United States Patent Application Publication US 2005/0153317 A1 - sequence listing, part 10

SEQ ID NO: 41814 - DNA, 599 bp, Chicken  19866894278029_3
  misc_feature (1)..(61): n is any nucleotide
nnnnnnnnnnnnnnnnnnnnnnnnnnnnnnnnnnnnnnnnnnnnnnnnnnnnnnnnnnnnntttaaatcaattaagtaatttttttttccgtagccaatgtgacagtataggtcattcctgtaggatgtcacatgaggccaaatagtatgatctgagaaataatggcaagctgtaagtatttcttgctgctgttggtaatacatgcaggaggatatrttaaaccctmtccatcagagctcagtttaatttctgaagttaaaagataggagtaagacctttctagaggggttactgtcccrtggcctacctccagttcatgtgtctgggaggcagttctgcatcccttcagcagagatgtgatactgcagtacgggatttctgggcaaatccagtgtggttctgatcttgtttcagtgaatcactgagtgttccctttaagtgagaatttacagcatagcctggtagggcatgtgcatatgtgcacgttttgtacaagctgttgtgtttgcttctggtctgcatgtctgtatctgattaccctccattgcctcacagcatcttttattttgaaagcttaggaaggaaaccaaattctact

SEQ ID NO: 41815 - DNA, 600 bp, Chicken  19866894278029_4
cagcagagatgtgatactgcagtacgggatttctgggcaaatccagtgtggttctgatcttgtttcagtgaatcactgagtgttccctttaagtgagaatttacagcatagcctggtagggcatgtgcatatgtgcacgttttgtacaagctgttgtgtttgcttctggtctgcatgtctgtatctgattaccctccattgcctcacagcatcttttattttgaaagcttaggaaggaaaccaaattctacttttactgttcttaaggatttgttcgtctaaaataacaaccccaatccragagagaaaaaagtgttccataaatgtcccacagtgtgggagtgaacacaactgcaagtcctataaagtttttgggcttttcacaattttgcctgtgtgtcctctcccctcctggagggtgttgtctgttctccacaacactggtgattcctgatgataacaggggtttcttcaatttactgtaaatgagaagtagctcagcttactggaatgtgagtcagccaagacaagtcaaggcacatgaagagtgcttctgcctcgcagtgtgtcctgccactgacggctgctgtgtctgtggtc

SEQ ID NO: 41816 - DNA, 600 bp, Chicken  19866894278035_1
tggggagactccagagccatcattagggcatctcttgttctcccctggaagatgtggacagaaagaggccctctgtttcttatttctcagggttattacgcagattgcctgctgaattttataactggcaaccaggtaaaacttataaaatgtgtttcatgtgaggtacatcccagagtatgtgttctgtaatgggatgctgtttgtttgggggagccaactgatcaaaatcagctttcctaagagtcttgtactgtttaaacactattaagtctatatatgtatgtgagtgcatgtgtrtatgtgcaagcgtttatgtaaaaaataaaaatgaagctatatggaatacagagaacttgtcgaaacattcatacatctgccagcaagcctgctgacagtttagggttttttaatatatttacacagctgtaatacatacacttttatagggaacattttccatcattaactttccaacaggttaagagggttattcatagatatatctacacacaatgaaccaaattctgtaaccagaatccagagccactctgttaaaatcgattgctattttttcctcatttgcttattttctgggtg

SEQ ID NO: 41817 - DNA, 600 bp, Chicken  19866894278037_1
ctctcaggcatgcacatagacttgtcttgctgggtcatgcttggccactgtctgtgagaagaagttttctcctgttttctgcctctcttttttagttttttggcagtgttgctttctccacagggatgtggtttgagtgaacgtggcctgtgtccaaccttgtaaagtagtgccatgttactggttgttgatctgagaaagggaaaaggagctggatagcttgttgtaacaagctactgtgatgttgttagacattgtatcagccgtcagaataaagagaaacaccaggaaacactcagycctgagaaacaccaggaaaaatgtggaccttgtgatttttgtacttcccatcttgttcctaatgttctcttcccctgtcattctgaaatactccttaatcatatctgggtacctggacagattgaggttgaggcttgatgcatcaaagcaatgcaaaccacagcttgtcctgtgcaacagtgccttattggacagaggatctgaatgatggggagctcaaggaatgtttagaccttaccattggtgttggaattttgtttttattttttatttatagtttttcctcagtttgctcgattt

SEQ ID NO: 41818 - DNA, 600 bp, Chicken  19866894278039_1
ctcatgggctgatgagaggtgataacgtcatccttgactgatggcttaaagccctcctggagggtgggagggaactgaaattcatacttctgcttcgcattgatttggaaattgacaaggcagttaggttacactagaaacactggtttcttgtgctgggtgctgccgtggctctccttaacctttgtttagggctgaagcaaaggactaacagtgcctctatagattgtccttccctcagggtgctgaaattcaaagtacctgacctccacggagtgcctacagagactgcaaccagcrgatgtgcaaggggagtgtgagctgtgctgcaatgggcttcagcacacagctgggacgggtgcacaggaagcctggaggtgagygttgctggggggcctggagagcagccactgccaaggtcacaacagaagcactcttaaatggtatcttaatatactcaaatttaatgaaagcacattataaacataccatcgccacaacttcagacagtttcagttcataaacaataacatgaggtagactgactagtgaagctaaattcaccaaggcttttttggttaagaaaactttacactagga

SEQ ID NO: 41819 - DNA, 600 bp, Chicken  19866894278039_2
atacttctgcttcgcattgatttggaaattgacaaggcagttaggttacactagaaacactggtttcttgtgctgggtgctgccgtggctctccttaacctttgtttagggctgaagcaaaggactaacagtgcctctatagattgtccttccctcagggtgctgaaattcaaagtacctgacctccacggagtgcctacagagactgcaaccagcrgatgtgcaaggggagtgtgagctgtgctgcaatgggcttcagcacacagctgggacgggtgcacaggaagcctggaggtgagygttgctggggggcctggagagcagccactgccaaggtcacaacagaagcactcttaaatggtatcttaatatactcaaatttaatgaaagcacattataaacataccatcgccacaacttcagacagtttcagttcataaacaataacatgaggtagactgactagtgaagctaaattcaccaaggcttttttggttaagaaaactttacactaggaaagcgacattttaaccctcttccaaaagtcacaaaaaagcaattacataagttaagcaaaaaagcatctgaatatgattcttt

SEQ ID NO: 41820 - DNA, 600 bp, Chicken  19866894278041_1
cagcagaaagcaaatatatttactggtcccagtttctgaatgtggcacaaggtctccttactaatgtgctagcgcagaagggttgcatggctgaaagctaaactcagtgcttctctaatgcacacgaaacaggctagaatcacatgcagcctttcagtgaattgccacatcaccctgtttggaggcaccatcttcaaaactagacaacctattcctcttccctcttagttctgttaatctctgatccagaaagcagctgtgctgatactgacatactgtccttctggctgccatgagcaytggtggttgtagcttaccagagcacccttgcttatgcctgggacaggcagtgtgttgggaatagctgggcacaggcagaataaaagggctcacaggactcttctgtctctytgggggtatggccaagtggcacacatttcagcatgtttttgagtgtactaatctactccagggccaaaaactgacctacaggaattgtgaaaattaggcagtttcaaggtgcagaagaacatctgagcttgcttgttcctcacaagaagccatgttgctgcaggacttmgtattaacaaagaagcacgc

SEQ ID NO: 41821 - DNA, 600 bp, Chicken  19866894278041_2
tctctaatgcacacgaaacaggctagaatcacatgcagcctttcagtgaattgccacatcaccctgtttggaggcaccatcttcaaaactagacaacctattcctcttccctcttagttctgttaatctctgatccagaaagcagctgtgctgatactgacatactgtccttctggctgccatgagcaytggtggttgtagcttaccagagcacccttgcttatgcctgggacaggcagtgtgttgggaatagctgggcacaggcagaataaaagggctcacaggactcttctgtctctytgggggtatggccaagtggcacacatttcagcatgtttttgagtgtactaatctactccagggccaaaaactgacctacaggaattgtgaaaattaggcagtttcaaggtgcagaagaacatctgagcttgcttgttcctcacaagaagccatgttgctgcaggacttmgtattaacaaagaagcacgcttgcctcttttctcctgagaaaacaaatatagaaagctgtgattgctagcaagttatgagtgggtgtgagtttgagtcttctgtatgtgcagaactccacaaaaatcctct

SEQ ID NO: 41822 - DNA, 600 bp, Chicken  19866894278041_3
cttctggctgccatgagcaytggtggttgtagcttaccagagcacccttgcttatgcctgggacaggcagtgtgttgggaatagctgggcacaggcagaataaaagggctcacaggactcttctgtctctytgggggtatggccaagtggcacacatttcagcatgtttttgagtgtactaatctactccagggccaaaaactgacctacaggaattgtgaaaattaggcagtttcaaggtgcagaagaacatctgagcttgcttgttcctcacaagaagccatgttgctgcaggacttmgtattaacaaagaagcacgcttgcctcttttctcctgagaaaacaaatatagaaagctgtgattgctagcaagttatgagtgggtgtgagtttgagtcttctgtatgtgcagaactccacaaaaatcctctgcctctgtgtctgggatctacagtctacttcacctaatccaaactgttagcatgccaagtaagactaaaaagaggagttaatctttattccgtgcaaaatcaataaggcagaatgctcagtttgattttcatagtatgttgtgcagctgtgagaggagagatcaagcct

SEQ ID NO: 41823 - DNA, 600 bp, Chicken  19866894278046_1
ggaagaatatcttcacagacagaatgcaatcaggacagatttcctggcgattaatacaagtagaaagaaaacaaataaacaaatatcctcaaataatcctatgtgattgtacaaacagatcaggtagctgccctgaacattcaagcctgaactctttctgtagattgttgtcgttctgaattagtgataaaatctccagactcaatgcattgagttcatacattcagtgatgtgcagtcaagcattccatttctttgcaatacagcccacaagtattgttcccttatcagtcatacgggwagtgattgaagggctgaatatcagtaagtaccgagtcaatattccccctatgagtattgcagtactaccatattacttggagagtgatgaaagtacacgccttttctatgcctctgacatacagataggtcctgcccttaaagagtggaagtattggtatgatataccatacactcaaacatacctacactcagccaatttgtgaacagagtgcttcttaaagtttctgcactatttctaaccattgcagtaaatctggatcaataaaggtagaaacactcaatctctttggtgaaaata

SEQ ID NO: 41824 - DNA, 600 bp, Chicken  19866894278051_1
ctccgacttcagctacattcagggttggttctgtgaattaaaaacatcctgtgactccttaccagaggaaagccttctgtaaaacttgagatccttcccttatgttttgatggcagaaaatgcacagggaatgcgacatggtgttgcttggactatatgcaagcatcagactttctgtccactggagtcgcactccggataactcctcacccacaaccaaaatgggatttgtcaggagagccgggtcattttggagactttgcagttagtgttggaagctgttctggggagaggttgggyataaatattcagtagacttctgtcagtcatagatggagtcttattgatctcagctgcacgtttgaagtttgaccagcttcagatcaaatcgccctgtgccttcttccagcataaactgcggagcacttacacagataaaattatgggagcctgtttgcgggctgacaaacragtgtggtggtgagtgttgcaacttgtacaacagtggctgatgtggtctgtttaactgcaagttgctgcaagtaaatggcttctaggtaccatgtaaaagagttaaatggtaatggcctagccatatga

SEQ ID NO: 41825 - DNA, 600 bp, Chicken  19866894278051_2
tttctgtccactggagtcgcactccggataactcctcacccacaaccaaaatgggatttgtcaggagagccgggtcattttggagactttgcagttagtgttggaagctgttctggggagaggttgggyataaatattcagtagacttctgtcagtcatagatggagtcttattgatctcagctgcacgtttgaagtttgaccagcttcagatcaaatcgccctgtgccttcttccagcataaactgcggagcacttacacagataaaattatgggagcctgtttgcgggctgacaaacragtgtggtggtgagtgttgcaacttgtacaacagtggctgatgtggtctgtttaactgcaagttgctgcaagtaaatggcttctaggtaccatgtaaaagagttaaatggtaatggcctagccatatgatgcaaatccctgtgacaattggatagattataatgattccctcatttgcgggagacatacgcagacactccacgtatttccctgcaacagtgctctagctcagcttctaactgaagattagtttcccccaatttaacaaaacatgaagagggccagagtgggaaggaaaaa

SEQ ID NO: 41826 - DNA, 600 bp, Chicken  19866894278057_1
ggcaaaaccagtgttatcccccaaatataaatcattaaaaactttaaaccagctagttttgtactgttcaattttgcttattttgttttctcagtggtctaatgggagaaaacctaaaacaattatttaaaatttagagttctgtatgagttcagaggtttgtactgataccaggagactcttcagcttaacatgaactttctgtaccagcattcttgtaatccaatattctcctacttccaatttcaaacacaagtcaagctggtagttatatatactcttagaagggctacggagaaytcagtcatcaatattttctgcagagattagtgagaagcagtctctcarcactgagtatctagcaaggctggatcttttatgatgcygggaccataaaaggttgtgttgttatgacaatacatagcacarttgacttgactatttgttcattgttatcaagtcttgttatttttttttcatgagtctttgtagtacatgatgtcagaggctccggcttctaaagtcattcccctccatcttcccttaaaaaaaaatgcacacaactattaagaggtggatgggagagaataaacaagacaa

SEQ ID NO: 41827 - DNA, 600 bp, Chicken  19866894278057_2
ccagctagttttgtactgttcaattttgcttattttgttttctcagtggtctaatgggagaaaacctaaaacaattatttaaaatttagagttctgtatgagttcagaggtttgtactgataccaggagactcttcagcttaacatgaactttctgtaccagcattcttgtaatccaatattctcctacttccaatttcaaacacaagtcaagctggtagttatatatactcttagaagggctacggagaaytcagtcatcaatattttctgcagagattagtgagaagcagtctctcarcactgagtatctagcaaggctggatcttttatgatgcygggaccataaaaggttgtgttgttatgacaatacatagcacarttgacttgactatttgttcattgttatcaagtcttgttatttttttttcatgagtctttgtagtacatgatgtcagaggctccggcttctaaagtcattcccctccatcttcccttaaaaaaaaatgcacacaactattaagaggtggatgggagagaataaacaagacaagtccaaagtcaagttcaaatcacgtggtatttattacacctttgaaaa

SEQ ID NO: 41828 - DNA, 600 bp, Chicken  19866894278057_3
tttctcagtggtctaatgggagaaaacctaaaacaattatttaaaatttagagttctgtatgagttcagaggtttgtactgataccaggagactcttcagcttaacatgaactttctgtaccagcattcttgtaatccaatattctcctacttccaatttcaaacacaagtcaagctggtagttatatatactcttagaagggctacggagaaytcagtcatcaatattttctgcagagattagtgagaagcagtctctcarcactgagtatctagcaaggctggatcttttatgatgcygggaccataaaaggttgtgttgttatgacaatacatagcacarttgacttgactatttgttcattgttatcaagtcttgttatttttttttcatgagtctttgtagtacatgatgtcagaggctccggcttctaaagtcattcccctccatcttcccttaaaaaaaaatgcacacaactattaagaggtggatgggagagaataaacaagacaagtccaaagtcaagttcaaatcacgtggtatttattacacctttgaaaacatatcattttaaagactgtgcccttcctgttgaagag

SEQ ID NO: 41829 - DNA, 600 bp, Chicken  19866894278057_4
aaatttagagttctgtatgagttcagaggtttgtactgataccaggagactcttcagcttaacatgaactttctgtaccagcattcttgtaatccaatattctcctacttccaatttcaaacacaagtcaagctggtagttatatatactcttagaagggctacggagaaytcagtcatcaatattttctgcagagattagtgagaagcagtctctcarcactgagtatctagcaaggctggatcttttatgatgcygggaccataaaaggttgtgttgttatgacaatacatagcacarttgacttgactatttgttcattgttatcaagtcttgttatttttttttcatgagtctttgtagtacatgatgtcagaggctccggcttctaaagtcattcccctccatcttcccttaaaaaaaaatgcacacaactattaagaggtggatgggagagaataaacaagacaagtccaaagtcaagttcaaatcacgtggtatttattacacctttgaaaacatatcattttaaagactgtgcccttcctgttgaagagcaggaggcttttattgagtgtctgtgcttggctgtgttacata

SEQ ID NO: 41830 - DNA, 600 bp, Chicken  19866894278061_1
aactggtattaagtgctttggcaaagtggggtgcaatccatcaaatctgcaaaggcctgcttttttctctgttggtggttcagctttacgaggaacatatatgcaaaataacagctctcacattgcttcaaactcatcaatacgctgctttgtattgccttgtcggatttgtcgaagagtcttgtacttatcacggcctgctttaacattctcagcatgaaggacatcattttgtgttttcttggtttcatctctggcttgggccaactcagaacttaaagcctgttgaataaaatattkgcatttaagtgctttaactaatcttttcatgattctggaacttatgataatacctatcctgcagyttggataaggattcctgaatgtcagccaatgaaatactgtctgtactgttcagtacctaaagctgtaaggcctatcaaaaaagactagaatgaagatgacaacagcacaagattccttccttatagatatgtgagcatcaaacaaacaaacaagaaaaacaaccttataacctaacatccaagaacggggggaccagcaagttaaaacaggaagattatgttacttctatttctg

SEQ ID NO: 41831 - DNA, 600 bp, Chicken  19866894278061_2
tctctgttggtggttcagctttacgaggaacatatatgcaaaataacagctctcacattgcttcaaactcatcaatacgctgctttgtattgccttgtcggatttgtcgaagagtcttgtacttatcacggcctgctttaacattctcagcatgaaggacatcattttgtgttttcttggtttcatctctggcttgggccaactcagaacttaaagcctgttgaataaaatattkgcatttaagtgctttaactaatcttttcatgattctggaacttatgataatacctatcctgcagyttggataaggattcctgaatgtcagccaatgaaatactgtctgtactgttcagtacctaaagctgtaaggcctatcaaaaaagactagaatgaagatgacaacagcacaagattccttccttatagatatgtgagcatcaaacaaacaaacaagaaaaacaaccttataacctaacatccaagaacggggggaccagcaagttaaaacaggaagattatgttacttctatttctgcttgactgaagacagcacactcatctccctgactctgtcaatgactgggcaagtagaaaagatgc

SEQ ID NO: 41832 - DNA, 600 bp, Chicken  19866894278067_1
gtttttcttctcatctttgcaaggcatgactgaaaaattggacccaacagtatgccatcttaaaagctcgtataatctcacttctttttcaacgtaatataaagagtcttctagtataattttgcatttcagcgaggttaattctgtctttcattaaagtgctattgtaatctaagcttctaatggagatttagaaatatttcatcacctgcatattttcaggaccatatctattaggccagaagtgtttcttacataggcatgaagaactctttgaacaattatcataattgaaatagktttttaaatttttaattttgagctatataatgtttgcattctatgtttagaaatgagatttttccccctcttttgttcagaaaaggagaaagggtgcttaaagaaaatttcttagtatgaaagtacacctgactagtcttagttcttttcagaaatggaaattgccctcaggacttcctgataaattgtgatggtatgtaacatttgtgactacaacagaagagatgacactttacagaatcagaatgtgaagatcagtatgtaaagtgaacttttttgtgcaactgatttgtttcactg

SEQ ID NO: 41833 - DNA, 600 bp, Chicken  19866894278068_1
ttaggtactggaaggctgcaatgaggtcaccccgcagccttcttttctccaggctgaacaagcccagctccctcagcctgacctcgtaggggaggtgctccagccctctgatcatctttgtggccctcctctggaccctctccaacagctccctgtcttttttatagtggggaccccagacctggacacagtactccagatggggcttcacaaaggcagagcagagagggataatcacctctgcagcctttgcaaagatgtcctaaagagttccccacagaccgtggtctgctactatgkgtctgtaggccaggcagtgtcagtgagctccttactgcagggatgggcggcagctggggccctgtgagcaccgtgcatgcctggaccaggtttctcttgtgctgcagaactcaccgggcagttgttgtgtgctgctgccttaaccgaaggcgtttcctccccacatacctctgtgcccattgcagctgctctgtagagaggtgtgtctgtggcacagcatggatgtgcctgaagggcacacagtgtgttcaggcaaagcaagggccgggctcacgaggcagcgtgatctctgtaggcacc

SEQ ID NO: 41834 - DNA, 600 bp, Chicken  19866894278070_1
cactccctttggggctcaaattcccactgacaaatacaaacctgaacttaaattctccaccgcccctcagcacttttccctgcactgagatgaagaaaaatgccagcagctgtgctctgcagcatgcagcaaatgtgagtgctgtgtcctgtgcccttccttcagtgcaagccacacattctgctcatcaaaggggaaaaagacagaattattcactcagcgatgtcattttagttacctgcatctgaggatttattcagatttaacctgtagatatcctcatgttggttaatatgaacrcaccaatcaaatttatacaaaaagtccctgttaarcagatgattggaattgtgaacgctgccacgtcgttctccagtacaagcaaaggcaaatgtagtattttatcctgctaagaggacacgtaggaaaagatgctgctttctgaacagcatggggttcagtgttacaattcaagcaaaaaaagggaaaaatctatactctgtctactgggctggctgaaggggcatctggagaagcaaacacagcgtagttatatagcaccagtagttgtcacggtaacaaccagatgacgattacaga

SEQ ID NO: 41835 - DNA, 600 bp, Chicken  19866894278070_2
acaaacctgaacttaaattctccaccgcccctcagcacttttccctgcactgagatgaagaaaaatgccagcagctgtgctctgcagcatgcagcaaatgtgagtgctgtgtcctgtgcccttccttcagtgcaagccacacattctgctcatcaaaggggaaaaagacagaattattcactcagcgatgtcattttagttacctgcatctgaggatttattcagatttaacctgtagatatcctcatgttggttaatatgaacrcaccaatcaaatttatacaaaaagtccctgttaarcagatgattggaattgtgaacgctgccacgtcgttctccagtacaagcaaaggcaaatgtagtattttatcctgctaagaggacacgtaggaaaagatgctgctttctgaacagcatggggttcagtgttacaattcaagcaaaaaaagggaaaaatctatactctgtctactgggctggctgaaggggcatctggagaagcaaacacagcgtagttatatagcaccagtagttgtcacggtaacaaccagatgacgattacagactaaaaaatcactgcatacatcttttaagacccca

SEQ ID NO: 41836 - DNA, 600 bp, Chicken  19866894278073_1
ggtacttgacattccaaggatgtcaagtggagataagaaaataagggacctgcaaggcaagcagaaactgcttaaaggggggcctccccctgaggaggttaaaagtttacagtgaggaagactacgagccttcgtgaggaagaccatgagccttcatcccacaaccaccagaagccgccccacgaggagttggatgcatccacattccagagatctattgaatatgtatggacttgttctatatatgtagttaatttttccttatccatgtgcaagttaggaggagctattccccttgcrcccagtgtatgcacagtgatgattaaacatacctgcttttataactactttgtagttatagagtttgattccgcacgtcagtcccatatcctacatgtcatgccaagctgcttgggcactcattctgatacttgtgtcggtgagaatgtgcatgagtgaattgcaaagcttaacagaaatcactttctctggcagcatgggttatgtaatgagctttgctttcctaagagttactcactttacaaaatttaaggtgagatttactcaacataggtttttcacctctttaaaacgtgaact

SEQ ID NO: 41837 - DNA, 600 bp, Chicken  19866894278073_2
tgggttatgtaatgagctttgctttcctaagagttactcactttacaaaatttaaggtgagatttactcaacataggtttttcacctctttaaaacgtgaacttagaccttctgaacacatcatagtcttctggcaatgttgtgatttgtaagtactgtactatgctgtatcttcttctcacattaactcacctattttttatgttttatccatggaatcttggacagaggtctcagaaatatgatctgacttttgggtggtcctttgtggagctaggggttggtcttaacggcgtttgygttgtcccrtttcatgcctgttgtacagagtcgatacactcacaggactgaggtctgctgatagccttttgtttaagactgtacagacttggctgcgaagggagcacatctcagtatcatccaaatctgacatgtatacagttgctttcaatgaagaagcttagaaagctattagcttagctaaaaattgtctctggttacatgtctcgtgtcattctttcagtttgcacgagctccgcaaggcgttcactcattcacaccagaagtgaggacagggcattacttcattataacacccct

SEQ ID NO: 41838 - DNA, 600 bp, Chicken  19866894278073_3
taatgagctttgctttcctaagagttactcactttacaaaatttaaggtgagatttactcaacataggtttttcacctctttaaaacgtgaacttagaccttctgaacacatcatagtcttctggcaatgttgtgatttgtaagtactgtactatgctgtatcttcttctcacattaactcacctattttttatgttttatccatggaatcttggacagaggtctcagaaatatgatctgacttttgggtggtcctttgtggagctaggggttggtcttaacggcgtttgygttgtcccrtttcatgcctgttgtacagagtcgatacactcacaggactgaggtctgctgatagccttttgtttaagactgtacagacttggctgcgaagggagcacatctcagtatcatccaaatctgacatgtatacagttgctttcaatgaagaagcttagaaagctattagcttagctaaaaattgtctctggttacatgtctcgtgtcattctttcagtttgcacgagctccgcaaggcgttcactcattcacaccagaagtgaggacagggcattacttcattataacaccccttacatctca

SEQ ID NO: 41839 - DNA, 600 bp, Chicken  19866894278078_1
ctaagcttccagtaccaccataactttcccctttgggcttgcagtcagctctggtgtttggaagctgggcacaggtgttcccagctgcactggaagctgtgtgatctgtagaggggcctggctttgggaatgttttgcaggacattctcacagaaatgagaggtgtctttgttttatgggcactgtcacctctgggtggtgaacacacctggctcctgactgccaagaagggtgagatgagcagcaccttgagagcaatccatagataagcaaggctgtatgcagtgcatgttgagcacyctgcccagagtgatgtaagaaaagctatgtggaaggaagaggatctgggggtgttatttgacagccagctgaacgtgagccaactggatgcccaggtaaccgagaaggccaatggcatcctggccagtatcaaagataatgtagtcagcaggaggtgagaggtgattgtcccttttatcagcactggtgaggaaacagggaggtatggcactgagggatgtggttcagtgggcatggtggtgatgggctgatggctggaccaggtgaacttagtggtcttttccagccttagtaatgcta

SEQ ID NO: 41840 - DNA, 599 bp, Chicken  19866894278080_1
  misc_feature (1)..(229): n is any nucleotide
nnnnnnnnnnnnnnnnnnnnnnnnnnnnnnnnnnnnnnnnnnnnnnnnnnnnnnnnnnnnnnnnnnnnnnnnnnnnnnnnnnnnnnnnnnnnnnnnnnnnnnnnnnnnnnnnnnnnnnnnnnnnnnnnnnnnnnnnnnnnnnnnnnnnnnnnnnnnnnnnnnnnnnnnnnnnnnnnnnnnnnnnnnnnnnnnnnnnnnnnnnnnnnnnnnnnnnnnnnnnnnnnnnnnnggttcctgatacctgaagacagcttgtgagttgaggtttctgcacaatagagcagaaagtgacagctcaaygactggtggcaccaggtgctaacttacacaaagaattctccactgtagatcaaaaatttacaagtaaatggtatacagtggggtgagaacctgcagcagctgagtactctctttcctttctccaaattatcacagaagtcacatacacttgttaatttaatgcaaatgtttatcatatggatctcctgaatcagagtgaaatcaatggcagaagttattcaatcgctatatggtgtcagatggctctgtttcatgctgtatttggctccatttatamaaagggttagaagaaaattctg

SEQ ID NO: 41841 - DNA, 600 bp, Chicken  19866894278080_2
agagcagaaagtgacagctcaaygactggtggcaccaggtgctaacttacacaaagaattctccactgtagatcaaaaatttacaagtaaatggtatacagtggggtgagaacctgcagcagctgagtactctctttcctttctccaaattatcacagaagtcacatacacttgttaatttaatgcaaatgtttatcatatggatctcctgaatcagagtgaaatcaatggcagaagttattcaatcgctatatggtgtcagatggctctgtttcatgctgtatttggctccatttatamaaagggttagaagaaaattctgagtcaacagggaaggcagtttaccttyggcaaaagtraaggagaagggactgacagaatgctagcctaagcctggaaataaaactgtctcaaactaaacttttgctcctgtctttcaacagtaaatggcaagatcagcatcaggaccctgattatgaaaattgtaatataagcagaatctgcacatttgcacaaaacscttgctttggcatctaaacgtaggtaagctcatgtgagaaaaagtcaaattgcaggcaaacacagatcaccagtgtttac

SEQ ID NO: 41842 - DNA, 600 bp, Chicken  19866894278080_3
cacaaagaattctccactgtagatcaaaaatttacaagtaaatggtatacagtggggtgagaacctgcagcagctgagtactctctttcctttctccaaattatcacagaagtcacatacacttgttaatttaatgcaaatgtttatcatatggatctcctgaatcagagtgaaatcaatggcagaagttattcaatcgctatatggtgtcagatggctctgtttcatgctgtatttggctccatttatamaaagggttagaagaaaattctgagtcaacagggaaggcagtttaccttyggcaaaagtraaggagaagggactgacagaatgctagcctaagcctggaaataaaactgtctcaaactaaacttttgctcctgtctttcaacagtaaatggcaagatcagcatcaggaccctgattatgaaaattgtaatataagcagaatctgcacatttgcacaaaacscttgctttggcatctaaacgtaggtaagctcatgtgagaaaaagtcaaattgcaggcaaacacagatcaccagtgtttactacagactcaactaaaggagtgttacttgtgtattacttgggattccca

SEQ ID NO: 41843 - DNA, 600 bp, Chicken  19866894278080_4
tctccactgtagatcaaaaatttacaagtaaatggtatacagtggggtgagaacctgcagcagctgagtactctctttcctttctccaaattatcacagaagtcacatacacttgttaatttaatgcaaatgtttatcatatggatctcctgaatcagagtgaaatcaatggcagaagttattcaatcgctatatggtgtcagatggctctgtttcatgctgtatttggctccatttatamaaagggttagaagaaaattctgagtcaacagggaaggcagtttaccttyggcaaaagtraaggagaagggactgacagaatgctagcctaagcctggaaataaaactgtctcaaactaaacttttgctcctgtctttcaacagtaaatggcaagatcagcatcaggaccctgattatgaaaattgtaatataagcagaatctgcacatttgcacaaaacscttgctttggcatctaaacgtaggtaagctcatgtgagaaaaagtcaaattgcaggcaaacacagatcaccagtgtttactacagactcaactaaaggagtgttacttgtgtattacttgggattcccaaacttggtgt

SEQ ID NO: 41844 - DNA, 539 bp, Chicken  19866894278080_5
gaaatcaatggcagaagttattcaatcgctatatggtgtcagatggctctgtttcatgctgtatttggctccatttatamaaagggttagaagaaaattctgagtcaacagggaaggcagtttaccttyggcaaaagtraaggagaagggactgacagaatgctagcctaagcctggaaataaaactgtctcaaactaaacttttgctcctgtctttcaacagtaaatggcaagatcagcatcaggaccctgattatgaaaattgtaatataagcagaatctgcacatttgcacaaaacscttgctttggcatctaaacgtaggtaagctcatgtgagaaaaagtcaaattgcaggcaaacacagatcaccagtgtttactacagactcaactaaaggagtgttacttgtgtattacttgggattcccaaacttggtgtccattcctatgctctgtgaaatacttgattcagtatgcgtgacccactgaacagatagaaatttatctcctcttgggggaaaggttggacccgcagctcc

SEQ ID NO: 41845 - DNA, 600 bp, Chicken  19866894278081_1
tgagacggtgccccagcagagcacgctgagatttccttccatggatgaagaatcctctagtttagcataggatgaggaaaaaaaccaccaatgtcaaaagcttaggatgctttcaaggcatagcagctgaccagaaaaggacagtgacattcaattttatgcagcaaatgtgaaataagtgcacttccacctgtaccacgttactcaaaatgagcagataagaggctgcggccactgcagtgtaagagatagatttctgatgtctttcatggaaaacaacagcgatggctcagcaccagygcaggatgcaagcctaaacagctctaaataacatccatcagctgcaaataaggactgaaccactgccaaccgaagtgcaggggaagtggctcattgtactgccagctcaaccacgaggtctgaaagcgagtaagtgatgtcacgctgagcgattaataaggagagagctggctgacaaaagcagaaccactctcagttactcctcaagagttccctcctgcttttccctctgccaacatcaacagggtcaggaaatctgaggcacgagcagttcaaagatttcagaggaactgacacctt

SEQ ID NO: 41846 - DNA, 599 bp, Chicken  19866894278107_1
  misc_feature (1)..(15): n is any nucleotide
nnnnnnnnnnnnnnncttgttgtcccctggcagcattttggcatcagagacccatcgtgcctcttgtattatggagtgctaatttatcttagaagccagcagcagctgctcaagttacaagagggaatttctttcctttgttttgctgggtattgctctcctgaacttcaattcaggggttgatttaagtgggtctgtgtgacagaaggaggagatacttccagtgagcaactaaatgtgacatggttaatttttttgtgcaccaagctcaccagttacttctgaccccttcaataagcyctgcttggtagactttaaaatccaagggctgggttaacctggtataaagcataccctgatgcaaaacccagataagaacctcagcatatttctgttccttgcagttcccaaagacccctgttatgcagcagctgctctaggaagttgaactggcacataggcctgggatgagaagaatcccccagctggatcctgagagccccccaaagtcaatmatcactggatcacattgaagctgtcaggacctctggatccacctggtcctgcccagctccagcagggccacctgcagcaggatg

SEQ ID NO: 41847 - DNA, 600 bp, Chicken  19866894278107_2
tacttccagtgagcaactaaatgtgacatggttaatttttttgtgcaccaagctcaccagttacttctgaccccttcaataagcyctgcttggtagactttaaaatccaagggctgggttaacctggtataaagcataccctgatgcaaaacccagataagaacctcagcatatttctgttccttgcagttcccaaagacccctgttatgcagcagctgctctaggaagttgaactggcacataggcctgggatgagaagaatcccccagctggatcctgagagccccccaaagtcaatmatcactggatcacattgaagctgtcaggacctctggatccacctggtcctgcccagctccagcagggccacctgcagcaggatgcccaggctcacatccaggcatctttaaaaggtctccaaggagaagactccacaataacacctaatgcaaagagaaacaatggccaggaaacctccctatgaatgaccacagaacaacatatgggaactgctcggtaataatgtttaagctagatttaagtctgatggctgagattttctgggagaggtattttcttggagcgtagaggtgttatcc

SEQ ID NO: 41848 - DNA, 599 bp, Chicken  19866894278115_1
  misc_feature (1)..(47): n is any nucleotide
nnnnnnnnnnnnnnnnnnnnnnnnnnnnnnnnnnnnnnnnnnnnnnncagaatgagaattaaatctaggcagatgtttataaaccagtatcatatatctgcaaaacattaatacaaattactgaactatattgaccatttacgtggtcattataaactctaaacaataagggctccaggcctagaacgtgctgccaagtgtgactccagtcctcaccgcatcaggcaagcttccaatgagtcatttaatgtcaccttttaagtcttgtgtgggaggtggagaaaggaagaaagggtctgkctgcttgcagggtattattattctgtatgcaggatggaaaagtaagaccattaaattgaaagggtacgtgcaatacaccagtcatgcatattaatctcaacacattgattcagtgctacctatcatatactcctttccaactaatcagtgcttctcattcaggttaaggtgcagagggggctagttcccctccaacaccacacaaagccccagatgttatggggcactggtattgatagagactgttacaactaacttcactgttcctatcttgtacctatagacagaaggcaggcaca

SEQ ID NO: 41849 - DNA, 600 bp, Chicken  19866894278119_1
aataactgttttcagttatcataataaaattctcagccctgtattacagctggaaacaatagccttcatcttagctattaaaactagagctcaactattacagaacttttcctatgtagaatatttactatatattttgcagtacatctaatatgtcggaatgcagagagaatgtattatctgaaaacaactttctactgaatatgatcacccacagtggtgtttctttagaccacaacctggttatgcagtgaaactgcaaaacaattttacctttaaaatttgtgttccaatttctgycttctggatccagagagagctgaaacccagcagaattctcaatctggagaagctataatagaagcactgggacaagagaaaatacaaaaatctcctattgtaaagagtcttaggttgggggayaaacacagtgttgagccttaagagataagagtaatatagcacattttttaagaggctacgtataagtggtagaggatgaaactgatggttgaagtctaaataatactacgtatctcacaacttgttgaaaagcactttttttcattgggggagattcacagctgctgaattttctgc

SEQ ID NO: 41850 - DNA, 600 bp, Chicken  19866894278119_2
tttactatatattttgcagtacatctaatatgtcggaatgcagagagaatgtattatctgaaaacaactttctactgaatatgatcacccacagtggtgtttctttagaccacaacctggttatgcagtgaaactgcaaaacaattttacctttaaaatttgtgttccaatttctgycttctggatccagagagagctgaaacccagcagaattctcaatctggagaagctataatagaagcactgggacaagagaaaatacaaaaatctcctattgtaaagagtcttaggttgggggayaaacacagtgttgagccttaagagataagagtaatatagcacattttttaagaggctacgtataagtggtagaggatgaaactgatggttgaagtctaaataatactacgtatctcacaacttgttgaaaagcactttttttcattgggggagattcacagctgctgaattttctgcagttaatagagtcctttgattcacagcagtgccccttgcacaaaatatactggcctttgtgtattaccagaaactaattttctatttggctgaaaagggaaaaatggggttattgcttctccc

SEQ ID NO: 41851 - DNA, 599 bp, Chicken  19866894278120_1
  misc_feature (1)..(33): n is any nucleotide
nnnnnnnnnnnnnnnnnnnnnnnnnnnnnnnnncacctgattctggtcaggctaaattttactgagaaataaagaaaatattcccactgaatgaaatgaaaaagtaacaaatgtctacatggaatattagactctaaggtcttaatttataattcagattatagaaacatactccttgcttatatagttcataattgcactatgtgacagcatttgagaagcattctgtattgaaggataatcccataacccagcgacatattaaaaagcctaagttcgaatagacaacaaatctgaaayacatttatagtagacaacatcagaatagtggtagggacattctttttctacatgttgtgaaaagaggtaagactgtagagtcagaggctgcctgggtgaacaggtatacacctaaatatgaagaacatccagagttcactaggaacaactagtaagaaatctacagccaacytctgctgcattcttgcatgatcataacamtgaagtgcagttgtttcagcctcattcggtcaaagaggccagtcagtatggctttgatatctcttttactccatcgggtcacaactaaatctttccct

SEQ ID NO: 41852 - DNA, 600 bp, Chicken  19866894278120_2
tccttgcttatatagttcataattgcactatgtgacagcatttgagaagcattctgtattgaaggataatcccataacccagcgacatattaaaaagcctaagttcgaatagacaacaaatctgaaayacatttatagtagacaacatcagaatagtggtagggacattctttttctacatgttgtgaaaagaggtaagactgtagagtcagaggctgcctgggtgaacaggtatacacctaaatatgaagaacatccagagttcactaggaacaactagtaagaaatctacagccaacytctgctgcattcttgcatgatcataacamtgaagtgcagttgtttcagcctcattcggtcaaagaggccagtcagtatggctttgatatctcttttactccatcgggtcacaactaaatctttcccttccaraatcacacaagaacctcactcgtgccatatactctccagcattcagcccattgccactattttgccaataataacagcaaccaacagccacagcttcatttcttaatggggtaggattgtagcttccaggcttactcactggaaacacctctttgaacatatgatata

SEQ ID NO: 41853 - DNA, 600 bp, Chicken  19866894278120_3
atgtgacagcatttgagaagcattctgtattgaaggataatcccataacccagcgacatattaaaaagcctaagttcgaatagacaacaaatctgaaayacatttatagtagacaacatcagaatagtggtagggacattctttttctacatgttgtgaaaagaggtaagactgtagagtcagaggctgcctgggtgaacaggtatacacctaaatatgaagaacatccagagttcactaggaacaactagtaagaaatctacagccaacytctgctgcattcttgcatgatcataacamtgaagtgcagttgtttcagcctcattcggtcaaagaggccagtcagtatggctttgatatctcttttactccatcgggtcacaactaaatctttcccttccaraatcacacaagaacctcactcgtgccatatactctccagcattcagcccattgccactattttgccaataataacagcaaccaacagccacagcttcatttcttaatggggtaggattgtagcttccaggcttactcactggaaacacctctttgaacatatgatatactcgtagttctgaattttacttctgcaac

SEQ ID NO: 41854 - DNA, 600 bp, Chicken  19866894278120_4
ttatagtagacaacatcagaatagtggtagggacattctttttctacatgttgtgaaaagaggtaagactgtagagtcagaggctgcctgggtgaacaggtatacacctaaatatgaagaacatccagagttcactaggaacaactagtaagaaatctacagccaacytctgctgcattcttgcatgatcataacamtgaagtgcagttgtttcagcctcattcggtcaaagaggccagtcagtatggctttgatatctcttttactccatcgggtcacaactaaatctttcccttccaraatcacacaagaacctcactcgtgccatatactctccagcattcagcccattgccactattttgccaataataacagcaaccaacagccacagcttcatttcttaatggggtaggattgtagcttccaggcttactcactggaaacacctctttgaacatatgatatactcgtagttctgaattttacttctgcaacagaatttttacttggctcctgacttcctgcaacattgccataatcctcaggtttggaaatgacaatttcaggagtttgtctccaagtgtttaaggtcataaac

SEQ ID NO: 41855 - DNA, 600 bp, Chicken  19866894278120_5
attatagaaagtttttctacatttttctttgtttgtggagagatacattatgttcagagctcaaaagtctgccatagtgcttgaaaaaaaaattatctggaaatctagctatattagataacagcattaaaaaaccaactgggtgccttcttggcacagaagcactttcatgattcaaaagaaaaaagtcaagctaaaatatttgggtgggttggttgcttttttttttttttttcccattttgttttgattttaataagtcagtatgattataagccaagattaaagaatgagaaagarttgaagtattctactcagcttcccagcatctgcaggctatgccagctacmatacctgtcaacmccgtttaaagttccattctgaaaaataaaaaaataacaaaccttttttgcaaaagtgtctgaggcaatacagataaaatgaaaaaagtttaagaaaaaaaaaataagaacagtcatggtgaaacaacctgcagctgacaccatctgctctaaaagagcaaagccttggaacaccataaaaatatttggagtgactgccatatataggcaatgtctgttctcttgtactgtgctgaat

SEQ ID NO: 41856 - DNA, 600 bp, Chicken  19866894278120_6
tgttcagagctcaaaagtctgccatagtgcttgaaaaaaaaattatctggaaatctagctatattagataacagcattaaaaaaccaactgggtgccttcttggcacagaagcactttcatgattcaaaagaaaaaagtcaagctaaaatatttgggtgggttggttgcttttttttttttttttcccattttgttttgattttaataagtcagtatgattataagccaagattaaagaatgagaaagarttgaagtattctactcagcttcccagcatctgcaggctatgccagctacmatacctgtcaacmccgtttaaagttccattctgaaaaataaaaaaataacaaaccttttttgcaaaagtgtctgaggcaatacagataaaatgaaaaaagtttaagaaaaaaaaaataagaacagtcatggtgaaacaacctgcagctgacaccatctgctctaaaagagcaaagccttggaacaccataaaaatatttggagtgactgccatatataggcaatgtctgttctcttgtactgtgctgaatctgtagcttttctttgaatctcgggcttttacaaagggcaagcaaggcag

SEQ ID NO: 41857 - DNA, 600 bp, Chicken  19866894278120_7
aaagtctgccatagtgcttgaaaaaaaaattatctggaaatctagctatattagataacagcattaaaaaaccaactgggtgccttcttggcacagaagcactttcatgattcaaaagaaaaaagtcaagctaaaatatttgggtgggttggttgcttttttttttttttttcccattttgttttgattttaataagtcagtatgattataagccaagattaaagaatgagaaagarttgaagtattctactcagcttcccagcatctgcaggctatgccagctacmatacctgtcaacmccgtttaaagttccattctgaaaaataaaaaaataacaaaccttttttgcaaaagtgtctgaggcaatacagataaaatgaaaaaagtttaagaaaaaaaaaataagaacagtcatggtgaaacaacctgcagctgacaccatctgctctaaaagagcaaagccttggaacaccataaaaatatttggagtgactgccatatataggcaatgtctgttctcttgtactgtgctgaatctgtagcttttctttgaatctcgggcttttacaaagggcaagcaaggcaggcactgatcacac

SEQ ID NO: 41858 - DNA, 599 bp, Chicken  19866894278121_1
  misc_feature (1)..(38): n is any nucleotide
nnnnnnnnnnnnnnnnnnnnnnnnnnnnnnnnnnnnnntataagtgccagctgctagagaagataagggaagagagtagtaacctatttaaaactaaaaagccccaaccttccatacctgaaagtactttagtttgttttccagcacagcctttgaattttaatgaaacgtttggggaaacttgtaaatgaaaatggaaatgctgctttctgagaagctggcccagcaccacatgtgaattatttagatacaacttgtatttctttcttttaaggagcaaagaaaatgtttttcttttgmtttttttttccctttatttttaattgtttttatttcctcatcactgtttttgattccaaaatctattcaaaatacaacaacaatgccttataacaattaaataaaagcatctaaaatactagcagtaatacatgcttagctgctcatattcaactaaaaaaggagaaaaagaaaacagcctcatgataaactctccctgattgcattgcagaaatatgaaaggaaccctaattacagggaagactcagttctaaaatctttcctcagaaatgtcaccaaatagcccccaaaccttcaaa

SEQ ID NO: 41859 - DNA, 600 bp, Chicken  19866894278121_2
aggagaaaaagaaaacagcctcatgataaactctccctgattgcattgcagaaatatgaaaggaaccctaattacagggaagactcagttctaaaatctttcctcagaaatgtcaccaaatagcccccaaaccttcaaaagatctatcagaactatggttctgaaatgcactctcaggtgctcaatttaaagcatttcatgaaaacagcatcactgattttacttgtgtgtatatttgtatgtgcatgtcagagatgaaattttaaattacatgattgtgaaccacaaatctgggggtgrattttctcttatttctctaaaagatattgtcaattaatgctacatctgattgattccaaatttgcttgttcttttcatctggcctttctgtggctcaagttgtatgtgcagttgagtctttttggtataatactccccaggtattatttctggtatattgtttcttgatacagaaatcaatttgtgaagtgttaggcagtgtattagttgtagaatgtgtaatttgcacatgggaaggtaagtgaagaacaggcaatttgtaaagtaaaatttttaatattctttcttctagatttttct

SEQ ID NO: 41860 - DNA, 600 bp, Chicken  19866894278125_1
cgaccttgatttctctgatgctctgaagctttcccatctatgagaaatgatatttttaaattttggttgacaagagattctttcatatcctgataaatagtaacttgtatcaagtgtgcatactgtgttacttccgctctggactaatgaaaacatctaggaccccagtacgtctgctgtttaaaaaaatttatgcagagaaatatgcactgggtggctttcttactcactgtagaagggatgtaggtgtaaacaataactgtgagaatttttaaataggaaagaggtggtttgtgagaragccaaatacaataaatgttgaggtacaaatgtcaaggcacacaatttttgtaatggaaaaaggtatttggaagatattacagatgaagaacttgtgggaaagacatacttagttttttcctccaaactttttagaggaaatcttgacgaatatttcagatgaaaattttaggatagtgtacacttattccccggtgtcttatactaaccccactaggtttggtaaagaaataaggcttattcagctgttgccagttatcctcttagcctaactgattcaatgtgcaaatatatcttgtg

SEQ ID NO: 41861 - DNA, 600 bp, Chicken  19866894278126_1
tccttacagggtttgcatacttcactggtgaaaacacagttaataaccacatatgtagtgcacaatcctgtgacaaattttatccaataggaaaacatgttaaaggtgaggagtagaagtaacacacatgctccaagttatgcaggacagggttctctaaaccaacaccataccagttacagagcagatgtgctttaaattgattctctagcttaaagaaagacaagtatttaatcctgctcaacctacaccagcaataactacagtataactacagatctacagagaaaatacatttaygtgctaatgactggtggtaacgaccaggataaactaatcactggagagatgacccagacctgttttaaaggagacctctaataatacaaaacaattgccaattgttttaagctctgctaaggtaaaaaaacaaacaaaacaaaacaaaacaatcaaaaaacccaacaattcaccctcagtcatcgagcactcactgcatttgtggaagactgcttagtgatggggacataggttacacacaacagtttaagtatatacagctgggtactggaagaaggaaatacaattaatgcatttgga

SEQ ID NO: 41862 - DNA, 600 bp, Chicken  19866894278135_1
gtgtatttgctagtaaaagtcactggagaacattcagaagggctatttttgtgcttttcactctttagtcagctttggctatacccagcatgtattgacattaactcatacttgcattttgggatgggttgggcacttttcagaaagacaaacatctgcattgctatcagtagatacgtctctttctttgtcaccagctccttataagcctagaacatctagatatttagtatctactctttcaggaaagataggatagtccttgtccactgtcatgatactagctgtatgacttaaaayggggccattcactaatatctgtcatgtggttattgcacgacatggttgtcttgattcatattggctatttgaacctgaaaactgttatgttattaatatctgaataccacaaatattatctttgtctatctcttttaaaacagatgatgcaggctcccacatctccctgccacatcaaatagacatggctgctcaggtggcttctggcatggcttatcttgaatctcagaactatatccatcgagatttggcagccaggaatgttcttgttggtgaacacagtgtttacaaagtggcaga

SEQ ID NO: 41863 - DNA, 600 bp, Chicken  19866894278137_1
aggtaaataaatcagcatgctttaaatttccttcaaaaataaatattctgtatctctgagcttcttgatcatctctcaccattcagatctggaacatggttgtgctgagggtttatttccaaaggtgataggtagatgcagagacagaggaagcaaaagtttacatctaaacctttacttcatcaggtacaaagcttcagatggactctaaaatacctggtctcactgttgacctagaaggtgttgaaaaggaagaagaaggggaggattatatgttttccaagaatgaaaaatctgtgmgagttaccaccttacctcagcctagaacagttttgtacaggtatggagaaagatttcaattttcagatgatttttagttaatactcataacttttttctttctytacctaactgattaattgttggaagctgtgggaagctctgagatacaggccacmcccagcrtgtgcctgttacctaaggagctgaatatttaccttacagtcttactgaattcttatttcccatgtttcttcccctgaatactggcccacctactccacttaccccacagtgcggtgggagccacaagagtggatg

SEQ ID NO: 41864 - DNA, 600 bp, Chicken  19866894278137_2
ctgagggtttatttccaaaggtgataggtagatgcagagacagaggaagcaaaagtttacatctaaacctttacttcatcaggtacaaagcttcagatggactctaaaatacctggtctcactgttgacctagaaggtgttgaaaaggaagaagaaggggaggattatatgttttccaagaatgaaaaatctgtgmgagttaccaccttacctcagcctagaacagttttgtacaggtatggagaaagatttcaattttcagatgatttttagttaatactcataacttttttctttctytacctaactgattaattgttggaagctgtgggaagctctgagatacaggccacmcccagcrtgtgcctgttacctaaggagctgaatatttaccttacagtcttactgaattcttatttcccatgtttcttcccctgaatactggcccacctactccacttaccccacagtgcggtgggagccacaagagtggatgtaacctggagaagaaggatgtagcctttactggcaacactggttattacctcttaaagagttctcctgttagctctttatcacagctttgtgctcttgcttttt

SEQ ID NO: 41865 - DNA, 600 bp, Chicken  19866894278137_3
gtttacatctaaacctttacttcatcaggtacaaagcttcagatggactctaaaatacctggtctcactgttgacctagaaggtgttgaaaaggaagaagaaggggaggattatatgttttccaagaatgaaaaatctgtgmgagttaccaccttacctcagcctagaacagttttgtacaggtatggagaaagatttcaattttcagatgatttttagttaatactcataacttttttctttctytacctaactgattaattgttggaagctgtgggaagctctgagatacaggccacmcccagcrtgtgcctgttacctaaggagctgaatatttaccttacagtcttactgaattcttatttcccatgtttcttcccctgaatactggcccacctactccacttaccccacagtgcggtgggagccacaagagtggatgtaacctggagaagaaggatgtagcctttactggcaacactggttattacctcttaaagagttctcctgttagctctttatcacagctttgtgctcttgctttttgttttccttcattccttcccttccagcgtttagctatggccctcatgcctgtgc

SEQ ID NO: 41866 - DNA, 600 bp, Chicken  19866894278137_4
tctaaacctttacttcatcaggtacaaagcttcagatggactctaaaatacctggtctcactgttgacctagaaggtgttgaaaaggaagaagaaggggaggattatatgttttccaagaatgaaaaatctgtgmgagttaccaccttacctcagcctagaacagttttgtacaggtatggagaaagatttcaattttcagatgatttttagttaatactcataacttttttctttctytacctaactgattaattgttggaagctgtgggaagctctgagatacaggccacmcccagcrtgtgcctgttacctaaggagctgaatatttaccttacagtcttactgaattcttatttcccatgtttcttcccctgaatactggcccacctactccacttaccccacagtgcggtgggagccacaagagtggatgtaacctggagaagaaggatgtagcctttactggcaacactggttattacctcttaaagagttctcctgttagctctttatcacagctttgtgctcttgctttttgttttccttcattccttcccttccagcgtttagctatggccctcatgcctgtgcaggaaca

SEQ ID NO: 41867 - DNA, 600 bp, Chicken  19866894278140_1
attgctggttttgaaaaatgcctgaagtgagtcgcacacagtgaagaaatgttagggttttaattacacagtactgccacctagcatcgactcacagattcggatgtgtctgtagatttccaggcatatcagctaagttgactttcatttatttttctattgaaccttgttatgatttccaagaatataaacgtctttctggggggtgggatgacattttgtatgtggcaaacctcaaacacaaaaacaaaaagccttctattgcagataaatggaagcagaagtagtaaatgctttttkttgttgttgttgttgttaaatagatggaataatattataatcaagattaatggtttcgaagtttgtcttggtagatgccatgttaataaatattattattttagaagctttccaaataaaattttgcactgttaattagagatatctttcaacgtcaggcagaaaatatcgtagtttgtagtgcacataccccatttttgtgtgttcccacaaataaaaatatctgtgggattgtgataacctgaatcacagtaatcaaggtatgactgaatgcatatatggctgtaattaaatggttgg

SEQ ID NO: 41868 - DNA, 600 bp, Chicken  19866894278143_1
gagcatttcttaagggatgacttgacaggaaccacaatgctcttgacctggaacttgctttataagttgtttgtcctgggctgctaatttcactttgtcctttggatttttaagttaagaaatcgcgagtttaagcatggaagaattggattgctatagctgtgatcagttggcaaagatgtagaagctctgtcctttgagctgtataaatactgaatgctctgagcagcgtgctgtaggcttattgctgaatacctgccacacattgatcatgttgctccatgcatgagtgttatatasgctttgggagggggagctgtatatgagctgctgctggtggctttctatttgtcccatagttaattaaatttataaggtgattctgaaccactgagagttaaaagtggtggtgtttttttatcgattctgcaaaaaaaaaaaaaaaaaaaaaaaaaaggttgtagtctgcttctgtactgcttcatagctactagtgttgatgtaatgagtttttggtagatttccaatctccttttctcttttgaacaggtgtttataatccaaacaaaaactgctgttggactgaaagtcagacttgtc

SEQ ID NO: 41869 - DNA, 600 bp, Chicken  19866894278144_1
aggttgtaatgtccgtttctttcctttagatctccctccccacactgagttagtttgaaaatattacctcttgaatatttatttttcctgctgtaagaaaagaagcaaaagtgaattatgtgtataaagcaggttcccatgatttgatatcatttgatcagtcagagcaagagactctttactacttgattataatactatcaatattgaagttaccgtttgtcatttctatacttagtatcatgattcctgttctacactcatatttatccaccaaacacaacatgagagacattgcamctggctggatgcaaaaatatttgcataggaatactagagatagtaggactgaatattgaacatttaatgctgattgcaaattcagctactttactaccataaaatgctttaataaatcaaatcattagaaaatgcaaaattttagttggcctaagtgcataagaaatgtctatctgggtcagaaaacagatccacctaaaccagtattctgacaatgataaaaggaaatgctgtttggcagtgtatgcactctatctgctttgtacagacaactctctccataacccttggtatccttaa

SEQ ID NO: 41870 - DNA, 600 bp, Chicken  19866894278146_1
gtgattctaggatttccaggaaagtgatggagtcaccatccccggaggcgttcaagaaaacagtggaggtgacactgagggacatagttcagtgggcatggtagagataggctgatggttggacaagatgatcttagtggtctttcccaaccttgatgattctatgattactgataaaaattgtacataaactggaaaagttcctggctttgggctcacagctatctctaccattacatgggcagtgtggtccctcgtgtgctttttgctcaagccaaagaaacttctctctagcttagrgtcatcatgcatctgagaacacttccaagcaacagtttggatgcagccaccctcttttggagggtacaggagtttaatagcattgttgcatgcatcacagcataagaacagagagaacagtgagcagagaacagtgcaggatgatatgattcacccataacacctttgcaaagcattgagtctctgccacttagctggaaaaacaccttcagcyctrggcactgtctgtaaccaatatccttcctgtggtcacaaagatgcccagagctgaacagccaagagccagtacagacaaacggg

SEQ ID NO: 41871 - DNA, 568 bp, Chicken  19866894278146_2
ctcacagctatctctaccattacatgggcagtgtggtccctcgtgtgctttttgctcaagccaaagaaacttctctctagcttagrgtcatcatgcatctgagaacacttccaagcaacagtttggatgcagccaccctcttttggagggtacaggagtttaatagcattgttgcatgcatcacagcataagaacagagagaacagtgagcagagaacagtgcaggatgatatgattcacccataacacctttgcaaagcattgagtctctgccacttagctggaaaaacaccttcagcyctrggcactgtctgtaaccaatatccttcctgtggtcacaaagatgcccagagctgaacagccaagagccagtacagacaaacgggccttctttgggagatgtctgcttcaggaggtgatccctgtgcgtatttctctgcactaatctctaaattcagatgacacgaagcgcactgaggtgcatttgtcgatgcatcattgtcacagtgccctgaccctcaccacaagggctacacccatcaagggactactttcctgcctaaagcca

SEQ ID NO: 41872 - DNA, 565 bp, Chicken  19866894278146_3
acagctatctctaccattacatgggcagtgtggtccctcgtgtgctttttgctcaagccaaagaaacttctctctagcttagrgtcatcatgcatctgagaacacttccaagcaacagtttggatgcagccaccctcttttggagggtacaggagtttaatagcattgttgcatgcatcacagcataagaacagagagaacagtgagcagagaacagtgcaggatgatatgattcacccataacacctttgcaaagcattgagtctctgccacttagctggaaaaacaccttcagcyctrggcactgtctgtaaccaatatccttcctgtggtcacaaagatgcccagagctgaacagccaagagccagtacagacaaacgggccttctttgggagatgtctgcttcaggaggtgatccctgtgcgtatttctctgcactaatctctaaattcagatgacacgaagcgcactgaggtgcatttgtcgatgcatcattgtcacagtgccctgaccctcaccacaagggctacacccatcaagggactactttcctgcctaaagcca

SEQ ID NO: 41873 - DNA, 600 bp, Chicken  19866894278154_1
agtattcaaatgctccagcaccatactgggacaaagatctcagcatgtgtcgatttgctgtggaactaaaaagagaaaaacaaatcttcatgtaattgttgaatcaaatcattaagtcatatgatctcttttctgcttctcatgccatttcaaaatatcttggttttaattagtactgcaagttttttgaatttaaattctattaattccacacttttttttcagggtatggaccacctgaaagcaactgagccaatgaaggtgctgctgaattacagatttcccaataatatttgaggraattacatggcatgtgagtatctccatgtcctaatgcaaggatgtgaagagaaattaactaatgtccaacaccagttaggatcattaaaatgacgttaactaattgattcatctaattagtctcagtctcagcagaactatttagtatgggcacaatcatcttacagctaaatccagaatcaatttgggagtgttactttctggaaaacataaatgatatgataacacttatcagcctgatagagctctgctccccaggtctgactactgtgaagctatagacaaaagacagctttaggg

SEQ ID NO: 41874 - DNA, 599 bp, Chicken  19866894278156_1
  misc_feature (1)..(94): n is any nucleotide
nnnnnnnnnnnnnnnnnnnnnnnnnnnnnnnnnnnnnnnnnnnnnnnnnnnnnnnnnnnnnnnnnnnnnnnnnnnnnnnnnnnnnnnnnnnnnnattttattgctcatcggttaatgcaagaataagcctggaataataacagtaacaaatactttgaatagaagtttccatagtaacttccatctattgccttgtgagcttacgcgctctaatttatgcaatcttaacatcctctctttgctattttatctactggaagcaagtaaataaaaataaagaaattgttatcatcatttctraattcagacactcaaaaatgtggtaggaaaactgaatactcatatacacatatctttagataaacagaatttctcattacaatcacacatattcagtatgcaacattaaaataaactattttgctttaagtcagactgagacaatggtttctattattgctttcatgaaggctcattatagctgtaggtccttaaaatggtaaagaaaattgcctcttatcagcattcagcagaactgaactgttacactgcaggggacatgctatgctttctcttttttgctctgaggaacagaacga

SEQ ID NO: 41875 - DNA, 600 bp, Chicken  19866894278156_2
atttctcattacaatcacacatattcagtatgcaacattaaaataaactattttgctttaagtcagactgagacaatggtttctattattgctttcatgaaggctcattatagctgtaggtccttaaaatggtaaagaaaattgcctcttatcagcattcagcagaactgaactgttacactgcaggggacatgctatgctttctcttttttgctctgaggaacagaacgatggagaggcaagaggatatggcttggtatgcatgtagaagcatgagctttcagactgctctggtatctkcaaaagagccagtgacctctcatcccacwcaaayatctacggctgcagacacaagcatttctaatgtcctggtgaaaaccaaatttgggcaaaggacaagattaatctaacattaagcatatgcataaaacagcaaaggactaaggcttctagtgtaagggaggaatggtttcaacttgcgtttacataatgattgtacactgggactccaatcctcctaattttctcagctttgccaccataaaataaaacgatagtatttttattacttaatcagttaatgctcagttaacttacaga

SEQ ID NO: 41876 - DNA, 600 bp, Chicken  19866894278156_3
atgcaacattaaaataaactattttgctttaagtcagactgagacaatggtttctattattgctttcatgaaggctcattatagctgtaggtccttaaaatggtaaagaaaattgcctcttatcagcattcagcagaactgaactgttacactgcaggggacatgctatgctttctcttttttgctctgaggaacagaacgatggagaggcaagaggatatggcttggtatgcatgtagaagcatgagctttcagactgctctggtatctkcaaaagagccagtgacctctcatcccacwcaaayatctacggctgcagacacaagcatttctaatgtcctggtgaaaaccaaatttgggcaaaggacaagattaatctaacattaagcatatgcataaaacagcaaaggactaaggcttctagtgtaagggaggaatggtttcaacttgcgtttacataatgattgtacactgggactccaatcctcctaattttctcagctttgccaccataaaataaaacgatagtatttttattacttaatcagttaatgctcagttaacttacagattattaaaggaatgacaaagattcatttg

SEQ ID NO: 41877 - DNA, 600 bp, Chicken  19866894278156_4
acattaaaataaactattttgctttaagtcagactgagacaatggtttctattattgctttcatgaaggctcattatagctgtaggtccttaaaatggtaaagaaaattgcctcttatcagcattcagcagaactgaactgttacactgcaggggacatgctatgctttctcttttttgctctgaggaacagaacgatggagaggcaagaggatatggcttggtatgcatgtagaagcatgagctttcagactgctctggtatctkcaaaagagccagtgacctctcatcccacwcaaayatctacggctgcagacacaagcatttctaatgtcctggtgaaaaccaaatttgggcaaaggacaagattaatctaacattaagcatatgcataaaacagcaaaggactaaggcttctagtgtaagggaggaatggtttcaacttgcgtttacataatgattgtacactgggactccaatcctcctaattttctcagctttgccaccataaaataaaacgatagtatttttattacttaatcagttaatgctcagttaacttacagattattaaaggaatgacaaagattcatttgtttac

SEQ ID NO: 41878 - DNA, 568 bp, Chicken  19866894278157_1
cacggccaggaatgagctgcaaccccctgcaggtctctcctgctgcctgcagctcttcctgcacccaataccagttgcatgcagccctcggagcagccactgctgctgtctgggtgggtgctcatctttgctgagcatcccgcacaatctcttgcactcccctgcaaagcattctgcaggctccaaggctcctcagagtgcagtgaacttcccatgcagtgtaaagtgaggaccagagggagctaaaaaaataacctaggtgaaaaacaaccttatgctatcaggtcttaccagatctgygctgtggaacccgtacatgtcatacttggttgaagctacagcaataagtatcttccttataccacagctttttataagcctttttgtatatgcaagtgctccttgtagtgcaaagcagcttcccagcagcagttatctcctccggcagtgccacatctacacaggcattctgtggtgggaaggggacgtgttgtgaaggcagctgcacccgggcaggagcacagcagtgagcagcagccctgagcccagcttggtgggagaactgcat

SEQ ID NO: 41879 - DNA, 600 bp, Chicken  19866894278161_1
ggttatgattgtggtcacaattgtgatatggcctatttctggtttagtttgaaataacttccttcttgtctgcaccccctgtaagtgctgtgaatgaagcgccagaatgtgtcctcgaagagtggggtgtctaaatggatgggggaagcagagcaaggaaggaaatggaggcacgatcccaacatgtgtttctctagctcattgcaagggcctccagtgatgcagaaatctgtttaacatactctaatgaccttcaagaacttaaaatctggctgaaagtcatttactgatttcaggagrgctccagtgtggagcagaagccctcatcccatcatcattgggagtcattggagagaggctggagggggatggtcttcaacctgcccttaagtgctgtgttgagtggggcgctgagggcatggaaaacattgcctgactcccagtggttttgttcaattttttttattacttggttaactttttttttcaggtttccattgcaatttatatacgaattctgatgctttttggcttatgaatgctttctactagacttattttatttttacattaattgttagcgaaaaaaaaaaaagcata

SEQ ID NO: 41880 - DNA, 599 bp, Chicken  19866894278164_1
  misc_feature (1)..(4): n is any nucleotide
nnnncggactgggagcccagaactgccggagggagagggagctgcgagtggttggcaaaggactggggctggcaggtgggttctctgtgccaacaggatgggagctggtggcagagggggtggcagtcccaccagcagctggttgtcacatcccccagtgacagccccagccatacaagcagcaatgcagacataggagtatctcctgagcaaaggttacaaggccagggatagccaagcttcctttcttcaacggtgcccttagtcaagctgctctgaaatagctgtaactcaccttcrgataagcagtctgagcctctttgaagctaaatcctgcccagaggggctgcagagaccgtgagtcagctctgtatttatagcagggcaggagccaggcaggtgtcaggggctaacaagggcacagcagacccacgctcccaaagcctacataatttttcctgcaaggagtgaatatttcctacaccccaaccattccccaccccaacaggggcaggakagatcttgctatccccagcagcactcacagcatcccatgtaggagagcagtttggggatgggtgcagagctcggtcccaaca

SEQ ID NO: 41881 - DNA, 600 bp, Chicken  19866894278164_2
tacaaggccagggatagccaagcttcctttcttcaacggtgcccttagtcaagctgctctgaaatagctgtaactcaccttcrgataagcagtctgagcctctttgaagctaaatcctgcccagaggggctgcagagaccgtgagtcagctctgtatttatagcagggcaggagccaggcaggtgtcaggggctaacaagggcacagcagacccacgctcccaaagcctacataatttttcctgcaaggagtgaatatttcctacaccccaaccattccccaccccaacaggggcaggakagatcttgctatccccagcagcactcacagcatcccatgtaggagagcagtttggggatgggtgcagagctcggtcccaacatgaaccccagggcagggatgctccctgcatgcacagccctggtttgtccccatyctcccagcgctgtcctggaggctgggaaagcctcagcacacacatgccgcctgcagcagactcccagctcacttccacctgtttccgataagctgcctaatccggccccataatgattctttattaatggatgctgctgtcttcattacatgccttaattagtg

SEQ ID NO: 41882 - DNA, 600 bp, Chicken  19866894278164_3
gaccgtgagtcagctctgtatttatagcagggcaggagccaggcaggtgtcaggggctaacaagggcacagcagacccacgctcccaaagcctacataatttttcctgcaaggagtgaatatttcctacaccccaaccattccccaccccaacaggggcaggakagatcttgctatccccagcagcactcacagcatcccatgtaggagagcagtttggggatgggtgcagagctcggtcccaacatgaaccccagggcagggatgctccctgcatgcacagccctggtttgtccccatyctcccagcgctgtcctggaggctgggaaagcctcagcacacacatgccgcctgcagcagactcccagctcacttccacctgtttccgataagctgcctaatccggccccataatgattctttattaatggatgctgctgtcttcattacatgccttaattagtgttttgtgagcaaattcaaggggataagaagcgtgtcacattttccaaccgggggggtttgtgcacagctaccaaaataactttgtctgcgaagccaggagttcctgtttcaccctgcccataagccgtcgtcacca

SEQ ID NO: 41883 - DNA, 600 bp, Chicken  19866894278166_1
gtatagcccagcaagtactgggaaccaaggccaggatgttcccagggtgcaacgtggaaagcagaatattttcaaagctatgacttactaaatactaattagtttactaatggtacactatttactttcctaattatcaatctcatttgcttttgctttacacaaaaagaaggatgtggactgtgcatggttaattactgatatttacccaggttattgtcaatatgccatgttgaatgttgtaggtataataattaccttttaatgtgtatgctttctctgtacaaaaatctgtctttmrtgtgcagttttgaagacatctaaactctttggtgcatctaagagcacaaaggaaatgcatggtcactatccaacgtgacacaataactttaacgaggtcatttcttagatatctaccattctgcatccataaatggaaacttgcttccacctaatacggcaaccttttattgtgttgaaatattaaacattacactgactaaacccgtgccagaaaaaatagcaccggtcataataaaggcagtagttttaattctaggcaggtattccacaggattctttaaatattcattatgcata

SEQ ID NO: 41884 - DNA, 600 bp, Chicken  19866894278166_2
tatagcccagcaagtactgggaaccaaggccaggatgttcccagggtgcaacgtggaaagcagaatattttcaaagctatgacttactaaatactaattagtttactaatggtacactatttactttcctaattatcaatctcatttgcttttgctttacacaaaaagaaggatgtggactgtgcatggttaattactgatatttacccaggttattgtcaatatgccatgttgaatgttgtaggtataataattaccttttaatgtgtatgctttctctgtacaaaaatctgtctttmrtgtgcagttttgaagacatctaaactctttggtgcatctaagagcacaaaggaaatgcatggtcactatccaacgtgacacaataactttaacgaggtcatttcttagatatctaccattctgcatccataaatggaaacttgcttccacctaatacggcaaccttttattgtgttgaaatattaaacattacactgactaaacccgtgccagaaaaaatagcaccggtcataataaaggcagtagttttaattctaggcaggtattccacaggattctttaaatattcattatgcatat

SEQ ID NO: 41885 - DNA, 600 bp, Chicken  19866894278174_1
agatacacttagattagtattgcttaatattaagaacctgcttgctagatggtgtaaacgatgtgctaagtaattacttgcagttgagatctcactatatgagtgttagcaatatgagaaaaaggaaatgttctcagggttcaaatatgcaactgatttaaaatgttaatgctgtttaattgtgggacctatacctaaatgcattcctgaacagcgtttcaaaagtttctccttttctgaagggggagtattgctgcacctggtatggattgagctttccccaggtagctcctcaaagargacatacatgtaggtttacgatttttccccaaaatctgtactttagcttaaaaaacaaataaggaaggactaaaataaaaataaaaatgtctcttctgcrgtgccagggagaagcatccctttacagtttctacccctttagtcaggaaaaattgccaggtacacagtctcctgctccgcaggatgtttcagtcagaaaaacttgtgttgtccatgacagtagctgtttatttttgtcctagtagtccacaatcaaggtgttaacaactctcttaattaaattcttttgtcagagtggcg

SEQ ID NO: 41886 - DNA, 600 bp, Chicken  19866894278174_2
gagtgttagcaatatgagaaaaaggaaatgttctcagggttcaaatatgcaactgatttaaaatgttaatgctgtttaattgtgggacctatacctaaatgcattcctgaacagcgtttcaaaagtttctccttttctgaagggggagtattgctgcacctggtatggattgagctttccccaggtagctcctcaaagargacatacatgtaggtttacgatttttccccaaaatctgtactttagcttaaaaaacaaataaggaaggactaaaataaaaataaaaatgtctcttctgcrgtgccagggagaagcatccctttacagtttctacccctttagtcaggaaaaattgccaggtacacagtctcctgctccgcaggatgtttcagtcagaaaaacttgtgttgtccatgacagtagctgtttatttttgtcctagtagtccacaatcaaggtgttaacaactctcttaattaaattcttttgtcagagtggcgttcaccaggtgccagtattggggctggtcctgttccatatctttattgatggtctgcacaaggggtttgagaataccctcattgagtttgcagatgacac

SEQ ID NO: 41887 - DNA, 559 bp, Chicken  19866894278176_1
tttctgaatagtaccaggagagtcataaagaccattccatgtctctacggggaggcagatgcagtaggagacacttgcagcagtaagcttctcagctctggcatgacctgtgctagcagaggccttacagaatgtaactcagacacaaatgtgatggcagctggcattgccacaggaaccaaagctgggatggatttgtcctcgctgcagctcctgctgactcacaagtcccttctgtctttctcgctggtgcttgagacagtccagaaagtgaggggtagttagtggtggaggcttgcrtgggggccacacgaaagacaacatggctctttcaaaccagcagaaaacgcgtgttgctgggggctgcttgtcggcgtttagagcacagtccaacagtgctgtgctttgctgcggccttattgccagaggaaatggtctgttaacgcaggaagcctttggagtccttgcacacgagtactgtactgtaaaaatagcacatatattttagcttcttttgtttgttgctgcagtatttatgtctcctttttcttctcttttc

SEQ ID NO: 41888 - DNA, 600 bp, Chicken  19866894278188_1
tttcactacaaagctgacaggtgtgttacttttccccttcttctattaaatcttgattctttctgaagttcatgcaattatattataatatcattatgagaaatgatcttatttggtaatttgcagtgccctctcatgaaataagtttcaaaaatctcttgaaattctctccttaaagttagatgctattgctgctacccaaactcctccatggagacggacgttccttgcctttttaatggaggacatagctgtaagaacatatttttctttatgtcctgtacatcatgcagaaatgtscacgtcccacacatagcaattcccaatcccaaagatgatttacagcaccaagatcagtgacagagtagcatcttgactatgctgctggtgctcatattgatactgtactcatccagtggatttaatagagcggggtagattcaatcttgactgttaatcctttccatgtcacaggactcaaacatatcggttttctattaaggttggttacaaggccatgtgggcctgctccttgttaaattataggtaattctcaaagtatggtggctaagtgctgctcctagcccagcagatacaatg

SEQ ID NO: 41889 - DNA, 600 bp, Chicken  19866894278189_1
tgtgcagaagttagagtacctctcccttctttatcaagttgatccaaataaatgttttacctcaactagatttttggctacaaaaactactagaaatttttatgaagaccacacagtaaataaaacatacggttggtttgtcctttgtatttgttactgcatcataactgcagtaagacaacttgatctggcaggcggggtgctgggaaagcttggctggtaatgtgacttggatctgatggaaagggaaagattatacagctaaagttatttgactgccagaggagcagagcacagagmtggatgcccaaacagtgcccgagttcccagattttgtgacgggcagtgcaactacgtacaaatggaagatgaaggccaatgctgacctgcatcccagtgaccagcatgagaatgtttgtccatctctttgcagctctcataatgaaaccctctttcgagagagacagatttgttctgtgaaccataaagtgagtttaatgtggaaaattcacatctcctttgtgggaagagatgaatacaagggcaagcaaaagcttatcagctccacattgacaaagcatcattgtagagtgtgcactt

SEQ ID NO: 41890 - DNA, 599 bp, Chicken  19866894278191_1
cttacctaaccttagtcttcaagatgacatcgaagacgtgaaggaggaatctgactgcatcactggcaccctgactgcttctctctaaccagtggcatctatccattgtagttcatggttagttcacctggagaatccagagtccaaagaagtatctgtatctcactgtaattctttttggaaatcacaaatcactgcctttattttagaagcagaagcagaattacttagctttctctttttttcctctagtagtttattctgctgctcacagagagaaaaatatacctggcataccayraacacttgagtgaaaatagtttacttaacacctatgttgtgagaaaatgggagaaagatgtcaaacggtctttttaaagacttgtcagtttattaacactggttgtatcaccagcacaaagtactgaagctgctaagacgcacagcacagtgttcctgaaacgttagcagtactttgttagctctatatactgttgctttcttgtgcagtatgttttgtaaaactggagtgtcagccttgccttacaggccctttttacctttgggatggagttacctgctaggtaaacagactccca

SEQ ID NO: 41891 - DNA, 598 bp, Chicken  19866894278191_2
ttacctaaccttagtcttcaagatgacatcgaagacgtgaaggaggaatctgactgcatcactggcaccctgactgcttctctctaaccagtggcatctatccattgtagttcatggttagttcacctggagaatccagagtccaaagaagtatctgtatctcactgtaattctttttggaaatcacaaatcactgcctttattttagaagcagaagcagaattacttagctttctctttttttcctctagtagtttattctgctgctcacagagagaaaaatatacctggcataccayraacacttgagtgaaaatagtttacttaacacctatgttgtgagaaaatgggagaaagatgtcaaacggtctttttaaagacttgtcagtttattaacactggttgtatcaccagcacaaagtactgaagctgctaagacgcacagcacagtgttcctgaaacgttagcagtactttgttagctctatatactgttgctttcttgtgcagtatgttttgtaaaactggagtgtcagccttgccttacaggccctttttacctttgggatggagttacctgctaggtaaacagactccca

SEQ ID NO: 41892 - DNA, 600 bp, Chicken  19866894278194_1
cctcagtgccacatctccacagttctggaacacctccaggggcggtgaccccaccacctccctgggcagctgtgccaatacctcaccactctacgaagaaattgttcctaacacccaacctgaacctctctttaaacaatggcagactgccttgccccctgtccccccacccaggtacacaggtgccccacttgcctctttgaggaaggtcctctgcgtctcctcatcaaagcggatcagctccttcataaccatcacctcgcccgtttccctgtgcgtcacctggcggaaggcaggcamtcagcacctctgcgacgcatcactcacatccccaccccacacagctaagaccaccatgctcataacacaaatggcatggcaaggcactgcaccttgatggcctggccgaagcagcccttgcccagcacctcgccatggatcaggtcagaggggcggaagatgcggtgagcgcgagagacaacgcgcagcgactcggagcggccaatgtccttgcgctgggaggcaggtgagcccaccgagctggagcctggagacttgtctgtgctgcagctcctcctgcggggcaggcagaagcatggg

SEQ ID NO: 41893 - DNA, 600 bp, Chicken  19866894278200_1
tagttgcaaatgagtctatagggaacccaggagttctgttaagctcatttcatacctgtagcaatagctttaaaatctaatcctggatatgtttatacatttttaatagaaccccaattttacctacaatatcctctagtggcttcaactgctgcagcatcttcctgaacagtttttcacataataggctcagcaggttcaacacttgattatctttttctcaggttcactatcttctcttttcccttcattatacaccgacaaggggactatacacaggttctgtgtggtgcatggctygtacatgaacgtgaaagcaatgtggaatcaatgttctggaggaagctagttttcaaggaatttaattgaattattgaaattcagggttgaacccctgggacattgatctagtattgtcagcttcaaatccaaagcactctgtctgcttgataatatgttcatagaatttgcagtggaagaggtggtgaatcaaagcctgtgacagtatagctaactgacagaaaacagaggaactgttgctgaatacatttaaaaataaatcaatatagactggcctgattaaacaatcttggcaatgca

SEQ ID NO: 41894 - DNA, 600 bp, Chicken  19866894278200_2
aataaatcaatatagactggcctgattaaacaatcttggcaatgcattgtgttggcatggctgctgacttaccaatttaagagcaggctgaggactcatggtatctggaaagctggagaggcctgcgctgggacgatgcatttagcttccaagacagatatttgctcatctgttttccttgccagaggctagaaaccgttgttgcagctgccaaatgaaacaaagagagattaaaagagaaacaaaatgataaaataatacttgcaaaaagcttagaaagaaaaacagaagagatggctytcatttaaattgacatgagtgcaaatgctttgcttatttttcccatatattaaaatatcgtttagaatttgatgctggggtcaattaaaaaaaaaaagagagagagagagagagagagagagagagagagaagggggggtggggggggagggaggatgaagggttttaaaacatttctgcaaaacaaggctcagccatcacacctctcctgaatgctaagtcatgtccttcctcaagtgtaactgctggaaggaaacaaagcagagacagctgcaggactgttctgccctgttgtgggtt

SEQ ID NO: 41895 - DNA, 600 bp, Chicken  19866894278204_1
agcaggctcagacttaaggctctgtccaggcgtcagtcaatgcatttctcagtcctcattgttggacagctgcttacagtaacgaatttcagactaaacaaagccagttacttttgctcttgccaatgaaaaatatatttacccttcatgctggtctctggtccccctcggtggctcctgatgggatggttcggtgctcctccggcagagctgggtcaacgtgtgtagggttccaccgccccactgtgcccccatccccatcagccccacatcccgctgacagccctggggctcgccgcrctgcttttaagggacccagaggcagaggaaagcttctagctttagccttgtaaggaagatgaaataaccgggaggtggggttgcgggagccggagagctgcgttttctcctcccctttctgcgctcttaaggaggttcgctgcagagcaatgttgggaccacactgctggagtgagcagggagtgctggaatgggagggggaggccatgctgcagccatcccccagccctggattcctattacagaatcatagaatcagaaaggttggagaagacccctmagatccccaagtccaactgc

SEQ ID NO: 41896 - DNA, 600 bp, Chicken  19866894278204_2
cagccctggggctcgccgcrctgcttttaagggacccagaggcagaggaaagcttctagctttagccttgtaaggaagatgaaataaccgggaggtggggttgcgggagccggagagctgcgttttctcctcccctttctgcgctcttaaggaggttcgctgcagagcaatgttgggaccacactgctggagtgagcagggagtgctggaatgggagggggaggccatgctgcagccatcccccagccctggattcctattacagaatcatagaatcagaaaggttggagaagacccctmagatccccaagtccaactgcaccttatgccaccatgcccactgcccacgtcccccagtgccacagctctgaacacctccagggacggtgacccccagctccctgtgcagctgtgcagtgcctcactgctctgagcagaaatgtctcctgcagaaaagaaattctaccagcccaagaaagaagaatctgtaggttagtgagtaagctgcatcctttccaacaggrgctgcccatcccttacccattccttccctgcagaatgcagtctgtggtcccctgaacaaccatatttctgcctttg

SEQ ID NO: 41897 - DNA, 600 bp, Chicken  19866894278204_3
ccatgctgcagccatcccccagccctggattcctattacagaatcatagaatcagaaaggttggagaagacccctmagatccccaagtccaactgcaccttatgccaccatgcccactgcccacgtcccccagtgccacagctctgaacacctccagggacggtgacccccagctccctgtgcagctgtgcagtgcctcactgctctgagcagaaatgtctcctgcagaaaagaaattctaccagcccaagaaagaagaatctgtaggttagtgagtaagctgcatcctttccaacaggrgctgcccatcccttacccattccttccctgcagaatgcagtctgtggtcccctgaacaaccatatttctgcctttgcaatgcctgaacaatcattaaaaatgttgcctaagctacagcagctgccagcttggaacagaagttctatttaaaccactcccattcagtagagccctgaaacaaagatgagggcttaaatatcggtattgcttaactaatgatcgtgtttgtcagaattttggcaggcgtgcaggtgccacagatcctccctgctctcctgggtgccaatcccaccccacgtg

SEQ ID NO: 41898 - DNA, 600 bp, Chicken  19866894278206_1
tccctgttagttcctgccgaggtactgctaaagtgctgttagtttggatagtgcaaaaggtaaatgtgccaactggtataattagaactaagagtgctgtaagggaactctatttgcttttaatataaatcagttgctgtgatggcccctgattagcacagctcagtagctctgtagatacaaaggaggaatgagttacaaatggtaaggtttctcacagagaaatggggcagtattttaaaggtcagtctgttatgtgtgtatgttagccaatgaggcacatatcagaaacatacactrttttcaatatgttatttttaaaataatttgtgctgttggaagaagattttaatagacgatgtgcactttggtaatgaaaaattatcttagactttgcaattttagatctcagtagtttgattttctctcacgtcctctttctttagtttgacaaacctttgcactctctggctttaaaactgctagatttttgggagagtaaataagcaaaagttatatgcatgtgaatggactgtgaacattattgaagttgtctggcggtgccataggatgtgaaattagcagtaccttgcctagttc

SEQ ID NO: 41899 - DNA, 599 bp, Chicken  19866894278214_1
  misc_feature (1)..(251): n is any nucleotide
nnnnnnnnnnnnnnnnnnnnnnnnnnnnnnnnnnnnnnnnnnnnnnnnnnnnnnnnnnnnnnnnnnnnnnnnnnnnnnnnnnnnnnnnnnnnnnnnnnnnnnnnnnnnnnnnnnnnnnnnnnnnnnnnnnnnnnnnnnnnnnnnnnnnnnnnnnnnnnnnnnnnnnnnnnnnnnnnnnnnnnnnnnnnnnnnnnnnnnnnnnnnnnnnnnnnnnnnnnnnnnnnnnnnnnnnnnnnnnnnnnnnnnnnnnntcaaataatgatgctgcctgtctgtccattgcctccaagaattctgggratctcttgactgttatgagttacttttcaaggagatttgagatcctacargtttctggaggagatcaccaggaagtgcattctgaaaatttcctaccaaattagtagttttcttaactccatgaggaacatcagcgtgctgggtagaaatttacagttcactctatgtaattttttcatgggatgtgaactaagcccctgtctgttctttcttggtagaaggcacagaacagtattatcttcatcgtgaactatgatggcattctttccaaagatactctgatacatcaaaataaactt

SEQ ID NO: 41900 - DNA, 599 bp, Chicken  19866894278214_2
  misc_feature (1)..(201): n is any nucleotide
nnnnnnnnnnnnnnnnnnnnnnnnnnnnnnnnnnnnnnnnnnnnnnnnnnnnnnnnnnnnnnnnnnnnnnnnnnnnnnnnnnnnnnnnnnnnnnnnnnnnnnnnnnnnnnnnnnnnnnnnnnnnnnnnnnnnnnnnnnnnnnnnnnnnnnnnnnnnnnnnnnnnnnnnnnnnnnnnnnnnnnnnnnnnnnnnnnnnnnnnntcaaataatgatgctgcctgtctgtccattgcctccaagaattctgggratctcttgactgttatgagttacttttcaaggagatttgagatcctacargtttctggaggagatcaccaggaagtgcattctgaaaatttcctaccaaattagtagttttcttaactccatgaggaacatcagcgtgctgggtagaaatttacagttcactctatgtaattttttcatgggatgtgaactaagcccctgtctgttctttcttggtagaaggcacagaacagtattatcttcatcgtgaactatgatggcattctttccaaagatactctgatacatcaaaataaacttagtgtaaaaacctttgtggtactgtatttttaattagcatccacataact

SEQ ID NO: 41901 - DNA, 580 bp, Chicken  19866894278220_1
accctaccactgcagcacaaggtacgcacccacccatcaccaccaccctgcctcagccaggcaggagccgacgggcactgacacacttcagcagaccccggaaccccccgcagggctgccccccaacccgagctctgggcagggacaagagctgcacagcaccaccaagcaaagccccggtgagccgcgatgcgcggggctgtgagctgcagagctccccccgggtgaacagcagccccacagagccccgcagagccccgcgctgagctttgggctgcggcgatgcgaagttggtgcgaygcagacaaagggatgcagccagatgggggccaagcacggtgaaacgccgcgtaactgggacagcagcacggagggagggaagggaagagggaaaagggaaaagggaaggagcttttctcatctgagtgctctgcacgagcccggcacatccctctgcagcacgagagcaggaggacgcggctgccggtaccgggagcgctgcgcagcgcggctggccagggggcactgtgggcggccggcaggatgcactttgaccctggaaacacacccagggagacac

SEQ ID NO: 41902 - DNA, 599 bp, Chicken  19866894278227_1
  misc_feature (1)..(149): n is any nucleotide
nnnnnnnnnnnnnnnnnnnnnnnnnnnnnnnnnnnnnnnnnnnnnnnnnnnnnnnnnnnnnnnnnnnnnnnnnnnnnnnnnnnnnnnnnnnnnnnnnnnnnnnnnnnnnnnnnnnnnnnnnnnnnnnnnnnnnnnnnnnnnnnnnnnnnctgagggacctcatcttgattaaatttgtggagcgaaagaaggaaatttccttacaaaaggaagggaaaatgagaatctgtgggggccaaatcactggcaagctgtgaaggggtgagttaaatataaaagcaagcttagaaaccagcactsggctgagcaggtgcctagcaacaaaatgccacacacgacatgttctgcagtagcagagaaactccagcagttgtgctgctcagcgaaacgagattccttcctcaaacatcatcttcctcctggtctatcaaattccagacagcaaagagacactcttgtgacatcaaagggaatttctaacatcacagcttcctgctatgtatttagagcagctgcaccttatccacagccacacagatacgtttttcttttcttcacctgttttgtgtttaacggcaggtaagtattttaagaaactc

SEQ ID NO: 41903 - DNA, 600 bp, Chicken  19866894278229_1
ctaatggaagagaagtacttcaagtaaggcaggctcattaagaggaagtttatttggcaaggatatttaaaacacagattttgccatgactagtaagttccaattaaatcacaaaaggcagatctcaagccccactgaaatcaatgggagttttcctgttgacttcagtgatagaaagatttggacctcctttggatttatcttccaatttaagatttttcttatgcttactaaatcttccccagtgtttacattttaaaatgtgttgccaattcaaataacgttgtcttgtactgtaaraactaaaataaagtatttattttggcatctttgtaagcggaatttttgtcatgcgtttagaactcattctacactgctaactgcacgtaggaaatgttcctttcttgtttaaagacatttttagtacatgtttaagacattaactgcaactgtatggattgcgattcccattaagtggatttacactacagaaagtatccaactcttaataaatagcaatttgtaagtccttctgcacatcagattatttttgcctataagactattgctttgcttttaatgataagattgtcattaata

SEQ ID NO: 41904 - DNA, 600 bp, Chicken  19866894278233_1
gcccaggtgacagcattgcagaggggctggagcagtgaggccttgagcagactgctcatttgtctacaatgcccttggctgttcttgctcatggaaggggctgacccatctccatccttccagtgcagttcattagagagaagcgtaacgttagctgagattaatggtgaccgtgacacagcaatgaaggtgaccagaattggcatagatgagtctgctttgagcttctgcaacagtcagggcaaaagataaaacctgaaaattttacagagaagttctcttttctcgtcaacctacagratgtttgtccatatgtaccagcaagaagagtaaaaccaaagtccccaagctacgcattgactgctcctgactgcaagaggagtcatttcacaaacccagtgtcatgtggtgctgaagacttccagaaaactcaagtggacatgaaagtgaaccatgtgctcgggatgaatcaggaatcccatgtgggtgactcagtcgaatggctgccccattggcagggcttgaggctttggacaggctgraggaaaagtgctgatcaggatgtgagcctttctcaggagaggtggggatgggctttag

SEQ ID NO: 41905 - DNA, 600 bp, Chicken  19866894278233_2
caaaagataaaacctgaaaattttacagagaagttctcttttctcgtcaacctacagratgtttgtccatatgtaccagcaagaagagtaaaaccaaagtccccaagctacgcattgactgctcctgactgcaagaggagtcatttcacaaacccagtgtcatgtggtgctgaagacttccagaaaactcaagtggacatgaaagtgaaccatgtgctcgggatgaatcaggaatcccatgtgggtgactcagtcgaatggctgccccattggcagggcttgaggctttggacaggctgraggaaaagtgctgatcaggatgtgagcctttctcaggagaggtggggatgggctttagtcagaacacaagctgtaactgcgtgggtgcatggatgtatgcactgagatggatggaggtaccctgatggtgggagacattgaggtccttcatggacctgcaggctttctccataataaagctgctccttcctgcagtcttctgaaatgccctccctgagactgcccacacagaaataagaaacagggaggcagggtggcaaatacatcctcagatgtccacagattaggcatctaaatctg

SEQ ID NO: 41906 - DNA, 531 bp, Chicken  19866894278236_1
attagatgtacagaaataaatttcaagaacggaaaagagtgaaaaaatgaatgtttttgctggtcattagtaacttaccttgtgtgtgctaaaagctatctaagtgtattttatggaaatctaacaagcggttattaactcttcatttcaccacaaggcaatgaatagctcttcatgcaatctcttctcccccttctgcccccctttatgatagtggtacaaaactttcattcaatattgttctcctgcactgcactgcataaagactggtttatcacgatctggtgcagtctgtcctgmatctgtgggacactgggygatgagacagtcctcgagcacgaattaaacagcagctttctgttcagttttcagagactgcagtcattactccctgaaattaagggtctgtgtcctctacaaatagtgaatttaacttgtaattcaaaaggttttacaatgaatgcatttcatttttgtattctggattctgaggttttggggagttggagctgctcctttaagactgttaaa

SEQ ID NO: 41907 - DNA, 513 bp, Chicken  19866894278236_2
aatttcaagaacggaaaagagtgaaaaaatgaatgtttttgctggtcattagtaacttaccttgtgtgtgctaaaagctatctaagtgtattttatggaaatctaacaagcggttattaactcttcatttcaccacaaggcaatgaatagctcttcatgcaatctcttctcccccttctgcccccctttatgatagtggtacaaaactttcattcaatattgttctcctgcactgcactgcataaagactggtttatcacgatctggtgcagtctgtcctgmatctgtgggacactgggygatgagacagtcctcgagcacgaattaaacagcagctttctgttcagttttcagagactgcagtcattactccctgaaattaagggtctgtgtcctctacaaatagtgaatttaacttgtaattcaaaaggttttacaatgaatgcatttcatttttgtattctggattctgaggttttggggagttggagctgctcctttaagactgttaaa

SEQ ID NO: 41908 - DNA, 600 bp, Chicken  19866894278237_1
gagtagcgttaacatagtaatgtatcctcctcaaaagcaactataaggcttcagattcttcagaaacaaagttctgacccacaaacagaccaaggtatggcttctccctcccctctaacaactctacaaaacaagtagcaagcaaacaagtcacaaacctgactcgacctcaacacctcttgtttcagttgtgcgtaaagaaaacaagctaacaaagaaccttaaataaacacatactaaagctgccacacaccaagatatttcacatttgatacaccaataatttgccttccacactayccgttttctgacgtgacaaccacagatatagttcagaccacagagatcatccctaaattactaagacagcatcactaaagttcagttttgccattacacctccgctctttttatatgttagcttcctagaaatctaacaagcttgtgcaaattgtccttttgtctgggaagctgaaatctcccatcatctggaaccactgcactgccacaacaaacatgtctaggaaattcctgaagcatagtgaaggtaacatcctctgccaagtatggagagagacaactaggaaaggtaccctccta

SEQ ID NO: 41909 - DNA, 600 bp, Chicken  19866894278237_2
ctccgctctttttatatgttagcttcctagaaatctaacaagcttgtgcaaattgtccttttgtctgggaagctgaaatctcccatcatctggaaccactgcactgccacaacaaacatgtctaggaaattcctgaagcatagtgaaggtaacatcctctgccaagtatggagagagacaactaggaaaggtaccctcctaggcctgttgtttcagaacagaaaaggccttactggagatacgacagcaggtagctgtctcagccactgtgatcatgaaatgaaatcaagttcaaaactyttggtgtaacgagaagatagaagagttgtcaccctgaattttaagggaacaaacttgaagctatgaagggagaaagtgagcagtgacccttggaaactggctctctagaagactgaggtgtgcctaagatctggtcactttctaagtaccagcttctagaagcccaggagcacacaatcccactgtgccacaagtcaagcaaacagggcagaagaggttcaacaaggccaagtgcagggtcctgcactttggccatgataaccccatgcagtgccatagtcttgggaatgagtggctgga

SEQ ID NO: 41910 - DNA, 600 bp, Chicken  19866894278239_1
ctgtggttgtgttggctgtcctggatgaataggaagttcctaacatgagaaaaacaacaaaccaagaagaaattcacctttgttcatttaaaaatagcccttcaggagctgtgagttgccatgcccagtgttctgggaggtggcttgcccttcaggatgggagtggttggcttctttccctgtacagattttataaaacaacgtttgcagcagaaaaataaaccatctgctggattcccaacaaagctccatacaagctgcagccaagcaatctgtgatgagttgcatttcctttggtgycacttcatggcctcagcacagagggggcatggcagaatccagaactgcttgctgtgatgacatgctcactgctggtgagacctcagtgttgatgaccaggtggttgttttccagactgctgtggtaatttgggttgttaagccatttcctagctgttctcctgtctccttgctgcttccacaactctgccagcagctcttgtaagtgctccccaatccccaaggtgtaacgttgctattaaggacctgattgagggaacttcacctggaggcatcctttggccttgtgctgcacagccct

SEQ ID NO: 41911 - DNA, 600 bp, Chicken  19866894278240_1
tctttagtcatgcaaagtgcacaggtaaaaaagaaattcagagcatgaggttgtgcaaattcaccccactccaaacttctctcagaacttgaggtgtctctatctgctacagctccagcacctgtgtgctcccctgtgtgcccccaaggcgagggccaacagacagaccagggtaaatcatggcagctggaacagcaaaaacatcagctacctgaatattctccctttaacttgacaggtgttttgccccacctaccaggcacataaggcaattccagaaacacttcttagttctcaaasttatttcttggttgaatctgaaactgctgggtgttktttccaggttgcctcattctagttgcatttgatttctgcttactctttttccaaagccctttcctgtaacatggacttgctaaccttcatggattttgtcccactctttgttttaagagtctcttggcttctctaacttcctacctactcctgtgactgcagttctggctgggatgtccctgagctaattcagttaccctagcctagccttggctttccctggtcgtatcatttagttgcattttccagctttggttccaggca

SEQ ID NO: 41912 - DNA, 600 bp, Chicken  19866894278240_2
ttcagagcatgaggttgtgcaaattcaccccactccaaacttctctcagaacttgaggtgtctctatctgctacagctccagcacctgtgtgctcccctgtgtgcccccaaggcgagggccaacagacagaccagggtaaatcatggcagctggaacagcaaaaacatcagctacctgaatattctccctttaacttgacaggtgttttgccccacctaccaggcacataaggcaattccagaaacacttcttagttctcaaasttatttcttggttgaatctgaaactgctgggtgttktttccaggttgcctcattctagttgcatttgatttctgcttactctttttccaaagccctttcctgtaacatggacttgctaaccttcatggattttgtcccactctttgttttaagagtctcttggcttctctaacttcctacctactcctgtgactgcagttctggctgggatgtccctgagctaattcagttaccctagcctagccttggctttccctggtcgtatcatttagttgcattttccagctttggttccaggcagtctttaaacaacagaaatgatcactcacgtctcat

SEQ ID NO: 41913 - DNA, 446 bp, Chicken  19866894278242_1
aaggggatttttttttcatgttttattttgtcttttatgctgtagtttatgcaagtcaaactagttggctgacatagcaagtatgaactatgagagtgtatctcctataatattcagatgaaagtcataattaatgcagactatgaaatttattttatacagactggaaaatgtattcatccagactacaggagctgaattagatatcataccttcagaaggtctgccatatatttgatagtgtagtctcagttcactctgaaattgtagctgtatttaatcctcaggtatatacatttsagtaaggatagaactgatacaaaaatcccttctagaaacagttcttagtggttacctcagaatgctaaagaaaaatatcaaaataaccacatgaaagtacaactttattactgtaccagaattattgcagctatatgtcagcaaag

SEQ ID NO: 41914 - DNA, 600 bp, Chicken  19866894278246_1
ttaggctagatcccgtcccttagaggcctattgacttcagagggtgttttatatggcagtagctcagtcgtattgtgctttccttattcactgcaaaacctttttgagataactgaggaataataacttagtaatgcttttgagaaatttgttaatttcagttaaaaattagaaaatttgaatgatagtggtatgtttgtgctgtggcctcattctagcaattagatttgtgcagaaggtttgcacatccctctgcatccagttgcaggactgggacctattcatgtatttgaccataawgctgaaaatwtattttttctctttagagagactgttattttacttgaatttaagccatactgggctaccttaacatatcaaaattgacttaattctacattcttccagcctcctgttatagcagtgcgtctcaaagatttattagacacaaataaatattttcttttgctccatcaacaaaatgtacttaatgaggcttctataaggattatcaaaaatgcatctagattgtgttggcattaatattttatttttgctgtcaatatgcaacaaaagatgtcatcccaaattcacaacatg

SEQ ID NO: 41915 - DNA, 600 bp, Chicken  19866894278246_2
tcccgtcccttagaggcctattgacttcagagggtgttttatatggcagtagctcagtcgtattgtgctttccttattcactgcaaaacctttttgagataactgaggaataataacttagtaatgcttttgagaaatttgttaatttcagttaaaaattagaaaatttgaatgatagtggtatgtttgtgctgtggcctcattctagcaattagatttgtgcagaaggtttgcacatccctctgcatccagttgcaggactgggacctattcatgtatttgaccataawgctgaaaatwtattttttctctttagagagactgttattttacttgaatttaagccatactgggctaccttaacatatcaaaattgacttaattctacattcttccagcctcctgttatagcagtgcgtctcaaagatttattagacacaaataaatattttcttttgctccatcaacaaaatgtacttaatgaggcttctataaggattatcaaaaatgcatctagattgtgttggcattaatattttatttttgctgtcaatatgcaacaaaagatgtcatcccaaattcacaacatgattcagtact

SEQ ID NO: 41916 - DNA, 599 bp, Chicken  19866894278250_1
  misc_feature (1)..(39): n is any nucleotide
nnnnnnnnnnnnnnnnnnnnnnnnnnnnnnnnnnnnnnntcgttcctgctttcccctcccgatctaaggacgcgccttcagaaaagactcctctgggcatttattcccggggacttcgttgcacctttgtcggagcgacgctcgggagagcaacggaggagacaacaacaacaacaaaaaaaaccaccgatcctccctcctcccctaaaaaccaacaatgaaaccctacgtttctgccccaaaaatgccgcccaaggagctcccccgaccccgcacagcgtccctcggggacgggtccgyggcgcttcccaagggaaaggccagcgcgctgcccgccgctcaatgccscgcagcgttgcccggggccgaccgctgccgcccgggagcggagggcgccgcccgcagcgtctcggccttccgagagccgggggtatggagagacggcgcggagcttcgcaaggagccagtgggagaggactggcagtggggctcccaaagcgtgagggtcgcagtggcagtgaaatagctcgttgttcctccgtgggggtgaatggaagcctggytatggtcagtagggtgtaaaggatgacagattcgag

SEQ ID NO: 41917 - DNA, 600 bp, Chicken  19866894278250_2
ctttcccctcccgatctaaggacgcgccttcagaaaagactcctctgggcatttattcccggggacttcgttgcacctttgtcggagcgacgctcgggagagcaacggaggagacaacaacaacaacaaaaaaaaccaccgatcctccctcctcccctaaaaaccaacaatgaaaccctacgtttctgccccaaaaatgccgcccaaggagctcccccgaccccgcacagcgtccctcggggacgggtccgyggcgcttcccaagggaaaggccagcgcgctgcccgccgctcaatgccscgcagcgttgcccggggccgaccgctgccgcccgggagcggagggcgccgcccgcagcgtctcggccttccgagagccgggggtatggagagacggcgcggagcttcgcaaggagccagtgggagaggactggcagtggggctcccaaagcgtgagggtcgcagtggcagtgaaatagctcgttgttcctccgtgggggtgaatggaagcctggytatggtcagtagggtgtaaaggatgacagattcgagcactggggagaacccctgtgtgagttgcattcagctgtattctttacag

SEQ ID NO: 41918 - DNA, 600 bp, Chicken  19866894278250_3
cccgaccccgcacagcgtccctcggggacgggtccgyggcgcttcccaagggaaaggccagcgcgctgcccgccgctcaatgccscgcagcgttgcccggggccgaccgctgccgcccgggagcggagggcgccgcccgcagcgtctcggccttccgagagccgggggtatggagagacggcgcggagcttcgcaaggagccagtgggagaggactggcagtggggctcccaaagcgtgagggtcgcagtggcagtgaaatagctcgttgttcctccgtgggggtgaatggaagcctggytatggtcagtagggtgtaaaggatgacagattcgagcactggggagaacccctgtgtgagttgcattcagctgtattctttacagataatgaaaagtgagaagtgaaaaatatattcacagaaatatgcgtgcatctatgtatgaaactgaaaacgtggtgaaaggctgtgctaatccgtgacgttgcacagacacaaggatacttttacatccagtcatgtaaactcaaatttcaagttcactatatgagctaataaaagggtttggaacaacagaaatacgtccaaatcaattatttg

SEQ ID NO: 41919 - DNA, 600 bp, Chicken  19866894278254_1
gttgtttcctctttgttcctgctgagtctgggctttgaattatccatagagatgaaaacttctgtccttcccatccctacatgtgttactccgttagctctgatctttcaaggagaattccagcaaaaaatgatatgcagatccgtgtggatttagcatctgtctatgttctttaagtctatgaaaatgttatctaacttctgtaaggagaaaggttcaagccctcagctagttggtgaacagctagattattatgctgctaaggagaacaataaaataaaactcccacttcaacactgwagatgttttaaacatactaattttctgctctacctggagcaaccattactatatctatcaaggacttgagatgctttcttttttattaaaaaaaaaaaatcatgttcctagcattgatcattttgctttaattgtagctttcatttaaacaacgtttctagtatcaaaccttcagaacatgatgcaagtgctctctaatgtcttaaaaactcacaaggcaaatatcaggaactagaaatatttgtgatagcatgtaatctaaaatatgaggaaaaatraagcttatgatttggaagggac

SEQ ID NO: 41920 - DNA, 600 bp, Chicken  19866894278254_2
ctccgttagctctgatctttcaaggagaattccagcaaaaaatgatatgcagatccgtgtggatttagcatctgtctatgttctttaagtctatgaaaatgttatctaacttctgtaaggagaaaggttcaagccctcagctagttggtgaacagctagattattatgctgctaaggagaacaataaaataaaactcccacttcaacactgwagatgttttaaacatactaattttctgctctacctggagcaaccattactatatctatcaaggacttgagatgctttcttttttattwaaaaaaaaaaatcatgttcctagcattgatcattttgctttaattgtagctttcatttaaacaacgtttctagtatcaaaccttcagaacatgatgcaagtgctctctaatgtcttaaaaactcacaaggcaaatatcaggaactagaaatatttgtgatagcatgtaatctaaaatatgaggaaaaatraagcttatgatttggaagggactttgtgcagtatttttaatgagtttttggcagtattgtatgtcactatctgcctttttgttgatttttctactgcagtagcctcgctt

SEQ ID NO: 41921 - DNA, 600 bp, Chicken  19866894278254_3
aaaactcccacttcaacactgwagatgttttaaacatactaattttctgctctacctggagcaaccattactatatctatcaaggacttgagatgctttcttttttattaaaaaaaaaaaatcatgttcctagcattgatcattttgctttaattgtagctttcatttaaacaacgtttctagtatcaaaccttcagaacatgatgcaagtgctctctaatgtcttaaaaactcacaaggcaaatatcaggaactagaaatatttgtgatagcatgtaatctaaaatatgaggaaaaatraagcttatgatttggaagggactttgtgcagtatttttaatgagtttttggcagtattgtatgtcactatctgcctttttgttgatttttctactgcagtagcctcgcttcatgttctttgctatattcagtatatggtgtgtaaagttcagaagctctctgggatctttgaactgtggaccctgtagatatgaaacaacacttttcataagaattgttacattgcaaacattgcattttattcagaaaattgcccagctgttaaatggagaactggagtttgaatacaaacaattttct

SEQ ID NO: 41922 - DNA, 599 bp, Chicken  19866894278256_1
  misc_feature (1)..(7): n is any nucleotide
nnnnnnntctggtttagcagaaattgtctcctactgagtttaaggtgctttatcaatctgaatatcattcctactgctggtaggaattatacctcttttgtcttagcaccattaccagccagagcaggatttgctagtaatatttatgtgtctatataaattgtctttctatataactgtaaataggattgcaatgacagtcaaatgattacttttcccgtgagtggtattttacatatgtctacttattgggtatgaacaaaccttttatttttagctgtacccacttggtgcacatayacccatgactttttaatggacataataaattgtaaatgggggaacatrtggtaaatgcagcttggatttgaatcacatcctactcttttttggtcctgcatttatcctttaaagctcttttggattgtttataatcatgttttgccagtgtctttttctaagaattattattaatattactactgtttgytcttctgtcctttttatggcttctttgatgaatttcattcttcctcataaatggtgaaaagttgtgcccttaccaaatggtcatactaraagtctttactgtgtaagag

SEQ ID NO: 41923 - DNA, 600 bp, Chicken  19866894278256_2
tttatcaatctgaatatcattcctactgctggtaggaattatacctcttttgtcttagcaccattaccagccagagcaggatttgctagtaatatttatgtgtctatataaattgtctttctatataactgtaaataggattgcaatgacagtcaaatgattacttttcccgtgagtggtattttacatatgtctacttattgggtatgaacaaaccttttatttttagctgtacccacttggtgcacatayacccatgactttttaatggacataataaattgtaaatgggggaacatrtggtaaatgcagcttggatttgaatcacatcctactcttttttggtcctgcatttatcctttaaagctcttttggattgtttataatcatgttttgccagtgtctttttctaagaattattattaatattactactgtttgytcttctgtcctttttatggcttctttgatgaatttcattcttcctcataaatggtgaaaagttgtgcccttaccaaatggtcatactaraagtctttactgtgtaagagwgaagcttatctttgtaaaaagcttagggacctacgtcctcttaagaga

SEQ ID NO: 41924 - DNA, 600 bp, Chicken  19866894278256_3
gcaatgacagtcaaatgattacttttcccgtgagtggtattttacatatgtctacttattgggtatgaacaaaccttttatttttagctgtacccacttggtgcacatayacccatgactttttaatggacataataaattgtaaatgggggaacatrtggtaaatgcagcttggatttgaatcacatcctactcttttttggtcctgcatttatcctttaaagctcttttggattgtttataatcatgttttgccagtgtctttttctaagaattattattaatattactactgtttgytcttctgtcctttttatggcttctttgatgaatttcattcttcctcataaatggtgaaaagttgtgcccttaccaaatggtcatactaraagtctttactgtgtaagagwgaagcttatctttgtaaaaagcttagggacctacgtcctcttaagagaaacagtagaggtaaatctattatatctgcctcagatctcagtagcgttgatcatttgaatcttgctcgtctttgccttttctttcagccaaaaagtgtgtctttagactacagctgtgactaggagtttgagcatccatgta

SEQ ID NO: 41925 - DNA, 600 bp, Chicken  19866894278256_4
gtacccacttggtgcacatayacccatgactttttaatggacataataaattgtaaatgggggaacatrtggtaaatgcagcttggatttgaatcacatcctactcttttttggtcctgcatttatcctttaaagctcttttggattgtttataatcatgttttgccagtgtctttttctaagaattattattaatattactactgtttgytcttctgtcctttttatggcttctttgatgaatttcattcttcctcataaatggtgaaaagttgtgcccttaccaaatggtcatactaraagtctttactgtgtaagagwgaagcttatctttgtaaaaagcttagggacctacgtcctcttaagagaaacagtagaggtaaatctattatatctgcctcagatctcagtagcgttgatcatttgaatcttgctcgtctttgccttttctttcagccaaaaagtgtgtctttagactacagctgtgactaggagtttgagcatccatgtacaacctctttgaatgcagttcttcattcttcattcttactttttgaacttccatccttgaggggatgagtatggataaggtcatgaaac

SEQ ID NO: 41926 - DNA, 600 bp, Chicken  19866894278256_5
acccatgactttttaatggacataataaattgtaaatgggggaacatrtggtaaatgcagcttggatttgaatcacatcctactcttttttggtcctgcatttatcctttaaagctcttttggattgtttataatcatgttttgccagtgtctttttctaagaattattattaatattactactgtttgytcttctgtcctttttatggcttctttgatgaatttcattcttcctcataaatggtgaaaagttgtgcccttaccaaatggtcatactaraagtctttactgtgtaagagwgaagcttatctttgtaaaaagcttagggacctacgtcctcttaagagaaacagtagaggtaaatctattatatctgcctcagatctcagtagcgttgatcatttgaatcttgctcgtctttgccttttctttcagccaaaaagtgtgtctttagactacagctgtgactaggagtttgagcatccatgtacaacctctttgaatgcagttcttcattcttcattcttactttttgaacttccatccttgaggggatgagtatggataaggtcatgaaacctactattgtatttccttctg

SEQ ID NO: 41927 - DNA, 600 bp, Chicken  19866894278261_1
aacagttcagaggcaggagaggaggtagatcagtttgggcataccgtaaggtttagatgtgttacatttcacatgtggaagatgtgaaaccatatttctgataactttaatctagctctctcagataccaacagaggcagcgttcgaccaagtggaactgggttaactcagtgggtaacctgataattatttggattcctaacttacatgctgtatttgccctgctattactacccttcccagctgtgaccttcacacatctcagtcacacttcttgataaccttggaaatggactcttygctgctatcctcacttaagttaaaactgagactcaccatgaagtttgctgctgacttttaactgagtctggaggagcccyggcttgttttctattttcttttagtatgacacagacgtggctttatcttcagtgtagttctggctcgagtggatatgtttttgatgccaaaaagtgcaaaacaaaatacaggaggcagaaataaatattaagaatgagatcagtgaagctggtgggaggatgacagaaaacagccgtgagcagaagcatggaaggttctgaatggatatacactttttac

SEQ ID NO: 41928 - DNA, 600 bp, Chicken  19866894278261_2
gatgtgaaaccatatttctgataactttaatctagctctctcagataccaacagaggcagcgttcgaccaagtggaactgggttaactcagtgggtaacctgataattatttggattcctaacttacatgctgtatttgccctgctattactacccttcccagctgtgaccttcacacatctcagtcacacttcttgataaccttggaaatggactcttygctgctatcctcacttaagttaaaactgagactcaccatgaagtttgctgctgacttttaactgagtctggaggagcccyggcttgttttctattttcttttagtatgacacagacgtggctttatcttcagtgtagttctggctcgagtggatatgtttttgatgccaaaaagtgcaaaacaaaatacaggaggcagaaataaatattaagaatgagatcagtgaagctggtgggaggatgacagaaaacagccgtgagcagaagcatggaaggttctgaatggatatacactttttacccatgaggacagtacagaggtagaaaaagcagcccagagaagctctgaggtctcaggctgtgctgtctgcatcctgggag

SEQ ID NO: 41929 - DNA, 600 bp, Chicken  19866894278267_1
tctggtccttagacagaagcaagcagacgtgcttagctgggaatagaattttctgtgtggagtcacctatgcccaattcaattaaagcttgatctttaagtttgtaaattggaaatcctatgatattcaccatccgcaccgcttgatattctgacactgtgtgttttatgtatatatttgtacactgtgtttaagaaatagataaaaattgccctgctctttatttgtaacctttgtgctcagtcttgttgaaccatcctaagttctgtccttaaaaatgtttgtaaaaatgtcattatygtgatattctgtttgtttctatttttcaagcagatttatggcactcctttgcaaatgtatcaatttgtcagataaaggttaaaaattagatacrttttattcatgttaaagtcacaccctgcttgtttaaaggcagctttgacttggagttgcaagcctgaggatattgatttgaattatgcatgactgtctggtatgcagttccattagccttctgtgtggataatgtaaacatgttcagaattttaagtatcctatatgagcggcaggttaaaaatagagctgataagagcacatgta

SEQ ID NO: 41930 - DNA, 600 bp, Chicken  19866894278267_2
tttaagtttgtaaattggaaatcctatgatattcaccatccgcaccgcttgatattctgacactgtgtgttttatgtatatatttgtacactgtgtttaagaaatagataaaaattgccctgctctttatttgtaacctttgtgctcagtcttgttgaaccatcctaagttctgtccttaaaaatgtttgtaaaaatgtcattatygtgatattctgtttgtttctatttttcaagcagatttatggcactcctttgcaaatgtatcaatttgtcagataaaggttaaaaattagatacrttttattcatgttaaagtcacaccctgcttgtttaaaggcagctttgacttggagttgcaagcctgaggatattgatttgaattatgcatgactgtctggtatgcagttccattagccttctgtgtggataatgtaaacatgttcagaattttaagtatcctatatgagcggcaggttaaaaatagagctgataagagcacatgtatttggaaaatccaaatgttggagaatgaaactacaaaaggtttgtctcctcaagaggctgacttcaggtgtggctttcttttcttggaaaatac

SEQ ID NO: 41931 - DNA, 600 bp, Chicken  19866894278275_1
taagttatgtgaacaaatgagaagtttcgagaaaaaaagtagttcaaggaaaaacagaaatactttaagacatttaaaattacagtgtctttctgagataatttcaaaaatgagttcttgctgaatattttaatgtattttataattataattgtagtttaagaagggtcaaaaatctgtggcttacaacctgatattttgtttctgcattttaaaatgccttatatatgagtttaatatcaaacaataatattttgtacttagagattgatggataattgatttcatagcttaaaaagrtttttttttatatatataaattaatacaagcattgtggtggtggtgataactatagaaattcttcacaaaagacaaaattaatggaaatagttcttttaagtacagcctccatcattagtttaaattagaagccaaaacagatattggaaggtagttgaaaatttaccttggaaaaatcattcgtctgtttagattgcctgatcagcttacagaaaaataaatcttggcatctaaattaataattttggggcttacttgttacctgtgagacatggatctgattaaactctgattgcaaa

SEQ ID NO: 41932 - DNA, 599 bp, Chicken  19866894278282_1
  misc_feature (1)..(61): n is any nucleotide
nnnnnnnnnnnnnnnnnnnnnnnnnnnnnnnnnnnnnnnnnnnnnnnnnnnnnnnnnnnnntaaaacaaaaaaacacaaaagcaaaaattggcatttgcacaaatccaaaaggactccttcaaggtctgatgagagcagtatgctctggtctacaccaaactcccatctcaagaactgctgctgagacctctccctcaacaactgcaactcaactttaagatgacagtgttgctccccattctgcaccagccatgcaatccccagatgtgtcccagctgtcactgccatcactgctcaaygtgccaaggctctgcttgarcagaacacccgtcagtcccagccccagtttctacgagcaccttttgcaaygctttactttcatgacctatagsagtacttsrgtgtgaagaaacctacattcattaaaacttgtatttttacatgtgtgtgccatggaatccagaaaatcaacatgaaaacatcacttctgagcaaccaccagccaagctacagctacaaaaaaaaatcagctggagttgagtttaacaaaacccaccaaagcaawacagaaacagttaaaccacgtccwtttcttctt

SEQ ID NO: 41933 - DNA, 600 bp, Chicken  19866894278282_10
tgtgtgccatggaatccagaaaatcaacatgaaaacatcacttctgagcaaccaccagccaagctacagctacaaaaaaaaatcagctggagttgagtttaacaaaacccaccaaagcaawacagaaacagttaaaccacgtccwtttcttctttttgcctactttaaggtcttcaataccatcttgaatacaaaaggaagccacttccacttctactacatgtcaccaaagagcccgcacacacctcctgtttttcctaccgtgctttctcagcagttacccccagsaaaacatcagcwtcaacttccaggcacgctttgcagcygtcagtttttaatgaatgttttgtcttttgacagcttccagctaatggtggtttaacagcaccttcagaacgatggtacacaagcaatgatcagagctgtcagaggcaaaaggcattcgtaagtgcagcttgtcctcagtttcctattaggaattgccagagatttaccagagctggctggatgctgattccatgctcattttacactgtgctgcttagctgcatgcagttgactcacagagcaaagatgcccagttttgctatctccagcact

SEQ ID NO: 41934 - DNA, 600 bp, Chicken  19866894278282_11
acatgaaaacatcacttctgagcaaccaccagccaagctacagctacaaaaaaaaatcagctggagttgagtttaacaaaacccaccaaagcaawacagaaacagttaaaccacgtccwtttcttctttttgcctactttaaggtcttcaataccatcttgaatacaaaaggaagccacttccacttctactacatgtcaccaaagagcccgcacacacctcctgtttttcctaccgtgctttctcagcagttacccccagsaaaacatcagcwtcaacttccaggcacgctttgcagcygtcagtttttaatgaatgttttgtcttttgacagcttccagctaatggtggtttaacagcaccttcagaacgatggtacacaagcaatgatcagagctgtcagaggcaaaaggcattcgtaagtgcagcttgtcctcagtttcctattaggaattgccagagatttaccagagctggctggatgctgattccatgctcattttacactgtgctgcttagctgcatgcagttgactcacagagcaaagatgcccagttttgctatctccagcacttatggaagcagagcagtatcatgcct

SEQ ID NO: 41935 - DNA, 600 bp, Chicken  19866894278282_12
atgatcagagctgtcagaggcaaaaggcattcgtaagtgcagcttgtcctcagtttcctattaggaattgccagagatttaccagagctggctggatgctgattccatgctcattttacactgtgctgcttagctgcatgcagttgactcacagagcaaagatgcccagttttgctatctccagcacttatggaagcagagcagtatcatgcctcccaactcacataatctgaagtgctgtcatcccagggagcccagcagagagctacctgtactgcctgccttcctaagaaacaaagsactcaaaaaataaacctgcataatttctcatgaagcratggtttttggtatcgtgtcaatgaattctcacctttcaaaaaaacctgcccgttccaagtataaatcattttgcatacaaagtagttacaggacgacaaaaataacttcacgtgtaacaacaatgagaacagcaacagttctgcccaggctcccctcctcattttagggtagggatcatttcctcactatctcactgacgaacactggctcagagatgattacccgattgctgtgtttttctttatcaaattgtaatctgaa

SEQ ID NO: 41936 - DNA, 600 bp, Chicken  19866894278282_13
tgcagcttgtcctcagtttcctattaggaattgccagagatttaccagagctggctggatgctgattccatgctcattttacactgtgctgcttagctgcatgcagttgactcacagagcaaagatgcccagttttgctatctccagcacttatggaagcagagcagtatcatgcctcccaactcacataatctgaagtgctgtcatcccagggagcccagcagagagctacctgtactgcctgccttcctaagaaacaaagsactcaaaaaataaacctgcataatttctcatgaagcratggtttttggtatcgtgtcaatgaattctcacctttcaaaaaaacctgcccgttccaagtataaatcattttgcatacaaagtagttacaggacgacaaaaataacttcacgtgtaacaacaatgagaacagcaacagttctgcccaggctcccctcctcattttagggtagggatcatttcctcactatctcactgacgaacactggctcagagatgattacccgattgctgtgtttttctttatcaaattgtaatctgaacaaatttgacttaccccttgaactggagaagtggatg

SEQ ID NO: 41937 - DNA, 599 bp, Chicken  19866894278282_2
  misc_feature (1)..(41): n is any nucleotide
nnnnnnnnnnnnnnnnnnnnnnnnnnnnnnnnnnnnnnnnntaaaacaaaaaaacacaaaagcaaaaattggcatttgcacaaatccaaaaggactccttcaaggtctgatgagagcagtatgctctggtctacaccaaactcccatctcaagaactgctgctgagacctctccctcaacaactgcaactcaactttaagatgacagtgttgctccccattctgcaccagccatgcaatccccagatgtgtcccagctgtcactgccatcactgctcaaygtgccaaggctctgcttgarcagaacacccgtcagtcccagccccagtttctacgagcaccttttgcaaygctttactttcatgacctatagsagtacttsrgtgtgaagaaacctacattcattaaaacttgtatttttacatgtgtgtgccatggaatccagaaaatcaacatgaaaacatcacttctgagcaaccaccagccaagctacagctacaaaaaaaaatcagctggagttgagtttaacaaaacccaccaaagcaawacagaaacagttaaaccacgtccwtttcttctttttgcctactttaaggtctt

SEQ ID NO: 41938 - DNA, 600 bp, Chicken  19866894278282_3
aaaacacaaaagcaaaaattggcatttgcacaaatccaaaaggactccttcaaggtctgatgagagcagtatgctctggtctacaccaaactcccatctcaagaactgctgctgagacctctccctcaacaactgcaactcaactttaagatgacagtgttgctccccattctgcaccagccatgcaatccccagatgtgtcccagctgtcactgccatcactgctcaaygtgccaaggctctgcttgarcagaacacccgtcagtcccagccccagtttctacgagcaccttttgcaaygctttactttcatgacctatagsagtacttsrgtgtgaagaaacctacattcattaaaacttgtatttttacatgtgtgtgccatggaatccagaaaatcaacatgaaaacatcacttctgagcaaccaccagccaagctacagctacaaaaaaaaatcagctggagttgagtttaacaaaacccaccaaagcaawacagaaacagttaaaccacgtccwtttcttctttttgcctactttaaggtcttcaataccatcttgaatacaaaaggaagccacttccacttctactacatgtc

SEQ ID NO: 41939 - DNA, 600 bp, Chicken  19866894278282_4
atttgcacaaatccaaaaggactccttcaaggtctgatgagagcagtatgctctggtctacaccaaactcccatctcaagaactgctgctgagacctctccctcaacaactgcaactcaactttaagatgacagtgttgctccccattctgcaccagccatgcaatccccagatgtgtcccagctgtcactgccatcactgctcaaygtgccaaggctctgcttgarcagaacacccgtcagtcccagccccagtttctacgagcaccttttgcaaygctttactttcatgacctatagsagtacttsrgtgtgaagaaacctacattcattaaaacttgtatttttacatgtgtgtgccatggaatccagaaaatcaacatgaaaacatcacttctgagcaaccaccagccaagctacagctacaaaaaaaaatcagctggagttgagtttaacaaaacccaccaaagcaawacagaaacagttaaaccacgtccwtttcttctttttgcctactttaaggtcttcaataccatcttgaatacaaaaggaagccacttccacttctactacatgtcaccaaagagcccgcacacacctc

SEQ ID NO: 41940 - DNA, 600 bp, Chicken  19866894278282_5
aaatccaaaaggactccttcaaggtctgatgagagcagtatgctctggtctacaccaaactcccatctcaagaactgctgctgagacctctccctcaacaactgcaactcaactttaagatgacagtgttgctccccattctgcaccagccatgcaatccccagatgtgtcccagctgtcactgccatcactgctcaaygtgccaaggctctgcttgarcagaacacccgtcagtcccagccccagtttctacgagcaccttttgcaaygctttactttcatgacctatagsagtacttsrgtgtgaagaaacctacattcattaaaacttgtatttttacatgtgtgtgccatggaatccagaaaatcaacatgaaaacatcacttctgagcaaccaccagccaagctacagctacaaaaaaaaatcagctggagttgagtttaacaaaacccaccaaagcaawacagaaacagttaaaccacgtccwtttcttctttttgcctactttaaggtcttcaataccatcttgaatacaaaaggaagccacttccacttctactacatgtcaccaaagagcccgcacacacctcctgttttt

SEQ ID NO: 41941 - DNA, 600 bp, Chicken  19866894278282_6
aatccaaaaggactccttcaaggtctgatgagagcagtatgctctggtctacaccaaactcccatctcaagaactgctgctgagacctctccctcaacaactgcaactcaactttaagatgacagtgttgctccccattctgcaccagccatgcaatccccagatgtgtcccagctgtcactgccatcactgctcaaygtgccaaggctctgcttgarcagaacacccgtcagtcccagccccagtttctacgagcaccttttgcaaygctttactttcatgacctatagsagtacttsrgtgtgaagaaacctacattcattaaaacttgtatttttacatgtgtgtgccatggaatccagaaaatcaacatgaaaacatcacttctgagcaaccaccagccaagctacagctacaaaaaaaaatcagctggagttgagtttaacaaaacccaccaaagcaawacagaaacagttaaaccacgtccwtttcttctttttgcctactttaaggtcttcaataccatcttgaatacaaaaggaagccacttccacttctactacatgtcaccaaagagcccgcacacacctcctgtttttc

SEQ ID NO: 41942 - DNA, 600 bp, Chicken  19866894278282_7
tgtgtcccagctgtcactgccatcactgctcaaygtgccaaggctctgcttgarcagaacacccgtcagtcccagccccagtttctacgagcaccttttgcaaygctttactttcatgacctatagsagtacttsrgtgtgaagaaacctacattcattaaaacttgtatttttacatgtgtgtgccatggaatccagaaaatcaacatgaaaacatcacttctgagcaaccaccagccaagctacagctacaaaaaaaaatcagctggagttgagtttaacaaaacccaccaaagcaawacagaaacagttaaaccacgtccwtttcttctttttgcctactttaaggtcttcaataccatcttgaatacaaaaggaagccacttccacttctactacatgtcaccaaagagcccgcacacacctcctgtttttcctaccgtgctttctcagcagttacccccagsaaaacatcagcwtcaacttccaggcacgctttgcagcygtcagtttttaatgaatgttttgtcttttgacagcttccagctaatggtggtttaacagcaccttcagaacgatggtacacaagcaatgatcaga

SEQ ID NO: 41943 - DNA, 600 bp, Chicken  19866894278282_8
actgctcaaygtgccaaggctctgcttgarcagaacacccgtcagtcccagccccagtttctacgagcaccttttgcaaygctttactttcatgacctatagsagtacttsrgtgtgaagaaacctacattcattaaaacttgtatttttacatgtgtgtgccatggaatccagaaaatcaacatgaaaacatcacttctgagcaaccaccagccaagctacagctacaaaaaaaaatcagctggagttgagtttaacaaaacccaccaaagcaawacagaaacagttaaaccacgtccwtttcttctttttgcctactttaaggtcttcaataccatcttgaatacaaaaggaagccacttccacttctactacatgtcaccaaagagcccgcacacacctcctgtttttcctaccgtgctttctcagcagttacccccagsaaaacatcagcwtcaacttccaggcacgctttgcagcygtcagtttttaatgaatgttttgtcttttgacagcttccagctaatggtggtttaacagcaccttcagaacgatggtacacaagcaatgatcagagctgtcagaggcaaaaggcattcg

SEQ ID NO: 41944 - DNA, 600 bp, Chicken  19866894278282_9
tatttttacatgtgtgtgccatggaatccagaaaatcaacatgaaaacatcacttctgagcaaccaccagccaagctacagctacaaaaaaaaatcagctggagttgagtttaacaaaacccaccaaagcaawacagaaacagttaaaccacgtccwtttcttctttttgcctactttaaggtcttcaataccatcttgaatacaaaaggaagccacttccacttctactacatgtcaccaaagagcccgcacacacctcctgtttttcctaccgtgctttctcagcagttacccccagsaaaacatcagcwtcaacttccaggcacgctttgcagcygtcagtttttaatgaatgttttgtcttttgacagcttccagctaatggtggtttaacagcaccttcagaacgatggtacacaagcaatgatcagagctgtcagaggcaaaaggcattcgtaagtgcagcttgtcctcagtttcctattaggaattgccagagatttaccagagctggctggatgctgattccatgctcattttacactgtgctgcttagctgcatgcagttgactcacagagcaaagatgcccagttttgct

SEQ ID NO: 41945 - DNA, 600 bp, Chicken  19866894278284_1
ccgagtgtaatagcttcagtaggcctgttagaggtgcccgtgtgaaggctcaaacagtgggctgacagcagtcagtgttaggagctcttggtgggctgcgaccacttcaggaagattcttagcaggaaccaaaaaacccaattgaattacagggatgtcagactgaagagctactctggttttcttcctgaatcaagttcattcacggaagtttcctctttgcttttgagcagtgtactagttcagcatgccatgaagagttctatactttgtactgttagaattagggcagcagaatgkgtgagatgaggtgtcctgtatagttctgatttttgtctttctagttgctggtgctgctaaaacatggttgtagcaagtttttggagatgaacaaatcttctaatacttaacagtggtatcaactgagaaagagagaattattyttttgtggactgctccacttgcatcaattctgtgctaagtagtaaataagagaacttccttctgaaagaagtgtgtgtctgtagcagagctgcatttacaaggctggtgtagcaaaaatcgccaagttggcaatggaattttaataggtaacttcct

SEQ ID NO: 41946 - DNA, 600 bp, Chicken  19866894278284_2
gaattacagggatgtcagactgaagagctactctggttttcttcctgaatcaagttcattcacggaagtttcctctttgcttttgagcagtgtactagttcagcatgccatgaagagttctatactttgtactgttagaattagggcagcagaatgkgtgagatgaggtgtcctgtatagttctgatttttgtctttctagttgctggtgctgctaaaacatggttgtagcaagtttttggagatgaacaaatcttctaatacttaacagtggtatcaactgagaaagagagaattattyttttgtggactgctccacttgcatcaattctgtgctaagtagtaaataagagaacttccttctgaaagaagtgtgtgtctgtagcagagctgcatttacaaggctggtgtagcaaaaatcgccaagttggcaatggaattttaataggtaacttcctgggattatgttttgcccttttgctgggattatttccaagttatgtaacctgaaacctttaaaactgggtttataattcaaaacccttattaacaggatatggcatactcttttgttcctatctgaattaaggcccctgccata

SEQ ID NO: 41947 - DNA, 600 bp, Chicken  19866894278294_1
gatgtcagtcagaaagagaacagtgggactttcatctttgtcttgtaattgatgtctgcagggtttccaaggagtgacaggctcccggggcagcagtggagagaagggacctcccaggtgatgttgggccaacagtaagtaactgagcgtgggtctcagagaaggccaaggcaggaaatcattgcgtgtaagcaagctgctcccatggtagttcttcctcagcatctgaaggagagtttaaattcacactcacccttcacatggatgtgtaaatcctgaccttatatctgtggaatatcyttgttgatggtgttccagcaccttaagcacgaacagaaaacattcctatgagctcacagtacttttagtcattttcataaggtcaagggaagtacaagtgtgtgggaaacaaatcttgggctccacgtcccgctgatgtaacctgcatccccactgaccttctgctttctcctcctctccctagaccgtgacttttccttttgttttcctygcagggactaccaggtccaaaaggagaaagaggagagaaagtgagttttcctggtgctgtacgtcaagcactcgaaagagtggatgtgg

SEQ ID NO: 41948 - DNA, 600 bp, Chicken  19866894278294_2
ttcttcctcagcatctgaaggagagtttaaattcacactcacccttcacatggatgtgtaaatcctgaccttatatctgtggaatatcyttgttgatggtgttccagcaccttaagcacgaacagaaaacattcctatgagctcacagtacttttagtcattttcataaggtcaagggaagtacaagtgtgtgggaaacaaatcttgggctccacgtcccgctgatgtaacctgcatccccactgaccttctgctttctcctcctctccctagaccgtgacttttccttttgttttcctygcagggactaccaggtccaaaaggagaaagaggagagaaagtgagttttcctggtgctgtacgtcaagcactcgaaagagtggatgtggtaatctgcttggcaagctatgcttacatgtgaagacctttacagagcagaataacataatgtaccaagggctcgttgctttctgttcacctgcactggctgttctgacgggtgtgaataatgagctgcttagtaccaattgtagtagcaaagaagaaaagccaattgaaaatccatcctttgctgagaagtcaaaaccaaaaccactcagt

SEQ ID NO: 41949 - DNA, 600 bp, Chicken  19866894278294_3
gtccctgcgttactaaaactttccaaagaaaaacctcagatgtcatttattttgagtttaataaggataagaatcaatattcataaaagattgagacaaagataggatattgtaatatctgattgcgttaaatgttttacatatcacagaatattgagttatgcactgcctatctgttttgatgaaatttgagagggaaatttactctcctttttttttggtagcttcagtaattatatcaattcagtctaggctttttgatgtgtgggagaggagcaattattgatgcttcccaattasagttttatggtgttggagctttgtaataaataaatcaagaaaatgcatttcatagcaattaatgtctcagtaacacaagctgacagaaggaaagggcagaaagctatcctgcattgtgatattgatcctttctacaagatatcaatgaagacrtgaatacttccttctctaaaacagaattgtaatgcttcactttagggggaaccacagtccttggccacaatttaccagctcgttagccaggcttgtgagaggatgatccagagtgagtataaccaccctgagcttgttttgatgctt

SEQ ID NO: 41950 - DNA, 600 bp, Chicken  19866894278294_4
ttgagttatgcactgcctatctgttttgatgaaatttgagagggaaatttactctcctttttttttggtagcttcagtaattatatcaattcagtctaggctttttgatgtgtgggagaggagcaattattgatgcttcccaattasagttttatggtgttggagctttgtaataaataaatcaagaaaatgcatttcatagcaattaatgtctcagtaacacaagctgacagaaggaaagggcagaaagctatcctgcattgtgatattgatcctttctacaagatatcaatgaagacrtgaatacttccttctctaaaacagaattgtaatgcttcactttagggggaaccacagtccttggccacaatttaccagctcgttagccaggcttgtgagaggatgatccagagtgagtataaccaccctgagcttgttttgatgcttctccagcagcagtggacaaaagcacgggggaagatggcatgaagctgtagtgagccagggatcccctctgtcctgtgcaatgcgtgtcccaccacattgtcccgtccattggtttcattgggtggttttagcacagagacttttgtgcccttg

SEQ ID NO: 41951 - DNA, 600 bp, Chicken  19866894278294_5
ggagatagaaactcttcaaaaattcagctcatggaacacaagagtttttgagtaatctgttaggatttggtgtgctcctccatcctgatccttttcacttgaactcaagaggaagtttaccactgactgtgaagtcacaaaaacagtgactccaaggtagatcccagagttaatgtgttttctatgttgacacacaggtgggctttcttgtaaccagctagggaagctaggtacttttaattccaaacagaagacctctagttaccaagattcagaagagtccaaacttcttccccaaamtaaagaaacagtactcagagaatgatttgtcatgtaggatggggaaagtatagaagtgttacaacgaagctgtggatgtgctgtggcttacagcttcttctttaggcccaccaggagaagttgtgctggggaaaccaggcccaaagggctaccctgggaacaccggtcctcaaggttttcctggtgtcagaggacagcctgggcagcccggatactcagggggctgtgatgtctctggatgctatgggccaggtagaagaggtaagtcctgataatttaaatgcagaagttatgatttta

SEQ ID NO: 41952 - DNA, 599 bp, Chicken  19866894278299_1
  misc_feature (1)..(96): n is any nucleotide
nnnnnnnnnnnnnnnnnnnnnnnnnnnnnnnnnnnnnnnnnnnnnnnnnnnnnnnnnnnnnnnnnnnnnnnnnnnnnnnnnnnnnnnnnnnnnnnntgttggcaggagcctgacttggcttgaacaagcgcttgataagatccatgaagctaagtgaggattactgctctataagaaagtgttgagcactaagtatgctccgctttctgccatctaaatcataccaattctctaagcgtcactcataacgcatctggcgccaaccatttccatctacttataggcgatgctaaatgagaygctgctgtaattttgctgagccagacagagataatacccaaggaaacagttcaggtttgtaaaaaagaaatcatggtgtaggttgctaagygataaacattcactaagcccaactacttacacaaaaggaagtgattaattcaggacattctttacatgtcacctctacaatttccatctgtagcccattatgtacctttrtctcacagcctgctctctttatttgttttaccaccaatcttaatctgcagggtttttcaatattacccatctaacacacccagccctctgcttgctgc

SEQ ID NO: 41953 - DNA, 599 bp, Chicken  19866894278299_2
  misc_feature (1)..(5): n is any nucleotide
nnnnntgttggcaggagcctgacttggcttgaacaagcgcttgataagatccatgaagctaagtgaggattactgctctataagaaagtgttgagcactaagtatgctccgctttctgccatctaaatcataccaattctctaagcgtcactcataacgcatctggcgccaaccatttccatctacttataggcgatgctaaatgagaygctgctgtaattttgctgagccagacagagataatacccaaggaaacagttcaggtttgtaaaaaagaaatcatggtgtaggttgctaagygataaacattcactaagcccaactacttacacaaaaggaagtgattaattcaggacattctttacatgtcacctctacaatttccatctgtagcccattatgtacctttrtctcacagcctgctctctttatttgttttaccaccaatcttaatctgcagggtttttcaatattacccatctaacacacccagccctctgcttgctgcagccaccctcagtccaaggagtgatgcccatgggcccactgtgcttgttttggggcatgttggcactttgacaccaaagaaatgttctgag

SEQ ID NO: 41954 - DNA, 600 bp, Chicken  19866894278299_3
gctttctgccatctaaatcataccaattctctaagcgtcactcataacgcatctggcgccaaccatttccatctacttataggcgatgctaaatgagaygctgctgtaattttgctgagccagacagagataatacccaaggaaacagttcaggtttgtaaaaaagaaatcatggtgtaggttgctaagygataaacattcactaagcccaactacttacacaaaaggaagtgattaattcaggacattctttacatgtcacctctacaatttccatctgtagcccattatgtacctttrtctcacagcctgctctctttatttgttttaccaccaatcttaatctgcagggtttttcaatattacccatctaacacacccagccctctgcttgctgcagccaccctcagtccaaggagtgatgcccatgggcccactgtgcttgttttggggcatgttggcactttgacaccaaagaaatgttctgaggaacagtttcagtaccaggtcaatccagcacccatggctgagccatgtctctgccaccacccatgcaggaactggtggtgcaatttcttgctcctgcacacagggtatttg

SEQ ID NO: 41955 - DNA, 600 bp, Chicken  19866894278301_1
gtttgatttggtttttgtattttttccaactaacctgtgggaccctgctgttctttctctgaaaaatgcctgcttcctgggaggaggttggtttaattttcttacacaagtctctccgtgaataatttagcttgtaaatgtttcagaatgagaaaatacacacttatctcctcttggataattgtttcttattaatggtaactgttagctctgctataatagggtttattcaattttcctttcatgacagaactctaatgtgatagagaatatactatttagctgaaggtttgcagcatyttrctatagcttcattaagagttggtggtttgaagatgactactgtgtatttaaaaaaaatcacaaagcctttttatcaaacgtagtgaagtgagttgtggtatcgtgattgtgcgttctggatatggagcaaactctgagtgaaccgatagaaactttggctcagatttgtattgtggtttatgaggaataaaagagatgctgttcctgaaggaaatttcccatccagctcttttagccagcactgatgatgtcagtggtatgctgcagttcttcagaggaaactggagatgtttcacg

SEQ ID NO: 41956 - DNA, 600 bp, Chicken  19866894278301_2
tgatttggtttttgtattttttccaactaacctgtgggaccctgctgttctttctctgaaaaatgcctgcttcctgggaggaggttggtttaattttcttacacaagtctctccgtgaataatttagcttgtaaatgtttcagaatgagaaaatacacacttatctcctcttggataattgtttcttattaatggtaactgttagctctgctataatagggtttattcaattttcctttcatgacagaactctaatgtgatagagaatatactatttagctgaaggtttgcagcatyttrctatagcttcattaagagttggtggtttgaagatgactactgtgtatttaaaaaaaatcacaaagcctttttatcaaacgtagtgaagtgagttgtggtatcgtgattgtgcgttctggatatggagcaaactctgagtgaaccgatagaaactttggctcagatttgtattgtggtttatgaggaataaaagagatgctgttcctgaaggaaatttcccatccagctcttttagccagcactgatgatgtcagtggtatgctgcagttcttcagaggaaactggagatgtttcacgcat

SEQ ID NO: 41957 - DNA, 600 bp, Chicken  19866894278305_1
tttttctttttctcctaggagtgataaacagcaaaatggtaggtgccacagaattatatacaaaatatgatccacagcagattgctaagtaagtgtttgtatacatgagcaggcattaattaaaatggaaggcacagcttttctggagtgtacaagaccaaaaaggcaaggtgactgctcagttgttaatttaagaggttatggtaataagaacaagctacatccaacagaggaaaatgttatttttgaataggtaggtatgtggttaatagtacatctatccatgtgcttctaagatawaagtcattgtatgaatctcagactgttttcagtgaattgaatctctccatgtattcctgatttagggatatacagtacatgtagatttattacatgaagaattaaaacaggcttttcctaaactgtcaaattaagcttcagggaagtttggttttactatctgattttacaaagcactctgccttaaagtagccccagatgcacagttcatgttcatgcacctcatctcttcttcctactttatacgaggtgataatatcttttattcacaaagctgaaaaagatgtccttgaaggtacc

SEQ ID NO: 41958 - DNA, 599 bp, Chicken  19866894278308_1
  misc_feature (1)..(128): n is any nucleotide
nnnnnnnnnnnnnnnnnnnnnnnnnnnnnnnnnnnnnnnnnnnnnnnnnnnnnnnnnnnnnnnnnnnnnnnnnnnnnnnnnnnnnnnnnnnnnnnnnnnnnnnnnnnnnnnnnnnnnnnnnnnnnnnnagccttgtccttttgaaattatctttgcatcagtctctcaaatgctttgcattgggcacgtaagggatactggagcatccactccacgcagatctaaaatacaaaaatgtacagcttgttaaatcaactgaaaccaaacctttggtttcctcatttaatgtaaaaagggggraaaaagtaccaaaaagctacatccttatgaatttgtgatgtaaatcaatttagctagtagctccctcctccttcggaaggcagctatagactacagctagatttagattttgttaaaaaattactggttgcattatggaactatcatattctgttttctgtatctattttacttgagcaatgttgaatacatagaatatatgttttaagtcacaactgttgcactcactagctgagcagtgcagtagaagctactgagatgagatgaggtaggttatgctcactctcttattcctgctt

SEQ ID NO: 41959 - DNA, 600 bp, Chicken  19866894278310_1
gagttatatgagacaattacctaaaggtcatacatcctcagctttgaaaactctcttctcctcctgttacctaaatttacaccagtttggttctttctgaaatgtagataatctcccattcaggacacttggataagaaaattcacagtcagaacttactcttgtaccactgtcagtgccgtgcagacagccatccctcagggacatgacaccaacagcagctccttgttcagctggtgcactctgcctttcaccaagacagaagttctgcaagccacaaccagcctacaggctgccacytgaatccctcaatactacttatgtttgacttgaggcctctctttcagcctctctatcccaccccccaaaaaagtgtttttaatcacagtaagtttgtaagaaaatagcagtttaaaacaagattgcaaggyccctgctcactgtatgtttagtaatggatctctgagcactgacagaaacaaaagggtacctctgcactatgaagacaaacactcatgcacagatcctttatggcaaggagacgcttttatttagtagttggtttgtatatgaagtcagaaagatatgaaacaactctgt

SEQ ID NO: 41960 - DNA, 600 bp, Chicken  19866894278310_2
gataagaaaattcacagtcagaacttactcttgtaccactgtcagtgccgtgcagacagccatccctcagggacatgacaccaacagcagctccttgttcagctggtgcactctgcctttcaccaagacagaagttctgcaagccacaaccagcctacaggctgccacytgaatccctcaatactacttatgtttgacttgaggcctctctttcagcctctctatcccaccccccaaaaaagtgtttttaatcacagtaagtttgtaagaaaatagcagtttaaaacaagattgcaaggyccctgctcactgtatgtttagtaatggatctctgagcactgacagaaacaaaagggtacctctgcactatgaagacaaacactcatgcacagatcctttatggcaaggagacgcttttatttagtagttggtttgtatatgaagtcagaaagatatgaaacaactctgtttgcaaaaatgaccagagccatgcayrctgaaataaatactcatgacagcagcagtaaatgcacctccagaactcagttgaaattagaatatctatctccaagaggtaagcagcagaatggatctctgtca

SEQ ID NO: 41961 - DNA, 600 bp, Chicken  19866894278310_3
gacttgaggcctctctttcagcctctctatcccaccccccaaaaaagtgtttttaatcacagtaagtttgtaagaaaatagcagtttaaaacaagattgcaaggyccctgctcactgtatgtttagtaatggatctctgagcactgacagaaacaaaagggtacctctgcactatgaagacaaacactcatgcacagatcctttatggcaaggagacgcttttatttagtagttggtttgtatatgaagtcagaaagatatgaaacaactctgtttgcaaaaatgaccagagccatgcayrctgaaataaatactcatgacagcagcagtaaatgcacctccagaactcagttgaaattagaatatctatctccaagaggtaagcagcagaatggatctctgtcatatgaaggggaaaagcaattcaaagaaatatacatatgaaaagatttccatttgtagttgggctttggccaaactttttaaactctccagttcaatttgtacttcaatagcaagaactctctccattcgaagtacagcacaagcttgttattacactcacagactgagctatgtgttagcataattgctacaatt

SEQ ID NO: 41962 - DNA, 600 bp, Chicken  19866894278310_4
acttgaggcctctctttcagcctctctatcccaccccccaaaaaagtgtttttaatcacagtaagtttgtaagaaaatagcagtttaaaacaagattgcaaggyccctgctcactgtatgtttagtaatggatctctgagcactgacagaaacaaaagggtacctctgcactatgaagacaaacactcatgcacagatcctttatggcaaggagacgcttttatttagtagttggtttgtatatgaagtcagaaagatatgaaacaactctgtttgcaaaaatgaccagagccatgcayrctgaaataaatactcatgacagcagcagtaaatgcacctccagaactcagttgaaattagaatatctatctccaagaggtaagcagcagaatggatctctgtcatatgaaggggaaaagcaattcaaagaaatatacatatgaaaagatttccatttgtagttgggctttggccaaactttttaaactctccagttcaatttgtacttcaatagcaagaactctctccattcgaagtacagcacaagcttgttattacactcacagactgagctatgtgttagcataattgctacaattt

SEQ ID NO: 41963 - DNA, 600 bp, Chicken  19866894278321_1
acagggaagtgggatggtgtggagctgaggatctgctccctggcccaggcttgctgggcaccagcaggagctcactcatattctaccttttagtggcctcattttgttttcactataaagtctgcctaataaaagaggagagggatggctctctggcacctctctcttttccacttctgtgctgggtctccccaaagcagacatacaacatcttgtccatttgtccatttctgccttaaaaagagcattaggaagtccaagtttgtcgaacagcattcaggtccatgttatcgatggagrggcaattatttcagttgaacagattccatgattcaacatttcacgatgagtttttgcagctattayattggtttctacagctccctgacatttttgttagggcttaagcagggcttcaaaacataaaaaacgagttaatttgcttttcttgtcaaaacagccactaacatcaatcgtattccaagggaagaagactacacagcataaaaggcttatggaaaataacttagaaaacaaaagcagcagattagagttcccagtaattgtgtgaatatctgcaaaccagcattaacatcttaa

SEQ ID NO: 41964 - DNA, 600 bp, Chicken  19866894278321_2
ggagctcactcatattctaccttttagtggcctcattttgttttcactataaagtctgcctaataaaagaggagagggatggctctctggcacctctctcttttccacttctgtgctgggtctccccaaagcagacatacaacatcttgtccatttgtccatttctgccttaaaaagagcattaggaagtccaagtttgtcgaacagcattcaggtccatgttatcgatggagrggcaattatttcagttgaacagattccatgattcaacatttcacgatgagtttttgcagctattayattggtttctacagctccctgacatttttgttagggcttaagcagggcttcaaaacataaaaaacgagttaatttgcttttcttgtcaaaacagccactaacatcaatcgtattccaagggaagaagactacacagcataaaaggcttatggaaaataacttagaaaacaaaagcagcagattagagttcccagtaattgtgtgaatatctgcaaaccagcattaacatcttaagcaaagagaataaatgcacaccatgaaatcaactttgtcactccaaggggaatagtccactgtact

SEQ ID NO: 41965 - DNA, 600 bp, Chicken  19866894278335_1
tctattaggaaaattaatgtagctaagagtctaagggactcatactgaaatgtaagaacatctggaagactgtggtacagatgatttgtagacttgaatggaatactgttactaccctgacaataatattttccttccttggttagaagtgtaatttccctactacttttaaacaaacccagtttattactgaagattggccagtgacaagcatcactgaagattcatgttgacaatgatgaaaaaatagtgaaggcatctgaaaaacaacttagttacactacagtgttctatgcttcyttcttccctatatcagacacaggcatctcattttgttgcaacagattttgtcattttttcatctgtttgctttttcaaatttaatctaagctgttttcaatgcccagtccatgcgtatatatatayatatgtacatacgtatctatctatctatctatctgtctatctatctatatctatcaatctatctagctttagccacagtctgctttacgatggctcaactttaattttatttacctgtatggattttaaacacagcttgatttcttaatcactgacaaaaataaaattatgtaa

SEQ ID NO: 41966 - DNA, 600 bp, Chicken  19866894278335_2
tattttccttccttggttagaagtgtaatttccctactacttttaaacaaacccagtttattactgaagattggccagtgacaagcatcactgaagattcatgttgacaatgatgaaaaaatagtgaaggcatctgaaaaacaacttagttacactacagtgttctatgcttcyttcttccctatatcagacacaggcatctcattttgttgcaacagattttgtcattttttcatctgtttgctttttcaaatttaatctaagctgttttcaatgcccagtccatgcgtatatatatayatatgtacatacgtatctatctatctatctatctgtctatctatctatatctatcaatctatctagctttagccacagtctgctttacgatggctcaactttaattttatttacctgtatggattttaaacacagcttgatttcttaatcactgacaaaaataaaattatgtaaaccagatggtttcatatagctctagaattatgatttcagttttctttcactaaactactgcctttccagcaaacggatgcagaatagtgaagaatagacagaagagagctgttgttttggttactg

SEQ ID NO: 41967 - DNA, 600 bp, Chicken  19866894278340_1
ttgagaccttactaactcaataaaattggaagacttgtgttgcaggtgactgaattgcttctttaaaccgcatcaccagttcaaacagcatttttggaggaatgataagctactttccctgcagaggcttcagtatttatgttgagacagaaggctgtggagaacttgacttgtgaagccattcactcatggaataagggctgggggaactgtgacagaactgacttctggagcccttgcctcctgttttgccttcaaactaaaggtgcagccttgccctttctgcaaggttggctctgygctgtcaatggagcagccctgcactgggcagcaacgagcttgcttccagctgggaggtgatttcagcttctaatttgggatggtttaaatggaaggtacttcattatcaggctatttcaagagctgcctctccagagcccgcccagttttcctgtagctgtgctttgctgccagtcagactcatcagcaatcaaatacttaatttctggtgctgaagctgcagtggtgctggagacctggcagctggcgaggcaggtgtgggaagaagcgtcaggtctgtgaatgatttcattttggatt

SEQ ID NO: 41968 - DNA, 599 bp, Chicken  19866894278350_1
  misc_feature (1)..(79): n is any nucleotide
nnnnnnnnnnnnnnnnnnnnnnnnnnnnnnnnnnnnnnnnnnnnnnnnnnnnnnnnnnnnnnnnnnnnnnnnnnnnnnntctaagagggaacatctctgggctgagggcaacacctgagaaacagcaaattccaagaaagagacgctttgctgcttaataataacaacaaactcgaccagctgcacacaaggcacgatgcccactgcctgggaaggcaggaaatcacaccgggatatcactcaggagctcaaagtttgttaagctggtgcctaacagtaacagggcactcagtgctcacrtcctgccctgacggcacggcccccctttgcttttccctatctgcaaaggragatttgctgagaccatgragctcatttcagacctgccaagccgctcagtagctccagccagatgtaaccatcggacagcaaaaataagaatgaaattccattgaggacctgcactgctcaagggttggagcagagacactacccatgcaaagccaagccaggcttgtgtcatcacttaggtgtttgggmacccgagcaggaaacacagccacctgccctgacaattctcaaagcaaaacccagggctt

SEQ ID NO: 41969 - DNA, 599 bp, Chicken  19866894278350_2
  misc_feature (1)..(29): n is any nucleotide
nnnnnnnnnnnnnnnnnnnnnnnnnnnnntctaagagggaacatctctgggctgagggcaacacctgagaaacagcaaattccaagaaagagacgctttgctgcttaataataacaacaaactcgaccagctgcacacaaggcacgatgcccactgcctgggaaggcaggaaatcacaccgggatatcactcaggagctcaaagtttgttaagctggtgcctaacagtaacagggcactcagtgctcacrtcctgccctgacggcacggcccccctttgcttttccctatctgcaaaggragatttgctgagaccatgragctcatttcagacctgccaagccgctcagtagctccagccagatgtaaccatcggacagcaaaaataagaatgaaattccattgaggacctgcactgctcaagggttggagcagagacactacccatgcaaagccaagccaggcttgtgtcatcacttaggtgtttgggmacccgagcaggaaacacagccacctgccctgacaattctcaaagcaaaacccagggctttctctttcctttcggcggctcctcctcctgccagcagccagcagcagatg

SEQ ID NO: 41970 - DNA, 599 bp, Chicken  19866894278350_3
  misc_feature (1)..(10): n is any nucleotide
nnnnnnnnnntctaagagggaacatctctgggctgagggcaacacctgagaaacagcaaattccaagaaagagacgctttgctgcttaataataacaacaaactcgaccagctgcacacaaggcacgatgcccactgcctgggaaggcaggaaatcacaccgggatatcactcaggagctcaaagtttgttaagctggtgcctaacagtaacagggcactcagtgctcacrtcctgccctgacggcacggcccccctttgcttttccctatctgcaaaggragatttgctgagaccatgragctcatttcagacctgccaagccgctcagtagctccagccagatgtaaccatcggacagcaaaaataagaatgaaattccattgaggacctgcactgctcaagggttggagcagagacactacccatgcaaagccaagccaggcttgtgtcatcacttaggtgtttgggmacccgagcaggaaacacagccacctgccctgacaattctcaaagcaaaacccagggctttctctttcctttcggcggctcctcctcctgccagcagccagcagcagatggttggcacctggctgcact

SEQ ID NO: 41971 - DNA, 564 bp, Chicken  19866894278350_4
tcaggagctcaaagtttgttaagctggtgcctaacagtaacagggcactcagtgctcacrtcctgccctgacggcacggcccccctttgcttttccctatctgcaaaggragatttgctgagaccatgragctcatttcagacctgccaagccgctcagtagctccagccagatgtaaccatcggacagcaaaaataagaatgaaattccattgaggacctgcactgctcaagggttggagcagagacactacccatgcaaagccaagccaggcttgtgtcatcacttaggtgtttgggmacccgagcaggaaacacagccacctgccctgacaattctcaaagcaaaacccagggctttctctttcctttcggcggctcctcctcctgccagcagccagcagcagatggttggcacctggctgcacttgggcctggggaccttctgagtgacagcaggcttgatgtgcttcaaagagagtccctggggggtgcaggaggacacaaaggatctcacagagccatcagaggctgctcagtgcacgttgcttcctgcaggcaggag

SEQ ID NO: 41972 - DNA, 600 bp, Chicken  19866894278363_1
ctccaattttacccttgtacaacaactgaagggtagtaaaagtaggcctgagctgttcttctgggatttgtctcaggccccatttctgagtcagatattaacgtagtacaaacagtggttcgtgtcctcctggcagatggagagggaaacttgcccagttttggcatttggacacctactggtgggtggtggcagctctttggttgcatgtatatattttttcagcacgaaggtggtttgggtaaacttgttttgtgtccatcagtgctttttctccaagctctgacagtattaactcayaaatgttgcaaggaaacccatcctrtatgcctgtgttagaagggttttacccttgcttccctggtgtttcttgagttacattttaatgagaccaaattgacactgtatctctctgttagacatgataaaccatgtatgcatgcatgctgcctagcgttctgctttgttggaagcattaagaacatgctataccgatttactttgagacttgtcctaactgatacaaccatctgctttttcagtacccagaaaccaattgcagtcggtggcagcagcatgtaaagtcctgattgagttctc

SEQ ID NO: 41973 - DNA, 600 bp, Chicken  19866894278363_2
ctgaagggtagtaaaagtaggcctgagctgttcttctgggatttgtctcaggccccatttctgagtcagatattaacgtagtacaaacagtggttcgtgtcctcctggcagatggagagggaaacttgcccagttttggcatttggacacctactggtgggtggtggcagctctttggttgcatgtatatattttttcagcacgaaggtggtttgggtaaacttgttttgtgtccatcagtgctttttctccaagctctgacagtattaactcayaaatgttgcaaggaaacccatcctrtatgcctgtgttagaagggttttacccttgcttccctggtgtttcttgagttacattttaatgagaccaaattgacactgtatctctctgttagacatgataaaccatgtatgcatgcatgctgcctagcgttctgctttgttggaagcattaagaacatgctataccgatttactttgagacttgtcctaactgatacaaccatctgctttttcagtacccagaaaccaattgcagtcggtggcagcagcatgtaaagtcctgattgagttctcccttctgcgtctggagaacccagac

SEQ ID NO: 41974 - DNA, 528 bp, Chicken  19866894278370_1
agtatactgccacttaggaaaaatagacattctactaactcattctactcagtccattgatccataaactgttgtaagacttatataagggaggtagtccttcttagaagtattgactgttttgtatcctttagctttcatggagttttgattgatagtcttggctcaggtagacaggaacatgaacttcatgatgagtggagaattcagtggcatttcaacagaaccttccaactccaactcagattgctttttgtgtgaggtgtgtctcagaagcacactgcgaattgcgtgccaacrcactttgtctcaggtttctttaaatttgcaattaatacaacaatatgggagtatttaaatacactcaattaaaagttgcccatgtaaagcaaaaaaaaaaaaaaacaacaacaaatgaacaaactcaggcccttgtgaaatcacatccaatcaatcaataagacgtgatgcaagactgctcctatttaatatttgagggagtaatcagttttgaatctaaactgattt

SEQ ID NO: 41975 - DNA, 600 bp, Chicken  19866894278373_1
ctgtaaaattcttgtgcccctaataggttctcagaaaactcagaggacctgaggtcctatcagcagtgaggcacaaagtatgtgaaagaaaatgaatacactgagagagtctgatatgggaagctattggaaacaggaaagctctaaggtgattttcctcttaagatgtgcacctgcaaagtctgtattgttaactgacttttattgagttacagggttgtaacttttttgttgttctgaaattctgtttttttttttttttcattttattttgttttaataaataactcaaaatttatrcacaggaattcttgatataaaatgctgtgtaaaatacttcttgaaacagaagattaaaattgctcaacccacttyaccaagggaacaacattatcatcagttctacaggaaactgaaaaaacacattaagagacctgaaatttcttttcccataagtctagcaaatttgtatcgtgattttggaaatctttagtttataaattgagctgaataggttttttctttttcatcaacattacttgtataaaaaaatctttggcttttttattgcagtaaagtttcacatacctatttttataa

SEQ ID NO: 41976 - DNA, 559 bp, Chicken  19866894278373_2
aagtatgtgaaagaaaatgaatacactgagagagtctgatatgggaagctattggaaacaggaaagctctaaggtgattttcctcttaagatgtgcacctgcaaagtctgtattgttaactgacttttattgagttacagggttgtaacttttttgttgttctgaaattctgtttttttttttttttcattttattttgttttaataaataactcaaaatttatrcacaggaattcttgatataaaatgctgtgtaaaatacttcttgaaacagaagattaaaattgctcaacccacttyaccaagggaacaacattatcatcagttctacaggaaactgaaaaaacacattaagagacctgaaatttcttttcccataagtctagcaaatttgtatcgtgattttggaaatctttagtttataaattgagctgaataggttttttctttttcatcaacattacttgtataaaaaaatctttggcttttttattgcagtaaagtttcacatacctatttttataaagctcttggaattatcatgagaaaaccccaataa

SEQ ID NO: 41977 - DNA, 600 bp, Chicken  19866894278375_1
ggattcagccttcccccatcgcgcccaggacgatgagcctggcgcccgcaggcactttccatttcctgccctcgcagaggttgcttgtttagactgacagataaactctaaccctgctataataccctctccataaaattcgggctggtcaaacaaatacccgtatgtgaatgactccttatctttgctcagtgtactagagatagtgaaactggatgtttatctgctccgactgctttcccaagacctgcagcacctttaccaactgggctggcagctgggtgcagcctgggccacgcrggcagcacaggaacccacagcaactccctgctctctgcttcctggaaaaataccgtgcagcccttctctgctgcattacttgcttgaagaggagcagatctgagagaaggcacagtctgggcacaacctcccctttgtctgtgtccttggcacgtgatatgagccactctcatttggctgtggtgccaaatcttgtcaaatgagcacatcttgtgctcatttgggcacaagagttgtaataccctttatatgctgtattacaaaaagccccagtgtgtttctacggactagttgtttaga

SEQ ID NO: 41978 - DNA, 600 bp, Chicken  19866894278376_1
agcacagtggtttacgtgtctaacatgtgtgggtgtcccaggagcaccgtaatggggctgtgtgattctaacacccagcaatatccactgtctcatgatgctgtatcgctcggaggaggaaggcatttagcgctgcagttgtttcaccctgcagcatcgctctgtagcaaaaggaatgtgagcacatggaaggacccaaagaattgccacctcaacccttcatattgattctatgcttgttactcataagtgaagccacattttctgactgctgctctgcaccatgctgtgccaggccaygtgccttggaaacatcagaagagaggaaacatcctctaagatgcctgcaggtggatggggatcctgcagggctggcagtgctcccataccccacgcaccagttagtatggggctgggaaggcattgagattccaccctgccacttgtttacaaagaccagagccaacaacagaaaaggagaaataacagcatcatttttttttaatttcctctccaaacactttcatttcactgaaaacttttcttcccctgcaacctgcctttgtatttttttttccattacttgcttttctcttctct

SEQ ID NO: 41979 - DNA, 600 bp, Chicken  19866894278376_2
taacagcatcatttttttttaatttcctctccaaacactttcatttcactgaaaacttttcttcccctgcaacctgcctttgtatttttttttccattacttgcttttctcttctctgttgaaaacttctctagccagaggttatctccttgtacagaatataattacccgtgactgctgctgctgccttctgcagaagaaaagccaaaactttgctaatttgacactgtctgtacttctcactcctgaagcgggctcttccaaaagccaggaagttactgtttttttctatgtcagagrttcaaccctgaagcattgagccagatatcactgggatgagcttagtccagcagcacggggtcagcagcacagtgctacagtgccttggcayggggaagctcaacatggccatgctatggggatgggtggcagtgattcagtcttaatagggactattgccggaacaagtaaaagaaaataaagatatggaggcaaagaactggggaaaaaaaaatatctaggatgtgaattctaatagtaatggttattttgcagtaacagagttagccatattaggaatgctttcacatggttggattt

SEQ ID NO: 41980 - DNA, 600 bp, Chicken  19866894278376_3
ttccattacttgcttttctcttctctgttgaaaacttctctagccagaggttatctccttgtacagaatataattacccgtgactgctgctgctgccttctgcagaagaaaagccaaaactttgctaatttgacactgtctgtacttctcactcctgaagcgggctcttccaaaagccaggaagttactgtttttttctatgtcagagrttcaaccctgaagcattgagccagatatcactgggatgagcttagtccagcagcacggggtcagcagcacagtgctacagtgccttggcayggggaagctcaacatggccatgctatggggatgggtggcagtgattcagtcttaatagggactattgccggaacaagtaaaagaaaataaagatatggaggcaaagaactggggaaaaaaaaatatctaggatgtgaattctaatagtaatggttattttgcagtaacagagttagccatattaggaatgctttcacatggttggatttaatccacttccacagtggttaaactgaagtcacatccagatcaaatgtgtttacacagcgacttaattccattaatgtctaacaactaatg

SEQ ID NO: 41981 - DNA, 599 bp, Chicken  19866894278381_1
  misc_feature (1)..(167): n is any nucleotide
nnnnnnnnnnnnnnnnnnnnnnnnnnnnnnnnnnnnnnnnnnnnnnnnnnnnnnnnnnnnnnnnnnnnnnnnnnnnnnnnnnnnnnnnnnnnnnnnnnnnnnnnnnnnnnnnnnnnnnnnnnnnnnnnnnnnnnnnnnnnnnnnnnnnnnnnnnnnnnnnnnnnnnncacagaaaggtgcaaaggcacaaagtattttccactgccagcagaaaaggcacaaattgggtctgtgcaggtgtgtgctgtgctgaaacaggagccaggtctggttcaggtgctgccactggggtttgttcakgttragtacaccggtgtatccagcgagtggccaaaaaatgacctgatcyatccaatccctttgcaaaggggattaaggtcatgctttaaatgagcatgttaaaactcgagagggcaggaggcacrggtaaatggtgagcagtctgacactcaggggcaagggatgctgacctccttggggtagagggcataaaagaacagtggttttgcagtgtggtacaaatgatcacagtgctgcagctgcccaaaatgggtggcaaaagggaaaggcagagtttcagggcaggttgtgagcggccc

SEQ ID NO: 41982 - DNA, 599 bp, Chicken  19866894278381_2
  misc_feature (1)..(163): n is any nucleotide
nnnnnnnnnnnnnnnnnnnnnnnnnnnnnnnnnnnnnnnnnnnnnnnnnnnnnnnnnnnnnnnnnnnnnnnnnnnnnnnnnnnnnnnnnnnnnnnnnnnnnnnnnnnnnnnnnnnnnnnnnnnnnnnnnnnnnnnnnnnnnnnnnnnnnnnnnnnnnnnnnnncacagaaaggtgcaaaggcacaaagtattttccactgccagcagaaaaggcacaaattgggtctgtgcaggtgtgtgctgtgctgaaacaggagccaggtctggttcaggtgctgccactggggtttgttcakgttragtacaccggtgtatccagcgagtggccaaaaaatgacctgatcyatccaatccctttgcaaaggggattaaggtcatgctttaaatgagcatgttaaaactcgagagggcaggaggcacrggtaaatggtgagcagtctgacactcaggggcaagggatgctgacctccttggggtagagggcataaaagaacagtggttttgcagtgtggtacaaatgatcacagtgctgcagctgcccaaaatgggtggcaaaagggaaaggcagagtttcagggcaggttgtgagcggccccgct

SEQ ID NO: 41983 - DNA, 599 bp, Chicken  19866894278381_3
  misc_feature (1)..(118): n is any nucleotide
nnnnnnnnnnnnnnnnnnnnnnnnnnnnnnnnnnnnnnnnnnnnnnnnnnnnnnnnnnnnnnnnnnnnnnnnnnnnnnnnnnnnnnnnnnnnnnnnnnnnnnnnnnnnnnnnnnnnnncacagaaaggtgcaaaggcacaaagtattttccactgccagcagaaaaggcacaaattgggtctgtgcaggtgtgtgctgtgctgaaacaggagccaggtctggttcaggtgctgccactggggtttgttcakgttragtacaccggtgtatccagcgagtggccaaaaaatgacctgatcyatccaatccctttgcaaaggggattaaggtcatgctttaaatgagcatgttaaaactcgagagggcaggaggcacrggtaaatggtgagcagtctgacactcaggggcaagggatgctgacctccttggggtagagggcataaaagaacagtggttttgcagtgtggtacaaatgatcacagtgctgcagctgcccaaaatgggtggcaaaagggaaaggcagagtttcagggcaggttgtgagcggccccgctgcaagctgctggtatgcggtattcagagctgctgaaacacaggct

SEQ ID NO: 41984 - DNA, 599 bp, Chicken  19866894278381_4
  misc_feature (1)..(42): n is any nucleotide
nnnnnnnnnnnnnnnnnnnnnnnnnnnnnnnnnnnnnnnnnncacagaaaggtgcaaaggcacaaagtattttccactgccagcagaaaaggcacaaattgggtctgtgcaggtgtgtgctgtgctgaaacaggagccaggtctggttcaggtgctgccactggggtttgttcakgttragtacaccggtgtatccagcgagtggccaaaaaatgacctgatcyatccaatccctttgcaaaggggattaaggtcatgctttaaatgagcatgttaaaactcgagagggcaggaggcacrggtaaatggtgagcagtctgacactcaggggcaagggatgctgacctccttggggtagagggcataaaagaacagtggttttgcagtgtggtacaaatgatcacagtgctgcagctgcccaaaatgggtggcaaaagggaaaggcagagtttcagggcaggttgtgagcggccccgctgcaagctgctggtatgcggtattcagagctgctgaaacacaggctgtgagctgctttctccaacacattggtgttatcgcccataatcctggatatgttcttgtaaartagaatttctgct

SEQ ID NO: 41985 - DNA, 600 bp, Chicken  19866894278381_5
gggcaggaggcacrggtaaatggtgagcagtctgacactcaggggcaagggatgctgacctccttggggtagagggcataaaagaacagtggttttgcagtgtggtacaaatgatcacagtgctgcagctgcccaaaatgggtggcaaaagggaaaggcagagtttcagggcaggttgtgagcggccccgctgcaagctgctggtatgcggtattcagagctgctgaaacacaggctgtgagctgctttctccaacacattggtgttatcgcccataatcctggatatgttcttgtaaartagaatttctgcttttgttgttccctttgcaggtgcatgtctgtggatggaacccaagtgctcctgccccgtgctagaatcacacctgcagatcaacagctccttcctaaggaaataaagccctaagctggaaagagttcatggagcaaaggtaccaaagcatagcagctaaaacgcatctccccccgttgcacagcacgccctctctgctctctgtctgctgtgttttgagaggaaaggagaggatgcaggaaacaggacgtgaaggctgaaaaccaaaaatagatgggaagcggggaa

SEQ ID NO: 41986 - DNA, 600 bp, Chicken  19866894278383_1
caccactggagagcagctagtccaaccatgatgctaaaataaagggtcagctaaagcaggttgccatgtccagttgggttttgaacattttcaaggatggagactccacaaatctctggacaacctatattagtgttaggtcatccttagagtaacaatgctttttctcatgtttaaacatgaacttttgtatttcagtctgtgcctattgccttgcatcctgtcactggataactctgagaatgatctatttccaccttctttatgagcctctattggatatctatgcacactgataakatttatcccaaagacttctcttccctatcctaaacagttccagctctgtcaacctctgttcaaatgtcagatgttccagtcctttaatcatcttcatagccctttactagacttgatccagcatgtccttgtcactcctatgctgaggaacctagaactggacacatcattctaaaagtggtttcaccagggctgggtgcaagggaagaactgtcctccttgaacttctggtgatgcccttcctaatgcaatccaaggtactcttgcctctctttgctatgaggacacgttactggcttg

SEQ ID NO: 41987 - DNA, 583 bp, Chicken  19866894278389_1
gtcgcagactcacagtagtcttttatagagtttaacttattggggggaggggggtaacggcgcttcagcttttgttgaggaaaacgtgggacagtcccaggaaaaccatttgtatccagaacagattacaaatcctcatagagaaatgatgtaaagatgacttgtctgaagcagaagcacaagtgccttcagagggcagtacatgaattgagtttcttcgggagacatatgctcttgcccttcctgtgtcttgctatcaagatttaggttgaggcataaagaaagtcccaatagattatrttactgggattgtattggtcaacaaaaagtgaaatatttttcattgtattttatttgaaaaaaataatcaaatcattgccttctgcactattaacctagctcaacaaactcattgcttgaataaaaaacgtggctcagaactaagctagcatgtcttttactcatcttttggaagggttggtttcagtttttaaagcccatttctgtgtatgctcacttaaacacagttgtgcgatatctgcacacctttagtagtatttgtgagttaatgcttaaaacacaa

SEQ ID NO: 41988 - DNA, 600 bp, Chicken  19866894278401_1
tacactgaacaaagctgtgaattaaaggtctgcgatggcagccagcagttttttcagtggactactaatggaaattcccaaggccttatgcaatcttcaattggaaatatcaagccctacaatatgttaaaatcttgacctaggcaccctaaaagatttgtacaactctgaactgttacctgttatagttaaaagctgatgctcaatctactaccctaccataaacaggataaaacagacttgagaaataaggaataaaaggacagtgacatttttcatattaagtccattaacatataycaactagtatattctagcagtaatctatttaaagcattgcactgcagccaaaaaggccaggayaaatccacacttctgagtctayrctgccattcctacctttgtaggctggttagctaattcatcttagttacagatgcagaaaccagactgtcaaaaagtcttctaaagtggcaactgcttttctctgtaactactccctaatcccgtgcaacaatgaatgtgttgcaagacttgaatcttaaacagcaggaggcctgaaaaccatagcttcatagaattgtaaaactttacrggctt

SEQ ID NO: 41989 - DNA, 600 bp, Chicken  19866894278401_2
actaatggaaattcccaaggccttatgcaatcttcaattggaaatatcaagccctacaatatgttaaaatcttgacctaggcaccctaaaagatttgtacaactctgaactgttacctgttatagttaaaagctgatgctcaatctactaccctaccataaacaggataaaacagacttgagaaataaggaataaaaggacagtgacatttttcatattaagtccattaacatataycaactagtatattctagcagtaatctatttaaagcattgcactgcagccaaaaaggccaggayaaatccacacttctgagtctayrctgccattcctacctttgtaggctggttagctaattcatcttagttacagatgcagaaaccagactgtcaaaaagtcttctaaagtggcaactgcttttctctgtaactactccctaatcccgtgcaacaatgaatgtgttgcaagacttgaatcttaaacagcaggaggcctgaaaaccatagcttcatagaattgtaaaactttacrggcttggatatttttttcctttctcaaggtcaaaatattgggatcaatctagaattatactcatttgt

SEQ ID NO: 41990 - DNA, 600 bp, Chicken  19866894278401_3
ttatgcaatcttcaattggaaatatcaagccctacaatatgttaaaatcttgacctaggcaccctaaaagatttgtacaactctgaactgttacctgttatagttaaaagctgatgctcaatctactaccctaccataaacaggataaaacagacttgagaaataaggaataaaaggacagtgacatttttcatattaagtccattaacatataycaactagtatattctagcagtaatctatttaaagcattgcactgcagccaaaaaggccaggayaaatccacacttctgagtctayrctgccattcctacctttgtaggctggttagctaattcatcttagttacagatgcagaaaccagactgtcaaaaagtcttctaaagtggcaactgcttttctctgtaactactccctaatcccgtgcaacaatgaatgtgttgcaagacttgaatcttaaacagcaggaggcctgaaaaccatagcttcatagaattgtaaaactttacrggcttggatatttttttcctttctcaaggtcaaaatattgggatcaatctagaattatactcatttgtattatcacagaatcattacggt

SEQ ID NO: 41991 - DNA, 600 bp, Chicken  19866894278401_4
tatgcaatcttcaattggaaatatcaagccctacaatatgttaaaatcttgacctaggcaccctaaaagatttgtacaactctgaactgttacctgttatagttaaaagctgatgctcaatctactaccctaccataaacaggataaaacagacttgagaaataaggaataaaaggacagtgacatttttcatattaagtccattaacatataycaactagtatattctagcagtaatctatttaaagcattgcactgcagccaaaaaggccaggayaaatccacacttctgagtctayrctgccattcctacctttgtaggctggttagctaattcatcttagttacagatgcagaaaccagactgtcaaaaagtcttctaaagtggcaactgcttttctctgtaactactccctaatcccgtgcaacaatgaatgtgttgcaagacttgaatcttaaacagcaggaggcctgaaaaccatagcttcatagaattgtaaaactttacrggcttggatatttttttcctttctcaaggtcaaaatattgggatcaatctagaattatactcatttgtattatcacagaatcattacggtt

SEQ ID NO: 41992 - DNA, 600 bp, Chicken  19866894278401_5
tataycaactagtatattctagcagtaatctatttaaagcattgcactgcagccaaaaaggccaggayaaatccacacttctgagtctayrctgccattcctacctttgtaggctggttagctaattcatcttagttacagatgcagaaaccagactgtcaaaaagtcttctaaagtggcaactgcttttctctgtaactactccctaatcccgtgcaacaatgaatgtgttgcaagacttgaatcttaaacagcaggaggcctgaaaaccatagcttcatagaattgtaaaactttacrggcttggatatttttttcctttctcaaggtcaaaatattgggatcaatctagaattatactcatttgtattatcacagaatcattacggttggaaagatctctcagatcatccagtccaatcaccaacccacccccaccatgcccattcttcatgtccctcagtgccacatccacgtttcttgaacacctccaaggacagtgactccaccacctccctgggcagcctgtgccactgcctcactgctcttttggagaagaaatttttcctaatatccaacctgaacctcctccggtgcaac

SEQ ID NO: 41993 - DNA, 600 bp, Chicken  19866894278403_1
ccaactccagctccataagtatatgcatcctggtttggagctcttagaaactagggaagaaaaatggaagatgatgtaaggtgctgagaagtgcttcaaaacagctggggaaggcggtccatccagaaggtggctttcaagacatgggacctgacagcagcagcaactacttcttttaccctatttcagcataattggagctttcagggggattctcagtcccacacatgttccaaaactgcagcaagcagagctatgcagaaagacccaccctagggtctttcaccctaggccttacaragcctccaaactgtgggaactcccaatcctctgcaaagggctttcagcagcccttgaacaacaaaggattcttcccttccatttcagcactgctaaagcaaaggctgctgtgtcgggtccatcttttttccagatctgctcagacgtgactccatacctcatctttacagaaagataagtgagtctagaaggaaactccattgagtgtaaccctccagaatcgacagtagatacagttacaccccatttacttcctctacatcatccttccacacagaggtaactgacttcttgtggacc

SEQ ID NO: 41994 - DNA, 600 bp, Chicken  19866894278409_1
agcctggggatggctcctcctcccttgtggttgggaatgatggcttctgttttcagacagcaaatggttccagagatgcatccctaagtgactggtgtccatcctgcagcaatccaggccttccaggggctgcgactgagatggagaactgctgaggctgtgtctccctgtgcaactttgggacttctgcaccatgcacagcatgggagcctgactgaggacatgagggatgcttgtgcaaaggggacagtcaagctagggccacatacaagtgaagtcactcttcagtttctccctctygtggcatattcacatctgaaaatggtaacatggagagttgagaaagaacaggctgtagatgaaagcaagtctgacttaaagggtcttacctacataaagggccttacacacttaaaacaaatawgaataaacatccagtgttgtggaaaacactaactgaggtgagatgctttccaggagcaaaggagggatgatttcttctgacaccaatatccattaaatttatgtagatagggatcattgacaacaccagctcaaagccttgctattgtctacagggccactgtagaaagcaaacta

SEQ ID NO: 41995 - DNA, 600 bp, Chicken  19866894278409_2
aggggctgcgactgagatggagaactgctgaggctgtgtctccctgtgcaactttgggacttctgcaccatgcacagcatgggagcctgactgaggacatgagggatgcttgtgcaaaggggacagtcaagctagggccacatacaagtgaagtcactcttcagtttctccctctygtggcatattcacatctgaaaatggtaacatggagagttgagaaagaacaggctgtagatgaaagcaagtctgacttaaagggtcttacctacataaagggccttacacacttaaaacaaatawgaataaacatccagtgttgtggaaaacactaactgaggtgagatgctttccaggagcaaaggagggatgatttcttctgacaccaatatccattaaatttatgtagatagggatcattgacaacaccagctcaaagccttgctattgtctacagggccactgtagaaagcaaactactaggtgacatttccaagcagtccattcttgttctccaaacacatctagattaaagatccaggatcctgcaaatgcaggaattgtgcatataacatacttttccaggagtttaaaggttgcaat

SEQ ID NO: 41996 - DNA, 600 bp, Chicken  19866894278410_1
ctgcacctctcctagaccccatttaagggctgactcccaacgaggaaggatatctatctggagatcactcctcttggagcccttccacgagtaagctctttatttcattactcctttgtaatgcgataatctctctggtcctatacctgtataccgtacaaccttaaattctaaaatgacacctctagtttgtgtttgatgacctgtatttgcaggggagggctggaaaccagaaaatgcaaaattgaaagtctctgaaaggccagtcatcatctcttcataattttaaatgatttcacrtttttctggaagttataatgagcacatgaacacacaacctgaacatgaatgtatacctctggttgctttcaaaaaaaacacttcttgtgcttgagccagcataatgagactgagagttccaactgtgtctggagagatgtccactgtaggttctcggctcagagctgacaggacggtgtctttaatgtgttggaaagcaccacttgcaaactaaacaaaatagaaaattaacatgtcatactcccaaacatgattttacttttacaaatataattcatacagtaatttcaaaaaactata

SEQ ID NO: 41997 - DNA, 599 bp, Chicken  19866894278411_1
  misc_feature (1)..(199): n is any nucleotide
nnnnnnnnnnnnnnnnnnnnnnnnnnnnnnnnnnnnnnnnnnnnnnnnnnnnnnnnnnnnnnnnnnnnnnnnnnnnnnnnnnnnnnnnnnnnnnnnnnnnnnnnnnnnnnnnnnnnnnnnnnnnnnnnnnnnnnnnnnnnnnnnnnnnnnnnnnnnnnnnnnnnnnnnnnnnnnnnnnnnnnnnnnnnnnnnnnnnnnntggagagattagactgtgagttggcatcacaaccaagaaagaaaaggaactttattattataatgtgtttcttatttgttgtggctttttttttaaatttrttctatttaatcctggtgacttgccttttgataaggcagatctagaagctgtccttgttgtacgcaacaggaagccagtttacattcatggttttgtttatgtctctcccatatgccataaaatgcaagtgattgcagttatcctgctctatttagagcccttctgccacctgkaagcttgttctgcatttaagctgatggcagtctttgaagtcttgatttaaagtgatagcctagtattgtgcttatcttttttctctcttaccttctggagtgtggatgcgtgtgggcataacttc

SEQ ID NO: 41998 - DNA, 599 bp, Chicken  19866894278411_2
  misc_feature (1)..(25): n is any nucleotide
nnnnnnnnnnnnnnnnnnnnnnnnntggagagattagactgtgagttggcatcacaaccaagaaagaaaaggaactttattattataatgtgtttcttatttgttgtggctttttttttaaatttrttctatttaatcctggtgacttgccttttgataaggcagatctagaagctgtccttgttgtacgcaacaggaagccagtttacattcatggttttgtttatgtctctcccatatgccataaaatgcaagtgattgcagttatcctgctctatttagagcccttctgccacctgkaagcttgttctgcatttaagctgatggcagtctttgaagtcttgatttaaagtgatagcctagtattgtgcttatcttttttctctcttaccttctggagtgtggatgcgtgtgggcataacttcatggagacaggaaatgggaatgtaaagaaaacagcctctctattttatcttagttttgcatttggtaaatgcccacaggtcactgttttgctctaagggatggtagatagtatgccttaatgaagacaaagtctgaacagtggaaatgagtttgagaaggatcggtgttaaatt

SEQ ID NO: 41999 - DNA, 600 bp, Chicken  19866894278413_1
cttggcctaagggcaaatttacattttttacttagatcatattttttccttcatgttgatgaccacagagggtgaaagtgagaagataatgaagatattggcaaaatgaacgcataggtcgttaaggcagcttggatctcactgtccaaaacaggcctctattcatatgtagttcatacatcacacaaatttccataagggtttttaatatagatggcatgtcacctgattacataaatacgtgatgctttttaatggcttactgattcaggggagataaaaactcctctgacaagttcyrtgagctctaaactccagaggggtttgytggttttgtgtatgtttttgtcagcttttaatatgatgtttccctaaaatcactggagtgtaatgggctttaaagaaggaaatgcacttttaaaacttatttgaaaaggcaaccatctaaaatagattgataaaacagagacttgttaaatttcatataaaacacaaaattcatctttttctgtttcataaatagttccaccacagcaaaagtgttaagccacaatagataaagcatcctacgtggatcaaagactatcagaagtggaggta

SEQ ID NO: 42000 - DNA, 600 bp, Chicken  19866894278413_2
ttggcctaagggcaaatttacattttttacttagatcatattttttccttcatgttgatgaccacagagggtgaaagtgagaagataatgaagatattggcaaaatgaacgcataggtcgttaaggcagcttggatctcactgtccaaaacaggcctctattcatatgtagttcatacatcacacaaatttccataagggtttttaatatagatggcatgtcacctgattacataaatacgtgatgctttttaatggcttactgattcaggggagataaaaactcctctgacaagttcyrtgagctctaaactccagaggggtttgytggttttgtgtatgtttttgtcagcttttaatatgatgtttccctaaaatcactggagtgtaatgggctttaaagaaggaaatgcacttttaaaacttatttgaaaaggcaaccatctaaaatagattgataaaacagagacttgttaaatttcatataaaacacaaaattcatctttttctgtttcataaatagttccaccacagcaaaagtgttaagccacaatagataaagcatcctacgtggatcaaagactatcagaagtggaggtat

SEQ ID NO: 42001 - DNA, 600 bp, Chicken  19866894278413_3
tacttagatcatattttttccttcatgttgatgaccacagagggtgaaagtgagaagataatgaagatattggcaaaatgaacgcataggtcgttaaggcagcttggatctcactgtccaaaacaggcctctattcatatgtagttcatacatcacacaaatttccataagggtttttaatatagatggcatgtcacctgattacataaatacgtgatgctttttaatggcttactgattcaggggagataaaaactcctctgacaagttcyrtgagctctaaactccagaggggtttgytggttttgtgtatgtttttgtcagcttttaatatgatgtttccctaaaatcactggagtgtaatgggctttaaagaaggaaatgcacttttaaaacttatttgaaaaggcaaccatctaaaatagattgataaaacagagacttgttaaatttcatataaaacacaaaattcatctttttctgtttcataaatagttccaccacagcaaaagtgttaagccacaatagataaagcatcctacgtggatcaaagactatcagaagtggaggtataatcttacagcattgtctttgataata

SEQ ID NO: 42002 - DNA, 599 bp, Chicken  19866894278419_1
  misc_feature (1)..(3): n is any nucleotide
nnnagattaattgcacaaataaacaacaaatgtaagttgtggttccattaatgttctgtttagaaagctaactaagagaaatctcaacattacatttctcactgtgtacttctcaaataccacagaaactagtagtcattggaataatgtacccactttcccttcatgtacagcatgaaaataatacttttaaatactttctaaatttgagatggttcagtttaccatatggcccccacccagttatttttgtataacttcactgtgaggatgagaaagaataactgaggtcagaaacckctttggcctctcttactgctgaaaacagcattcacaggacctcatctgcaagcagaaacagattaaaagaacattaagactaaaaacctttcagaagcattagtaatttttcagtatttcccatacacacctaatttgcagacttattggaaatgtacacctatccccaagtgcacaamtgcaccagacttacttttgccataaataaaagctactcaaaatgagaacatagggataaaataggtggctcaaggccatacagtctggaggacatgacattaaaaacacacctgccaagt

SEQ ID NO: 42003 - DNA, 600 bp, Chicken  19866894278419_2
aataatacttttaaatactttctaaatttgagatggttcagtttaccatatggcccccacccagttatttttgtataacttcactgtgaggatgagaaagaataactgaggtcagaaacckctttggcctctcttactgctgaaaacagcattcacaggacctcatctgcaagcagaaacagattaaaagaacattaagactaaaaacctttcagaagcattagtaatttttcagtatttcccatacacacctaatttgcagacttattggaaatgtacacctatccccaagtgcacaamtgcaccagacttacttttgccataaataaaagctactcaaaatgagaacatagggataaaataggtggctcaaggccatacagtctggaggacatgacattaaaaacacacctgccaagtggaaaggcccactgcttccctccttggttagcatagtgcagatacatctttggtctcacccctttcccctgctatatgtcagccttctctatgcattacaagctcattgtggcagtcaaagtacctattactctgtaccatgcttaaaacagcaatattttatcctccagctagcccact

SEQ ID NO: 42004 - DNA, 599 bp, Chicken  19866894278423_1
  misc_feature (1)..(108): n is any nucleotide
nnnnnnnnnnnnnnnnnnnnnnnnnnnnnnnnnnnnnnnnnnnnnnnnnnnnnnnnnnnnnnnnnnnnnnnnnnnnnnnnnnnnnnnnnnnnnnnnnnnnnnnnnnnncatttagaattttcattaccatttcatctcattcaaggataattctaatttggcattagactgagtccttgtgaggcatgtaaggtcctcatggatgcactgggtaatagaagacaaagtgaagtcccaaaaaatcctaatatcagtttgttaacataaataatgaagctactttacccattgtcatcttgyagatttttcttaagagtctctccactgctaggcatgktgacacacccgctatggctggtcacaaatatgctgaagaactgtgcgggtcrggcataaataagcaacttggacaatagaagaaaccgacggtaactggttatttgttggaaaaaacaacacgtaatacaagaggaggagactacagccacaaaagctgtttctttctgattttaacatgcttgaaatgtcgcagtgctgtgagccgcttactgttaaactttccttttaatccagttctctttaattatccatgagaagaa

SEQ ID NO: 42005 - DNA, 599 bp, Chicken  19866894278423_2
  misc_feature (1)..(71): n is any nucleotide
nnnnnnnnnnnnnnnnnnnnnnnnnnnnnnnnnnnnnnnnnnnnnnnnnnnnnnnnnnnnnnnnnnnnnnncatttagaattttcattaccatttcatctcattcaaggataattctaatttggcattagactgagtccttgtgaggcatgtaaggtcctcatggatgcactgggtaatagaagacaaagtgaagtcccaaaaaatcctaatatcagtttgttaacataaataatgaagctactttacccattgtcatcttgyagatttttcttaagagtctctccactgctaggcatgktgacacacccgctatggctggtcacaaatatgctgaagaactgtgcgggtcrggcataaataagcaacttggacaatagaagaaaccgacggtaactggttatttgttggaaaaaacaacacgtaatacaagaggaggagactacagccacaaaagctgtttctttctgattttaacatgcttgaaatgtcgcagtgctgtgagccgcttactgttaaactttccttttaatccagttctctttaattatccatgagaagaattttaatgagcctacaatgctttaaaatgcaaatctt

SEQ ID NO: 42006 - DNA, 599 bp, Chicken  19866894278423_3
  misc_feature (1)..(19): n is any nucleotide
nnnnnnnnnnnnnnnnnnncatttagaattttcattaccatttcatctcattcaaggataattctaatttggcattagactgagtccttgtgaggcatgtaaggtcctcatggatgcactgggtaatagaagacaaagtgaagtcccaaaaaatcctaatatcagtttgttaacataaataatgaagctactttacccattgtcatcttgyagatttttcttaagagtctctccactgctaggcatgktgacacacccgctatggctggtcacaaatatgctgaagaactgtgcgggtcrggcataaataagcaacttggacaatagaagaaaccgacggtaactggttatttgttggaaaaaacaacacgtaatacaagaggaggagactacagccacaaaagctgtttctttctgattttaacatgcttgaaatgtcgcagtgctgtgagccgcttactgttaaactttccttttaatccagttctctttaattatccatgagaagaattttaatgagcctacaatgctttaaaatgcaaatcttttcttttgacaggatttttaacaaattagtttacacaagttgaagcaattcc

SEQ ID NO: 42007 - DNA, 600 bp, Chicken  19866894278428_1
cccaagttttcagaccacaagagcctcacagtgtagttttacttaattagaaatgagagtcatggttagcagcgatctttcaagaatttcccaatgctgtaaaaaatggtggtggttatagcagtagttgtttacccgtgcctgttccctcaatcctgagcccgttatcagtgctttttgaatgatacaattagaaactaagtcctggccatttgcattcagtaatgtccagattttcagcgaggctgagcagcaagaatttgcactgaattgatgggctcagctctgaagtcaagccaragagtcatatatacctgtgaataacagccaatctgcartgtggactgttacattctgtttggctaattccccttgctgatgtagaaattattcctttattccattcccctgcaaatgtttggcacagaaatgctgctccagactgccacgaagggggcagttagttacatttcaagaagagaagacatgagagtatggttctttcttttgagttttggctggaggaaaaattccacttaaggcatgagtgattattttcatttatatgggcagtgcctgtatgaattaaaatgtcaagag

SEQ ID NO: 42008 - DNA, 600 bp, Chicken  19866894278428_2
ttacttaattagaaatgagagtcatggttagcagcgatctttcaagaatttcccaatgctgtaaaaaatggtggtggttatagcagtagttgtttacccgtgcctgttccctcaatcctgagcccgttatcagtgctttttgaatgatacaattagaaactaagtcctggccatttgcattcagtaatgtccagattttcagcgaggctgagcagcaagaatttgcactgaattgatgggctcagctctgaagtcaagccaragagtcatatatacctgtgaataacagccaatctgcartgtggactgttacattctgtttggctaattccccttgctgatgtagaaattattcctttattccattcccctgcaaatgtttggcacagaaatgctgctccagactgccacgaagggggcagttagttacatttcaagaagagaagacatgagagtatggttctttcttttgagttttggctggaggaaaaattccacttaaggcatgagtgattattttcatttatatgggcagtgcctgtatgaattaaaatgtcaagagcttttgatataaaaaactcagggtgaatagttaccata

SEQ ID NO: 42009 - DNA, 599 bp, Chicken  19866894278439_1
  misc_feature (1)..(42): n is any nucleotide
nnnnnnnnnnnnnnnnnnnnnnnnnnnnnnnnnnnnnnnnnnccctaccccgagtcctttgtgccttgatgccaggcagagcatgtatttggggtgcagtcatggttacttgtaggtctgcatggtccgcaatgagagggcaggtatctaggagcagggagagcagaggtcgttatcatctggggggactggagtccttcctgcccctcagggaggacaggaggagagcaccacttggaaccttgaggaccctgccatgctttccccattgcaaccagcccagtgcagcctcttgcaccrctgcaagactggtgcagctcctaggctctgcccttgctccctccaaactcatttccccaaaaccacgcggagtagcacagtgttccccaaaatgcacggacctgggcaggggggcaatcaacaacaaccacaccgaccatctcagctgcactaccctgcacagcggtacatgcacatcagcctcctgggcagaagcccaagctgcgccatctcctycaggcaaaaactggcctgacagccccaataaatactgaataaatagagccagcatcagccgggtgctgggaggctgcactgag

SEQ ID NO: 42010 - DNA, 600 bp, Chicken  19866894278439_2
acaggaggagagcaccacttggaaccttgaggaccctgccatgctttccccattgcaaccagcccagtgcagcctcttgcaccrctgcaagactggtgcagctcctaggctctgcccttgctccctccaaactcatttccccaaaaccacgcggagtagcacagtgttccccaaaatgcacggacctgggcaggggggcaatcaacaacaaccacaccgaccatctcagctgcactaccctgcacagcggtacatgcacatcagcctcctgggcagaagcccaagctgcgccatctcctycaggcaaaaactggcctgacagccccaataaatactgaataaatagagccagcatcagccgggtgctgggaggctgcactgaggcacgcagggtggccatggggtgcgcggtgctgctcactcaggcagcagctcctccagctcctgctcatccagctggttggtggtgacaatgtggtcgagctgcttcatgtaccgctccaggtcctgcatgaaatgggggatgcgagccttctccaggacgccaaatttcttcaggcggttcacatcttcgtaggagacctggtgggaagcaagggg

SEQ ID NO: 42011 - DNA, 600 bp, Chicken  19866894278441_1
agaccctgggaaggagctgtggtgaggttctgggcatttggagacttctcgggctttaaatacaaaagaccaaatctgaattctaggaaggagatcagacgtggcagcaacctgcagagaaagcacactcagaatgcccggccccagctgcagcactggcccctgtgctcccagcgggcctagaagcatcagaaccaaaactgggttcgtgatgagtctctcctgcatctcacaggctttggcatccacgtgctgcaggacccgtggcagcagcggagcacatcggggctggttgtcttyccccatcagcttgcagtcagccatactgcagcagtcaggtggggtgagatgggctgggaggaacagcgacagcgggagtgacgcacagagtgcccggggctggcacactgctgtgagcgaagggatcactgctttgctctcttacacagagacactactggctaataaaggaagcgacccagttcggagctggcctgctgtgcggggcagcggttacatctcggcagggcagttgagctgatccgtgggcatcatcttgtcggtgtcgatcttgtaggtccggagcatgctcttcaggtg

SEQ ID NO: 42012 - DNA, 546 bp, Chicken  19866894278447_1
atttcaaagattcagtaagtccaaatatgtgcagaatttaggagatttgaatgcagccttaaaatgtcagtgtttttccaacacaaacatctatccaactgttttatttcagggaggtgctctcaaaatgtgggctgcatctttaatagtggtaggtaagcttctcaggcgttgttagaagttgaattgtgctgctgctgaagctaacagaaaagccttctccatgttttaatggcaaaggattaggccagtaggagtgctcttggatgtaacgttcgcttgtttctctgtccactaggrattktaatttacatcaggcacaagtacttgcagtcaagaactggtccctgaagtttcttggaaagtggaatgattcaattgttctgctctgtcacttgcctgttttggatcctgctgaaaatttactggatagcttttggtraagaattcaatcttctgttgcctcaagcacactttctctgaaatgagaatataccatgcttttctaaaacccattcaacttytattcctgcttcatgcatctgg

SEQ ID NO: 42013 - DNA, 542 bp, Chicken  19866894278447_2
atttcaaagattcagtaagtccaaatatgtgcagaatttaggagatttgaatgcagccttaaaatgtcagtgtttttccaacacaaacatctatccaactgttttatttcagggaggtgctctcaaaatgtgggctgcatctttaatagtggtaggtaagcttctcaggcgttgttagaagttgaattgtgctgctgctgaagctaacagaaaagccttctccatgttttaatggcaaaggattaggccagtaggagtgctcttggatgtaacgttcgcttgtttctctgtccactaggktaatttacatcaggcacaagtacttgcagtcaagaactggtccctgaagtttcttggaaagtggaatgattcaattgttctgctctgtcacttgcctgttttggatcctgctgaaaatttactggatagcttttggtraagaattcaatcttctgttgcctcaagcacactttctctgaaatgagaatataccatgcttttctaaaacccattcaacttytattcctgcttcatgcatctgg

SEQ ID NO: 42014 - DNA, 404 bp, Chicken  19866894278447_3
atttcaaagattcagtaagtccaaatatgtgcagaatttaggagatttgaatgcagccttaaaatgtcagtgtttttccaacacaaacatctatccaactgttttatttcagggaggtgctctcaaaatgtgggctgcatctttaatagtggtaggtaagcttctcaggcgttgttagaagttgaattgtgctgctgctgaagctaacagaaaagccttctccatgttttaatggcaaaggattaggccagtaggagtgctcttggatgtaacgttcgcttgtttctctgtccactaggraagaattcaatcttctgttgcctcaagcacactttctctgaaatgagaatataccatgcttttctaaaacccattcaacttytattcctgcttcatgcatctgg

SEQ ID NO: 42015 - DNA, 322 bp, Chicken  19866894278447_4
atttcaaagattcagtaagtccaaatatgtgcagaatttaggagatttgaatgcagccttaaaatgtcagtgtttttccaacacaaacatctatccaactgttttatttcagggaggtgctctcaaaatgtgggctgcatctttaatagtggtaggtaagcttctcaggcgttgttagaagttgaattgtgctgctgctgaagctaacagaaaagccttctccatgttttaatggcaaaggattaggccagtaggagtgctcttggatgtaacgttcgcttgtttctctgtccactaggytattcctgcttcatgcatctgg

SEQ ID NO: 42016 - DNA, 600 bp, Chicken  19866894278449_1
tcttcataactgaaaagtttccccacccaagtggtgtaaagtgtgagccgacttaaccatttttgtttcgtgaggtacctgcagtgttccttgcagacatagagcacacttcaattgtctttgccttttaggtctgcagataataggagcatactttactgggagtgatgcttggaaactgtgctgctggccctgcagattgataactgtttgtttaggactagatcctggctgcagccatggacagcactccagggcacctggtgtccagtgagttgtcagctagaacgccttccaagraaagaacatcattttgcatgttcatgaacacccttttctgcagagttcctttggaagaatgactggcagagatgcttcccagctgcccaacttctgcaagtctcagcaggtgcagtcctgcccactccacatgcactgccaaccccctcagtgctgaggatcttggaaggttgccattgacattcaaaattgcagccaagcctaaattttatttatttcaaatgagaattatatagaaggcagtggaagagttcttatgcagtgttgtagggaaaaatgtcaaaccagtcaacagagcca

SEQ ID NO: 42017 - DNA, 600 bp, Chicken  19866894278452_1
gcccttgcttcatggtgaggacagggctgtgctccatgccacctgcagggcccatgtgctgtttgatcccatagccccaagcctgacccagatttcaggccacagctttccctgccatcagagctgtttgttcgggctgcagcccgccagcatcaaggggaaggcttcaagggattcacaaagagatcctaaaagcagaatgtgccacgttaggtatcaataaaacctgctgaaaaagggaagtgccaacagcctgaatggagcaacctttggggatggatccagagagccccatcccarggcggcagaaccaagctgtgacccgacgcacggagcagggctctgcagcacggccaaccccagcagcaccgaagtgcaaacctccgcctgcagacacagcaacagaggaacgcgtgcggcygcgggagggaagcgtggccccaaatcccagtgtgggactgcccaggcacacctcgcccggttctgggggggtcaggctccttccccatttctcttcccctttgcagttccgatgggcacggcggctccatgcgatgcgtccctgcggcccagcgcgcggcaccgaggcaggacgacgcg

SEQ ID NO: 42018 - DNA, 495 bp, Chicken  19866894278452_2
agctgtttgttcgggctgcagcccgccagcatcaaggggaaggcttcaagggattcacaaagagatcctaaaagcagaatgtgccacgttaggtatcaataaaacctgctgaaaaagggaagtgccaacagcctgaatggagcaacctttggggatggatccagagagccccatcccarggcggcagaaccaagctgtgacccgacgcacggagcagggctctgcagcacggccaaccccagcagcaccgaagtgcaaacctccgcctgcagacacagcaacagaggaacgcgtgcggcygcgggagggaagcgtggccccaaatcccagtgtgggactgcccaggcacacctcgcccggttctgggggggtcaggctccttccccatttctcttcccctttgcagttccgatgggcacggcggctccatgcgatgcgtccctgcggcccagcgcgcggcaccgaggcaggacgacgcgtgctgtcagctctcca

SEQ ID NO: 42019 - DNA, 600 bp, Chicken  19866894278458_1
tgcatggcaagttactgggtacagatcacaacatccctcaagacaactgcagtttctgtgacgtggcacacgcccagctccttaccacatattcatcctcgtaaccctcgtcgtctgtctcacccgtgtttggatcacagtccttgacagtaaatttcatcatgcagctgaacgtgcaggccactgcaggcaggggaggcaaaggcaaagctcacgttaccaccagatccactcctctgcaggagaatggggctaggaaacttggggcaggtgggttctccccctcccagtcagcagcayaggctgagcacgtgacctagaaagcgtgctgacagctcctctctctcaaggacaaagtacttatttgtaacactaaggccagcaatcagtgataaatacagactcccaacggttgcaccgtaatcttcagatcaagtcctgctactgacgaatataaagttgtgttgggaatataaactaagcatgtcccatcaacctcttgcgaaggaggtgagacccttatctagggatcagttcatgcaccttggaaatgaaaccaccttgctctgcagcacagcaatgattaataccactcagctg

SEQ ID NO: 42020 - DNA, 600 bp, Chicken  19866894278461_1
ggtatgattaattacaccaggatcagtttagcggtctgaatttgcatgaaggctctgcattttgggccacagaagtctactgatgatgctgcttcaaacagaacacctcagaccagccagcacacatggatgttgctgcaccgtggtcgccagcccagcttttctaactcggttgcacaacgctcacttcccaccagaagtcatgttttctgcttgcaacatgttccgtccaagtcaaaaaaaggttggaaatgactctcaagtgaatgtacctcacgaagaatggcaggaaatcttccrggagagtttgcgacagctcgcgaatgattcagccaagtcacacagaggtttacctctaattttaaaaccaccacctgctaaaagctctgcctcttatctaattgtggtacagctaaaaaaaaaatgaactgaagtttccatcaccacaagagacctgttgtggttaggagaacaaagaagaggagagcgctgacttcgtgacaccgcctctccctgccatagaccaaactccgcaggcagggagcagggcacggcggcagcagagaaggatcactgcaagaagaggaaggctgatggcca

SEQ ID NO: 42021 - DNA, 600 bp, Chicken  19866894278461_2
aaaggaagatttgcattcagtagtgcctgataccaaacacagctgaatgtttttcttcccctcgaatactacgtatataatttaattccgtctctgtaaatttcagaccaaaaggcagtggctgaagcaggcacagacaaaaaaaagtgattaggcctgtctggtactgaataatacatacaagtataaccatattagtgacgcacaatattgctaatatagacaggtcaccacaatgaaaatagctctatctccttggctaccacaggatgccattactgcccctgtaaaaagtattcytttattyggaaaggtgctaaactgtacttctcaatgagttctgaaaattatttgttttcttacaagcagaaatgaaacattccctacagaagaaggaagctgaaccatccaccgtacagtcagaatgactgacacgcaaagcaaaaaatgtaaggaaaaagatggaaaatgcttgcctttttagcatcatcatcaatgatctggatggctcgggctgagacagcatggaggcctttattatcaggagtgtggatattcagaccttccaaaaaccagggcacgagtgcctgcaggtgggca

SEQ ID NO: 42022 - DNA, 600 bp, Chicken  19866894278461_3
gatttgcattcagtagtgcctgataccaaacacagctgaatgtttttcttcccctcgaatactacgtatataatttaattccgtctctgtaaatttcagaccaaaaggcagtggctgaagcaggcacagacaaaaaaaagtgattaggcctgtctggtactgaataatacatacaagtataaccatattagtgacgcacaatattgctaatatagacaggtcaccacaatgaaaatagctctatctccttggctaccacaggatgccattactgcccctgtaaaaagtattcytttattyggaaaggtgctaaactgtacttctcaatgagttctgaaaattatttgttttcttacaagcagaaatgaaacattccctacagaagaaggaagctgaaccatccaccgtacagtcagaatgactgacacgcaaagcaaaaaatgtaaggaaaaagatggaaaatgcttgcctttttagcatcatcatcaatgatctggatggctcgggctgagacagcatggaggcctttattatcaggagtgtggatattcagaccttccaaaaaccagggcacgagtgcctgcaggtgggcaggtctgc

SEQ ID NO: 42023 - DNA, 600 bp, Chicken  19866894278461_4
ttagcatcatcatcaatgatctggatggctcgggctgagacagcatggaggcctttattatcaggagtgtggatattcagaccttccaaaaaccagggcacgagtgcctgcaggtgggcaggtctgccaagagacagccaggaaacgagcccacgcacagggggaggtacacaggcactgctccgtggccttaaaattaggagtgcacatcacagtgtaacagctaactggccaacatatcacacgatccctccaaacaaatacgatccgggtggcattcccacgctacgtgctggtttrtgctgtgaaacaacaaccagacagctgagaacagaaacaaagagyggctscgtccacgcctgaagaagttcctgtctgagaagggacatggggaggcttcagcacagttcccaaaagggctggcgctgcctggtcgctactctggcattggtagagccgggttttatcagcagagcacccttgaggaagccaagcgcccagctgggtgagcttgcactcctgggagaagaaataagggtcagaaacaaagcaagccagcagtagcggtgtcaggaggtgagtaaaggtgcagagtgggtt

SEQ ID NO: 42024 - DNA, 600 bp, Chicken  19866894278461_5
tggaggcctttattatcaggagtgtggatattcagaccttccaaaaaccagggcacgagtgcctgcaggtgggcaggtctgccaagagacagccaggaaacgagcccacgcacagggggaggtacacaggcactgctccgtggccttaaaattaggagtgcacatcacagtgtaacagctaactggccaacatatcacacgatccctccaaacaaatacgatccgggtggcattcccacgctacgtgctggtttrtgctgtgaaacaacaaccagacagctgagaacagaaacaaagagyggctscgtccacgcctgaagaagttcctgtctgagaagggacatggggaggcttcagcacagttcccaaaagggctggcgctgcctggtcgctactctggcattggtagagccgggttttatcagcagagcacccttgaggaagccaagcgcccagctgggtgagcttgcactcctgggagaagaaataagggtcagaaacaaagcaagccagcagtagcggtgtcaggaggtgagtaaaggtgcagagtgggttaaatagagggccggtgtccctctctgctctcaacaacccagtgaa

SEQ ID NO: 42025 - DNA, 600 bp, Chicken  19866894278461_6
gcctttattatcaggagtgtggatattcagaccttccaaaaaccagggcacgagtgcctgcaggtgggcaggtctgccaagagacagccaggaaacgagcccacgcacagggggaggtacacaggcactgctccgtggccttaaaattaggagtgcacatcacagtgtaacagctaactggccaacatatcacacgatccctccaaacaaatacgatccgggtggcattcccacgctacgtgctggtttrtgctgtgaaacaacaaccagacagctgagaacagaaacaaagagyggctscgtccacgcctgaagaagttcctgtctgagaagggacatggggaggcttcagcacagttcccaaaagggctggcgctgcctggtcgctactctggcattggtagagccgggttttatcagcagagcacccttgaggaagccaagcgcccagctgggtgagcttgcactcctgggagaagaaataagggtcagaaacaaagcaagccagcagtagcggtgtcaggaggtgagtaaaggtgcagagtgggttaaatagagggccggtgtccctctctgctctcaacaacccagtgaaacagc

SEQ ID NO: 42026 - DNA, 566 bp, Chicken  19866894278466_1
tgtgtcatgcaagcttgtatgagtctggtttaaaaacttcctgttctgatggaaggagaggatgttggtacaagataactatgggatttgtactctccagatatccaattgcaatcacagcttattgtccctatagaaaatagctcttctgtagatgaactgagatagtttcattaagtggctgaagctctaagtgatccaaggtgaagcataatccaagctggaatttagctaatggtagtagggaattcttgtgaccattcaagccctagttatgaggtgcagcaggaaagaggcagygtgcaaaaaactcattcagctgtagttaaataggagtcctccatctaaaatagcattgagctcttaccctgattcatggtagaaacaagatttaacaacagaagactaaagttatgctccatgtttcttgtcacttaagcaaatatttgaacatattattttctttggctgtattagagctcatattgaggtcagcagatgttctttaaatgctcacagtctggcagtgtggggaaatggactgccatttgctgctgagctttagg

SEQ ID NO: 42027 - DNA, 480 bp, Chicken  19866894278469_1
cacttgctttatcaagatctggttcttccagtgctagtgcaagctcattgttgtccattacagaggctgctgcaacatctagtggtgtcgaacctctcattgaaggaaatgctgcagaagaacgttaaacaaacaaataaataaataaatcattcagtttgcagtaatcgaagtcatgcagcagagggcagcaatcatactggaatctaaacatattaatagcatgttgtatgtacagctgttcttcaatcaagaacatggttagctttcaataatgttacagtaaatgctgaaatcctytcctgtcttgacatgcacatccacaaacatacagaactatattatttttaaatgcagataaagaaatcattattagcaacacggcaaactataaacaattttatacaagtttctttagccaaataacattttcagctctgtaactctcagaagctgcataaaccctatcagttcgatatt

SEQ ID NO: 42028 - DNA, 600 bp, Chicken  19866894278492_1
ggggaccaagaggtgagcaaactgacagagcctgtatgtgcgtggtttcttcttcaaaaataagatcagcggcctcttctttttttttttttttttttactctttttaagacacggtggctataaatggtctttcaaaaataaatcaagcctgaggctgggtctgaaagtgcttaacaaggggtaaaagaggttaaaaaaaggaaaaagaaaaattcccatgctattcctagcacggacctcccccacctccatatgtaaacagcagctgcaccgtggtggggcatttcaacccattgcraaccattacctggctcctgatggtagagtggagcacagcatcttccacactgtgagggaacaacaaggctttaaagcaaagctgtgtgacacaataagatgaaacttcttgtggacatggtggtaaagctgctagggaactgaactgagtggagctaaaagctgtgactactatttgtaactgctgactcagcctttctgcatccaaatcaggattttcgaacagatttaattatggtctttgcagaggttaaatttggcttgggaaaaatagctctgtggatgcgatagattttggcaa

SEQ ID NO: 42029 - DNA, 600 bp, Chicken  19866894278494_1
cataacacatggaactgacccaattaattgctgaaatacaaccccacgttataacagaaattggctcaagacatgagaacaccggcaataactgaaaagcccatacagctcaaggaacgagttgtggaaagggtaagaggaagcaagttactagacctttcttttcgtgtgaaatatcgctgatcagaaccatggtaagaactcctcacttccagggaggaaaaagaaatgttgcagaagatgactttagaaaatattacaaggtcctggtgacagcagcctgagcttctgctgcctctytgggagtaaccctctgtgctgagcagcaaacagccatgtcatcacactgatgtgtttatcagcatcatctgatggcacagcaggacatcgcgcatctacacagataagcttatccagccacaggacataaaacagcacacatcccattgccctggctcggctgctgatacaaatccttcccagccaaaattctttcctccagttctcatttgcaaggaataaacatccagagcctgacagttctggagagaggacagaacaggcaaagcactatggaaaatccttgcacgtgcacagatg

SEQ ID NO: 42030 - DNA, 600 bp, Chicken  19866894278506_1
tcagactgagtttctaacgaagctcaaagacgttttttcctctgaactccagaggagtgcaacgtctgaaaattgcacagcggtgtttctgccaccgatcctaattaaacccattctggccattcaactgtttatcttttggagaagaacaaataaatctgtaatgtcgtggtggtggtgcgttattgggccaaggagcaaagaggtggcaagtactcaaaattccaaatggaacgaccccccactggcacacatcacaaccacaacttcctcatcctttgggatttgtcctcttcatgmtaaaactggaattctgtgactgtagtgaaggtctgactgtacatcacctccttgcagactgtggagcctgtggagctgttctggaaggggaacgtggcaaatccccacacctcccactgtctgggcagcggtgacatcctgatcagctgcttgggagatccttctggcaatgggaaaggtatccatctctttgttgttctagaaattaatgctagagatgcgtctggctgcaggctgcaatgmtggcacatcattacgagctcacagttctttggtgcacctggcagttccagcagttgt

SEQ ID NO: 42031 - DNA, 600 bp, Chicken  19866894278506_2
actggcacacatcacaaccacaacttcctcatcctttgggatttgtcctcttcatgmtaaaactggaattctgtgactgtagtgaaggtctgactgtacatcacctccttgcagactgtggagcctgtggagctgttctggaaggggaacgtggcaaatccccacacctcccactgtctgggcagcggtgacatcctgatcagctgcttgggagatccttctggcaatgggaaaggtatccatctctttgttgttctagaaattaatgctagagatgcgtctggctgcaggctgcaatgmtggcacatcattacgagctcacagttctttggtgcacctggcagttccagcagttgtttgttgttggcaaacaaaagaaaagagaagagactcctccaggactgcctctatgatactccttaatggaaaggtacttaggaaggataaccggtgtatcaagatgccttgagtacctatagagcaacctggagtttaattacaaaagtgatagaggtctttaagaatcttgccttaatttgctttgtcccacagaattgatacaaacagaatcacaacgttttcctgaagcataaggacacg

SEQ ID NO: 42032 - DNA, 600 bp, Chicken  19866894278529_1
tcttagggagaagaagataggctggatgtacatggaggtctataggctgggacagaagttaattcagcctgacatctactattttgattttcaatattgacttttacacgtattatcacatcaagactccaaaaggtctactacaacacttaaaccaatgttgggaatcttaatcaaagctatcaagagttcaccaatcctttcaatgagttcttgaatatgctaacaagaaaacaccataggccagatctctaaattccactatgaagaaagtaaacttttttcatacaagccccaacrtctttatgaaacttacctcattgtctcagacaccccacagtcctatatgcactttcacaaagaagatgagaacagatgaaagctaggaccttttaaatagttaaaccaaccctacagatcccttccaacccctacaatcccttgattccgtggctctgacatgtaggcctctcaccctggatgcagacctcgcctttgtgctgctggcagtgcctaccctgtccctggctatccctcagatgttccacttgtgctcctcactgtgcaccatctgcttccttttatctctgcacacgtgcc

SEQ ID NO: 42033 - DNA, 600 bp, Chicken  19866894278533_1
taacctgaatcaaccctgctgcagagatgtagacttaattgctgaatgtagttactgatacaaccttcagcattctatgtactgctcgtgagaagtccttaattgattgcagtggggcagtaatttgatccttaacctgtgatttaaagacagcacagcacaagagctaccgtgcaggctggtgtaggcttccacagctttcactttcagctctttcagcagcagatcagagtgatttggtcataacgtgagttgtgatcgattgtagtttggaaatgggcctaagatcatgaaatagtrrgaacccttattctgaccattgctgtttgcttttattatggtgattctggataaaagctcggtcctcctgaacctttcacagctgtgcaagaacactggtttggggtgacatgatgacttgtttggttcygytttggctctctcctaacccaggagaaggtgaacaaggtgactgttgaaaactccaaagtcataagcttcttgaattgttcttcttgtgacagatgtgaggctgaaggcagrtttggtgcagaaacagattgccgtacttagctcacacgtaggctattactcacccag

SEQ ID NO: 42034 - DNA, 600 bp, Chicken  19866894278533_2
aacctgaatcaaccctgctgcagagatgtagacttaattgctgaatgtagttactgatacaaccttcagcattctatgtactgctcgtgagaagtccttaattgattgcagtggggcagtaatttgatccttaacctgtgatttaaagacagcacagcacaagagctaccgtgcaggctggtgtaggcttccacagctttcactttcagctctttcagcagcagatcagagtgatttggtcataacgtgagttgtgatcgattgtagtttggaaatgggcctaagatcatgaaatagtrrgaacccttattctgaccattgctgtttgcttttattatggtgattctggataaaagctcggtcctcctgaacctttcacagctgtgcaagaacactggtttggggtgacatgatgacttgtttggttcygytttggctctctcctaacccaggagaaggtgaacaaggtgactgttgaaaactccaaagtcataagcttcttgaattgttcttcttgtgacagatgtgaggctgaaggcagrtttggtgcagaaacagattgccgtacttagctcacacgtaggctattactcacccaga

SEQ ID NO: 42035 - DNA, 600 bp, Chicken  19866894278533_3
cttaacctgtgatttaaagacagcacagcacaagagctaccgtgcaggctggtgtaggcttccacagctttcactttcagctctttcagcagcagatcagagtgatttggtcataacgtgagttgtgatcgattgtagtttggaaatgggcctaagatcatgaaatagtrrgaacccttattctgaccattgctgtttgcttttattatggtgattctggataaaagctcggtcctcctgaacctttcacagctgtgcaagaacactggtttggggtgacatgatgacttgtttggttcygytttggctctctcctaacccaggagaaggtgaacaaggtgactgttgaaaactccaaagtcataagcttcttgaattgttcttcttgtgacagatgtgaggctgaaggcagrtttggtgcagaaacagattgccgtacttagctcacacgtaggctattactcacccagaggaggctatctaaraggtccagtttaactttcattctgacctattttgtaaaggtgtgtactatgtgattcatctcttctgtgacctgaacgatgtccttaaagtggtgctttgctgtgctttatcagt

SEQ ID NO: 42036 - DNA, 600 bp, Chicken  19866894278533_4
taacctgtgatttaaagacagcacagcacaagagctaccgtgcaggctggtgtaggcttccacagctttcactttcagctctttcagcagcagatcagagtgatttggtcataacgtgagttgtgatcgattgtagtttggaaatgggcctaagatcatgaaatagtrrgaacccttattctgaccattgctgtttgcttttattatggtgattctggataaaagctcggtcctcctgaacctttcacagctgtgcaagaacactggtttggggtgacatgatgacttgtttggttcygytttggctctctcctaacccaggagaaggtgaacaaggtgactgttgaaaactccaaagtcataagcttcttgaattgttcttcttgtgacagatgtgaggctgaaggcagrtttggtgcagaaacagattgccgtacttagctcacacgtaggctattactcacccagaggaggctatctaaraggtccagtttaactttcattctgacctattttgtaaaggtgtgtactatgtgattcatctcttctgtgacctgaacgatgtccttaaagtggtgctttgctgtgctttatcagtgt

SEQ ID NO: 42037 - DNA, 600 bp, Chicken  19866894278533_5
taacgtgagttgtgatcgattgtagtttggaaatgggcctaagatcatgaaatagtrrgaacccttattctgaccattgctgtttgcttttattatggtgattctggataaaagctcggtcctcctgaacctttcacagctgtgcaagaacactggtttggggtgacatgatgacttgtttggttcygytttggctctctcctaacccaggagaaggtgaacaaggtgactgttgaaaactccaaagtcataagcttcttgaattgttcttcttgtgacagatgtgaggctgaaggcagrtttggtgcagaaacagattgccgtacttagctcacacgtaggctattactcacccagaggaggctatctaaraggtccagtttaactttcattctgacctattttgtaaaggtgtgtactatgtgattcatctcttctgtgacctgaacgatgtccttaaagtggtgctttgctgtgctttatcagtgtttgtgtacagtggcactcagctccgcgtgttgcacgttctgctcagaaggagatgccagctgtgataactgttctttccactggaagatttgccttctttatgaagacaca

SEQ ID NO: 42038 - DNA, 600 bp, Chicken  19866894278533_6
accattgctgtttgcttttattatggtgattctggataaaagctcggtcctcctgaacctttcacagctgtgcaagaacactggtttggggtgacatgatgacttgtttggttcygytttggctctctcctaacccaggagaaggtgaacaaggtgactgttgaaaactccaaagtcataagcttcttgaattgttcttcttgtgacagatgtgaggctgaaggcagrtttggtgcagaaacagattgccgtacttagctcacacgtaggctattactcacccagaggaggctatctaaraggtccagtttaactttcattctgacctattttgtaaaggtgtgtactatgtgattcatctcttctgtgacctgaacgatgtccttaaagtggtgctttgctgtgctttatcagtgtttgtgtacagtggcactcagctccgcgtgttgcacgttctgctcagaaggagatgccagctgtgataactgttctttccactggaagatttgccttctttatgaagacacatttgtagattgatacagtggttgtaccttcagtggggttgatggaactcaaattaatgcctgaaaaccccag

SEQ ID NO: 42039 - DNA, 599 bp, Chicken  19866894278537_1
  misc_feature (1)..(28): n is any nucleotide
nnnnnnnnnnnnnnnnnnnnnnnnnnnnttgctcctggcattttaaagtataaatgtggcacttagggatatggttttgtgggcctggtggttataggttgatggttggactacatgatcttagtggtcttttccaacattaatgattctaagttctcggatgtacctcttttctttccaattttgacaacatatctttccaatagcaatcatatatgagcaatcatatattttgttcaaaaagtttgttatatattgattgctgttattttatcttttacataagtctaattacgtttycatctctacttcttcctggattatttgttcctcttcaatttctccagttattgctcatcttctgatttagccacttcttccattattgttttcacttcaaatgatgatggccaaacatctggttgttgaatatttagaaattaatctgccttcataaagcacgtgtgcatgctgaggtccttgagggttaagcactgtgcaccacctcggattacacacaagctgaaacagttaggccctctagtggattgtcctccctttacatatatactttccactaggacactgcgccattcatt

SEQ ID NO: 42040 - DNA, 600 bp, Chicken  19866894278543_1
cgttaaatcaggttttgtgattctccttttgctgactcttagttctgtgcttcttctgtgctggctttgttgattacctggttcagggagaactgtcgagcccacaggcaacccaacctcaaaggaggcattactgctgaactcccagaactggtgcaggaagacgaagtgtggcagaggtgggactataggagctccaaccttaaatccatttacattgtagtgaacatactccgtcagtcagagaatctaagaaaatgtggtttaatctgtcctgctcagaaagactaaattaattcmatttctcactatagggctttactgctgtctctcaaacttgyattttgtcatctgtatttttcttgatacattccagttctcccacatgctctktactcacctgccagtctcttccttcagccwcactcttttgaaatagttaaaaatattaattgtggctttttcatagaggttttccctcccttcatttaaggctcttcagccatttctgttttactctgttttcagagttgactactccaataacagcttcactgccaaagtgtgagctttcaggagacgtgcttctatcctatctat

SEQ ID NO: 42041 - DNA, 600 bp, Chicken  19866894278543_2
gttctgtgcttcttctgtgctggctttgttgattacctggttcagggagaactgtcgagcccacaggcaacccaacctcaaaggaggcattactgctgaactcccagaactggtgcaggaagacgaagtgtggcagaggtgggactataggagctccaaccttaaatccatttacattgtagtgaacatactccgtcagtcagagaatctaagaaaatgtggtttaatctgtcctgctcagaaagactaaattaattcmatttctcactatagggctttactgctgtctctcaaacttgyattttgtcatctgtatttttcttgatacattccagttctcccacatgctctktactcacctgccagtctcttccttcagccwcactcttttgaaatagttaaaaatattaattgtggctttttcatagaggttttccctcccttcatttaaggctcttcagccatttctgttttactctgttttcagagttgactactccaataacagcttcactgccaaagtgtgagctttcaggagacgtgcttctatcctatctattttggcttcagatttcttaggatgatcctactcattttgtg

SEQ ID NO: 42042 - DNA, 600 bp, Chicken  19866894278543_3
tgtcgagcccacaggcaacccaacctcaaaggaggcattactgctgaactcccagaactggtgcaggaagacgaagtgtggcagaggtgggactataggagctccaaccttaaatccatttacattgtagtgaacatactccgtcagtcagagaatctaagaaaatgtggtttaatctgtcctgctcagaaagactaaattaattcmatttctcactatagggctttactgctgtctctcaaacttgyattttgtcatctgtatttttcttgatacattccagttctcccacatgctctktactcacctgccagtctcttccttcagccwcactcttttgaaatagttaaaaatattaattgtggctttttcatagaggttttccctcccttcatttaaggctcttcagccatttctgttttactctgttttcagagttgactactccaataacagcttcactgccaaagtgtgagctttcaggagacgtgcttctatcctatctattttggcttcagatttcttaggatgatcctactcattttgtgaagagctagttttctcttgcctgaaaaaggcagcgaagagattcatccaaag

SEQ ID NO: 42043 - DNA, 600 bp, Chicken  19866894278543_4
ggaggcattactgctgaactcccagaactggtgcaggaagacgaagtgtggcagaggtgggactataggagctccaaccttaaatccatttacattgtagtgaacatactccgtcagtcagagaatctaagaaaatgtggtttaatctgtcctgctcagaaagactaaattaattcmatttctcactatagggctttactgctgtctctcaaacttgyattttgtcatctgtatttttcttgatacattccagttctcccacatgctctktactcacctgccagtctcttccttcagccwcactcttttgaaatagttaaaaatattaattgtggctttttcatagaggttttccctcccttcatttaaggctcttcagccatttctgttttactctgttttcagagttgactactccaataacagcttcactgccaaagtgtgagctttcaggagacgtgcttctatcctatctattttggcttcagatttcttaggatgatcctactcattttgtgaagagctagttttctcttgcctgaaaaaggcagcgaagagattcatccaaagagaatgtgctctgtaattggaatatgccga

SEQ ID NO: 42044 - DNA, 600 bp, Chicken  19866894278550_1
agaaacattaattcatccttcttccccatgatgtacacacagttataaaacacatacagtaatatgattgaattcacgcatttaggttgtacatggaaactctaaacaggtgctttctataactgcatagtttatgatggagtaaagagtatgtgacaacttggcctactaagatacccaccttcagcatttcctgtgattgactttaaataagcaatctcatgtccagttaaactcttattcaaatataaaactcagtgaaatataaaaatcttgaggtattcttatcatttggctacytggtttcaaaaacattagcaaaaaaaatggttttatttccttttgtcatgtgtttttaagatttaaataaattaggttatgtatcgcaagcaaatagccctgccataaataaatattcctgacaaaaatatttatttttctgcttttagtacgtgtcagtctcagtccttattgctgtgcatcttaaccataccaatgcacacagcatggggaataaacaggaaaaactagagatctgtgtgtggtctcaggactatgatctcactgagaccacagagacatggtggacagctcacatga

SEQ ID NO: 42045 - DNA, 600 bp, Chicken  19866894278552_1
tcaaaaacagtgaaaatctgacttcttatcctgtttacacattctaaatttaaactttcagaaacagtctatgcaccattacaatatgagaataacaaatgaacaaacggcactgaaaattaccagaacatattcatgattaactagctgatgctttcttccctctctcacatgccagagacgagacatttcccttctaaaaagagacaaaagaaccattcaacgatgttcgaaagcattctgacctgcagtcagttccaggcacggacagagccccacaatggtgacaggataggctgytagatgcaggtttgactgacatggcagggaacaaatgagcaagtgtacagtaggggagttgcatcccaaatgatgacggtacagagaaagaaaggtttcctgtattcaagggtggttgcagagaacgagtttgttgaaaggctaaaatatttaaagatacagaacagcttaatttttttgtacacgatacccaaaataccaaattaggagctgcttgtgaaattgtgacattcattattaacaaattctaccagaaccaaatttgcattcagtattaaaactactttgtcttactattgt

SEQ ID NO: 42046 - DNA, 599 bp, Chicken  19866894278555_1
  misc_feature (1)..(53): n is any nucleotide
nnnnnnnnnnnnnnnnnnnnnnnnnnnnnnnnnnnnnnnnnnnnnnnnnnnnncccttccaccctgacagcttttggctggtatgttctctgggaggatgaagccatcctgcctgtccgatgtgctgcaggcaccaggctgctgtcgcaggctgttgtcccctgaactcccagcagcactaatgcaggactcgtgttgttggatgcgtttttatcccttctgtctctgctgccctgggggggctctttgttgtattgtagtgctgctttcacacaaagtattgcatctggcagcacaagygttgtggtgctgagtctaaacagctgcaggttgcactgtgtgctttccaggtacactgcaaatagccatcaacttttcctccttttcagtacaattctgtccatccaaagcattatggccatcatatatttccagaagaggttattgagttactagctggcttttccagtgtgatatttcacctgtaaggggagttttttttatcttcactacagcccgatgcagtttttagtgggttgtattttacccgcctgacacacttaaactgtctggtcgtggttggctttccttgttttgta

SEQ ID NO: 42047 - DNA, 599 bp, Chicken  19866894278559_1
  misc_feature (1)..(85): n is any nucleotide
nnnnnnnnnnnnnnnnnnnnnnnnnnnnnnnnnnnnnnnnnnnnnnnnnnnnnnnnnnnnnnnnnnnnnnnnnnnnnnnnnnnnntttttctatctgatttcttaaatgcaaaagaagctgacgcaacttcattttctgccacagttccaaaagtgaagccagcgactccggttttattctcactggtagttacggaagtagaacttgaaccaaaactgaaaccccccaatactggttgttgttctttcttttcctgctgtcccaggcttgctgtcccaaactgaaatgttaagggagcyggactacttgtagacggaaggccaaaggtaaaattgttacttttatcttcttttttactctcttctggtttagagtccgaggatgaaactccaaatttaaagttccctgaactgctaggaaacttgaatcccccaggtgcagtgytggaagatgcagattcagatgcaatgccaaacttgaagcccccttgttctccaaatttaaaacttcctgtgacactcgatgtttgagaatcagaggatgatgattgaacaccaaatgtaaatgatggcaatgcagcatttgtggacacagcaga

SEQ ID NO: 42048 - DNA, 600 bp, Chicken  19866894278559_2
ttccaaaagtgaagccagcgactccggttttattctcactggtagttacggaagtagaacttgaaccaaaactgaaaccccccaatactggttgttgttctttcttttcctgctgtcccaggcttgctgtcccaaactgaaatgttaagggagcyggactacttgtagacggaaggccaaaggtaaaattgttacttttatcttcttttttactctcttctggtttagagtccgaggatgaaactccaaatttaaagttccctgaactgctaggaaacttgaatcccccaggtgcagtgytggaagatgcagattcagatgcaatgccaaacttgaagcccccttgttctccaaatttaaaacttcctgtgacactcgatgtttgagaatcagaggatgatgattgaacaccaaatgtaaatgatggcaatgcagcatttgtggacacagcagaagcatcaaaacctgcagaagtaagaaataacatttactttgtaatctgtgatacaacatctgtggcgcatgaaggcttcagctacttagcagggattctagtccccaaaattcccaatcaaaastgtaaaaaatacaaataaaaca

SEQ ID NO: 42049 - DNA, 496 bp, Chicken  19866894278559_3
ttgaatcccccaggtgcagtgytggaagatgcagattcagatgcaatgccaaacttgaagcccccttgttctccaaatttaaaacttcctgtgacactcgatgtttgagaatcagaggatgatgattgaacaccaaatgtaaatgatggcaatgcagcatttgtggacacagcagaagcatcaaaacctgcagaagtaagaaataacatttactttgtaatctgtgatacaacatctgtggcgcatgaaggcttcagctacttagcagggattctagtccccaaaattcccaatcaaaastgtaaaaaatacaaataaaacaaaaaacaacctaaactcaaaacaaaaaaacaaagttcycctcacacgtctctctaaataaaccttttcacaatggtattttttctgtctgccacttggctttcagatgtgtactggtattcaatgtaatacacataacattattattacacttttttgtctaagctgcaaatga

SEQ ID NO: 42050 - DNA, 436 bp, Chicken  19866894278559_4
cccccttgttctccaaatttaaaacttcctgtgacactcgatgtttgagaatcagaggatgatgattgaacaccaaatgtaaatgatggcaatgcagcatttgtggacacagcagaagcatcaaaacctgcagaagtaagaaataacatttactttgtaatctgtgatacaacatctgtggcgcatgaaggcttcagctacttagcagggattctagtccccaaaattcccaatcaaaastgtaaaaaatacaaataaaacaaaaaacaacctaaactcaaaacaaaaaaacaaagttcycctcacacgtctctctaaataaaccttttcacaatggtattttttctgtctgccacttggctttcagatgtgtactggtattcaatgtaatacacataacattattattacacttttttgtctaagctgcaaatga

SEQ ID NO: 42051 - DNA, 560 bp, Chicken  19866894278561_1
gtaaacacgctctggaagcgatggcaacaagcaattagcctgaatgctgcaggcaccccgaggtggatagaaattaaacaggtgttcgtgcgtacagcaccgaccctccgccaggttgagttgggcaggaaggatttcggcaatcagccgttgcccgacagtaataaaggaggctggcagcaattcactgcgctatttgcatacccataaccaccagccctgggatacctcccagctctgttttcatcccaggcactttggaaacaccgtgcgcacgtccccagaacgtgacctgccccmaagagcggcagggctgggagcaccrggcagccctggccatgcagacctggagcgaggccagctgtaaggcgagctgctcccggccagcaatgygcacatgggatgccccggcgtgcggccggggacagcagcatggtgcagtttgctccacggctacatgtaacacacccacagccaattctcatgcagcagatggaggcactgcgagagcagtgagtttcaattaatgtctatcttgggccaaaggaaggggctccact

SEQ ID NO: 42052 - DNA, 535 bp, Chicken  19866894278561_2
aacaagcaattagcctgaatgctgcaggcaccccgaggtggatagaaattaaacaggtgttcgtgcgtacagcaccgaccctccgccaggttgagttgggcaggaaggatttcggcaatcagccgttgcccgacagtaataaaggaggctggcagcaattcactgcgctatttgcatacccataaccaccagccctgggatacctcccagctctgttttcatcccaggcactttggaaacaccgtgcgcacgtccccagaacgtgacctgccccmaagagcggcagggctgggagcaccrggcagccctggccatgcagacctggagcgaggccagctgtaaggcgagctgctcccggccagcaatgygcacatgggatgccccggcgtgcggccggggacagcagcatggtgcagtttgctccacggctacatgtaacacacccacagccaattctcatgcagcagatggaggcactgcgagagcagtgagtttcaattaatgtctatcttgggccaaaggaaggggctccact

SEQ ID NO: 42053 - DNA, 467 bp, Chicken  19866894278561_3
acagcaccgaccctccgccaggttgagttgggcaggaaggatttcggcaatcagccgttgcccgacagtaataaaggaggctggcagcaattcactgcgctatttgcatacccataaccaccagccctgggatacctcccagctctgttttcatcccaggcactttggaaacaccgtgcgcacgtccccagaacgtgacctgccccmaagagcggcagggctgggagcaccrggcagccctggccatgcagacctggagcgaggccagctgtaaggcgagctgctcccggccagcaatgygcacatgggatgccccggcgtgcggccggggacagcagcatggtgcagtttgctccacggctacatgtaacacacccacagccaattctcatgcagcagatggaggcactgcgagagcagtgagtttcaattaatgtctatcttgggccaaaggaaggggctccact

SEQ ID NO: 42054 - DNA, 599 bp, Chicken  19866894278573_1
  misc_feature (1)..(93): n is any nucleotide
nnnnnnnnnnnnnnnnnnnnnnnnnnnnnnnnnnnnnnnnnnnnnnnnnnnnnnnnnnnnnnnnnnnnnnnnnnnnnnnnnnnnnnnnnnnnncatattattttgcaccttgctttaaaatatgttgttaactcaatctaaggattcacagatgctttcaccttcataattcttacattataaggccccaagggtaactacagaatgacatacctttaaatcatggctgaataaaagctgatctttgcaattattccagtttatgcatgaaagtacgtgaagatttgtagtctgcagtgktttttttttctttgtgtgtagttagatcctacagtacttttctacgtggaaagtaaataggaaagacgtaagccacgtatggactactacttataggagtgagtagtaatactcaagtttgcagctgctctgacttwatattaaaatctaggaggaatgtctctgctgaggagacttttcattcctgatattcctttccttccaagagaaggaaaggggttctcacacttatggtaataaagatgagttactttctggcactgtttctaagaagcaaatctattgatttactggaatct

SEQ ID NO: 42055 - DNA, 600 bp, Chicken  19866894278573_2
ctaaggattcacagatgctttcaccttcataattcttacattataaggccccaagggtaactacagaatgacatacctttaaatcatggctgaataaaagctgatctttgcaattattccagtttatgcatgaaagtacgtgaagatttgtagtctgcagtgktttttttttctttgtgtgtagttagatcctacagtacttttctacgtggaaagtaaataggaaagacgtaagccacgtatggactactacttataggagtgagtagtaatactcaagtttgcagctgctctgacttwatattaaaatctaggaggaatgtctctgctgaggagacttttcattcctgatattcctttccttccaagagaaggaaaggggttctcacacttatggtaataaagatgagttactttctggcactgtttctaagaagcaaatctattgatttactggaatcttgtcacacaagtctgataaacacatcttaaaggcagtggtgtttttctttttctttttgcagatgayattaaagtatctgtaaatgattttattatcaaggcagcagctgtcactctgaaggtaagtgaacaattgac

SEQ ID NO: 42056 - DNA, 600 bp, Chicken  19866894278573_3
cgtaagccacgtatggactactacttataggagtgagtagtaatactcaagtttgcagctgctctgacttwatattaaaatctaggaggaatgtctctgctgaggagacttttcattcctgatattcctttccttccaagagaaggaaaggggttctcacacttatggtaataaagatgagttactttctggcactgtttctaagaagcaaatctattgatttactggaatcttgtcacacaagtctgataaacacatcttaaaggcagtggtgtttttctttttctttttgcagatgayattaaagtatctgtaaatgattttattatcaaggcagcagctgtcactctgaaggtaagtgaacaattgactttaatacatcttatagcaagctgcaagagagacaagtattttatgagactatatggagatagaaatgcaatcatagcaaagcttctaatactttatcatttagtgttagttcctatgagctacctaggtagaattctccacactatctatactgtggactgtgaaagtgagattttttttttttagcaaagatcctcatagtacagttatgaacagaaactgcaggtg

SEQ ID NO: 42057 - DNA, 600 bp, Chicken  19866894278573_4
actctgaaggtaagtgaacaattgactttaatacatcttatagcaagctgcaagagagacaagtattttatgagactatatggagatagaaatgcaatcatagcaaagcttctaatactttatcatttagtgttagttcctatgagctacctaggtagaattctccacactatctatactgtggactgtgaaagtgagattttttttttttagcaaagatcctcatagtacagttatgaacagaaactgcaggtgatatagcagtaggtgctttgtcagcaagctgacaaactttcaacygaaaacctatcttttaggtatttaaaacttcaaggaggaaattatrtttaagttagggagctattcccatagacgtatgttgattctgtttcagttctcataacactgtaaaaggccgtttctgctcagygatggaacagatagtaaatcaaaataagaattctcaagtaattttgcattgctatttgctttacattgtcatgctatattaaatgctggtaattggtgtgaatatgtatcctagtccctgaggacaaaggaaacagaaacttttcctcttgtcgtattacacactttgtt

SEQ ID NO: 42058 - DNA, 600 bp, Chicken  19866894278573_5
gctgcaagagagacaagtattttatgagactatatggagatagaaatgcaatcatagcaaagcttctaatactttatcatttagtgttagttcctatgagctacctaggtagaattctccacactatctatactgtggactgtgaaagtgagattttttttttttagcaaagatcctcatagtacagttatgaacagaaactgcaggtgatatagcagtaggtgctttgtcagcaagctgacaaactttcaacygaaaacctatcttttaggtatttaaaacttcaaggaggaaattatrtttaagttagggagctattcccatagacgtatgttgattctgtttcagttctcataacactgtaaaaggccgtttctgctcagygatggaacagatagtaaatcaaaataagaattctcaagtaattttgcattgctatttgctttacattgtcatgctatattaaatgctggtaattggtgtgaatatgtatcctagtccctgaggacaaaggaaacagaaacttttcctcttgtcgtattacacactttgttggctttcttttggggataatatgtcaaatattcagttttccacatg

SEQ ID NO: 42059 - DNA, 600 bp, Chicken  19866894278573_6
tgttagttcctatgagctacctaggtagaattctccacactatctatactgtggactgtgaaagtgagattttttttttttagcaaagatcctcatagtacagttatgaacagaaactgcaggtgatatagcagtaggtgctttgtcagcaagctgacaaactttcaacygaaaacctatcttttaggtatttaaaacttcaaggaggaaattatrtttaagttagggagctattcccatagacgtatgttgattctgtttcagttctcataacactgtaaaaggccgtttctgctcagygatggaacagatagtaaatcaaaataagaattctcaagtaattttgcattgctatttgctttacattgtcatgctatattaaatgctggtaattggtgtgaatatgtatcctagtccctgaggacaaaggaaacagaaacttttcctcttgtcgtattacacactttgttggctttcttttggggataatatgtcaaatattcagttttccacatggaggttcctttttgattatttacttttcttcctcttttttttcttttcagaaaagccttacctagaaatgtgtctgaaatagta

SEQ ID NO: 42060 - DNA, 600 bp, Chicken  19866894278584_1
aacagcatcactctaagtcagagatctaagacgaaatcttccaagtatgaaacatatccagaggtgtgtctgtcaagttttttattggtttgtcatagacatgcacacaaatagcctgtagcaaacccttcccactgtaggactgtgtggtgacctcagtttcctttcagggctcgattttggacttggggaaaagcatgctcagtcccaagccttcaggctcactgggcctggacaggtaaggcaacagctgtacaggctttggttcctctcccctacactcctatagaaatgtgcccygtgagtctgcctggaggatccagaaagaggaacgcagaagtcctttccaccctcccaactcttctggcacctggcagccaattgcacgttaggtgctgagaccatcaggtattttttcatgtgggcatctgaacggtggtgggactgcagtctcttttggtcacaataaccctgaagatgtttgtgacagctttttacacctctatgcaatacagaaggagtttgtgataatttcatgccacaggaaccactctttagatgctgagagcagcatcttcccaaacagctgactgatctgca

SEQ ID NO: 42061 - DNA, 600 bp, Chicken  19866894278584_2
gcacctggcagccaattgcacgttaggtgctgagaccatcaggtattttttcatgtgggcatctgaacggtggtgggactgcagtctcttttggtcacaataaccctgaagatgtttgtgacagctttttacacctctatgcaatacagaaggagtttgtgataatttcatgccacaggaaccactctttagatgctgagagcagcatcttcccaaacagctgactgatctgcaggggaaagacaagccagtgtgccagggatggagcaagtactgctctgcatcagctgctcctggagragaggggragaacagcagcagtggtgttgtggatggtgtggaaaccaacttcagctcaggacttgcaatggctgctttcctgaaggttagaacaaatgtacggaaaaggtatttggagttaagacttgccttaaaaaaaaaaacacaggaaagctaaagcragtatgaaaataaattagaaatgaggggcagataaaagcagaacctgcaggaatcaaatctaaacaaaaagcaggggctgggccgtccagtgagaaagccacaaatggcaggggttgaaatgtaaaacctacaggccac

SEQ ID NO: 42062 - DNA, 600 bp, Chicken  19866894278584_3
cagccaattgcacgttaggtgctgagaccatcaggtattttttcatgtgggcatctgaacggtggtgggactgcagtctcttttggtcacaataaccctgaagatgtttgtgacagctttttacacctctatgcaatacagaaggagtttgtgataatttcatgccacaggaaccactctttagatgctgagagcagcatcttcccaaacagctgactgatctgcaggggaaagacaagccagtgtgccagggatggagcaagtactgctctgcatcagctgctcctggagragaggggragaacagcagcagtggtgttgtggatggtgtggaaaccaacttcagctcaggacttgcaatggctgctttcctgaaggttagaacaaatgtacggaaaaggtatttggagttaagacttgccttaaaaaaaaaaacacaggaaagctaaagcragtatgaaaataaattagaaatgaggggcagataaaagcagaacctgcaggaatcaaatctaaacaaaaagcaggggctgggccgtccagtgagaaagccacaaatggcaggggttgaaatgtaaaacctacaggccactgagaaac

SEQ ID NO: 42063 - DNA, 600 bp, Chicken  19866894278584_4
ataatttcatgccacaggaaccactctttagatgctgagagcagcatcttcccaaacagctgactgatctgcaggggaaagacaagccagtgtgccagggatggagcaagtactgctctgcatcagctgctcctggagragaggggragaacagcagcagtggtgttgtggatggtgtggaaaccaacttcagctcaggacttgcaatggctgctttcctgaaggttagaacaaatgtacggaaaaggtatttggagttaagacttgccttaaaaaaaaaaacacaggaaagctaaagcragtatgaaaataaattagaaatgaggggcagataaaagcagaacctgcaggaatcaaatctaaacaaaaagcaggggctgggccgtccagtgagaaagccacaaatggcaggggttgaaatgtaaaacctacaggccactgagaaacatgaaagatgctgttgtgttccacacctccttttcccgggtgtagctgtctccatacagtgaagggcagtaatgaatcaagctcctttcctctcctcctgtgttttctattcaattattcacaggctgtgccagttctgctttatttctcccc

SEQ ID NO: 42064 - DNA, 589 bp, Chicken  19866894278590_1
acggagtactgcgtcctatgattcttgattgtaattgtaataatgggtttcagaaagcctgcaagtagttctgagcatcacaataagggtttaggccagtattgtttaaaaaggaatagtttattgaatatcaaagcaaccttaggaggacagcaggggtgatgcagagaagaggttcccacctgtacaaagtaagcagaaggcagtcacttgggtcctctttaaacacacttggggtctccacagcagaggcagatacgtgaattgccctgagcttccttgctgcccaagagaaagaaygaaagccatcacagcttcagggaagggtgagggggggagagactgtgaggcagagactggagcagagacccttgttcagaaaacaaaggaaacgtgaggctcatcctctgagcccactcaacaccattcctgtttccctcaatgcatttagatatttcccttggccccagtaatagtcagtgcttagaaaatacaatctggtttattttattgccaagatcttcagcatcagaagcaggatatgctttcctgcaaggcatgatgctcagcaggacagcgtggcagaaga

SEQ ID NO: 42065 - DNA, 600 bp, Chicken  19866894278591_1
tgctgcaggagcagcctacacagcaacgatagcagctggtcttctaaagcagataactgtttaaaacagaagataactacatcaagcacatttcgcagaatcatagagtggctttggttggaaggagactttaagatcacctatttccaagcccctgctgtgggctggctgccatccacaggaccaggcagcccaggacccagcccggctgccacagttatcctgggcaagctgtgactttttgaaaagaacaccaaaaccttttaacactcccattgtaacccaggccatagaacaccrcaaagcattcamtgaggtgatctgamaggaacacagactacacattcaataacatgaaaaatactggttttccacagatgaaccactctacagaaaacaactgcgcagaaaggaggcagacacacacacttcagtgcttttcacctccagcatctttataaaatcctatctggatggattcccctacaaatcaccctggaagcttattctgctctgtgtaacagtcacacatttcacacatcaagcctccacaaagccatgaaaataaacctttgccttgataagacacaaaatgctgag

SEQ ID NO: 42066 - DNA, 600 bp, Chicken  19866894278591_2
agcctacacagcaacgatagcagctggtcttctaaagcagataactgtttaaaacagaagataactacatcaagcacatttcgcagaatcatagagtggctttggttggaaggagactttaagatcacctatttccaagcccctgctgtgggctggctgccatccacaggaccaggcagcccaggacccagcccggctgccacagttatcctgggcaagctgtgactttttgaaaagaacaccaaaaccttttaacactcccattgtaacccaggccatagaacaccrcaaagcattcamtgaggtgatctgamaggaacacagactacacattcaataacatgaaaaatactggttttccacagatgaaccactctacagaaaacaactgcgcagaaaggaggcagacacacacacttcagtgcttttcacctccagcatctttataaaatcctatctggatggattcccctacaaatcaccctggaagcttattctgctctgtgtaacagtcacacatttcacacatcaagcctccacaaagccatgaaaataaacctttgccttgataagacacaaaatgctgaggaaccgaacacg

SEQ ID NO: 42067 - DNA, 587 bp, Chicken  19866894278591_3
cgatagcagctggtcttctaaagcagataactgtttaaaacagaagataactacatcaagcacatttcgcagaatcatagagtggctttggttggaaggagactttaagatcacctatttccaagcccctgctgtgggctggctgccatccacaggaccaggcagcccaggacccagcccggctgccacagttatcctgggcaagctgtgactttttgaaaagaacaccaaaaccttttaacactcccattgtaacccaggccatagaacaccrcaaagcattcamtgaggtgatctgamaggaacacagactacacattcaataacatgaaaaatactggttttccacagatgaaccactctacagaaaacaactgcgcagaaaggaggcagacacacacacttcagtgcttttcacctccagcatctttataaaatcctatctggatggattcccctacaaatcaccctggaagcttattctgctctgtgtaacagtcacacatttcacacatcaagcctccacaaagccatgaaaataaacctttgccttgataagacacaaaatgctgaggaaccgaacacgt

SEQ ID NO: 42068 - DNA, 599 bp, Chicken  19866894278593_1
  misc_feature (1)..(98): n is any nucleotide
nnnnnnnnnnnnnnnnnnnnnnnnnnnnnnnnnnnnnnnnnnnnnnnnnnnnnnnnnnnnnnnnnnnnnnnnnnnnnnnnnnnnnnnnnnnnnnnnnngaggcaggcacacacacacttcagtgcttttcacctccagcatctttataaaatcctatctggatggattcccctacaaatcaccctggaagcttattctgctctgtgtaacagtcacacatttcacacatcaagcctccacaaagccatgaaaataaacctttgccttgataagacacaaaatgctgaggaaccgaacacrtcttgtggtaaaccactccactatccactttgcttccagctcaatgcagccacctttatctcctgcattgcagagctttctgcgacttgagwgcaccttacagcagtggtagattcctgcgacgaacccaatgacttcaggctttcaccaatttgccaattctaaatgttaccccaatcaggagagatcactgtaaaatggtgcaaacccaccgccaacagattcgttcttttttcaggttactcctccttcattaactacagtctgcacggcctgaaaaaaawcctttctttgtctct

SEQ ID NO: 42069 - DNA, 599 bp, Chicken  19866894278593_2
  misc_feature (1)..(6): n is any nucleotide
nnnnnngaggcaggcacacacacacttcagtgcttttcacctccagcatctttataaaatcctatctggatggattcccctacaaatcaccctggaagcttattctgctctgtgtaacagtcacacatttcacacatcaagcctccacaaagccatgaaaataaacctttgccttgataagacacaaaatgctgaggaaccgaacacrtcttgtggtaaaccactccactatccactttgcttccagctcaatgcagccacctttatctcctgcattgcagagctttctgcgacttgagwgcaccttacagcagtggtagattcctgcgacgaacccaatgacttcaggctttcaccaatttgccaattctaaatgttaccccaatcaggagagatcactgtaaaatggtgcaaacccaccgccaacagattcgttcttttttcaggttactcctccttcattaactacagtctgcacggcctgaaaaaaawcctttctttgtctctggagcaacttatgtaccaacttcacccctagtcaagttcatgagatctcctattacacagctttattacacagactttcaaactttgtagtg

SEQ ID NO: 42070 - DNA, 470 bp, Chicken  19866894278593_3
tgaggaaccgaacacrtcttgtggtaaaccactccactatccactttgcttccagctcaatgcagccacctttatctcctgcattgcagagctttctgcgacttgagwgcaccttacagcagtggtagattcctgcgacgaacccaatgacttcaggctttcaccaatttgccaattctaaatgttaccccaatcaggagagatcactgtaaaatggtgcaaacccaccgccaacagattcgttcttttttcaggttactcctccttcattaactacagtctgcacggcctgaaaaaaawcctttctttgtctctggagcaacttatgtaccaacttcacccctagtcaagttcatgagatctcctattacacagctttattacacagactttcaaactttgtagtggtttctctgtgagatgccagcaattcgcccacatcattctggggagcattaatatccagacag

SEQ ID NO: 42071 - DNA, 599 bp, Chicken  19866894278595_1
  misc_feature (1)..(129): n is any nucleotide
nnnnnnnnnnnnnnnnnnnnnnnnnnnnnnnnnnnnnnnnnnnnnnnnnnnnnnnnnnnnnnnnnnnnnnnnnnnnnnnnnnnnnnnnnnnnnnnnnnnnnnnnnnnnnnnnnnnnnnnnnnnnnnnnnattttattgttttttttttaattagctcccatctagttcagtttaagtttttatttgagaaagtgtacatgtgaaaaagagcctgtctctagggaaagcagagctcttcaaaatgtaaactatatactttgcaaaaagaagttgcagcatctgttttggtggactgttaaytcacagcttctatagaaaacgtaaccttttcatgccaaatgtcctgaaatcatattagatatctccagaaagagggcatcaccagaaagataataattgcactgattcatttcttcatttcagtaaaatgtatttctaaataacctaaaataaaggagaaataagtgttttggtgtgtgtgtatgtacatataattttwtatatatatatatatatatatatatatagcaaatttatacttcctatttaaaatattttgcaaagagatgtcagagccaatggcatagctagaagacaag

SEQ ID NO: 42072 - DNA, 600 bp, Chicken  19866894278595_2
gtgaaaaagagcctgtctctagggaaagcagagctcttcaaaatgtaaactatatactttgcaaaaagaagttgcagcatctgttttggtggactgttaaytcacagcttctatagaaaacgtaaccttttcatgccaaatgtcctgaaatcatattagatatctccagaaagagggcatcaccagaaagataataattgcactgattcatttcttcatttcagtaaaatgtatttctaaataacctaaaataaaggagaaataagtgttttggtgtgtgtgtatgtacatataattttwtatatatatatatatatatatatatatagcaaatttatacttcctatttaaaatattttgcaaagagatgtcagagccaatggcatagctagaagacaagggagtgagcatacttacaactgttttgtacactggtataaacatttcttagttgtgtaattctttgtgttacatgtttctgctttagctggctacttaacagccacaatggtgtaaggtaatagttgtaaagcttctgttragctgatggcaggagctcttttagtaggtattccactgataaatcagtaaactgttttc

SEQ ID NO: 42073 - DNA, 600 bp, Chicken  19866894278595_3
taacctaaaataaaggagaaataagtgttttggtgtgtgtgtatgtacatataattttwtatatatatatatatatatatatatatagcaaatttatacttcctatttaaaatattttgcaaagagatgtcagagccaatggcatagctagaagacaagggagtgagcatacttacaactgttttgtacactggtataaacatttcttagttgtgtaattctttgtgttacatgtttctgctttagctggctacttaacagccacaatggtgtaaggtaatagttgtaaagcttctgttragctgatggcaggagctcttttagtaggtattccactgataaatcagtaaactgttttcttgactgctgatttgtccttcaaatcatgtcttagcggtgagttgagaggcttgctgcaaagaaacttggcatgatgaaaaacatgcataatacagaagaatgtatgcactctrtgattcatctagcagaatagtcacaacccgctgttacagagaaagattaagccttaccctgcaagtgaccatggcctcaagttcaagaacagtgtaccaactagtcaggacaggccagagtaggaca

SEQ ID NO: 42074 - DNA, 600 bp, Chicken  19866894278595_4
tacaactgttttgtacactggtataaacatttcttagttgtgtaattctttgtgttacatgtttctgctttagctggctacttaacagccacaatggtgtaaggtaatagttgtaaagcttctgttragctgatggcaggagctcttttagtaggtattccactgataaatcagtaaactgttttcttgactgctgatttgtccttcaaatcatgtcttagcggtgagttgagaggcttgctgcaaagaaacttggcatgatgaaaaacatgcataatacagaagaatgtatgcactctrtgattcatctagcagaatagtcacaacccgctgttacagagaaagattaagccttaccctgcaagtgaccatggcctcaagttcaagaacagtgtaccaactagtcaggacaggccagagtaggacatgtgacagaagccgatcttcaaagaggaaatagagttaatttatcctattgtgaaataggaggtgattacatgaatatgaatgttctcagaagaatgtttatatgtcttcctatattctggtctgtatttctaggtcttattttatttcccttgcccacaggaaatccatctt

SEQ ID NO: 42075 - DNA, 600 bp, Chicken  19866894278599_1
gagcccctcctctgagcccagtgtacgtgggctccctcgctccctgccggtgtctcgccgccctccttggggcagctggagtaccctgctctcctggagcacccttgtgacccctgcagggccacggcccctcctggctggccggcacctgtgcaccggggctgggtgggtgacaggaactcctggggcgggcccttaccgtacctcacacctctctctgcagccctttattgcccagccttggccggctgcctggaggcacggcgcgctgccaggtctctgtgccaggtggcttattgygatcccatggcactggacaccaactggtgtcggctgccaaggatgaacaatgtaattgctggaattacagtaaagtgctcccattcccactcattaactgctgagatagggcccctgggtccttccagggaacatctgctccagctgtgacctctatcagctgcatgcctatccttgcccagcacggaggagcccccagcccagccggtgcctaatagggatgggggctgttatccccaggcctgctatgtgtagagcatggctccaggcaacaggacacacctccctggttctgcgctg

SEQ ID NO: 42076 - DNA, 600 bp, Chicken  19866894278604_1
tgtagaaatacacttgaagatatacataggcacatattgtataagcacatacttattttggacacaaaacatttgtgttttggcagctgtgtctctagctatcaattcacagcttaatgctttgcttactctcacaattactgtacactttggtgagggggaaagcaatttcagtcacctgcaaaactccatccatgcatatctagaggtaactgcctgaaataacagtgactcttgtgcaagctacagacaataaaaatacaaagcatccatttctgttcctgtgatgacatttcttcrttatttgwgattaagcaatttgattctatggtttttttgtcctgcatctcatcatttaccctagcaattagtaattgcatgacattacaagcagtaatttctatcagttcaatttcagccaaaggaaacaataattacttttccagataaaaattaacactaccagtgtgtcctatgatataaacagagaaactccagacatactccaaggaatgaaagatgttacattcacatctcaaaaccaattctgaacaaaaacaagctccttataatcattaattccaacctcagagctcagtt

SEQ ID NO: 42077 - DNA, 600 bp, Chicken  19866894278604_2
tacacttgaagatatacataggcacatattgtataagcacatacttattttggacacaaaacatttgtgttttggcagctgtgtctctagctatcaattcacagcttaatgctttgcttactctcacaattactgtacactttggtgagggggaaagcaatttcagtcacctgcaaaactccatccatgcatatctagaggtaactgcctgaaataacagtgactcttgtgcaagctacagacaataaaaatacaaagcatccatttctgttcctgtgatgacatttcttcrttatttgwgattaagcaatttgattctatggtttttttgtcctgcatctcatcatttaccctagcaattagtaattgcatgacattacaagcagtaatttctatcagttcaatttcagccaaaggaaacaataattacttttccagataaaaattaacactaccagtgtgtcctatgatataaacagagaaactccagacatactccaaggaatgaaagatgttacattcacatctcaaaaccaattctgaacaaaaacaagctccttataatcattaattccaacctcagagctcagttaaacagga

SEQ ID NO: 42078 - DNA, 600 bp, Chicken  19866894278607_1
agacatcatttcatgagatattctttaatctttcctttgttttcttcacatctttttttgtttgttagtttttagtaaaaaataggatttttaaagcatatcctttacaatggagttgaatgtgttaccatcaccccaatgtagtgagctgtggttgcttctctcacagtgtgaggtggatttgtgcaagttacaacagaagaaaacttctgggccttctctttacttgtattataagatcagagagccatcaatgcaaagccacagtgaaggactgttctgcagtgaagacataacttyagacagccacgtaatttcctttccatgttggttcctgacaagagacaatacgttatacttccagaaatggataaccgggacacaagaggaaagtatgatagctttattttacagtctgtacaatcctgctttgtttttaaaatagatttttaggtccaggttygtackgtgctcaataattcatcctattctttccagatttgctaactgttaagtaaccagttcagggtgtttcaagacacctagtctggtttccaggaggattatggtgaacaaatgctatcacagaaaagcagttaa

SEQ ID NO: 42079 - DNA, 600 bp, Chicken  19866894278607_2
tcacagtgtgaggtggatttgtgcaagttacaacagaagaaaacttctgggccttctctttacttgtattataagatcagagagccatcaatgcaaagccacagtgaaggactgttctgcagtgaagacataacttyagacagccacgtaatttcctttccatgttggttcctgacaagagacaatacgttatacttccagaaatggataaccgggacacaagaggaaagtatgatagctttattttacagtctgtacaatcctgctttgtttttaaaatagatttttaggtccaggttygtackgtgctcaataattcatcctattctttccagatttgctaactgttaagtaaccagttcagggtgtttcaagacacctagtctggtttccaggaggattatggtgaacaaatgctatcacagaaaagcagttaaacattygtgctttgctttctgtataatttcatatttaagatacttctctgctgcttacagaccttctgtaactccagtgatgtgcttcccattgctgctgcaaaaaacagatttattggtcagagcaatcagttgtgtccacatcagttagacatcactaatt

SEQ ID NO: 42080 - DNA, 600 bp, Chicken  19866894278607_3
gtgtgaggtggatttgtgcaagttacaacagaagaaaacttctgggccttctctttacttgtattataagatcagagagccatcaatgcaaagccacagtgaaggactgttctgcagtgaagacataacttyagacagccacgtaatttcctttccatgttggttcctgacaagagacaatacgttatacttccagaaatggataaccgggacacaagaggaaagtatgatagctttattttacagtctgtacaatcctgctttgtttttaaaatagatttttaggtccaggttygtackgtgctcaataattcatcctattctttccagatttgctaactgttaagtaaccagttcagggtgtttcaagacacctagtctggtttccaggaggattatggtgaacaaatgctatcacagaaaagcagttaaacattygtgctttgctttctgtataatttcatatttaagatacttctctgctgcttacagaccttctgtaactccagtgatgtgcttcccattgctgctgcaaaaaacagatttattggtcagagcaatcagttgtgtccacatcagttagacatcactaattcactc

SEQ ID NO: 42081 - DNA, 600 bp, Chicken  19866894278607_4
ccacgtaatttcctttccatgttggttcctgacaagagacaatacgttatacttccagaaatggataaccgggacacaagaggaaagtatgatagctttattttacagtctgtacaatcctgctttgtttttaaaatagatttttaggtccaggttygtackgtgctcaataattcatcctattctttccagatttgctaactgttaagtaaccagttcagggtgtttcaagacacctagtctggtttccaggaggattatggtgaacaaatgctatcacagaaaagcagttaaacattygtgctttgctttctgtataatttcatatttaagatacttctctgctgcttacagaccttctgtaactccagtgatgtgcttcccattgctgctgcaaaaaacagatttattggtcagagcaatcagttgtgtccacatcagttagacatcactaattcactcctttgtcggagtaagatatttgcagatcactttttgaaactggctcttagatttggtcagggaagatgttgcttattcacgagatagaatagggtgtaactatgcagtttggttattgagcaagcaggtgataggaga

SEQ ID NO: 42082 - DNA, 600 bp, Chicken  19866894278607_5
tgttgcttattcacgagatagaatagggtgtaactatgcagtttggttattgagcaagcaggtgataggagaaacggtacgcctggttttaaacgctagttggaaaattcatcttgttggtgaggagttggtggggaattaaaacccctgtgtattaagctggttctgcataggtaattttcctgttagaccttatatctatcccactgttttttatttattattaataattaggacttcagatatttgaccaagaatagttgagtcactcgcagagctaatacgtctcagttcgacaaygtttccccaagtctctatctctcrkttttctttctaaaataattaatttcttttaattttgtaccttcttctgaaaagctctgagtttgttctgaggaacaatcatttatagaagtcttagaaattttctagagatgctcagatgccctaatgatattcggtacaaaagtaatgaatacaatggcaggaaatgttctttgtagagaccccatgtgaaggagattcctttccttccattccacatatgaaattgttccccctgatgttagatatttctcaagttcattaggtaacccagca

SEQ ID NO: 42083 - DNA, 600 bp, Chicken  19866894278607_6
agggtgtaactatgcagtttggttattgagcaagcaggtgataggagaaacggtacgcctggttttaaacgctagttggaaaattcatcttgttggtgaggagttggtggggaattaaaacccctgtgtattaagctggttctgcataggtaattttcctgttagaccttatatctatcccactgttttttatttattattaataattaggacttcagatatttgaccaagaatagttgagtcactcgcagagctaatacgtctcagttcgacaaygtttccccaagtctctatctctcrkttttctttctaaaataattaatttcttttaattttgtaccttcttctgaaaagctctgagtttgttctgaggaacaatcatttatagaagtcttagaaattttctagagatgctcagatgccctaatgatattcggtacaaaagtaatgaatacaatggcaggaaatgttctttgtagagaccccatgtgaaggagattcctttccttccattccacatatgaaattgttccccctgatgttagatatttctcaagttcattaggtaacccagcatctcatcttctctccagattaagg

SEQ ID NO: 42084 - DNA, 600 bp, Chicken  19866894278607_7
gggtgtaactatgcagtttggttattgagcaagcaggtgataggagaaacggtacgcctggttttaaacgctagttggaaaattcatcttgttggtgaggagttggtggggaattaaaacccctgtgtattaagctggttctgcataggtaattttcctgttagaccttatatctatcccactgttttttatttattattaataattaggacttcagatatttgaccaagaatagttgagtcactcgcagagctaatacgtctcagttcgacaaygtttccccaagtctctatctctcrkttttctttctaaaataattaatttcttttaattttgtaccttcttctgaaaagctctgagtttgttctgaggaacaatcatttatagaagtcttagaaattttctagagatgctcagatgccctaatgatattcggtacaaaagtaatgaatacaatggcaggaaatgttctttgtagagaccccatgtgaaggagattcctttccttccattccacatatgaaattgttccccctgatgttagatatttctcaagttcattaggtaacccagcatctcatcttctctccagattaaggc

SEQ ID NO: 42085 - DNA, 600 bp, Chicken  19866894278608_1
ccaccaaggctgcagagaaactggagaacgatgagcctctctgccagcactaagagcatttctttcttcagcatctgttgagactcccatgttgtgcactaattaccattgccatttaattaagctacacacaagttggggatggatgtggctgtatgcaggccctgaagtctcagctgtttctgcagagccaggattccagattatacatgtgatgctgtgtacaagtccagaagggctcgtggctatggcatatgctgtatggatggatgctgccttattagaattcatctgctggtrttcrctataaacccaattaatttcattaatgtgaactttgtgtctctaaccaggtgtaagtgttctttctataaagtcctctggccacatttgtctcctctctgaaacgcagatttctgcttgttctttcagctgttttcagtctgcagcagtttgcagtcattatgcggcattacaaataacttcagacaggagatgtgctgctcctctcttcagcagagtgctgttcagatctggaggttgcttctgttttcagacagaactgtagatctggactaagtgtgggcatcccagtgttag

SEQ ID NO: 42086 - DNA, 600 bp, Chicken  19866894278608_2
caaggctgcagagaaactggagaacgatgagcctctctgccagcactaagagcatttctttcttcagcatctgttgagactcccatgttgtgcactaattaccattgccatttaattaagctacacacaagttggggatggatgtggctgtatgcaggccctgaagtctcagctgtttctgcagagccaggattccagattatacatgtgatgctgtgtacaagtccagaagggctcgtggctatggcatatgctgtatggatggatgctgccttattagaattcatctgctggtrttcrctataaacccaattaatttcattaatgtgaactttgtgtctctaaccaggtgtaagtgttctttctataaagtcctctggccacatttgtctcctctctgaaacgcagatttctgcttgttctttcagctgttttcagtctgcagcagtttgcagtcattatgcggcattacaaataacttcagacaggagatgtgctgctcctctcttcagcagagtgctgttcagatctggaggttgcttctgttttcagacagaactgtagatctggactaagtgtgggcatcccagtgttaggctg

SEQ ID NO: 42087 - DNA, 600 bp, Chicken  19866894278608_3
acccaattaatttcattaatgtgaactttgtgtctctaaccaggtgtaagtgttctttctataaagtcctctggccacatttgtctcctctctgaaacgcagatttctgcttgttctttcagctgttttcagtctgcagcagtttgcagtcattatgcggcattacaaataacttcagacaggagatgtgctgctcctctcttcagcagagtgctgttcagatctggaggttgcttctgttttcagacagaactgtagatctggactaagtgtgggcatcccagtgttaggctgtcatcytattgtcagaactcatcacacgcatctgcctgatggcacaagtggcacgagtgctccggagctctggttctgcagtgagcctcccaatgagatgctgtcatctcagctgggttttcatttctttgtccagtagtgcttcctgcagcttacagtaagccgcaaatcacgctgtctttgttcattatgcaagcctgtctctggtcagggatgtgcgacttttagactcctgtaggctttcggatttcgttttcatctttagagaccttcctcccttcaccgtgcatttaccatctacgtttt

SEQ ID NO: 42088 - DNA, 599 bp, Chicken  19866894278619_1
  misc_feature (1)..(205): n is any nucleotide
nnnnnnnnnnnnnnnnnnnnnnnnnnnnnnnnnnnnnnnnnnnnnnnnnnnnnnnnnnnnnnnnnnnnnnnnnnnnnnnnnnnnnnnnnnnnnnnnnnnnnnnnnnnnnnnnnnnnnnnnnnnnnnnnnnnnnnnnnnnnnnnnnnnnnnnnnnnnnnnnnnnnnnnnnnnnnnnnnnnnnnnnnnnnnnnnnnnnnnnnnnnnnctgtttggaaaatagaatacaatgttaagtaggtctgtatatgctttaggaaagatccttcattttacctagcaaaatttccctgctactatgcmtaatagaagcatcatcgattctgatctacctccatgctcttttaagcctatttgtattttatttctttgtagatactaagccgtgttttagagatttgctgttatttcctgaagctttcaagaacttggtctgttccctctttctaacccctcaggcatttgcagatatgttgaaagtgaacaaaacactgaagagtctgaatgtagagtccaatttcatcactgggacgggtattttggcactgattgatgcgctgaaggagaatgaatccctgacagagattaaaattgacaaccag

SEQ ID NO: 42089 - DNA, 555 bp, Chicken  19866894278619_2
ttcctgaagctttcaagaacttggtctgttccctctttctaacccctcaggcatttgcagatatgttgaaagtgaacaaaacactgaagagtctgaatgtagagtccaatttcatcactgggacgggtattttggcactgattgatgcgctgaaggagaatgaatccctgacagagattaaaattgacaaccaggtaaagagagagcattgaactgcagtccccttctgtctcccttctgtgcagattcccagaaggccctggcaaagccaaggcagcctctggagctgttctgcagctsatgtcccgtgcaaccacaccatggaaaacgtccaaataaaactagtcaaaggaaacataaaacccagagctatgtctccagggaagggattctctttgyagtttgagcacagtactgaaatatcagctcttattttctgtgttttgagaacaaatattttattttcttttggggacatttcaccgtgtcaccaacagaggcagcagctggggacagctgtggagatggagattgccaagatgctggaggagaact

SEQ ID NO: 42090 - DNA, 456 bp, Chicken  19866894278619_3
tagagtccaatttcatcactgggacgggtattttggcactgattgatgcgctgaaggagaatgaatccctgacagagattaaaattgacaaccaggtaaagagagagcattgaactgcagtccccttctgtctcccttctgtgcagattcccagaaggccctggcaaagccaaggcagcctctggagctgttctgcagctsatgtcccgtgcaaccacaccatggaaaacgtccaaataaaactagtcaaaggaaacataaaacccagagctatgtctccagggaagggattctctttgyagtttgagcacagtactgaaatatcagctcttattttctgtgttttgagaacaaatattttattttcttttggggacatttcaccgtgtcaccaacagaggcagcagctggggacagctgtggagatggagattgccaagatgctggaggagaact

SEQ ID NO: 42091 - DNA, 600 bp, Chicken  19866894278621_1
attcattttacaaggacatttctagagatactgatcagttctccacagtgtgagaaagaaatggtgtggaggtagattatgaggcagagaactgtatgtgagccagtattttatgcaggactcaatagttactgctttcatccaataagttagttgtgagaaggaatcggagtacttctccagtgtattccctcagccaccacactgcaaatgcacaatttgtcaagcaagagaaagctgaagcttcttagctgaaaatgtacctacctctatatagtgtgtcatgtcactgtgtagtgrtaccagagctagttcaaacttaggatgccttttgcaaggcataatgttgtgaaggaagaaatgcagttgtgaccctgactctgcttttcagactcttccacttaacagaattgtgaataacagtgttaacatcccatgctatcaaaatccctaacaaaatcaaatttacgtgcatactgatactctctactcacttattgcaagaatgagctctcgtctttgcgcaaatccaataagtcgctccgagtcttttgagaccacaactgggaagccattgtagtcagtctccttgattaatgt

SEQ ID NO: 42092 - DNA, 600 bp, Chicken  19866894278626_1
tgctttagtgatttcctgacctggggcttttattttccttctgtgaatattagtgaaagtacctttttgttcatatgaacactcatgaaaagcacattttgagcccctggctcagatttgcttaatctaatcaagaaaaaggaaaatcacatgatgtatattaggtaaccagttgcccaatttgtgggtgaccattagatcatttaagatagtaaaagttgtaatagcttgcagtgtgctcttagattattcataaaaataagaaatctgctctcatgttatggaagttctctcagtaasgactgttgcaagatagggaatacttttgctggaaaatatataygcttgaaagaaacttcagatttctcataaggcaaagcaaaaacatgaattgcttcaaatgtagaaagagcttccattgtctgcattgctcaaaggttttctgattgaaaagatatatmcaggtaaaacagcctctttgcagtcaatcttgtaaaaaaaaatggtgcataaagtacagatgtggaaattacaaaaaaacagcaatcctcacagatatctgcaggtacttttcaataatgttacaattttacaatttta

SEQ ID NO: 42093 - DNA, 600 bp, Chicken  19866894278626_2
tgaatattagtgaaagtacctttttgttcatatgaacactcatgaaaagcacattttgagcccctggctcagatttgcttaatctaatcaagaaaaaggaaaatcacatgatgtatattaggtaaccagttgcccaatttgtgggtgaccattagatcatttaagatagtaaaagttgtaatagcttgcagtgtgctcttagattattcataaaaataagaaatctgctctcatgttatggaagttctctcagtaasgactgttgcaagatagggaatacttttgctggaaaatatataygcttgaaagaaacttcagatttctcataaggcaaagcaaaaacatgaattgcttcaaatgtagaaagagcttccattgtctgcattgctcaaaggttttctgattgaaaagatatatmcaggtaaaacagcctctttgcagtcaatcttgtaaaaaaaaatggtgcataaagtacagatgtggaaattacaaaaaaacagcaatcctcacagatatctgcaggtacttttcaataatgttacaattttacaattttatttatgcaagctcaaatggatgtgatatttgtatgcatgcttt

SEQ ID NO: 42094 - DNA, 541 bp, Chicken  19866894278626_3
taggtaaccagttgcccaatttgtgggtgaccattagatcatttaagatagtaaaagttgtaatagcttgcagtgtgctcttagattattcataaaaataagaaatctgctctcatgttatggaagttctctcagtaasgactgttgcaagatagggaatacttttgctggaaaatatataygcttgaaagaaacttcagatttctcataaggcaaagcaaaaacatgaattgcttcaaatgtagaaagagcttccattgtctgcattgctcaaaggttttctgattgaaaagatatatmcaggtaaaacagcctctttgcagtcaatcttgtaaaaaaaaatggtgcataaagtacagatgtggaaattacaaaaaaacagcaatcctcacagatatctgcaggtacttttcaataatgttacaattttacaattttatttatgcaagctcaaatggatgtgatatttgtatgcatgcttttgaaaagcctttgaaaacacacaggaaagcacattttatgtgtttgtgtacatgttcca

SEQ ID NO: 42095 - DNA, 600 bp, Chicken  19866894278632_1
aagtccaatgtacaggtttgtgagtttaatagaaattgtctccgttgtaacagcatgctttatattccagtcacgatgcatcagcagtttattctggagttcattctgaggaggtaatgactaggaaaatgacaaagaaaactgttactgaccattagtgagcaatcactctgtcatattaccaagataatttagataaatgtggggtttagctgtctccaagggagacgggatgctgatatcttagatagtgcagcttttaaagattttccatttgatgaatatatatttttgcctcaragacatagactagttccccatatcttcctgatggaaatagtaatagctcatttcagagctgtcatctttgctcagttgtatagaagctatgtagttttgcagcaaatatagaaagctctgtttggaaacataaggtatttaataaacaaatgtagaacatatcatgtttttctccaattggcttccattattttaccagctgctaattatgcagtgttgatatttagagaaagagtaacagatttatctgttccgtctggataatcaggcttttagagcatgtcctaccaacattggact

SEQ ID NO: 42096 - DNA, 599 bp, Chicken  19866894278646_1
  misc_feature (1)..(83): n is any nucleotide
nnnnnnnnnnnnnnnnnnnnnnnnnnnnnnnnnnnnnnnnnnnnnnnnnnnnnnnnnnnnnnnnnnnnnnnnnnnnnnnnnnnctatgccatagagatcataacgcttctggcttaaaatagggatttgttgacggatttctgcaagtttcttcaaatctggaggggaaaaaaagagctattagaacagtggtcaaaaaggacttgctgacgcaaggcaggaagagagcagctttcacagtgattgagtctgtagggcacagctactgggcaaccaggaaagaagcctcagcttcgctcyttcctaagatggcagcttcctcataggtaaagaagcaggaatagtccactcctgctgctgcytgttctttcctctagtaaaggctgagaagggatgggaacactgcttcatctggaactgagtgagtaaggccacagacattaaaaacaaacaaacacctgtctctttagtcttatgcattgtactcattaaaagtaggacaaaaacctttgcttaccgatatctgtgtagataactgtttcctcagccccagctttggctatgacttcacccctgcaacatgaagcacatttgttctg

SEQ ID NO: 42097 - DNA, 599 bp, Chicken  19866894278646_2
  misc_feature (1)..(21): n is any nucleotide
nnnnnnnnnnnnnnnnnnnnnctatgccatagagatcataacgcttctggcttaaaatagggatttgttgacggatttctgcaagtttcttcaaatctggaggggaaaaaaagagctattagaacagtggtcaaaaaggacttgctgacgcaaggcaggaagagagcagctttcacagtgattgagtctgtagggcacagctactgggcaaccaggaaagaagcctcagcttcgctcyttcctaagatggcagcttcctcataggtaaagaagcaggaatagtccactcctgctgctgcytgttctttcctctagtaaaggctgagaagggatgggaacactgcttcatctggaactgagtgagtaaggccacagacattaaaaacaaacaaacacctgtctctttagtcttatgcattgtactcattaaaagtaggacaaaaacctttgcttaccgatatctgtgtagataactgtttcctcagccccagctttggctatgacttcacccctgcaacatgaagcacatttgttctgctgtcactaacacagtctcaaggcatcagatcagctgctgctgtttgtataaaagggagttt

SEQ ID NO: 42098 - DNA, 599 bp, Chicken  19866894278647_1
  misc_feature (1)..(11): n is any nucleotide
nnnnnnnnnnngaaatgcctgagcacttatctgcgtgctttatgcaggcaatgtgttggaaggtagaaaatagggacagcaagaaaaacagccatttcacaggggaatttcgatgtgcagaaaacagcaccagagctatgggagaaggatgctgggcttctcacttgaagccgaatctgaaggctctaaaacctttgcaagcagaatttccctcctgagcacatctccccatctcctgcttcccgcatggccaatgccaagtgctaactcacagcagcccacaaaggaattcccttgctycattcagagaaggtcagccttccctgggagctgtgtagctttaaagacaggtgggacttttcaccctgccttctccgaagagatttccgatgagatattgcaagcaaaggaagacaaaaagctgaaaaggaaagctggaagtaatcatcattgacctgcacacaagatggttgatccgaaagtgatcatgaaggaaaaataacccagtgctgactatgactgtgcatacaagtatacctagtgctattaacatacttaaaatgcaaagtcttggacactgcctccaaacaagaggattt

SEQ ID NO: 42099 - DNA, 600 bp, Chicken  19866894278648_1
caggaaataattcatctagaacagtatgtatgtatttccttgatgtttgaacattgtagagtcattcttacagacctcctgggagctttcattctagtcagaaaattccagtctcacctgcttggactcctattagccggagttcttgccaacaaactgcaaaccggtgcatagaacggtgttcctgggcatgtgcagctgggccattgtcttggcaggggtgaaatgatttctgtcttgatttcagccccagtattaccactgtcctcagaagattgttttgatactgtgttgtttgartacatttaacttcctctgttgaratggtttgaagtgtggataagtctgttgttaagcatagttgtaattgaagtaaagccatagctgttrggaccccttattctgtaggaaatttgcatgagaatcaattctagataaggttatctaaatatcagtatatatacatacaaacatacgccaaatatctaagrtctctaacaatcagtatggtcaaacaatggcatggagtgacagatcacacagaagaaagaacacacagcaagattcagttgcccatatatgtgtctagtgctcttggga

SEQ ID NO: 42100 - DNA, 600 bp, Chicken  19866894278648_2
gtatgtatgtatttccttgatgtttgaacattgtagagtcattcttacagacctcctgggagctttcattctagtcagaaaattccagtctcacctgcttggactcctattagccggagttcttgccaacaaactgcaaaccggtgcatagaacggtgttcctgggcatgtgcagctgggccattgtcttggcaggggtgaaatgatttctgtcttgatttcagccccagtattaccactgtcctcagaagattgttttgatactgtgttgtttgartacatttaacttcctctgttgaratggtttgaagtgtggataagtctgttgttaagcatagttgtaattgaagtaaagccatagctgttrggaccccttattctgtaggaaatttgcatgagaatcaattctagataaggttatctaaatatcagtatatatacatacaaacatacgccaaatatctaagrtctctaacaatcagtatggtcaaacaatggcatggagtgacagatcacacagaagaaagaacacacagcaagattcagttgcccatatatgtgtctagtgctcttgggaatgcttaagggtatttgaatcaa

SEQ ID NO: 42101 - DNA, 600 bp, Chicken  19866894278648_3
attctagtcagaaaattccagtctcacctgcttggactcctattagccggagttcttgccaacaaactgcaaaccggtgcatagaacggtgttcctgggcatgtgcagctgggccattgtcttggcaggggtgaaatgatttctgtcttgatttcagccccagtattaccactgtcctcagaagattgttttgatactgtgttgtttgartacatttaacttcctctgttgaratggtttgaagtgtggataagtctgttgttaagcatagttgtaattgaagtaaagccatagctgttrggaccccttattctgtaggaaatttgcatgagaatcaattctagataaggttatctaaatatcagtatatatacatacaaacatacgccaaatatctaagrtctctaacaatcagtatggtcaaacaatggcatggagtgacagatcacacagaagaaagaacacacagcaagattcagttgcccatatatgtgtctagtgctcttgggaatgcttaagggtatttgaatcaaccaccaaatctaggagataggacactaacagcctgatcctggaaggaccaatcaaccctatcactag

SEQ ID NO: 42102 - DNA, 600 bp, Chicken  19866894278648_4
tgtgcagctgggccattgtcttggcaggggtgaaatgatttctgtcttgatttcagccccagtattaccactgtcctcagaagattgttttgatactgtgttgtttgartacatttaacttcctctgttgaratggtttgaagtgtggataagtctgttgttaagcatagttgtaattgaagtaaagccatagctgttrggaccccttattctgtaggaaatttgcatgagaatcaattctagataaggttatctaaatatcagtatatatacatacaaacatacgccaaatatctaagrtctctaacaatcagtatggtcaaacaatggcatggagtgacagatcacacagaagaaagaacacacagcaagattcagttgcccatatatgtgtctagtgctcttgggaatgcttaagggtatttgaatcaaccaccaaatctaggagataggacactaacagcctgatcctggaaggaccaatcaaccctatcactagatatctctgtgagatcaggtaaattgatatataatcacaaaggaatgtattagaacgtgaacaggaggaactgagatacatgtaagtgtcttaatcttcac

SEQ ID NO: 42103 - DNA, 600 bp, Chicken  19866894278650_1
acttatcaaaagtcttccaaacctagtgtctttaacaacaggctgtgttattttctagttagtctatttgtctgctagaatcgatttgtgtcatgagatatttcttaaaaattgaactgatagtgtttctgatgaaaaaatttctctcatgcaaaggcaatgaaggccggttttaagggaacaaattctttacatttcatattctctacaggagaatgatttttaaataatgtagatatgtttttgataataattcagtagctaattttaaaatagtgtaacaaattgctagtttcaatwcaaatcaattgcaattcaaatgcatcatttgtttttagcagtaagggcaagagatatagtcactctctcaggtaatcagatcctaacaaatttagaagcagtagcttcacatgtaacaaatgaacattgtaggtaaaggtgtataaaggaaataaagaaaaagctatacattgttttctagtgagaaaaatattcttaataattcagtgctatttataagacttttcctgagttttgtttaacaatgtactgttgatttctgtaataactgatttagttctttgagtatcttcttagcaa

SEQ ID NO: 42104 - DNA, 600 bp, Chicken  19866894278657_1
cagctgacctctgcagagtgctgcacgtccaggcacagccaggtgctcacgccacccgcacacccttatcagttctccgtccaacagtcagagcgaagaagctgggctggaaaagtgataagggggtgagagcggccacgggatcgccttctcctgaaactttggcgtggaaaaaaaaggcaaagctggtagcaaacggagtaaataagatgtcaccggttcctctctgcggccctctgcactggtgtggggatgctgctggaggagcaggcgatgctgttggggcagtcccagcctccygctgccccgcagtgccgccgctctgccgtgctgcagacactccccattcacaaatttcataacctccagtcccctccctgcgggtgggattggacgccccgtggcccccccggcccgccggattaggctgtacaaattgtggggctgcagccgggcggattcgtctgacgctgcagaaaggtgctggcagctgtgtctgtgcaccccaatgctgcccgccccaaactggctgggggtgtccccacctgcaaagagcgaagggtcgtgggcggtgcctgggggcatctccttcccctgtgc

SEQ ID NO: 42105 - DNA, 600 bp, Chicken  19866894278660_1
tggcgacggaccggggaaaggaacatgagaaggagatcaagccacctatcagcactactggtaacctcatagcactgctctgcaccgtacagaagtacgtacacagaacaaagcccccagcaggaatgttttctctctgaaaaggagttggttgcaattcatgttgccgcaaagtggcttttccacagggcagacttcttgcaggtccagctgcagctcgcagcccagcaggcctgctggagaccgactctgcattgctcgctgctcccgtctataaataacatttcagatgcccaggcygcacagtcacgctgtaggaaaggtcaggcacaaccgtcactgcccaaagggatcgctctccacaactgccccactgctgaggctcatttttgggctgcagccaacaactctgggccttatcaggcctggatcgcgctgggaattttctgacggaacaattttattggaaaatgctgattcatagacatcaaaatgtttcacggaaatgcacaagtttttattaatttacaaggaaacccagacattattttgatgcactagtgactggtaggctgccagggtatcccatggctcccagtg

SEQ ID NO: 42106 - DNA, 600 bp, Chicken  19866894278672_1
cgttagtaatgtgggcagcaagtgtgtagtgctgtgtgagggagtgccttgttttatggtaagtttctacctttagggataaaatcacccctgtgagctattcacaagaatgtaaaaacatgttacagtaatacgcttttctctttaaaagacaagaataaacaccaagaacaagaaggcaatcggatgcttagttgtatcagccagtctttcctggctgagatgtgtgctttgcgtccatagagtattaactgaagtcctgctgtattccagcagcagaaagcacaaaattcagtgctygctttcaagaagaaggcagccctagaagaggggggaagttgcaggcgctgtgagttcagcctggtagcagctgagtaactgcttctgtccgtgaaataagggctccctcctcatcctgggctggagggtctcgtgaaatgggatgctgcttttaacaggcagtgtggaatgaggagtgtcatacaggagccctggctgccaggtccgcctgttagccatggcatgrccaaattaaaatcaattccaattaaaatagccatggttggagggatccgactgaggaagagaatcttgatgggt

SEQ ID NO: 42107 - DNA, 600 bp, Chicken  19866894278672_2
gtgctttgcgtccatagagtattaactgaagtcctgctgtattccagcagcagaaagcacaaaattcagtgctygctttcaagaagaaggcagccctagaagaggggggaagttgcaggcgctgtgagttcagcctggtagcagctgagtaactgcttctgtccgtgaaataagggctccctcctcatcctgggctggagggtctcgtgaaatgggatgctgcttttaacaggcagtgtggaatgaggagtgtcatacaggagccctggctgccaggtccgcctgttagccatggcatgrccaaattaaaatcaattccaattaaaatagccatggttggagggatccgactgaggaagagaatcttgatgggtttcctgagcgtgccagattgcacattaaaagtgcaggcagtgctgctaggctcctgtgtgtgtaacttggcagccccatggggactgctgccccttctctgatcccagccctcagggcactgacaggttgcactgttttctctgcccagagcagagtcagctcctgggtggccgtgggcacaaggcagctggcggggggacgcttctatgcatgttcctcactttc

SEQ ID NO: 42108 - DNA, 600 bp, Chicken  19866894278674_1
cctggtacttctaatgatgaaaatcctcatctaattatctatcttgagctatacctgttgaatagatacactttttttaggcaactaagggaagagaatcacaacgcaaaagaagaaattatgactctagagacaaagaacagtgaaatgatgtcaatgttgaatcagtctaatcagaagatccttgagcttgaaaaggaacttaatgaaaaaaaaagactacttaaagagaaaaatgctcttgtcagtgaaaatgcagagctgagagcgcttaatgcacaacagcataacaacttgaamttatgccatcaagaaatggagaattcaaggcgagagctcaacttactacaaaccattatttcccagttgtctttaagtacatctgaagaggtacagtaactgatacattattctaaattgtgttttgtatcttaaataattttaactgatattgcgtggaagtcttgtgacattgttgagaaattatctgagtatatctttttttttttccaagatgcatgaacaaaatgttatttcagttgaaatacttagttttcatctttgtgtcaacgacaaggaacaggtgctttggagttcatt

SEQ ID NO: 42109 - DNA, 600 bp, Chicken  19866894278683_1
aaattcctccctcagaggaaaatagccctagaaatcagattagaaagtgtttaaagggaattatttgtcaaagtggggttttttttaattttttttttttttttttactgaagttaagataactaataataatctcctccatgcctctctaaagagtactttatttcctatcgctgaaccgtgtgggttgcacgcagactgtaactttgctatgtactgtacaggtaatttacctgccagcccgacactggcactcatttcaccctgaaagcttctctgtggttgcggtcacgttacacyrctgagagtgccaaatctgaagtattcctcaggaatcaaggtgtaggtggttggtgttgtctcatgcacgtatcaaacagcaaggaaaatgtcagaaagcttatcttcccccttcactcattgagtatgtattcgtatactacaagatatcagatttaccagtgcctgagtactttaaaaagccctggcaagttcatctgattctgaattaatgagatctcattacactaaatgtttgaacagcagaaaaaccctctatgtaaatgagatgtgagtggaccaagtgcttgtcacttccca

SEQ ID NO: 42110 - DNA, 600 bp, Chicken  19866894278683_2
aattcctccctcagaggaaaatagccctagaaatcagattagaaagtgtttaaagggaattatttgtcaaagtggggttttttttaattttttttttttttttttactgaagttaagataactaataataatctcctccatgcctctctaaagagtactttatttcctatcgctgaaccgtgtgggttgcacgcagactgtaactttgctatgtactgtacaggtaatttacctgccagcccgacactggcactcatttcaccctgaaagcttctctgtggttgcggtcacgttacacyrctgagagtgccaaatctgaagtattcctcaggaatcaaggtgtaggtggttggtgttgtctcatgcacgtatcaaacagcaaggaaaatgtcagaaagcttatcttcccccttcactcattgagtatgtattcgtatactacaagatatcagatttaccagtgcctgagtactttaaaaagccctggcaagttcatctgattctgaattaatgagatctcattacactaaatgtttgaacagcagaaaaaccctctatgtaaatgagatgtgagtggaccaagtgcttgtcacttcccat

SEQ ID NO: 42111 - DNA, 600 bp, Chicken  19866894278683_3
tggaccaagtgcttgtcacttcccatcaggctgttgtgtgacgttacctacgtatttcatatacaggcacgcatattagaaggaaacatctgtctggtagggaggaatgtcatgtctttcgaatcagctgtaatataggattttttttattgaaaagagacatttttgaaaaggacccagtgatcttattgcaaaaaaataaagaagaaaagaccagaaggaaagattctggcagcttactattaaatttcaatcaagcctgtatagttagcaataaaacgtttacgagtttgtaaatgytaattttcttcaaactcttactgtcatgtgtggaattttcatttatactaattgtccattttgtacagctgcctacattcacagcttaacagtcagtctgcatttgtcacattgaggtacagatgagatgtaaatacgtaaaaccagaaattgcctactgctgttttgatgttttcacaaaatgatatactgcaaaggtgtacatttctggtgttaactacctgttgtcagttgctggtgctcttgccctcacaagtgttgtaagcagaatgggcattaaactgaaataaaaccaatgta

SEQ ID NO: 42112 - DNA, 600 bp, Chicken  19866894278683_4
aaaaccagaaattgcctactgctgttttgatgttttcacaaaatgatatactgcaaaggtgtacatttctggtgttaactacctgttgtcagttgctggtgctcttgccctcacaagtgttgtaagcagaatgggcattaaactgaaataaaaccaatgtacaaatccttgtggggctctgtactttgcttaaaagccaaatgtagacattgttcaagcttattttgttctctggaagttattgtggtcaatacaagcataatttgtttcatctaggatgctaagaagctgtgagcctcktagcttagggaagagcctcggcatagctgatcacaatagatgccagttaatttgaatctagattttttttcccctctgttacttgacagttttctttgattcttctgaatactggggattgtgtttaggctaaaccacttctaattataccccagcacaaacatatagcttatggctatattttaatcagtttcagaaaaagtaataaaaatattattgcatatgccaaaggatggtgttgctacatgctattttaaatggtgtttaagtatggttataagcataccagtacaatgaaat

SEQ ID NO: 42113 - DNA, 600 bp, Chicken  19866894278698_1
catgttagacacgtaatatcactaaacatagacttttagtcagatatttagtttaggttaaattccagcactgtaactctgaagcagtaacatcaattaaacatgtggagctaaagtagctttacaaaacagaatttggccctatggcttaggagtcttcaccctacagaagctctgtacccaattttgttgctgtagcactgagttgaacctaaaggtatagctctagctcctgtgtgcaccagcttatcatagaatcatagaattgtagtttgggttggaagggatctttaagggccrtttaggccaactcccctgcactaaacagggrcatcyrcagctcagtcaggcactcagagccctgcccagtctgacctggagtgtctcaagggacagggcttccatcacctctctgggcaccctgctctagcgcccatcccagtaatgctcatttagagtgttctcatcctcmcagacatgccctrttttggataaactccagctacttgttacataccattgcctttcttcccttgttgtctctgtcttctcttcttaggtcacatcagaaatagttcaggcagatttgatactcaaaaa

SEQ ID NO: 42114 - DNA, 600 bp, Chicken  19866894278698_2
acttttagtcagatatttagtttaggttaaattccagcactgtaactctgaagcagtaacatcaattaaacatgtggagctaaagtagctttacaaaacagaatttggccctatggcttaggagtcttcaccctacagaagctctgtacccaattttgttgctgtagcactgagttgaacctaaaggtatagctctagctcctgtgtgcaccagcttatcatagaatcatagaattgtagtttgggttggaagggatctttaagggccrtttaggccaactcccctgcactaaacagggrcatcyrcagctcagtcaggcactcagagccctgcccagtctgacctggagtgtctcaagggacagggcttccatcacctctctgggcaccctgctctagcgcccatcccagtaatgctcatttagagtgttctcatcctcmcagacatgccctrttttggataaactccagctacttgttacataccattgcctttcttcccttgttgtctctgtcttctcttcttaggtcacatcagaaatagttcaggcagatttgatactcaaaaacatcaatctaacagtaaaataaatggaatcc

SEQ ID NO: 42115 - DNA, 600 bp, Chicken  19866894278698_3
tagtcagatatttagtttaggttaaattccagcactgtaactctgaagcagtaacatcaattaaacatgtggagctaaagtagctttacaaaacagaatttggccctatggcttaggagtcttcaccctacagaagctctgtacccaattttgttgctgtagcactgagttgaacctaaaggtatagctctagctcctgtgtgcaccagcttatcatagaatcatagaattgtagtttgggttggaagggatctttaagggccrtttaggccaactcccctgcactaaacagggrcatcyrcagctcagtcaggcactcagagccctgcccagtctgacctggagtgtctcaagggacagggcttccatcacctctctgggcaccctgctctagcgcccatcccagtaatgctcatttagagtgttctcatcctcmcagacatgccctrttttggataaactccagctacttgttacataccattgcctttcttcccttgttgtctctgtcttctcttcttaggtcacatcagaaatagttcaggcagatttgatactcaaaaacatcaatctaacagtaaaataaatggaatccgagtt

SEQ ID NO: 42116 - DNA, 600 bp, Chicken  19866894278698_4
agtcagatatttagtttaggttaaattccagcactgtaactctgaagcagtaacatcaattaaacatgtggagctaaagtagctttacaaaacagaatttggccctatggcttaggagtcttcaccctacagaagctctgtacccaattttgttgctgtagcactgagttgaacctaaaggtatagctctagctcctgtgtgcaccagcttatcatagaatcatagaattgtagtttgggttggaagggatctttaagggccrtttaggccaactcccctgcactaaacagggrcatcyrcagctcagtcaggcactcagagccctgcccagtctgacctggagtgtctcaagggacagggcttccatcacctctctgggcaccctgctctagcgcccatcccagtaatgctcatttagagtgttctcatcctcmcagacatgccctrttttggataaactccagctacttgttacataccattgcctttcttcccttgttgtctctgtcttctcttcttaggtcacatcagaaatagttcaggcagatttgatactcaaaaacatcaatctaacagtaaaataaatggaatccgagtta

SEQ ID NO: 42117 - DNA, 600 bp, Chicken  19866894278698_5
ctctgtacccaattttgttgctgtagcactgagttgaacctaaaggtatagctctagctcctgtgtgcaccagcttatcatagaatcatagaattgtagtttgggttggaagggatctttaagggccrtttaggccaactcccctgcactaaacagggrcatcyrcagctcagtcaggcactcagagccctgcccagtctgacctggagtgtctcaagggacagggcttccatcacctctctgggcaccctgctctagcgcccatcccagtaatgctcatttagagtgttctcatcctcmcagacatgccctrttttggataaactccagctacttgttacataccattgcctttcttcccttgttgtctctgtcttctcttcttaggtcacatcagaaatagttcaggcagatttgatactcaaaaacatcaatctaacagtaaaataaatggaatccgagttaagacttagtcccattcatggtcttgaaatgaaatgttaaggttcaatatatgactctagattaaattataaccacgtctctataataaagaaaccrttggctggaacaactctcagattaatcattccccttccg

SEQ ID NO: 42118 - DNA, 600 bp, Chicken  19866894278698_6
tttgttgctgtagcactgagttgaacctaaaggtatagctctagctcctgtgtgcaccagcttatcatagaatcatagaattgtagtttgggttggaagggatctttaagggccrtttaggccaactcccctgcactaaacagggrcatcyrcagctcagtcaggcactcagagccctgcccagtctgacctggagtgtctcaagggacagggcttccatcacctctctgggcaccctgctctagcgcccatcccagtaatgctcatttagagtgttctcatcctcmcagacatgccctrttttggataaactccagctacttgttacataccattgcctttcttcccttgttgtctctgtcttctcttcttaggtcacatcagaaatagttcaggcagatttgatactcaaaaacatcaatctaacagtaaaataaatggaatccgagttaagacttagtcccattcatggtcttgaaatgaaatgttaaggttcaatatatgactctagattaaattataaccacgtctctataataaagaaaccrttggctggaacaactctcagattaatcattccccttccgtaaagaggactag

SEQ ID NO: 42119 - DNA, 509 bp, Chicken  19866894278698_7
ccatcccagtaatgctcatttagagtgttctcatcctcmcagacatgccctrttttggataaactccagctacttgttacataccattgcctttcttcccttgttgtctctgtcttctcttcttaggtcacatcagaaatagttcaggcagatttgatactcaaaaacatcaatctaacagtaaaataaatggaatccgagttaagacttagtcccattcatggtcttgaaatgaaatgttaaggttcaatatatgactctagattaaattataaccacgtctctataataaagaaaccrttggctggaacaactctcagattaatcattccccttccgtaaagaggactagatgcatttaatccatacctctacctggtccctcctgggtagatcttcctcagactcaggcagattattgacccctctggtcagtctaaaactagcaagaggccactatacttacctgtgaagttatggactaaaagcagaagttgctgaatataaca

SEQ ID NO: 42120 - DNA, 600 bp, Chicken  19866894278701_1
agctcggctccgtgtgttttgtggagctggatcgagaaggggcttcatatggggaaactgtgcatgtcgtgagagtgggcagcctgatctagcgggtggcaaccctgtccatggcagtgggttggatctttgagaccccttccaacccaagagattctatgattttttggccacacgcgcagcaataaatacaggaggccagggcttgttttcctggtgagcagctgggtttgtgtatgtgctgctgagcccttttccctcctcgtctccaaacagggtggcctgtgctctcggagcaaycacagcaccttcctaaccacrcaggctcggagttgcagtagattggagtcgaaaatagccaagcaagctacaaacacacctctttttccttttcttttccccaggatggttgagcacaaccataactgtatgggtttttaatgcagccatgatgtaagcatacacaaatgcctccctcccggtgctcctggcgtgtttccaatgcagccatgttacctggcacagtcattccagagaatttcctctcctctttcttrctgcatgggttgcagaatgtggctttaatccgggttttctccg

SEQ ID NO: 42121 - DNA, 600 bp, Chicken  19866894278701_2
tggagctggatcgagaaggggcttcatatggggaaactgtgcatgtcgtgagagtgggcagcctgatctagcgggtggcaaccctgtccatggcagtgggttggatctttgagaccccttccaacccaagagattctatgattttttggccacacgcgcagcaataaatacaggaggccagggcttgttttcctggtgagcagctgggtttgtgtatgtgctgctgagcccttttccctcctcgtctccaaacagggtggcctgtgctctcggagcaaycacagcaccttcctaaccacrcaggctcggagttgcagtagattggagtcgaaaatagccaagcaagctacaaacacacctctttttccttttcttttccccaggatggttgagcacaaccataactgtatgggtttttaatgcagccatgatgtaagcatacacaaatgcctccctcccggtgctcctggcgtgtttccaatgcagccatgttacctggcacagtcattccagagaatttcctctcctctttcttrctgcatgggttgcagaatgtggctttaatccgggttttctccggttccagaarggatgaaatct

SEQ ID NO: 42122 - DNA, 600 bp, Chicken  19866894278701_3
cctcctcgtctccaaacagggtggcctgtgctctcggagcaaycacagcaccttcctaaccacrcaggctcggagttgcagtagattggagtcgaaaatagccaagcaagctacaaacacacctctttttccttttcttttccccaggatggttgagcacaaccataactgtatgggtttttaatgcagccatgatgtaagcatacacaaatgcctccctcccggtgctcctggcgtgtttccaatgcagccatgttacctggcacagtcattccagagaatttcctctcctctttcttrctgcatgggttgcagaatgtggctttaatccgggttttctccggttccagaarggatgaaatcttatataggcactgcagaactgcttctgtggagcctgttgctgggaagcgtccagcggagctgtgcaggttcgaaaagtggaggcatctcaggcattttaaagcctaactcctccaggcctcctgctctgccaggtacatctgattccgtgcgatttctgctttgcatagccgagcttcattatagcaaactggcaaagtttctgcatttcaacgagctttctgaaagcggagtttt

SEQ ID NO: 42123 - DNA, 600 bp, Chicken  19866894278701_4
tcctaaccacrcaggctcggagttgcagtagattggagtcgaaaatagccaagcaagctacaaacacacctctttttccttttcttttccccaggatggttgagcacaaccataactgtatgggtttttaatgcagccatgatgtaagcatacacaaatgcctccctcccggtgctcctggcgtgtttccaatgcagccatgttacctggcacagtcattccagagaatttcctctcctctttcttrctgcatgggttgcagaatgtggctttaatccgggttttctccggttccagaarggatgaaatcttatataggcactgcagaactgcttctgtggagcctgttgctgggaagcgtccagcggagctgtgcaggttcgaaaagtggaggcatctcaggcattttaaagcctaactcctccaggcctcctgctctgccaggtacatctgattccgtgcgatttctgctttgcatagccgagcttcattatagcaaactggcaaagtttctgcatttcaacgagctttctgaaagcggagtttttcatcccccgaaagccacggcgcacagttggattggtgcgaaaattgctgcgt

SEQ ID NO: 42124 - DNA, 600 bp, Chicken  19866894278717_1
ctagcaattgtcatccatgtattgtgactagaggctttttgtagtggtaacgacgcttaggagataatttggcttttaggaggaccctcaaggcctgcactgacaatgggcagagttcggactgctcaattgtttgcaaaaggctaaaggaaaatcaaagtccgagactttgtctcttaaccactgcctagacattgtcactcaagttttaaatgctttctcctcttgcgaggaggatcttagcgaaagaggctggaggaaaggtcagaagttggtttagacagatggtgatgttgatgsaaggtatttcttttcactccttgaatggcatktttttwagcggcatgtctgcagccagtcccaccaagactgggctttaaacaaccaggcgttccctgaagctatgatttattttctgtctcaggtgctgaaagttcagggaatttggatgccataagcaaagacctactgcctcggcaagaagctagactgaaagcaggcctggagatggctgtgaaacacaaagacaagttgttggagtttgacaggacaaggtaaggtaccagctgtgagcgctgaagtttggtgttctcattcact

SEQ ID NO: 42125 - DNA, 600 bp, Chicken  19866894278717_2
ggctttttgtagtggtaacgacgcttaggagataatttggcttttaggaggaccctcaaggcctgcactgacaatgggcagagttcggactgctcaattgtttgcaaaaggctaaaggaaaatcaaagtccgagactttgtctcttaaccactgcctagacattgtcactcaagttttaaatgctttctcctcttgcgaggaggatcttagcgaaagaggctggaggaaaggtcagaagttggtttagacagatggtgatgttgatgsaaggtatttcttttcactccttgaatggcatktttttwagcggcatgtctgcagccagtcccaccaagactgggctttaaacaaccaggcgttccctgaagctatgatttattttctgtctcaggtgctgaaagttcagggaatttggatgccataagcaaagacctactgcctcggcaagaagctagactgaaagcaggcctggagatggctgtgaaacacaaagacaagttgttggagtttgacaggacaaggtaaggtaccagctgtgagcgctgaagtttggtgttctcattcactattacaagaatgaactcctccagtgtgtcctg

SEQ ID NO: 42126 - DNA, 600 bp, Chicken  19866894278717_3
ttgtagtggtaacgacgcttaggagataatttggcttttaggaggaccctcaaggcctgcactgacaatgggcagagttcggactgctcaattgtttgcaaaaggctaaaggaaaatcaaagtccgagactttgtctcttaaccactgcctagacattgtcactcaagttttaaatgctttctcctcttgcgaggaggatcttagcgaaagaggctggaggaaaggtcagaagttggtttagacagatggtgatgttgatgsaaggtatttcttttcactccttgaatggcatktttttwagcggcatgtctgcagccagtcccaccaagactgggctttaaacaaccaggcgttccctgaagctatgatttattttctgtctcaggtgctgaaagttcagggaatttggatgccataagcaaagacctactgcctcggcaagaagctagactgaaagcaggcctggagatggctgtgaaacacaaagacaagttgttggagtttgacaggacaaggtaaggtaccagctgtgagcgctgaagtttggtgttctcattcactattacaagaatgaactcctccagtgtgtcctgttggga

SEQ ID NO: 42127 - DNA, 600 bp, Chicken  19866894278717_4
catgtctgcagccagtcccaccaagactgggctttaaacaaccaggcgttccctgaagctatgatttattttctgtctcaggtgctgaaagttcagggaatttggatgccataagcaaagacctactgcctcggcaagaagctagactgaaagcaggcctggagatggctgtgaaacacaaagacaagttgttggagtttgacaggacaaggtaaggtaccagctgtgagcgctgaagtttggtgttctcattcactattacaagaatgaactcctccagtgtgtcctgttgggatgtcmttgctttgtgtccctgagagcagaagggagcaggaggaaaaagagrtttggggcacatggtgctgttcagggctggtcttttaccactgtgttttttttctcaccagcgtgcgtcgaacccaggtcattgacgatgaatcagattattttgcgacagactccaaccagtggctctccaagcaagagagggaggccctacagaagagagagcaggaactgcaggaactgcgccacgcctcccgccttgccaaaaaaatcaccatcgactttgctggaagacagatcctggaggaggacagt

SEQ ID NO: 42128 - DNA, 600 bp, Chicken  19866894278717_5
cgttccctgaagctatgatttattttctgtctcaggtgctgaaagttcagggaatttggatgccataagcaaagacctactgcctcggcaagaagctagactgaaagcaggcctggagatggctgtgaaacacaaagacaagttgttggagtttgacaggacaaggtaaggtaccagctgtgagcgctgaagtttggtgttctcattcactattacaagaatgaactcctccagtgtgtcctgttgggatgtcmttgctttgtgtccctgagagcagaagggagcaggaggaaaaagagrtttggggcacatggtgctgttcagggctggtcttttaccactgtgttttttttctcaccagcgtgcgtcgaacccaggtcattgacgatgaatcagattattttgcgacagactccaaccagtggctctccaagcaagagagggaggccctacagaagagagagcaggaactgcaggaactgcgccacgcctcccgccttgccaaaaaaatcaccatcgactttgctggaagacagatcctggaggaggacagtgggatggctgaataccacagcaagtaagtgagagcagggaggtgag

SEQ ID NO: 42129 - DNA, 600 bp, Chicken  19866894278719_1
tgctttggaggaaatatggagatattagcattaccagtaatacaatctgaatgagctaaatgggaggtgtaatgagaagttcagggcaagagagagcaggcaaaaaggttgaaatgtcattttatgctggctgaagtatcatttcccaaatggaattcagcctgcccttgctctgtctgaatatcaaatgaatacgttagtagcgagtttgtggtgatactgatttactcattgtcattgcccctactgctacatagatgtacccctgatatcagtttaaataaaacatccacactatgrttaatttaatatctaaagtaatattcatgtttctttgcttgttctaccttcaggagtgttctttgctcttagctttactattcagactccattcaatgtacagtgtacagaaaaaaatgtacagaggaaaatatagttgtttgttaaactctgggattaagtcctccatcagggaaaatactatttatctgagagtcacaggatactgcttcaactgctcctccaagcagggttatttccagtatttaaacttcttcaaattttaatttttacttgaatatatgctggtgagaatctaga

SEQ ID NO: 42130 - DNA, 600 bp, Chicken  19866894278721_1
cttgtgttttttgacctgtaggtatgtaagatactcctatcgccatgtagctcttacaagatcatttactgctgagtcactggctacgggaatcatactgctatttttaagtagtacttgcttagacacttgcttcctttggaactgcttcatgtgtacccttccagtagctctacttaagtctttttaaaagtcttaatcactagctgaaacagctttttgaaaaaagcacaaacagcttgtcttgtgacttggattcagaatgtatgtaaatagggttaaccagtcactgcaaccacrttctggcttcaagtatgtaggaatgtgcttatattcatgtgtgctttcctagttgatgtggatgtattgttcttaaagtattttccagtttggcacatacacccctgtgcatctgtcacaatgatgttcaattttgtacaggcagtagttttcaactgtcaagcacagctgtgtactacacacctattgtctctcatagaggcccataaataatcttcactattgaagaaaatgcaataggactctaaatatttacctgaaaacttgtagtagtcttaaatctggctctataaacattta

SEQ ID NO: 42131 - DNA, 600 bp, Chicken  19866894278721_2
tgtgctttcctagttgatgtggatgtattgttcttaaagtattttccagtttggcacatacacccctgtgcatctgtcacaatgatgttcaattttgtacaggcagtagttttcaactgtcaagcacagctgtgtactacacacctattgtctctcatagaggcccataaataatcttcactattgaagaaaatgcaataggactctaaatatttacctgaaaacttgtagtagtcttaaatctggctctataaacatttagaacacttcttaacctgttaagtgcattagagttttttkgggggggtgggaaagaaattataactattgattaaaaaagaacaacaatcttatgctatgtttctactgtaatttctttataatctggtgttttttgtaagtgaagttgaatgtcttttccagagtatttttgtatgtattgtaaatactatcttccaaagaaatctaaaacttcagtctcgtctccatttttatgaaaatgaagaattctttttaaaaatctcaagccacaggtgtgggcgggggagacagggacaaacacaatgttctgcagaatgacagttgtgttagagtcaactt

SEQ ID NO: 42132 - DNA, 599 bp, Chicken  19866894278724_1
  misc_feature (1)..(35): n is any nucleotide
nnnnnnnnnnnnnnnnnnnnnnnnnnnnnnnnnnncatgcactgtatttcatgaagcatcttgcacacaagaactctcctgcttctactgagcagagccacccaatgcaaacagtgcactccctttgcctacctacaccacattgaagcaaaacttcatcagcccaaatagaagcattaagcccctgtaatcacacagacaagcatgttatgacaataaagatttctcaagtcttaatcaagctttggtctaaatatttggagagtttaaagggtttctgctgagatctcaaaagttgcrctgaatcacagaagctccctatccttagtctcgctggagatagtgaaawaaccaacctaaagtaaaagcttttctctggtgtgcttggttccacaaacacaatgtgcagtcatctgaatagttcacttgtcctctcttaaacaggtctcaatcccacaatcagtggttataatcctactttctttctagcaagcctgtacatgcaggagggtagtgggaaaagagtaaagaaatagccattagaagcacattttcttctttgcatacagctcagttttaaacaaagcagattaattaag

SEQ ID NO: 42133 - DNA, 600 bp, Chicken  19866894278724_2
catgaagcatcttgcacacaagaactctcctgcttctactgagcagagccacccaatgcaaacagtgcactccctttgcctacctacaccacattgaagcaaaacttcatcagcccaaatagaagcattaagcccctgtaatcacacagacaagcatgttatgacaataaagatttctcaagtcttaatcaagctttggtctaaatatttggagagtttaaagggtttctgctgagatctcaaaagttgcrctgaatcacagaagctccctatccttagtctcgctggagatagtgaaawaaccaacctaaagtaaaagcttttctctggtgtgcttggttccacaaacacaatgtgcagtcatctgaatagttcacttgtcctctcttaaacaggtctcaatcccacaatcagtggttataatcctactttctttctagcaagcctgtacatgcaggagggtagtgggaaaagagtaaagaaatagccattagaagcacattttcttctttgcatacagctcagttttaaacaaagcagattaattaagctgcaaagaagcagcttggtgctttggggtttttttttgtttgtttttgt

SEQ ID NO: 42134 - DNA, 599 bp, Chicken  19866894278731_1
  misc_feature (1)..(33): n is any nucleotide
nnnnnnnnnnnnnnnnnnnnnnnnnnnnnnnnntggaagtataaagctcttgtcggtatttccattgctttggtgcaaattactgaaccctgcattaatgattgcttcccaggttgtgataaatttccgtgtagctaaatattgatattccgcttcagctttattgataggcatcctcctgggctgccatattgttccagcttttatgaatatgaaaaatcaaaggcggtttattattttaaatagctctgagctcgcttgtattgttttacatctgaaaccacttgcattaatcagagrgggaggtttggattttattactctgtcagccatgagcttttggtatgtgacattacgataccgagataactgatggagctatgagggatgcaagcatcacaatttaatgaagttttccagctctgaacagggcacagatgcctttacccacctcagagcagctttgacgacaattcaggatcccataggtaccattttgtgtcatcctcccctgcaatcctgctggaggggctggcagctccctggatgcatgagaacctggtgcttttgctccttgggtttctcttycctgctgcctc

SEQ ID NO: 42135 - DNA, 567 bp, Chicken  19866894278731_2
attaatcagagrgggaggtttggattttattactctgtcagccatgagcttttggtatgtgacattacgataccgagataactgatggagctatgagggatgcaagcatcacaatttaatgaagttttccagctctgaacagggcacagatgcctttacccacctcagagcagctttgacgacaattcaggatcccataggtaccattttgtgtcatcctcccctgcaatcctgctggaggggctggcagctccctggatgcatgagaacctggtgcttttgctccttgggtttctcttycctgctgcctccaggcttcttgctaaagcaactggtgatcctgcgggcactcagcaccttcccttgtgatatttcagccagcagtaaggggtaaaaagtaaaactaaagaggcagaggataagaagaggaatttgccttgtgttcctgggagccagaaccctgtaggatacttcccccgaagagccaggcgatgcctggggacctctctgccacatctgggacttgcacaggtacatcaagaggagagaatcgtccccgagaagcag

SEQ ID NO: 42136 - DNA, 600 bp, Chicken  19866894278732_1
tatgcttcagcagcagggaggaggatgaacaacaggaatgtaaataggaaaaagaacagacaaaagggaacgcaaaactacagctgtgattatcaccttgaagctttccttccttcatctcctcaaacatcattatctttacatttcctggggctcagccaggatcgtttccttcattgtgccagcctccaccagaaagaggcagactgtcaccagcccatctgtgcagggcagcctacttcctcccactttgccgaactctatcagctgaacatactgctgctctgtacccattccctmctkcttgttcacacccatgccgcttgccaggagatttcacctggcacaggcttttcaaggaggctgaagaagatgtggggacatggtgaggagaaaagatgggagaaaagactttaggggtggagggaatgtggatgtgagaatagcatcacttctgccttagtgtgctctttctacctgcacggtgctttctcagaatgcccaggatattttcagaatgttaaagtgctaaatctgacagcatgtgtggaaatatttaattctggaatggctgaatgactacttggaaacagttgaaaa

SEQ ID NO: 42137 - DNA, 600 bp, Chicken  19866894278732_2
gcttcagcagcagggaggaggatgaacaacaggaatgtaaataggaaaaagaacagacaaaagggaacgcaaaactacagctgtgattatcaccttgaagctttccttccttcatctcctcaaacatcattatctttacatttcctggggctcagccaggatcgtttccttcattgtgccagcctccaccagaaagaggcagactgtcaccagcccatctgtgcagggcagcctacttcctcccactttgccgaactctatcagctgaacatactgctgctctgtacccattccctmctkcttgttcacacccatgccgcttgccaggagatttcacctggcacaggcttttcaaggaggctgaagaagatgtggggacatggtgaggagaaaagatgggagaaaagactttaggggtggagggaatgtggatgtgagaatagcatcacttctgccttagtgtgctctttctacctgcacggtgctttctcagaatgcccaggatattttcagaatgttaaagtgctaaatctgacagcatgtgtggaaatatttaattctggaatggctgaatgactacttggaaacagttgaaaatat

SEQ ID NO: 42138 - DNA, 599 bp, Chicken  19866894278735_1
  misc_feature (1)..(38): n is any nucleotide
nnnnnnnnnnnnnnnnnnnnnnnnnnnnnnnnnnnnnntctgcagatgtcctcggtaagttgctagcaccagattcagtagtttagattgtaatagctccctctgctttgtatgaggtcttgtaatgtgtagcatagtgaaaacatggctgttactcttgaagggtccagttaaagaatcctttttgactcctgctcgtaactgagggctttagaactgcaggaacggggtgaactcagctgagatggagcttctcaaagctgcattttgcataaccagtgggctacacgaagagttaaygtgagatcagtgtgacaaatatgaagtggcagttcccaacaaactctggcatccctgagacatctgccctgttctcttatttctcagaattacagtggaagagtgacagaagatgtctgtgatttgatgagatgggattttgctgcacttgagatgtctggtagtaaagcatgatacaagttacttgatttcagacagaaaacatactgttaacgcgcataacaaaggtgtaaagccttctcatcaaaaaggcaggaagataaatacagaactattgtttagctattagataacagctc

SEQ ID NO: 42139 - DNA, 599 bp, Chicken  19866894278741_1
  misc_feature (1)..(82): n is any nucleotide
nnnnnnnnnnnnnnnnnnnnnnnnnnnnnnnnnnnnnnnnnnnnnnnnnnnnnnnnnnnnnnnnnnnnnnnnnnnnnnnnnnaatattgctgttggatccagaaaagacagcgcccggctaaggtaaaccatggaagaacatcagtgggattgcttggagcatcttctgaagaaatttctggatcaaatctaagacatgcttagctctttccccattcttctcaaatcttttggactccttccagtcgttaccttcgccgcttctacgcactgctctgacaaacacagctcccttaccgygctctgcctctcctcctgctcccctgcatgcagcacaaccacatgcatcccccccagccttggtcaccacaagaccaggcctatttccttccctccctttataatcgagagagagatgcccatgcagaccacaaagcatgattccacgctgagagaaccaggggaaattccctgccagctctccctatgggatcagaaggtacctgaggcaaatttgggccacgtggggctccattctcagatatccttcagagtaagcactgccacatggtactgactcctgcaataactcagggtct

SEQ ID NO: 42140 - DNA, 599 bp, Chicken  19866894278742_1
  misc_feature (1)..(23): n is any nucleotide
nnnnnnnnnnnnnnnnnnnnnnnggctgaagctggggttagagcctggtgtatccctgtaaaggtgagaacaagagagtctctgctccagagaaggctgaagagcagctggcccattaaaggcatttctggaaaaactggaaaaaccaaagcctctttgtgcagaaaatgcccgtgtccaataaggcaacattcataatcaacctgaagtcaagttgaaatcaaaaaaacccactctgcctctgaagaagcagcagcaacccttgataagtgggatgggaaggagggtgcattctatccrcatggttccttggcaagccccagcagcgtttgattaaccaggagcaagatttatgtgctataaagtgctctggggaagttgctgatgccaaagctctgcacctgggttttgaaagcatctctaaagggatgagaatacacaggaaaagaaatcccccctaaaaccaaaaaatgactactgcttttttggcaggaggataggagaatgcaatttcacctaggagggagatttgcaaaaataccaagcgtcccagtcccacagtaaatggttgtgagttagcatttcatgactgtacaccc

SEQ ID NO: 42141 - DNA, 600 bp, Chicken  19866894278745_1
tttgtcagccctggaaatgtatatatgaaagaatgtcaccaagtttctgatttcatgttattgctctctagcttttgttcttgaattatgttttttcccttacaaattttgaggagcacctagaaaatgagtaatttaaactatattgtatgtaatctaatccgttgttacttgtttatcctgtagttcttggagattaatagccattaacttccatagcagtctctctgccctatctggcataacttgttttggcaacaagggaaaaacagtagtatcttttaaagttactgctctttrgtgtgagaagttcaatcttttcctacatcagtgtaggttttctacttcataatagttcctgcaatgttaaaacgttagatacattatgacctcctattgcatctttgtcctcagattcaccacttcctttgaagaatttaaaaaaggaaccagttgttagctactttgtttgctccacataggaaataattctgtaacattattttagggagaagccagtaggacatctgaatgacttttccatttrgaagtgaatacctcaactcagtgttatgttcatcastttttcttttcaaayac

SEQ ID NO: 42142 - DNA, 600 bp, Chicken  19866894278745_2
tgttttggcaacaagggaaaaacagtagtatcttttaaagttactgctctttrgtgtgagaagttcaatcttttcctacatcagtgtaggttttctacttcataatagttcctgcaatgttaaaacgttagatacattatgacctcctattgcatctttgtcctcagattcaccacttcctttgaagaatttaaaaaaggaaccagttgttagctactttgtttgctccacataggaaataattctgtaacattattttagggagaagccagtaggacatctgaatgacttttccatttrgaagtgaatacctcaactcagtgttatgttcatcastttttcttttcaaayacttcttattgcagtctctggaaataaaactgaattcagtgaaaggcacaacgaggccacagttttacaggctgaaattgaacactcatacaatccagtctcgtggctaatggtttttttccactaattttgaagtcttaccccctatggctacatgcaagayagatgaggaggtgaaccgtgtgtgaaggcgtatggagatgttccagtaaatttggaataacggccagctccattgactgggatatt

SEQ ID NO: 42143 - DNA, 600 bp, Chicken  19866894278745_3
aaagttactgctctttrgtgtgagaagttcaatcttttcctacatcagtgtaggttttctacttcataatagttcctgcaatgttaaaacgttagatacattatgacctcctattgcatctttgtcctcagattcaccacttcctttgaagaatttaaaaaaggaaccagttgttagctactttgtttgctccacataggaaataattctgtaacattattttagggagaagccagtaggacatctgaatgacttttccatttrgaagtgaatacctcaactcagtgttatgttcatcastttttcttttcaaayacttcttattgcagtctctggaaataaaactgaattcagtgaaaggcacaacgaggccacagttttacaggctgaaattgaacactcatacaatccagtctcgtggctaatggtttttttccactaattttgaagtcttaccccctatggctacatgcaagayagatgaggaggtgaaccgtgtgtgaaggcgtatggagatgttccagtaaatttggaataacggccagctccattgactgggatatttttaaacccaggttaatgtatgggacgcattgattg

SEQ ID NO: 42144 - DNA, 600 bp, Chicken  19866894278745_4
trgtgtgagaagttcaatcttttcctacatcagtgtaggttttctacttcataatagttcctgcaatgttaaaacgttagatacattatgacctcctattgcatctttgtcctcagattcaccacttcctttgaagaatttaaaaaaggaaccagttgttagctactttgtttgctccacataggaaataattctgtaacattattttagggagaagccagtaggacatctgaatgacttttccatttrgaagtgaatacctcaactcagtgttatgttcatcastttttcttttcaaayacttcttattgcagtctctggaaataaaactgaattcagtgaaaggcacaacgaggccacagttttacaggctgaaattgaacactcatacaatccagtctcgtggctaatggtttttttccactaattttgaagtcttaccccctatggctacatgcaagayagatgaggaggtgaaccgtgtgtgaaggcgtatggagatgttccagtaaatttggaataacggccagctccattgactgggatatttttaaacccaggttaatgtatgggacgcattgattgattttattttaagct

SEQ ID NO: 42145 - DNA, 600 bp, Chicken  19866894278745_5
tactttgtttgctccacataggaaataattctgtaacattattttagggagaagccagtaggacatctgaatgacttttccatttrgaagtgaatacctcaactcagtgttatgttcatcastttttcttttcaaayacttcttattgcagtctctggaaataaaactgaattcagtgaaaggcacaacgaggccacagttttacaggctgaaattgaacactcatacaatccagtctcgtggctaatggtttttttccactaattttgaagtcttaccccctatggctacatgcaagayagatgaggaggtgaaccgtgtgtgaaggcgtatggagatgttccagtaaatttggaataacggccagctccattgactgggatatttttaaacccaggttaatgtatgggacgcattgattgattttattttaagctgatacagcatggaaatgtttactgttgaggttaatgcaatgcttgatgtcttatttcaaaatagaatctgcttacatttgtaagttagctttacgtacttaaacctatttcatgtgtatcataaataaacctatctgtattttctcaatgtcacatgacaggg

SEQ ID NO: 42146 - DNA, 599 bp, Chicken  19866894278754_1
  misc_feature (1)..(28): n is any nucleotide
nnnnnnnnnnnnnnnnnnnnnnnnnnnntccccaaatcccctattacaacccttctaagacaaactaacaagaatagaaaccccacagacagcagcacttcaagtctgccatcttcacctgcgagacccagaattccaattacctgtaataaatacaaacgtatcgcagtcaactgcaaaacaagaaagaagctcacagagaagcatgagttcatagctctgctttctgacttccctttgtctcctagtgatatgataataagaaatgaacagcgatgcattttaccttttagttcgtaygaatggtgagatgtttcaggagcacagtgaggtgtcaagtaattaacaccagcatggtgaccggcgtcctgtaacaatacacgacctctgcacatctctgcactgttccagtaaaaccacattttctcctatttcaggagaaccactcgacttggctgaactccaggagctggtcctcagagggttctatagaaaaatgttaatgaaacctcttcagaacaggtttagagctactcctaactgattttattttgagttggaccagcatcacaaaacaactgcatttcatcattactcag

SEQ ID NO: 42147 - DNA, 599 bp, Chicken  19866894278757_1
  misc_feature (1)..(51): n is any nucleotide
nnnnnnnnnnnnnnnnnnnnnnnnnnnnnnnnnnnnnnnnnnnnnnnnnnncccctcgcagcagtgggccgagctggctgcacggcaaggcaatgagcttggagtgtgctcccctctcgtctcccacactgttctgtttgcacgctgctggcccgtgcacaggggatggaggagatgatgggagtccaaggacaccttttcttaagccccattcatagtgcaggcatggcataacagcctgccaattgttctctcaaatgtcaccttcccatgcagggcaatgcgctgacaaaaacctcytatgggcacgtgtgggagggaggattctttattatttttctaagcattacatccttttaacaaacacccccagataaatccctccgtgcacagatggattcttccctctttcacccagctcttcctcctctcccccctctgctttccttttcactccttctcccttccctgctccctgcaggaacaagctgcctctgtctgtgcattcctgctggccctgcttgctgcctgtgcctgaggtctgcactgggggaggtgggcaggcaagaaaaagcagcacccggtgactgttgtgccat

SEQ ID NO: 42148 - DNA, 600 bp, Chicken  19866894278757_2
tgcaggaacaagctgcctctgtctgtgcattcctgctggccctgcttgctgcctgtgcctgaggtctgcactgggggaggtgggcaggcaagaaaaagcagcacccggtgactgttgtgccatcagcttaatacctgagcagggaaaacaaaggtgcttcagagaagcaacatcggtgccgtgctcctgcccccagcttggaggaactcagagataacgagggctgaaagaaaggcacgagcataattaaagctacccgagagatccctggaggtattacagctgctgatagcccagagrataaatgtactcctggtattattgcatcctctggcacgaagggacgggcgctgggtttggggtttaaagttctttggtgcaataattttggatggggtggaaaaagttcttgggaagggtgcagatggggccaggatgggtccccccatgctgggatgagggtccctgctgacacagccaccccgagccctgctctgcaccacccggcaccatgggctgccccacgccagctctgagctgaacccacccagtgtggtgccctgctgggtgagggcaccgttaatgccaccactactgcca

SEQ ID NO: 42149 - DNA, 600 bp, Chicken  19866894278764_1
aaacctcagactagtagtggggctaggactgcatagagacttttatgtattctgtttagttttagaggtgccggtgttactgttcttcagaggaggtacataaaggaaagagaatagcaaaggaagctagagttggtcgctctccttaacaagtccaaacagtgaaaggaaaccttttgatccaggttactaaatgctctctcatattaacctaattttatagttcctgtgtggaaggagagatgcgatgtgagaggatgacactatcaacaataccttacatttgcctatgtttagagytgcaaggctgaccttacctcagcagccaggtagcagataagcttagaaactgtgggttagaaatttagcgttgtacacacacaraatgcrtagaaatgtgttagttaacacactgttctgtgtgattgctaaggattccatgagtattttaatttttttttgtaaaattttttttttttagattgctcccagtatgggatgctgaaggtgaaaatgagcttgttttttaaggtacagctcaggtatcagagtgactcatgaaaaatagggagagttggtggaaggggttttggctccaag

SEQ ID NO: 42150 - DNA, 600 bp, Chicken  19866894278764_2
cttcagaggaggtacataaaggaaagagaatagcaaaggaagctagagttggtcgctctccttaacaagtccaaacagtgaaaggaaaccttttgatccaggttactaaatgctctctcatattaacctaattttatagttcctgtgtggaaggagagatgcgatgtgagaggatgacactatcaacaataccttacatttgcctatgtttagagytgcaaggctgaccttacctcagcagccaggtagcagataagcttagaaactgtgggttagaaatttagcgttgtacacacacaraatgcrtagaaatgtgttagttaacacactgttctgtgtgattgctaaggattccatgagtattttaatttttttttgtaaaattttttttttttagattgctcccagtatgggatgctgaaggtgaaaatgagcttgttttttaaggtacagctcaggtatcagagtgactcatgaaaaatagggagagttggtggaaggggttttggctccaagatgaaataagcgttttcataggtgaaggtgtggtttacatccctttatactgtgtatttgaaacttctgccatagtgttggttt

SEQ ID NO: 42151 - DNA, 600 bp, Chicken  19866894278764_3
aggaggtacataaaggaaagagaatagcaaaggaagctagagttggtcgctctccttaacaagtccaaacagtgaaaggaaaccttttgatccaggttactaaatgctctctcatattaacctaattttatagttcctgtgtggaaggagagatgcgatgtgagaggatgacactatcaacaataccttacatttgcctatgtttagagytgcaaggctgaccttacctcagcagccaggtagcagataagcttagaaactgtgggttagaaatttagcgttgtacacacacaraatgcrtagaaatgtgttagttaacacactgttctgtgtgattgctaaggattccatgagtattttaatttttttttgtaaaattttttttttttagattgctcccagtatgggatgctgaaggtgaaaatgagcttgttttttaaggtacagctcaggtatcagagtgactcatgaaaaatagggagagttggtggaaggggttttggctccaagatgaaataagcgttttcataggtgaaggtgtggtttacatccctttatactgtgtatttgaaacttctgccatagtgttggttttacaat

SEQ ID NO: 42152 - DNA, 522 bp, Chicken  19866894278765_1
actgtcctcacccacgacatccagctggtaggtgtggttgatgctcccgtatttgttctccacgatgcacgtgtagttgcccttatctgatggcaccaccgagtccatgatgatgctccaggtggcatagcggacctgggggcggcaggatgggggcggtgggtgagatgtgcgcacatcagagcggctcagccctttggcacagcataaatctgcttcatggtcacctttcccctctcctacagagggaccataattgctcccagctgtcccagcacagagccaactgctgagcaccaygggctgggtgcagggatgccgccctgggtggcacaaagggaacagcacccacattcacatgctgatggcacgctggcaatgcccacagctctgcgcttccaccccattttctaccagggctttgcacacagatggggagcacccgcaccctgctgccttggggggcacattgagccccgtgccccaaacgctccgggctgcacctccttctcccacagtgca

SEQ ID NO: 42153 - DNA, 529 bp, Chicken  19866894278768_1
tagaaagaaagtatggcaaatatcaccaagaaaaagttaaaagtagaccacagagtttaaaatgatgaatatgtgaaatgtatgaggactactccaaaagtaatgcctcctattttattctgttggcccacaacatcccagacggatattggtggtacagcagtagaatttgaaccagaattcccaccgatatcccattacattttcctgccatgtgacagatggcagcaaaggggcagcctaacaaaatgacaactgacgtgggagtgcagatgaagcgaaggtgtgtcaatgaattgstccatgaggatgaatggcatccactgacattcttcaatgcttggcgaacctttatggagacgaaacggtggtggtgtgtttcagcagtagtgacagtgggtcacctctgcaggcacagattgttatgagtgcagcatgcaggctcttgttggtcactggcaaaaatgcagtacctaatggggggaactgttgaaaaacagtgttttgtagctgagaatttgctctatta

SEQ ID NO: 42154 - DNA, 600 bp, Chicken  19866894278777_1
cggctttctatttgcttctaattaagcgctgccagttgagctctgttttcccactttccaccaatgcctgatggtggcccctctgaatcatcatggccacacacatgcacacccctttcagagggaagctgaaatgacttccattaggagatagcaagtagcatgcagtagttcataggctgagccttgttacggtgagctggaacaagcagaagagttgatttatttcaaaccaattaattcactagactcgatgtcgttattccccaattttacactctcctcctggcagtagcttgygttgtctagacaggaagatgtgcaaaatcatctttaaagatgtgtagctttatatcccccaggggagaaaggcctcaattcttcacaagcaaagctctgttcagatgagtgggaaacaaattattcccttctactctcaaaggccatcagtgtctgtatcacacagcctgcatcaaacaggtcctcaaagggctctccggaggtgcctttaagacttgcaggtgctcctgctgctgtctggcaaagcccatcgctgtttgcttgcagaccaggtatttggcttgtaggtgtgctacttga

SEQ ID NO: 42155 - DNA, 600 bp, Chicken  19866894278782_1
tgcttcattcttgctgctgtgcaattacccagccattgatgggctctcaaataccatggggatgctttggagcagcacagtaaggttcagtgcctactgacaggactcagctgctcagtcactttaaactgagtcatttttaatgctcctcacaggcagctaagagtataactttaagcactcggatttagaagttgggatttaaggctttagtgataaatgttgcacatgaatgttgaccattcctttgctgtagcatttgtttttgattgagatgtttccaagggtaccagaagaacrgggaacaggaattagactcaaattcaaacagtgtgccatatagctcatatagctgctccgttctttgatgatgcttctacttctgaaatgagcttcctttacagcagagcccactcacattgttctggcagtgcatgggacagtctgcacagccatgctttcagatcagtgagaattgaagctgttgcagtgtgctcagtcagaagtgagaacatttgagctgggttcttatccgggttgctaaagaatgttgtgttcctaaaagctatatgtcacatggaggctgttaaataatgaatg

SEQ ID NO: 42156 - DNA, 599 bp, Chicken  19866894278785_1
  misc_feature (1)..(41): n is any nucleotide
nnnnnnnnnnnnnnnnnnnnnnnnnnnnnnnnnnnnnnnnntcaaacatcttttagtagcataaaattaacttacagatgtaactgacgtgaaaaaaatcaagagggacaaagagatgcttccattggaggcaagaggcaggtgcttctctcctgtgtccccagtgctgctttaggacaagtggttggtatcactgctgagggtagaagccgataagacagaaaacatgattttacttatcctttgaaaaacagttaatttttcagttaatttcaaggctgaaactgaagcccgaacacsatttttttgtgtgctctaatcacagacaggaatgggcctgagggagttagggactgtcctttgtggctcctcawcttccwggggctcagggttcrggtgtcatccccctcctccctgtgaccacagtgagaggtacaggtactggtgctggggagcagtgcaggacggrggcagctcctctcctgcacgtccagatcgagtttagtctgtctcatcatttacagttrcagcctggatgtcaaaaacatctgttaacccgtccacgggcatgaataaaaaggggatttatatacgttggt

SEQ ID NO: 42157 - DNA, 600 bp, Chicken  19866894278785_2
cagatgtaactgacgtgaaaaaaatcaagagggacaaagagatgcttccattggaggcaagaggcaggtgcttctctcctgtgtccccagtgctgctttaggacaagtggttggtatcactgctgagggtagaagccgataagacagaaaacatgattttacttatcctttgaaaaacagttaatttttcagttaatttcaaggctgaaactgaagcccgaacacsatttttttgtgtgctctaatcacagacaggaatgggcctgagggagttagggactgtcctttgtggctcctcawcttccwggggctcagggttcrggtgtcatccccctcctccctgtgaccacagtgagaggtacaggtactggtgctggggagcagtgcaggacggrggcagctcctctcctgcacgtccagatcgagtttagtctgtctcatcatttacagttrcagcctggatgtcaaaaacatctgttaacccgtccacgggcatgaataaaaaggggatttatatacgttggtcaacttgatttaaaacagtaagagttattatgagacgaggtatcagctgttcttccttgtagcaggagaaccacc

SEQ ID NO: 42158 - DNA, 600 bp, Chicken  19866894278785_3
taactgacgtgaaaaaaatcaagagggacaaagagatgcttccattggaggcaagaggcaggtgcttctctcctgtgtccccagtgctgctttaggacaagtggttggtatcactgctgagggtagaagccgataagacagaaaacatgattttacttatcctttgaaaaacagttaatttttcagttaatttcaaggctgaaactgaagcccgaacacsatttttttgtgtgctctaatcacagacaggaatgggcctgagggagttagggactgtcctttgtggctcctcawcttccwggggctcagggttcrggtgtcatccccctcctccctgtgaccacagtgagaggtacaggtactggtgctggggagcagtgcaggacggrggcagctcctctcctgcacgtccagatcgagtttagtctgtctcatcatttacagttrcagcctggatgtcaaaaacatctgttaacccgtccacgggcatgaataaaaaggggatttatatacgttggtcaacttgatttaaaacagtaagagttattatgagacgaggtatcagctgttcttccttgtagcaggagaaccaccacatag

SEQ ID NO: 42159 - DNA, 600 bp, Chicken  19866894278785_4
aaatcaagagggacaaagagatgcttccattggaggcaagaggcaggtgcttctctcctgtgtccccagtgctgctttaggacaagtggttggtatcactgctgagggtagaagccgataagacagaaaacatgattttacttatcctttgaaaaacagttaatttttcagttaatttcaaggctgaaactgaagcccgaacacsatttttttgtgtgctctaatcacagacaggaatgggcctgagggagttagggactgtcctttgtggctcctcawcttccwggggctcagggttcrggtgtcatccccctcctccctgtgaccacagtgagaggtacaggtactggtgctggggagcagtgcaggacggrggcagctcctctcctgcacgtccagatcgagtttagtctgtctcatcatttacagttrcagcctggatgtcaaaaacatctgttaacccgtccacgggcatgaataaaaaggggatttatatacgttggtcaacttgatttaaaacagtaagagttattatgagacgaggtatcagctgttcttccttgtagcaggagaaccaccacatagctgcagtaaactgtg

SEQ ID NO: 42160 - DNA, 600 bp, Chicken  19866894278785_5
ctttaggacaagtggttggtatcactgctgagggtagaagccgataagacagaaaacatgattttacttatcctttgaaaaacagttaatttttcagttaatttcaaggctgaaactgaagcccgaacacsatttttttgtgtgctctaatcacagacaggaatgggcctgagggagttagggactgtcctttgtggctcctcawcttccwggggctcagggttcrggtgtcatccccctcctccctgtgaccacagtgagaggtacaggtactggtgctggggagcagtgcaggacggrggcagctcctctcctgcacgtccagatcgagtttagtctgtctcatcatttacagttrcagcctggatgtcaaaaacatctgttaacccgtccacgggcatgaataaaaaggggatttatatacgttggtcaacttgatttaaaacagtaagagttattatgagacgaggtatcagctgttcttccttgtagcaggagaaccaccacatagctgcagtaaactgtgcttggcaagaatgaccgaagtgcaataatgtatgtctttcctatgaaacagatgagggaacagccatgaaaagc

SEQ ID NO: 42161 - DNA, 600 bp, Chicken  19866894278785_6
tgattttacttatcctttgaaaaacagttaatttttcagttaatttcaaggctgaaactgaagcccgaacacsatttttttgtgtgctctaatcacagacaggaatgggcctgagggagttagggactgtcctttgtggctcctcawcttccwggggctcagggttcrggtgtcatccccctcctccctgtgaccacagtgagaggtacaggtactggtgctggggagcagtgcaggacggrggcagctcctctcctgcacgtccagatcgagtttagtctgtctcatcatttacagttrcagcctggatgtcaaaaacatctgttaacccgtccacgggcatgaataaaaaggggatttatatacgttggtcaacttgatttaaaacagtaagagttattatgagacgaggtatcagctgttcttccttgtagcaggagaaccaccacatagctgcagtaaactgtgcttggcaagaatgaccgaagtgcaataatgtatgtctttcctatgaaacagatgagggaacagccatgaaaagcgccgagcagctccgcaggagcaaagcacgattggctttcctataagcccagtgcctcc

SEQ ID NO: 42162 - DNA, 600 bp, Chicken  19866894278787_1
cttttttcacaatatgcaaaccagcttgacataatgcacgtacagtgaggatattcatggccctttctggcaaaatagagatatccattgggatacagtggactgatcttgcttcccaggatttaagagatcatctgctgtagctgttagtgtttaccatggactctggcattatttctaagtcaggcattttccatcattgaatcgttttgctgctatcagaagccaaattttccaggagctttttctaacctacacttcactccaggcagtcaagggtctgtgcttttattgcttttrtaatctcagcagttaaagctttgcagtaaccaaatgggaggctgtactggtgacctattcccctgtcattgcactgcacagtgttctttgattaaagccagagccatggatttgttctcctttattttttttttaagaatattgtgaatattcctctgtgacagtgaaagaacagacccatcattttaacagtagcttcctttgcttaatattrtctttccaagagatagaaaccagaatgtaattgtctgtgcagagttttcagaccratctctaagccaggtgaaatgagaataggat

SEQ ID NO: 42163 - DNA, 600 bp, Chicken  19866894278787_2
gctatcagaagccaaattttccaggagctttttctaacctacacttcactccaggcagtcaagggtctgtgcttttattgcttttrtaatctcagcagttaaagctttgcagtaaccaaatgggaggctgtactggtgacctattcccctgtcattgcactgcacagtgttctttgattaaagccagagccatggatttgttctcctttattttttttttaagaatattgtgaatattcctctgtgacagtgaaagaacagacccatcattttaacagtagcttcctttgcttaatattrtctttccaagagatagaaaccagaatgtaattgtctgtgcagagttttcagaccratctctaagccaggtgaaatgagaataggatgggcagtaatgcttccttccagtgcttggaaaacccccccttgccagggcttgctggaggaagaggcctttcagcagaatgggatcagagacagaaattgatagaaattgttttttttccattgtgccttttctgcaggatttccttgcggaaggtagttttctgtcttgcatcgctgctccccacttttccctctaagctacaggcctgaaat

SEQ ID NO: 42164 - DNA, 600 bp, Chicken  19866894278787_3
cagtcaagggtctgtgcttttattgcttttrtaatctcagcagttaaagctttgcagtaaccaaatgggaggctgtactggtgacctattcccctgtcattgcactgcacagtgttctttgattaaagccagagccatggatttgttctcctttattttttttttaagaatattgtgaatattcctctgtgacagtgaaagaacagacccatcattttaacagtagcttcctttgcttaatattrtctttccaagagatagaaaccagaatgtaattgtctgtgcagagttttcagaccratctctaagccaggtgaaatgagaataggatgggcagtaatgcttccttccagtgcttggaaaacccccccttgccagggcttgctggaggaagaggcctttcagcagaatgggatcagagacagaaattgatagaaattgttttttttccattgtgccttttctgcaggatttccttgcggaaggtagttttctgtcttgcatcgctgctccccacttttccctctaagctacaggcctgaaatcgtgcagagccagaagagaagggggaataacgtagctatgctggcatgggaagcc

SEQ ID NO: 42165 - DNA, 600 bp, Chicken  19866894278788_1
cagtcataaagggtggaccctgtggtacagagccatgttggagcagtgcttggagagctgcagcctgtgggaagcccaggcaagatcagcttgtgaaggatggtatcctgtgggagggaccccatatagagcacaggcagagagtggccatggacaagcaggagagatgaagcatcatggactgactgcagcgcccaggcatgtatagttttgcattcagtttctcagtgctttattccattagtaataggcaataaattacattagtctccctcagtctgcattgcctgtgatagtacytggtgaggtatctccccatccttatctcgatccgtgagccttttttcatcatattttatcccccttgtcctttttttgaagggggggggaatgaaagaatggtgtgatggtgcttagctacacatctatttaaaaccaccatcagcaattaatatagctcaactttgcttcatgtcttatattagctgtgctctaaataatctgatatacttaatgcttaattcctcttttctacaaaattcactytgtggaatggcatccgttgttaagaagtgtatttggaaggatgaaggagggatg

SEQ ID NO: 42166 - DNA, 600 bp, Chicken  19866894278788_2
ataggcaataaattacattagtctccctcagtctgcattgcctgtgatagtacytggtgaggtatctccccatccttatctcgatccgtgagccttttttcatcatattttatcccccttgtcctttttttgaagggggggggaatgaaagaatggtgtgatggtgcttagctacacatctatttaaaaccaccatcagcaattaatatagctcaactttgcttcatgtcttatattagctgtgctctaaataatctgatatacttaatgcttaattcctcttttctacaaaattcactytgtggaatggcatccgttgttaagaagtgtatttggaaggatgaaggagggatgctgttttatactagcatgaagaatatcacagtttagcatagggttacaaatgtgcaaaataaagacaaagaaaatgaatcagcccacaaagaatagcaccaaagtaatatctttcttctgccttgcctcccatgtgaccacagaataatccctacacaggaatctggggtgaagcacagggcatttgtgtcaggtagtggaaaagaatagggttccctatacacaaagtggagatatataactcat

SEQ ID NO: 42167 - DNA, 600 bp, Chicken  19866894278803_1
agatgtttgtctagcacagtgatgggtaaacatgcttgcttttccccgcatgccactttttcgctggttggatttacagattctaacagttacgtttgtgaaagagacacaaaggcacacacagactcggagatgagaagaagggaagaaagttttctacctgccagaaggcaaaatctgctcagagccgcactcatgtaaacctgcactaacccaatgccatcaatcgagataccctagtgaaaacaagcacacaacaaatacacaaataaaacaaatccctaaagaaaaaagaacggrgagcctgaaatcccaggtgcagaagaaaacctacagttacattcaccgtaacagcagatctaagtgacagaacagtttggcagcacagacgtactgcgagcaccaagcgatgctgcaggacgacacatcagtttgatcagcatgtgttttatttcaacgctgagtaccaagactgtcacaaaayggggagaggcaggcgctgcccagatgatggacatctctaatgaggcttggtcactccgtgtgaaatagtcagcctcgtcaaccttcaacacacaatctcatgtgttatcattcagc

SEQ ID NO: 42168 - DNA, 600 bp, Chicken  19866894278803_2
gagccgcactcatgtaaacctgcactaacccaatgccatcaatcgagataccctagtgaaaacaagcacacaacaaatacacaaataaaacaaatccctaaagaaaaaagaacggrgagcctgaaatcccaggtgcagaagaaaacctacagttacattcaccgtaacagcagatctaagtgacagaacagtttggcagcacagacgtactgcgagcaccaagcgatgctgcaggacgacacatcagtttgatcagcatgtgttttatttcaacgctgagtaccaagactgtcacaaaayggggagaggcaggcgctgcccagatgatggacatctctaatgaggcttggtcactccgtgtgaaatagtcagcctcgtcaaccttcaacacacaatctcatgtgttatcattcagcttataatgcagctattcttccatacgtgtgcttgcaagcatattttaaaagcaaagcagaacttaccatagagatgcaaagaagtgaccgtaaaggagttagttttgagtctttctaaagtatgttcaaagtaaccagtctcccatataacctgaaatcaaagagtgaaaacctgccagaaagg

SEQ ID NO: 42169 - DNA, 600 bp, Chicken  19866894278804_1
ttgacaccatcaaggcctgagagataaaggagtgaattaaaagggaagggaataaaagagagagagagaagaagagaaaaagagaagtcctatcccctaagatctgatttcatgttttcatctttggagtgagcatcagcagttgatcagcagcgtctgctcttttcactcccttttaaaggcccattcactgatagctgacacctaaaacatctgttgttcctggagtgcttccctgtgtcagatacctttccaacacagcaaacacgtggcttcctgcttcatgaggtggttgctggrgacctaactttgattgcctgatgggcacaatctgagacgtggctttgccagaggtgcacggccccttcttttcaaagcagaggcggcctcagctgtgtgtgcaaaccgtggcttccccagatgcagctgcatcctacagcacctgtttgccacgtggtaatgcaggtggaaataaggatcagttactgtcaggtctttagaagtctgttggcaccattaggcatttatgagcgatgacctgactgcttaggggtcagggtgtttcgttatccctgctgtgatcaaacacacctctggaag

SEQ ID NO: 42170 - DNA, 600 bp, Chicken  19866894278808_1
aaagtggcataagcttctttgacttgtatttttgcgtgaagtaactgtgatcttcaggcaaggagtatttgttagattctgtgagcgtgccacaaatgataacttaattcagaatgtttttccctgagtgaactgcctgaagtattaattaatgttcgattaggtttcgtctcgtttgtttctttgtttcagttgttgattaattggagatttttattgttatttttactttacagattggtacatttaaaaacatgtttggaaaagagcatttgcgtaaaattgttacagatctctaaygtaagaaaacaaagtatttttccatggtatttgaactgaagaaccttttatttaaggaaagaaagttcacagagcttacttccttgcatgctgtggtgtgtttcaaagaagaataaagcaaagtgagagagaggaaaaaagagttatcacagcaagagttggtcagacaagctggacagcaaaagatactgtatgtgcttttgtactcttcatcagtcttagtctgaacaatttattatgtatttctctgataataccaaactcacaaatcataaaggaaccaatataagtgctaaataa

SEQ ID NO: 42171 - DNA, 600 bp, Chicken  19866894278809_1
ttgtaattcgcctgaatggcatttttcctgaatcctttcccttgcctttggagatgtgtgttggctgtggctggttcacatctttgctagggaggtagagcagtagtttgactccagagagttgggttgtgccacatgctggtgtttattctatgttgatatgtgtcactgttacctttgttactagtgcattcaaggaaattacattttatcgtgagtgcagcagatatgaaatgcatgcaactgtgtttcagggagtaaatttttcatgatcatagcacaggagtactaaataaaaawtgtcagcttcttggatttggttgcagtacrgaaatgtgcctggaaataatgggttctgtgacccttttgaaataaagggcaactctaagattgaacctcagagggcagaaaaatttgtgtgcttaatcacagaaggaaacgcttggtattgcagtgtatgatcattaagagtttggaaagctgtaacaaggcacagaatgcagcagaaaaatgaatgtgcatgagaggagcatggatagtaaacatagctttttagagatctaaattaattttctgaagagtaaaaaagaaatcagctgt

SEQ ID NO: 42172 - DNA, 600 bp, Chicken  19866894278809_2
aatcctttcccttgcctttggagatgtgtgttggctgtggctggttcacatctttgctagggaggtagagcagtagtttgactccagagagttgggttgtgccacatgctggtgtttattctatgttgatatgtgtcactgttacctttgttactagtgcattcaaggaaattacattttatcgtgagtgcagcagatatgaaatgcatgcaactgtgtttcagggagtaaatttttcatgatcatagcacaggagtactaaataaaaawtgtcagcttcttggatttggttgcagtacrgaaatgtgcctggaaataatgggttctgtgacccttttgaaataaagggcaactctaagattgaacctcagagggcagaaaaatttgtgtgcttaatcacagaaggaaacgcttggtattgcagtgtatgatcattaagagtttggaaagctgtaacaaggcacagaatgcagcagaaaaatgaatgtgcatgagaggagcatggatagtaaacatagctttttagagatctaaattaattttctgaagagtaaaaaagaaatcagctgtctgtatgattccgttcactcccatgcttgt

SEQ ID NO: 42173 - DNA, 503 bp, Chicken  19866894278809_3
aatgtgcctggaaataatgggttctgtgacccttttgaaataaagggcaactctaagattgaacctcagagggcagaaaaatttgtgtgcttaatcacagaaggaaacgcttggtattgcagtgtatgatcattaagagtttggaaagctgtaacaaggcacagaatgcagcagaaaaatgaatgtgcatgagaggagcatggatagtaaacatagctttttagagatctaaattaattttctgaagagtaaaaaagaaatcagctgtctgtatgattccgttcactcccatgcttgtcstgctttgtctcacacccraggtgctttgaggaatggtactgattctgaagtctgtctggagaggagcagtaagaatcggagctattagttaatgatccaaagcagcaagccagctttggctcagacgcatccattgtctcttatactcctacacagtttctcctcctaaatgtttctctttttgttcctcctgtctcatcacg

SEQ ID NO: 42174 - DNA, 485 bp, Chicken  19866894278809_4
gggttctgtgacccttttgaaataaagggcaactctaagattgaacctcagagggcagaaaaatttgtgtgcttaatcacagaaggaaacgcttggtattgcagtgtatgatcattaagagtttggaaagctgtaacaaggcacagaatgcagcagaaaaatgaatgtgcatgagaggagcatggatagtaaacatagctttttagagatctaaattaattttctgaagagtaaaaaagaaatcagctgtctgtatgattccgttcactcccatgcttgtcstgctttgtctcacacccraggtgctttgaggaatggtactgattctgaagtctgtctggagaggagcagtaagaatcggagctattagttaatgatccaaagcagcaagccagctttggctcagacgcatccattgtctcttatactcctacacagtttctcctcctaaatgtttctctttttgttcctcctgtctcatcacg

SEQ ID NO: 42175 - DNA, 600 bp, Chicken  19866894278810_1
aggccagattctgattacatacacatgggtgcagctcaattgatcccgacgctgtcccatcttgctgaccttacaaaccatctaccaacacctttcattcagaccagagactgaagacgtgtatcaggcacatcagagagctaagggagggagagcaccaggagtggttcgcagaggagataacaacagctctcctccgtctctctgcaccgctgtgggataggatggggctgggcatgacctggcaagtcctgctgatttgtttcatcccacagattacccatcagccccacatcggtrcagtcccactgccaatcacatgatatcaccccagcataaatgcactgcaattgctcaagagccatgtgcagccctagagcccccatgggtatgaagtatctttctttcccatgcagygagatcagaatcaggctcggtattgggttagggagcggcaatagttgttccataattaactctgaaaccaggttctcattagaccttgcttttcataaacacccttccctccatgcatgcctaatttcctactactcgtcagggaagctaatagagactgaagtcagtagcaaagctcccatg

SEQ ID NO: 42176 - DNA, 600 bp, Chicken  19866894278810_2
cgtgtatcaggcacatcagagagctaagggagggagagcaccaggagtggttcgcagaggagataacaacagctctcctccgtctctctgcaccgctgtgggataggatggggctgggcatgacctggcaagtcctgctgatttgtttcatcccacagattacccatcagccccacatcggtrcagtcccactgccaatcacatgatatcaccccagcataaatgcactgcaattgctcaagagccatgtgcagccctagagcccccatgggtatgaagtatctttctttcccatgcagygagatcagaatcaggctcggtattgggttagggagcggcaatagttgttccataattaactctgaaaccaggttctcattagaccttgcttttcataaacacccttccctccatgcatgcctaatttcctactactcgtcagggaagctaatagagactgaagtcagtagcaaagctcccatgccttccactaagacagatacacacccacatcagaaagggcaatgaactgggtgcatctctttaacaatcttattttttcctagatatatgcacaacacctcacagcatgaagatcaa

SEQ ID NO: 42177 - DNA, 600 bp, Chicken  19866894278810_3
gttctcattagaccttgcttttcataaacacccttccctccatgcatgcctaatttcctactactcgtcagggaagctaatagagactgaagtcagtagcaaagctcccatgccttccactaagacagatacacacccacatcagaaagggcaatgaactgggtgcatctctttaacaatcttattttttcctagatatatgcacaacacctcacagcatgaagatcaagctggactgctgctgccaatgaatgttaaataaccatcatagtgacactctgaaagggcaggatattatawcaccctccacattgtgtgaggtgtttgctcagtgtcagctctattgaaaactactgtcacatctcttttagaatttttttcttattgtcattcactgctgttgtttctttggaatatgcatatacactcatttattcatggtgtgccctgcttctgcagggcaataaatggaggcagatttcttgtcttacatagagcagaccctttctcccatttcaagatcaggaccatcttatcttgctctggctgtgggatatttgacaggacacaggagggtgggagaaatgatagtgggaggca

SEQ ID NO: 42178 - DNA, 599 bp, Chicken  19866894278811_1
  misc_feature (1)..(76): n is any nucleotide
nnnnnnnnnnnnnnnnnnnnnnnnnnnnnnnnnnnnnnnnnnnnnnnnnnnnnnnnnnnnnnnnnnnnnnnnnnnntttctttttgttttgcatcatagagagaacacccaaaagtactaaagccaaatgctcttagtaataactgtaatagtgattggataacaacataggaacactagcaatttattagaaagaatttaatttctgcctgtaataagtacaaatttgttgagatgagtatattccttggaatttctcagatgcaacttgaaatgctacaatgcaggctttacattaamgtgatgctaacttttccagaacaaaattcataatttatttatattttgtgtttgtttgtttttttttcctgatttaacctttattttacaaggaagtctcctaaaatattaattacgttttcttctacagagatttaacagtggtaggcagcaagatcgtactcacacagcaggaacagaaagaacaggatgagatgctttctggggaataaaaagataaataaataaatgcaagagaaagtcttgaacagtataacttctctgtatgttataaatgagatattttattctcacagtct

SEQ ID NO: 42179 - DNA, 600 bp, Chicken  19866894278813_1
aggagagccatcaaaggggggacaaaaggctcgggaaggggggacgctgaaggcagagaagccaggagccccatcagcacgctgcggatggggataaggcaaaagtgcccttcgtcgcatccctataggtacagagaggaaccatctgttgtattcgatcacagcctgtgctcgtcacctctctgaccctgctgcttcctgcagtgtgggcacacacatccactgagtgcctcccacataatcgatccacgggtttgaaatctgcagcctctcccagcccatcctgctgcaccccggggygggtctgggcragccgtgctctggggatgaggaccacagcacacctgagcctggagggatgccctggcacccaattcaactgcagaagtcactatagcaaccatcgaccaatgcggcgcgctgagagctggcattgtttccgtgcccatagggatgcagctgatgacacggtgacatcagccgctgcaaagagaagcctttggaaatttgcttttccctggttataaatagcgtgacccagaaatgcgtgcaaagcagcgggmygagtccgtgggagacagagatgagcagagcttcatt

SEQ ID NO: 42180 - DNA, 600 bp, Chicken  19866894278813_2
caaaggggggacaaaaggctcgggaaggggggacgctgaaggcagagaagccaggagccccatcagcacgctgcggatggggataaggcaaaagtgcccttcgtcgcatccctataggtacagagaggaaccatctgttgtattcgatcacagcctgtgctcgtcacctctctgaccctgctgcttcctgcagtgtgggcacacacatccactgagtgcctcccacataatcgatccacgggtttgaaatctgcagcctctcccagcccatcctgctgcaccccggggygggtctgggcragccgtgctctggggatgaggaccacagcacacctgagcctggagggatgccctggcacccaattcaactgcagaagtcactatagcaaccatcgaccaatgcggcgcgctgagagctggcattgtttccgtgcccatagggatgcagctgatgacacggtgacatcagccgctgcaaagagaagcctttggaaatttgcttttccctggttataaatagcgtgacccagaaatgcgtgcaaagcagcgggmygagtccgtgggagacagagatgagcagagcttcattgacgggggctg

SEQ ID NO: 42181 - DNA, 600 bp, Chicken  19866894278813_3
gcagcctctcccagcccatcctgctgcaccccggggygggtctgggcragccgtgctctggggatgaggaccacagcacacctgagcctggagggatgccctggcacccaattcaactgcagaagtcactatagcaaccatcgaccaatgcggcgcgctgagagctggcattgtttccgtgcccatagggatgcagctgatgacacggtgacatcagccgctgcaaagagaagcctttggaaatttgcttttccctggttataaatagcgtgacccagaaatgcgtgcaaagcagcgggmygagtccgtgggagacagagatgagcagagcttcattgacgggggctgtgagcgccccgcagtgagggacagcacggagcggctgcagggtggctstatgaggctctcacacactccaggttctgtcccccgtccgtctgtgcagccttcccacggctgcctgctgctgtttgccccgggaggatgggctcagaccccccgagcagctcctcctgaccccccattcagctctccatgtcagtacgccccggcacggctcgcctgcctcaggactgagcaatttggtgcttctctctaccc

SEQ ID NO: 42182 - DNA, 600 bp, Chicken  19866894278813_4
cagcctctcccagcccatcctgctgcaccccggggygggtctgggcragccgtgctctggggatgaggaccacagcacacctgagcctggagggatgccctggcacccaattcaactgcagaagtcactatagcaaccatcgaccaatgcggcgcgctgagagctggcattgtttccgtgcccatagggatgcagctgatgacacggtgacatcagccgctgcaaagagaagcctttggaaatttgcttttccctggttataaatagcgtgacccagaaatgcgtgcaaagcagcgggmygagtccgtgggagacagagatgagcagagcttcattgacgggggctgtgagcgccccgcagtgagggacagcacggagcggctgcagggtggctstatgaggctctcacacactccaggttctgtcccccgtccgtctgtgcagccttcccacggctgcctgctgctgtttgccccgggaggatgggctcagaccccccgagcagctcctcctgaccccccattcagctctccatgtcagtacgccccggcacggctcgcctgcctcaggactgagcaatttggtgcttctctctaccct

SEQ ID NO: 42183 - DNA, 600 bp, Chicken  19866894278813_5
tgccctggcacccaattcaactgcagaagtcactatagcaaccatcgaccaatgcggcgcgctgagagctggcattgtttccgtgcccatagggatgcagctgatgacacggtgacatcagccgctgcaaagagaagcctttggaaatttgcttttccctggttataaatagcgtgacccagaaatgcgtgcaaagcagcgggmygagtccgtgggagacagagatgagcagagcttcattgacgggggctgtgagcgccccgcagtgagggacagcacggagcggctgcagggtggctstatgaggctctcacacactccaggttctgtcccccgtccgtctgtgcagccttcccacggctgcctgctgctgtttgccccgggaggatgggctcagaccccccgagcagctcctcctgaccccccattcagctctccatgtcagtacgccccggcacggctcgcctgcctcaggactgagcaatttggtgcttctctctaccctcaagcagtgtcctccagcgagctcctcctctcctgtgagcctcagcacatccgcagcaggagcagacacggcttccattcagttggcaggaggag

SEQ ID NO: 42184 - DNA, 600 bp, Chicken  19866894278814_1
ctgcgaccttcaatcaacactcctttaatatgcatgaagttacgtttctttatcattaataaacagagtgaaaatccaattggagcaaatactcagttgatttccatcattacaaagctgcaagaacattgacattcatgggaggaacaagttctaaacactcagttttagttttgtcccctttccaatacttctgcagctgagagccatcaagttttcacactcctagctgggatgtgtaagtgatatgttcatccaggatctcttcctgccagaagccaaaccatatgaattcctackatagacagtaggatggaaggtgaactcacagtgcattatcttgaactcatttygaactgatacaaggctatgtgggctcttggtatcctctacctgtggcactgagggacatagttcagtgggttgtgtgagtggcatcgtggtgatggttgatggcagcactctgtgattctgaagtgcatgctgcacccacccagtttattagggccatgtcagaaaaacactaagtctgttcattttgctgttcccacaaagaccaacagcattagagaaaagctaatcacaggaaggccacaattc

SEQ ID NO: 42185 - DNA, 600 bp, Chicken  19866894278814_2
cattaataaacagagtgaaaatccaattggagcaaatactcagttgatttccatcattacaaagctgcaagaacattgacattcatgggaggaacaagttctaaacactcagttttagttttgtcccctttccaatacttctgcagctgagagccatcaagttttcacactcctagctgggatgtgtaagtgatatgttcatccaggatctcttcctgccagaagccaaaccatatgaattcctackatagacagtaggatggaaggtgaactcacagtgcattatcttgaactcatttygaactgatacaaggctatgtgggctcttggtatcctctacctgtggcactgagggacatagttcagtgggttgtgtgagtggcatcgtggtgatggttgatggcagcactctgtgattctgaagtgcatgctgcacccacccagtttattagggccatgtcagaaaaacactaagtctgttcattttgctgttcccacaaagaccaacagcattagagaaaagctaatcacaggaaggccacaattcataggcagctatttcagatgaaggaatcccaccccacacaaagcagctctatg

SEQ ID NO: 42186 - DNA, 600 bp, Chicken  19866894278825_1
tcttccaagtaaaaacttgttaatttgacaatcatccctggaaattatctaataggtttagcagaaatgaacaaacattatggacactgaacccgtaataatgtaattcattttttcattctagcaacattcagcaataattaagggaaaaaaggacaaaccttaagagcttattataataacctttgtctaagttttacccatttttattctgtattggcgatccaggcagccaagtgtagcagctgccacattttatggcccaattccagaaacactggatgtattcaacttctgtgrttccctttcctgaaaatcaggttaaatgcaccatgtacagtmggtagaagatgttatcrtacagcttattttgtcaatatgaaatacttattaartacagaagaattcatcaattctaacgctctcacagttaccagcaaataaatacaaaactacaaactaaacatataagactgaattcatcagtttgttaaaaagaagtattagtgattgccgaaggagcgccagcaggaaccacccccctaccttcctgctctaagcacagaactttcaaagtcagaggtaataattttaggaaaa

SEQ ID NO: 42187 - DNA, 600 bp, Chicken  19866894278825_2
aattatctaataggtttagcagaaatgaacaaacattatggacactgaacccgtaataatgtaattcattttttcattctagcaacattcagcaataattaagggaaaaaaggacaaaccttaagagcttattataataacctttgtctaagttttacccatttttattctgtattggcgatccaggcagccaagtgtagcagctgccacattttatggcccaattccagaaacactggatgtattcaacttctgtgrttccctttcctgaaaatcaggttaaatgcaccatgtacagtmggtagaagatgttatcrtacagcttattttgtcaatatgaaatacttattaartacagaagaattcatcaattctaacgctctcacagttaccagcaaataaatacaaaactacaaactaaacatataagactgaattcatcagtttgttaaaaagaagtattagtgattgccgaaggagcgccagcaggaaccacccccctaccttcctgctctaagcacagaactttcaaagtcagaggtaataattttaggaaaacaaacaataaaaatgcaaggatggccccgagtgacagctttg

SEQ ID NO: 42188 - DNA, 600 bp, Chicken  19866894278825_3
agcagaaatgaacaaacattatggacactgaacccgtaataatgtaattcattttttcattctagcaacattcagcaataattaagggaaaaaaggacaaaccttaagagcttattataataacctttgtctaagttttacccatttttattctgtattggcgatccaggcagccaagtgtagcagctgccacattttatggcccaattccagaaacactggatgtattcaacttctgtgrttccctttcctgaaaatcaggttaaatgcaccatgtacagtmggtagaagatgttatcrtacagcttattttgtcaatatgaaatacttattaartacagaagaattcatcaattctaacgctctcacagttaccagcaaataaatacaaaactacaaactaaacatataagactgaattcatcagtttgttaaaaagaagtattagtgattgccgaaggagcgccagcaggaaccacccccctaccttcctgctctaagcacagaactttcaaagtcagaggtaataattttaggaaaacaaacaataaaaatgcaaggatggccccgagtgacagctttgcaaaggctggagaaatc

SEQ ID NO: 42189 - DNA, 600 bp, Chicken  19866894278825_4
taataatgtaattcattttttcattctagcaacattcagcaataattaagggaaaaaaggacaaaccttaagagcttattataataacctttgtctaagttttacccatttttattctgtattggcgatccaggcagccaagtgtagcagctgccacattttatggcccaattccagaaacactggatgtattcaacttctgtgrttccctttcctgaaaatcaggttaaatgcaccatgtacagtmggtagaagatgttatcrtacagcttattttgtcaatatgaaatacttattaartacagaagaattcatcaattctaacgctctcacagttaccagcaaataaatacaaaactacaaactaaacatataagactgaattcatcagtttgttaaaaagaagtattagtgattgccgaaggagcgccagcaggaaccacccccctaccttcctgctctaagcacagaactttcaaagtcagaggtaataattttaggaaaacaaacaataaaaatgcaaggatggccccgagtgacagctttgcaaaggctggagaaatcagctgtgcttaaaaagtaagtaaaagtaatttttaa

SEQ ID NO: 42190 - DNA, 452 bp, Chicken  19866894278827_1
aggcggcagtcaaaactaccaaattactgctttcatgagcacaacttcagaaggcgccttttgaaacctttttaaagggaatttaaatgctctttttccatttggaaatgtttaagtaaaattaggagaagtggaagtacttaatgacaaacacagctaagttttagaaccataggaaacataataggaaaatagattctccagtctgtcaccttgcttatcctggatgattctggcagacaaggtgtatatgctgtccctttacaccaacatccaaactacttgtcttctttatgaccratctggggagactcggatggaaactttagactccagcttgcaaatcagtaagtaggtaacctcctgcacattgctgaaatcccttcactcagttaaagcaagttggtgttcgaagtcctttcagcagttttgtagggctgagtacctcatgt

SEQ ID NO: 42191 - DNA, 600 bp, Chicken  19866894278832_1
tattttaaagcaatgttgattttgaacaggataataaagagaaggtttccatcttctagcttatcattgaaagacagaagaaagttctggtccatatattctccctatatcctgtcaccttaaacacttgttttttgtttaaattgattgtaaattttgaatctctattcctgtttttgatacctgttgtgcggataaacttcatcactaaccaaaactacagagaatgtttctgtcattacatccttagacatttccagtcataatgctttggttgcacatattcatagagaggtggayttttccatgcagttttcctggtatgtacatcataagaacttctgccagaaacctacatatcctgattgtttatgacctaccactttgtatgcttgttcagagatttaactcagtcttgtgtgagcatccaattataactgacgtttgctctraaggcctggttgcatccttgtttcctttattttacaaagatgtatagtgcaacacaaggagtgatgcagtagaaaaagatatctactgtcctgtagctagcaagtggacaggttggatgtagaatctggaaaagcaattttaggtcac

SEQ ID NO: 42192 - DNA, 600 bp, Chicken  19866894278832_2
aattttgaatctctattcctgtttttgatacctgttgtgcggataaacttcatcactaaccaaaactacagagaatgtttctgtcattacatccttagacatttccagtcataatgctttggttgcacatattcatagagaggtggayttttccatgcagttttcctggtatgtacatcataagaacttctgccagaaacctacatatcctgattgtttatgacctaccactttgtatgcttgttcagagatttaactcagtcttgtgtgagcatccaattataactgacgtttgctctraaggcctggttgcatccttgtttcctttattttacaaagatgtatagtgcaacacaaggagtgatgcagtagaaaaagatatctactgtcctgtagctagcaagtggacaggttggatgtagaatctggaaaagcaattttaggtcactagaacttacttttttcctgtggtttttgtttatttcttcaggtgttctttttttgtttgtttgtttgcttgtttgtttgcagatacaaataatgatctactttatgtttttttcctgtacttttgacttttatgtctagaagcaatcccag

SEQ ID NO: 42193 - DNA, 600 bp, Chicken  19866894278833_1
atgtgtgaaggaagcaatctgataaggaaaagatgggaaagactataaataccagtgctgggaggaaagaggagcagatgttatttcagatcataagtgttcatgctaaaaaagctatcaccaccccacgccacccacagagctgcaacccaaggagttcaaaaactgtgggagtgatttaaaatgatatacgatggatctatttgctttctgctgttgaatttacagatttaatcttggttttcaagctttttagcacatttctgatagttacaaattcactttaaaaacaaataatakaaaagcaatgmaaaaacagagtcttaagaaatcacaggatatgagatgtgttataaaaccagatttggttgccttttgtcagcgaaaaatactgagagaatctgagcagtaaggtaccaccctctagcaatgtcgtcttgtgctcagatcacctaaagctggtaataaggacatctctagctgtattatatgagcttacaggttctctggcatgggggaagtaaacctacctttttcttgtattactgaacaaggcttgaattracctcctagatctgttactcatttattgattctttt

SEQ ID NO: 42194 - DNA, 600 bp, Chicken  19866894278833_2
aagcaatctgataaggaaaagatgggaaagactataaataccagtgctgggaggaaagaggagcagatgttatttcagatcataagtgttcatgctaaaaaagctatcaccaccccacgccacccacagagctgcaacccaaggagttcaaaaactgtgggagtgatttaaaatgatatacgatggatctatttgctttctgctgttgaatttacagatttaatcttggttttcaagctttttagcacatttctgatagttacaaattcactttaaaaacaaataatakaaaagcaatgmaaaaacagagtcttaagaaatcacaggatatgagatgtgttataaaaccagatttggttgccttttgtcagcgaaaaatactgagagaatctgagcagtaaggtaccaccctctagcaatgtcgtcttgtgctcagatcacctaaagctggtaataaggacatctctagctgtattatatgagcttacaggttctctggcatgggggaagtaaacctacctttttcttgtattactgaacaaggcttgaattracctcctagatctgttactcatttattgattctttttttttaatttg

SEQ ID NO: 42195 - DNA, 600 bp, Chicken  19866894278833_3
tgatagttacaaattcactttaaaaacaaataatakaaaagcaatgmaaaaacagagtcttaagaaatcacaggatatgagatgtgttataaaaccagatttggttgccttttgtcagcgaaaaatactgagagaatctgagcagtaaggtaccaccctctagcaatgtcgtcttgtgctcagatcacctaaagctggtaataaggacatctctagctgtattatatgagcttacaggttctctggcatgggggaagtaaacctacctttttcttgtattactgaacaaggcttgaattracctcctagatctgttactcatttattgattctttttttttaatttgctggctctctgaatgatcctggtatgaaccaggactcactctgtgcaagtgagctgccagtaatacactaaaatgaacaagaaagggaagtcgctgaaattgagactgccctgacaaatctgatttacagtctgaatggagtttgctgatgtttgttgctggctaattataaataccaactacaaactgacttccagtatttttatgtgaatgttctataaatactcctcaattgtgtgtcagttctgctaga

SEQ ID NO: 42196 - DNA, 600 bp, Chicken  19866894278833_4
cactctgtgcaagtgagctgccagtaatacactaaaatgaacaagaaagggaagtcgctgaaattgagactgccctgacaaatctgatttacagtctgaatggagtttgctgatgtttgttgctggctaattataaataccaactacaaactgacttccagtatttttatgtgaatgttctataaatactcctcaattgtgtgtcagttctgctagactgatgtgtttatacaagcatataccactgtaggtaggtatgtacaacttactgactttttgactgcatagtcagaattttamaagtgtttaaatggtgtgaccactctcgtgtcttgttttcctatgcccacacatgtattgcacagcatggactgatttgaagcgttaaagaacccaaagattgtattaatagaagtgccccaagggatttagaatgtggctcccactgactgtcactgatggtttatgaaggaaaattgtagggagcagtgccagtacagcagtctgcttccatgcacaaacattaatccagagaatattcttgcaaggtaaatattgtatctgagccagatcccagactcatctaagtgaagggaagag

SEQ ID NO: 42197 - DNA, 600 bp, Chicken  19866894278837_1
tgttatattaattatgacagatcaaaatcacagccttgaacaagagcattagtgctcgtggactagataacattacttctccatgtcccacaataagctcactacatattgataaatatagcagccattcaaattaaaatatccaacattatctcctttgggagctgtgcacattcaagagggaatatacccttctaggcactgttcacagaagaaaaacaggaaaagaaaaatcacacaaattatttcatccttttctttttaatcagttgtctgacgcacacacagaaagtaaaatayatscattttcacttggacgtagtcacttgttttaggtaggcacttctctatggtcatcatcaagccaactttaaaaacagacaaatccttcctcacyggatgtagaaaattgtctttttttcccagaaaactaatacaatcccaagcaggaaaattcatcacagcaatcacaagtccacaagctcaggtctgaagaaacattcagacatttcaagccataaatcagagtctgcaagtatgcagcagctccacaatcccaaatctacattcatggatatgatacccaacagaagtcccaag

SEQ ID NO: 42198 - DNA, 600 bp, Chicken  19866894278837_2
tatattaattatgacagatcaaaatcacagccttgaacaagagcattagtgctcgtggactagataacattacttctccatgtcccacaataagctcactacatattgataaatatagcagccattcaaattaaaatatccaacattatctcctttgggagctgtgcacattcaagagggaatatacccttctaggcactgttcacagaagaaaaacaggaaaagaaaaatcacacaaattatttcatccttttctttttaatcagttgtctgacgcacacacagaaagtaaaatayatscattttcacttggacgtagtcacttgttttaggtaggcacttctctatggtcatcatcaagccaactttaaaaacagacaaatccttcctcacyggatgtagaaaattgtctttttttcccagaaaactaatacaatcccaagcaggaaaattcatcacagcaatcacaagtccacaagctcaggtctgaagaaacattcagacatttcaagccataaatcagagtctgcaagtatgcagcagctccacaatcccaaatctacattcatggatatgatacccaacagaagtcccaagcaa

SEQ ID NO: 42199 - DNA, 600 bp, Chicken  19866894278837_3
ctcactacatattgataaatatagcagccattcaaattaaaatatccaacattatctcctttgggagctgtgcacattcaagagggaatatacccttctaggcactgttcacagaagaaaaacaggaaaagaaaaatcacacaaattatttcatccttttctttttaatcagttgtctgacgcacacacagaaagtaaaatayatscattttcacttggacgtagtcacttgttttaggtaggcacttctctatggtcatcatcaagccaactttaaaaacagacaaatccttcctcacyggatgtagaaaattgtctttttttcccagaaaactaatacaatcccaagcaggaaaattcatcacagcaatcacaagtccacaagctcaggtctgaagaaacattcagacatttcaagccataaatcagagtctgcaagtatgcagcagctccacaatcccaaatctacattcatggatatgatacccaacagaagtcccaagcaagtttgtccatgcagagactgtaaggttccgcctctcgtcttttgtgaaagaaaatgttcattttatgacaattcatttttgcttccctgcttaa

SEQ ID NO: 42200 - DNA, 497 bp, Chicken  19866894278837_4
tgtctttttttcccagaaaactaatacaatcccaagcaggaaaattcatcacagcaatcacaagtccacaagctcaggtctgaagaaacattcagacatttcaagccataaatcagagtctgcaagtatgcagcagctccacaatcccaaatctacattcatggatatgatacccaacagaagtcccaagcaagtttgtccatgcagagactgtaaggttccgcctctcgtcttttgtgaaagaaaatgttcattttatgacaattcatttttgcttccctgcttaactgcaggggatawcagcttttgaggtggttcacaagctcaagagaaattcaactgttagcgtttgagactatgaaaccagagaagaaagcagaactggtgtttacttgtttttaacttgtaacaaaacactaataaaagaagggggttcctttgttggcatcccctcccttacacagcattaatactgtaggcacagttctatttgcata

SEQ ID NO: 42201 - DNA, 600 bp, Chicken  19866894278841_1
agctgattaatattagcagatgtctttgttcatctgtatttattgattgggtaacattaatggaagaaaacatccccgttttcagggaaaaaaaaaaaaagtgatacagaacataaataatatagagacagaaaaaaagttccagcattctatgaatattttcattagttttgtcttaatttttcataccttttacttccctgttctatgagtaaccacatcaatgtaagatgaaagtaaaatgtgacagacctagtccttaatgaaaatacataaaagatactaataaagtaaaaatgyacgaaccattcattatacacaacattccattccaagtaaagtacagggagaaatagccataacttcagataaaatcctgtgttagcaaagaatgatttgtagtagcaactggagagtgtattgtgaacattttagacaaaggaactaactaataattattttgtgtgttcagcaagcaagaacattttgtgaacattttaataatattgctagaatagttgtaaagtacagatggcttgtcctcaagactagcacactgacaaaaatatagaggagtagttaatatgtggactgctgtga

SEQ ID NO: 42202 - DNA, 599 bp, Chicken  19866894278842_1
  misc_feature (1)..(45): n is any nucleotide
nnnnnnnnnnnnnnnnnnnnnnnnnnnnnnnnnnnnnnnnnnnnngtagccatgccgtcagcacgttccctgtagcagacttgctctgacccgtgttctctaccacacaacacgtttctgttacagctctcagaactttacccaacaaaggttcacacagctgctgggtgaacacttcagcgtggaattttttgcctgataacagcgctaccactgtgagcacaactaacctggaacaatctctcaagacacacttagggcaaaaatgtatttttccatacagttgttgacgggctttayataaactgctgccttgtatacagtcatcagttttaaccagtggcatcgtgctgtttaaacgcaggttatggatcaatgcagccaaacaattaatacaaattctccgtgttgcaattaatatttaattaacttgtgctgccttgtactctagcaggcacttaacacgcagggaacaggtacagctttaaagtgctgaaagaataattaccactctgactgggtcctgaacataatgtcactctactgtatttttctgacaaatatgtagagacagttttacagatcctgtggcattttct

SEQ ID NO: 42203 - DNA, 600 bp, Chicken  19866894278847_1
tgttctccatgctacataaaccactttttttttttaattaaacacttaaacatctcactcaaggaggaatacagttatttcatcaatgctaatattagtattcctactgcaacaaaggcttcaagtcacagacttttctgtctacttctcatgaagtttgcatacggtttcaaaaatgctctaaagctaccccagctttagtgtaatgtttcttcatattagtttatttcatggctattttcacaggtggaagaaatcatactctctgggcaatagctcccacaagtctgccacatgcayagagacagaacagaagattatacctacatgaattacttctgctttgctattattccagtatgccacttgggaaccctgaggttcttaaagaaaaacatgctaaattctagattccagtagtcttgagtacaattaatgcacgctcctgcayatgagctagagacactrttttgctgayracaacttctaaatattgaaccctgatgtcacactgcatgcaaaacttgaggagggtaagaagaagcagaacacagtttgcagctctgataaagtcagtaaagtttcctcctcaacttggca

SEQ ID NO: 42204 - DNA, 600 bp, Chicken  19866894278847_2
tgaagtttgcatacggtttcaaaaatgctctaaagctaccccagctttagtgtaatgtttcttcatattagtttatttcatggctattttcacaggtggaagaaatcatactctctgggcaatagctcccacaagtctgccacatgcayagagacagaacagaagattatacctacatgaattacttctgctttgctattattccagtatgccacttgggaaccctgaggttcttaaagaaaaacatgctaaattctagattccagtagtcttgagtacaattaatgcacgctcctgcayatgagctagagacactrttttgctgayracaacttctaaatattgaaccctgatgtcacactgcatgcaaaacttgaggagggtaagaagaagcagaacacagtttgcagctctgataaagtcagtaaagtttcctcctcaacttggcaatataccattagtgtttttctatacagcagtgagcaaaaatacttgcattctgtacccaacgtttcttacaagacaaataagagcaccaaagtaggaaacaaagatcagtcattcagacaactcagcagggctaaagagcctggcaagaat

SEQ ID NO: 42205 - DNA, 600 bp, Chicken  19866894278847_3
ttcaaaaatgctctaaagctaccccagctttagtgtaatgtttcttcatattagtttatttcatggctattttcacaggtggaagaaatcatactctctgggcaatagctcccacaagtctgccacatgcayagagacagaacagaagattatacctacatgaattacttctgctttgctattattccagtatgccacttgggaaccctgaggttcttaaagaaaaacatgctaaattctagattccagtagtcttgagtacaattaatgcacgctcctgcayatgagctagagacactrttttgctgayracaacttctaaatattgaaccctgatgtcacactgcatgcaaaacttgaggagggtaagaagaagcagaacacagtttgcagctctgataaagtcagtaaagtttcctcctcaacttggcaatataccattagtgtttttctatacagcagtgagcaaaaatacttgcattctgtacccaacgtttcttacaagacaaataagagcaccaaagtaggaaacaaagatcagtcattcagacaactcagcagggctaaagagcctggcaagaattctttacacaccttagg

SEQ ID NO: 42206 - DNA, 600 bp, Chicken  19866894278847_4
ctctaaagctaccccagctttagtgtaatgtttcttcatattagtttatttcatggctattttcacaggtggaagaaatcatactctctgggcaatagctcccacaagtctgccacatgcayagagacagaacagaagattatacctacatgaattacttctgctttgctattattccagtatgccacttgggaaccctgaggttcttaaagaaaaacatgctaaattctagattccagtagtcttgagtacaattaatgcacgctcctgcayatgagctagagacactrttttgctgayracaacttctaaatattgaaccctgatgtcacactgcatgcaaaacttgaggagggtaagaagaagcagaacacagtttgcagctctgataaagtcagtaaagtttcctcctcaacttggcaatataccattagtgtttttctatacagcagtgagcaaaaatacttgcattctgtacccaacgtttcttacaagacaaataagagcaccaaagtaggaaacaaagatcagtcattcagacaactcagcagggctaaagagcctggcaagaattctttacacaccttagggtctggttct

SEQ ID NO: 42207 - DNA, 600 bp, Chicken  19866894278847_5
tctaaagctaccccagctttagtgtaatgtttcttcatattagtttatttcatggctattttcacaggtggaagaaatcatactctctgggcaatagctcccacaagtctgccacatgcayagagacagaacagaagattatacctacatgaattacttctgctttgctattattccagtatgccacttgggaaccctgaggttcttaaagaaaaacatgctaaattctagattccagtagtcttgagtacaattaatgcacgctcctgcayatgagctagagacactrttttgctgayracaacttctaaatattgaaccctgatgtcacactgcatgcaaaacttgaggagggtaagaagaagcagaacacagtttgcagctctgataaagtcagtaaagtttcctcctcaacttggcaatataccattagtgtttttctatacagcagtgagcaaaaatacttgcattctgtacccaacgtttcttacaagacaaataagagcaccaaagtaggaaacaaagatcagtcattcagacaactcagcagggctaaagagcctggcaagaattctttacacaccttagggtctggttctc

SEQ ID NO: 42208 - DNA, 600 bp, Chicken  19866894278847_6
ttttctatacagcagtgagcaaaaatacttgcattctgtacccaacgtttcttacaagacaaataagagcaccaaagtaggaaacaaagatcagtcattcagacaactcagcagggctaaagagcctggcaagaattctttacacaccttagggtctggttctcaaatcttcctgtcacctttttctggttagtcgaagattttacttggcaagctgaagtgtatgtcatgctgccctcgcaattaccagcaccagttctcccacatacattcaagtaatagtaatactcctctttgtcrtctttggctaagtatggtgtgacataatctaaatawttaagamagaaaaaaggaaaaacgttgcagtagaacagacattaaaaaaaatctactagtcagataggacccaagtatctagagaggatatttttccttcactctacrcattgagccagaaaaccaattagtagcaccacacactgaaaataagaatagtgagtttacctggagatagagtaagtgggctcaagtcaatggagacatcatgttgctcattagtcagaacacagctcttactttccaggtaatccctgtgacagg

SEQ ID NO: 42209 - DNA, 600 bp, Chicken  19866894278847_7
tgtacccaacgtttcttacaagacaaataagagcaccaaagtaggaaacaaagatcagtcattcagacaactcagcagggctaaagagcctggcaagaattctttacacaccttagggtctggttctcaaatcttcctgtcacctttttctggttagtcgaagattttacttggcaagctgaagtgtatgtcatgctgccctcgcaattaccagcaccagttctcccacatacattcaagtaatagtaatactcctctttgtcrtctttggctaagtatggtgtgacataatctaaatawttaagamagaaaaaaggaaaaacgttgcagtagaacagacattaaaaaaaatctactagtcagataggacccaagtatctagagaggatatttttccttcactctacrcattgagccagaaaaccaattagtagcaccacacactgaaaataagaatagtgagtttacctggagatagagtaagtgggctcaagtcaatggagacatcatgttgctcattagtcagaacacagctcttactttccaggtaatccctgtgacaggcatactcagtaacccactcaacttcataccggcaat

SEQ ID NO: 42210 - DNA, 600 bp, Chicken  19866894278847_8
aacgtttcttacaagacaaataagagcaccaaagtaggaaacaaagatcagtcattcagacaactcagcagggctaaagagcctggcaagaattctttacacaccttagggtctggttctcaaatcttcctgtcacctttttctggttagtcgaagattttacttggcaagctgaagtgtatgtcatgctgccctcgcaattaccagcaccagttctcccacatacattcaagtaatagtaatactcctctttgtcrtctttggctaagtatggtgtgacataatctaaatawttaagamagaaaaaaggaaaaacgttgcagtagaacagacattaaaaaaaatctactagtcagataggacccaagtatctagagaggatatttttccttcactctacrcattgagccagaaaaccaattagtagcaccacacactgaaaataagaatagtgagtttacctggagatagagtaagtgggctcaagtcaatggagacatcatgttgctcattagtcagaacacagctcttactttccaggtaatccctgtgacaggcatactcagtaacccactcaacttcataccggcaatttgtttt

SEQ ID NO: 42211 - DNA, 600 bp, Chicken  19866894278847_9
caccttagggtctggttctcaaatcttcctgtcacctttttctggttagtcgaagattttacttggcaagctgaagtgtatgtcatgctgccctcgcaattaccagcaccagttctcccacatacattcaagtaatagtaatactcctctttgtcrtctttggctaagtatggtgtgacataatctaaatawttaagamagaaaaaaggaaaaacgttgcagtagaacagacattaaaaaaaatctactagtcagataggacccaagtatctagagaggatatttttccttcactctacrcattgagccagaaaaccaattagtagcaccacacactgaaaataagaatagtgagtttacctggagatagagtaagtgggctcaagtcaatggagacatcatgttgctcattagtcagaacacagctcttactttccaggtaatccctgtgacaggcatactcagtaacccactcaacttcataccggcaatttgtttttgctgtgagtttgggacctgcgctctgatacagagaagatcaaaactgcaattacaagtttagagatatactgacggcactatattcgtttaagaccagta

SEQ ID NO: 42212 - DNA, 600 bp, Chicken  19866894278850_1
ttttttttttttttttctgcctaatcgttgctcttctcgcacaaaagcgccgccagagcgatcgtggcgcctcgtttcgccgcccggccgcggacgcgccgtgaggtaactgccggccgcgcggagccgccgcggggctgcgggttgcgggcatgcgtgggctaaaccggggcaaaagcggtccagataaagcaaggcctggccgcggtcagcctttaaaaaggttaaataaatacgaatggacgaagataacgctcccggcccggtaagtaggggtgtcgcggagcggtggtttcgcgkcgtgccgggcccgagccgcggccctgcctgcctctgcgcttggggctgccggcccggcccgccgtgacgcggggcacggctccgaggggctccgatcgctgtatccggagctcccctcgtttcgtgcgtctcaaaatgtccgcgtgtccccttctgtaacggcccccgttctgtcttcgggctccgttttaaattaacgcctcggctgaatcgaaatggcaaaattagatcacccggcgtctaataaaggctgatgaaatgaagtggctcgagtcgttcttagcgctgcgcggcgcgtac

SEQ ID NO: 42213 - DNA, 600 bp, Chicken  19866894278856_1
tcactttgggtttttaagctggtattgggtgaagataaaaactaacaaatcgcagctctaaaaaagcactcttctgagcagaggctggggaaagggagcattaaatactatggagcagaaaaattaagaaaaaataactcagatctcggctcaattttgttacagccataaattactttctcagactgcttttagctgaatgtatattagaaaatgcaaaagtaatttgtacaggaaaagagctaccaatggtttgagaagcaggctgaacctagagggaatgagctctcctgaaactayagcagaaagattcaagagggaaattgaagaggtaaaacccccaacagagagggatgaggagaggtctgctggaaggactgttatactgaacatctggcttttcagttgttggcatctttaatacacttgccaattagaaaataataattcttttgcagccaaaaatacttagggagtttttcrtcactaaaattcacggcaggcaaaatactttctcccttttaaatggagggraaagggaagcacaggtgcagtcatttgttcaaggtccccaagcaagtccctgacaaagttaattaa

SEQ ID NO: 42214 - DNA, 600 bp, Chicken  19866894278856_2
gactgcttttagctgaatgtatattagaaaatgcaaaagtaatttgtacaggaaaagagctaccaatggtttgagaagcaggctgaacctagagggaatgagctctcctgaaactayagcagaaagattcaagagggaaattgaagaggtaaaacccccaacagagagggatgaggagaggtctgctggaaggactgttatactgaacatctggcttttcagttgttggcatctttaatacacttgccaattagaaaataataattcttttgcagccaaaaatacttagggagtttttcrtcactaaaattcacggcaggcaaaatactttctcccttttaaatggagggraaagggaagcacaggtgcagtcatttgttcaaggtccccaagcaagtccctgacaaagttaattaacgtcttgtccattcaacaatggtgccacgcagagatggttcttctacacgatgcgagtcaaattcattgcatgagccatacccagaaatattccaaatttatgccacaagaagataaagcagataactctttccaagtattytaaacttttatcctatagctcagagcttcaacttgcgtcag

SEQ ID NO: 42215 - DNA, 600 bp, Chicken  19866894278856_3
gaaaagagctaccaatggtttgagaagcaggctgaacctagagggaatgagctctcctgaaactayagcagaaagattcaagagggaaattgaagaggtaaaacccccaacagagagggatgaggagaggtctgctggaaggactgttatactgaacatctggcttttcagttgttggcatctttaatacacttgccaattagaaaataataattcttttgcagccaaaaatacttagggagtttttcrtcactaaaattcacggcaggcaaaatactttctcccttttaaatggagggraaagggaagcacaggtgcagtcatttgttcaaggtccccaagcaagtccctgacaaagttaattaacgtcttgtccattcaacaatggtgccacgcagagatggttcttctacacgatgcgagtcaaattcattgcatgagccatacccagaaatattccaaatttatgccacaagaagataaagcagataactctttccaagtattytaaacttttatcctatagctcagagcttcaacttgcgtcagggttccgccatcatacgttacatttatgtagatgtctccataaaatatact

SEQ ID NO: 42216 - DNA, 600 bp, Chicken  19866894278856_4
aataattcttttgcagccaaaaatacttagggagtttttcrtcactaaaattcacggcaggcaaaatactttctcccttttaaatggagggraaagggaagcacaggtgcagtcatttgttcaaggtccccaagcaagtccctgacaaagttaattaacgtcttgtccattcaacaatggtgccacgcagagatggttcttctacacgatgcgagtcaaattcattgcatgagccatacccagaaatattccaaatttatgccacaagaagataaagcagataactctttccaagtattytaaacttttatcctatagctcagagcttcaacttgcgtcagggttccgccatcatacgttacatttatgtagatgtctccataaaatatactgatgatgcaatcttcccattgttaagctgtcagcaaaatgctgacctttgctccttctaaaacaaactttcctgtcaatcaaaaccttgttatacatggatatgacattagacctacgaataacaatcttgttgatggacagctcatctgcaatgactccctttttaaattgccttgagtttaaagccatgagcagccaactaaccac

SEQ ID NO: 42217 - DNA, 599 bp, Chicken  19866894278859_1
  misc_feature (1)..(125): n is any nucleotide
nnnnnnnnnnnnnnnnnnnnnnnnnnnnnnnnnnnnnnnnnnnnnnnnnnnnnnnnnnnnnnnnnnnnnnnnnnnnnnnnnnnnnnnnnnnnnnnnnnnnnnnnnnnnnnnnnnnnnnnnnnnnncacaggtagcctgtagcaggagctctgctaagcatgacttaatgaggaaaagcttttttatttgcaacaaattaatgtaggtgttgtttgttttgttttgatctatgcaggtttgatgaattttgtacaattcttgctatttttgttttatgttcctgggagcaagaactggaaygtttgtgttaaatatgagtgcctttagtagttagaacaaaaaccatttatgtcaactgccttctctgtcttttgactactacacatttacataaatttcagaatttccaagaggaagaagtagggtctgatggaagggggatttaagatgcagttgcatgaagcagaggaaagatttgaatttctcccctgcgaaacaaaagtgcttgtctgatgtcaataaactggtgctttaaagcagtgagatgaaaagtaccttctccttataaatagttggctcttctccactgaagaaaagaw

SEQ ID NO: 42218 - DNA, 600 bp, Chicken  19866894278859_2
ygtttgtgttaaatatgagtgcctttagtagttagaacaaaaaccatttatgtcaactgccttctctgtcttttgactactacacatttacataaatttcagaatttccaagaggaagaagtagggtctgatggaagggggatttaagatgcagttgcatgaagcagaggaaagatttgaatttctcccctgcgaaacaaaagtgcttgtctgatgtcaataaactggtgctttaaagcagtgagatgaaaagtaccttctccttataaatagttggctcttctccactgaagaaaagawattccaattaaaatttcaaatatttkgaatgttattgaaatgtcactttccaattaatttataattgctggaagaataagttccctagtcgtcgtggtggcagcttcatttgataaggtaaaacagtcagcatgtacagatttatttagtgtggacttacctggttctctgtatccctgttgctaagcttctctatgcctaatttgaatggtttcaatatttcctaaatcttagttgttttatgtgtttgttttttaattgttcttggcaaagttatttgaggaagaggtctgaataact

SEQ ID NO: 42219 - DNA, 600 bp, Chicken  19866894278859_3
agtagttagaacaaaaaccatttatgtcaactgccttctctgtcttttgactactacacatttacataaatttcagaatttccaagaggaagaagtagggtctgatggaagggggatttaagatgcagttgcatgaagcagaggaaagatttgaatttctcccctgcgaaacaaaagtgcttgtctgatgtcaataaactggtgctttaaagcagtgagatgaaaagtaccttctccttataaatagttggctcttctccactgaagaaaagawattccaattaaaatttcaaatatttkgaatgttattgaaatgtcactttccaattaatttataattgctggaagaataagttccctagtcgtcgtggtggcagcttcatttgataaggtaaaacagtcagcatgtacagatttatttagtgtggacttacctggttctctgtatccctgttgctaagcttctctatgcctaatttgaatggtttcaatatttcctaaatcttagttgttttatgtgtttgttttttaattgttcttggcaaagttatttgaggaagaggtctgaataactgttgatgattcaggccaaatcttgaa

SEQ ID NO: 42220 - DNA, 600 bp, Chicken  19866894278860_1
tggcaggaaaattatgaacattttattaatctgagaaaaatacataaaaacattcataagcctctaaagttattgccacagaaactgcttcaggcttcaaaagacaaagtacttcacaattattctgcttcaatatgatactcactgtactacgtttaatcaactgttaatacaaagtaaagaggtcccctaagcactgcatagaaaattcctgtcctgttaatatatcatatgatgtagaatgtaacacactcaccaacagctgaaaatgtgaagagcacttataccatgctcctccaratccagagagatgagacagactttaggacaaaaggactgctttggactactggcccaaaaccaaattttctgctttaaaaaawtaaacataatacaagcttaaaataattcactgaagcactgaagtgaaagaaggacattacactgtacttgagccaaacaacaacaaaaaaaaacyacaaaaaaaaacaaccaaccaaaggcaatactattgtggtaaactttaagctcctgaagagaatcttgtaatgacaagaaatgcacattcacgtccaagtttcaactggtgaagatgattct

SEQ ID NO: 42221 - DNA, 600 bp, Chicken  19866894278860_2
actgcttcaggcttcaaaagacaaagtacttcacaattattctgcttcaatatgatactcactgtactacgtttaatcaactgttaatacaaagtaaagaggtcccctaagcactgcatagaaaattcctgtcctgttaatatatcatatgatgtagaatgtaacacactcaccaacagctgaaaatgtgaagagcacttataccatgctcctccaratccagagagatgagacagactttaggacaaaaggactgctttggactactggcccaaaaccaaattttctgctttaaaaaawtaaacataatacaagcttaaaataattcactgaagcactgaagtgaaagaaggacattacactgtacttgagccaaacaacaacaaaaaaaaacyacaaaaaaaaacaaccaaccaaaggcaatactattgtggtaaactttaagctcctgaagagaatcttgtaatgacaagaaatgcacattcacgtccaagtttcaactggtgaagatgattctgttcacaattttctcatggactttcccttaggtgactaaaaactacactgttgtttatactgatcaagtttcaagacttatgt

SEQ ID NO: 42222 - DNA, 600 bp, Chicken  19866894278860_3
aaagaggtcccctaagcactgcatagaaaattcctgtcctgttaatatatcatatgatgtagaatgtaacacactcaccaacagctgaaaatgtgaagagcacttataccatgctcctccaratccagagagatgagacagactttaggacaaaaggactgctttggactactggcccaaaaccaaattttctgctttaaaaaawtaaacataatacaagcttaaaataattcactgaagcactgaagtgaaagaaggacattacactgtacttgagccaaacaacaacaaaaaaaaacyacaaaaaaaaacaaccaaccaaaggcaatactattgtggtaaactttaagctcctgaagagaatcttgtaatgacaagaaatgcacattcacgtccaagtttcaactggtgaagatgattctgttcacaattttctcatggactttcccttaggtgactaaaaactacactgttgtttatactgatcaagtttcaagacttatgttttgagatattaaattatttatactgtacttcaatcaagctaaagttaagtgagttcagacctgggatggtattctgaagatgtgaagaagttgg

SEQ ID NO: 42223 - DNA, 593 bp, Chicken  19866894278865_1
agattatatttctgcaggaccagattaatttagctacaatttatttatttattttaaggaagtggcatttacagacatgcaaggcaaataacgtgcttattaatttctcctggtcctgttgtaagatgctaccagctccaaaaagccaatcagaacaacgtgagttcactgtcgccctccatcattgcatatgaaaatgtgtgcaaaactttgcttaaataatgcacatcttttgcaaataccatgtgtctgatattccctccaaggctgcagactgagcagaaagaaagcaacatttgytgtaacaaatgtcagtgttgattcttggcaagacaactcttccatggataagcatgtttaagamatatcatgggccaacattactacaagcttccatataaaagttttctgaatgcgtttgaaataaataacaaaactctatggttttattgtagaaacacttttcttcaagtctgattaagaggtgttaattaagtctaaaagggcagagacacacagataccatgggactgcatgacttttcaaagaaggaatctcataggccattttcataagatcacataatatcccaa

SEQ ID NO: 42224 - DNA, 529 bp, Chicken  19866894278865_2
gcatttacagacatgcaaggcaaataacgtgcttattaatttctcctggtcctgttgtaagatgctaccagctccaaaaagccaatcagaacaacgtgagttcactgtcgccctccatcattgcatatgaaaatgtgtgcaaaactttgcttaaataatgcacatcttttgcaaataccatgtgtctgatattccctccaaggctgcagactgagcagaaagaaagcaacatttgytgtaacaaatgtcagtgttgattcttggcaagacaactcttccatggataagcatgtttaagamatatcatgggccaacattactacaagcttccatataaaagttttctgaatgcgtttgaaataaataacaaaactctatggttttattgtagaaacacttttcttcaagtctgattaagaggtgttaattaagtctaaaagggcagagacacacagataccatgggactgcatgacttttcaaagaaggaatctcataggccattttcataagatcacataatatcccaa

SEQ ID NO: 42225 - DNA, 599 bp, Chicken  19866894278867_1
  misc_feature (1)..(191): n is any nucleotide
nnnnnnnnnnnnnnnnnnnnnnnnnnnnnnnnnnnnnnnnnnnnnnnnnnnnnnnnnnnnnnnnnnnnnnnnnnnnnnnnnnnnnnnnnnnnnnnnnnnnnnnnnnnnnnnnnnnnnnnnnnnnnnnnnnnnnnnnnnnnnnnnnnnnnnnnnnnnnnnnnnnnnnnnnnnnnnnnnnnnnnnnnnnnnnnccccccgttctaattctccgaggctttcagctctcgtggcactggaaaagggcagatgcaaagacaaatgaaaggcaaaaccgtcattgcaacaaatgctggggtgaaygggggcttttcccgcacgcggatgaatcccacctggcacagctgcgggctgtgataagctgccaccgggtgctgagccctgatagctgccaacactgcactgcarctccttctgggctggggggtcagagggctctgcaagctgcagacttggctaaagttatcccactgtggtcatgattatggacagcctgtgggtctctaaggtcacacacggtcatctcctggtggtgggagcacgcaggggagctgggaggatgcaaatctgctcagggcacagggctggactcaaactatcac

SEQ ID NO: 42226 - DNA, 599 bp, Chicken  19866894278867_2
  misc_feature (1)..(86): n is any nucleotide
nnnnnnnnnnnnnnnnnnnnnnnnnnnnnnnnnnnnnnnnnnnnnnnnnnnnnnnnnnnnnnnnnnnnnnnnnnnnnnnnnnnnnnccccccgttctaattctccgaggctttcagctctcgtggcactggaaaagggcagatgcaaagacaaatgaaaggcaaaaccgtcattgcaacaaatgctggggtgaaygggggcttttcccgcacgcggatgaatcccacctggcacagctgcgggctgtgataagctgccaccgggtgctgagccctgatagctgccaacactgcactgcarctccttctgggctggggggtcagagggctctgcaagctgcagacttggctaaagttatcccactgtggtcatgattatggacagcctgtgggtctctaaggtcacacacggtcatctcctggtggtgggagcacgcaggggagctgggaggatgcaaatctgctcagggcacagggctggactcaaactatcactgccctgacctcaggaagggttttattgcagcactgcccctggcttgctgctgggacacattcagcgtccccaggctgctgctttggattcccacagagggaccc

SEQ ID NO: 42227 - DNA, 600 bp, Chicken  19866894278868_1
taaatccattgtgttcaacccatgacttatggttcattgttcctatgcatgaaaacttgcttagaattaggtaaaaggagttaaaatggcttaactcctcttgattaactccatccaccatttctctgattctagaaaatatatttttccaattatctctgttattccagaaaccaaaagtttaacacatggaattaatctgtaaaagcactttaggaatggttgttctggagtaaattctcacatagaaaggttttagcacacaacttgaagatagtgggattgagcaggtggtaatgrattcacatttattaaacattaaaatcccattaattccttccaagatagattgctttgttggtctagagaaataacaaagtgctaacacctatttttactgtggaaactggaaggtttttctctgtgcatgtaataagaacagatctgcccttttaatgtaaacacttcttagggcacttaagagtgaacttgttgccctgggtaagcttactctatatgccttctgttctgtggtaactgtattcgtacactctgtggccatgggaaagtagaaagtaacacaaactagataatctccca

SEQ ID NO: 42228 - DNA, 600 bp, Chicken  19866894278874_1
tcagtgttccacttattgctagaattcatcccccctgccaatttactattccttgaaagctgctattgatgcatcccacaaagctagtacgggcttagcaaagcttaatagctcaacatccacactttcacagtgccattccttcaccaacacgagacccatcttgatgattgggaaccacgggttctggaaaatcacacaaaatctctgcaaagctttgccagactttgaaaaaaagaaggaattagagtactttcaatataagcagagattcagaggaacggaaagaaatcttcaacyagatttcagtttgaactgttaatattatccatcttcaagctttttggctttcagaaacacattagatctcagaaacagcctgtatgtacataagcaatgaaacagwggaaaacaaacagctgttccagggatattcagtaattagrctcctatgatttaatgtcatgatttaatgtcatgatttaatgtcatttgttttgtactgttgatacactcagcagagttcaagctgccgaagtcttgaggcaacaaaaatagtttttggaagtaggrcttatgcttatattaattttcacttgt

SEQ ID NO: 42229 - DNA, 600 bp, Chicken  19866894278874_2
aatagctcaacatccacactttcacagtgccattccttcaccaacacgagacccatcttgatgattgggaaccacgggttctggaaaatcacacaaaatctctgcaaagctttgccagactttgaaaaaaagaaggaattagagtactttcaatataagcagagattcagaggaacggaaagaaatcttcaacyagatttcagtttgaactgttaatattatccatcttcaagctttttggctttcagaaacacattagatctcagaaacagcctgtatgtacataagcaatgaaacagwggaaaacaaacagctgttccagggatattcagtaattagrctcctatgatttaatgtcatgatttaatgtcatgatttaatgtcatttgttttgtactgttgatacactcagcagagttcaagctgccgaagtcttgaggcaacaaaaatagtttttggaagtaggrcttatgcttatattaattttcacttgtacggtcgggccagaaattgtcttcgtgtattgaagttttaaactcagagcatgagtgcagtattcaaaaatgatcaaattggagtgcctggcatacaaatstaaat

SEQ ID NO: 42230 - DNA, 600 bp, Chicken  19866894278874_3
ccaacacgagacccatcttgatgattgggaaccacgggttctggaaaatcacacaaaatctctgcaaagctttgccagactttgaaaaaaagaaggaattagagtactttcaatataagcagagattcagaggaacggaaagaaatcttcaacyagatttcagtttgaactgttaatattatccatcttcaagctttttggctttcagaaacacattagatctcagaaacagcctgtatgtacataagcaatgaaacagwggaaaacaaacagctgttccagggatattcagtaattagrctcctatgatttaatgtcatgatttaatgtcatgatttaatgtcatttgttttgtactgttgatacactcagcagagttcaagctgccgaagtcttgaggcaacaaaaatagtttttggaagtaggrcttatgcttatattaattttcacttgtacggtcgggccagaaattgtcttcgtgtattgaagttttaaactcagagcatgagtgcagtattcaaaaatgatcaaattggagtgcctggcatacaaatstaaataaaacactggattctctgaagctataaacacaacttgaaa

SEQ ID NO: 42231 - DNA, 600 bp, Chicken  19866894278874_4
cagaggaacggaaagaaatcttcaacyagatttcagtttgaactgttaatattatccatcttcaagctttttggctttcagaaacacattagatctcagaaacagcctgtatgtacataagcaatgaaacagwggaaaacaaacagctgttccagggatattcagtaattagrctcctatgatttaatgtcatgatttaatgtcatgatttaatgtcatttgttttgtactgttgatacactcagcagagttcaagctgccgaagtcttgaggcaacaaaaatagtttttggaagtaggrcttatgcttatattaattttcacttgtacggtcgggccagaaattgtcttcgtgtattgaagttttaaactcagagcatgagtgcagtattcaaaaatgatcaaattggagtgcctggcatacaaatstaaataaaacactggattctctgaagctataaacacaacttgaaacctgtgaattgttgagctttttcacttyttttttttaaatagttctgacataccctggctgtggtttttcagtaagcttagttcactgttgtgtgttctctaggtagagtacaatgcttacatgaag

SEQ ID NO: 42232 - DNA, 600 bp, Chicken  19866894278874_5
acagwggaaaacaaacagctgttccagggatattcagtaattagrctcctatgatttaatgtcatgatttaatgtcatgatttaatgtcatttgttttgtactgttgatacactcagcagagttcaagctgccgaagtcttgaggcaacaaaaatagtttttggaagtaggrcttatgcttatattaattttcacttgtacggtcgggccagaaattgtcttcgtgtattgaagttttaaactcagagcatgagtgcagtattcaaaaatgatcaaattggagtgcctggcatacaaatstaaataaaacactggattctctgaagctataaacacaacttgaaacctgtgaattgttgagctttttcacttyttttttttaaatagttctgacataccctggctgtggtttttcagtaagcttagttcactgttgtgtgttctctaggtagagtacaatgcttacatgaaggtaattgaaggatgcatcattttgagatattgaagmtycttagggacctgaaatctctgcaactaaatctttattcatttatatgtgactgctagcaaaaacatttcttcctgtattcattcctctta

SEQ ID NO: 42233 - DNA, 600 bp, Chicken  19866894278874_6
gtcatgatttaatgtcatttgttttgtactgttgatacactcagcagagttcaagctgccgaagtcttgaggcaacaaaaatagtttttggaagtaggrcttatgcttatattaattttcacttgtacggtcgggccagaaattgtcttcgtgtattgaagttttaaactcagagcatgagtgcagtattcaaaaatgatcaaattggagtgcctggcatacaaatstaaataaaacactggattctctgaagctataaacacaacttgaaacctgtgaattgttgagctttttcacttyttttttttaaatagttctgacataccctggctgtggtttttcagtaagcttagttcactgttgtgtgttctctaggtagagtacaatgcttacatgaaggtaattgaaggatgcatcattttgagatattgaagmtycttagggacctgaaatctctgcaactaaatctttattcatttatatgtgactgctagcaaaaacatttcttcctgtattcattcctcttaattctcttttactgtaaattgttgctctgaatgttttgtgctgtatatatacttagaatgtcattgctttcga

SEQ ID NO: 42234 - DNA, 600 bp, Chicken  19866894278874_7
ccagaaattgtcttcgtgtattgaagttttaaactcagagcatgagtgcagtattcaaaaatgatcaaattggagtgcctggcatacaaatstaaataaaacactggattctctgaagctataaacacaacttgaaacctgtgaattgttgagctttttcacttyttttttttaaatagttctgacataccctggctgtggtttttcagtaagcttagttcactgttgtgtgttctctaggtagagtacaatgcttacatgaaggtaattgaaggatgcatcattttgagatattgaagmtycttagggacctgaaatctctgcaactaaatctttattcatttatatgtgactgctagcaaaaacatttcttcctgtattcattcctcttaattctcttttactgtaaattgttgctctgaatgttttgtgctgtatatatacttagaatgtcattgctttcgaaagtcgcaggacaaacctaaaccattcgagtgcataaaaatgttcaaaaaatatagaaaagttagcttgtaatgcatactatatgtatatgaacctcgaagcacaatcacagcttcattggcaatcctttgtgta

SEQ ID NO: 42235 - DNA, 600 bp, Chicken  19866894278874_8
agaaattgtcttcgtgtattgaagttttaaactcagagcatgagtgcagtattcaaaaatgatcaaattggagtgcctggcatacaaatstaaataaaacactggattctctgaagctataaacacaacttgaaacctgtgaattgttgagctttttcacttyttttttttaaatagttctgacataccctggctgtggtttttcagtaagcttagttcactgttgtgtgttctctaggtagagtacaatgcttacatgaaggtaattgaaggatgcatcattttgagatattgaagmtycttagggacctgaaatctctgcaactaaatctttattcatttatatgtgactgctagcaaaaacatttcttcctgtattcattcctcttaattctcttttactgtaaattgttgctctgaatgttttgtgctgtatatatacttagaatgtcattgctttcgaaagtcgcaggacaaacctaaaccattcgagtgcataaaaatgttcaaaaaatatagaaaagttagcttgtaatgcatactatatgtatatgaacctcgaagcacaatcacagcttcattggcaatcctttgtgtagt

SEQ ID NO: 42236 - DNA, 600 bp, Chicken  19866894278878_1
catcagcgttctttcatacgtgtcttctgtaagtaaaaagtagaaatgttggcaacatattattttgtgacatcacgtacattataaaaaaacaaatagcttactaagtataattttttcacagttcaagttagtgagccaagtttcgtgctggctcatgttcagttctttccacatttccatcagcactaaacctgccttctgttcattactggttgtctactttccatgatatatgaaggagacagaaagatcagaaaatgagatgttcgttattagggttgatattgtctttatctyatgtgagagagaaaatagcaccagtggaagaaataaccaaaggctgaacatttgccccacgggagcagcagagtccagcgaggctgagtaatggaaaatatttgctttcactttagcagggacagtttacgggtgaacagtcactgctgctgagagcaatacagctaacagcccaccaagcaaagagggcagggttttgtgagacaggagctgttgagttttagagactgaaatgattgctgcatcccatttctttcccatttcacagtttcccacattacctttgatgtcaaaaggcaa

SEQ ID NO: 42237 - DNA, 600 bp, Chicken  19866894278881_1
gtccatgtactttagaagacggaagaatttgttaataatagcaaaataaacagaaattcggattaggcaaggttgcattttcaacttgaaatgtgtacctggtctgagtaaggtcaaggtaaagcagggcagttgcagcattgggctttccactgccaggttctaatttggtaactagatgataggtgcttctaaaacaaaacaggtggatacagcttgggtttgccaagccaattgcttgtttgctatcgtgacaatgcaagatgagagcaattatgaaataggcttctccctcccccyaaaacacaccacttgttttatcctggattgcttgtttaaacttaacatcagggaactgcttctcctcctacgtgattcccattccttctgccaacaaatactacatttctaccttctggtctcgtcactcctaccagtgatgttatgaagacaatttggaaactcaaagatattccgcaccaacccttgtaaacactagaaatatttcacctgacttgtcagattaattggaagcwtttggattcttgtactataagatgcactgctggttgatgaagactggccacaagactgggctcc

SEQ ID NO: 42238 - DNA, 600 bp, Chicken  19866894278881_2
gcttgtttgctatcgtgacaatgcaagatgagagcaattatgaaataggcttctccctcccccyaaaacacaccacttgttttatcctggattgcttgtttaaacttaacatcagggaactgcttctcctcctacgtgattcccattccttctgccaacaaatactacatttctaccttctggtctcgtcactcctaccagtgatgttatgaagacaatttggaaactcaaagatattccgcaccaacccttgtaaacactagaaatatttcacctgacttgtcagattaattggaagcwtttggattcttgtactataagatgcactgctggttgatgaagactggccacaagactgggctccttggagacaagtgagagttcatttccccatacatacctatttctgacctgtttagtagaggttttagcttaaaagattcacctattatccaaaactagcagtgatgggaagagcacctctcaaaggtgcatagcaatcaggctccagggactcttcttagagaaaagtaaacgagcaggtcccaaattttcctgttgacaatcccagttccctttgcagtttcaaattctcctcat

SEQ ID NO: 42239 - DNA, 600 bp, Chicken  19866894278881_3
ggccacaagactgggctccttggagacaagtgagagttcatttccccatacatacctatttctgacctgtttagtagaggttttagcttaaaagattcacctattatccaaaactagcagtgatgggaagagcacctctcaaaggtgcatagcaatcaggctccagggactcttcttagagaaaagtaaacgagcaggtcccaaattttcctgttgacaatcccagttccctttgcagtttcaaattctcctcatttgaaggtgattaacatctctcctctctgttctgctcccacactycatttgattttcttctggtcacgctttggcagcccaagatcgtccagactgctcctgctgagacaaggctgcatggctctgctttccctaatccgtttcccccttgtcccagttcttcccgtctacatctgttttcactcggttgatttatatgtccatataagaatccttagctatatattagtagttacatcactgacggtatctatcttaaatacaaggctctggtgcaaatttcaaagaacccagaaagagggagaaaggactattagaaacaccaaaacacacttttaccatcca

SEQ ID NO: 42240 - DNA, 600 bp, Chicken  19866894278882_1
aggacctgctggtcagactgagggaaaagaagggattgtactggctatgcaaactagagcgtcacctggggaaaatacaggggtgctgtctggacttgcagagaggggattaggaaagccaatgcacagatggaactgaacttggtgagggatgttaaaaacaagaagagcagattctgtaggtccattgtcccgaagaggcaggccaaagaaagcatacctcttttggtaaatgagaaaggagaactggctacaaaagatacggagaagcctgaggtactaaatgaggtttttgcctcygtcttcaccggcagccaggtttattatatttctcacatctctgaggctctcatccctgagcctctatgtgggaacagggggagtaaatgcccccctgctgtgagggaagagcaagtccaagaccacctcataagactgaatgtatacaagtctatggggccggatgacaagcatcccagtcataaaggagctggctgatgtgatgtgattgctgagccactctccatcatatttgaaaaatcatggctgttggacaaagtctttagggactggaaaaaaggaaacatcacttccatttac

SEQ ID NO: 42241 - DNA, 500 bp, Chicken  19866894278882_2
gagtaaatgcccccctgctgtgagggaagagcaagtccaagaccacctcataagactgaatgtatacaagtctatggggccggatgacaagcatcccagtcataaaggagctggctgatgtgatgtgattgctgagccactctccatcatatttgaaaaatcatggctgttggacaaagtctttagggactggaaaaaaggaaacatcacttccatttacaaaaaagggaggaaggaagacctggggaactgcaggcaggtgagcttcacctctgtgcctgggaaggtcatggaacagawcctcctagaagacatgttaagacacatgagggatgagcaggtgatccaatacagccagcatggctttagcaaggtcgtgcctgaccaatctggacttctgcaaggcctttgaaatggtcccccaccccatcattatctctaaattggagaggtatggatttgagggggtggacttttttgtggataaggaattgattgga

SEQ ID NO: 42242 - DNA, 600 bp, Chicken  19866894278889_1
atgtaaaagcatcagtaaataccttgttgagctgcattctcaaaaaggaaatcaagtagattaataaggaattttaaaataataccaagcagacccacagaagaagaatgtttttaaaaattagaatagaatgggaattctgtgatgcaagctcttactcttaagcaacaccctttctgttttcatatgaaaaacaatgaaatagtagttaatattttattgagcctatttcctctcttaggtgaatctcttttggaagataatgcagcatgtgtcagatgattatacataaaatacttyttattatatagagaagaagtagcctaagcactggaagtcttgcgcagtggtaacaatacctttgcaccgaaagaaagacagtaagttgttgaatctgtattgctggaactatgcaggaattgattagttacctatgtttgtatacggtatgtattattaggagtaattaaatggattcttctgtgacacggggaacagactttgatacctatctgtcattgactgtgtgtggcaaacttgaaccaggaactgtttcaaagattactgaatcctagcaataagaaaagatagcagtacctt

SEQ ID NO: 42243 - DNA, 600 bp, Chicken  19866894278891_1
cctagtagaaaaccaattttacatccctcataacaactgtgatcacataaagatattactagtttatatcacagacactatcactgacatataagccctatgatgaggccaaattctattttttttttaatgtttttctggatatacatcaagataccttattctgtggcatcctgcttttaatatttgaccctataaatggcttaaaaatagttaaaaatatcaccttctcatctgaaggccacaaagtttctgctcttttggtttactcctgtatgttaacaagactcttattttttwaaaaatttctatattataaagtmgaatgacttaagttaatgaccatgatacygccaagtacgtggaccagtaatcagcacaaagaataaaaggaaaatataggtgtaaacagaaaagaaaaaaaaaaaatctgtactgcttgaagttcaattaattccttatttttcccatttcaagcactcttacagagatgagatcagttagatttatgttcccatttcccttgtctttgatgttgcatctggcataaagtgccttttcctggtgctaaaatatgaagatgcagatgtatcagtggta

SEQ ID NO: 42244 - DNA, 600 bp, Chicken  19866894278891_2
tccctcataacaactgtgatcacataaagatattactagtttatatcacagacactatcactgacatataagccctatgatgaggccaaattctattttttttttaatgtttttctggatatacatcaagataccttattctgtggcatcctgcttttaatatttgaccctataaatggcttaaaaatagttaaaaatatcaccttctcatctgaaggccacaaagtttctgctcttttggtttactcctgtatgttaacaagactcttattttttwaaaaatttctatattataaagtmgaatgacttaagttaatgaccatgatacygccaagtacgtggaccagtaatcagcacaaagaataaaaggaaaatataggtgtaaacagaaaagaaaaaaaaaaaatctgtactgcttgaagttcaattaattccttatttttcccatttcaagcactcttacagagatgagatcagttagatttatgttcccatttcccttgtctttgatgttgcatctggcataaagtgccttttcctggtgctaaaatatgaagatgcagatgtatcagtggtaaccaacattttctcccaattaag

SEQ ID NO: 42245 - DNA, 600 bp, Chicken  19866894278891_3
atattactagtttatatcacagacactatcactgacatataagccctatgatgaggccaaattctattttttttttaatgtttttctggatatacatcaagataccttattctgtggcatcctgcttttaatatttgaccctataaatggcttaaaaatagttaaaaatatcaccttctcatctgaaggccacaaagtttctgctcttttggtttactcctgtatgttaacaagactcttattttttwaaaaatttctatattataaagtmgaatgacttaagttaatgaccatgatacygccaagtacgtggaccagtaatcagcacaaagaataaaaggaaaatataggtgtaaacagaaaagaaaaaaaaaaaatctgtactgcttgaagttcaattaattccttatttttcccatttcaagcactcttacagagatgagatcagttagatttatgttcccatttcccttgtctttgatgttgcatctggcataaagtgccttttcctggtgctaaaatatgaagatgcagatgtatcagtggtaaccaacattttctcccaattaagtttatatgcttctcttagatgccattaac

SEQ ID NO: 42246 - DNA, 600 bp, Chicken  19866894278891_4
ttttttttttaatgtttttctggatatacatcaagataccttattctgtggcatcctgcttttaatatttgaccctataaatggcttaaaaatagttaaaaatatcaccttctcatctgaaggccacaaagtttctgctcttttggtttactcctgtatgttaacaagactcttattttttwaaaaatttctatattataaagtmgaatgacttaagttaatgaccatgatacygccaagtacgtggaccagtaatcagcacaaagaataaaaggaaaatataggtgtaaacagaaaagyaaaaaaaaaaatctgtactgcttgaagttcaattaattccttatttttcccatttcaagcactcttacagagatgagatcagttagatttatgttcccatttcccttgtctttgatgttgcatctggcataaagtgccttttcctggtgctaaaatatgaagatgcagatgtatcagtggtaaccaacattttctcccaattaagtttatatgcttctcttagatgccattaacatacatctttatttttttaatgcatgttttcaattttattgctttatttaagaagcaaaataaaaa

SEQ ID NO: 42247 - DNA, 600 bp, Chicken  19866894278891_5
tttttttttaatgtttttctggatatacatcaagataccttattctgtggcatcctgcttttaatatttgaccctataaatggcttaaaaatagttaaaaatatcaccttctcatctgaaggccacaaagtttctgctcttttggtttactcctgtatgttaacaagactcttattttttwaaaaatttctatattataaagtmgaatgacttaagttaatgaccatgatacygccaagtacgtggaccagtaatcagcacaaagaataaaaggaaaatataggtgtaaacagaaaagayaaaaaaaaaatctgtactgcttgaagttcaattaattccttatttttcccatttcaagcactcttacagagatgagatcagttagatttatgttcccatttcccttgtctttgatgttgcatctggcataaagtgccttttcctggtgctaaaatatgaagatgcagatgtatcagtggtaaccaacattttctcccaattaagtttatatgcttctcttagatgccattaacatacatctttatttttttaatgcatgttttcaattttattgctttatttaagaagcaaaataaaaag

SEQ ID NO: 42248 - DNA, 600 bp, Chicken  19866894278893_1
ctgcttttttggcagtgggggctctttccccctcctcccacatatatgcacgcgggacagaacgtgatgtgctccttgcagagctttggctcctggacaggtagcaagccctgctgatgtatgtgcgtgcagcgtgttgtgggcaggctgcagggaggtgtggcaggggagctggagctggtcctggggagaagagggaattaaacagcagctcattctgctcaaaaatgggagcattcttttccttttcaaaacacaggtgtttaattcctatatgtggtatgaaaggtaaaacaattktccttggcagcaccagaaatgcctgctatgcaggtgataatggatcgtaacacagaacaagcycagcttccaygactgctctgagcgtcagcaaacctgttacaattaggggtttgtaggcagtgaatgttctggcagcatctggctggaaagcattttaactgctgggctggccccagcacttgagcatcacatgagcatcaaattagcgaagcagacgttgtcctcccataagcgatcacactttatccacggcacactgctagatttctccatcagcaagccctgctcagccatgca

SEQ ID NO: 42249 - DNA, 600 bp, Chicken  19866894278893_2
gtgatgtgctccttgcagagctttggctcctggacaggtagcaagccctgctgatgtatgtgcgtgcagcgtgttgtgggcaggctgcagggaggtgtggcaggggagctggagctggtcctggggagaagagggaattaaacagcagctcattctgctcaaaaatgggagcattcttttccttttcaaaacacaggtgtttaattcctatatgtggtatgaaaggtaaaacaattktccttggcagcaccagaaatgcctgctatgcaggtgataatggatcgtaacacagaacaagcycagcttccaygactgctctgagcgtcagcaaacctgttacaattaggggtttgtaggcagtgaatgttctggcagcatctggctggaaagcattttaactgctgggctggccccagcacttgagcatcacatgagcatcaaattagcgaagcagacgttgtcctcccataagcgatcacactttatccacggcacactgctagatttctccatcagcaagccctgctcagccatgcacaggatgcccttgtcccaaagacccacgctgctctgtggcatctgaaatgggtgctaaaagct

SEQ ID NO: 42250 - DNA, 600 bp, Chicken  19866894278893_3
ccttgcagagctttggctcctggacaggtagcaagccctgctgatgtatgtgcgtgcagcgtgttgtgggcaggctgcagggaggtgtggcaggggagctggagctggtcctggggagaagagggaattaaacagcagctcattctgctcaaaaatgggagcattcttttccttttcaaaacacaggtgtttaattcctatatgtggtatgaaaggtaaaacaattktccttggcagcaccagaaatgcctgctatgcaggtgataatggatcgtaacacagaacaagcycagcttccaygactgctctgagcgtcagcaaacctgttacaattaggggtttgtaggcagtgaatgttctggcagcatctggctggaaagcattttaactgctgggctggccccagcacttgagcatcacatgagcatcaaattagcgaagcagacgttgtcctcccataagcgatcacactttatccacggcacactgctagatttctccatcagcaagccctgctcagccatgcacaggatgcccttgtcccaaagacccacgctgctctgtggcatctgaaatgggtgctaaaagcttaactcaccc

SEQ ID NO: 42251 - DNA, 600 bp, Chicken  19866894278907_1
gttatttgaacacaggcacagtttttgagattaacttgatgatgttcaagttgaacatgtaaaagatttgtccttgcatgcctaataatgccttgacaaggttataaatactacagtgggaaagaataaaatacgaagcaataggcagcctctcctggctttcctgctacaaactgtctaatgaaggaagccatggtaaatttttcatattttaactgaaaaagcaggctaaactgagatgaaaaatagttgctttctatatacggtcctttcaaaagcaaaatgttcttttaaatgtaycaaattgatcrtggtagcataacttagcaattgattttaagtaatttttgtgaaagtaattcaaatcctaatgtgactatttaccctaaaccttagaggtttaggtattgtatgggaaaaagggctgtattagcccttacgcttactggtagtgaagaattaataaaataaaaagaaccccggaggttggtcttcacaaatgaacatgactgaataatccccttgacagatgtaaagcccagaataaggattctgtgttcttactgctttagaaggatgatttcttaaaatatgaacaaa

SEQ ID NO: 42252 - DNA, 600 bp, Chicken  19866894278907_2
acaggcacagtttttgagattaacttgatgatgttcaagttgaacatgtaaaagatttgtccttgcatgcctaataatgccttgacaaggttataaatactacagtgggaaagaataaaatacgaagcaataggcagcctctcctggctttcctgctacaaactgtctaatgaaggaagccatggtaaatttttcatattttaactgaaaaagcaggctaaactgagatgaaaaatagttgctttctatatacggtcctttcaaaagcaaaatgttcttttaaatgtaycaaattgatcrtggtagcataacttagcaattgattttaagtaatttttgtgaaagtaattcaaatcctaatgtgactatttaccctaaaccttagaggtttaggtattgtatgggaaaaagggctgtattagcccttacgcttactggtagtgaagaattaataaaataaaaagaaccccggaggttggtcttcacaaatgaacatgactgaataatccccttgacagatgtaaagcccagaataaggattctgtgttcttactgctttagaaggatgatttcttaaaatatgaacaaatcagtgaaaac

SEQ ID NO: 42253 - DNA, 551 bp, Chicken  19866894278907_3
aatgggttagaaagcgggtaattagcgagatcatgttattaatgtaaatgcagaatctgtatggagtatctttctagaggggtcttgcaaggatctgttcttgtctgtactaattagcacttactgctgctcgatgaaagtgcatatatacagtcattacttgtaaggaatacagacagagatggagacaaaacattgttgcagagtgggcgaggttttatacaagaaggtgtgagcaatcactcttcctacgtggtgaaaaatcatgtcacacaggcagtatcaaagaaggctggccgygtgtgtgtaatgtgggattctctcctgggcacagtgatgtctgkagaaggttggaaatgtgatttcatggtgttgatgctgtggcagtagcttacagaatgtgctgtttcttggataaatgagcagaaataagagaatagtttatagatyggtggtaaaactactaagtgaacgctccctccaattctaacgcttatgcttcagaaacatattggaaacctgcagtgactcagaaaaactgccaagatgaa

SEQ ID NO: 42254 - DNA, 507 bp, Chicken  19866894278907_4
taaatgcagaatctgtatggagtatctttctagaggggtcttgcaaggatctgttcttgtctgtactaattagcacttactgctgctcgatgaaagtgcatatatacagtcattacttgtaaggaatacagacagagatggagacaaaacattgttgcagagtgggcgaggttttatacaagaaggtgtgagcaatcactcttcctacgtggtgaaaaatcatgtcacacaggcagtatcaaagaaggctggccgygtgtgtgtaatgtgggattctctcctgggcacagtgatgtctgkagaaggttggaaatgtgatttcatggtgttgatgctgtggcagtagcttacagaatgtgctgtttcttggataaatgagcagaaataagagaatagtttatagatyggtggtaaaactactaagtgaacgctccctccaattctaacgcttatgcttcagaaacatattggaaacctgcagtgactcagaaaaactgccaagatgaa

SEQ ID NO: 42255 - DNA, 401 bp, Chicken  19866894278907_5
cagtcattacttgtaaggaatacagacagagatggagacaaaacattgttgcagagtgggcgaggttttatacaagaaggtgtgagcaatcactcttcctacgtggtgaaaaatcatgtcacacaggcagtatcaaagaaggctggccgygtgtgtgtaatgtgggattctctcctgggcacagtgatgtctgkagaaggttggaaatgtgatttcatggtgttgatgctgtggcagtagcttacagaatgtgctgtttcttggataaatgagcagaaataagagaatagtttatagatyggtggtaaaactactaagtgaacgctccctccaattctaacgcttatgcttcagaaacatattggaaacctgcagtgactcagaaaaactgccaagatgaa

SEQ ID NO: 42256 - DNA, 600 bp, Chicken  19866894278909_1
ggcacaccttgaggccattccctctcatcctatcactgttacctaggagaagaagccaactcccaccttgccacaactttcctttcaggcagctgtagagaacgataaggtccctcctaagcctcctcttctccagactgaacaatcccagctccctcagccactccccgtaacataagacatgtgctccagacccctcaccagtttcgttgcccttctctggacacactccagggcctcagcatctttcttgtagtgaggggtccaaaactgaacatagtactcaaggtgcagcctcaygagggctgagtgcagagaggctccttgcgatgcctcagcccgagaagtctggcccaatgctgcttcagcacacactgagcttccggcttctggaggaagcatcacatcaatatctgaactgtcacagttaaaccctatggagtagctttctgttcacctcttcagttttcatgtcaacgtgccattatgtcataaggaagcaggtggatgcagagcaggaagagtatttggacgcattaggcaatggggtttagttcatccagctcatgcacccccaccactaccctctgagatcatgtg

SEQ ID NO: 42257 - DNA, 599 bp, Chicken  19866894278911_1
  misc_feature (1)..(29): n is any nucleotide
nnnnnnnnnnnnnnnnnnnnnnnnnnnnngggctgatgaggcacagaactactgagatgagtatctcccaagtggagcagggaactggcaagagaaaaaccagatttcctggaaactcaatttgtcagaaggcaacctgcttgcaggagcactggagaaggaagaatctccagactaaacattaaaaaagaaaatacttttcaacttgccataatgtggtctctgtctcttgtattttctttagatgaggaatttattttgattctgaagcacctttgttttggaattgcagagtgctawatgtttcaaaagtttttaattatctttagatatcagaattgaaacaaactgtycccatatgcttcagattaaagatttcagtggaaaccaaactgaaaccagagggggagagtttggcgtgcagttttacttgtttctatttattacaggaggggaaaaagaaattcctgacaactctcacaggatagggaatgagtttcctgctcacttgtggagaccaagtccttcaggcagatctgctctcgcagcaaatcagcccatgtgaaggcttcttaccatcaatggatggagagaaaatg

SEQ ID NO: 42258 - DNA, 600 bp, Chicken  19866894278911_2
gagatgagtatctcccaagtggagcagggaactggcaagagaaaaaccagatttcctggaaactcaatttgtcagaaggcaacctgcttgcaggagcactggagaaggaagaatctccagactaaacattaaaaaagaaaatacttttcaacttgccataatgtggtctctgtctcttgtattttctttagatgaggaatttattttgattctgaagcacctttgttttggaattgcagagtgctawatgtttcaaaagtttttaattatctttagatatcagaattgaaacaaactgtycccatatgcttcagattaaagatttcagtggaaaccaaactgaaaccagagggggagagtttggcgtgcagttttacttgtttctatttattacaggaggggaaaaagaaattcctgacaactctcacaggatagggaatgagtttcctgctcacttgtggagaccaagtccttcaggcagatctgctctcgcagcaaatcagcccatgtgaaggcttcttaccatcaatggatggagagaaaatgccccattctcaaggatatatgggtgacagaatcacagatccataggggttggaa

SEQ ID NO: 42259 - DNA, 599 bp, Chicken  19866894278923_1
  misc_feature (1)..(180): n is any nucleotide
nnnnnnnnnnnnnnnnnnnnnnnnnnnnnnnnnnnnnnnnnnnnnnnnnnnnnnnnnnnnnnnnnnnnnnnnnnnnnnnnnnnnnnnnnnnnnnnnnnnnnnnnnnnnnnnnnnnnnnnnnnnnnnnnnnnnnnnnnnnnnnnnnnnnnnnnnnnnnnnnnnnnnnnnnnnnnnnnnnnntcctgttctaagttgatttctgcttctacagatagtttgcgtctacaagtggtttgtgttccgagcgaagagtaataaaaggcaagcggttgagtttgcaattgtcattgaactgaaaawatgtctctaatccagagtctatggttctcttaagagcttcttaaatggcatttagtgaagtcttatttgtaacaaaatgggrtataggaacgctaaacaactgtaatgcaatttaaagcaggaagtgaagtatcttgcagaacaccttgaagggagttagaagaggcaaaacgtgctgatgtttaaccaggctgatgagttctgaggggaaaaaataattagtcttggatgacaactaagtaaaatgataatctgttgtataagagcaatagaaaagctgctctgagcactatactaag

SEQ ID NO: 42260 - DNA, 599 bp, Chicken  19866894278923_2
  misc_feature (1)..(98): n is any nucleotide
nnnnnnnnnnnnnnnnnnnnnnnnnnnnnnnnnnnnnnnnnnnnnnnnnnnnnnnnnnnnnnnnnnnnnnnnnnnnnnnnnnnnnnnnnnnnnnnnnntcctgttctaagttgatttctgcttctacagatagtttgcgtctacaagtggtttgtgttccgagcgaagagtaataaaaggcaagcggttgagtttgcaattgtcattgaactgaaaawatgtctctaatccagagtctatggttctcttaagagcttcttaaatggcatttagtgaagtcttatttgtaacaaaatgggrtataggaacgctaaacaactgtaatgcaatttaaagcaggaagtgaagtatcttgcagaacaccttgaagggagttagaagaggcaaaacgtgctgatgtttaaccaggctgatgagttctgaggggaaaaaataattagtcttggatgacaactaagtaaaatgataatctgttgtataagagcaatagaaaagctgctctgagcactatactaagcatttaattcagtgatagccgaaaactacttcacctaatgtgttttcagtacctcatctggtctcatattgatgttcttctc

SEQ ID NO: 42261 - DNA, 600 bp, Chicken  19866894278925_1
aaataagcctctttaagttcagtaagaactataagtctattctccttgcttagccacttataattaaagataaataaatagctcagcttttttttttcccccccacttcagatgaatgtgctgatcatcacagtaatattatctctgcagtcctctggtttgtggatgagagattctcatgaagagtccaactgcctaaatggttgccccagagagagggattagatgtgggagaggggagaaataaatcccaaactgcacaaaaagttccaaaaaatattttaagtgtattttcaataktttaaaattgaatatgcaaaggaatgctgcatacgctcttaaaatccttttacaaacaaaactacatactccctgcactgcatacactgacrcaggacaagaatggatttgctcagtatttccccttatcaggtaaaacaacatctgtgtacctcatttacctatggataattaatagaatgtacagctcagacctaatgagtgaacaaaatatccagaaaacaaaactcagtgtcagtggagttgyacatattttgtaaagatcaagtttttggagagctatgatttgggaaagcatac

SEQ ID NO: 42262 - DNA, 600 bp, Chicken  19866894278925_2
tttttcccccccacttcagatgaatgtgctgatcatcacagtaatattatctctgcagtcctctggtttgtggatgagagattctcatgaagagtccaactgcctaaatggttgccccagagagagggattagatgtgggagaggggagaaataaatcccaaactgcacaaaaagttccaaaaaatattttaagtgtattttcaataktttaaaattgaatatgcaaaggaatgctgcatacgctcttaaaatccttttacaaacaaaactacatactccctgcactgcatacactgacrcaggacaagaatggatttgctcagtatttccccttatcaggtaaaacaacatctgtgtacctcatttacctatggataattaatagaatgtacagctcagacctaatgagtgaacaaaatatccagaaaacaaaactcagtgtcagtggagttgyacatattttgtaaagatcaagtttttggagagctatgatttgggaaagcatacagctaataaataatgaaagcagtcacatactttatgtggcatactattaaatacataggttacytcaaaagtaatgcctcctgttaattgtc

SEQ ID NO: 42263 - DNA, 600 bp, Chicken  19866894278925_3
atcccaaactgcacaaaaagttccaaaaaatattttaagtgtattttcaataktttaaaattgaatatgcaaaggaatgctgcatacgctcttaaaatccttttacaaacaaaactacatactccctgcactgcatacactgacrcaggacaagaatggatttgctcagtatttccccttatcaggtaaaacaacatctgtgtacctcatttacctatggataattaatagaatgtacagctcagacctaatgagtgaacaaaatatccagaaaacaaaactcagtgtcagtggagttgyacatattttgtaaagatcaagtttttggagagctatgatttgggaaagcatacagctaataaataatgaaagcagtcacatactttatgtggcatactattaaatacataggttacytcaaaagtaatgcctcctgttaattgtcatggaagctgcaacaggtacaaagagcacaataacattatttgacagagaaaattctcagttacaaaacactttttaacagtctccaccattagttacacattttcaccagcaatgaaygtgagcctgcattccacactggtaacaatctgcacc

SEQ ID NO: 42264 - DNA, 600 bp, Chicken  19866894278925_4
catactccctgcactgcatacactgacrcaggacaagaatggatttgctcagtatttccccttatcaggtaaaacaacatctgtgtacctcatttacctatggataattaatagaatgtacagctcagacctaatgagtgaacaaaatatccagaaaacaaaactcagtgtcagtggagttgyacatattttgtaaagatcaagtttttggagagctatgatttgggaaagcatacagctaataaataatgaaagcagtcacatactttatgtggcatactattaaatacataggttacytcaaaagtaatgcctcctgttaattgtcatggaagctgcaacaggtacaaagagcacaataacattatttgacagagaaaattctcagttacaaaacactttttaacagtctccaccattagttacacattttcaccagcaatgaaygtgagcctgcattccacactggtaacaatctgcaccagcagaggtgacccactgccactgttactgctgaaacgcaccacccacagccttgctgtgctcacatcccctgtttgtttggtctccagaaacattcagcaagtacctatcaacatc

SEQ ID NO: 42265 - DNA, 470 bp, Chicken  19866894278925_5
tatccagaaaacaaaactcagtgtcagtggagttgyacatattttgtaaagatcaagtttttggagagctatgatttgggaaagcatacagctaataaataatgaaagcagtcacatactttatgtggcatactattaaatacataggttacytcaaaagtaatgcctcctgttaattgtcatggaagctgcaacaggtacaaagagcacaataacattatttgacagagaaaattctcagttacaaaacactttttaacagtctccaccattagttacacattttcaccagcaatgaaygtgagcctgcattccacactggtaacaatctgcaccagcagaggtgacccactgccactgttactgctgaaacgcaccacccacagccttgctgtgctcacatcccctgtttgtttggtctccagaaacattcagcaagtacctatcaacatcagtgagtgctattttgc

SEQ ID NO: 42266 - DNA, 599 bp, Chicken  19866894278926_1
  misc_feature (1)..(170): n is any nucleotide
nnnnnnnnnnnnnnnnnnnnnnnnnnnnnnnnnnnnnnnnnnnnnnnnnnnnnnnnnnnnnnnnnnnnnnnnnnnnnnnnnnnnnnnnnnnnnnnnnnnnnnnnnnnnnnnnnnnnnnnnnnnnnnnnnnnnnnnnnnnnnnnnnnnnnnnnnnnnnnnnnnnnnnnnnntgatgtgcagcagtgctggctgaggaaagggaggcccgggagatagggctctgtggtgcgaggttcaagaagagataggactctgtggtgcacagatccagacatgggaacaccccggacatgcccccarcacatcaggtccgcatgagacacaggcatgggactcatgggcctgtgactcccacatggcctcagcagaggacgggtgcatagaagtccactcaagctgaggtggcggtgtctttgggaacaggtagcagtgtgtcttcaggcattcgtgatgtatttctgcccttcaggagctgcagtcccagagttagatcagatctcaacacctgataaaaagtaaatgacttcctaatgctacaaaaagcctgtaaaaaaaaaaaaagtgcacatgcagatagattcaaatacttgaaagtcaaa

SEQ ID NO: 42267 - DNA, 521 bp, Chicken  19866894278926_2
gttagatcagatctcaacacctgataaaaagtaaatgacttcctaatgctacaaaaagcctgtaaaaaaaaaaaaagtgcacatgcagatagattcaaatacttgaaagtcaaattccaatagtgtattctgtgttcattcctttgttattattactatagaatcactttcttcttttggtcaggaatcatggagtctcctgcttagcattaagttgttgcatgatatagaatcagttccaaatgggtagtttttttactgtgtatgtcctggatttcgtttttcagttatttttcatargtacattttacatctaactacctcagctgccttttgttttgttttggcgcataaaaagtcatgcactttctatatttggggattaggggggagggggagttctttccattttgaataaccaggttcaaagccatgttgatcaatttatagaggagaacaggaagacataattattgacagttgtagaacatacattttatttttaggttccgttggggtat

SEQ ID NO: 42268 - DNA, 600 bp, Chicken  19866894278946_1
tagctataacaataagtatatgaagctggagctgatcttgttggcgctttcttgttcttctgaaacaaacgtgtctgttttcacaccgttttgtcaattattaaaatcttccagtagtacacaaaacacttcagtgtttgctttagcagcttttctggtggaactaagtgaataacaaaggaaatattaaacagggaacattaaaaggaaacactgcagataggtctggatgtgagcatgttgaggcaatggatggtcggtttcagcagtggcaacagtgacgatgggtcaccttcaatratgcatatgtttttaagtatggcatacaggctcttgttggtggctgtgaaaaaatgcatggctaatagtggtggctatgttgaagagtactgttttgtagctgagaatttggtctatcaaacagtgttattgtgctctttctaactgttgtagtttgcatgtaataaaataggagacattacttttggagcaacctacgtatattcaaatgcatggtttcagtgccttgttctcaaaagttagttccagttgtttttacaaatacgcttatttgtgttgcccaaactagatggcttactt

SEQ ID NO: 42269 - DNA, 600 bp, Chicken  19866894278948_1
ctgcatccccacaacccagttgcttgcacacaacttgagcatcattgatatcccattcatcatggcacacgctgccccactgctcttcgtgaagaacctcgactcttccagcacatcggtttgggcctcccacgagacgaagtggccctggctcaggtatttctgtccctaaaaatggaataaataggtaaatgaacaaacaaacaaacaaacaacaacaacaacaaaacaaacaaacaaacaaaaaagcaagccagggagaagttttggagaagtctctgtgcccctgaccccctgaasaaagcaaartcttccgcaatgaatcaaaactctctgctcatccctaacacttgccaaaggctcccctcctaccttctggctaaaaagagaggtttgtggagaaataaaaaacaggatggaggttgtcaaaacagggagaagaccaagtgtatccaattccagctctgtaggacatgtgatacagcttctctggatcaaggtgataggatgctagagctcagcaaagtcactctgaatccctagcctcctaattggatggctcagaaatagcaccatagctttcttaagacagaagggaca

SEQ ID NO: 42270 - DNA, 600 bp, Chicken  19866894278948_2
cacaacccagttgcttgcacacaacttgagcatcattgatatcccattcatcatggcacacgctgccccactgctcttcgtgaagaacctcgactcttccagcacatcggtttgggcctcccacgagacgaagtggccctggctcaggtatttctgtccctaaaaatggaataaataggtaaatgaacaaacaaacaaacaaacaacaacaacaacaaaacaaacaaacaaacaaaaaagcaagccagggagaagttttggagaagtctctgtgcccctgaccccctgaasaaagcaaartcttccgcaatgaatcaaaactctctgctcatccctaacacttgccaaaggctcccctcctaccttctggctaaaaagagaggtttgtggagaaataaaaaacaggatggaggttgtcaaaacagggagaagaccaagtgtatccaattccagctctgtaggacatgtgatacagcttctctggatcaaggtgataggatgctagagctcagcaaagtcactctgaatccctagcctcctaattggatggctcagaaatagcaccatagctttcttaagacagaagggacacaaagtaga

SEQ ID NO: 42271 - DNA, 599 bp, Chicken  19866894278959_1
  misc_feature (1)..(252): n is any nucleotide
nnnnnnnnnnnnnnnnnnnnnnnnnnnnnnnnnnnnnnnnnnnnnnnnnnnnnnnnnnnnnnnnnnnnnnnnnnnnnnnnnnnnnnnnnnnnnnnnnnnnnnnnnnnnnnnnnnnnnnnnnnnnnnnnnnnnnnnnnnnnnnnnnnnnnnnnnnnnnnnnnnnnnnnnnnnnnnnnnnnnnnnnnnnnnnnnnnnnnnnnnnnnnnnnnnnnnnnnnnnnnnnnnnnnnnnnnnnnnnnnnnnnnnnnnnnntcgccgtccctgtctccatcctatccctgccccaccttctccctatcyctctccccactcccatcacrtccccggccccctgtgcccccgcagaagctgcgccaggacatcctgctcatgaagccatactttatcacctgcaaagaggcaatggaagcacggctgctgctgcaggtcaggcccggtggcgggcaggggggaggcccygggtacgtgggcacagcagtgacatctgcctgcccgtgcagctgcaggaccgacagcactttgtagagaacgacgagatgtactcgctgcaggacctcattgacatcgaggccgggcgcctgagctgctccctgactgag

SEQ ID NO: 42272 - DNA, 599 bp, Chicken  19866894278959_2
  misc_feature (1)..(232): n is any nucleotide
nnnnnnnnnnnnnnnnnnnnnnnnnnnnnnnnnnnnnnnnnnnnnnnnnnnnnnnnnnnnnnnnnnnnnnnnnnnnnnnnnnnnnnnnnnnnnnnnnnnnnnnnnnnnnnnnnnnnnnnnnnnnnnnnnnnnnnnnnnnnnnnnnnnnnnnnnnnnnnnnnnnnnnnnnnnnnnnnnnnnnnnnnnnnnnnnnnnnnnnnnnnnnnnnnnnnnnnnnnnnnnnnnnnnnnnntcgccgtccctgtctccatcctatccctgccccaccttctccctatcyctctccccactcccatcacrtccccggccccctgtgcccccgcagaagctgcgccaggacatcctgctcatgaagccatactttatcacctgcaaagaggcaatggaagcacggctgctgctgcaggtcaggcccggtggcgggcaggggggaggcccygggtacgtgggcacagcagtgacatctgcctgcccgtgcagctgcaggaccgacagcactttgtagagaacgacgagatgtactcgctgcaggacctcattgacatcgaggccgggcgcctgagctgctccctgactgagatccacaccctcttcgccaa

SEQ ID NO: 42273 - DNA, 599 bp, Chicken  19866894278959_3
  misc_feature (1)..(93): n is any nucleotide
nnnnnnnnnnnnnnnnnnnnnnnnnnnnnnnnnnnnnnnnnnnnnnnnnnnnnnnnnnnnnnnnnnnnnnnnnnnnnnnnnnnnnnnnnnnnntcgccgtccctgtctccatcctatccctgccccaccttctccctatcyctctccccactcccatcacrtccccggccccctgtgcccccgcagaagctgcgccaggacatcctgctcatgaagccatactttatcacctgcaaagaggcaatggaagcacggctgctgctgcaggtcaggcccggtggcgggcaggggggaggcccygggtacgtgggcacagcagtgacatctgcctgcccgtgcagctgcaggaccgacagcactttgtagagaacgacgagatgtactcgctgcaggacctcattgacatcgaggccgggcgcctgagctgctccctgactgagatccacaccctcttcgccaagcacattaagttggactgcgaggtgagtggggcggtgctgcagggcagcctgggctgagatctgcaggatggagggcaccggtgaagacccgggggtccttgtcagcacccagttaccaggggctcctctggttttcct

SEQ ID NO: 42274 - DNA, 600 bp, Chicken  19866894278963_1
tgtctggggaccttactgctgagatttggggagcagcaggaacacaacctgcaggctttgctgctgtgatgtgaggaagagggctggcacattctagagttaaaaagaacacagatttgctacttggaaacaagaaacgtctttagagtgagtaaaagctgtcagggcacttctgcttggagcagcaacacacttgtcactgcagagcatcctttgtgacaggaggctgaaaccttacagcagctaaacagcaactgctcagtctgtgacgtgtcagggaggaccgtgagcagccaggcygtcaggaggtgacacaggccacccggtcacccagctgcctgcgttcccgcacgtcccagggacacactgcagggagcttggcactgctgttggtcctctcagacagcattgcacagctgcagctctgcggggacccacacggtgaccttgcaaggttgagcagccgaggccacagcagggagcagcaacgtggcacagcaatgacacggttctgaccacacagctaccagcacagtaggggcctgcagtgacccagccaggctgtgcatttgcagctgcctcgggccgccatctgccggc

SEQ ID NO: 42275 - DNA, 526 bp, Chicken  19866894278966_1
agtccactaaacacagaccagcaaccttccagaaacacatctggtgcaggcattgcagaaacacattggtcaggcaacaccatgctgtcaccctcacagggtacctgagcaactcaagcttgaggtagctctcactggttggcccagaagagccagccagcaaaggagacaaacaacggtgtgacagagaatacaagaggttggcagcttctccaactgtggttcatcagccggtgagattaatcattaaaggtgcaatcccttgacaatttgactagtaggcttagctctatgcttcartatgctttaatatctcatgttaaactgtttacatttcatttagtatgctcatgtttgaattgttggcatttttgtcccatgacacaccatsccacagacttcagtaacaaaacaccacacatgtacacttactttctaggattttctacacaggtatataaaacagttacgttcctttgaagcaatcacagtccaataacatttcaattctgatagcacatacaat

SEQ ID NO: 42276 - DNA, 435 bp, Chicken  19866894278966_2
cctcacagggtacctgagcaactcaagcttgaggtagctctcactggttggcccagaagagccagccagcaaaggagacaaacaacggtgtgacagagaatacaagaggttggcagcttctccaactgtggttcatcagccggtgagattaatcattaaaggtgcaatcccttgacaatttgactagtaggcttagctctatgcttcartatgctttaatatctcatgttaaactgtttacatttcatttagtatgctcatgtttgaattgttggcatttttgtcccatgacacaccatsccacagacttcagtaacaaaacaccacacatgtacacttactttctaggattttctacacaggtatataaaacagttacgttcctttgaagcaatcacagtccaataacatttcaattctgatagcacatacaat

SEQ ID NO: 42277 - DNA, 599 bp, Chicken  19866894278967_1
  misc_feature (1)..(111): n is any nucleotide
nnnnnnnnnnnnnnnnnnnnnnnnnnnnnnnnnnnnnnnnnnnnnnnnnnnnnnnnnnnnnnnnnnnnnnnnnnnnnnnnnnnnnnnnnnnnnnnnnnnnnnnnnnnnnnntatttttagaagtagctaattagattattcctttggtattaaaaaaataaaatgaaataatacttaccccaccaaaaacctttactctgaaataatggcattagtaccactttgcacataagctgatttcaaagaggtacgtgatagaaaccagaagtgaaactagtttgtggcttcccatgctaatcrctaggccctactccctctcagaagcatttcaaaagaaaatctgaacctgcagccttcaagccttctgatctgtgctgctccttcatgagaaacagrttccccagctcttccttccagcatgctgtctcrggcgggtgagctggccagcaatgactaaagcagtcaggctgatcagctgaggatatttctacrctccttttgaacttttatttgttattttacattcttatttaatgcctatttatttccactacagagtcagcttacagaaagaaaaaaaaaaagaaaaaattaaaaca

SEQ ID NO: 42278 - DNA, 599 bp, Chicken  19866894278967_2
  misc_feature (1)..(15): n is any nucleotide
nnnnnnnnnnnnnnntatttttagaagtagctaattagattattcctttggtattaaaaaaataaaatgaaataatacttaccccaccaaaaacctttactctgaaataatggcattagtaccactttgcacataagctgatttcaaagaggtacgtgatagaaaccagaagtgaaactagtttgtggcttcccatgctaatcrctaggccctactccctctcagaagcatttcaaaagaaaatctgaacctgcagccttcaagccttctgatctgtgctgctccttcatgagaaacagrttccccagctcttccttccagcatgctgtctcrggcgggtgagctggccagcaatgactaaagcagtcaggctgatcagctgaggatatttctacrctccttttgaacttttatttgttattttacattcttatttaatgcctatttatttccactacagagtcagcttacagaaagaaaaaaaaaaagaaaaaattaaaacaagtagggtaacggcctgtttactgcataaatgtgctgccaggaaatcccattgttgtagtggtgagtaaaagtcctacaccctgacttatgtctta

SEQ ID NO: 42279 - DNA, 600 bp, Chicken  19866894278967_3
attagattattcctttggtattaaaaaaataaaatgaaataatacttaccccaccaaaaacctttactctgaaataatggcattagtaccactttgcacataagctgatttcaaagaggtacgtgatagaaaccagaagtgaaactagtttgtggcttcccatgctaatcrctaggccctactccctctcagaagcatttcaaaagaaaatctgaacctgcagccttcaagccttctgatctgtgctgctccttcatgagaaacagrttccccagctcttccttccagcatgctgtctcrggcgggtgagctggccagcaatgactaaagcagtcaggctgatcagctgaggatatttctacrctccttttgaacttttatttgttattttacattcttatttaatgcctatttatttccactacagagtcagcttacagaaagaaaaaaaaaaagaaaaaattaaaacaagtagggtaacggcctgtttactgcataaatgtgctgccaggaaatcccattgttgtagtggtgagtaaaagtcctacaccctgacttatgtcttactcaccctaaatcatgtatgagccatgcagcttt

SEQ ID NO: 42280 - DNA, 600 bp, Chicken  19866894278967_4
ttactctgaaataatggcattagtaccactttgcacataagctgatttcaaagaggtacgtgatagaaaccagaagtgaaactagtttgtggcttcccatgctaatcrctaggccctactccctctcagaagcatttcaaaagaaaatctgaacctgcagccttcaagccttctgatctgtgctgctccttcatgagaaacagrttccccagctcttccttccagcatgctgtctcrggcgggtgagctggccagcaatgactaaagcagtcaggctgatcagctgaggatatttctacrctccttttgaacttttatttgttattttacattcttatttaatgcctatttatttccactacagagtcagcttacagaaagaaaaaaaaaaagaaaaaattaaaacaagtagggtaacggcctgtttactgcataaatgtgctgccaggaaatcccattgttgtagtggtgagtaaaagtcctacaccctgacttatgtcttactcaccctaaatcatgtatgagccatgcagcttttcatgattaatgaaagtgggcaaatgttttacaacacatcttaggaagtcgtctctctgtgca

SEQ ID NO: 42281 - DNA, 600 bp, Chicken  19866894278970_1
ggattcatttgatgaagtgagctggttttgctgaagggtcacagttggagattaagtatttcagaaaagcaaaagatctaaaggctagagaaatggacagtttttacaagatatcagataaacatgcagtaacagaaagaaattcagctcttacaaagcagaacagctcagtgtgatctgtcttaactataaccaggtgatcggagccagcctccctgcagaaaagtgagccttgcttcctttgcctcattagtctgttttctgtggcatgatgtcatggccaggaggtactttgtactyaccgacatgaggctacaagcagtggtgtaacataagagagaggaaaacatgagagcaaaaacatttccctgctctcttgcttgtaggtactctcaggctgctgctcagcaggcagtagaagatcagactttctgaccctgagaaacaacagtcattgctcttttgctttcatcaaaaatgaaaagtttgagtagccaaagtttctcaagaaatataaagttctggtaaatccccatgtaaaatacatttttttgacgttgtaatgcagaatattttgacattcttgaactgaaattccat

SEQ ID NO: 42282 - DNA, 600 bp, Chicken  19866894278981_1
aatcaaacattgatccacctatgtcagtaagtagaagggaaattttttatactgtgatcttttcttgtcattaaaggttatattttaaatcattcactacaagtctaaaatatttactgtagctaaaagaaacctctgcttttcagcttcaatttcatttaattagaaatgtgtaagaccttttatgtccctttgtctattttctgccattcataccctgtgaatgcataactatttcctacccaatacctcaaattgctttttccagtgtgattttaatagactgaaacaacaaggaasaattcctttttcctccttgtcagaagttactttctattaccttccttccaatcctactggcatagacttcctcttcatttaatagccactctatccacccaactaaggtaaagtctaaggaacatgagaagttgccttgaaagagacaaatatcactgagcagaaagcatcctgaatttaactgcactatttcttccttttcaccaaatgttagctcacgtctcccttctgagcacgtaattagtgaagaatttgatattttactagaattaatctcttttttatgttgcaacctcagta

SEQ ID NO: 42283 - DNA, 599 bp, Chicken  19866894278985_1
  misc_feature (1)..(222): n is any nucleotide
nnnnnnnnnnnnnnnnnnnnnnnnnnnnnnnnnnnnnnnnnnnnnnnnnnnnnnnnnnnnnnnnnnnnnnnnnnnnnnnnnnnnnnnnnnnnnnnnnnnnnnnnnnnnnnnnnnnnnnnnnnnnnnnnnnnnnnnnnnnnnnnnnnnnnnnnnnnnnnnnnnnnnnnnnnnnnnnnnnnnnnnnnnnnnnnnnnnnnnnnnnnnnnnnnnnnnnnnnnnnnnactttgagagaaagaaactgcaggaagacaacgtgaaaaaaaattgagtaactgatctgccctcaatctcttccctgstactgtattttcctacttctgttttgaaaacacatttgtaaacataagaaatgtggtccattcraaattgatgggaagcttaaaacactgaacatgtttaaagatgggaaatctcgtcagtgttttgcatttccctactagtaattgttataggaattctgtgtttccatactggaagtgccatcatgctgggaaatctaatgttggagtatgattttggatctcttcatgaatccttcatcaaatttgttcacttctgagtgaaaatgttttccttagtagcaatatagccaattgga

SEQ ID NO: 42284 - DNA, 599 bp, Chicken  19866894278985_2
  misc_feature (1)..(158): n is any nucleotide
nnnnnnnnnnnnnnnnnnnnnnnnnnnnnnnnnnnnnnnnnnnnnnnnnnnnnnnnnnnnnnnnnnnnnnnnnnnnnnnnnnnnnnnnnnnnnnnnnnnnnnnnnnnnnnnnnnnnnnnnnnnnnnnnnnnnnnnnnnnnnnnnnnnnnnnnnnnnnnactttgagagaaagaaactgcaggaagacaacgtgaaaaaaaattgagtaactgatctgccctcaatctcttccctgstactgtattttcctacttctgttttgaaaacacatttgtaaacataagaaatgtggtccattcraaattgatgggaagcttaaaacactgaacatgtttaaagatgggaaatctcgtcagtgttttgcatttccctactagtaattgttataggaattctgtgtttccatactggaagtgccatcatgctgggaaatctaatgttggagtatgattttggatctcttcatgaatccttcatcaaatttgttcacttctgagtgaaaatgttttccttagtagcaatatagccaattggacctaaaacctggwcttcagtcagtttgtgcaacttgtgaaaatatgaattaagatcgcagtcta

SEQ ID NO: 42285 - DNA, 600 bp, Chicken  19866894278985_3
ctacttctgttttgaaaacacatttgtaaacataagaaatgtggtccattcraaattgatgggaagcttaaaacactgaacatgtttaaagatgggaaatctcgtcagtgttttgcatttccctactagtaattgttataggaattctgtgtttccatactggaagtgccatcatgctgggaaatctaatgttggagtatgattttggatctcttcatgaatccttcatcaaatttgttcacttctgagtgaaaatgttttccttagtagcaatatagccaattggacctaaaacctggwcttcagtcagtttgtgcaacttgtgaaaatatgaattaagatcgcagtctagataaactttctatggtttacaaaccaaatagttctgttgcatggagatacttgcattgcgagacatactcaggtcagttccaatggctaaaamtatgattgccagtaccacttggtgtattgtatgcctttccwgagttgagaatcgttgcttctactgaaaactagggaaaactaagtttaacctcactgtagtttaaatcttcccaagcctgaaactggtaactgctactgggaattacctgtgtg

SEQ ID NO: 42286 - DNA, 527 bp, Chicken  19866894278985_4
tctgtgtttccatactggaagtgccatcatgctgggaaatctaatgttggagtatgattttggatctcttcatgaatccttcatcaaatttgttcacttctgagtgaaaatgttttccttagtagcaatatagccaattggacctaaaacctggwcttcagtcagtttgtgcaacttgtgaaaatatgaattaagatcgcagtctagataaactttctatggtttacaaaccaaatagttctgttgcatggagatacttgcattgcgagacatactcaggtcagttccaatggctaaaamtatgattgccagtaccacttggtgtattgtatgcctttccwgagttgagaatcgttgcttctactgaaaactagggaaaactaagtttaacctcactgtagtttaaatcttcccaagcctgaaactggtaactgctactgggaattacctgtgtgggagttacatgttaggaatacaaaaaagcacaaagggactgtattaaaacagcttggccaggtgatctgtga

SEQ ID NO: 42287 - DNA, 486 bp, Chicken  19866894278985_5
taatgttggagtatgattttggatctcttcatgaatccttcatcaaatttgttcacttctgagtgaaaatgttttccttagtagcaatatagccaattggacctaaaacctggwcttcagtcagtttgtgcaacttgtgaaaatatgaattaagatcgcagtctagataaactttctatggtttacaaaccaaatagttctgttgcatggagatacttgcattgcgagacatactcaggtcagttccaatggctaaaamtatgattgccagtaccacttggtgtattgtatgcctttccwgagttgagaatcgttgcttctactgaaaactagggaaaactaagtttaacctcactgtagtttaaatcttcccaagcctgaaactggtaactgctactgggaattacctgtgtgggagttacatgttaggaatacaaaaaagcacaaagggactgtattaaaacagcttggccaggtgatctgtga

SEQ ID NO: 42288 - DNA, 600 bp, Chicken  19866894278986_1
agcaccgcacatgtgctgcaccaagggacaaaatgggtctgtggaggcacttacaggcgttccaggctgtaatatggggctggtaagcagttcgtacagcttttgccagctaggaaactcctaagcagtttcctctgtgctgagtggagtacagtgagcctttagttaccacccaagatctgccctatttttgagtggcccagattcatgggagttctccatcctctcagggatggtgttgcaagggtggtgcatgccagagacctcaagagccattgatagttctgcacagctccaaargactgttacctacacatgctcatctttcaaaccggagtcttctgatactgcccaagctttcagggagagagaaayggagaggaagtggatgaggggaagagaaagaggagggagaaaggaggggagaagagagaaaagagtaagaggaagataagcaagagaaaaggtctcattaaactcaggttgcaaattaaaggccagataataagccagtttaattaatttagtgttgttacactaaatacaatcagcctccatgcactcggtgcatatgcaggttcagatcctaagtaggttgtt

SEQ ID NO: 42289 - DNA, 600 bp, Chicken  19866894278986_2
ggggctggtaagcagttcgtacagcttttgccagctaggaaactcctaagcagtttcctctgtgctgagtggagtacagtgagcctttagttaccacccaagatctgccctatttttgagtggcccagattcatgggagttctccatcctctcagggatggtgttgcaagggtggtgcatgccagagacctcaagagccattgatagttctgcacagctccaaargactgttacctacacatgctcatctttcaaaccggagtcttctgatactgcccaagctttcagggagagagaaayggagaggaagtggatgaggggaagagaaagaggagggagaaaggaggggagaagagagaaaagagtaagaggaagataagcaagagaaaaggtctcattaaactcaggttgcaaattaaaggccagataataagccagtttaattaatttagtgttgttacactaaatacaatcagcctccatgcactcggtgcatatgcaggttcagatcctaagtaggttgttcagtcaggaatccaaaatgccatcacaaaacratctgcagtaactctgctgtgtatcgtgtacggaattayttga

SEQ ID NO: 42290 - DNA, 508 bp, Chicken  19866894278986_3
cggagtcttctgatactgcccaagctttcagggagagagaaayggagaggaagtggatgaggggaagagaaagaggagggagaaaggaggggagaagagagaaaagagtaagaggaagataagcaagagaaaaggtctcattaaactcaggttgcaaattaaaggccagataataagccagtttaattaatttagtgttgttacactaaatacaatcagcctccatgcactcggtgcatatgcaggttcagatcctaagtaggttgttcagtcaggaatccaaaatgccatcacaaaacratctgcagtaactctgctgtgtatcgtgtacggaattayttgaaacatattaacttccccagcagttctccctaaatgagaaaacatrcaggaactttgtgtacaaggcattcagagraaaccaagaagtgaaatgcaatgaaacaagcttctcagatacaagctgcagtttggaaagaaatagagtttgcagtgccttacagtaaga

SEQ ID NO: 42291 - DNA, 469 bp, Chicken  19866894278986_4
aaayggagaggaagtggatgaggggaagagaaagaggagggagaaaggaggggagaagagagaaaagagtaagaggaagataagcaagagaaaaggtctcattaaactcaggttgcaaattaaaggccagataataagccagtttaattaatttagtgttgttacactaaatacaatcagcctccatgcactcggtgcatatgcaggttcagatcctaagtaggttgttcagtcaggaatccaaaatgccatcacaaaacratctgcagtaactctgctgtgtatcgtgtacggaattayttgaaacatattaacttccccagcagttctccctaaatgagaaaacatrcaggaactttgtgtacaaggcattcagagraaaccaagaagtgaaatgcaatgaaacaagcttctcagatacaagctgcagtttggaaagaaatagagtttgcagtgccttacagtaaga

SEQ ID NO: 42292 - DNA, 420 bp, Chicken  19866894278986_5
ggggagaagagagaaaagagtaagaggaagataagcaagagaaaaggtctcattaaactcaggttgcaaattaaaggccagataataagccagtttaattaatttagtgttgttacactaaatacaatcagcctccatgcactcggtgcatatgcaggttcagatcctaagtaggttgttcagtcaggaatccaaaatgccatcacaaaacratctgcagtaactctgctgtgtatcgtgtacggaattayttgaaacatattaacttccccagcagttctccctaaatgagaaaacatrcaggaactttgtgtacaaggcattcagagraaaccaagaagtgaaatgcaatgaaacaagcttctcagatacaagctgcagtttggaaagaaatagagtttgcagtgccttacagtaaga

SEQ ID NO: 42293 - DNA, 390 bp, Chicken  19866894278986_6
ataagcaagagaaaaggtctcattaaactcaggttgcaaattaaaggccagataataagccagtttaattaatttagtgttgttacactaaatacaatcagcctccatgcactcggtgcatatgcaggttcagatcctaagtaggttgttcagtcaggaatccaaaatgccatcacaaaacratctgcagtaactctgctgtgtatcgtgtacggaattayttgaaacatattaacttccccagcagttctccctaaatgagaaaacatrcaggaactttgtgtacaaggcattcagagraaaccaagaagtgaaatgcaatgaaacaagcttctcagatacaagctgcagtttggaaagaaatagagtttgcagtgccttacagtaaga

SEQ ID NO: 42294 - DNA, 600 bp, Chicken  19866894278995_1
taatttaaacaaggatgccatatctacataccgtatcctgaataaaattcatactacctctgcagtaaggaaaatattcttgccacatcctgcagtaaaattcttatataattaggaacaagaacatggctctccaagtttattgcttctccaggaaataagtcaaaagcatcagaagcttccaagtacggaagctgagcttcgatctgttgagcagtgtgcagatgaagcagtttcatggaatctaaaaggaaaacacgaaaagcaattttatgtaaacattacctgactacagaaaaraagattttcaagttcttatttaacaaaaagagaaaacgtgcatctttgcacatttgactatttccaaaggagcagaaattcaagcaactgggaaatcaagggatgtacttaaagtataacattcaaaaagaggaaaatgagataattgtggaatagaaattggtaaacacagccaccagaaaaagtagtaagattatatttcatatatgttgcctctccagtggaatgcatagcaattttatgctcagagacattgatcatgatgtttaagtgatgaatcacgtgagtttctgcccatgc

SEQ ID NO: 42295 - DNA, 600 bp, Chicken  19866894278998_1
ccctgtgagcatcagctcagtcacaggccacccctcctgctcctgcaagagctggggagaaaaaccagaggcatggcatattaactgaaatggggtccttccaaaaagaaatgtgtgtccacatacctgcatgtacatactttatgggtatctcaacacataaaccccataccctgcaatagagttcttgttgtacaccttgtcctgccagcagagcccaaccggagccatgtggtggttcctgtggaaggctgcccatgtaaatactgggctttgttcttcacatctgtccattgaagyagcattaaggacacaaacaacagacctcagaatcaaccccctggctaacctcaaactggccttgacacacagcaagctgagcctgcagggccagaatgccacacagtgacactgtgcacagaatttctgaraagaaaaaggcagtgtaagccaaagtaccactttgtgtagctctcctgctatcaaagactcagctgtacttgcatttagctcttaatttgtatcctgactttactactctttgctccgtgtgtatattggcaaagctcctgcaatgcagttattaaactctgatacgtg

SEQ ID NO: 42296 - DNA, 600 bp, Chicken  19866894278998_2
tgtacatactttatgggtatctcaacacataaaccccataccctgcaatagagttcttgttgtacaccttgtcctgccagcagagcccaaccggagccatgtggtggttcctgtggaaggctgcccatgtaaatactgggctttgttcttcacatctgtccattgaagyagcattaaggacacaaacaacagacctcagaatcaaccccctggctaacctcaaactggccttgacacacagcaagctgagcctgcagggccagaatgccacacagtgacactgtgcacagaatttctgaraagaaaaaggcagtgtaagccaaagtaccactttgtgtagctctcctgctatcaaagactcagctgtacttgcatttagctcttaatttgtatcctgactttactactctttgctccgtgtgtatattggcaaagctcctgcaatgcagttattaaactctgatacgtgtaggtgtataattgcagagagggctctttttaataatgtattttgatccatctacaaatacagaacataattatctgcaattatcacacgcttgtctaaataactgtatattgttcctccgcccactgtag

SEQ ID NO: 42297 - DNA, 600 bp, Chicken  19866894278999_1
ttcatcagtctcagtcatcacctcacctggcctggagggaatggtaagtgtgaaacagagcttataataaatatatgtacagagagcattctgacatgcttttgctgaagaaaataaaagtattttcttccttttcactattttcaaccaggtgtggtgtttagaaaaggacgttagcatacttaggaaccttccactagcttttaagatgtcctgaagaagctaggagtcggcggagcagagaagaggaaggtggtaaaggttaatattgctgagaggaaagcttccagagctgcagtrccaggttatacaggtgtcttgggtgtgacttgggccacagcatgaccatttgccaacacagcaagcatgtactgcagtgcctactgcaacacaagcatcctctaatttgcctgaaatcctcgcatcgctttctgaagatgagtgtaaagatataagaaagcaaaggtgccttgccagaggtttctcagccgtctgctctccgtactaccctgccatatgcttacagacagccctcaggacagctctggcaccatttgctttctggttcaccacctgactaaggccccagagcatctgtag

SEQ ID NO: 42298 - DNA, 600 bp, Chicken  19866894279002_1
actgtactgtaccaagaaagaactctaggctctccactagcaatctctgcctttctggctctacttcctcaaatagttgactgattttcacagtattaatattcagttgtgtttcttttcacctctcagcactgtttttctgttgttataactgtgcaggtacttcatacactaatgttcatgcagcatcctactttacacagttcccataggtacacactgatgtcactagttattcatatatatcatgacttaataaaaataatttgctgtcatctttgattaaaatacgaccatttyttgatcacgaagaagatagcttttaggttgtttagtctgtaggcartgttttgtcttccttatattcaaactagtattaagaaagagtggaaggactggatatctgacagctcagtttcttaattctgtcttgcacatccttcccttaagtttgctttcttgatcactgtgagtgacagcaccactcagtcttgcagtcmtacaactttgggtgttgctgactcgtgtccttggatcctactcttgttgattctgcccttccagtgtttgtctaaattttgccagaagcttgcagaattc

SEQ ID NO: 42299 - DNA, 600 bp, Chicken  19866894279002_2
ctgcctttctggctctacttcctcaaatagttgactgattttcacagtattaatattcagttgtgtttcttttcacctctcagcactgtttttctgttgttataactgtgcaggtacttcatacactaatgttcatgcagcatcctactttacacagttcccataggtacacactgatgtcactagttattcatatatatcatgacttaataaaaataatttgctgtcatctttgattaaaatacgaccatttyttgatcacgaagaagatagcttttaggttgtttagtctgtaggcartgttttgtcttccttatattcaaactagtattaagaaagagtggaaggactggatatctgacagctcagtttcttaattctgtcttgcacatccttcccttaagtttgctttcttgatcactgtgagtgacagcaccactcagtcttgcagtcmtacaactttgggtgttgctgactcgtgtccttggatcctactcttgttgattctgcccttccagtgtttgtctaaattttgccagaagcttgcagaattcttaataaaaaggaggaatgtctcacaggtgacagataagaaactgc

SEQ ID NO: 42300 - DNA, 563 bp, Chicken  19866894279002_3
cagttcccataggtacacactgatgtcactagttattcatatatatcatgacttaataaaaataatttgctgtcatctttgattaaaatacgaccatttyttgatcacgaagaagatagcttttaggttgtttagtctgtaggcartgttttgtcttccttatattcaaactagtattaagaaagagtggaaggactggatatctgacagctcagtttcttaattctgtcttgcacatccttcccttaagtttgctttcttgatcactgtgagtgacagcaccactcagtcttgcagtcmtacaactttgggtgttgctgactcgtgtccttggatcctactcttgttgattctgcccttccagtgtttgtctaaattttgccagaagcttgcagaattcttaataaaaaggaggaatgtctcacaggtgacagataagaaactgctgtcatttgcattgaaatatagagcttaccactgacccttctacagcataagctatatgatgcagtagagcacaaacaggtactttttcatttgcttttgctttagttttagccctt

SEQ ID NO: 42301 - DNA, 564 bp, Chicken  19866894279003_1
tctcctacccagagggaaccgtattttccaggcactggctgtgggaattgcagtgagcgaggacagaagagggcaaatcacagattaaggaatgaaaacggcttcgttaggccagttcatttctcccaggtgttctgtctgttttatttggttgctgaaattatcttcttgttgggtttcttgtgtgtggttgggttggaagggatcttgcagccgtatgaaatgcagtttctctttcccacactgtctggttaacaagataatactgttaatgagggtttttttttctactgttatgaktggttttccattttgccttacacccatgacagagggaggcagcgattacatagaactgctaatagctttgagcttaacctgttgatctcttgtgtggatgtggaagaggcgtttgcaagtgagcctgatgatggcaatgaaatatttctgtaaagtcacagaagaggcatggagaaacacacgtaataagagccactgggaaagcaaaaggggctcatgaacacgtggtcaccaggtggacaagctgtacgctcactcagtatc

SEQ ID NO: 42302 - DNA, 600 bp, Chicken  19866894279005_1
aggcccgagtggtggagctgggctgaagcagctgctgtgcggatccgagggctgctgacagagctgcacagccagccgtggcagacccacatcctgcacatcgaggcggtgaaatcctacgcgccccacgtgcatcacattgtgctggaccttgagtgccgcccgacgccgcccgcctagctggctgcggtgccccagcatggctccaggtctggattttgccatctggatgtggtttacatcccgtgttcccaggtggcagcagtgcccagcagcaagccgggcccctgccatccctgygccgtgcccagggctgctgtgcaaggggagctgcgctcagctgagctgcacggggaccgtgtgatggcagagcgtggggctgaggctgcccatagtcccacctcagctctgcctactggcgcccagtgcagggacatcacgctgcagggacatcacgctgcagggacatcacgctgccttggatgcgtgctggcactttcaactccactttcacatgaaagagagctgcagggctggatgaacctcagcatttgtgctgggctttgtttcgatgagtcaggtgcaggctctgttaggtgt

SEQ ID NO: 42303 - DNA, 599 bp, Chicken  19866894279008_1
  misc_feature (1)..(10): n is any nucleotide
nnnnnnnnnnagcccatggcacagccaggggctggcaaacaccatgcgagtcaacagctcatttcctcccaggtgctctgtgactgagccctgtcacgtccaccgaaacctgagaccaaggcagcgtgcccggctggggatggggcccaggagccaaagaaggtgagcacaggactggggcatccttagggctcacagcacctgcagctgggatgggcactgccccgctgccagcaggaccccacctccacacccatcccagtgcagaagcttcagcaaccgtggtgcaaatgtcacagkgcaggaaaaggaggtgattgcagcagcaagcacaggcttcacagggtacaggcactcagagcccagtcacagggctgtaaccagcgcacctgggccagggcgaggtgctgagcatgcacccagaagccagagagcactgaggcttttcacagcaaccaagaaaaccagcccttgaacccagtctctgctccgtccttccacctctacagagggcagggatgcagtaggtgaggggggtgcttcgggcaggaggctccaagatcctcattcttctcgtggtcggctcaggaaacgagtgc

SEQ ID NO: 42304 - DNA, 600 bp, Chicken  19866894279014_1
gtaaacatgcacatttacataccacgcagactgttgtgaaaatacggcacttgtaataaaaaccaagccaatctgaatgagttatagatgagatctctgaacttagtgaaataagggagggaggcatcacctcaggtaagcttagcaggatcttagcaacatttatgtcagtcactcctttcgggaggagccttaaagctttggcccgacgacctgtgctgatttaggcaataagggtccaggtgtagtactgcaccgtgatttttttgttttttaaggctgaacttgggcattcttgcratgccattatcatcctttgctgttgtagtgaaagcggagctacaaaktgcagacttctctcctgctttttgcagtcccagtgtggctgcattaagcagccagagctgatggctgctgcaggcggtgctgtagattaaaggcttcattaactcgagtgtatcgctcaagccgcacgcggctgttgttccaagtgtgcttggtgtactaaggttatgggtccagttcagaagcctgtacgtatactaattcctcttaatggacagagatgcatttctgttgttctcttttcctcttcaagta

SEQ ID NO: 42305 - DNA, 600 bp, Chicken  19866894279014_2
cacttgtaataaaaaccaagccaatctgaatgagttatagatgagatctctgaacttagtgaaataagggagggaggcatcacctcaggtaagcttagcaggatcttagcaacatttatgtcagtcactcctttcgggaggagccttaaagctttggcccgacgacctgtgctgatttaggcaataagggtccaggtgtagtactgcaccgtgatttttttgttttttaaggctgaacttgggcattcttgcratgccattatcatcctttgctgttgtagtgaaagcggagctacaaaktgcagacttctctcctgctttttgcagtcccagtgtggctgcattaagcagccagagctgatggctgctgcaggcggtgctgtagattaaaggcttcattaactcgagtgtatcgctcaagccgcacgcggctgttgttccaagtgtgcttggtgtactaaggttatgggtccagttcagaagcctgtacgtatactaattcctcttaatggacagagatgcatttctgttgttctcttttcctcttcaagtatctccatccagaacacactcagtgtaatggaagagccaaagttatct

SEQ ID NO: 42306 - DNA, 599 bp, Chicken  19866894279018_1
  misc_feature (1)..(162): n is any nucleotide
nnnnnnnnnnnnnnnnnnnnnnnnnnnnnnnnnnnnnnnnnnnnnnnnnnnnnnnnnnnnnnnnnnnnnnnnnnnnnnnnnnnnnnnnnnnnnnnnnnnnnnnnnnnnnnnnnnnnnnnnnnnnnnnnnnnnnnnnnnnnnnnnnnnnnnnnnnnnnnnnnnggcaggcaggcctgcaggcccaccagccctccccctccccctcccccccccaaaagaaaacaaacaaaaaaaagggaaaagggggagggtagggagatggaagctgggctcaaaaaacaaaacaaaaagaaaaacaartccagaacagcagcaatgatctaaggaggaaacttaattttactaaatatgatatgaaaatgcaagataacaccatataatacaatataattggaattgaggctaataaatcaaataaaatgagagagcgagcatctgaaaccgaaagccgtactttgaactgaaggcgcatggctggggagcacacccacacactgccaggtagcgaaagagagagagatcctgtgacttcctctctgaacacaaagtcctctaaggtatgtagtagatcctcttttcagagagccaggtatccagaa

SEQ ID NO: 42307 - DNA, 600 bp, Chicken  19866894279029_1
tcgctgaggtcggtgaactgggacctgtggttgagtgccatgtctgtgttgaaacgcatctccgggctctatcagtgtgactgtgagggactgaactgcccagagatgcgaggaagaagtactggaactcccagcccggctctgtgagggcacgttgtgtgctgctggcctgtttgggagggatgaagacaaaggaataatgcttggttgggagtttcgcaactcatttgtattccacaacatcagaccttgctgtaactgtcatgtgaatgcagatgcaattgtatttctcctaagaarggtaacttagaggctatcccaaaatcattttctagcatacaagccttctcctgacatagtgtgcttccatacctgtttatgtgccttaaaaaacaacacgcttgtaatgccatgtggtgggtcatgcggttggtttgctcttagagcatgtaagagcagaactagaatgaaagctctccttaggaagtatatagaagtagatagcttatgttccaaagagctcgtttaaagggcatccagtgcattggaagcaaagaagaggtgtgtcagctgagcggcagggaagttggttgggttttt

SEQ ID NO: 42308 - DNA, 600 bp, Chicken  19866894279031_1
tttatggatccattgtgtaatcatgaataaggctgacaaagctctatagtgaagtcaaagaggattgtatttcggtaacatttaggttgaacaagtttctacctctttattacattcatacaaattagatacactattcttatgtatttatttatttaagaaagttctcaccaatgttttttcaggaattatttttttcctgtggcatgagatatttcagagaatgaagaagtagctttggggattttttttcaagcagatgtggaattctcttgtgctcctagaatgcagtcaaccttmattcaagttaactaagcttttgttttgagtcatgtcatcatctgtcaggatctcrgaattatgttttagagctgctcaacataaagaacgagcaaccagacatctctggtcattgtaaagcttcagtgtttcatgaaggacaacaacttttatttctacttgccaatattatcggaaagaaacagaatgctgatatggagataatgtatgtttggatgccaggagtgcattggcacaaaaatatctgtggtaaaaagtagctgagaaagttcattacaagggttgctaaaggctgttatg

SEQ ID NO: 42309 - DNA, 600 bp, Chicken  19866894279031_2
caaagaggattgtatttcggtaacatttaggttgaacaagtttctacctctttattacattcatacaaattagatacactattcttatgtatttatttatttaagaaagttctcaccaatgttttttcaggaattatttttttcctgtggcatgagatatttcagagaatgaagaagtagctttggggattttttttcaagcagatgtggaattctcttgtgctcctagaatgcagtcaaccttmattcaagttaactaagcttttgttttgagtcatgtcatcatctgtcaggatctcrgaattatgttttagagctgctcaacataaagaacgagcaaccagacatctctggtcattgtaaagcttcagtgtttcatgaaggacaacaacttttatttctacttgccaatattatcggaaagaaacagaatgctgatatggagataatgtatgtttggatgccaggagtgcattggcacaaaaatatctgtggtaaaaagtagctgagaaagttcattacaagggttgctaaaggctgttatgttactgctttttgtcattgagtgccaaatcagttgtaccctgggagcttttaagg

SEQ ID NO: 42310 - DNA, 600 bp, Chicken  19866894279031_3
atctctggtcattgtaaagcttcagtgtttcatgaaggacaacaacttttatttctacttgccaatattatcggaaagaaacagaatgctgatatggagataatgtatgtttggatgccaggagtgcattggcacaaaaatatctgtggtaaaaagtagctgagaaagttcattacaagggttgctaaaggctgttatgttactgctttttgtcattgagtgccaaatcagttgtaccctgggagcttttaagggtcatgtacttctggttggagtagtgtgataaacaaagcttgtcamggctggcagcatgcatctcttccccggcagtctttcaaatcatatggaagaaagactgtggaagccaggacctgaaggtaagctaatagatattattcaagtctgttgagttttaaatacctcaagaatgcaatgttttgttgctgcacagacttgataaaatcacagataggcagtataatttccagtaataacccctctggttcaagggttcattcagttgtacctcatattttctttttctctgaaatatgtctggtcaaaaayattttgctgtctgtatgcttcacagaattttga

SEQ ID NO: 42311 - DNA, 555 bp, Chicken  19866894279031_4
ggttggagtagtgtgataaacaaagcttgtcamggctggcagcatgcatctcttccccggcagtctttcaaatcatatggaagaaagactgtggaagccaggacctgaaggtaagctaatagatattattcaagtctgttgagttttaaatacctcaagaatgcaatgttttgttgctgcacagacttgataaaatcacagataggcagtataatttccagtaataacccctctggttcaagggttcattcagttgtacctcatattttctttttctctgaaatatgtctggtcaaaaayattttgctgtctgtatgcttcacagaattttgatagtttcctcattttctccaaggcagatacttcataccaagatgtatttgaaattctgacatttaaagttagtgatctgctaccaattgctgcatgtcattgcacgtcttgatttagtggaataaaaatattatggatgaacacagggcaaaattttgcccttgccacatgctagtcagttacctagtgaaatcactcatatgcaaagataaggaaggtagg

SEQ ID NO: 42312 - DNA, 600 bp, Chicken  19866894279033_1
ggccgctctctcacaggactggtttccacccttgcccagctctcaggaggataattcatttcctcatagttttcccaactccttggccccgtttctgctcccatgctggggggacccttcacgtccattccaggtgggaagaagcagcattcagcatgcccagcacttagccctggcctccttgggcctggcagggatgtgtcctaggatctcctggcccagcagcctggcacatgggtggctctgatgtagtgccccgatggtaggaggcagagtggccttgtggaggcggctgggacrcgtgctccaacattgatcagccatcagatttgggacaagccgctgccccggttcccatttatcatcctggctcctgtgggagaaggtgggtcccacacctccccgggaggctgcacgaacacctgcagagagcaaagcccctccagcagcaggctccagccccaccgccgtgcccacgcagggtgtccgtgtgtctgtggccgtgtgcgtcctgtcctccctgtgtagcgtaggaggctgttgtcgctgtgcattgtgactcctctgactgtagtggaaacagctacaccaataaacttc

SEQ ID NO: 42313 - DNA, 600 bp, Chicken  19866894279044_1
tcttcctagtttccaatcaattttccaagttcaattagtagtaattttatttgagtacctttgagtatatttaagtaccttttcaaaagatacttaccttaacctgaatggttctcagttctagctctagcttctttctttcttgtacttctttcttatatttttcttctaattcttcaaacttagcgtctacaaagacacaatgaatccttcttcaaaaatataacttaatacacaggtgttattttatgtcactaatttgaagatataagcgatgttttggatagaggttttgttctragtgttcaaattactatgtacagtaataatgtaagtcaaaaayagtcttataaagaacacaaatgacttgacaattttagttaaagcacctatactgtatgaaagagaagaaatttgttcttttctatgtgaaagaaacagctgacactatgaacaaccattctaaaaactattgcagtctgttaataaatactcccattactgtaccatgcctgtcagtgtagtgcttaaaaggtttagtatctgctataagagttcaatctgcattaataatttttaaagttggagtttatgggggtt

SEQ ID NO: 42314 - DNA, 600 bp, Chicken  19866894279044_2
attttatttgagtacctttgagtatatttaagtaccttttcaaaagatacttaccttaacctgaatggttctcagttctagctctagcttctttctttcttgtacttctttcttatatttttcttctaattcttcaaacttagcgtctacaaagacacaatgaatccttcttcaaaaatataacttaatacacaggtgttattttatgtcactaatttgaagatataagcgatgttttggatagaggttttgttctragtgttcaaattactatgtacagtaataatgtaagtcaaaaayagtcttataaagaacacaaatgacttgacaattttagttaaagcacctatactgtatgaaagagaagaaatttgttcttttctatgtgaaagaaacagctgacactatgaacaaccattctaaaaactattgcagtctgttaataaatactcccattactgtaccatgcctgtcagtgtagtgcttaaaaggtttagtatctgctataagagttcaatctgcattaataatttttaaagttggagtttatgggggttaagaaacgggcaccctcacaagctacacaacgtgggctaggga

SEQ ID NO: 42315 - DNA, 599 bp, Chicken  19866894279048_1
  misc_feature (1)..(120): n is any nucleotide
nnnnnnnnnnnnnnnnnnnnnnnnnnnnnnnnnnnnnnnnnnnnnnnnnnnnnnnnnnnnnnnnnnnnnnnnnnnnnnnnnnnnnnnnnnnnnnnnnnnnnnnnnnnnnnnnnnnnnnnngataaataagacggtagtggatattacaccagatttctcctttcttctgccagtggaacaattttttcccctactgcttctcccaaatcatcatgagacttttgtaaagagagtgtttgcgcaaaaagctgtgggcaattgctcctgaaaagatacttgcagttacttaatgctgcaaawgggraaaatgaaatgctatttaagtgtattttcatgctaaattagaataatgaaatctcctcttaacgccctgacaatgaaactggggccaactcgttttatccaggtaaactctgcagaatgaaatccacttctgaaaaatgaagaatggagctgagaagtgggtgtgtttggaatatgggatatttcaaatggttatttatttaagttttttatttgcaatgattataaccctgttcacttgaaaacaaatgttcaaagcatcacaagctggagacaagtggattcctgggtggaaa

SEQ ID NO: 42316 - DNA, 599 bp, Chicken  19866894279048_2
  misc_feature (1)..(116): n is any nucleotide
nnnnnnnnnnnnnnnnnnnnnnnnnnnnnnnnnnnnnnnnnnnnnnnnnnnnnnnnnnnnnnnnnnnnnnnnnnnnnnnnnnnnnnnnnnnnnnnnnnnnnnnnnnnnnnnnnnnngataaataagacggtagtggatattacaccagatttctcctttcttctgccagtggaacaattttttcccctactgcttctcccaaatcatcatgagacttttgtaaagagagtgtttgcgcaaaaagctgtgggcaattgctcctgaaaagatacttgcagttacttaatgctgcaaawgggraaaatgaaatgctatttaagtgtattttcatgctaaattagaataatgaaatctcctcttaacgccctgacaatgaaactggggccaactcgttttatccaggtaaactctgcagaatgaaatccacttctgaaaaatgaagaatggagctgagaagtgggtgtgtttggaatatgggatatttcaaatggttatttatttaagttttttatttgcaatgattataaccctgttcacttgaaaacaaatgttcaaagcatcacaagctggagacaagtggattcctgggtggaaacgga

SEQ ID NO: 42317 - DNA, 600 bp, Chicken  19866894279054_1
taaagaataaggaaaattacgcatgaagtggtgcttgaaatcaaccaaggtaattcattcgaagccatacttcctattaaggaaagcagatgacagaaaacatgctagtaagtaaaaaacatcatgcacaaactggaaggttcacaaaacacgggatacaattcaagattataacatttaatctaaaatggactggtatgtgttcctagcacacacttaatatgcaatattaaaccagtgtagtcaaaaatatcaactcaaaatgcttttacattagtttatcagagtgatactctgagytacttgcagtgactgtcttgaattttccactaagacatattctgacagtgccttcaccttccccattattaacacatctgtagttcaaaccctgccagcataagacaacttccattaaggagtctatccttacagaaaaaggttattatgttcaaaaataattgtaccttgtgggttaagagccactcagtcactgttccatacacacacacacaaaagcctacattgctaccatattggtcaggcacaataatctttattttcaagtattaagaaaatgaccatcatactatttcaaag

SEQ ID NO: 42318 - DNA, 411 bp, Chicken  19866894279054_2
gccagcataagacaacttccattaaggagtctatccttacagaaaaaggttattatgttcaaaaataattgtaccttgtgggttaagagccactcagtcactgttccatacacacacacacaaaagcctacattgctaccatattggtcaggcacaataatctttattttcaagtattaagaaaatgaccatcatactatttcaaagattaacaggcatattcagagcacttttacaaaatgtctctaataaccactttggctcttacagcccacggacttattaaataagcgaaacttycattttcaaactgagctctatttgaatacactttatatatagaagtgactacaagggaatagagaggatacaattataaaacacagtatcctcaaaaaataagttttacag

SEQ ID NO: 42319 - DNA, 600 bp, Chicken  19866894279062_1
ttcctccaagctgatcttcccttgaagtgagcaaattttcagctgtctgaatttggttaagcttgactagaaaattcagtgatgaaatacggctttgacgtgggccagattacagcagatacattttgtttaagaaaaagccagtaaacaatctaatgattttttatctcattatgagtgtcactgcatcagtggattttcttgaatagtttactgttttatacagagaaatattgaaaatgagaagctttagcacagaaaccacctataggttcaatgtcagctttggtaaatttcaasagactgtgccttcaagcatcaaactaatcacttgtaattaagcagaatatatctggaagatggaaccagaatgaaaaaccaacatgtttaccctcygcacaacacaaatctccacgctccttagttggagttacaacctgtaccataacgcgcacacagattgttgggacaaccatcttaactatctgatttgagtatgtttaccagtgcttctaattgccacgtaaggaccattctctgctcttcttccagatgacccttgactttcagcacataagtctgacaataccagcagcttct

SEQ ID NO: 42320 - DNA, 600 bp, Chicken  19866894279062_2
gacgtgggccagattacagcagatacattttgtttaagaaaaagccagtaaacaatctaatgattttttatctcattatgagtgtcactgcatcagtggattttcttgaatagtttactgttttatacagagaaatattgaaaatgagaagctttagcacagaaaccacctataggttcaatgtcagctttggtaaatttcaasagactgtgccttcaagcatcaaactaatcacttgtaattaagcagaatatatctggaagatggaaccagaatgaaaaaccaacatgtttaccctcygcacaacacaaatctccacgctccttagttggagttacaacctgtaccataacgcgcacacagattgttgggacaaccatcttaactatctgatttgagtatgtttaccagtgcttctaattgccacgtaaggaccattctctgctcttcttccagatgacccttgactttcagcacataagtctgacaataccagcagcttctttatttgccaggatgctctcttggaagtttatttaacctaatgttccacaagaagtgatttgagtgtaaaggtgagctgggaagtggttaatgagg

SEQ ID NO: 42321 - DNA, 600 bp, Chicken  19866894279069_1
acaggcaaatttggagcaaaatttggcccactctttcagtgcaagtgagagattgttgtttctgcaaggaaacactaaccaaaatacttctctcaacaacaaccgatcacatggtctcgttgactctgtttcctttcctgtctttgagtaatatataggcttttcaaacaattaaaaaaaaatcttttcaattagataactgatcttaatacaagtgagaattctgtatactaacatgctaaacctaaatgtgtgacttcaaaagaatatctcctttaccttatgaccaaaaccattctktctgcagctgggcaagttctgctattatctcatgaaacagccatcagcattgctgtgccaactgagggattggtatcaatcagtctttttagagtagaaaataatagaaaactttgcagattaaatgcatagtttaggcaagaggtgcagtattttcaggcagctaacatagggcattcatagaccatctccttacaggattttaactgtgcttctgatttgtgatatgatttatgaaaatgagctctctgtgccctattttaaccatctgtacagtagattattattatttttttttaa

SEQ ID NO: 42322 - DNA, 600 bp, Chicken  19866894279076_1
ctgatggcagcactgcacacacttttacaccaaagtcaaactctttgcaacccaactgaggtaaagatgcagactgtaattattttctatgaaagcagcacctttacctctactcaacagaaaactcccttaattttggcagcgtaaaaagcctgtagggtggggaaaaacatcccacagccctagaaaaagctgactgcaagagtagaatcacagcacggctctgctgaagacaacactcgaaacaagcagctcctccatgcctgcagaggaagcctcggtgccactgcctcagtacarttcggttgctttttgacctcctagagctttgaagcttctgggtaatccagctgcgatgagatttcatattccttgatgaaacatctgaagccgctgctgggtttgctgacggatcctttcatatgtctgtgtgtgaggcaggagctcttcctttgcttttcctttttgttttgaagatgaagggcgcccagcggacgcaggcagaggccacgcgagggttgcgataattgctgggcaaaaagcagaaaggatttgacaacaaaggcaatttcttcctccatcttgagatgtcagcctgag

SEQ ID NO: 42323 - DNA, 600 bp, Chicken  19866894279077_1
gtgagagcaccccctgtctgattagccagtcagcctcaaaactgagaattctcattatcagatgatggtggcagacagctgatagtgccactacatgcttttaatttggttgcagaggaagagccacatgaaagctgaatactccctgcattctactcttctcatgttgggactttccacagatcatcacgagacattttagcaggagatcctgactgcagtccatctgtgtctaattacccacataagcacgtagtagtattgatgagtgggtctacaataaggcactgatgtgacttyagtattaagaaggcagcaagtttttaaggtagcaaacctgggtacttgttggcagttcagtacagcgtgcagagctcagcttcatggtaggttttgcagctcgtgccacgttttgcagctgtgatgagacaattcatctcaggaagtcaaaattaccgtcacaatagtggtatatgtttggtcaccacaaaaaggaatagcatcaccgtcacagcttttatacagaggtagatattaggagatatcaggttggatattaggacaaagtttttcacccagagggtggtgacgcactgaaca

SEQ ID NO: 42324 - DNA, 462 bp, Chicken  19866894279077_2
attccatcatcagctaaatatacccgtattgcaaaggggcagaatacaaaaacaaccctgcaagtctctgctggataaactaagggatcaattccctaattagcctaggaaaagtaatcaaaggagactggaatagccacattccacctcgcagacaaacattacattggctatgtatcccctaataaacatcatgtgaatgctcttctcaaccaagataacagagataagtgggaaagaggattattctctttagtatactgatgtatctgatatatcgacatcttttgttttaacttytacatctgctaagaagtagaaattacctatattgtggggcttttgaaggggaaatacactccttacctgcagtaaaaagtcatacaaatttccattggacattccagctggatattagggaagaatttcttctcacaaagagtggtgaggcattggcaatgg

SEQ ID NO: 42325 - DNA, 600 bp, Chicken  19866894279078_1
aactgggtgctttgtgttttgcttccttagaaacaacaacacaaagcctgcagttcttactctgaatccttgcactgatcacgcagtgactgtgctctcattgtaaaatcagaattgagcattgagtttggtaaagtgttaaagttgtctcacgtgtggaatgcggcttacctgtggtttgcacattgtatttccctgtagctaaagaaggctttattccttctgcatgggtgcttttcgggtcacccaatgactgtgtgcagccatgtctcttggcagggagggaaagaaagggtgcaktgtgacctcacgtagttggggctgcaggcagaaagcagacgtagctgtcatcaatttctgtggcctcttgtgtgtcccttttccaagaagcatcatttgctgcatatgtagttgcctcaatcaacagaagtccaatcttggtgccttctacttaaatagtgccaagcctttttacaggtaggaacatatctttccatctccacaaggtcataacgttctgtcaaacattttgtgaactttaacagaggtatgtttaatgtatatgatagtgagtcattgtctacacaaatggatttcttg

SEQ ID NO: 42326 - DNA, 545 bp, Chicken  19866894279078_2
acgtagttggggctgcaggcagaaagcagacgtagctgtcatcaatttctgtggcctcttgtgtgtcccttttccaagaagcatcatttgctgcatatgtagttgcctcaatcaacagaagtccaatcttggtgccttctacttaaatagtgccaagcctttttacaggtaggaacatatctttccatctccacaaggtcataacgttctgtcaaacattttgtgaactttaacagaggtatgtttaatgtatatgatagtgagtcattgtctacacaaatggatttcttggccatctcyccttacaggatgctcataygccatcagattaacctttaaaatattcagactttattttctgactgactagataacatgttttatatagacaagatataaattcaagagcaagagcaggagtttaacaaaggcacactgcacccatatgaagtacaagaggagttttaataatctgaagcagtcttcacttgttgcattaggaaaagcaatacctttaagtgcccagtccctgaaatattttggag

SEQ ID NO: 42327 - DNA, 526 bp, Chicken  19866894279078_3
cagaaagcagacgtagctgtcatcaatttctgtggcctcttgtgtgtcccttttccaagaagcatcatttgctgcatatgtagttgcctcaatcaacagaagtccaatcttggtgccttctacttaaatagtgccaagcctttttacaggtaggaacatatctttccatctccacaaggtcataacgttctgtcaaacattttgtgaactttaacagaggtatgtttaatgtatatgatagtgagtcattgtctacacaaatggatttcttggccatctcyccttacaggatgctcataygccatcagattaacctttaaaatattcagactttattttctgactgactagataacatgttttatatagacaagatataaattcaagagcaagagcaggagtttaacaaaggcacactgcacccatatgaagtacaagaggagttttaataatctgaagcagtcttcacttgttgcattaggaaaagcaatacctttaagtgcccagtccctgaaatattttggag

SEQ ID NO: 42328 - DNA, 600 bp, Chicken  19866894279080_1
gggtaagtttagattagatataaagaagaaattctttactgagggtggtaaggccttggcacaggctgcccagagcagttgtggatgtcccatgtctggaggcatgttaagccaggttggatggagtcctggacagcctgatctggtgggtggtgtctctggatggaactgggttatcctgaaggtcccgtccaacccaaactataattctgtgatgatgctgaagagtgtatgaacccaaaagcacaaggcacagagccagggctgtacatggtgccccagcagcagtacccactgatrgcccagcacaggactcagggacccacatccgtggctgtgtagtcataaaacctgttcctcggccctatagcaaaggatcctcaagtaacaggaattctcattttctgctacctggctgagtttaattattggtcctgtgagtgcagcagcattaatacgtgccaggtatgacccaggtacctttaaggcaactgaggcgcatagctgccagcagcagacaagggcagcatggcctagcaggccgggcagggacagcacgttttgccttaggtaaayatcagccctccagcactggggcag

SEQ ID NO: 42329 - DNA, 600 bp, Chicken  19866894279080_2
ccccagcagcagtacccactgatrgcccagcacaggactcagggacccacatccgtggctgtgtagtcataaaacctgttcctcggccctatagcaaaggatcctcaagtaacaggaattctcattttctgctacctggctgagtttaattattggtcctgtgagtgcagcagcattaatacgtgccaggtatgacccaggtacctttaaggcaactgaggcgcatagctgccagcagcagacaagggcagcatggcctagcaggccgggcagggacagcacgttttgccttaggtaaayatcagccctccagcactggggcagcctggctgtgccatcaatcactgctctatctgggtgttttattaacagtgctttcctaagcgttaccctgacatttcccctcattcactaattataaaccagtctaactttcctgttcagtagaacaaggtatttgcctgcatagagcccaccatgactcaaggaggctgccacttccatgtagccatgtacaactcccagaagtgaagatagggctcattctacccggcaggtgtttactttggttgcattgaaatctttatggggtaacgaacg

SEQ ID NO: 42330 - DNA, 599 bp, Chicken  19866894279084_1
  misc_feature (1)..(99): n is any nucleotide
nnnnnnnnnnnnnnnnnnnnnnnnnnnnnnnnnnnnnnnnnnnnnnnnnnnnnnnnnnnnnnnnnnnnnnnnnnnnnnnnnnnnnnnnnnnnnnnnnnnttgttaagtactttctattttaaatgagagaaggatttcagctctgtattaccagctcagctcatacagacattcgttaacaactttcaggtcaccttgagttaaactccatgtccttgtggggcaggtgctgaatcacaaatacgcattattctctgctctgttttctctttgtgtttcttagctgttttctagcattcygtgtcaaaacatacagctttcctyataaaacattttcacatcatttccaatttcatcagacaattgaggcagattcctactctgttatccctttccaatcattcctggcttacattgaattagttgaaaaaatgtatgcagcttctagaatgagtagcagcagagtgcaaggtttatgattagttattaattgtacttttctttttcaaccactgagaaagagaagtgaaatgagttactgtttcaacatcttaaatgtgaaagagcagggtagcgggttgaaatttcattctgataca

SEQ ID NO: 42331 - DNA, 599 bp, Chicken  19866894279084_2
  misc_feature (1)..(75): n is any nucleotide
nnnnnnnnnnnnnnnnnnnnnnnnnnnnnnnnnnnnnnnnnnnnnnnnnnnnnnnnnnnnnnnnnnnnnnnnnnnttgttaagtactttctattttaaatgagagaaggatttcagctctgtattaccagctcagctcatacagacattcgttaacaactttcaggtcaccttgagttaaactccatgtccttgtggggcaggtgctgaatcacaaatacgcattattctctgctctgttttctctttgtgtttcttagctgttttctagcattcygtgtcaaaacatacagctttcctyataaaacattttcacatcatttccaatttcatcagacaattgaggcagattcctactctgttatccctttccaatcattcctggcttacattgaattagttgaaaaaatgtatgcagcttctagaatgagtagcagcagagtgcaaggtttatgattagttattaattgtacttttctttttcaaccactgagaaagagaagtgaaatgagttactgtttcaacatcttaaatgtgaaagagcagggtagcgggttgaaatttcattctgatacawatttggaaagagaaaggttgctt

SEQ ID NO: 42332 - DNA, 600 bp, Chicken  19866894279084_3
gtgtcaaaacatacagctttcctyataaaacattttcacatcatttccaatttcatcagacaattgaggcagattcctactctgttatccctttccaatcattcctggcttacattgaattagttgaaaaaatgtatgcagcttctagaatgagtagcagcagagtgcaaggtttatgattagttattaattgtacttttctttttcaaccactgagaaagagaagtgaaatgagttactgtttcaacatcttaaatgtgaaagagcagggtagcgggttgaaatttcattctgatacawatttggaaagagaaaggttgcttttatgaagaatagccgttagtgttttcagatgttctttactgtatcagagaaacctatgattttgctagtagtcgtttccactgtcatgtggtttttcttcttaagttttttaagtcgtgaaggtacacagtgtgttgtgtcatcatcttacttggtgattctcagctacttcattcacagcttcaaatacagggaagggaaagagcgggagaaaagccctttctaaataaaaacatgtataggaaatgcagaataaaactacatgatcttcctttt

SEQ ID NO: 42333 - DNA, 600 bp, Chicken  19866894279086_1
ataaatgtgtggaaaacaaaaacaaaaaacagaggaagagagaaagtaaagctatatctcagttcatctcagttcacctgcaatactaacaagactgaattcaagagttcttaatgatcgtttctgggaaactcccagtccctgtttagaaagatgtgagtttctttttcctcatgaattgtacttaaaacaccatttgtctgtattctagctctaggaacagaaaataaaggctacagccttataaagtaagacttgatagttgtttgagcttcacattttctatacggtttttgaaaycttcgcaaatatattttgcttttaggagtcctgctttgaacatttatacatgacacatagctaaattctgtgaaaaaaaaaagaaaacaaaaaaacacaggttttatttacatttctatgcaagacagaatgacaaaattgcacttaatgattttaaaggtttttatcccctttttgggaatgtgatgatattgcaagcaaaatcttgttcagtctgtgctcttcactgaaaaaatttaccacatatgataaacagaatgtggtaaaaatttggttactcatctgtacacagctcatcca

SEQ ID NO: 42334 - DNA, 600 bp, Chicken  19866894279091_1
caattggttctcctctattgccactctgcatacagcacacacagacgtgttccatgggtgtcccaaagggagggggagatgaggcaaagccctgactgtggtgcacgaggactgattttgagaacaagcattcattttaactgtcccagcactgctgaaacaatgcacataaaagcagtgcatcccccgttcagcagctgggtaaaggtttccgagtggaacgcagagtcccccctgggatagaagagacagagctcatgctggcccagaaagaccatgaaaatctatcctgcacgatcrcccagcccaggagctgaattcaatattccctgctacaatccagtgtcttcagactgatcggtcagctctttcaagacattcagccatccttaccgaggtccagtattgcctgagacagcagaaatgtgagcaggatccagcttggcaggcacaggatcagcccaccaggtaggcagcccttcccagccccttgcttccagaaaaggccagggcagaaccacacaacagaagtaaacaggaccagaaccccccaccctgctcctaaaccctctgagtgcaccctgccctaccccaacatca

SEQ ID NO: 42335 - DNA, 599 bp, Chicken  19866894279098_1
  misc_feature (1)..(47): n is any nucleotide
nnnnnnnnnnnnnnnnnnnnnnnnnnnnnnnnnnnnnnnnnnnnnnnaaatattagttacggattaaagtacaactatttaaaacaataaacaatcccaataatattaagcagtttccagtacttgtgaacacgtgttttagcttcaacacaagtggcagttgcattgatgacagtcaatacaagtctgttcaaaacttctgcactgaagaagggcaaggatcctcctgagatgctttatacagatctaaagcaacaagaagtgaggggagctgaacggaagtttgaattttaaacatawaaatgccatgaaatctggaagatcacagccctgaggtctcaaaatagccaaagaacaagttcaaagaacaagaggttttcatgagtgtcmcaggagagcattcgggaggtatttcaagttgtgtcrgcccactcgagctaagaaaccacatttgcataagtttgtataacttctgtattttcaggggctgaagaacatgcctaacaggagcaggaattagaagaacactgtagtgaataaattcatatgccttaggctcagctagcacaggttattattttcttctttcttctatgtcg

SEQ ID NO: 42336 - DNA, 600 bp, Chicken  19866894279098_2
acaatcccaataatattaagcagtttccagtacttgtgaacacgtgttttagcttcaacacaagtggcagttgcattgatgacagtcaatacaagtctgttcaaaacttctgcactgaagaagggcaaggatcctcctgagatgctttatacagatctaaagcaacaagaagtgaggggagctgaacggaagtttgaattttaaacatawaaatgccatgaaatctggaagatcacagccctgaggtctcaaaatagccaaagaacaagttcaaagaacaagaggttttcatgagtgtcmcaggagagcattcgggaggtatttcaagttgtgtcrgcccactcgagctaagaaaccacatttgcataagtttgtataacttctgtattttcaggggctgaagaacatgcctaacaggagcaggaattagaagaacactgtagtgaataaattcatatgccttaggctcagctagcacaggttattattttcttctttcttctatgtcgatatgttacacgttatttattttcacccatttctagttgaaatgtacatgtcaaaataaccaaagtatgttacagccagtaaggaaaagga

SEQ ID NO: 42337 - DNA, 600 bp, Chicken  19866894279098_3
tgaacacgtgttttagcttcaacacaagtggcagttgcattgatgacagtcaatacaagtctgttcaaaacttctgcactgaagaagggcaaggatcctcctgagatgctttatacagatctaaagcaacaagaagtgaggggagctgaacggaagtttgaattttaaacatawaaatgccatgaaatctggaagatcacagccctgaggtctcaaaatagccaaagaacaagttcaaagaacaagaggttttcatgagtgtcmcaggagagcattcgggaggtatttcaagttgtgtcrgcccactcgagctaagaaaccacatttgcataagtttgtataacttctgtattttcaggggctgaagaacatgcctaacaggagcaggaattagaagaacactgtagtgaataaattcatatgccttaggctcagctagcacaggttattattttcttctttcttctatgtcgatatgttacacgttatttattttcacccatttctagttgaaatgtacatgtcaaaataaccaaagtatgttacagccagtaaggaaaaggaaaggtgaggactaaacagcagactattccacaaagc

SEQ ID NO: 42338 - DNA, 600 bp, Chicken  19866894279099_1
tttgaacgaaacactattgctcagtggatacttctaactgacgtttatgcacactataaaagacaacaggcaagtgatattaaatcgtcttttatcagatcactacaagaggcaaccactctttgagaaagcacccaaaataaagaataaaataaagagcaaatacagttcttaatactgttccacctaaggaagagtattcaattgccacaggaaagtttccaaaacaaactgttaatgatgcaatcccaattctatctgctttaataccctaaaatgttgataaattgccaaatatcrggtatttttgtactatactaaatgaacatcttaagatatctttaaaaacagtgagacaaactgtggaggttcatacttatgcaaaactcactcttgccaggatagacatttgttttactgtaaaaaacatcatttttaattaccacttttcagtagatttcagactgctttatgaagcatggtaggaaagttacatgggttatcttttggactctacagtagcagtatacattgctgtaacagacctgaagacagagaaccttgctgtaccacatgtcaaataaaaatacataaattgaa

SEQ ID NO: 42339 - DNA, 600 bp, Chicken  19866894279100_1
tcttcactcagtttgcaaaaatgtatctgacgaacttagctggaaaatcagacatctgtgctgaaattctgaaactttcccagccaaaagtgaagccatgaggaaaatttttaatgtataaatacatttgtttgtttaatctaccactcaacactgagctactaccaacactctccaattcagccattgctttgtctagctgtgtctcaaaaactttcacagatggagataccatctgcaatgattccagtgctacagtaccctttcagtaaaaggaaaaaaaaaaagtgctcctatttyaccctttctgatgtstaatttgaacctcctaagatacwactgagaaaaccgcatctccatgatcttggtaactgctctgaataactgtggactgctcttagatcaccctttagccacctctttataaggctaaatcccagctcctgaacctctctcctcacaggctgcatgttgcaggaccctgaccgtctcagtagctcttttctggacttttccagttctttctcatcctccttcaactagtcacaaaattccaggagtagcctcttcagtatttcaggtggtggaaggtaacacctt

SEQ ID NO: 42340 - DNA, 600 bp, Chicken  19866894279100_2
caaaaatgtatctgacgaacttagctggaaaatcagacatctgtgctgaaattctgaaactttcccagccaaaagtgaagccatgaggaaaatttttaatgtataaatacatttgtttgtttaatctaccactcaacactgagctactaccaacactctccaattcagccattgctttgtctagctgtgtctcaaaaactttcacagatggagataccatctgcaatgattccagtgctacagtaccctttcagtaaaaggaaaaaaaaaaagtgctcctatttyaccctttctgatgtstaatttgaacctcctaagatacwactgagaaaaccgcatctccatgatcttggtaactgctctgaataactgtggactgctcttagatcaccctttagccacctctttataaggctaaatcccagctcctgaacctctctcctcacaggctgcatgttgcaggaccctgaccgtctcagtagctcttttctggacttttccagttctttctcatcctccttcaactagtcacaaaattccaggagtagcctcttcagtatttcaggtggtggaaggtaacaccttcttcatctgcaatct

SEQ ID NO: 42341 - DNA, 600 bp, Chicken  19866894279100_3
gctggaaaatcagacatctgtgctgaaattctgaaactttcccagccaaaagtgaagccatgaggaaaatttttaatgtataaatacatttgtttgtttaatctaccactcaacactgagctactaccaacactctccaattcagccattgctttgtctagctgtgtctcaaaaactttcacagatggagataccatctgcaatgattccagtgctacagtaccctttcagtaaaaggaaaaaaaaaaagtgctcctatttyaccctttctgatgtstaatttgaacctcctaagatacwactgagaaaaccgcatctccatgatcttggtaactgctctgaataactgtggactgctcttagatcaccctttagccacctctttataaggctaaatcccagctcctgaacctctctcctcacaggctgcatgttgcaggaccctgaccgtctcagtagctcttttctggacttttccagttctttctcatcctccttcaactagtcacaaaattccaggagtagcctcttcagtatttcaggtggtggaaggtaacaccttcttcatctgcaatctgctggatacagtgcccctaatgc

SEQ ID NO: 42342 - DNA, 600 bp, Chicken  19866894279101_1
catttttcagtatggtcatcaccattagctgagtacccatcaactcctgtgctgagtgacagaaattttacatcagtctgttacagtgagaattaagtgtgttcaaacaaggtttagcatacactgagatgctacatgtttgaggaaggaactgtgttgtctgacatgcatattttcacatattatctttaaaagtccagattcctgcatcacagctcaagataaatctttttcatatgatgctttttcctcccaactcaatttaatctatttatttttcattaaatagccacaatgctrttttgtaaatatactaatctcttaataagatgatggttaaatgtgaaccacagtaaagtaaggaaattttattgtatctctattatttatttgcctattaactggtgactttaatagtctcattacttacaaatactctgagaagtaaacgtagtttagaaatgattatcacagtgtaatgtgcatgtactattgataaaaagatcttgactcttaaaatgcagaaaacaaaattagtgtttattatttaataagtagctatcagtaattttatttctttaatttttaatattttaaaga

SEQ ID NO: 42343 - DNA, 600 bp, Chicken  19866894279103_1
aggaagatgaagatgggcctgggtgccaagctcctaaatcacagctcggtgctgtaaccgcctgtttcacctctggccatccaggccccagatgtctctcagtgcagaaggagctgaagaagagccagggcataaccatcagggaacagtgaaagatgcttcatttccaatctgcaggggttcttgtggttgcacaagcagcttaaaaaaatgagacaaactacctaaattctttactcgaagagtgatgtggccctggcacaggatgcccggagagctgcagtgccccattcctggagrtgcttgaggccaggctggatgggccctgggcagcctgagctggtaggcggtgtctcaccaggaggttggagctcagtaagctttgagggaggttccttcyaacccaagccattctgtgattctgtgatccctgggaatcctgctcccggtcagtacccaagatgtgtatgaggggcctctcagtgggacatagcttgccacctgttttgcagcagcgtgaggagctctgctgagcacaacgcagcagccagggacgctgctttcccacaggaagcgctggacacagagataagctcctcc

SEQ ID NO: 42344 - DNA, 600 bp, Chicken  19866894279103_2
agtgcagaaggagctgaagaagagccagggcataaccatcagggaacagtgaaagatgcttcatttccaatctgcaggggttcttgtggttgcacaagcagcttaaaaaaatgagacaaactacctaaattctttactcgaagagtgatgtggccctggcacaggatgcccggagagctgcagtgccccattcctggagrtgcttgaggccaggctggatgggccctgggcagcctgagctggtaggcggtgtctcaccaggaggttggagctcagtaagctttgagggaggttccttcyaacccaagccattctgtgattctgtgatccctgggaatcctgctcccggtcagtacccaagatgtgtatgaggggcctctcagtgggacatagcttgccacctgttttgcagcagcgtgaggagctctgctgagcacaacgcagcagccagggacgctgctttcccacaggaagcgctggacacagagataagctcctccacatgaacacacagataatagcaaatctccagcagccagcaacatgaagcacagcagccacggcagctgccgggtacatgggggctctgacatatgcttt

SEQ ID NO: 42345 - DNA, 599 bp, Chicken  19866894279105_1
  misc_feature (1)..(157): n is any nucleotide
nnnnnnnnnnnnnnnnnnnnnnnnnnnnnnnnnnnnnnnnnnnnnnnnnnnnnnnnnnnnnnnnnnnnnnnnnnnnnnnnnnnnnnnnnnnnnnnnnnnnnnnnnnnnnnnnnnnnnnnnnnnnnnnnnnnnnnnnnnnnnnnnnnnnnnnnnnnnntagcaagaaaaacgctggaaccactttatcagcaacttctatcatttgaagaaagtccccaaggaaaagttttacaggtaatttgcattactgttcttaatctgagaacatctcttgttcagttctcactgagaaatttacaraaatctttcacgcttcatttgacaagttttactatttcaaagccttgttgagtacagaaatactagagtaacacctactgatgattagcaaattgaaagtgctagagaaaagttaactatatattattttgcctttactatgtgtgcttcttatctcagtgggctttctttggtattacggataaatactcagttacttcccagctcatttctgccgctgtatcttggtaatgtatgctgaaataacctgtatcagcagtggaattgttcaatccttactgtgtataattaaataaaag

SEQ ID NO: 42346 - DNA, 599 bp, Chicken  19866894279113_1
  misc_feature (1)..(16): n is any nucleotide
nnnnnnnnnnnnnnnnatgctttttcttgctatttcgttggtgttaagtaactcttttcagatgccccttcagccaaaagaaaactatagaggataaatacagttaaagactcttttttttttcccagaatgggaaatatctgtctgccaccctcctctagctgtgaggacagcatgaaaaccacctgcagtcttattttcagggggactgaacagtctgagcttccagtggctgcaaatggagccacgcattcccagtatatctgagaatggggcactgctctgtgccccactgctctsagyatcagygtctggtgcttcccgactgcctttgagggctttgcttcaggtgtgagcccgacttggaggaaagtctggtgtcytgcagggcactggggaagctttgtgctagaagtggttgaaccatccgagccccttaaggtctttccacttcttccttattcggtcatacaggtttctctgcactttttccaccctccccccattgcctctccctttccccagcagtaggtagccacacattttgattgaggtttaatctcctttcttccttcctttgcaaacccacctcctcccgc

SEQ ID NO: 42347 - DNA, 599 bp, Chicken  19866894279113_2
  misc_feature (1)..(13): n is any nucleotide
nnnnnnnnnnnnnatgctttttcttgctatttcgttggtgttaagtaactcttttcagatgccccttcagccaaaagaaaactatagaggataaatacagttaaagactcttttttttttcccagaatgggaaatatctgtctgccaccctcctctagctgtgaggacagcatgaaaaccacctgcagtcttattttcagggggactgaacagtctgagcttccagtggctgcaaatggagccacgcattcccagtatatctgagaatggggcactgctctgtgccccactgctctsagyatcagygtctggtgcttcccgactgcctttgagggctttgcttcaggtgtgagcccgacttggaggaaagtctggtgtcytgcagggcactggggaagctttgtgctagaagtggttgaaccatccgagccccttaaggtctttccacttcttccttattcggtcatacaggtttctctgcactttttccaccctccccccattgcctctccctttccccagcagtaggtagccacacattttgattgaggtttaatctcctttcttccttcctttgcaaacccacctcctcccgcgcc

SEQ ID NO: 42348 - DNA, 599 bp, Chicken  19866894279113_3
  misc_feature (1)..(7): n is any nucleotide
nnnnnnnatgctttttcttgctatttcgttggtgttaagtaactcttttcagatgccccttcagccaaaagaaaactatagaggataaatacagttaaagactcttttttttttcccagaatgggaaatatctgtctgccaccctcctctagctgtgaggacagcatgaaaaccacctgcagtcttattttcagggggactgaacagtctgagcttccagtggctgcaaatggagccacgcattcccagtatatctgagaatggggcactgctctgtgccccactgctctsagyatcagygtctggtgcttcccgactgcctttgagggctttgcttcaggtgtgagcccgacttggaggaaagtctggtgtcytgcagggcactggggaagctttgtgctagaagtggttgaaccatccgagccccttaaggtctttccacttcttccttattcggtcatacaggtttctctgcactttttccaccctccccccattgcctctccctttccccagcagtaggtagccacacattttgattgaggtttaatctcctttcttccttcctttgcaaacccacctcctcccgcgcccggggc

SEQ ID NO: 42349 - DNA, 600 bp, Chicken  19866894279113_4
actatagaggataaatacagttaaagactcttttttttttcccagaatgggaaatatctgtctgccaccctcctctagctgtgaggacagcatgaaaaccacctgcagtcttattttcagggggactgaacagtctgagcttccagtggctgcaaatggagccacgcattcccagtatatctgagaatggggcactgctctgtgccccactgctctsagyatcagygtctggtgcttcccgactgcctttgagggctttgcttcaggtgtgagcccgacttggaggaaagtctggtgtcytgcagggcactggggaagctttgtgctagaagtggttgaaccatccgagccccttaaggtctttccacttcttccttattcggtcatacaggtttctctgcactttttccaccctccccccattgcctctccctttccccagcagtaggtagccacacattttgattgaggtttaatctcctttcttccttcctttgcaaacccacctcctcccgcgcccggggcgatctgtcagctcaaacgcatcacaaatcaacttgacagtggagatctcccctggagccacagcaccgccagtta

SEQ ID NO: 42350 - DNA, 599 bp, Chicken  19866894279117_1
  misc_feature (1)..(37): n is any nucleotide
nnnnnnnnnnnnnnnnnnnnnnnnnnnnnnnnnnnnncaaagtttgtcacgaagaatcacaatgctgacctagaagtgttccccagcggacaggagattagccattgctacaactccaatggcaatattctctcaggtacttcatagggagaacttgcctcagtaaggtgtgtggagttggcctccaagggaaatctgatttaaagtctctttttaaagttatacagcaataccacagggcatcaaaagagatttcaagttttcttcacactgatttaaggcaactgtgatgctgtcccygctctccctatctcgcagcccacagagcaatcccgttgtccaacagagctcagagcaggagctgctcscttgcagtaactacaaaacccacctcctccagagttgggagagtttagtgtttaaataatcagtctccatccacagctgccagacgcaaagagaagcagcaagaactgataccagacaaagcagaaggacacgaatgtgattaacggtagaaaacagccagagcagagagaggaagacagtgccaggggaggaggaggacagtgtgtgggttcttacttttaactggtcct

SEQ ID NO: 42351 - DNA, 538 bp, Chicken  19866894279117_2
caaagtttgtcacgaagaatcacaatgctgacctagaagtgttccccagcggacaggagattagccattgctacaactccaatggcaatattctctcaggtacttcatagggagaacttgcctcagtaaggtgtgtggagttggcctccaagggaaatctgatttaaagtctctttttaaagttatacagcaataccacagggcatcaaaagagatttcaagttttcttcacactgatttaaggcaactgtgatgctgtcccygctctccctatctcgcagcccacagagcaatcccgtscttgcagtaactacaaaacccacctcctccagagttgggagagtttagtgtttaaataatcagtctccatccacagctgccagacgcaaagagaagcagcaagaactgataccagacaaagcagaaggacacgaatgtgattaacggtagaaaacagccagagcagagagaggaagacagtgccaggggaggaggaggacagtgtgtgggttcttacttttaactggtcctctgggga

SEQ ID NO: 42352 - DNA, 600 bp, Chicken  19866894279122_1
gccatggggggggggaacctgaacctcatctccaggctgagcagctgacagagaagttgttttgatgcacaattccagaaaagtgacaatctctggtggttcggggccaagatgtaaaaggtgctaaaaaagaaatccccagattttgagcaagaggagccggatgggcacaaagcagcgcctgcggggagccctccaaatgctgcaggatggatcctccctgctgcaagcagggcccagcccttcccatctccccataggttgctcagagcacccaaaccaccccacgggcagctctcygtgcccaacacaaccacttctacgtgtgccgggcgcacaggtgcacccctccatcccagtgctggggcgggatgcagccccggggctttgctattttcatgttccctgctggagtgcacagagccagcccgaaatagcaggcgtgagcacgttggcacgggagcgcattggcagccagcatcggcgcggcagcggtgaaaggatttgggcaacgtctcaccatggctacccgggccagggagaagtatgccggctcggggggagggtgctggctcctttcagagaggagaaagccgcgac

SEQ ID NO: 42353 - DNA, 600 bp, Chicken  19866894279139_1
tgtgaacagaccctggtgacctgtactttctgtacaggcttttctggaatctgttcagatcttttactgatagttctcaatttcctgcatgctcaaaccaaagagaagggatggcccttctggccaagtgtgttctgtcttgaccatgtggctgctatttttaagataggaagataggctagttacagtatggctacatcaaatttgatgtaggaactaactctgtgttggataaacatgccaacttggcatttaatatcctataatcattaagtgcattttgtcttattacaggaaatygagctcacagaaaaggctcaaaaagaggaccaggagtttgaagaacttgtagcatttattcagcaacggcttacacagacagaggtaacatatttttgtcctgattcatgaaatattcaaacccataacaagaaatatgaaactaatttaaactaatatttttttagcctgttactctaatcagagacattgaaaatcagacggttttaacagatgaagatgctatctttgaatgtgagattaaaattaactatccagaaattaaactttcatggtacaagggaactcagaaactggact

SEQ ID NO: 42354 - DNA, 600 bp, Chicken  19866894279143_1
gcgtatgaccaaatctagtcagattttcttgaggagaggaaaagaaatattctgttaagaactcagcccgtgttcaaattttaagtttgatttagggaataagagttttccagggtttttctgaataaaggctccaggggctcaaaataagtgtcatttttctgtcctcatctagaaagtggctggagccctactgcaccaaattttagaatcacttgaagtcaagcatgcagtatagaaatctcgtctaaaagtttaaagtttgtgcgaataaactcagcaaaatgtgctatgtaagcyctaaggagttcaggtgtcgtggcagcctgaagcaggcgaggcactgggctctgtgctgaatgatcggcctctgaagtttggcagagctgctgctggttcagcccttacggttaggagcagctcagagatggctgtgaagggctgtgtgctgtcccagcaatagttctttgtttaagaattaaccctttgtcagtggactggatgtttacacaggaatgtcacgttcttgaattaaggaatgctattaattcctgaaatgctggggtgaaaggatcatttattactatgaatacgtgactt

SEQ ID NO: 42355 - DNA, 477 bp, Chicken  19866894279143_2
cagagctgctgctggttcagcccttacggttaggagcagctcagagatggctgtgaagggctgtgtgctgtcccagcaatagttctttgtttaagaattaaccctttgtcagtggactggatgtttacacaggaatgtcacgttcttgaattaaggaatgctattaattcctgaaatgctggggtgaaaggatcatttattactatgaatacgtgacttcatttgcagcttcttgcatagaagtgtcctggtataaaacctgatgctggcagtggaagggaagctcctgcaggacttaaygcagactgtggggaaagcaaccatagtgaaagcagtatggaatgagagcgtgctgtaggagttgattttatagactaggatcactgcacaggaaacttggcttcggagatgggtaagggaaatgatcttgacgcagtcgaatgggcagtaaagcaatccgtacagctttacttacgt

SEQ ID NO: 42356 - DNA, 600 bp, Chicken  19866894279147_1
cactgagactttgtgaagagctcatctgctgaaggttggatgatcttccatttgtcaggtattgagtatgtttgagtacaagtactaggtcaagactttgcgaacattcctcttcatataagagctgtctttctgccgtttattcttctgaagaagttaggctttgcatgatccactcttaactgtcttgtgattgcttcatcctgtctcctcttgaccaggagacttctcatgacttcttgaaggctgctattgaatatgttctgcagttacccaccaaatcctctactcatcatgtarcagtatttttcctctgtccctgagagctcagaaagcacgtcagagttgcaacattggtgtcttgcaatattggatatatgcaatattggatgtttgatcagagtcaatacaactggttgcttaaccaatgaaagttacctgcttagctgcatagggtaatttgagcaagccatcaagaagactacttagtaggttcccctaagaaattctgttctctgatttggtttgaaatcctcttttgggagtgtgtggtacttgacatgttgtcaaattgaggacaaaataaagcacgcacattag

SEQ ID NO: 42357 - DNA, 600 bp, Chicken  19866894279155_1
tgaactgagaaagcagcttatagttttcttgttccttctcttctgctaattgtgctttggtcagagcattctctaaagcttgcctttctttctcaagttcagcttgcagagctgacagttccatctgtaaacacaaacacccttcagattaatagactcatctcatcacccaaatgtgcaacagctatatttctatagagagtaacaatataacaacaccccctaagaaagcaagcatcccaggttaacccatcaccatataacagctagtatttctttagcatttgcagcaccagtcaygatgataatgtttcatctagacctagcatgaacgtgtctttctcactgggaaactaacagatttacattttaatcagagttctacagaatctccaagttttgcctgacacactaaacctaaaagacttggaggggccagggacaaaaacactttgttttgcatttttgtatattcctgaaggtggaataagtcttctaaagaaaaaagaaaaattagctacaacaaacaaagtcaaaaacaaccccgccaacaccatgttcatttctgattaatggaaactgaaccaagatggcagtcac

SEQ ID NO: 42358 - DNA, 600 bp, Chicken  19866894279163_1
aagccagcctcccttccacaaacccaccaggcacagggagccatggagtgctatgctgccctgcagtgcagctgtgctgagtcccctcacgcagatctcctcctgggaaaggatgaaaacaaagcaaggtcccacactcccacactcccgtgcacactgctgtgagccgagcagcttttcactgcagccaagcctctgccataggagatgagatttcattgacacacacagattcccactgatggcatcgagtgctgcaatgtctctccacagctgggacccctccatccccccacctamgagcagaagggctcagagccaggaggagctcacctatagttgtactggaagagcttctggtagacagcatggggcagggagaagcaggcagccagcagccagatcacagcaatgctcacagctccttttgtcagagacatcctttgcttgagtgggttcagaataacctataacacagactgtacaaaggttcttgtctctcataaaagagaactccctccaccaatgcacacagcagaggttttgttttcattttgtttttttaaaacatgatttaatgctatttagaaaataacagcc

SEQ ID NO: 42359 - DNA, 600 bp, Chicken  19866894279167_1
tgtccaaaccatttaagatttagacagtatttacacagattgaagttgtttcttctgccgatatccgaagctaagcctttcgtatgtggcatttcataagaagagtatttatataaatatctgcgtggaaacaataatagattagcagtagctgtctgtttccaaaatgcttgttttgaaaatgcttgcatagatctgtaggcaggtgcacagatattgtttctgtgacctcttcccacggagatcacattcttctacttcagtttatactggatttgaatttggataaagcatattttraaaattctcaagcaaataatacagcaaatatctaaatgatgctattccttgatttctctggagccttgtttcagcctggcatgcttatcttyctagagatctaaatccgagaccttccatgttmctgacctttgctgaacawaacacacggggttgacgaactcaatgastgggcctccctttgactagcagtcttttgtcagcaaggctattgctttaatttggactgatcctgacccagatcagatcaatggcagaactgttaatgatgtcaacagagccaggatttcacccttaccc

SEQ ID NO: 42360 - DNA, 600 bp, Chicken  19866894279167_2
ttcataagaagagtatttatataaatatctgcgtggaaacaataatagattagcagtagctgtctgtttccaaaatgcttgttttgaaaatgcttgcatagatctgtaggcaggtgcacagatattgtttctgtgacctcttcccacggagatcacattcttctacttcagtttatactggatttgaatttggataaagcatattttraaaattctcaagcaaataatacagcaaatatctaaatgatgctattccttgatttctctggagccttgtttcagcctggcatgcttatcttyctagagatctaaatccgagaccttccatgttmctgacctttgctgaacawaacacacggggttgacgaactcaatgastgggcctccctttgactagcagtcttttgtcagcaaggctattgctttaatttggactgatcctgacccagatcagatcaatggcagaactgttaatgatgtcaacagagccaggatttcacccttaccctccacacttacaatggttagcattatcaagaagacattttacaagcagcgttcatcaacattaggggcttcagagagaactcatttgagggc

SEQ ID NO: 42361 - DNA, 600 bp, Chicken  19866894279167_3
gtggaaacaataatagattagcagtagctgtctgtttccaaaatgcttgttttgaaaatgcttgcatagatctgtaggcaggtgcacagatattgtttctgtgacctcttcccacggagatcacattcttctacttcagtttatactggatttgaatttggataaagcatattttraaaattctcaagcaaataatacagcaaatatctaaatgatgctattccttgatttctctggagccttgtttcagcctggcatgcttatcttyctagagatctaaatccgagaccttccatgttmctgacctttgctgaacawaacacacggggttgacgaactcaatgastgggcctccctttgactagcagtcttttgtcagcaaggctattgctttaatttggactgatcctgacccagatcagatcaatggcagaactgttaatgatgtcaacagagccaggatttcacccttaccctccacacttacaatggttagcattatcaagaagacattttacaagcagcgttcatcaacattaggggcttcagagagaactcatttgagggctgatgcctcaagtcaaattatgtgcaacatga

SEQ ID NO: 42362 - DNA, 600 bp, Chicken  19866894279167_4
tagcagtagctgtctgtttccaaaatgcttgttttgaaaatgcttgcatagatctgtaggcaggtgcacagatattgtttctgtgacctcttcccacggagatcacattcttctacttcagtttatactggatttgaatttggataaagcatattttraaaattctcaagcaaataatacagcaaatatctaaatgatgctattccttgatttctctggagccttgtttcagcctggcatgcttatcttyctagagatctaaatccgagaccttccatgttmctgacctttgctgaacawaacacacggggttgacgaactcaatgastgggcctccctttgactagcagtcttttgtcagcaaggctattgctttaatttggactgatcctgacccagatcagatcaatggcagaactgttaatgatgtcaacagagccaggatttcacccttaccctccacacttacaatggttagcattatcaagaagacattttacaagcagcgttcatcaacattaggggcttcagagagaactcatttgagggctgatgcctcaagtcaaattatgtgcaacatgatttagtccaagcagcttt

SEQ ID NO: 42363 - DNA, 600 bp, Chicken  19866894279167_5
ttgttttgaaaatgcttgcatagatctgtaggcaggtgcacagatattgtttctgtgacctcttcccacggagatcacattcttctacttcagtttatactggatttgaatttggataaagcatattttraaaattctcaagcaaataatacagcaaatatctaaatgatgctattccttgatttctctggagccttgtttcagcctggcatgcttatcttyctagagatctaaatccgagaccttccatgttmctgacctttgctgaacawaacacacggggttgacgaactcaatgastgggcctccctttgactagcagtcttttgtcagcaaggctattgctttaatttggactgatcctgacccagatcagatcaatggcagaactgttaatgatgtcaacagagccaggatttcacccttaccctccacacttacaatggttagcattatcaagaagacattttacaagcagcgttcatcaacattaggggcttcagagagaactcatttgagggctgatgcctcaagtcaaattatgtgcaacatgatttagtccaagcagcttttatcatcactagcatttcccctctgccc

SEQ ID NO: 42364 - DNA, 600 bp, Chicken  19866894279177_1
ctcattctgccttttccatttcatctgtacacctgttcatcttgccacatgggaagaaaagtgcagtggcacctctagaaggaaaattacttgcaacataattttttggagaaagaagctgctcactgccccctgggtcttcattgcacacagcccttcagcaacaggaaagcagctgtggtggctggagtgcaacatccttttctttgctctgcaaactcaaaaaatactccatgaggatgatgaacaaatctctgtgcagaatgggagaggtcatgtctgggcagggaggtgggggayggcggggggacatgaaataatcccagcagatgccacttgagacaaggctgyggtaggctgggattagtgccaagaggaaacaggtggcgaaacggcgttgatcagctattacccttgaatctgtttgcaaatcatcacaggcatctccaaagcatttgtgggtttcagacaccgcctgtcccttctaccatttctgggtggggaaagcaatggcagcattgggcacagcacgaatcatatgttcactgtcatgttggaatatacatatgcacggtctttcaccatccactgaccattccc

SEQ ID NO: 42365 - DNA, 600 bp, Chicken  19866894279177_2
ggaagaaaagtgcagtggcacctctagaaggaaaattacttgcaacataattttttggagaaagaagctgctcactgccccctgggtcttcattgcacacagcccttcagcaacaggaaagcagctgtggtggctggagtgcaacatccttttctttgctctgcaaactcaaaaaatactccatgaggatgatgaacaaatctctgtgcagaatgggagaggtcatgtctgggcagggaggtgggggayggcggggggacatgaaataatcccagcagatgccacttgagacaaggctgyggtaggctgggattagtgccaagaggaaacaggtggcgaaacggcgttgatcagctattacccttgaatctgtttgcaaatcatcacaggcatctccaaagcatttgtgggtttcagacaccgcctgtcccttctaccatttctgggtggggaaagcaatggcagcattgggcacagcacgaatcatatgttcactgtcatgttggaatatacatatgcacggtctttcaccatccactgaccattcccctactcaagtctaggggaagctttccatcatggagaatatcctggcaagag

SEQ ID NO: 42366 - DNA, 600 bp, Chicken  19866894279179_1
gttgggttttgctagctgtttacccaggctaaggggtaacttcagaggatctgtgggaccagttctgaaaacagtgtttggtctctaagttattgatggaagtagttggcagtgatggcagcaagtgctggagcagctggaaggtaactgcccacttctccttgtatggccaaagaagcgggattccatcggctggttacaaaacaaagcacactttcatacatagatggaaaaaaaaaaaaatcagggtttttcttgtttggttgaaacaaatccatctcaaatctctgtaagcctttwctaaggcatttctatcccacaagtttctcttctccaaggcagacagacttgtcaggccaactcctcagcatttctgtgcagctgactggtctcctatgggtggactttaaatgagcaaatactatggtgaatttcaggtgccgtagatctataaagacttctcagcaccaccatacaacaggattacttctttgcttcatttataatacttcttctgaggcagactttggtttgctgctttgctgcgacagtacaagccagtcttggatttgtgatagagcycaccttgttttgtgttaa

SEQ ID NO: 42367 - DNA, 600 bp, Chicken  19866894279179_2
aatctctgtaagcctttwctaaggcatttctatcccacaagtttctcttctccaaggcagacagacttgtcaggccaactcctcagcatttctgtgcagctgactggtctcctatgggtggactttaaatgagcaaatactatggtgaatttcaggtgccgtagatctataaagacttctcagcaccaccatacaacaggattacttctttgcttcatttataatacttcttctgaggcagactttggtttgctgctttgctgcgacagtacaagccagtcttggatttgtgatagagcycaccttgttttgtgttaacgatgagaggagagaagtttagcttgactttaagaaggctttcaacacagtttctaccaaagtgctcacagaaaaagtaagaaaggggaactgatggtaagtggatggtaaggggggctgctccttgcctggattttaatgggctgtgatcaacagcataaagtccaactggagaccagtcagtagtggtgtacctcagaggttcacaccaggtttcacactatttagcatcttcattaataatcaggatgttgtgacagagtacatcctcggcaagtctga

SEQ ID NO: 42368 - DNA, 600 bp, Chicken  19866894279179_3
gcataaagtccaactggagaccagtcagtagtggtgtacctcagaggttcacaccaggtttcacactatttagcatcttcattaataatcaggatgttgtgacagagtacatcctcggcaagtctgaagatgatacataaccaggaggatactctggaggatcatgttccatccagagagacctcaccaggatgcagaaatgggctgacaggaaccctgtgaagttcatccagggaaagtacaaatccctgcatgagaggaggaacaacctcatgcatcatgagccagcagtgtgccccrgtggccaagaaggccagtggcatccctgcttgtatcaggaatgctgtggtgagcaggactagggaagtcatcctgcctctgtactcggcactggtgaggcctcaccttgagtactgtgttcagttttgggcacctcagtagagaagggacacggaggtgctggagcaggtccaaagaagggcaacgaggcttgtgaagggcttggagaatctgccctacgaggagagactgaaggaactggggttatttrgtctggggaaaaggaggtctgaggggagaccttattgatcttccaatgtc

SEQ ID NO: 42369 - DNA, 600 bp, Chicken  19866894279179_4
gcatgagaggaggaacaacctcatgcatcatgagccagcagtgtgccccrgtggccaagaaggccagtggcatccctgcttgtatcaggaatgctgtggtgagcaggactagggaagtcatcctgcctctgtactcggcactggtgaggcctcaccttgagtactgtgttcagttttgggcacctcagtagagaagggacacggaggtgctggagcaggtccaaagaagggcaacgaggcttgtgaagggcttggagaatctgccctacgaggagagactgaaggaactggggttatttrgtctggggaaaaggaggtctgaggggagaccttattgatcttccaatgtctgaaaggtgcttacagtgagagcggggctgggctattctcactgctgacaggtgacaggacaaggggaaatagcctcaagttgtgccaggttgttaaatttaggttggatatcaggaaccacttctttacagaaagggtgattaagcactggaataggctccccagggaggtgattgagtcaccatccctggatgtgtttaaaaaccatttggatgtggtactcagggacagtatttagcagagggttgt

SEQ ID NO: 42370 - DNA, 600 bp, Chicken  19866894279180_1
tgctcaacaaggacaaaatcaacattttcttttaagtgagagtgactcaactgtaatgaagttaaaggctccctgtttgacagattatgatgtaatttcaaaacataattgcatctagtactatttggttagacatttttctgatgactacatacgtaaaagtgaatttattaatttcagaatccatgattagccagatccttatctctgcaattaaaaaaaatactcccgtatgccttttgggatggtatttttacacccaggagtatatttgaatgtgagtttttgacaaggacctgwaaaaagtctttggatctcctcacatgaatcccacggctttcacaagatgcccacttcaaagtcccrattatgcagattcctagyttttcaaaatctctgacttgtcagacctacatttctatcaacagctatttcatctcatagagaaaccatttatatcactctttgctcatagactaatattaatgctcaatattctgggtgttttttttttttttcagtgtttgcctctttctttaaagaagaaatggtatttgagcactctacaaatcccttttagttgaatctagaagtcttgcg

SEQ ID NO: 42371 - DNA, 600 bp, Chicken  19866894279180_2
ggctccctgtttgacagattatgatgtaatttcaaaacataattgcatctagtactatttggttagacatttttctgatgactacatacgtaaaagtgaatttattaatttcagaatccatgattagccagatccttatctctgcaattaaaaaaaatactcccgtatgccttttgggatggtatttttacacccaggagtatatttgaatgtgagtttttgacaaggacctgwaaaaagtctttggatctcctcacatgaatcccacggctttcacaagatgcccacttcaaagtcccrattatgcagattcctagyttttcaaaatctctgacttgtcagacctacatttctatcaacagctatttcatctcatagagaaaccatttatatcactctttgctcatagactaatattaatgctcaatattctgggtgttttttttttttttcagtgtttgcctctttctttaaagaagaaatggtatttgagcactctacaaatcccttttagttgaatctagaagtcttgcggggaggtattcctagacatagagttcactgttgcatgctgcttccacamagaagttgtgtcagtca

SEQ ID NO: 42372 - DNA, 600 bp, Chicken  19866894279180_3
ttatgatgtaatttcaaaacataattgcatctagtactatttggttagacatttttctgatgactacatacgtaaaagtgaatttattaatttcagaatccatgattagccagatccttatctctgcaattaaaaaaaatactcccgtatgccttttgggatggtatttttacacccaggagtatatttgaatgtgagtttttgacaaggacctgwaaaaagtctttggatctcctcacatgaatcccacggctttcacaagatgcccacttcaaagtcccrattatgcagattcctagyttttcaaaatctctgacttgtcagacctacatttctatcaacagctatttcatctcatagagaaaccatttatatcactctttgctcatagactaatattaatgctcaatattctgggtgttttttttttttttcagtgtttgcctctttctttaaagaagaaatggtatttgagcactctacaaatcccttttagttgaatctagaagtcttgcggggaggtattcctagacatagagttcactgttgcatgctgcttccacamagaagttgtgtcagtcagtgaaaattactgtggga

SEQ ID NO: 42373 - DNA, 600 bp, Chicken  19866894279180_4
cccacttcaaagtcccrattatgcagattcctagyttttcaaaatctctgacttgtcagacctacatttctatcaacagctatttcatctcatagagaaaccatttatatcactctttgctcatagactaatattaatgctcaatattctgggtgttttttttttttttcagtgtttgcctctttctttaaagaagaaatggtatttgagcactctacaaatcccttttagttgaatctagaagtcttgcggggaggtattcctagacatagagttcactgttgcatgctgcttccacamagaagttgtgtcagtcagtgaaaattactgtgggaggtggaaatacctccgctgcgatcaaataaatgctttccacatgaaagatacttcctcacatctcacacgttgctgcaaaatagtctgcattctactgctcttctgctgaataagcatctctggtttcatttctaatgggaactggatttgctatttactcctaaaaaccaggacaggggtattttaaaaattaatgtgacctgacctgtgagggtctcctgggatttacttcttctcctttatttgtctgaggtaccagtccag

SEQ ID NO: 42374 - DNA, 600 bp, Chicken  19866894279182_1
caaagagtctttgattgcaaactgtattttcacttccttcccatttcttctttcttatctgatctcctttagtttttttttgcttttgtacttctgttgcttccttttattttctccacctctttttctcccaccacacccaactaaaaattaaaacaaaaaaacccacaaaaccttgcccttgctttttttctgggaaattcagcttgctttgtacagtacaatctctgcccctcagagccattcttcaaaccctaaaacatctccctctctttacttcttgaggccagtctgtatagygtgttcgagacctcaaaagggagcagctgttaaagcatgggatctgtaatggactctaagaccaactcttttatttccaatggttcttcagtactcccctttcccctckttttctgcaagccagtgcatgccataatgcttgcctttgatttcagctgaagactgtttggatgctgaagagctattccagctcatcactgctgttcatactgtggccagagcaattaaggcttatttatgtgctcaagccctgacaactgcatggacaaatactgtttttgctactttaaaaagcattac

SEQ ID NO: 42375 - DNA, 600 bp, Chicken  19866894279182_2
ttttctccacctctttttctcccaccacacccaactaaaaattaaaacaaaaaaacccacaaaaccttgcccttgctttttttctgggaaattcagcttgctttgtacagtacaatctctgcccctcagagccattcttcaaaccctaaaacatctccctctctttacttcttgaggccagtctgtatagygtgttcgagacctcaaaagggagcagctgttaaagcatgggatctgtaatggactctaagaccaactcttttatttccaatggttcttcagtactcccctttcccctckttttctgcaagccagtgcatgccataatgcttgcctttgatttcagctgaagactgtttggatgctgaagagctattccagctcatcactgctgttcatactgtggccagagcaattaaggcttatttatgtgctcaagccctgacaactgcatggacaaatactgtttttgctactttaaaaagcattacgaagcaccaaaaaagctttcacttgtcaataacactgccattggaaaagactagcttcttactgggtttaaaaacaaggaacctgtattttgtgtttttattgataaga

SEQ ID NO: 42376 - DNA, 600 bp, Chicken  19866894279187_1
tggctttatatacatacacacacaggtgtctaatgatttctgggagctgaatgtgagacatctttaacatgaacttgatttgcagagatgaggcttgcaacacattatttaagtgcttgatatttcatgtaaagttccaaagctgtgacacctgtgaacctctagaggactttgaccaaaacattcatggcagtttctttttctggcccagtggttttttgtttgtttttctcatgaagagctctgaaagggcctacgttgcagtcagatgtagctgcctctgctgaggaatggggcagragcagtctaccctccactgtgaaagcccagaaatctttagtgatgctttccaaagaaagggagttgaagaaataatttactcatatcactytgacggcaacatttttcttcttctccttcctggctaccgaagtgaaatctttcttttccttggccattatggaacaccatacggatgtctgggatgctggctgtccttcccacactcatctaagcagcttctttcctgcgttaatatctgctttcttctgagaaggcctgtggaataggggtgtcttggttgtgggggctgttagggtg

SEQ ID NO: 42377 - DNA, 539 bp, Chicken  19866894279187_2
ggcttgcaacacattatttaagtgcttgatatttcatgtaaagttccaaagctgtgacacctgtgaacctctagaggactttgaccaaaacattcatggcagtttctttttctggcccagtggttttttgtttgtttttctcatgaagagctctgaaagggcctacgttgcagtcagatgtagctgcctctgctgaggaatggggcagragcagtctaccctccactgtgaaagcccagaaatctttagtgatgctttccaaagaaagggagttgaagaaataatttactcatatcactytgacggcaacatttttcttcttctccttcctggctaccgaagtgaaatctttcttttccttggccattatggaacaccatacggatgtctgggatgctggctgtccttcccacactcatctaagcagcttctttcctgcgttaatatctgctttcttctgagaaggcctgtggaataggggtgtcttggttgtgggggctgttagggtgataagttcaaagcacagcatcagtcacttg

SEQ ID NO: 42378 - DNA, 600 bp, Chicken  19866894279195_1
tgcctacagtttgttattcacgtatacccacagtttaactgtccatctataaatccttatttttagatttagttattactcattatagggaggtgcaattttgagagattttgtttgccataagtgctacaaagcgaaaaaataacgtattaaaggtgaagctttaatttttagaagggtgacagaagtattctattgttgaggatgttaagggttgatgcatttagaggtttcatttttattgacttctattatgcgtcctcagaagcttggacatgcggacagctataattgcacttstgcttaaagacaacaaacaacacagatatgaaaaaaagcaaaatgccactgaatgaccttggagagaaatgcctggggcacagttctgcagcaactgacatcattaactgtgactcttatgcttgggtcctggtataatcagacttcagaggaatgcttcacaggcagcaccttatcagtcggtctcatgcactcattatgatgctctgtcttttcttgagagaacaggggaagatgtaccttgaggcatatcaagcagtgtagcctggaggtattaggaaatcttgacagagtaagaca

SEQ ID NO: 42379 - DNA, 600 bp, Chicken  19866894279201_1
atgattttgtggatgatagatcagtctgcagattgctatagagaagcctgctgttccacaagtaccctgagacatagcatcttttttttcctaataagtatacagctttcacctcgtagtgtcttctaagactatccagggagtgagcactcccctccttcctccttagaagctttgtaaaattaaatctttgcagactgacttacatatgcatctctctcttctgggatttccttcaaaaatcctgcctagagaaaagggaaacaagcatttttatctggctttgaacacacaggaagygtctgcaggaatgtggctttgtgattttttgagtcttttttctgaatacattacttaaggaaactcacacttcccctgtaacatcccaatagtttgtatatgtacagaacaggtcagggagggcacaacagtgcatagttgagcatgaagagaacagggttgcttggcagactgcaggcttctaatccctaagcaagaaatggtaggagggcatggtatgtctctcaagatctttgtgttaacccatttgctggattgaaattgtgttcatggtgtcttccttgagacttttaaaaaagg

SEQ ID NO: 42380 - DNA, 600 bp, Chicken  19866894279212_1
agctagcaccactactcatatttgaaaggaaaataaatgctcttccagagggtctttgtcagtgccattagtacacagctctttctacaaagattacagaaaggagatatgcagtgtagaatctgttagcagccagtagcaagcaaattgcttgtatttcttaggtaactgttaccttatgtcattgtttctggcagcgttgtgctattaaacgtgcatcatcaaataagaaaaaattgcatgtccaaacttatttactggtactgaggaatttgaactgctgccaaacttacagccacygtatgatccacacatttatgcaaggaggcagtgactcactgcagccaaaacaaatgctgtgtccctgcaagatttttccacatgatccatactttctgagggaaagatgcaacttagtacatgccatgtattaagaagatatatgtgaggctagtcaaataaaatagatacctatgtttgaagaacagcrttctgaatttccttgttcattgcttcctatttattcctagggagatgttttagtttaaaaagcagcagatttttgattgctaatcttgtctggaagtgtcctcctgtatt

SEQ ID NO: 42381 - DNA, 600 bp, Chicken  19866894279212_2
ctggcagcgttgtgctattaaacgtgcatcatcaaataagaaaaaattgcatgtccaaacttatttactggtactgaggaatttgaactgctgccaaacttacagccacygtatgatccacacatttatgcaaggaggcagtgactcactgcagccaaaacaaatgctgtgtccctgcaagatttttccacatgatccatactttctgagggaaagatgcaacttagtacatgccatgtattaagaagatatatgtgaggctagtcaaataaaatagatacctatgtttgaagaacagcrttctgaatttccttgttcattgcttcctatttattcctagggagatgttttagtttaaaaagcagcagatttttgattgctaatcttgtctggaagtgtcctcctgtatttcctctgcagatgcacaaggataggtctcccatttaggctttgcagaggaaatgagtgaaaaacagtctctgtttggtcttgtcactaagtagaaatctgaatgcagacatggcgtgagactccatagaataagaaggcagaggagctggatttcagagtggaatcatttcttaatgaacagcctgacag

SEQ ID NO: 42382 - DNA, 600 bp, Chicken  19866894279212_3
tagtttaaaaagcagcagatttttgattgctaatcttgtctggaagtgtcctcctgtatttcctctgcagatgcacaaggataggtctcccatttaggctttgcagaggaaatgagtgaaaaacagtctctgtttggtcttgtcactaagtagaaatctgaatgcagacatggcgtgagactccatagaataagaaggcagaggagctggatttcagagtggaatcatttcttaatgaacagcctgacagatactgaggggactgaccgttattccctgctgtcaacacaaggccacgargaagaaaagctctaggaagaagaaaraaaaaaaaaaaaagaacagtaaacctttatatccctccgttctaataggaattttgattgaatgtgtgtgccwagtgcccagacaggaaagcctgtgagagcgcctaaaattgagcagcaggttgggggtgcagcatgacccaaagcagacttaaacgtgtgacctgaaacagctcctcttcttcccctagggcctgccccaagcrgtgaatggactgggatggtattaccacaattttagaagagactacagaaaagcagccaagcactggtt

SEQ ID NO: 42383 - DNA, 600 bp, Chicken  19866894279212_4
tgattgctaatcttgtctggaagtgtcctcctgtatttcctctgcagatgcacaaggataggtctcccatttaggctttgcagaggaaatgagtgaaaaacagtctctgtttggtcttgtcactaagtagaaatctgaatgcagacatggcgtgagactccatagaataagaaggcagaggagctggatttcagagtggaatcatttcttaatgaacagcctgacagatactgaggggactgaccgttattccctgctgtcaacacaaggccacgargaagaaaagctctaggaagaagraaraaaaaaaaaaaaagaacagtaaacctttatatccctccgttctaataggaattttgattgaatgtgtgtgccwagtgcccagacaggaaagcctgtgagagcgcctaaaattgagcagcaggttgggggtgcagcatgacccaaagcagacttaaacgtgtgacctgaaacagctcctcttcttcccctagggcctgccccaagcrgtgaatggactgggatggtattaccacaattttagaagagactacagaaaagcagccaagcactggttaattgctgaagaactgggaaatg

SEQ ID NO: 42384 - DNA, 600 bp, Chicken  19866894279212_5
ttgctaatcttgtctggaagtgtcctcctgtatttcctctgcagatgcacaaggataggtctcccatttaggctttgcagaggaaatgagtgaaaaacagtctctgtttggtcttgtcactaagtagaaatctgaatgcagacatggcgtgagactccatagaataagaaggcagaggagctggatttcagagtggaatcatttcttaatgaacagcctgacagatactgaggggactgaccgttattccctgctgtcaacacaaggccacgargaagaaaagctctaggaagaagaaaraaaaaaaaaaaaagaacagtaaacctttatatccctccgttctaataggaattttgattgaatgtgtgtgccwagtgcccagacaggaaagcctgtgagagcgcctaaaattgagcagcaggttgggggtgcagcatgacccaaagcagacttaaacgtgtgacctgaaacagctcctcttcttcccctagggcctgccccaagcrgtgaatggactgggatggtattaccacaattttagaagagactacagaaaagcagccaagcactggttaattgctgaagaactgggaaatgcag

SEQ ID NO: 42385 - DNA, 600 bp, Chicken  19866894279212_6
tttgcagaggaaatgagtgaaaaacagtctctgtttggtcttgtcactaagtagaaatctgaatgcagacatggcgtgagactccatagaataagaaggcagaggagctggatttcagagtggaatcatttcttaatgaacagcctgacagatactgaggggactgaccgttattccctgctgtcaacacaaggccacgargaagaaaagctctaggaagaagaaaraaaaaaaaaaaaagaacagtaaacctttatatccctccgttctaataggaattttgattgaatgtgtgtgccwagtgcccagacaggaaagcctgtgagagcgcctaaaattgagcagcaggttgggggtgcagcatgacccaaagcagacttaaacgtgtgacctgaaacagctcctcttcttcccctagggcctgccccaagcrgtgaatggactgggatggtattaccacaattttagaagagactacagaaaagcagccaagcactggttaattgctgaagaactgggaaatgcagatgcatcctacaatcttggagtcctttatttagatgggatttaccctggagtacccggtagaaatcaagtgag

SEQ ID NO: 42386 - DNA, 600 bp, Chicken  19866894279212_7
taatgaacagcctgacagatactgaggggactgaccgttattccctgctgtcaacacaaggccacgargaagaaaagctctaggaagaagaaaraaaaaaaaaaaaagaacagtaaacctttatatccctccgttctaataggaattttgattgaatgtgtgtgccwagtgcccagacaggaaagcctgtgagagcgcctaaaattgagcagcaggttgggggtgcagcatgacccaaagcagacttaaacgtgtgacctgaaacagctcctcttcttcccctagggcctgccccaagcrgtgaatggactgggatggtattaccacaattttagaagagactacagaaaagcagccaagcactggttaattgctgaagaactgggaaatgcagatgcatcctacaatcttggagtcctttatttagatgggatttaccctggagtacccggtagaaatcaagtgagtcaatatttcatggtggtattttttacaytagtgcccaatttacagattttggcttcgttcttgagactgctatgttcactctcttggtttttgatgttttttcttcttttgagtatccctgctgtgcatgtt

SEQ ID NO: 42387 - DNA, 600 bp, Chicken  19866894279212_8
gcctaaaattgagcagcaggttgggggtgcagcatgacccaaagcagacttaaacgtgtgacctgaaacagctcctcttcttcccctagggcctgccccaagcrgtgaatggactgggatggtattaccacaattttagaagagactacagaaaagcagccaagcactggttaattgctgaagaactgggaaatgcagatgcatcctacaatcttggagtcctttatttagatgggatttaccctggagtacccggtagaaatcaagtgagtcaatatttcatggtggtattttttacaytagtgcccaatttacagattttggcttcgttcttgagactgctatgttcactctcttggtttttgatgttttttcttcttttgagtatccctgctgtgcatgtttgtgttcctttaatttagcaacaamgcacttgcagcaaagcatctttttggggctctggccccacctgcacagcctgagttaccttttacaaatcactttcagacacttgagaatgggtgattgtgcacaccaagacatactgagcatcgtgttgttctccagccttctgggaaagaaggtttattcacatttaag

SEQ ID NO: 42388 - DNA, 484 bp, Chicken  19866894279212_9
acaattttagaagagactacagaaaagcagccaagcactggttaattgctgaagaactgggaaatgcagatgcatcctacaatcttggagtcctttatttagatgggatttaccctggagtacccggtagaaatcaagtgagtcaatatttcatggtggtattttttacaytagtgcccaatttacagattttggcttcgttcttgagactgctatgttcactctcttggtttttgatgttttttcttcttttgagtatccctgctgtgcatgtttgtgttcctttaatttagcaacaamgcacttgcagcaaagcatctttttggggctctggccccacctgcacagcctgagttaccttttacaaatcactttcagacacttgagaatgggtgattgtgcacaccaagacatactgagcatcgtgttgttctccagccttctgggaaagaaggtttattcacatttaagttacattactctg

SEQ ID NO: 42389 - DNA, 600 bp, Chicken  19866894279218_1
tgcacgagcacatggcacagccaccattactatggttatgtgtctttttaaatccatcagtaacatttctcaaagttaacataaacttcggccagtcaagtgccatctgctgccctctggtgccgctggcatctctttctttttaaagcatggaaaaagacccttgcaaggtaaatgtaaaccaggttcttaccattgaagtttgaagtaaagcagaaaacatcatatcggctcctctctttatcccagaagccatagtttctgacaccgggcaccgtattcttccctccacagggctcyctgggcttggtgatagggtactgcactgaaccatcactgagccagccagcattgcaccagtccagccctgacctccaggcctcgtagagctggtcgaaggaggcaatgatggagtcctggtccaggcaagcttgctgagcctcatggaagtttaggttgtaacgacccagacgtggagaataggggaaaacaacacctgaaatggcaraaagaggtgagctggggggtaatccccactagaaggggttttgaatcttcaacactgaaagaacggaaggagaagcagcgtttacagttgtt

SEQ ID NO: 42390 - DNA, 593 bp, Chicken  19866894279218_2
taaagcagaaaacatcatatcggctcctctctttatcccagaagccatagtttctgacaccgggcaccgtattcttccctccacagggctcyctgggcttggtgatagggtactgcactgaaccatcactgagccagccagcattgcaccagtccagccctgacctccaggcctcgtagagctggtcgaaggaggcaatgatggagtcctggtccaggcaagcttgctgagcctcatggaagtttaggttgtaacgacccagacgtggagaataggggaaaacaacacctgaaatggcaraaagaggtgagctggggggtaatccccactagaaggggttttgaatcttcaacactgaaagaacggaaggagaagcagcgtttacagttgttagaaggagaaataaaggttaastccatgatgtgttagaatcataaaatcacagaatcattaaggttggaaaagacctctaagatcatctaggcctactgtccatctaccaccagcagtgtccactataccatgtccctacatctgcccttctcttaaaatttccatgaaattgtgtgtgattttagggagacatttatgat

SEQ ID NO: 42391 - DNA, 479 bp, Chicken  19866894279218_3
gcactgaaccatcactgagccagccagcattgcaccagtccagccctgacctccaggcctcgtagagctggtcgaaggaggcaatgatggagtcctggtccaggcaagcttgctgagcctcatggaagtttaggttgtaacgacccagacgtggagaataggggaaaacaacacctgaaatggcaraaagaggtgagctggggggtaatccccactagaaggggttttgaatcttcaacactgaaagaacggaaggagaagcagcgtttacagttgttagaaggagaaataaaggttaastccatgatgtgttagaatcataaaatcacagaatcattaaggttggaaaagacctctaagatcatctaggcctactgtccatctaccaccagcagtgtccactataccatgtccctacatctgcccttctcttaaaatttccatgaaattgtgtgtgattttagggagacatttatgat

SEQ ID NO: 42392 - DNA, 389 bp, Chicken  19866894279231_1
ttcatacatgcttttggttttgtcatgtgcatttgttattattatttattgtttttttttgttgttttttgtttgtttttatccattattattcagtagattcttcccatccctcctcccaccctccttcagcaacagatggtgcagcaggtgcaaatgccactgataatgcaaatgccagcttagtcaatggtacgtcaagaacacctagcttgttttatttgatagatctctctctcaactatgtaagatcccctctttcctctatgaactgtacagatgttttgtgtgtgtcattaycctctgagtgctcctattccataaactctacagtagcttataagagatgccacaaacatgctatgagtgaattaattcattcataagga

SEQ ID NO: 42393 - DNA, 599 bp, Chicken  19866894279232_1
  misc_feature (1)..(91): n is any nucleotide
nnnnnnnnnnnnnnnnnnnnnnnnnnnnnnnnnnnnnnnnnnnnnnnnnnnnnnnnnnnnnnnnnnnnnnnnnnnnnnnnnnnnnnnnnnntacacatcacatccagaagaagcacactgaggcagttttggagcagtgtgacctgaagatgacacacatgaccacatcaccggtgtccccttttctcctatacacactgaaacagagtattgcaatagaaaaatgtatagaagccatcaggatcactgtcagttgtttcacttctcctgagcacccataacatttagtcaaacattttrtaacctattttacctgtacagccaacttcaaagagtcacagaatggtttgagttggaagggactttgaaaggctatctacttcaacccccctgcaatgaacagggacacctacagctacaacagggttctcacagccctgtccaacctgactttgagtggcttcagggacgaggcatcaacttcactgtgaattttgaaaccattcttgtatgaaattaaagacttaaaggatgcttccaattccaaaaccacacaaacagcaggtgattaaaataaataccaccaaggggcatacttt

SEQ ID NO: 42394 - DNA, 600 bp, Chicken  19866894279232_2
aagacttaaaggatgcttccaattccaaaaccacacaaacagcaggtgattaaaataaataccaccaaggggcatactttctgtcacatttgcccatgcattatgtcctcattgaggcacgtggacagcgaccggcaaggtacacacagagcaatgtcagaattccaatgcaggaaactcagcactcctagttaactggggagagttttctcccatcattaactggaaaatgaaagctcgcagttccagcctcatctagccagacacaaaagcaagtgttcaaaggacactcattgatgwggctgcagcagctacacgacacctccgaaacgccagtgacaacacacacctggccaggtgtgggatgcttccccaggatgctccatggtattccaggatctgtgttcaaaaatgaggaggattcacaaaaagcatgcagctgattagctttatcatactggctccttyctgcagccactttccatctcacagatacttcrtatcctaaaatgctgtggtatctttctgagtaacagatgctatttggcttatacaatggctccaagtaccagattgcaatgacttgtaagaaaccagagt

SEQ ID NO: 42395 - DNA, 600 bp, Chicken  19866894279232_3
tgcaggaaactcagcactcctagttaactggggagagttttctcccatcattaactggaaaatgaaagctcgcagttccagcctcatctagccagacacaaaagcaagtgttcaaaggacactcattgatgwggctgcagcagctacacgacacctccgaaacgccagtgacaacacacacctggccaggtgtgggatgcttccccaggatgctccatggtattccaggatctgtgttcaaaaatgaggaggattcacaaaaagcatgcagctgattagctttatcatactggctccttyctgcagccactttccatctcacagatacttcrtatcctaaaatgctgtggtatctttctgagtaacagatgctatttggcttatacaatggctccaagtaccagattgcaatgacttgtaagaaaccagagtacagtgcgtttttctagcacttggcaatgcatgaggctggaagtacaaaataccacatagaaattgatgcatctctaatttttggatggaaggttgctgtataggaagctgggtttgttcagattcctgtatttagaaatgtctgttcacatgaacttcgtggtgcat

SEQ ID NO: 42396 - DNA, 600 bp, Chicken  19866894279232_4
gagagttttctcccatcattaactggaaaatgaaagctcgcagttccagcctcatctagccagacacaaaagcaagtgttcaaaggacactcattgatgwggctgcagcagctacacgacacctccgaaacgccagtgacaacacacacctggccaggtgtgggatgcttccccaggatgctccatggtattccaggatctgtgttcaaaaatgaggaggattcacaaaaagcatgcagctgattagctttatcatactggctccttyctgcagccactttccatctcacagatacttcrtatcctaaaatgctgtggtatctttctgagtaacagatgctatttggcttatacaatggctccaagtaccagattgcaatgacttgtaagaaaccagagtacagtgcgtttttctagcacttggcaatgcatgaggctggaagtacaaaataccacatagaaattgatgcatctctaatttttggatggaaggttgctgtataggaagctgggtttgttcagattcctgtatttagaaatgtctgttcacatgaacttcgtggtgcatgtgaagctgkggtgcgttgcctttctggggca

SEQ ID NO: 42397 - DNA, 600 bp, Chicken  19866894279232_5
tttccatctcacagatacttcrtatcctaaaatgctgtggtatctttctgagtaacagatgctatttggcttatacaatggctccaagtaccagattgcaatgacttgtaagaaaccagagtacagtgcgtttttctagcacttggcaatgcatgaggctggaagtacaaaataccacatagaaattgatgcatctctaatttttggatggaaggttgctgtataggaagctgggtttgttcagattcctgtatttagaaatgtctgttcacatgaacttcgtggtgcatgtgaagctgkggtgcgttgcctttctggggcatttgcacaggcaaagcctgctgtggaaatgccccaacaagatggaaagaccttcaatgtttcttctcaacaggaagggctcaaaaccatatctgaagctctcacatcacaacatggacacacatgaacaaaggtgtgagtcttgaatgtgttacaaaaaccctggctgctattcagtactggtccttccctccaagtcaccacaaactgagggcatgcagaccccttccctactactaggggccacaaaataatcttcacatcagtgcccagccaggg

SEQ ID NO: 42398 - DNA, 600 bp, Chicken  19866894279238_1
caattcattcctctattctatcacataacgtctgagaggatgggacacatctctctcctcatgtgtgaccaaccgcagactggaaagtacttgatattttctttatactgaaggtgcctgattaaatgaagtggcaatctccttttagtgactacataagaaatctagatgactagtttaggttggtgtttgcactgcagacagctataaactgtctacaaactatctaaatcctgctataaactgatgcaaattctgtcaaggtgagatattactctgtaagacctgagaagtgtgttsaagagaaagagaaaacaggatgagtaatatgtataatagaagggcaagcaattttcctgacacctgctccttattaggggactcttctgccaagaactgagctcctaggaattaaaaatgatcacagcctagctcctgggcttcccagattggctgatctgcagcttcctggggcttgccagggttaatacctacaggaatacattgctgcttgagaagaaattaatcttctgtttgtttaactcacaaaagtctactctaaattatttacactttttcatctcaagaaatgtggacact

SEQ ID NO: 42399 - DNA, 599 bp, Chicken  19866894279241_1
  misc_feature (1)..(43): n is any nucleotide
nnnnnnnnnnnnnnnnnnnnnnnnnnnnnnnnnnnnnnnnnnnttgaagttgcttttgattctgcatttgagcaaggatgtgtaaccagaacatgtattttagtatccgttaactgtaatatgaaagaccttatcagttgaggtgccggtgttgttttaaacactgtgtaagcaggaaggcatccaggaatattttccttttgttctgcatttctgtaagagcagggatttggcagggactgggtgagaaagttttcagtttatttgtatatatgttagttttatgatgtttgctagttktaagtatttgaaaattattctttaagtgcttgtagttttgatggaggaatctttaccagtaaaatgcattgttttagaaaccttgagaaaaatcaggagactgcaggtgtgatagatagattccttatggtgtttcatcttggtgctaccagtgaacaggagcagtagcacaagaccagtaatgttcatcagatcagtaacattgatcataatttaggtgacgcaataggaataaggggaaattagaatggtacagttttatgtgattaagtttaggaatacttactttgtcctaaaat

SEQ ID NO: 42400 - DNA, 599 bp, Chicken  19866894279243_1
  misc_feature (1)..(80): n is any nucleotide
nnnnnnnnnnnnnnnnnnnnnnnnnnnnnnnnnnnnnnnnnnnnnnnnnnnnnnnnnnnnnnnnnnnnnnnnnnnnnnnntctgcttgcttcttttttagtgttgtatttggatgtgtggaaagagcacttagtgaatctgtgaagactactgctgctaaaccttgccatatggagcataagcagtcagcgcaatagatcagtacagggtttggcctttactaggcaaaactggtagctgacatgatttgaatgatgtcatcttggccttaggaaggttgaactgcaaacacttcgtaayttcataagctaaagggattttttccctagtctgttatctattgtggatgaccttgaggcctttacccccacctctagccatttactatagctggaaataagtgtcctggctttactgacctgtgtcagacctgtggtctctgaagtcctttatgagttggttccacctttctaaggaatgaatttcatcttgcgtgtggtgtttaccttgcatagcattcgyctggcaatttaggcttactctctacaagcggctttcgtagctgcaaggtttctgagtggaataaaagtcttctgttt

SEQ ID NO: 42401 - DNA, 600 bp, Chicken  19866894279243_2
aggcaaaactggtagctgacatgatttgaatgatgtcatcttggccttaggaaggttgaactgcaaacacttcgtaayttcataagctaaagggattttttccctagtctgttatctattgtggatgaccttgaggcctttacccccacctctagccatttactatagctggaaataagtgtcctggctttactgacctgtgtcagacctgtggtctctgaagtcctttatgagttggttccacctttctaaggaatgaatttcatcttgcgtgtggtgtttaccttgcatagcattcgyctggcaatttaggcttactctctacaagcggctttcgtagctgcaaggtttctgagtggaataaaagtcttctgttttatcttcttgtttgaccagacttggtccttgtttttaaatgagagagtataagtgaatggaagattagtgtacaaagctaagagtaattgttccattaaatatttccttcaggatttcttctgttatcttttttgaagaaaaataatactgtggggtaatgcagttttcatacgcgcaycctttyaatactgaaatatgctttactttaggagattgatgagt

SEQ ID NO: 42402 - DNA, 552 bp, Chicken  19866894279243_3
tgaatttcatcttgcgtgtggtgtttaccttgcatagcattcgyctggcaatttaggcttactctctacaagcggctttcgtagctgcaaggtttctgagtggaataaaagtcttctgttttatcttcttgtttgaccagacttggtccttgtttttaaatgagagagtataagtgaatggaagattagtgtacaaagctaagagtaattgttccattaaatatttccttcaggatttcttctgttatcttttttgaagaaaaataatactgtggggtaatgcagttttcatacgcgcaycctttyaatactgaaatatgctttactttaggagattgatgagtacatcgtacaagccaaagaaagaggctatgagaccatggtgaattttggaagacaggggttgaatttggcagcaaccgcggcagtgacagcagctgtaaaggtaacctgcttacagtgattgcttttgtccttggtgtacttgttgaatatcacgtcgtgccattcaggctcatgccattcctacacaaaaagtttcaactctgcgaa

SEQ ID NO: 42403 - DNA, 546 bp, Chicken  19866894279243_4
tcatcttgcgtgtggtgtttaccttgcatagcattcgyctggcaatttaggcttactctctacaagcggctttcgtagctgcaaggtttctgagtggaataaaagtcttctgttttatcttcttgtttgaccagacttggtccttgtttttaaatgagagagtataagtgaatggaagattagtgtacaaagctaagagtaattgttccattaaatatttccttcaggatttcttctgttatcttttttgaagaaaaataatactgtggggtaatgcagttttcatacgcgcaycctttyaatactgaaatatgctttactttaggagattgatgagtacatcgtacaagccaaagaaagaggctatgagaccatggtgaattttggaagacaggggttgaatttggcagcaaccgcggcagtgacagcagctgtaaaggtaacctgcttacagtgattgcttttgtccttggtgtacttgttgaatatcacgtcgtgccattcaggctcatgccattcctacacaaaaagtttcaactctgcgaa

SEQ ID NO: 42404 - DNA, 599 bp, Chicken  19866894279245_1
  misc_feature (1)..(50): n is any nucleotide
nnnnnnnnnnnnnnnnnnnnnnnnnnnnnnnnnnnnnnnnnnnnnnnnnnaagcctacaggagagctgagtttttcctctggtcttaaatatgtatggtgtagggatataaataaagacattccgaattgtaggatttgaatcaaagtggtgacaattggctacactgaagatgtaataggaggcttccttcttattaacttttggtgctctctagttctggtgctggaaagcagaactgtgtctggttagtgagagcttagccatgcataacttaatctgcacagctgaacaggctgawgtccaggtgtkcttggagtctgccctggaggtaaattctattagcatcatttctctatccatatatacatatatgaatgaatatgcatgtatatcagctatatgtacacattytcccacattagaactgtggtcaggcagtgagcaggtgtatgtcaggatgccttctttctggtctgtgtttctccctgccagcagtctctgatacctctgctgccctcctggatgtacctcggggcagtgaaatgcatcaattgctgacaccctgcatggtgtctgtcggtccctctactgcagctt

SEQ ID NO: 42405 - DNA, 599 bp, Chicken  19866894279245_2
  misc_feature (1)..(39): n is any nucleotide
nnnnnnnnnnnnnnnnnnnnnnnnnnnnnnnnnnnnnnnaagcctacaggagagctgagtttttcctctggtcttaaatatgtatggtgtagggatataaataaagacattccgaattgtaggatttgaatcaaagtggtgacaattggctacactgaagatgtaataggaggcttccttcttattaacttttggtgctctctagttctggtgctggaaagcagaactgtgtctggttagtgagagcttagccatgcataacttaatctgcacagctgaacaggctgawgtccaggtgtkcttggagtctgccctggaggtaaattctattagcatcatttctctatccatatatacatatatgaatgaatatgcatgtatatcagctatatgtacacattytcccacattagaactgtggtcaggcagtgagcaggtgtatgtcaggatgccttctttctggtctgtgtttctccctgccagcagtctctgatacctctgctgccctcctggatgtacctcggggcagtgaaatgcatcaattgctgacaccctgcatggtgtctgtcggtccctctactgcagcttcccataaatat

SEQ ID NO: 42406 - DNA, 600 bp, Chicken  19866894279245_3
aaagacattccgaattgtaggatttgaatcaaagtggtgacaattggctacactgaagatgtaataggaggcttccttcttattaacttttggtgctctctagttctggtgctggaaagcagaactgtgtctggttagtgagagcttagccatgcataacttaatctgcacagctgaacaggctgawgtccaggtgtkcttggagtctgccctggaggtaaattctattagcatcatttctctatccatatatacatatatgaatgaatatgcatgtatatcagctatatgtacacattytcccacattagaactgtggtcaggcagtgagcaggtgtatgtcaggatgccttctttctggtctgtgtttctccctgccagcagtctctgatacctctgctgccctcctggatgtacctcggggcagtgaaatgcatcaattgctgacaccctgcatggtgtctgtcggtccctctactgcagcttcccataaatattgtctttggctgattgggaaagcctgttcatttccygtactctagggatctgaacctttcccaggatggtgagtgctggtgggcaacaacctggcaggcaagt

SEQ ID NO: 42407 - DNA, 600 bp, Chicken  19866894279245_4
tcatttctctatccatatatacatatatgaatgaatatgcatgtatatcagctatatgtacacattytcccacattagaactgtggtcaggcagtgagcaggtgtatgtcaggatgccttctttctggtctgtgtttctccctgccagcagtctctgatacctctgctgccctcctggatgtacctcggggcagtgaaatgcatcaattgctgacaccctgcatggtgtctgtcggtccctctactgcagcttcccataaatattgtctttggctgattgggaaagcctgttcatttccygtactctagggatctgaacctttcccaggatggtgagtgctggtgggcaacaacctggcaggcaagtctgagttcagccagagctgctgggcttgaatacagtgctgctgcactctctcactgccagatagcagtctcccacctccacaccagatgcagccagcatcttcatgtgaaattctttttttaaaacaacagatcagcttaaaaatgtgagttttatatgcaagagtttggggggaaggtctttcatataactttcctgatttctggcatttcattctaaaatgatcataatct

SEQ ID NO: 42408 - DNA, 600 bp, Chicken  19866894279250_1
ttttaatgtctagagagaaacaaaaccgcaagtacaccacgaacacagataacatgaatatttaaagatcactggggaccgtcattttcccttaatttcattcactggtgtttcaaaacttctttgagaagattatgaagcctgggattctgcagcagaaggatccatggcacacctcagtgcattgcatcgcacatctcagcaactatttgtctttgaaatgtgtgttttatttcctatttgcatctgtccagctttagctgccagctgactgcctgacagattatcagaggcattttyctggtatcaccccaaaagtcacacttctctgtgccgctccacaggctgaatgagttgcatctcctgtatggtggaaagattctctgaaatagagagtccctcctggagcccgtcagagtgacatcacagatctagaagccgtgctcaccacaaactccgctacatccttaaatggaactgggaaacaaaagttaaaaccagcatggaaaaagtattaattagtttcactgaatgaggaaccacagcttgggtgagcctggtgagttatgaccaagggcaggacagatgttcccctgctcc

SEQ ID NO: 42409 - DNA, 600 bp, Chicken  19866894279250_2
ggaaagattctctgaaatagagagtccctcctggagcccgtcagagtgacatcacagatctagaagccgtgctcaccacaaactccgctacatccttaaatggaactgggaaacaaaagttaaaaccagcatggaaaaagtattaattagtttcactgaatgaggaaccacagcttgggtgagcctggtgagttatgaccaagggcaggacagatgttcccctgctcctaatctgctcatcacacataagcaaggagagcatcactacaaacagagcagctgcctctcagagagcagccycatccagcctcattacttacagcaacaagcccaaaaggggcagcgagaagcagtcagagacccttctagcatcaattccaaagcactttgtgcagcactgttggtgctataacctgyctggtagatgagcacmcacstccaacttctactccaaagtctgaagtgggagaagccccgctgyagtagatagaatggcatcaaatcattctaaaggttctaatacagatttgcagaagtttaacatctacacacaggttggtagcttggtctgtctcagtggcaaagtacttgtctacatta

SEQ ID NO: 42410 - DNA, 600 bp, Chicken  19866894279250_3
agttaaaaccagcatggaaaaagtattaattagtttcactgaatgaggaaccacagcttgggtgagcctggtgagttatgaccaagggcaggacagatgttcccctgctcctaatctgctcatcacacataagcaaggagagcatcactacaaacagagcagctgcctctcagagagcagccycatccagcctcattacttacagcaacaagcccaaaaggggcagcgagaagcagtcagagacccttctagcatcaattccaaagcactttgtgcagcactgttggtgctataacctgyctggtagatgagcacmcacstccaacttctactccaaagtctgaagtgggagaagccccgctgyagtagatagaatggcatcaaatcattctaaaggttctaatacagatttgcagaagtttaacatctacacacaggttggtagcttggtctgtctcagtggcaaagtacttgtctacattatattttccatatttaaagattataaagccacaactaatgtttttactcactagtcatcacgctagcataaaaacagtgagatgtccgttatacatataaacaaaataagcacactgg

SEQ ID NO: 42411 - DNA, 600 bp, Chicken  19866894279250_4
gaaaaagtattaattagtttcactgaatgaggaaccacagcttgggtgagcctggtgagttatgaccaagggcaggacagatgttcccctgctcctaatctgctcatcacacataagcaaggagagcatcactacaaacagagcagctgcctctcagagagcagccycatccagcctcattacttacagcaacaagcccaaaaggggcagcgagaagcagtcagagacccttctagcatcaattccaaagcactttgtgcagcactgttggtgctataacctgyctggtagatgagcacmcacstccaacttctactccaaagtctgaagtgggagaagccccgctgyagtagatagaatggcatcaaatcattctaaaggttctaatacagatttgcagaagtttaacatctacacacaggttggtagcttggtctgtctcagtggcaaagtacttgtctacattatattttccatatttaaagattataaagccacaactaatgtttttactcactagtcatcacgctagcataaaaacagtgagatgtccgttatacatataaacaaaataagcacactggaaaacaggattgtgca

SEQ ID NO: 42412 - DNA, 600 bp, Chicken  19866894279250_5
aagtattaattagtttcactgaatgaggaaccacagcttgggtgagcctggtgagttatgaccaagggcaggacagatgttcccctgctcctaatctgctcatcacacataagcaaggagagcatcactacaaacagagcagctgcctctcagagagcagccycatccagcctcattacttacagcaacaagcccaaaaggggcagcgagaagcagtcagagacccttctagcatcaattccaaagcactttgtgcagcactgttggtgctataacctgyctggtagatgagcacmcacstccaacttctactccaaagtctgaagtgggagaagccccgctgyagtagatagaatggcatcaaatcattctaaaggttctaatacagatttgcagaagtttaacatctacacacaggttggtagcttggtctgtctcagtggcaaagtacttgtctacattatattttccatatttaaagattataaagccacaactaatgtttttactcactagtcatcacgctagcataaaaacagtgagatgtccgttatacatataaacaaaataagcacactggaaaacaggattgtgcattaa

SEQ ID NO: 42413 - DNA, 600 bp, Chicken  19866894279250_6
agcctggtgagttatgaccaagggcaggacagatgttcccctgctcctaatctgctcatcacacataagcaaggagagcatcactacaaacagagcagctgcctctcagagagcagccycatccagcctcattacttacagcaacaagcccaaaaggggcagcgagaagcagtcagagacccttctagcatcaattccaaagcactttgtgcagcactgttggtgctataacctgyctggtagatgagcacmcacstccaacttctactccaaagtctgaagtgggagaagccccgctgyagtagatagaatggcatcaaatcattctaaaggttctaatacagatttgcagaagtttaacatctacacacaggttggtagcttggtctgtctcagtggcaaagtacttgtctacattatattttccatatttaaagattataaagccacaactaatgtttttactcactagtcatcacgctagcataaaaacagtgagatgtccgttatacatataaacaaaataagcacactggaaaacaggattgtgcattaaaattgtattttatgctgtgttttcatatttcaaaagatgctctt

SEQ ID NO: 42414 - DNA, 600 bp, Chicken  19866894279253_1
gccctgagaacaacaagggcccatctgtgttcacgaaggactcacctctgcacgtgcagtggcagctctcagagcagccttcttcatttccactctcctctctttttgttgttgctgtcgtcttgctatcgagcaagaaaagccataaattcattttgtcaacagcaaaaccacggaaacatgagtaccataaaaaccgatggcagacaaaagacacgggcaattcggctaggaggcctcccagggaaggctatttccagtgggatgtgttaaagaccatcacagagttaatgggaaaakatggggttacacattttggcctttggacttggtagccttcaacacttttcccttctctgcagagagaaggaaaaagcaaagcaaaccctaagcaaactctgtgtgtttgataaaggcagcacctcaccaggacagctacagcatcttcttacctcttagctttgaggtctggaaccgttcagtccgcactggggcaggcccagggtgtgctgctggagctggcacaccgcctctgctctgatatgggctctgaacttttgccccatggcactccaccttcacttgtttcttggcagacca

SEQ ID NO: 42415 - DNA, 600 bp, Chicken  19866894279253_2
tcaacacttttcccttctctgcagagagaaggaaaaagcaaagcaaaccctaagcaaactctgtgtgtttgataaaggcagcacctcaccaggacagctacagcatcttcttacctcttagctttgaggtctggaaccgttcagtccgcactggggcaggcccagggtgtgctgctggagctggcacaccgcctctgctctgatatgggctctgaacttttgccccatggcactccaccttcacttgtttcttggcagaccaccactctgctttttgctcctcttcgtccactcccttgygctttcttgcagccacggtcttggagaaggagcggcagtcgactgcaggggaaaggtcttccccctgtgctgggacctgctgttccaggaagcctcccagcctggagaggagctttcaggtagatcctgccatttggcccagcacctctccctgtcaaaattaagaaaggggaagcaacaagagttaaagagagcccaacaactactctcagtctgccaaccaaaccaaaccaaaccccagggattaagacatcaagcaacacgcagtgacaacagccccaggaaaggacagacagaaag

SEQ ID NO: 42416 - DNA, 600 bp, Chicken  19866894279253_3
aagcaacaagagttaaagagagcccaacaactactctcagtctgccaaccaaaccaaaccaaaccccagggattaagacatcaagcaacacgcagtgacaacagccccaggaaaggacagacagaaagcctaactagaaagaccgtgcaccaaacccagatgcctgttgtgtgtctgtacctctcttcagtgctgtgccacacttggtgctcctcccctgccttcctgcaaggcgacgcttcactgcaaggccgcttgcatcaccttctgacagaaaaaggacaagaaatacataaagarcatctctttggaggaagattttagcccagcaaaccacaaacttctcttcaagagcagtttcttctagttgcccttctgctgctacagcgttgcaccatttctgcagtccgcacagatctgcagtgccctttcctctcccctccatcacacacaccccttcatgcagccctctttagaagcaggtacccacaccacagctcataagagcttcttacctggggaggctttccgtttctccccttgcccagcaccattccatggacacgcagactccatccctacaacggattgtgtgttgat

SEQ ID NO: 42417 - DNA, 600 bp, Chicken  19866894279255_1
attaaaaggccttggctctgataaaaacaagtaccaattagtggtgtgtgctttaaaggtgataccggatctagtttagaacaggaagaatccaaatttcatattgtgcacagcaagatggcaaagcagcttaagttctgagagctcctggtgagacagtgggtatgcaatgatgtgagctggtgtgcgggctaatggctagtgaagctacacatggctggcctgtaagtctgcctgactgtgcactttctggagagtctctcccctgtagtgctgtggcatcattgcagtgtgcgactyggggcaccttgctgcaagacccaagtaagctggaatgagtccagagaaaggccacaaagatgctaaagggattagagggaatgacctatgatgaggaaaggtgaaaagaatgaaatgtttagaacctctaagcttgttacatgggcacagaaatagtaacggagtttcctgtgccagcgcgaaggagagttggatcatctctctctccttttactttcctattaaggtaactagagctgagcaaaatggctgttcatcactttgaactctttgcaaaaaaaatgtttaactgttcttgaa

SEQ ID NO: 42418 - DNA, 600 bp, Chicken  19866894279268_1
atggatggagagctcttcccagttctgctctcattgcatcctctgttgtttttttcttgagcatatgaaccattggtggaatgttcagagttgaaatgaacaacaaaaatcaggtgttgacaaagtgtggttcatgcaataccacagatgagatagtttttctctactgcaccagctctttactgttgtctatacaagtttggaaatgaaaaaaaaagtttaatgcattgtgctacaagaaatgtgtcttttgccagatgaatgcagatgatcgtgccaggacaggagtattttgtaackggaaaacagctgaaaatagaaaaaagaaaggaagtgcattccttccgtgccttaaattttctgtaatccttcaagtacaatcagttgcactgatgaactgagcattatacacagtgcaaggtcaaagaccagattgaataacttagacrtgcacatgcagtaccagagacagtgaaaaataggtcagcatctttctttctttgtattttttcttgtttcatgtccagagccaaactctgatgtaaattgaactcagttctgattaaggtcttatctagcctctgttaaactcagtaccca

SEQ ID NO: 42419 - DNA, 600 bp, Chicken  19866894279268_2
gagatagtttttctctactgcaccagctctttactgttgtctatacaagtttggaaatgaaaaaaaaagtttaatgcattgtgctacaagaaatgtgtcttttgccagatgaatgcagatgatcgtgccaggacaggagtattttgtaackggaaaacagctgaaaatagaaaaaagaaaggaagtgcattccttccgtgccttaaattttctgtaatccttcaagtacaatcagttgcactgatgaactgagcattatacacagtgcaaggtcaaagaccagattgaataacttagacrtgcacatgcagtaccagagacagtgaaaaataggtcagcatctttctttctttgtattttttcttgtttcatgtccagagccaaactctgatgtaaattgaactcagttctgattaaggtcttatctagcctctgttaaactcagtacccaaaggaaaggcgttacttcattccactctatctggaaggcattgggctcctagtgaataaccatgttacartgtattttaacacaactttctggtgagtttgggttccaggatatacagcttcattttaaaacaaaaagcactggtaata

SEQ ID NO: 42420 - DNA, 600 bp, Chicken  19866894279268_3
tcaagtacaatcagttgcactgatgaactgagcattatacacagtgcaaggtcaaagaccagattgaataacttagacrtgcacatgcagtaccagagacagtgaaaaataggtcagcatctttctttctttgtattttttcttgtttcatgtccagagccaaactctgatgtaaattgaactcagttctgattaaggtcttatctagcctctgttaaactcagtacccaaaggaaaggcgttacttcattccactctatctggaaggcattgggctcctagtgaataaccatgttacartgtattttaacacaactttctggtgagtttgggttccaggatatacagcttcattttaaaacaaaaagcactggtaatatagtgagatatgcaaagcagcttgaagcctacagatattcaagaggaagtgattgagggtgatcatgctatggagggcttttagtttgagctgaaggaagtgggtgtgggaaaaattccacgttacctacttaatgttaatttaagagatattctttgctgagtgtttgacaggatgaaatttgaattctaatttccagagaaggcaaaggcatttatggc

SEQ ID NO: 42421 - DNA, 569 bp, Chicken  19866894279276_1
ataagagctacaagggaggttgatgtattttttcctcatactacgatgaaattgggattcaataagtaaatgtgacagaatatgcaatttcccatagatttcatgcagcagggcgcttcctgcgtaataaccttaaaccagtactttttttccataccccagctaagatcttttgcctcccatcttatctgaataatagttcatccccataaagtgcagcctgccactttagctgcagcttatcactgcctgatggtacatggaggacaaaagtaattttttcccccctttttctccatraaagacatcttcctgctgcttcctgtaagaaataagcttgagttgtgatgcatgggagaggactaattttagtaggcctaagtctctgtgatgatgcccagctgtatagggcctttaaaagttgtttcactgtgattgctcaaagacacctttccctttggagtccatattgacagctgtagagatggaaggaatactacagtaaaacctgctcctgtgccataggaagaaatctgcatcctaaaagtacttccctaacaggccccaca

SEQ ID NO: 42422 - DNA, 600 bp, Chicken  19866894279307_1
gagaactgttctgcagtagtggagtgtcagtgtttccttcaggaactgtacaggcgtaagcttactcccagaaacggagctgagttctgccatgcggagggcaggtgttgaaggcagcgccatctgctctggctcttcgtcaagtgagaaaagcagcagttaccaaatgcctttgcttatgtgcgacgatccaaggctctgtctgacaggaaagggttaagtgtggatcggtttggggatccatcggacattaaatacagggaagacgagcaggtagaacttctctttttgcagaggagrtgatgagcatggaaggtacatgataatatttatggagcagaacgttgtggggacagggcttgcttaaacaaagcttcctttacttactggatcctgaatgtccatggcatgagcacctacagacgatacccgcgtgtatgaatatacctatacacatccactgatctctgctcagcattatacagcgtagcgattaaaatattgtattccagtcagctattaactaataaggcagtagatactgaggttttcttttgggaggaattagaagttttagctactttttcttgttaccttaac

SEQ ID NO: 42423 - DNA, 600 bp, Chicken  19866894279307_2
ccactgatctctgctcagcattatacagcgtagcgattaaaatattgtattccagtcagctattaactaataaggcagtagatactgaggttttcttttgggaggaattagaagttttagctactttttcttgttaccttaacagagcccccatctgtggagggattcctcatagaagtggaagttaaatgtgttcgtgcttatggagggaaggtttgattttaataaaattaaatacagctgcttttggcagcttctctcacagactggcagctaaaaacaactttatgtagttcgttragcttgggaaaaaaaacgtcagatttatgcattttcagagacagtataatatactgttctttacgagttaactttttctattaagataatttgtggattatttcactgatatatgcaatcctatattcagctacagtgttggtggcacaggaacgctggaaaaattgtccctgcgacataaaagttttatttattgtgttttttctataggtaaagtggaaaactgaagttggctttaagtgtttgcaatctgagaaatgatgtgaaaaagcagctcaactaaatgtacattcttttcga

SEQ ID NO: 42424 - DNA, 517 bp, Chicken  19866894279314_1
  misc_feature (1)..(12): n is any nucleotide
nnnnnnnnnnnntctgatgtggtgtattgttctgtttattgagatttgagaacaccatttctatgaagttggaagtattttaaatcaaataatttatgtttttttaacataagaatgcatagaccacgcgtgtatggctactgtctgctagtttatactggctgaggatgtgggacagatttacagtcatttaagtagcaatcatgtgtttgatttcaactaaaattaagtaaacactcctgattttgatggattcactcatttaaaaacccttagttatctctccagatatgactcatkagagtgactggtgtttacttaaagagcaaatatgraaaacttaggcaaagtgctaagttacatataatcttaagctgacagtcatagataaagtgtcttttagagccatactaaatctggagaaaataatgacaactccaaagtccattatgttggtgtcctaggtctgaccactgccaatagcaagggagctaaaaaaagtgtaagacagacagca

SEQ ID NO: 42425 - DNA, 482 bp, Chicken  19866894279314_2
tctgatgtggtgtattgttctgtttattgagatttgagaacaccatttctatgaagttggaagtattttaaatcaaataatttatgtttttttaacataagaatgcatagaccacgcgtgtatggctactgtctgctagtttatactggctgaggatgtgggacagatttacagtcatttaagtagcaatcatgtgtttgatttcaactaaaattaagtaaacactcctgattttgatggattcactcatttaaaaacccttagttatctctccagatatgactcatkagagtgactggraaaacttaggcaaagtgctaagttacatataatcttaagctgacagtcatagataaagtgtcttttagagccatactaaatctggagaaaataatgacaactccaaagtccattatgttggtgtcctaggtctgaccactgccaatagcaagggagctaaaaaaagtgtaagacagacagca

SEQ ID NO: 42426 - DNA, 600 bp, Chicken  19866894279321_1
gcttatagagaggagattttctaatatttctaaaatgcctgtttgaatttggttctgagatctttccagtggaagtgggagcagactggacatctgcacatcctctgctctccttagaagtctgtagtgctcttgtggctttttcttccccagttcatggccccagtctgcagccgttgtccctgctaataggcacatggaccggtcttaacgcagagaggacagcccctgagaggcatgcagattgtgcactggttgcagaaccaactctcgtcttagggctttgcattcctctttgcyacgtctcagtatttggcctggttctgaagcaatgttttcttcttaggctgagcaaacagattgaagagccagagttagctgtatgtggaaatatgggggaattctccctttcacccacaccctttctagtgatgcgtgtttagaaattccctaccctgaaactagggagcccacagagagcgacttagagcaatagcacatggaggctatttgccatccagatagagtgtgcagctgatgtgtgtttaaggaaatagctttcaggtttgtccttatgaggtgggaaaaaaatacatctaa

SEQ ID NO: 42427 - DNA, 599 bp, Chicken  19866894279333_1
  misc_feature (1)..(235): n is any nucleotide
nnnnnnnnnnnnnnnnnnnnnnnnnnnnnnnnnnnnnnnnnnnnnnnnnnnnnnnnnnnnnnnnnnnnnnnnnnnnnnnnnnnnnnnnnnnnnnnnnnnnnnnnnnnnnnnnnnnnnnnnnnnnnnnnnnnnnnnnnnnnnnnnnnnnnnnnnnnnnnnnnnnnnnnnnnnnnnnnnnnnnnnnnnnnnnnnnnnnnnnnnnnnnnnnnnnnnnnnnnnnnnnnnnnnnnnnnnnccggatgttgtcttgcaatatttaggttgtataaaactatttttggcatctacatcaaacccttwttgctktatttgaatggcatcagtaattgccacttttgggcatgagaagtaatcttttgtacttgctcagtagcrgtcccagtaggctctgtcaactgctctgatgttacttctgatcatgtttgagaatataaataatcaacacaggcttaatgggctaattttatatattttctttttctagccaaaaagacttttcttgggcaaaataagtcattttggggacctttagaactagtagaaaaacttgttcctgaagctgcagagattacggcaagcgttaaggatctcccaggcct

SEQ ID NO: 42428 - DNA, 599 bp, Chicken  19866894279333_2
  misc_feature (1)..(229): n is any nucleotide
nnnnnnnnnnnnnnnnnnnnnnnnnnnnnnnnnnnnnnnnnnnnnnnnnnnnnnnnnnnnnnnnnnnnnnnnnnnnnnnnnnnnnnnnnnnnnnnnnnnnnnnnnnnnnnnnnnnnnnnnnnnnnnnnnnnnnnnnnnnnnnnnnnnnnnnnnnnnnnnnnnnnnnnnnnnnnnnnnnnnnnnnnnnnnnnnnnnnnnnnnnnnnnnnnnnnnnnnnnnnnnnnnnnnnccggatgttgtcttgcaatatttaggttgtataaaactatttttggcatctacatcaaacccttwttgctktatttgaatggcatcagtaattgccacttttgggcatgagaagtaatcttttgtacttgctcagtagcrgtcccagtaggctctgtcaactgctctgatgttacttctgatcatgtttgagaatataaataatcaacacaggcttaatgggctaattttatatattttctttttctagccaaaaagacttttcttgggcaaaataagtcattttggggacctttagaactagtagaaaaacttgttcctgaagctgcagagattacggcaagcgttaaggatctcccaggcctgaagta

SEQ ID NO: 42429 - DNA, 599 bp, Chicken  19866894279333_3
  misc_feature (1)..(160): n is any nucleotide
nnnnnnnnnnnnnnnnnnnnnnnnnnnnnnnnnnnnnnnnnnnnnnnnnnnnnnnnnnnnnnnnnnnnnnnnnnnnnnnnnnnnnnnnnnnnnnnnnnnnnnnnnnnnnnnnnnnnnnnnnnnnnnnnnnnnnnnnnnnnnnnnnnnnnnnnnnnnnnnnccggatgttgtcttgcaatatttaggttgtataaaactatttttggcatctacatcaaacccttwttgctktatttgaatggcatcagtaattgccacttttgggcatgagaagtaatcttttgtacttgctcagtagcrgtcccagtaggctctgtcaactgctctgatgttacttctgatcatgtttgagaatataaataatcaacacaggcttaatgggctaattttatatattttctttttctagccaaaaagacttttcttgggcaaaataagtcattttggggacctttagaactagtagaaaaacttgttcctgaagctgcagagattacggcaagcgttaaggatctcccaggcctgaagtaagtacagtcttttatggcacaagtacttaatacattcctttttgttgtgagaatgatcctgaagaagag

SEQ ID NO: 42430 - DNA, 553 bp, Chicken  19866894279338_1
gctttctgcttgatctctccttctcagaaagtcaactaaatgctgcctgaaagcgtacattcagatgtacatgagttgcttcatgcatatgccttaagcccactatttctctaaacgagcagacctgttgtgcgctgtgctatgtggtttcattggtgcctgcacagtgtgcacagctgagattgctggacacgcggtagctccagctgggccaccagctgcccagacatccccacattcagattatagatgcacacacagtcctcagagtcatccagacaatttctaggaaatctgtaygggcagcagccttacatgtgctattgtattatagctggtcatactctgacttctctcttctttagtctgttgaatggcatcttcttgaaaatgtcgtacctttgtatkacatgtgtatgtattttatatatgtgctttgagaaacagaaatgtgtgtgtttgtatacatatgcctacaggataaataaagttgtgtttcaaactaggtagccggtatgagcatagccctatatgtagctgctctgtacaaata

SEQ ID NO: 42431 - DNA, 445 bp, Chicken  19866894279338_2
ctctaaacgagcagacctgttgtgcgctgtgctatgtggtttcattggtgcctgcacagtgtgcacagctgagattgctggacacgcggtagctccagctgggccaccagctgcccagacatccccacattcagattatagatgcacacacagtcctcagagtcatccagacaatttctaggaaatctgtaygggcagcagccttacatgtgctattgtattatagctggtcatactctgacttctctcttctttagtctgttgaatggcatcttcttgaaaatgtcgtacctttgtatkacatgtgtatgtattttatatatgtgctttgagaaacagaaatgtgtgtgtttgtatacatatgcctacaggataaataaagttgtgtttcaaactaggtagccggtatgagcatagccctatatgtagctgctctgtacaaata

SEQ ID NO: 42432 - DNA, 600 bp, Chicken  19866894279339_1
gatttctttctaacagagaattacatagtcctaccccagtaattgcttcttgcagctaaaacacctgatgcttgtcactgttagacattgaagtagaaagagaacatttcaacatagcaaagggtcccagtgacttgaccaggccctgtacatcttggccaataacaatcatcaaagaataactcttggctgcgtgtgtccttgaactactatcctgcaagtcaggtttgcaagcttgggtgtgtttcttttccctcaacatattctgcatttccagcaaacaactttcatcaccacagktggtgcaataccaatgtgaatcagaaaagctcatttgtctaggagaagataattatatttagcaraaaaatcctattttccaaagggtataaaattttgtttagaaaaatgggttaatttagcttttaatccatacaaaccaaggagatcatcttcaaatattacctgcatatgaacggaggcaataagctgagacatttgcaaaggtttagcaccaatataaattctaggaggggaactggggtagaatccacccaaggctcttcgagtcttctacctgctggcagaggactaacaggg

SEQ ID NO: 42433 - DNA, 600 bp, Chicken  19866894279339_2
tgatgcttgtcactgttagacattgaagtagaaagagaacatttcaacatagcaaagggtcccagtgacttgaccaggccctgtacatcttggccaataacaatcatcaaagaataactcttggctgcgtgtgtccttgaactactatcctgcaagtcaggtttgcaagcttgggtgtgtttcttttccctcaacatattctgcatttccagcaaacaactttcatcaccacagktggtgcaataccaatgtgaatcagaaaagctcatttgtctaggagaagataattatatttagcaraaaaatcctattttccaaagggtataaaattttgtttagaaaaatgggttaatttagcttttaatccatacaaaccaaggagatcatcttcaaatattacctgcatatgaacggaggcaataagctgagacatttgcaaaggtttagcaccaatataaattctaggaggggaactggggtagaatccacccaaggctcttcgagtcttctacctgctggcagaggactaacagggagatgccattttaaaatcacaaaaagcaagaggatccatatgcatcagggtactaacttctacac

SEQ ID NO: 42434 - DNA, 599 bp, Chicken  19866894279343_1
  misc_feature (1)..(85): n is any nucleotide
nnnnnnnnnnnnnnnnnnnnnnnnnnnnnnnnnnnnnnnnnnnnnnnnnnnnnnnnnnnnnnnnnnnnnnnnnnnnnnnnnnnnnattgaatataaaggaagtcattaagtacttccagttcttaaacaacaggagctgacagtgctttattttcactgatttattctcccaaattacttcttttgtagcatctcacttgccaaggaatgcaaaagtgataggaattcatggttagaatttttgtttaaaacaaacaaaaatttgtttcacttttttcttcttcttttcagctgaaactytggggtgtaatggcagtggcaacatcaaagactttcgattgggtgcaagaagaggtagatatgaatgcaaaaatataaaatagataagagaaaacaattttattagacatttattatttttaagtaattacatcatatagtgcattaatacatatgtacacagaaacactgcttaggaagcacttgtgcttataacatgaaagcaatgaaattatctattttctgatttttgggtcaacagtcaastattcacttttaaagaaatatgaattctggcagaatagtaatttttgtaacac

SEQ ID NO: 42435 - DNA, 600 bp, Chicken  19866894279343_2
taaaacaaacaaaaatttgtttcacttttttcttcttcttttcagctgaaactytggggtgtaatggcagtggcaacatcaaagactttcgattgggtgcaagaagaggtagatatgaatgcaaaaatataaaatagataagagaaaacaattttattagacatttattatttttaagtaattacatcatatagtgcattaatacatatgtacacagaaacactgcttaggaagcacttgtgcttataacatgaaagcaatgaaattatctattttctgatttttgggtcaacagtcaastattcacttttaaagaaatatgaattctggcagaatagtaatttttgtaacacctttgaaactacagagctctaatgctgacttgcacatatgcctcttcactttctaaatattgatttttaacttttagctctagattcctgcttcagtcaactattttctgaggaagttcttcttatgccagaaatcacagatgaagggatgcgtctgctcttctggtgcttcagtagaaacaaatggttttctaagctgtcctgatgggtcacacttgtgtcttgccagatacttaatctcacctct

SEQ ID NO: 42436 - DNA, 600 bp, Chicken  19866894279349_1
agaaataaaaagttctgtagattctgttaaagctaaaaacttttaatgtaacagcttgcagtgaggttctcagtgatgtagacattgatgatggacatgatttctctacagctacctgaaaagaggttgtagtgaggtgggtaaggctctgatgcctgacctctctgtgctcaacactaaagcagagaatgcctgtatgtactcacttgggtttatttatgtcttggatgacaagaccagaaggggtacagctgatacttttgttttctttcttgaatatgttcttttctactaagcctmagactgaaatcagaattctttggattatggttagttttcatgtatgacaaaacaaggacaagatacggtgtatcatattttgtcatcttctgggcagcttgtaagtgtactcaattactctgtgttgtgtattgcatatgctttccatacccttctaattctgtgttatgacagactggatgattccatgttgtcaggataccatggggcttttttttgtctttgctttgaaaacatttattctgtttattttttgaacttggtctcctttttttttttttttttctagcgaacacaaac

SEQ ID NO: 42437 - DNA, 599 bp, Chicken  19866894279353_1
  misc_feature (1)..(134): n is any nucleotide
nnnnnnnnnnnnnnnnnnnnnnnnnnnnnnnnnnnnnnnnnnnnnnnnnnnnnnnnnnnnnnnnnnnnnnnnnnnnnnnnnnnnnnnnnnnnnnnnnnnnnnnnnnnnnnnnnnnnnnnnnnnnnnnnnnnnnnaaaacacacagctcacacgagtgctgtcttctgttgcacattctggcccgtgcccctctgaagcagggctgcccagagacatgagccaacacagggcgagcctgaactgccatgctgcacattcacgctgccttgagtcaggtcaacattaaatatgaccacaggsagctcgctggaagatttaagcacatcagctcttgccagccatgcaggtgaatgaaggcttccctccctccctggctctccatagagaccagctccccgctgcctggcttgccagccagccacacgctaattggggctgtcatcaaaagaaatgagtttccaggcgagccgagttcaagcaggcctggatctgaagtgtgcagctgcccattcccttttgtctcccttccccttctgtctttcttcttcttccctctcccctgtttctttttgattttattactgtttgtttttgtatgt

SEQ ID NO: 42438 - DNA, 600 bp, Chicken  19866894279367_1
gtagggagggggaaaacccctgagaattcaatgacaggaaaaaaaaatggtttgtgaagtcagcctcagtttgcgtacctaaaaagcaatatgattgatttgcaaaaacctctagcttcacaaagttcttccatctctaatgagaactaacagcatttttgtccagcttccctgcaaaatattgttctagtgctgaatccatcaacaaaaatggctaagcattagctttcttaatggcctctggcttcgcttgccagcagctgcagatggagtgggctaagcaggactggggctgaagcraggaggcctgttgcagatctcagctgcattgtgctcaattagaaggaagactgaayagtggctttgctcgtgtagtgggaacagagcttgttttaaaatcacaggttgttcctagagctggtaaggcacagatgcctgatccttccacaatctaactcacgtaaaccgttacattcagtgatcaagcatggcaaaagaaggaaaacagtaaagaagggggcaatggtcagagggcatctcagcactgacagcagaagttgtggaatttaagtctttttatctgcctctgccyactgagtg

SEQ ID NO: 42439 - DNA, 600 bp, Chicken  19866894279367_2
aagtcagcctcagtttgcgtacctaaaaagcaatatgattgatttgcaaaaacctctagcttcacaaagttcttccatctctaatgagaactaacagcatttttgtccagcttccctgcaaaatattgttctagtgctgaatccatcaacaaaaatggctaagcattagctttcttaatggcctctggcttcgcttgccagcagctgcagatggagtgggctaagcaggactggggctgaagcraggaggcctgttgcagatctcagctgcattgtgctcaattagaaggaagactgaayagtggctttgctcgtgtagtgggaacagagcttgttttaaaatcacaggttgttcctagagctggtaaggcacagatgcctgatccttccacaatctaactcacgtaaaccgttacattcagtgatcaagcatggcaaaagaaggaaaacagtaaagaagggggcaatggtcagagggcatctcagcactgacagcagaagttgtggaatttaagtctttttatctgcctctgccyactgagtgtgtgactgcaacamacctccactcgcacctgcctgcacaaacccagccttccctct

SEQ ID NO: 42440 - DNA, 424 bp, Chicken  19866894279367_3
ctgaagcraggaggcctgttgcagatctcagctgcattgtgctcaattagaaggaagactgaayagtggctttgctcgtgtagtgggaacagagcttgttttaaaatcacaggttgttcctagagctggtaaggcacagatgcctgatccttccacaatctaactcacgtaaaccgttacattcagtgatcaagcatggcaaaagaaggaaaacagtaaagaagggggcaatggtcagagggcatctcagcactgacagcagaagttgtggaatttaagtctttttatctgcctctgccyactgagtgtgtgactgcaacamacctccactcgcacctgcctgcacaaacccagccttccctctccctctctttgacttccagtgcgtctacacagcacggaggaggtgattttggcacaaaaa

SEQ ID NO: 42441 - DNA, 402 bp, Chicken  19866894279367_4
agatctcagctgcattgtgctcaattagaaggaagactgaayagtggctttgctcgtgtagtgggaacagagcttgttttaaaatcacaggttgttcctagagctggtaaggcacagatgcctgatccttccacaatctaactcacgtaaaccgttacattcagtgatcaagcatggcaaaagaaggaaaacagtaaagaagggggcaatggtcagagggcatctcagcactgacagcagaagttgtggaatttaagtctttttatctgcctctgccyactgagtgtgtgactgcaacamacctccactcgcacctgcctgcacaaacccagccttccctctccctctctttgacttccagtgcgtctacacagcacggaggaggtgattttggcacaaaaa

SEQ ID NO: 42442 - DNA, 600 bp, Chicken  19866894279372_1
tcttctcctttcttctcattcacagaagggaagagtctggggacaaagaaagagtcagtgatgcaactgcaacagtactaatggaaacagctctaaagggagaagaggctcaaggccataaactgacagatactctgttcttgaccaccagtcttgcattacaaatactagcaagataaaccagtttccatgtctgcaatccttatctcagttcccaaatttcacacaacactgttcaggcaaaacagcagaacaatgacgtgtttccagatgcttaatagtttaaagcacaagactgtwtgaactcttgctgggttcacttgattgcacagctttgcttttatgtcacatgtggtgttagaaggagaactcactggaaacacaaccatctgcaaaaaaataaatgaaaaaaggaaccagtactcacacgtattaaagccatttgactttcctattatccatgtggaacagcctcagatgctctagacgtggtgttatctagcaatcctgcactcctcagttcctggaaacatctgagaagacaaccttcagggcaaagcacttcctcaactcttgcatcacagcctcacaagcaggtta

SEQ ID NO: 42443 - DNA, 600 bp, Chicken  19866894279372_2
actggaaacacaaccatctgcaaaaaaataaatgaaaaaaggaaccagtactcacacgtattaaagccatttgactttcctattatccatgtggaacagcctcagatgctctagacgtggtgttatctagcaatcctgcactcctcagttcctggaaacatctgagaagacaaccttcagggcaaagcacttcctcaactcttgcatcacagcctcacaagcaggttattactcctagggagtcttgtgtgacactgcaatataaaggcaaaatatgctgtatgactagaaattcacttwggctttcaccagccttctatttctttcagtgaggctctggtaatgctccatacacaytctgagacatccaagccttctctgtcttaatgttccccatgttaggaataccacaaattcaaagaagataagtttctatttggatagcaagatgcaacacygggacaaaatycttccccgctctcatgtttcaccctgcatcaagcatcagaagccttccatctcacaaagaaaggcaggttgggtttatcacaaagtcacgagatgaagctcagtggcttccattgaacagtatggcgacag

SEQ ID NO: 42444 - DNA, 600 bp, Chicken  19866894279372_3
gtattaaagccatttgactttcctattatccatgtggaacagcctcagatgctctagacgtggtgttatctagcaatcctgcactcctcagttcctggaaacatctgagaagacaaccttcagggcaaagcacttcctcaactcttgcatcacagcctcacaagcaggttattactcctagggagtcttgtgtgacactgcaatataaaggcaaaatatgctgtatgactagaaattcacttwggctttcaccagccttctatttctttcagtgaggctctggtaatgctccatacacaytctgagacatccaagccttctctgtcttaatgttccccatgttaggaataccacaaattcaaagaagataagtttctatttggatagcaagatgcaacacygggacaaaatycttccccgctctcatgtttcaccctgcatcaagcatcagaagccttccatctcacaaagaaaggcaggttgggtttatcacaaagtcacgagatgaagctcagtggcttccattgaacagtatggcgacagggagagctcgtgccctttatatactatgagaggtgactgacaaaggtgaaatgaaga

SEQ ID NO: 42445 - DNA, 539 bp, Chicken  19866894279372_4
catctgagaagacaaccttcagggcaaagcacttcctcaactcttgcatcacagcctcacaagcaggttattactcctagggagtcttgtgtgacactgcaatataaaggcaaaatatgctgtatgactagaaattcacttwggctttcaccagccttctatttctttcagtgaggctctggtaatgctccatacacaytctgagacatccaagccttctctgtcttaatgttccccatgttaggaataccacaaattcaaagaagataagtttctatttggatagcaagatgcaacacygggacaaaatycttccccgctctcatgtttcaccctgcatcaagcatcagaagccttccatctcacaaagaaaggcaggttgggtttatcacaaagtcacgagatgaagctcagtggcttccattgaacagtatggcgacagggagagctcgtgccctttatatactatgagaggtgactgacaaaggtgaaatgaagagctgccccggcacaccaatcaaatagtacagcacagaaca

SEQ ID NO: 42446 - DNA, 528 bp, Chicken  19866894279372_5
acaaccttcagggcaaagcacttcctcaactcttgcatcacagcctcacaagcaggttattactcctagggagtcttgtgtgacactgcaatataaaggcaaaatatgctgtatgactagaaattcacttwggctttcaccagccttctatttctttcagtgaggctctggtaatgctccatacacaytctgagacatccaagccttctctgtcttaatgttccccatgttaggaataccacaaattcaaagaagataagtttctatttggatagcaagatgcaacacygggacaaaatycttccccgctctcatgtttcaccctgcatcaagcatcagaagccttccatctcacaaagaaaggcaggttgggtttatcacaaagtcacgagatgaagctcagtggcttccattgaacagtatggcgacagggagagctcgtgccctttatatactatgagaggtgactgacaaaggtgaaatgaagagctgccccggcacaccaatcaaatagtacagcacagaaca

SEQ ID NO: 42447 - DNA, 600 bp, Chicken  19866894279380_1
acatccagaggcctcttccaagctcagcgtttttgtgattggcagttccatgtttcctgtttttcacagtgttcacattgtctgatttagaacagttctgggttatttttgcgtagatgtcaaatcttattagcaaaacttctagtaaatgagtctaacctgtttgttcagttttctaagactatggtaccgttgacagcttcactaatctaatggatttcagtagagattaataaataaaattgtacccccaagtgagcgtatttcaccagaaatcatagcctgtagtaaaaacctctycaaaacctgactgcatgctctttatttaacagagaaaaaggggaacatcatggatgaccttttcctgacactgcaactacattgaaatggtttagaaatatgataaggattgacagaatctgtccattttctcttctgtgtgtgaattttttttcagtgtctctgaggaattttctaccctcctttaaatgtctgttttatgctgcctacattgagattgtgatcagaagtcagcatgatacttaaggtgataatgtagagttcactcctacattagaatttttccttttttgttaactt

SEQ ID NO: 42448 - DNA, 404 bp, Chicken  19866894279380_2
atagagaacaataaaaaaagagttctagaggcatttttttctttgcatagcatattcccggatgtgaatctgtttcttgagtgaaatactagtttaaatatactttgcaacttgaatatgattatttcaaaatgtaggctagaatcattcaatgtgttttgtgtcttcagtgaagtgacaagttctaagtgcttaagtggcctaagttctgtagaaataaataatgtatttaactggagagttatatgtaggtggtaagtgattcacattttttttttaagttgtaaaacaatcaggggwcagtatataaaattgcatgataaatttattctgttgggatttattcagttgggaatattggagataatctatcgtggaatcagtcttcgtttgaaataatatat

SEQ ID NO: 42449 - DNA, 600 bp, Chicken  19866894279386_1
cgagtgtagacacctggtttgccccgctcgccgcagccatcaccccacgaagtgatgccatagaggacaaagctgtgcgaggaggggtcctggcacaccagcggaccacccgagtcaccctgggggggacatctgcacatcagcccaagcaggacagacagggctctgtgctcaccccatgcccggggcactgtcatgttgtggggtgacagtacctggcaggaatcgatgcccccagacagatacccggcacagaacatggtgctggtgagcagctctctgcccagggctgcccggcaygtctcctggctgagcagaggcacctgtgcttccatcaccacctcggccgatggcccctctgccaggcaaggtgccagttatggggtactccgcacttggggtgcccacaccctcttctttttgctcctttggcttggtggctcagcactgagcacagaccccatgggtgctgggtggcacctaccttcatacagggacccccaccccgcgatgtggcagggggtgccggggctgggctcggtggtaccgctgggcaggcacacggggctcacggtgcccgacggtgccagcggctccgcc

SEQ ID NO: 42450 - DNA, 599 bp, Chicken  19866894279391_1
  misc_feature (1)..(37): n is any nucleotide
nnnnnnnnnnnnnnnnnnnnnnnnnnnnnnnnnnnnntgggggaaaaaaaaaaaaagtaattgaactgttacagacagacagtaattgagctgaagagaaccatcaaaggcagttcaggaaggtctcaagcaattactcatgctttaaagatgaaactcatacccaggcagccattcacggtgagccccgcttgcctgaggttcctttgttccgtgtgctgcctgtgcgtgctgccctgatgagcattctctggctcaggcagtgggggtgaaacacaccctgtggagcagccaaggggyaaaaacagaagggctatgtcctatagaaacaagtgaagraatacctggaaggacttgatgaaggtccaaagyagtgtccggatgccctcccctcggctcaggagcttcacaagacgcatcacgcggaagagtcggaagaaggtgattgagatgcgagagttttcctctgcgttctggaagccattgtcacagaggcaggagttacaacagcacgagagaaacaagggccctgggccacagagcacgctacgctgagagctcactgcactgttccttatcctggtaatgctccctgggct

SEQ ID NO: 42451 - DNA, 600 bp, Chicken  19866894279391_2
ggggaaaaaaaaaaaaagtaattgaactgttacagacagacagtaattgagctgaagagaaccatcaaaggcagttcaggaaggtctcaagcaattactcatgctttaaagatgaaactcatacccaggcagccattcacggtgagccccgcttgcctgaggttcctttgttccgtgtgctgcctgtgcgtgctgccctgatgagcattctctggctcaggcagtgggggtgaaacacaccctgtggagcagccaaggggaaaaaacagaagggctatgtcctatagaaacaagtgaagraatacctggaaggacttgatgaaggtccaaagyagtgtccggatgccctcccctcggctcaggagcttcacaagacgcatcacgcggaagagtcggaagaaggtgattgagatgcgagagttttcctctgcgttctggaagccattgtcacagaggcaggagttacaacagcacgagagaaacaagggccctgggccacagagcacgctacgctgagagctcactgcactgttccttatcctggtaatgctccctgggcttgcaatgccccagcacaccatggatgggccttctctccca

SEQ ID NO: 42452 - DNA, 600 bp, Chicken  19866894279391_3
agacagacagtaattgagctgaagagaaccatcaaaggcagttcaggaaggtctcaagcaattactcatgctttaaagatgaaactcatacccaggcagccattcacggtgagccccgcttgcctgaggttcctttgttccgtgtgctgcctgtgcgtgctgccctgatgagcattctctggctcaggcagtgggggtgaaacacaccctgtggagcagccaaggggaaaaaacagaagggctatgtcctatagaaacaagtgaagraatacctggaaggacttgatgaaggtccaaagyagtgtccggatgccctcccctcggctcaggagcttcacaagacgcatcacgcggaagagtcggaagaaggtgattgagatgcgagagttttcctctgcgttctggaagccattgtcacagaggcaggagttacaacagcacgagagaaacaagggccctgggccacagagcacgctacgctgagagctcactgcactgttccttatcctggtaatgctccctgggcttgcaatgccccagcacaccatggatgggccttctctcccatggtggtgaggctatctacgaggcttcctaggc

SEQ ID NO: 42453 - DNA, 600 bp, Chicken  19866894279391_4
gaagagtcggaagaaggtgattgagatgcgagagttttcctctgcgttctggaagccattgtcacagaggcaggagttacaacagcacgagagaaacaagggccctgggccacagagcacgctacgctgagagctcactgcactgttccttatcctggtaatgctccctgggcttgcaatgccccagcacaccatggatgggccttctctcccatggtggtgaggctatctacgaggcttcctaggccatcagcctctcctttcagcttgcctggactttaaggatcagggactgatgaygctcccctcattacattccctctaacagtgccaggatgcaattctcctgtgatattttactggagaatagagataattcctctatgggcctgcctcagatggctgatcccagtgagcccttcagccggcagctccacagagtgccgtgggcaccagccacgtgccacttgctctgccgcaaaacagcaggtcccaggtctgctctggggtccagaactgggtgctggcactacgcatatcagtggtggccctgctgtggccgtgctgtaggggctgagctgcacttgctgctctgcattt

SEQ ID NO: 42454 - DNA, 600 bp, Chicken  19866894279393_1
tgatggagctcggcagttcccgctgagccctcctgcaccagagatgcacctctgcatgcagcccaactgcaccgctcctctgccccgatgcgggacagcccgggggatgcggtggcacggacggcagcagctatttaacagaccgagttctcgagaaggatattcacgttgaacacagcgtatgagaattcagtgcttcacgtgggattcacttcagatgatgaaacacagcgatgggcaaaaccagccctctggaacgatagtagaaccccctaagtggcagtcgaacagaaatcatcrtccccggccaacactcggaagacactccgactgtaaagtcttaggcacagggagcagatgagaccgctccgagccggggaactgctgagggaagcgccgggagcgcgcggcggccaacagggggcagcttccgggggagcgcgccccgccggcaccacacggcacggcgcggcgcggccctgagaggtgagccccggcccggagcggcacgggtacgttcccagcgctgggagctgcggggaaaacagcgttcaggccggacggagagccccgttcgtgtgcgggtagtcccggaaaggg

SEQ ID NO: 42455 - DNA, 600 bp, Chicken  19866894279398_1
tgcttcactgtacaaatattaatttgtactgtacaaatgatttcagagcagaccaatgggatatattactagttgtgttttttttgtttgttcgttttttgttttttaatttaatgctgttctcagagtaaaatgttcagatccttcagcagaatataatagcaagagcatctgcgttttgaagctcacttttcaaatcaaaggacagcacttgctggtagcacaaagatccaattagtacccttactgaaagacaataactcacattaaaaataggaaggctttttttttttttttttyttccattaacttcaaaagggctcagtgtttcatttacaggagtaaactaaataacatagtgttagcagtgtcagagactgatgtagaaagggaatagttaaagtcatcagatgacacgtactctacaaggaagcgagacataaaatgtacccacacagaagcctgacatgcaggtttagtattttcctagtaaaaatcttaatcttcattttctctaaaaacaattgtatgcataagagcattccttcaaatatgaggccagaagaaatgctgaataagttttcatcctgaaagctaaga

SEQ ID NO: 42456 - DNA, 600 bp, Chicken  19866894279413_1
tcagcctgatttgcttcacccgaaatagctcagtgtatccctttgctatttctgcttatgtgaagttttgtgtgagtttttctttggttcgtgtagcctcatacttagcctttcttcttgcactgacacttccctgcagttcctttggactgcatctaacagctcagtgggctgcagtagtagtgtggcaagataagtagagcaccttctcaaacagatagaaaactgctaaacaccgtacaagaaacctggacagcaagcttgaaacacctacaaaaataaaaataaataaatagaggrcaacatctagatcccccctgtctcmtttccaggagtgcagcccagtttggtcagtttggaggagtgtctcattccttgggagcagttggatctaatgtgttatagctcctggtccaggtcatgtcttaaatccatttcaggttgaaaatatctgaataaggaaagcagagatgtaaaagctcctaggtttaacagaagcttctccagcacaactgcagttccttcttcccttaacattcttgcccatctatgtgtatagataattttaccacctttttgattggaaaatgttactaaagg

SEQ ID NO: 42457 - DNA, 600 bp, Chicken  19866894279413_2
tagctcagtgtatccctttgctatttctgcttatgtgaagttttgtgtgagtttttctttggttcgtgtagcctcatacttagcctttcttcttgcactgacacttccctgcagttcctttggactgcatctaacagctcagtgggctgcagtagtagtgtggcaagataagtagagcaccttctcaaacagatagaaaactgctaaacaccgtacaagaaacctggacagcaagcttgaaacacctacaaaaataaaaataaataaatagaggrcaacatctagatcccccctgtctcmtttccaggagtgcagcccagtttggtcagtttggaggagtgtctcattccttgggagcagttggatctaatgtgttatagctcctggtccaggtcatgtcttaaatccatttcaggttgaaaatatctgaataaggaaagcagagatgtaaaagctcctaggtttaacagaagcttctccagcacaactgcagttccttcttcccttaacattcttgcccatctatgtgtatagataattttaccacctttttgattggaaaatgttactaaaggaaaacaagcattgcttttgtataat

SEQ ID NO: 42458 - DNA, 599 bp, Chicken  19866894279422_1
  misc_feature (1)..(196): n is any nucleotide
nnnnnnnnnnnnnnnnnnnnnnnnnnnnnnnnnnnnnnnnnnnnnnnnnnnnnnnnnnnnnnnnnnnnnnnnnnnnnnnnnnnnnnnnnnnnnnnnnnnnnnnnnnnnnnnnnnnnnnnnnnnnnnnnnnnnnnnnnnnnnnnnnnnnnnnnnnnnnnnnnnnnnnnnnnnnnnnnnnnnnnnnnnnnnnnnnnnnaggttttttctttttttttttttttttttaagttacttgtgcaattatcatactattagttacattagatatgtactacttagttctctttctggccaaacctmtagttaaaatactgttaagctaccgagatctttcttgcaaactcagcaatggcttgcagttcatgaaatcagataattctgtcacctatttgcatcagtgactgcagaatgcacgttttgagtcactgaatgagaaagttgggaaatcccagcaaacaaagacataggctcaatccagcaaatatgtagttytgaattggtacagttaagaaacttagtcayatgtacagtctctaaatactagaaaatgagaggagaatgactattcctagaatttgttttcccaccaacagggaagt

SEQ ID NO: 42459 - DNA, 599 bp, Chicken  19866894279422_2
  misc_feature (1)..(4): n is any nucleotide
nnnnaggttttttctttttttttttttttttttaagttacttgtgcaattatcatactattagttacattagatatgtactacttagttctctttctggccaaacctmtagttaaaatactgttaagctaccgagatctttcttgcaaactcagcaatggcttgcagttcatgaaatcagataattctgtcacctatttgcatcagtgactgcagaatgcacgttttgagtcactgaatgagaaagttgggaaatcccagcaaacaaagacataggctcaatccagcaaatatgtagttytgaattggtacagttaagaaacttagtcayatgtacagtctctaaatactagaaaatgagaggagaatgactattcctagaatttgttttcccaccaacagggaagtaatccattttacacttgcatttattagsaaagaataaatctatcagtggaggagattttgtgtaagtgttggtattaatcagagaactgaatcaagctgtacatggacagaaatatactgctgatgtactaacaactatttcagcactggacttatcgccagtataaccatttacttgagaaaattatatga

SEQ ID NO: 42460 - DNA, 600 bp, Chicken  19866894279422_3
tttaagttacttgtgcaattatcatactattagttacattagatatgtactacttagttctctttctggccaaacctmtagttaaaatactgttaagctaccgagatctttcttgcaaactcagcaatggcttgcagttcatgaaatcagataattctgtcacctatttgcatcagtgactgcagaatgcacgttttgagtcactgaatgagaaagttgggaaatcccagcaaacaaagacataggctcaatccagcaaatatgtagttytgaattggtacagttaagaaacttagtcayatgtacagtctctaaatactagaaaatgagaggagaatgactattcctagaatttgttttcccaccaacagggaagtaatccattttacacttgcatttattagsaaagaataaatctatcagtggaggagattttgtgtaagtgttggtattaatcagagaactgaatcaagctgtacatggacagaaatatactgctgatgtactaacaactatttcagcactggacttatcgccagtataaccatttacttgagaaaattatatgacacaactagaaacgagattaaaaaaagtcat

SEQ ID NO: 42461 - DNA, 600 bp, Chicken  19866894279422_4
atctttcttgcaaactcagcaatggcttgcagttcatgaaatcagataattctgtcacctatttgcatcagtgactgcagaatgcacgttttgagtcactgaatgagaaagttgggaaatcccagcaaacaaagacataggctcaatccagcaaatatgtagttytgaattggtacagttaagaaacttagtcayatgtacagtctctaaatactagaaaatgagaggagaatgactattcctagaatttgttttcccaccaacagggaagtaatccattttacacttgcatttattagsaaagaataaatctatcagtggaggagattttgtgtaagtgttggtattaatcagagaactgaatcaagctgtacatggacagaaatatactgctgatgtactaacaactatttcagcactggacttatcgccagtataaccatttacttgagaaaattatatgacacaactagaaacgagattaaaaaaagtcatttcaacttactgaagctaaaaagcgtggtattacaacagacttcaattttactatagtggaaaagtacaatggacagaattactcactgaaattaaacaagctgc

SEQ ID NO: 42462 - DNA, 600 bp, Chicken  19866894279426_1
gagcatgctaaataaaatacaacattactaagttgataaataacatatacattagtactatcgaccagtgacattgttaacatgcaggacacttccactaattactcttgttaattttaggaagtcaacctgaaaacatactaatttaaatgactcactaaatgtgtcatggaagacacagcactgtgcagaacagctgatttaaagtaattccagactccactctgaatacagtaaatatttggtgtttttttttttttaaaaccctagattagacacaaacagctagaaacaattttwaaaagtgagcagaatatagaaagatttgtttgcttccaaataattattccccttagacttcgctatgctatctgggtgataactcatttctatcatgtgcattcgtcgtccccagtgcttcaaaaatgcatttatacctaatgattcagtaaactagcttaatttagaaaccttccttctgcatttaagggaaatctcagtcaccaaggggcagctgagatgcatttaaagcaaaagctctgagttaactgtctctttttgttttttttttccctcagcttttgaataagctgagcagat

SEQ ID NO: 42463 - DNA, 600 bp, Chicken  19866894279426_2
cagctgagatgcatttaaagcaaaagctctgagttaactgtctctttttgttttttttttccctcagcttttgaataagctgagcagatttaattaatttgatctcctagagtctgtaattcagttgctacggtcatagcatagccggtctgagaatggaaataccaggccacaaaaaagaaagagttagattgcggagctgcctggttaatgggctttgttcgtcctgttttctgctgcatggaaggtaaagctcctctggtacttctaagagaagtagtagaagagcagccttgtcaratgctgggagcattgactgcatcctctgggaaatccctaggaccttgtttacagcactcttacgacgagttccacaggctcactgcaatgcagttagggttgctatttaaaaactagcactattttttcaccccattctaccctctgaaaatagctatgcagcttctatgccttctatggatgcttctggcatttccattcaaatagaaattgtcagaataacaattcatactttgcatccaggttaattcaatttctttatgaattacaaggtataatttcacagcagaagtggaataa

SEQ ID NO: 42464 - DNA, 600 bp, Chicken  19866894279434_1
ggtacatgcatttatttgtacataactaaatgttttgtatatgtacaaggaagagagcgccactcagtgaacctgactaaaattggtattagaacaccaacttcagcaatgggactccacaaacaacacttcatagaaagttgatagtcaagccttctctgttttgtatgtgtaataaatgtgtagatcttagtgacagatatgtagacatcctcattacacacgacttgcaaaaaagaaaatgccacgcatttccagttatgtcatttctaaactgagcaaaggtcttttttctgaaawaaaaaagaaaaaaaaaataaaagaaaaagtttaaacttgggaagaaacagccagaaagcaytgaagagaagttgaagatgcaggaatgccaaggtgctatacggtaacagctgtgctctgctcccatcctgaaattctgtgcactgaactgtaacctgacagatacagggctaaaactgttgccagggatcagtgccacacgaaagcatcctggccaaacacatccctcttctgacaaagtggctccrtcccaaggttttcatcatactgagagatcttggtgtagaaattatccttgag

SEQ ID NO: 42465 - DNA, 600 bp, Chicken  19866894279434_2
catttatttgtacataactaaatgttttgtatatgtacaaggaagagagcgccactcagtgaacctgactaaaattggtattagaacaccaacttcagcaatgggactccacaaacaacacttcatagaaagttgatagtcaagccttctctgttttgtatgtgtaataaatgtgtagatcttagtgacagatatgtagacatcctcattacacacgacttgcaaaaaagaaaatgccacgcatttccagttatgtcatttctaaactgagcaaaggtcttttttctgaaawaaaaaagwaaaaaaaaataaaagaaaaagtttaaacttgggaagaaacagccagaaagcaytgaagagaagttgaagatgcaggaatgccaaggtgctatacggtaacagctgtgctctgctcccatcctgaaattctgtgcactgaactgtaacctgacagatacagggctaaaactgttgccagggatcagtgccacacgaaagcatcctggccaaacacatccctcttctgacaaagtggctccrtcccaaggttttcatcatactgagagatcttggtgtagaaattatccttgaggcatatga

SEQ ID NO: 42466 - DNA, 600 bp, Chicken  19866894279434_3
actcagtgaacctgactaaaattggtattagaacaccaacttcagcaatgggactccacaaacaacacttcatagaaagttgatagtcaagccttctctgttttgtatgtgtaataaatgtgtagatcttagtgacagatatgtagacatcctcattacacacgacttgcaaaaaagaaaatgccacgcatttccagttatgtcatttctaaactgagcaaaggtcttttttctgaaawaaaaaagaaaaaaaaaataaaagaaaaagtttaaacttgggaagaaacagccagaaagcaytgaagagaagttgaagatgcaggaatgccaaggtgctatacggtaacagctgtgctctgctcccatcctgaaattctgtgcactgaactgtaacctgacagatacagggctaaaactgttgccagggatcagtgccacacgaaagcatcctggccaaacacatccctcttctgacaaagtggctccrtcccaaggttttcatcatactgagagatcttggtgtagaaattatccttgaggcatatgatccactgagctcagagtcaaatccagcactgatgcgctgccaaatggatggag

SEQ ID NO: 42467 - DNA, 600 bp, Chicken  19866894279434_4
gcatttccagttatgtcatttctaaactgagcaaaggtcttttttctgaaawaaaaaagaaaaaaaaaataaaagaaaaagtttaaacttgggaagaaacagccagaaagcaytgaagagaagttgaagatgcaggaatgccaaggtgctatacggtaacagctgtgctctgctcccatcctgaaattctgtgcactgaactgtaacctgacagatacagggctaaaactgttgccagggatcagtgccacacgaaagcatcctggccaaacacatccctcttctgacaaagtggctccrtcccaaggttttcatcatactgagagatcttggtgtagaaattatccttgaggcatatgatccactgagctcagagtcaaatccagcactgatgcgctgccaaatggatggaggcatggacaaaggcagacagagacaccttacagcatttaggcatcgcaattcacagtctgaggcaattggtctgggaatccagacaggtcactagcatataaactcattcctaacctcaccagaagcctttccatgtgcgttataatgatgtacgttactatgatctcattttccttgaagcagtct

SEQ ID NO: 42468 - DNA, 600 bp, Chicken  19866894279437_1
aacttgcttcatatgttgtgtacaaccgcaacggtcaacactcaatctgtttttaggtcaataccaataaatcattaacccgatttaaattaatgcaaaggctacactatgatggaaaagaaatgactcccttttctaactgtttctgaagtctaaaagtctgaaagagttttaagatgttgctcgatattgtaatgcgcaaaaccacattgagtgtcttcagaggactcttggacgccagacgtcttccataccacctcttccatccatacacattaaagggattaggtctgtggtctycrttaaacccagargtgacaactgctgggagacygtcacttttgtgttttcaaacaactggtctggatatgtgaaatttgcagcactggaagcaatagctggaaagcatcctgaacataagtagtactgttgcagccctaatggggagagaaagtgaggttcatcagtttacttgtcatgtatttcaggaattacaatgtagttttagaataaactgtctttgttagatctgcatcgtgtgttattagcatatgtattcccacaggattttagaacctgtagataacaaaaatgatgcat

SEQ ID NO: 42469 - DNA, 600 bp, Chicken  19866894279437_2
cttgcttcatatgttgtgtacaaccgcaacggtcaacactcaatctgtttttaggtcaataccaataaatcattaacccgatttaaattaatgcaaaggctacactatgatggaaaagaaatgactcccttttctaactgtttctgaagtctaaaagtctgaaagagttttaagatgttgctcgatattgtaatgcgcaaaaccacattgagtgtcttcagaggactcttggacgccagacgtcttccataccacctcttccatccatacacattaaagggattaggtctgtggtctycrttaaacccagargtgacaactgctgggagacygtcacttttgtgttttcaaacaactggtctggatatgtgaaatttgcagcactggaagcaatagctggaaagcatcctgaacataagtagtactgttgcagccctaatggggagagaaagtgaggttcatcagtttacttgtcatgtatttcaggaattacaatgtagttttagaataaactgtctttgttagatctgcatcgtgtgttattagcatatgtattcccacaggattttagaacctgtagataacaaaaatgatgcatta

SEQ ID NO: 42470 - DNA, 600 bp, Chicken  19866894279437_3
gttgtgtacaaccgcaacggtcaacactcaatctgtttttaggtcaataccaataaatcattaacccgatttaaattaatgcaaaggctacactatgatggaaaagaaatgactcccttttctaactgtttctgaagtctaaaagtctgaaagagttttaagatgttgctcgatattgtaatgcgcaaaaccacattgagtgtcttcagaggactcttggacgccagacgtcttccataccacctcttccatccatacacattaaagggattaggtctgtggtctycrttaaacccagargtgacaactgctgggagacygtcacttttgtgttttcaaacaactggtctggatatgtgaaatttgcagcactggaagcaatagctggaaagcatcctgaacataagtagtactgttgcagccctaatggggagagaaagtgaggttcatcagtttacttgtcatgtatttcaggaattacaatgtagttttagaataaactgtctttgttagatctgcatcgtgtgttattagcatatgtattcccacaggattttagaacctgtagataacaaaaatgatgcattacaatggcttaca

SEQ ID NO: 42471 - DNA, 600 bp, Chicken  19866894279437_4
tcaacactcaatctgtttttaggtcaataccaataaatcattaacccgatttaaattaatgcaaaggctacactatgatggaaaagaaatgactcccttttctaactgtttctgaagtctaaaagtctgaaagagttttaagatgttgctcgatattgtaatgcgcaaaaccacattgagtgtcttcagaggactcttggacgccagacgtcttccataccacctcttccatccatacacattaaagggattaggtctgtggtctycrttaaacccagargtgacaactgctgggagacygtcacttttgtgttttcaaacaactggtctggatatgtgaaatttgcagcactggaagcaatagctggaaagcatcctgaacataagtagtactgttgcagccctaatggggagagaaagtgaggttcatcagtttacttgtcatgtatttcaggaattacaatgtagttttagaataaactgtctttgttagatctgcatcgtgtgttattagcatatgtattcccacaggattttagaacctgtagataacaaaaatgatgcattacaatggcttacagtaaataagcgtggcctgta

SEQ ID NO: 42472 - DNA, 599 bp, Chicken  19866894279441_1
  misc_feature (1)..(119): n is any nucleotide
nnnnnnnnnnnnnnnnnnnnnnnnnnnnnnnnnnnnnnnnnnnnnnnnnnnnnnnnnnnnnnnnnnnnnnnnnnnnnnnnnnnnnnnnnnnnnnnnnnnnnnnnnnnnnnnnnnnnnnnaaaagaaataactgtatcactttcataaaagatcaaaaccagagagaattttttgaagcttttataccacctccagaggctattaagtcaggcatgcaattttgaatagtttgtggaatccctaatctgggagtagattatggtggtgcttggagacctgagatagaacatctcaactcartcttaaagaaaaaacaattatggtgtttgccagaatgtaatcagaccagattatatgtttaaaagagaaaagccttaggttagttttcaaaatgtatattcacagtagaatcagagacaaaagtagaatctccaagagactgaaaaagcacaggatgcagcgaagagtacgtgcaatacagaggaaaaggggagactttggcaatgtcctaacattgcatgaaacacttaaatctgcaagatttaaacccacttttcaaaagtcttcagataaatgtattttacagaacaggaaagctc

SEQ ID NO: 42473 - DNA, 468 bp, Chicken  19866894279445_1
aagaaaatattttatcttgaataattattctactaacaaacttgtgatacattcttttttatgaagaattactcagacaagacaggtatacaagctgtcagaataaatgtcccgcatgttgttaagaacaataagttgcacagtaaatatacttcactctttttaaacttgaggggaactctgtttcaaaagtaaatgtaaagtctgtgaagtttcagactggaaaagagatgaagaatatctgtttctggactttatcctgggagttatgcacattatgaaaaatacaactgcatattstarcaggaacagtagtatttttctttctgtagcatgtgtagagtacaaacaagcccataagtaatgctgcacttctgtgatttctcattcaagagagcttcccctgtgcaacacttactgagaaagataaaactgtttgcacaatgggaaaatgttagtttgcatgtt

SEQ ID NO: 42474 - DNA, 465 bp, Chicken  19866894279445_2
aaaatattttatcttgaataattattctactaacaaacttgtgatacattcttttttatgaagaattactcagacaagacaggtatacaagctgtcagaataaatgtcccgcatgttgttaagaacaataagttgcacagtaaatatacttcactctttttaaacttgaggggaactctgtttcaaaagtaaatgtaaagtctgtgaagtttcagactggaaaagagatgaagaatatctgtttctggactttatcctgggagttatgcacattatgaaaaatacaactgcatattstarcaggaacagtagtatttttctttctgtagcatgtgtagagtacaaacaagcccataagtaatgctgcacttctgtgatttctcattcaagagagcttcccctgtgcaacacttactgagaaagataaaactgtttgcacaatgggaaaatgttagtttgcatgtt

SEQ ID NO: 42475 - DNA, 600 bp, Chicken  19866894279449_1
ttgaatatgtggacactggggtctttggaatttttcaaggctagcgtaagagctcctagaacatacagtgtactgttatgggagaagctctcttaatctcacactggttttatcggagtgcacagtacagagtttggtacagtgcgagggacagtattcacttaagaaaagtggagatggaggctggaatctcattgctagctttactgctgaaccagaaaatcacaaaaccgctgcctcagacacagagcagacattgtcattctatcatgtaaaacttttcaaagataacttttgggrtttttttttcccaacaaaatactttcttttcaccttttagcattctgtttaatcagagcttcagttatgctagctggcggtcatggaaataaaaagcagttttatttgtggttcagtacagatttgttgttaaaagctgtgcaagaagaaacattccttttctgctgaccaagtgctgctaagttaaattctccacgttgaaatactactgttcatgtcaagtagttgcaattaatgggagttaaatattcctcaccggatttttgagaacatctcatatgcgtgagtttatgtagatgc

SEQ ID NO: 42476 - DNA, 600 bp, Chicken  19866894279451_1
tgctggacaaagccgtgagctcattgggctggacaaggaatgggctcgcccgtctggggctgtttgaccagtgaaagtattttaccataaagaaggctcatctctctgttggctgcttgctgaaattgccagccctgatcacagtttgcagctgtttgtgttgggactgtgctgccatctaattgctttccagcttttcgtctgcattatccataagtcaaaagctatcatgctgcacgtgtatggacatccaggttgatcctagatgtccagagcaacacatgatggtttaagtgagayagaaggaaggaattgtttaacttgtatttattttatgcatattttaacttcagcactgaaattttatattctgtattattgctwyatttttaaaaaatgacttgtcatctctgagctttttctaatatcatcgatgaattataatgactaaagtgaattatatttatgcctaagcaaaacagaattcagcaaatgattttctaakttctggtttgactcaggcaaaggctacatcttaagagaagtgggcatgcaggrgcagatcccgatgatggagtgctcttatgttgaaattttcct

SEQ ID NO: 42477 - DNA, 600 bp, Chicken  19866894279451_2
ccataaagaaggctcatctctctgttggctgcttgctgaaattgccagccctgatcacagtttgcagctgtttgtgttgggactgtgctgccatctaattgctttccagcttttcgtctgcattatccataagtcaaaagctatcatgctgcacgtgtatggacatccaggttgatcctagatgtccagagcaacacatgatggtttaagtgagayagaaggaaggaattgtttaacttgtatttattttatgcatattttaacttcagcactgaaattttatattctgtattattgctwyatttttaaaaaatgacttgtcatctctgagctttttctaatatcatcgatgaattataatgactaaagtgaattatatttatgcctaagcaaaacagaattcagcaaatgattttctaakttctggtttgactcaggcaaaggctacatcttaagagaagtgggcatgcaggrgcagatcccgatgatggagtgctcttatgttgaaattttcctgtatcactgtctggtactactggaaacataagaggctgtatttcccgctgccttaaggcctggtatagctgaaatcaaaagtca

SEQ ID NO: 42478 - DNA, 600 bp, Chicken  19866894279451_3
cataaagaaggctcatctctctgttggctgcttgctgaaattgccagccctgatcacagtttgcagctgtttgtgttgggactgtgctgccatctaattgctttccagcttttcgtctgcattatccataagtcaaaagctatcatgctgcacgtgtatggacatccaggttgatcctagatgtccagagcaacacatgatggtttaagtgagayagaaggaaggaattgtttaacttgtatttattttatgcatattttaacttcagcactgaaattttatattctgtattattgctwyatttttaaaaaatgacttgtcatctctgagctttttctaatatcatcgatgaattataatgactaaagtgaattatatttatgcctaagcaaaacagaattcagcaaatgattttctaakttctggtttgactcaggcaaaggctacatcttaagagaagtgggcatgcaggrgcagatcccgatgatggagtgctcttatgttgaaattttcctgtatcactgtctggtactactggaaacataagaggctgtatttcccgctgccttaaggcctggtatagctgaaatcaaaagtcaa

SEQ ID NO: 42479 - DNA, 600 bp, Chicken  19866894279451_4
attatccataagtcaaaagctatcatgctgcacgtgtatggacatccaggttgatcctagatgtccagagcaacacatgatggtttaagtgagayagaaggaaggaattgtttaacttgtatttattttatgcatattttaacttcagcactgaaattttatattctgtattattgctwyatttttaaaaaatgacttgtcatctctgagctttttctaatatcatcgatgaattataatgactaaagtgaattatatttatgcctaagcaaaacagaattcagcaaatgattttctaakttctggtttgactcaggcaaaggctacatcttaagagaagtgggcatgcaggrgcagatcccgatgatggagtgctcttatgttgaaattttcctgtatcactgtctggtactactggaaacataagaggctgtatttcccgctgccttaaggcctggtatagctgaaatcaaaagtcaaaagccaagggaataaaacagctctaaaacagcattaaaaagcaaacagcggccatgtaaatttctttgcagaggcaacctatttcacttgcttgatagcaggcgtccatttagacaaatc

SEQ ID NO: 42480 - DNA, 600 bp, Chicken  19866894279451_5
ttatccataagtcaaaagctatcatgctgcacgtgtatggacatccaggttgatcctagatgtccagagcaacacatgatggtttaagtgagayagaaggaaggaattgtttaacttgtatttattttatgcatattttaacttcagcactgaaattttatattctgtattattgctwyatttttaaaaaatgacttgtcatctctgagctttttctaatatcatcgatgaattataatgactaaagtgaattatatttatgcctaagcaaaacagaattcagcaaatgattttctaakktctggtttgactcaggcaaaggctacatcttaagagaagtgggcatgcaggrgcagatcccgatgatggagtgctcttatgttgaaattttcctgtatcactgtctggtactactggaaacataagaggctgtatttcccgctgccttaaggcctggtatagctgaaatcaaaagtcaaaagccaagggaataaaacagctctaaaacagcattaaaaagcaaacagcggccatgtaaatttctttgcagaggcaacctatttcacttgcttgatagcaggcgtccatttagacaaatca

SEQ ID NO: 42481 - DNA, 600 bp, Chicken  19866894279451_6
tatccataagtcaaaagctatcatgctgcacgtgtatggacatccaggttgatcctagatgtccagagcaacacatgatggtttaagtgagayagaaggaaggaattgtttaacttgtatttattttatgcatattttaacttcagcactgaaattttatattctgtattattgctwyatttttaaaaaatgacttgtcatctctgagctttttctaatatcatcgatgaattataatgactaaagtgaattatatttatgcctaagcaaaacagaattcagcaaatgattttctaaktkctggtttgactcaggcaaaggctacatcttaagagaagtgggcatgcaggrgcagatcccgatgatggagtgctcttatgttgaaattttcctgtatcactgtctggtactactggaaacataagaggctgtatttcccgctgccttaaggcctggtatagctgaaatcaaaagtcaaaagccaagggaataaaacagctctaaaacagcattaaaaagcaaacagcggccatgtaaatttctttgcagaggcaacctatttcacttgcttgatagcaggcgtccatttagacaaatcaa

SEQ ID NO: 42482 - DNA, 600 bp, Chicken  19866894279451_7
atccataagtcaaaagctatcatgctgcacgtgtatggacatccaggttgatcctagatgtccagagcaacacatgatggtttaagtgagayagaaggaaggaattgtttaacttgtatttattttatgcatattttaacttcagcactgaaattttatattctgtattattgctwyatttttaaaaaatgacttgtcatctctgagctttttctaatatcatcgatgaattataatgactaaagtgaattatatttatgcctaagcaaaacagaattcagcaaatgattttctaakttktggtttgactcaggcaaaggctacatcttaagagaagtgggcatgcaggrgcagatcccgatgatggagtgctcttatgttgaaattttcctgtatcactgtctggtactactggaaacataagaggctgtatttcccgctgccttaaggcctggtatagctgaaatcaaaagtcaaaagccaagggaataaaacagctctaaaacagcattaaaaagcaaacagcggccatgtaaatttctttgcagaggcaacctatttcacttgcttgatagcaggcgtccatttagacaaatcaag

SEQ ID NO: 42483 - DNA, 600 bp, Chicken  19866894279451_8
atcctagatgtccagagcaacacatgatggtttaagtgagayagaaggaaggaattgtttaacttgtatttattttatgcatattttaacttcagcactgaaattttatattctgtattattgctwyatttttaaaaaatgacttgtcatctctgagctttttctaatatcatcgatgaattataatgactaaagtgaattatatttatgcctaagcaaaacagaattcagcaaatgattttctaakttctggtttgactcaggcaaaggctacatcttaagagaagtgggcatgcaggrgcagatcccgatgatggagtgctcttatgttgaaattttcctgtatcactgtctggtactactggaaacataagaggctgtatttcccgctgccttaaggcctggtatagctgaaatcaaaagtcaaaagccaagggaataaaacagctctaaaacagcattaaaaagcaaacagcggccatgtaaatttctttgcagaggcaacctatttcacttgcttgatagcaggcgtccatttagacaaatcaagtccgcgactttgcattgttccctgtgccctccccaggcacggcccaggag

SEQ ID NO: 42484 - DNA, 575 bp, Chicken  19866894279451_9
tttcccgctgccttaaggcctggtatagctgaaatcaaaagtcaaaagccaagggaataaaacagctctaaaacagcattaaaaagcaaacagcggccatgtaaatttctttgcagaggcaacctatttcacttgcttgatagcaggcgtccatttagacaaatcaagtccgcgactttgcattgttccctgtgccctccccaggcacggcccaggagagcccatttctacgactcctctgctaacaccttgccaagagaggagctgggagtgtcatgtggaggtacagggcttcctctkcactttctcaacttctgtgatttcacactctctctttctctctctctctggctctttcctgatttggctgcttagggacagacaggtaatggagaagaaattgaaagggaaaatacagggaaaatgtaaatgaaaagaagttattataactgttataatgaagtgcctttcatttaaatataagaatgtaacgctgaaatgaacttgtgatcctgaaatgcatttttaatgagtttcctttttattttgctgcttcagtggcatattttaaagac

SEQ ID NO: 42485 - DNA, 600 bp, Chicken  19866894279453_1
ctaattctggatagcagcctccggcaactagaggttgagtaccctacagttattctctgttttagaaataaagcattgcctacccctgcttgcacccagacaatcttgtaagtcttatagcctctgtgataggaaggtcaaattgaagatagcagccccagaaaagtactgggtatgtttttgtgaattcttctctattttggaggtagatgcatgcctggtagctagggttagtgagcctgggatgcttttcagcgtgtaccaggctttaaacaagatcaaactgagaccattgaggartctttatgttacccacaaactaaagcatggtgaaggcctatctatgtatttatgtaccactgttgcgtgattagaagaaaggcgtaaatagtatttttctattctaaggggaagttttattttataccattggaaaatctatgttggtacaggaaacaagatttgggctttgctttgttagaaaaacatgttttaatgcattctgagtaatttccattggcaaaaatgatgctattaaaagaaaggcaaataatgttctgtggagctccagtacctcttggggaaatttctctctctcca

SEQ ID NO: 42486 - DNA, 599 bp, Chicken  19866894279465_1
  misc_feature (1)..(275): n is any nucleotide
nnnnnnnnnnnnnnnnnnnnnnnnnnnnnnnnnnnnnnnnnnnnnnnnnnnnnnnnnnnnnnnnnnnnnnnnnnnnnnnnnnnnnnnnnnnnnnnnnnnnnnnnnnnnnnnnnnnnnnnnnnnnnnnnnnnnnnnnnnnnnnnnnnnnnnnnnnnnnnnnnnnnnnnnnnnnnnnnnnnnnnnnnnnnnnnnnnnnnnnnnnnnnnnnnnnnnnnnnnnnnnnnnnnnnnnnnnnnnnnnnnnnnnnnnnnnnnnnnnnnnnnnnnnnnnnnnnncaagaagaggtgagaagcagcagcrttacggcccctctgtgccccctctcccctcgcattgaccccaccggcatctccccaggctccatgggatgctcttcccccccttgcccaaacctacgggcagtgaagccctccggttctcagccagcgagacgagccaggtgagctgcagtgtgcaccctgggatgagctgcgaggccgagacctcccagcactgtgctccttctccccagcaggacaagccctggaaaagcttcgtggaaccctcggagcagctcagccccggggagctgctggtgatggagctgagccctgaaaagg

SEQ ID NO: 42487 - DNA, 443 bp, Chicken  19866894279465_2
caagaagaggtgagaagcagcagcrttacggcccctctgtgccccctctcccctcgcattgaccccaccggcatctccccaggctccatgggatgctcttcccccccttgcccaaacctacgggcagtgaagccctccggttctcagccagcgagacgagccaggtgagctgcagtgtgcaccctgggatgagctgcgaggccgagacctcccagcactgtgctccttctccccagcaggacaagccctggaaaagcttcgtggaaccctcggagcagctcagccccggggagctgctgscagcgcacggccccacacaccagagctcagccccaaagaactgacggagccactgcagccacactgcaatatggagctgccctttgcgtaccggcagcaggaggtgctgtacccggagccagtggggtcagggggggtcccca

SEQ ID NO: 42488 - DNA, 599 bp, Chicken  19866894279484_1
  misc_feature (1)..(170): n is any nucleotide
nnnnnnnnnnnnnnnnnnnnnnnnnnnnnnnnnnnnnnnnnnnnnnnnnnnnnnnnnnnnnnnnnnnnnnnnnnnnnnnnnnnnnnnnnnnnnnnnnnnnnnnnnnnnnnnnnnnnnnnnnnnnnnnnnnnnnnnnnnnnnnnnnnnnnnnnnnnnnnnnnnnnnnnnnnatgtactcagatagtttgttgttacttagataattctgtcagaactagaaagactttaggaaaggggtcatggcataggattcatcttcttgatgaacaagatcaagaagattcttgttgattatttttytatgacctgaacagatttctgttcataccatctagcatcccattagcaatgtgcacggtagtgttgtacttctaggtgagaagcttttacagcttaacttcatggggtttattgcaaaagctcttttaagcctatcagctcaagtaccttcttatgattaagggaaaccaactgtcactttgmcatgatgcatgcctctgatcagctcccactgtctcatttcttaagacctgcttcaagactcgctgctcctgccctcagaagaaaaggcacattgatctcacaagacctcatcgcca

SEQ ID NO: 42489 - DNA, 600 bp, Chicken  19866894279484_2
gtttgttgttacttagataattctgtcagaactagaaagactttaggaaaggggtcatggcataggattcatcttcttgatgaacaagatcaagaagattcttgttgattatttttytatgacctgaacagatttctgttcataccatctagcatcccattagcaatgtgcacggtagtgttgtacttctaggtgagaagcttttacagcttaacttcatggggtttattgcaaaagctcttttaagcctatcagctcaagtaccttcttatgattaagggaaaccaactgtcactttgmcatgatgcatgcctctgatcagctcccactgtctcatttcttaagacctgcttcaagactcgctgctcctgccctcagaagaaaaggcacattgatctcacaagacctcatcgccaagaactctgtggccgttgcaaaggcaagaggctgtcctgtgataacacctacagcttcaagtacattgtctgacttgtgtgccctccaatttgtgctctgcactttgtcagtcttttgtgatgttttgaccttaggcttttgacctggcactggataatggatgaagacttctgtgttatttat

SEQ ID NO: 42490 - DNA, 600 bp, Chicken  19866894279485_1
tttgagcaactggacttcatgtcactagtattctttctatagttactaagctaaaaactgatacacagctgagatgcttatgtattttactcccaaatttatttctagctgcagtaaaaatgatgaaaatctcaataaaacttcagaaatatgggagactccgcacagatttgagagttttcagccccttatttcaggtgcatatttactttgagcggagaagaggaggcacaggccaggcagttctccagagccaagtgcccagaggccatccaacatgttcagctttacctcaggatkgaagatgttctcatctctcatcaatggagagtgcatggagtgagctggacacctctatggatgcagttgcatgttgatctcatgcatgctggaattagaatttttggtagagaagtgttacagtgagggcagatgaggagagttcttayccttccaaagcagtttcagtaggattgtgtgttttctaaaccagtaaaggacagacagagattggtaaaaatattgatgcattcttattgcacacaaaaatgtttacagtttctggagtaaatgctgagaaagattaagaaaaatctcagg

SEQ ID NO: 42491 - DNA, 600 bp, Chicken  19866894279485_2
tatgggagactccgcacagatttgagagttttcagccccttatttcaggtgcatatttactttgagcggagaagaggaggcacaggccaggcagttctccagagccaagtgcccagaggccatccaacatgttcagctttacctcaggatkgaagatgttctcatctctcatcaatggagagtgcatggagtgagctggacacctctatggatgcagttgcatgttgatctcatgcatgctggaattagaatttttggtagagaagtgttacagtgagggcagatgaggagagttcttayccttccaaagcagtttcagtaggattgtgtgttttctaaaccagtaaaggacagacagagattggtaaaaatattgatgcattcttattgcacacaaaaatgtttacagtttctggagtaaatgctgagaaagattaagaaaaatctcaggaatccccaaaaatgagaaaggctttatgtgaccataacagaaagaggcagaaccactgccaaatatccacacaggaaaatagcctcatttaaatatgtcagtttgtatttgtgaatgtgggatgtacatgttcttatgagaaatgtaga

SEQ ID NO: 42492 - DNA, 600 bp, Chicken  19866894279496_1
ataaatatatgtttgttatgcagatatataaaacctatatatatatgtatatatatatgtgtgtgtgttccttgttttgtcaattccactaatacaatagtaaaaaaaaaaagaaaaaagaaaaaaagaaaacaatggtgatacagaaattgggtctgctaataagacactgacaaatttttatttacacttttattacaaaattaaaaaaaaaaatcaactaacatttgaagtttaaatttaaaatcttaacagcagagattaccaaaagtgaaataaatgtaaaaatacaaaaaaaaycaaaaaayaaaaayaaaaagggtgcagagtattttgctccccattctaaagagaacacaggagtttgccatcagtaaaaacagattgtccagctgctctgcctgtacagctgcaaatgaggaaagagacttaatgaagctctrccttttaatttttccttttcaaagcaagtaaatgtgcagcaaaggacayaaaatgtactattactaaaaaaatatgatctttagttaagatcaaagatttttcaagatgaaaaacataatgcactttttactctttcaagaatataaggaaagagat

SEQ ID NO: 42493 - DNA, 600 bp, Chicken  19866894279496_2
atgtttgttatgcagatatataaaacctatatatatatgtatatatatatgtgtgtgtgttccttgttttgtcaattccactaatacaatagtaaaaaaaaaaagaaaaaagaaaaaaagaaaacaatggtgatacagaaattgggtctgctaataagacactgacaaatttttatttacacttttattacaaaattaaaaaaaaaaatcaactaacatttgaagtttaaatttaaaatcttaacagcagagattaccaaaagtgaaataaatgtaaaaatacaaaaaaaaccaaaaaayaaaaayaaaaagggtgcagagtattttgctccccattctaaagagaacacaggagtttgccatcagtaaaaacagattgtccagctgctctgcctgtacagctgcaaatgaggaaagagacttaatgaagctctrccttttaatttttccttttcaaagcaagtaaatgtgcagcaaaggacayaaaatgtactattactaaaaaaatatgatctttagttaagatcaaagatttttcaagatgaaaaacataatgcactttttactctttcaagaatataaggaaagagatttataaaa

SEQ ID NO: 42494 - DNA, 600 bp, Chicken  19866894279496_3
gttatgcagatatataaaacctatatatatatgtatatatatatgtgtgtgtgttccttgttttgtcaattccactaatacaatagtaaaaaaaaaaagaaaaaagaaaaaaagaaaacaatggtgatacagaaattgggtctgctaataagacactgacaaatttttatttacacttttattacaaaattaaaaaaaaaaatcaactaacatttgaagtttaaatttaaaatcttaacagcagagattaccaaaagtgaaataaatgtaaaaatacaaaaaaaaccaaaaaayaaaaayaaaaagggtgcagagtattttgctccccattctaaagagaacacaggagtttgccatcagtaaaaacagattgtccagctgctctgcctgtacagctgcaaatgaggaaagagacttaatgaagctctrccttttaatttttccttttcaaagcaagtaaatgtgcagcaaaggacayaaaatgtactattactaaaaaaatatgatctttagttaagatcaaagatttttcaagatgaaaaacataatgcactttttactctttcaagaatataaggaaagagatttataaaatacyty

SEQ ID NO: 42495 - DNA, 600 bp, Chicken  19866894279496_4
cagaaattgggtctgctaataagacactgacaaatttttatttacacttttattacaaaattaaaaaaaaaaatcaactaacatttgaagtttaaatttaaaatcttaacagcagagattaccaaaagtgaaataaatgtaaaaatacaaaaaaaaccaaaaaayaaaaayaaaaagggtgcagagtattttgctccccattctaaagagaacacaggagtttgccatcagtaaaaacagattgtccagctgctctgcctgtacagctgcaaatgaggaaagagacttaatgaagctctrccttttaatttttccttttcaaagcaagtaaatgtgcagcaaaggacayaaaatgtactattactaaaaaaatatgatctttagttaagatcaaagatttttcaagatgaaaaacataatgcactttttactctttcaagaatataaggaaagagatttataaaatacytyaattctgttaaaatttcagttaagtcatttaagtcagttcactctaacagattaacatctacaaattgcaagatggttgagacttaattctttgaatgcgttgtaaatgataaacactatacacagaaa

SEQ ID NO: 42496 - DNA, 600 bp, Chicken  19866894279496_5
ttattacaaaattaaaaaaaaaaatcaactaacatttgaagtttaaatttaaaatcttaacagcagagattaccaaaagtgaaataaatgtaaaaatacaaaaaaaaccaaaaaayaaaaayaaaaagggtgcagagtattttgctccccattctaaagagaacacaggagtttgccatcagtaaaaacagattgtccagctgctctgcctgtacagctgcaaatgaggaaagagacttaatgaagctctrccttttaatttttccttttcaaagcaagtaaatgtgcagcaaaggacayaaaatgtactattactaaaaaaatatgatctttagttaagatcaaagatttttcaagatgaaaaacataatgcactttttactctttcaagaatataaggaaagagatttataaaatacytyaattctgttaaaatttcagttaagtcatttaagtcagttcactctaacagattaacatctacaaattgcaagatggttgagacttaattctttgaatgcgttgtaaatgataaacactatacacagaaagatgtaactgttgaatgttttaaaagaatgtscccaatcaacaacttac

SEQ ID NO: 42497 - DNA, 600 bp, Chicken  19866894279496_6
ayaaaaagggtgcagagtattttgctccccattctaaagagaacacaggagtttgccatcagtaaaaacagattgtccagctgctctgcctgtacagctgcaaatgaggaaagagacttaatgaagctctrccttttaatttttccttttcaaagcaagtaaatgtgcagcaaaggacayaaaatgtactattactaaaaaaatatgatctttagttaagatcaaagatttttcaagatgaaaaacataatgcactttttactctttcaagaatataaggaaagagatttataaaatacytyaattctgttaaaatttcagttaagtcatttaagtcagttcactctaacagattaacatctacaaattgcaagatggttgagacttaattctttgaatgcgttgtaaatgataaacactatacacagaaagatgtaactgttgaatgttttaaaagaatgtscccaatcaacaacttacacacctatgaggtagacaggcagatgcaaatatgcaggaaaaaatactgttttcataattattttagtttcaaatccactgttttgcaaagaccaatcatctttcaggaaatatttgcaa

SEQ ID NO: 42498 - DNA, 600 bp, Chicken  19866894279496_7
aaaaagggtgcagagtattttgctccccattctaaagagaacacaggagtttgccatcagtaaaaacagattgtccagctgctctgcctgtacagctgcaaatgaggaaagagacttaatgaagctctrccttttaatttttccttttcaaagcaagtaaatgtgcagcaaaggacayaaaatgtactattactaaaaaaatatgatctttagttaagatcaaagatttttcaagatgaaaaacataatgcactttttactctttcaagaatataaggaaagagatttataaaatacytyaattctgttaaaatttcagttaagtcatttaagtcagttcactctaacagattaacatctacaaattgcaagatggttgagacttaattctttgaatgcgttgtaaatgataaacactatacacagaaagatgtaactgttgaatgttttaaaagaatgtscccaatcaacaacttacacacctatgaggtagacaggcagatgcaaatatgcaggaaaaaatactgttttcataattattttagtttcaaatccactgttttgcaaagaccaatcatctttcaggaaatatttgcaatg

SEQ ID NO: 42499 - DNA, 479 bp, Chicken  19866894279496_8
tgtgcagcaaaggacayaaaatgtactattactaaaaaaatatgatctttagttaagatcaaagatttttcaagatgaaaaacataatgcactttttactctttcaagaatataaggaaagagatttataaaatacytyaattctgttaaaatttcagttaagtcatttaagtcagttcactctaacagattaacatctacaaattgcaagatggttgagacttaattctttgaatgcgttgtaaatgataaacactatacacagaaagatgtaactgttgaatgttttaaaagaatgtscccaatcaacaacttacacacctatgaggtagacaggcagatgcaaatatgcaggaaaaaatactgttttcataattattttagtttcaaatccactgttttgcaaagaccaatcatctttcaggaaatatttgcaatgcaaacctatgtagtttgcttgccactctttaaaaataaca

SEQ ID NO: 42500 - DNA, 599 bp, Chicken  19866894279497_1
  misc_feature (1)..(217): n is any nucleotide
nnnnnnnnnnnnnnnnnnnnnnnnnnnnnnnnnnnnnnnnnnnnnnnnnnnnnnnnnnnnnnnnnnnnnnnnnnnnnnnnnnnnnnnnnnnnnnnnnnnnnnnnnnnnnnnnnnnnnnnnnnnnnnnnnnnnnnnnnnnnnnnnnnnnnnnnnnnnnnnnnnnnnnnnnnnnnnnnnnnnnnnnnnnnnnnnnnnnnnnnnnnnnnnnnnnnnnnnntggaagtccatacataatttgttgtaattgtgctaaagttggtagtttggaaaagacaaactccattagcattaaaaatgacrtttgcaagaaaaagctgacacagtaactgtgatgtaagtgacaccatattatctaattatgtactagggcatcaattttattgtcttgggctccgtggtggctacttgtttaatagtttgcacacaaatgaatgtgagattggtgaaaaaggtataagtgtgttgagaggtaaagggtctgtattcaacagatgttcaggcatttttaaaaatatgggaggtcttaacatttgtaaaccagctttagtacctgaatctgaacaggttctgaacagtctgtaaaagataacaaaatgaaa

SEQ ID NO: 42501 - DNA, 600 bp, Chicken  19866894279500_1
aaaatcaactggcagcatgcttcattgaaaaatagccagggaaagtccctgagagctattaattaagtttctaaatatgtgaacatccaacgcatacctaaggggaatggagaaagcagtttcctgccagctttagctttaattcctttacccattttgcacctaccattttgccagcataaatatttcctggggtcatctattcagtaaaatataaatgacaacagttggttgtcagtcaaatcacacccatgttttctttcttgccttcacaaatatttctggcacttccagaaattsagaggcatgtgttttggattgcttttcttgctttatgttgaaaatttacacaacatctagagactccttcagtcaaatcttcaacatgtcttttcagtacttcctctcatcccctgaaagttgttatgaataaataaagaaaaaaggctggccactggcctgaaccaagrttgcacttcctacagtttacccaacaatgaggttagtgctgctaacaccaatggcattttagtactttacccaagctyaggctcttggtttttgccatcttaagaaggactgggatgaaaagatggtatc

SEQ ID NO: 42502 - DNA, 600 bp, Chicken  19866894279500_2
ttgccagcataaatatttcctggggtcatctattcagtaaaatataaatgacaacagttggttgtcagtcaaatcacacccatgttttctttcttgccttcacaaatatttctggcacttccagaaattsagaggcatgtgttttggattgcttttcttgctttatgttgaaaatttacacaacatctagagactccttcagtcaaatcttcaacatgtcttttcagtacttcctctcatcccctgaaagttgttatgaataaataaagaaaaaaggctggccactggcctgaaccaagrttgcacttcctacagtttacccaacaatgaggttagtgctgctaacaccaatggcattttagtactttacccaagctyaggctcttggtttttgccatcttaagaaggactgggatgaaaagatggtatcctggttgaatgttacctttcatgcaaaactctgttcaaagtagagatcagcaacagcatcaaaacttgtctgtactttgtccatgtccataaggaagaggtcagttggaattctcactcmtcttatctcagaacttgctgtcaaggaggttaattgcaccacgactgatc

SEQ ID NO: 42503 - DNA, 600 bp, Chicken  19866894279500_3
cccatgttttctttcttgccttcacaaatatttctggcacttccagaaattsagaggcatgtgttttggattgcttttcttgctttatgttgaaaatttacacaacatctagagactccttcagtcaaatcttcaacatgtcttttcagtacttcctctcatcccctgaaagttgttatgaataaataaagaaaaaaggctggccactggcctgaaccaagrttgcacttcctacagtttacccaacaatgaggttagtgctgctaacaccaatggcattttagtactttacccaagctyaggctcttggtttttgccatcttaagaaggactgggatgaaaagatggtatcctggttgaatgttacctttcatgcaaaactctgttcaaagtagagatcagcaacagcatcaaaacttgtctgtactttgtccatgtccataaggaagaggtcagttggaattctcactcmtcttatctcagaacttgctgtcaaggaggttaattgcaccacgactgatcacagaaactcattcaatgtgtgttagccaatacagattgctgtgatgtcttactaaggaaaacacactctactaggta

SEQ ID NO: 42504 - DNA, 600 bp, Chicken  19866894279500_4
ttgttatgaataaataaagaaaaaaggctggccactggcctgaaccaagrttgcacttcctacagtttacccaacaatgaggttagtgctgctaacaccaatggcattttagtactttacccaagctyaggctcttggtttttgccatcttaagaaggactgggatgaaaagatggtatcctggttgaatgttacctttcatgcaaaactctgttcaaagtagagatcagcaacagcatcaaaacttgtctgtactttgtccatgtccataaggaagaggtcagttggaattctcactcmtcttatctcagaacttgctgtcaaggaggttaattgcaccacgactgatcacagaaactcattcaatgtgtgttagccaatacagattgctgtgatgtcttactaaggaaaacacactctactaggtataaaaggtggaaattcttcatagcttatccttatatttgcttttaattttcatcctaactactaatgatgaggcattttctgagaactgatgatcaactgacaggtgtttatggccacagatgtagccaagggtgccattagtcccagctggtcattaatccctgagaatgt

SEQ ID NO: 42505 - DNA, 599 bp, Chicken  19866894279512_1
  misc_feature (1)..(16): n is any nucleotide
nnnnnnnnnnnnnnnncttctaatttagtacagagtggtctcttgtggaagaaaaaaaaaattaagagcagtagtaggcatattttagattcctatatattaaaaaggaatacaggatagtcggtaaggactgaaagatagaagaaggggagaggaagagagaggaggggaggggcctaggtcttctcactgaagcaaatacaaaaacatggtaattgctagcctgtctgtggaaagggccacatttatactgcctgctaaactgaaacattttctgaggctgtgtggttcttccactcytctaatcttagctgaagggactgtgaaatttattcraactgttgtattgaaaaaaatcccatcctttttttttttatagtaagcatatgaagattatagagcaacagacatgccaacattatgggactttttattctaaagtttttaatctcattgcatacaggtagaaaaaaatattttatctgtattgattgctgtggcttcaaatcttgaagtccagaataacaattgacctcttagaggccttgctgtcaaggttagcagtttaggtcaagaatgtatgttacaagatggggtag

SEQ ID NO: 42506 - DNA, 600 bp, Chicken  19866894279512_2
ggtctcttgtggaagaaaaaaaaaattaagagcagtagtaggcatattttagattcctatatattaaaaaggaatacaggatagtcggtaaggactgaaagatagaagaaggggagaggaagagagaggaggggaggggcctaggtcttctcactgaagcaaatacaaaaacatggtaattgctagcctgtctgtggaaagggccacatttatactgcctgctaaactgaaacattttctgaggctgtgtggttcttccactcytctaatcttagctgaagggactgtgaaatttattcraactgttgtattgaaaaaaatcccatcctttttttttttatagtaagcatatgaagattatagagcaacagacatgccaacattatgggactttttattctaaagtttttaatctcattgcatacaggtagaaaaaaatattttatctgtattgattgctgtggcttcaaatcttgaagtccagaataacaattgacctcttagaggccttgctgtcaaggttagcagtttaggtcaagaatgtatgttacaagatggggtagagttacagtcaaatttccttgaaaatagtattttgcc

SEQ ID NO: 42507 - DNA, 599 bp, Chicken  19866894279513_1
  misc_feature (1)..(135): n is any nucleotide
nnnnnnnnnnnnnnnnnnnnnnnnnnnnnnnnnnnnnnnnnnnnnnnnnnnnnnnnnnnnnnnnnnnnnnnnnnnnnnnnnnnnnnnnnnnnnnnnnnnnnnnnnnnnnnnnnnnnnnnnnnnnnnnnnnnnnnnatgtctgcaaaaccacaccaaaaaaagatatcagtgaatgtaaacagtgagtaaatgtgaagacaagtatcattatatctcaacacaggatggtgaaataactttccaaatcaactagttgtgaggtcaaatccataaagtgagttagccattgtgaaatggagygctgctgttttacatatggagaaatgtatttgtttcatcactgcaggggactatgacagtgattctgattcagagatgggctgtagaactaattctgtcatagaaagaaatgacaaaattcccttgatatttagcaattcagaataaagcccataatagatcagattttttcatgctgactctagaacagaggtcycatgatacccactaaaatgcttttcactgctaacctatagtgattaacttgcactgagtgtcaagaaagtactactacattctagtacctaataaataccaat

SEQ ID NO: 42508 - DNA, 600 bp, Chicken  19866894279513_2
gacaagtatcattatatctcaacacaggatggtgaaataactttccaaatcaactagttgtgaggtcaaatccataaagtgagttagccattgtgaaatggagygctgctgttttacatatggagaaatgtatttgtttcatcactgcaggggactatgacagtgattctgattcagagatgggctgtagaactaattctgtcatagaaagaaatgacaaaattcccttgatatttagcaattcagaataaagcccataatagatcagattttttcatgctgactctagaacagaggtcycatgatacccactaaaatgcttttcactgctaacctatagtgattaacttgcactgagtgtcaagaaagtactactacattctagtacctaataaataccaattttctgagtcaattgctgggattctagagccagcaaagatgtttgcctttatacctttgggttgagagatgatcagctcaacttcatcaggagaattttgtataattttaactgcagtattgaatgaaacaccctcaagactaatattattcacagagatgagtcgtcccccttaaaaagaataaaaacaagacaat

SEQ ID NO: 42509 - DNA, 600 bp, Chicken  19866894279516_1
cctgaggatgtgcacttgagtcagaagggttcatctcatgaagactgcgacagaaagcggcgacctgctctgtactctttaaaaacaagaaagaggaaaggccagtggtaataactgaggcaggagctacaggaacgaaggagttgagaagcctttgcagttatgaagctgcagtcaccaacgtccagaagtacacgcgttatttcatatatatatccaccctctctttcagtgtctaagggtaagcgaaaaagagttgcctaattcaagttagctgaagtgttgtctggtaaccttccygttttcaaataaaygtgatctttaamaggcttgtcgagcatttaggattgaaacaaacaaacaacagggcctgagaagtgagaactaaaaatgatagtgccatcaaaacacccaagccctttgcragttccctaatctagtttgcaacagtcctgtacatggcggtgtcaatacagccaaagagacaacatggcgatagaaaccctctgagttgttttacaggggaggagggccatctgggtaaccaaagcctcaggcttcaaagctttctggaaagtacctgcatttttgtgctgggcc

SEQ ID NO: 42510 - DNA, 600 bp, Chicken  19866894279516_2
cttgagtcagaagggttcatctcatgaagactgcgacagaaagcggcgacctgctctgtactctttaaaaacaagaaagaggaaaggccagtggtaataactgaggcaggagctacaggaacgaaggagttgagaagcctttgcagttatgaagctgcagtcaccaacgtccagaagtacacgcgttatttcatatatatatccaccctctctttcagtgtctaagggtaagcgaaaaagagttgcctaattcaagttagctgaagtgttgtctggtaaccttccygttttcaaataaaygtgatctttaamaggcttgtcgagcatttaggattgaaacaaacaaacaacagggcctgagaagtgagaactaaaaatgatagtgccatcaaaacacccaagccctttgcragttccctaatctagtttgcaacagtcctgtacatggcggtgtcaatacagccaaagagacaacatggcgatagaaaccctctgagttgttttacaggggaggagggccatctgggtaaccaaagcctcaggcttcaaagctttctggaaagtacctgcatttttgtgctgggcctggaaacacacctt

SEQ ID NO: 42511 - DNA, 600 bp, Chicken  19866894279516_3
gggttcatctcatgaagactgcgacagaaagcggcgacctgctctgtactctttaaaaacaagaaagaggaaaggccagtggtaataactgaggcaggagctacaggaacgaaggagttgagaagcctttgcagttatgaagctgcagtcaccaacgtccagaagtacacgcgttatttcatatatatatccaccctctctttcagtgtctaagggtaagcgaaaaagagttgcctaattcaagttagctgaagtgttgtctggtaaccttccygttttcaaataaaygtgatctttaamaggcttgtcgagcatttaggattgaaacaaacaaacaacagggcctgagaagtgagaactaaaaatgatagtgccatcaaaacacccaagccctttgcragttccctaatctagtttgcaacagtcctgtacatggcggtgtcaatacagccaaagagacaacatggcgatagaaaccctctgagttgttttacaggggaggagggccatctgggtaaccaaagcctcaggcttcaaagctttctggaaagtacctgcatttttgtgctgggcctggaaacacaccttgcagggtgtatt

SEQ ID NO: 42512 - DNA, 600 bp, Chicken  19866894279516_4
gctacaggaacgaaggagttgagaagcctttgcagttatgaagctgcagtcaccaacgtccagaagtacacgcgttatttcatatatatatccaccctctctttcagtgtctaagggtaagcgaaaaagagttgcctaattcaagttagctgaagtgttgtctggtaaccttccygttttcaaataaaygtgatctttaamaggcttgtcgagcatttaggattgaaacaaacaaacaacagggcctgagaagtgagaactaaaaatgatagtgccatcaaaacacccaagccctttgcragttccctaatctagtttgcaacagtcctgtacatggcggtgtcaatacagccaaagagacaacatggcgatagaaaccctctgagttgttttacaggggaggagggccatctgggtaaccaaagcctcaggcttcaaagctttctggaaagtacctgcatttttgtgctgggcctggaaacacaccttgcagggtgtatttcctccttacgcatcaggtttttcagagctgctgcatctcactggtttcttcaatgtttaattacgtctctatataaagagaattatcctcccttcacc

SEQ ID NO: 42513 - DNA, 600 bp, Chicken  19866894279517_1
tgcacgtaaggatccgcagaacatctctccagatctcaccacggtgaaagcttcagcaagacttttatgctgccttcatcttgggggatttctcatttgtcaaatagtcccaaataaatggaagaggaaggttttgctgttgttccttaactcattgttagtgacttattcattacaccctgaggaatatccatctcttttttttggctctcaccacgactgcactccacagacaactgtgccacattagtccagccactttagcactgatttgtgcttttcccccctttccttattttycccccccgagaacacaaactgctaaatttgcctcagattccacatttgccatgcctgctcttgcacactgactctggctcagccatatatctgtcattggatccattagtaagtacagtagttgagttcagctttctgcatgtgttgctgagcttcctgcacgctatgctgggtctcaaggaggtttggggagcaaagcagtgctgagtcttttccctatggtataaatcaggggagctggctcaagtaacacattaattcaaagcccctcttctgcccatccatctcccctccagtggg

SEQ ID NO: 42514 - DNA, 599 bp, Chicken  19866894279519_1
  misc_feature (1)..(68): n is any nucleotide
nnnnnnnnnnnnnnnnnnnnnnnnnnnnnnnnnnnnnnnnnnnnnnnnnnnnnnnnnnnnnnnnnnnntacttatggaatggctccaggcacggtaagcccacagaaatgcactaagctgctaacaaatcccaggacacaataatgcctgagaaggctctgctcatggatgcattccccacacatggcatggtatctaggcagatagcaccagaatcctggtcctttaatatacttgacataagagcacacctatcactgttaactatccaaatttacattaaaaagtactgtaagcctyatttctctactatgagcacagtgaatataaaaatataatagcrtcaatttccmagaaaactacaatatttaaactggtattcaagtttttgagaacgagcagcatattagcaaacaatttgaacactaactttttttttcccccccacttcttaatttagtatgagttaaatgttagtgaagagttttcatagaaaatctttctttttctttatcaaatgttaaataatttatatcaagttaggttgctgaaaactttagatttaacaaggacaagaattaaagttgtgatacaatcat

SEQ ID NO: 42515 - DNA, 600 bp, Chicken  19866894279519_10
tcttccaaaactaccccaaaaggctctgcactttccacatcctcactggaggtagtacctacccccaggttctgccagcagaccataactgagctcttgtgacctctcagccacttttaaacctacccttgctcagccattaggccgtgaggtgacagaggaaaagccagacaaagcactagcatggctgtcccgttkctttcttctaaagaggactaaaccctgaacagtcccaataccagtgagtctacacaacccaatctgtaaataaggaatccacatctagtcctcttctttggsagccaatagcttgccatgcccataaacgatccaagaacaatttcactagcactgctaataagccttttacaattgctctgcttctttcttgagatcagcgctcataagtcaatgaagactggatggtgcctcctgcaaagagtgaaaagcctcatttgtttgtacgataagttaaataaagagttatagtcttagaatgatagcatatcccaagttggtgggggcctgcaaggatcaagtccaactcccagctccacacagcaccacccaacattcaaacactgagcaatacccaaatgc

SEQ ID NO: 42516 - DNA, 599 bp, Chicken  19866894279519_2
  misc_feature (1)..(25): n is any nucleotide
nnnnnnnnnnnnnnnnnnnnnnnnntacttatggaatggctccaggcacggtaagcccacagaaatgcactaagctgctaacaaatcccaggacacaataatgcctgagaaggctctgctcatggatgcattccccacacatggcatggtatctaggcagatagcaccagaatcctggtcctttaatatacttgacataagagcacacctatcactgttaactatccaaatttacattaaaaagtactgtaagcctyatttctctactatgagcacagtgaatataaaaatataatagcrtcaatttccmagaaaactacaatatttaaactggtattcaagtttttgagaacgagcagcatattagcaaacaatttgaacactaactttttttttcccccccacttcttaatttagtatgagttaaatgttagtgaagagttttcatagaaaatctttctttttctttatcaaatgttaaataatttatatcaagttaggttgctgaaaactttagatttaacaaggacaagaattaaagttgtgatacaatcataagccaatctcatttgaagcaaacactgctgttccctcaatta

SEQ ID NO: 42517 - DNA, 599 bp, Chicken  19866894279519_3
  misc_feature (1)..(15): n is any nucleotide
nnnnnnnnnnnnnnntacttatggaatggctccaggcacggtaagcccacagaaatgcactaagctgctaacaaatcccaggacacaataatgcctgagaaggctctgctcatggatgcattccccacacatggcatggtatctaggcagatagcaccagaatcctggtcctttaatatacttgacataagagcacacctatcactgttaactatccaaatttacattaaaaagtactgtaagcctyatttctctactatgagcacagtgaatataaaaatataatagcrtcaatttccmagaaaactacaatatttaaactggtattcaagtttttgagaacgagcagcatattagcaaacaatttgaacactaactttttttttcccccccacttcttaatttagtatgagttaaatgttagtgaagagttttcatagaaaatctttctttttctttatcaaatgttaaataatttatatcaagttaggttgctgaaaactttagatttaacaaggacaagaattaaagttgtgatacaatcataagccaatctcatttgaagcaaacactgctgttccctcaattaaaacatgaca

SEQ ID NO: 42518 - DNA, 600 bp, Chicken  19866894279519_4
cttaatttgctcacagtagattagaaacgacaaatcaagagaccttcaagcagacattcatccgtgatagccaattactgggtaactgaaactggtacaagttgtacatcgtggatgacagatcaagcgtttcaaatcttaccgtagagtacaaaatgaattttacctgtacaattgagtaaggcttcaaaaagcagctttattttcactgaaatggtttctgctttgcatgcttttctgctcccaccccaactttttatttttaaaagaaaaacacatacattaaaatgacaagaaaaytaaaaccttttcaaaatggtaactgttttctattcaggattacttgagggaagccaacatctctctccatgcacagatcttaccagtcagttgcatctacactactacagatacaaactaattttgaccataacaagacacaagaggttaaggaacgagggaaagatggatttgttccttcctagaaagaacgcagtcataagaaaagaaaaaraaaaatcattagggggacggagaaataaatcctcrtgagctttatcctacaactaagtctaagtagctgaaccacaaacatacgca

SEQ ID NO: 42519 - DNA, 600 bp, Chicken  19866894279519_5
tgaaatggtttctgctttgcatgcttttctgctcccaccccaactttttatttttaaaagaaaaacacatacattaaaatgacaagaaaaytaaaaccttttcaaaatggtaactgttttctattcaggattacttgagggaagccaacatctctctccatgcacagatcttaccagtcagttgcatctacactactacagatacaaactaattttgaccataacaagacacaagaggttaaggaacgagggaaagatggatttgttccttcctagaaagaacgcagtcataagaaaagyaaaaraaaaatcattagggggacggagaaataaatcctcrtgagctttatcctacaactaagtctaagtagctgaaccacaaacatacgcagtagcaaagaccactgagattaagtggaacccagaaagagccaaaacacaaaactcatcctctttgacactgctcaattttagcccagtccctgccctatcttttttccttccccaatcaccttggctakctgtctcccagacaataccatggcaatccacaggagctcattcaaaaaaatactttcagaaggcagcagtgatcagatc

SEQ ID NO: 42520 - DNA, 600 bp, Chicken  19866894279519_6
tggtttctgctttgcatgcttttctgctcccaccccaactttttatttttaaaagaaaaacacatacattaaaatgacaagaaaaytaaaaccttttcaaaatggtaactgttttctattcaggattacttgagggaagccaacatctctctccatgcacagatcttaccagtcagttgcatctacactactacagatacaaactaattttgaccataacaagacacaagaggttaaggaacgagggaaagatggatttgttccttcctagaaagaacgcagtcataagaaaagaaaaaraaaaatcattagggggacggagaaataaatcctcrtgagctttatcctacaactaagtctaagtagctgaaccacaaacatacgcagtagcaaagaccactgagattaagtggaacccagaaagagccaaaacacaaaactcatcctctttgacactgctcaattttagcccagtccctgccctatcttttttccttccccaatcaccttggctakctgtctcccagacaataccatggcaatccacaggagctcattcaaaaaaatactttcagaaggcagcagtgatcagatcacaca

SEQ ID NO: 42521 - DNA, 600 bp, Chicken  19866894279519_7
caactttttatttttaaaagaaaaacacatacattaaaatgacaagaaaaytaaaaccttttcaaaatggtaactgttttctattcaggattacttgagggaagccaacatctctctccatgcacagatcttaccagtcagttgcatctacactactacagatacaaactaattttgaccataacaagacacaagaggttaaggaacgagggaaagatggatttgttccttcctagaaagaacgcagtcataagaaaagaaaaaraaaaatcattagggggacggagaaataaatcctcrtgagctttatcctacaactaagtctaagtagctgaaccacaaacatacgcagtagcaaagaccactgagattaagtggaacccagaaagagccaaaacacaaaactcatcctctttgacactgctcaattttagcccagtccctgccctatcttttttccttccccaatcaccttggctakctgtctcccagacaataccatggcaatccacaggagctcattcaaaaaaatactttcagaaggcagcagtgatcagatcacacaagatccgggttcctccatcttatgtggtcttccaa

SEQ ID NO: 42522 - DNA, 600 bp, Chicken  19866894279519_8
taacaagacacaagaggttaaggaacgagggaaagatggatttgttccttcctagaaagaacgcagtcataagaaaagaaaaaraaaaatcattagggggacggagaaataaatcctcrtgagctttatcctacaactaagtctaagtagctgaaccacaaacatacgcagtagcaaagaccactgagattaagtggaacccagaaagagccaaaacacaaaactcatcctctttgacactgctcaattttagcccagtccctgccctatcttttttccttccccaatcaccttggctakctgtctcccagacaataccatggcaatccacaggagctcattcaaaaaaatactttcagaaggcagcagtgatcagatcacacaagatccgggttcctccatcttatgtggtcttccaaaactaccccaaaaggctctgcactttccacatcctcactggaggtagtacctacccccaggttctgccagcagaccataactgagctcttgtgacctctcagccacttttaaacctacccttgctcagccattaggccgtgaggtgacagaggaaaagccagacaaagcactagcatggct

SEQ ID NO: 42523 - DNA, 600 bp, Chicken  19866894279519_9
agacaataccatggcaatccacaggagctcattcaaaaaaatactttcagaaggcagcagtgatcagatcacacaagatccgggttcctccatcttatgtggtcttccaaaactaccccaaaaggctctgcactttccacatcctcactggaggtagtacctacccccaggttctgccagcagaccataactgagctcttgtgacctctcagccacttttaaacctacccttgctcagccattaggccgtgaggtgacagaggaaaagccagacaaagcactagcatggctgtcccgttkctttcttctaaagaggactaaaccctgaacagtcccaataccagtgagtctacacaacccaatctgtaaataaggaatccacatctagtcctcttctttggsagccaatagcttgccatgcccataaacgatccaagaacaatttcactagcactgctaataagccttttacaattgctctgcttctttcttgagatcagcgctcataagtcaatgaagactggatggtgcctcctgcaaagagtgaaaagcctcatttgtttgtacgataagttaaataaagagttatagtcttagaat

SEQ ID NO: 42524 - DNA, 599 bp, Chicken  19866894279527_1
  misc_feature (1)..(33): n is any nucleotide
nnnnnnnnnnnnnnnnnnnnnnnnnnnnnnnnntcgagctgacaggagaaaaccacttctgtcccacagcacaggcagacagctctccagcagcagtgctgtggtgttgccacgatagtggccaggcaagaaaataatcttccctttaagtactaaaagtggagctctgtcagtagtctgcattgcatacgcaggagtcccaagtgtctgtctaggtaacagagttctcctggcccagctggagacctgcatttgattctgattgtatccatatatgtgcttggttgggatttttttgtyctccttaaatcttttcctctccaaattctgtctgtgttcagggtgctgttgctgctaaaagagccaggtcaggctgratcccattgtggtagctgctgtgggcaggggatgttaatatgaaggagaaagccacaccaggaagaggagaaaaagaggaatggggaaatgaatgtaatagcatatttgtggttctctgctgatctggaagagtgatcgcagctgtctctgcatgtccagccataatcaggggctgaatctgtctgctgaagtcagagcatgccctgaacaccacagcacta

SEQ ID NO: 42525 - DNA, 600 bp, Chicken  19866894279527_2
gacagctctccagcagcagtgctgtggtgttgccacgatagtggccaggcaagaaaataatcttccctttaagtactaaaagtggagctctgtcagtagtctgcattgcatacgcaggagtcccaagtgtctgtctaggtaacagagttctcctggcccagctggagacctgcatttgattctgattgtatccatatatgtgcttggttgggatttttttgtyctccttaaatcttttcctctccaaattctgtctgtgttcagggtgctgttgctgctaaaagagccaggtcaggctgratcccattgtggtagctgctgtgggcaggggatgttaatatgaaggagaaagccacaccaggaagaggagaaaaagaggaatggggaaatgaatgtaatagcatatttgtggttctctgctgatctggaagagtgatcgcagctgtctctgcatgtccagccataatcaggggctgaatctgtctgctgaagtcagagcatgccctgaacaccacagcactataacattttcccactgtttttcctggaattggtgcctgaaacgtttcattgcagctcttctgcagtcatcagaccagc

SEQ ID NO: 42526 - DNA, 600 bp, Chicken  19866894279528_1
aaaagcagaaaatcgtgattttcttttttctttttttaaattaaaaagtaaaagaattctgttagatttaagttagggaactgtctagcttctgtaagaacatacagtggtagcatgtagcaatatgtatttgtatatcattgtcattttcttgaattttgttcaaataattgtgcctatattgtggctttcataggtctatagaaagccatgtgaggaagagcaccataatgatgggaaggttgtaacaggacagcagtttataatattttctctgttattttcagcacttggataacrcamagaaagaattcaggctattgataccacttcctttctctctatctttggacttctttattcaaatacaaaacttcygtgcttctctcttcttccagacaccttggttcctcggtgtttaaaatgagaatcagtactgagctgatgataatgagtgtgagagatgaagaacaagttccatgtcaataactataaaaaatcagagaatttgctttgtttattggacagtaacttacagactgccttgtgattagaacaggagacacagctgataatcgttattattctggcttttgttac

SEQ ID NO: 42527 - DNA, 600 bp, Chicken  19866894279528_2
agcagaaaatcgtgattttcttttttctttttttaaattaaaaagtaaaagaattctgttagatttaagttagggaactgtctagcttctgtaagaacatacagtggtagcatgtagcaatatgtatttgtatatcattgtcattttcttgaattttgttcaaataattgtgcctatattgtggctttcataggtctatagaaagccatgtgaggaagagcaccataatgatgggaaggttgtaacaggacagcagtttataatattttctctgttattttcagcacttggataacrcamagaaagaattcaggctattgataccacttcctttctctctatctttggacttctttattcaaatacaaaacttcygtgcttctctcttcttccagacaccttggttcctcggtgtttaaaatgagaatcagtactgagctgatgataatgagtgtgagagatgaagaacaagttccatgtcaataactataaaaaatcagagaatttgctttgtttattggacagtaacttacagactgccttgtgattagaacaggagacacagctgataatcgttattattctggcttttgttactga

SEQ ID NO: 42528 - DNA, 600 bp, Chicken  19866894279528_3
aactgtctagcttctgtaagaacatacagtggtagcatgtagcaatatgtatttgtatatcattgtcattttcttgaattttgttcaaataattgtgcctatattgtggctttcataggtctatagaaagccatgtgaggaagagcaccataatgatgggaaggttgtaacaggacagcagtttataatattttctctgttattttcagcacttggataacrcamagaaagaattcaggctattgataccacttcctttctctctatctttggacttctttattcaaatacaaaacttcygtgcttctctcttcttccagacaccttggttcctcggtgtttaaaatgagaatcagtactgagctgatgataatgagtgtgagagatgaagaacaagttccatgtcaataactataaaaaatcagagaatttgctttgtttattggacagtaacttacagactgccttgtgattagaacaggagacacagctgataatcgttattattctggcttttgttactgaattgctcaataaaactgggcgcatctcctaattttaattggaaaggttggaggtgctaccatgaaactcttcagt

SEQ ID NO: 42529 - DNA, 599 bp, Chicken  19866894279533_1
  misc_feature (1)..(3): n is any nucleotide
nnncacagtgagtgggggtggggacgtcctcccatgacaccctcctccctcgtcccgctgccactcaccaccaggttcccgatgaccatgaccatcatgaagacgatgaggcacatggtctggccggccacctccatgcagtcccacatggtctcgatccactcaccgcagaggatgcggaagacaatgaggaaggagtggaaaaagtcgtgcatgtgccagcggggcagtgtgcagtcgagggagatcttgcagacgcactccatgtagctcttcccaaagagctgcatccccaccackgcgaagatgaagacgatgatggccagcaccagtgtcaggttcccaagcgcgcccactgagttgccaatgatcttgatgagcatgttgagggtgggccaagacttggccaatttgaagaccctcagctgtaggagcaaggaggcaaggtgtgagttgctgggggtcttcattgccacaggggttgggattggaccttcacrtggcagttttaggatrgaytgaacacccaacagctttgctaagagtcgcattcctcaatacttggctcagatggtgctgttatcctggaggttggcact

SEQ ID NO: 42530 - DNA, 600 bp, Chicken  19866894279533_2
gaaaaagtcgtgcatgtgccagcggggcagtgtgcagtcgagggagatcttgcagacgcactccatgtagctcttcccaaagagctgcatccccaccackgcgaagatgaagacgatgatggccagcaccagtgtcaggttcccaagcgcgcccactgagttgccaatgatcttgatgagcatgttgagggtgggccaagacttggccaatttgaagaccctcagctgtaggagcaaggaggcaaggtgtgagttgctgggggtcttcattgccacaggggttgggattggaccttcacrtggcagttttaggatrgaytgaacacccaacagctttgctaagagtcgcattcctcaatacttggctcagatggtgctgttatcctggaggttggcactggacaatctttgaggtcccttccaaccctagtcattctatgattctgtccttaactggggccaagctggtggctgccatgaatgtccttgaatgagccattccccacccctctggtgatcccaccccaaacccacagatttcatccccatgccacataccaagcggaaggagcgcagcacggagagcccctgcacattggc

SEQ ID NO: 42531 - DNA, 600 bp, Chicken  19866894279533_3
tgccagcggggcagtgtgcagtcgagggagatcttgcagacgcactccatgtagctcttcccaaagagctgcatccccaccackgcgaagatgaagacgatgatggccagcaccagtgtcaggttcccaagcgcgcccactgagttgccaatgatcttgatgagcatgttgagggtgggccaagacttggccaatttgaagaccctcagctgtaggagcaaggaggcaaggtgtgagttgctgggggtcttcattgccacaggggttgggattggaccttcacrtggcagttttaggatrgaytgaacacccaacagctttgctaagagtcgcattcctcaatacttggctcagatggtgctgttatcctggaggttggcactggacaatctttgaggtcccttccaaccctagtcattctatgattctgtccttaactggggccaagctggtggctgccatgaatgtccttgaatgagccattccccacccctctggtgatcccaccccaaacccacagatttcatccccatgccacataccaagcggaaggagcgcagcacggagagcccctgcacattggccagccccagctccacc

SEQ ID NO: 42532 - DNA, 600 bp, Chicken  19866894279533_4
cagcggggcagtgtgcagtcgagggagatcttgcagacgcactccatgtagctcttcccaaagagctgcatccccaccackgcgaagatgaagacgatgatggccagcaccagtgtcaggttcccaagcgcgcccactgagttgccaatgatcttgatgagcatgttgagggtgggccaagacttggccaatttgaagaccctcagctgtaggagcaaggaggcaaggtgtgagttgctgggggtcttcattgccacaggggttgggattggaccttcacrtggcagttttaggatrgaytgaacacccaacagctttgctaagagtcgcattcctcaatacttggctcagatggtgctgttatcctggaggttggcactggacaatctttgaggtcccttccaaccctagtcattctatgattctgtccttaactggggccaagctggtggctgccatgaatgtccttgaatgagccattccccacccctctggtgatcccaccccaaacccacagatttcatccccatgccacataccaagcggaaggagcgcagcacggagagcccctgcacattggccagccccagctccaccagg

SEQ ID NO: 42533 - DNA, 600 bp, Chicken  19866894279538_1
taactgcaaataacttggaaaatatatatccgtatttcctatgcaaatccagaaaatctctattgtttccacattgctctttaaactctttccatatacttgccagtgagcaattatgccataaaaatccgtgaaggacaatgactcaccactttcaaatttcaggcacatagtaaaatcacttcccgcacagtgcgcatggctatgttcccttcaggcaaaactacttaaaagaaactcactgaggataagaaacaccatcagaaacacataatgcagagatagatagctcatcttacmtgcaagatgcctctcacattattctgagatgcaataactggtggaaacatcagttattacagagaaaattaggtcttctacatataatcaacgttttgtttattataattttatttttctctgattccataaaaaatgttatcaaagtaactatgttttctgaatatttatgtgaatttgtgcaattagtttaggacttgttcttctatcactttgacatacataaaaattgaaaactttgaaagtgatttaaattttctaaatcttctacctcctaaacacttaatacatgttatggag

SEQ ID NO: 42534 - DNA, 570 bp, Chicken  19866894279540_1
agaattaaggaatcagaaacttgcagttaggatagatttaaaatcttaactaaattattgcattgcactatggtaataccttcagatactaacttttccagagtacatttccctaaatgtgcaaatttcatgtacgtaactcaccggtcaatgtgcaatccatgatcacgttgctttgactccttcctgaagagggaaatttctacttcatgtacttctccgttacattcatccctacatatctgaacaattcataaatgttcatcactctttatgacatctgtatgagagaataagatyacctttttattagtgtacaggttagacagagggctgaagttctataggacttgatttttcattttgcctggtagagaatattttagaaacagttacacacacagtaaaactgaaccattactttataaaccatctgtttagctcaaaataatgtatttcagcattcatcctttatactctgtaataccttgttttccgtttcattattgtctaaccttaaacttgttctgtgtgatgcactgtttctctagcggggttaacctgttcaat

SEQ ID NO: 42535 - DNA, 599 bp, Chicken  19866894279551_1
  misc_feature (1)..(79): n is any nucleotide
nnnnnnnnnnnnnnnnnnnnnnnnnnnnnnnnnnnnnnnnnnnnnnnnnnnnnnnnnnnnnnnnnnnnnnnnnnnnnnnattaacttcccaataggaataacaaagacacacacacacacaaaaacaacaaccccctaaacagtcaacccagtaacaacaaaacacctcacaatctatttttgagggcctgatccaaatcccaaagcacaaacctaatcaacttcgtaatgattagaaagtctaatgtactttcctggtaatcgctgcctcaaacccttaatttctgtctgagctatagmagatctttttggacattaacgtctctgatttacaaattctgagtgatcaaaaatccccaccttccttatgtgtatttcccagcggttaattaccacatgaaaccaaccagtccttaattctccttgaccattttttgtcttgcttttaattttagtttcttctcgctgttgaattgttttccaacagwttaaagagctgtctgtatggacagacggtgatcaactccccagttaacttctttgggataagatagattgcatttcttaagtctctcatttacaaggcaagtattctgtat

SEQ ID NO: 42536 - DNA, 600 bp, Chicken  19866894279551_2
ctgatccaaatcccaaagcacaaacctaatcaacttcgtaatgattagaaagtctaatgtactttcctggtaatcgctgcctcaaacccttaatttctgtctgagctatagmagatctttttggacattaacgtctctgatttacaaattctgagtgatcaaaaatccccaccttccttatgtgtatttcccagcggttaattaccacatgaaaccaaccagtccttaattctccttgaccattttttgtcttgcttttaattttagtttcttctcgctgttgaattgttttccaacagwttaaagagctgtctgtatggacagacggtgatcaactccccagttaacttctttgggataagatagattgcatttcttaagtctctcatttacaaggcaagtattctgtatattttgctttgtgaataccttttgatttaatttcctgttttaaagcagaggcacaagtactggctttactaattctctacgcttttcctatttccaaagagctgcattcagcatcataactgcagtgctgcacagacacctaattcagttggtaatacatgataaccccttcttagcagcggtgtattg

SEQ ID NO: 42537 - DNA, 599 bp, Chicken  19866894279552_1
  misc_feature (1)..(34): n is any nucleotide
nnnnnnnnnnnnnnnnnnnnnnnnnnnnnnnnnnatattgggaaaaaattcttctcagaaagagtggttgggcattggcacaggctgcccagggaggtggtgaagttaccatctctggaggtgttcaagaaccgtggggatgtggcactgagggacgtggttagcagccatggtgggagtgggttgacagttggactagatgatcttagacgtcttttccaacctttatcgttctgtgattctaaatctgcctgtgctttactggctgtaagcctggatatcatcacagtaactccccarcctgcagctagggctctgctaggagaaatgtgtgtggtggccagctgagctggtgacaaggtttgtcactgtgtgcctgaggcatgcgtggaaatctcactcagctccttgtaccaggctgctcataggaagacagagactgaggagtcaatgagragcttatgaaaagttcatgagtagcccatgagtacctgtgatagtgctaattgcactgttcatcttaaatgaacttccaaggcagcctgatctagtggatggcaaccctgtccacagcagaggttttggaactagatgatcta

SEQ ID NO: 42538 - DNA, 600 bp, Chicken  19866894279552_2
gtggttagcagccatggtgggagtgggttgacagttggactagatgatcttagacgtcttttccaacctttatcgttctgtgattctaaatctgcctgtgctttactggctgtaagcctggatatcatcacagtaactccccarcctgcagctagggctctgctaggagaaatgtgtgtggtggccagctgagctggtgacaaggtttgtcactgtgtgcctgaggcatgcgtggaaatctcactcagctccttgtaccaggctgctcataggaagacagagactgaggagtcaatgagragcttatgaaaagttcatgagtagcccatgagtacctgtgatagtgctaattgcactgttcatcttaaatgaacttccaaggcagcctgatctagtggatggcaaccctgtccacagcagaggttttggaactagatgatctacaaggtcccttccagcccaagctgttctatgaacttgcaaggcactggggatgctcttagggttgtccccagcacaaaccagccaaagggctctggtcaatcccaggcagcaacaagaggtgagaaaagttgggtctgccctcaggtgttctgtttg

SEQ ID NO: 42539 - DNA, 600 bp, Chicken  19866894279554_1
atagacaactacatatcattttctgcttcaaaaattacctatatttaacttgcagagccactttcttgttacttgtttcagagatatggtggatggaatccattgcagccatgtatttctagttaaatattatgttcctttaaatgatgattgggaaattgtaacctgggagtagggaaaacttgcaacttcccagaagacctactgcttggaaagagggagatactctgggatgggagaggcaagagttgggaggcttcagagaggaacaggaagatgccagccagtctcagaagggartaaaaaaacttaatggagttttctgcaacttgccccagttagtgtctatattttcaatatttcaaaagtaaacttttctagcttacggcttttgagtttaaagatttctctgacttacctggggagctccgagtaggagaaggcctaggaagatctatctcagagctccagctattcgagttgccctctraattctaatctacatttattcatggaaatttactatccattcgttcttgcagcaacactgagtgttagcttaaaaagctcttttcctccttaacatttgtctctttgaca

SEQ ID NO: 42540 - DNA, 600 bp, Chicken  19866894279554_2
tcccagaagacctactgcttggaaagagggagatactctgggatgggagaggcaagagttgggaggcttcagagaggaacaggaagatgccagccagtctcagaagggartaaaaaaacttaatggagttttctgcaacttgccccagttagtgtctatattttcaatatttcaaaagtaaacttttctagcttacggcttttgagtttaaagatttctctgacttacctggggagctccgagtaggagaaggcctaggaagatctatctcagagctccagctattcgagttgccctctraattctaatctacatttattcatggaaatttactatccattcgttcttgcagcaacactgagtgttagcttaaaaagctcttttcctccttaacatttgtctctttgacatatttatgaagagaaattatatccactcttagctttcattttgcaaggatgagcagacccagctattaacatttcctttcatgagataagctatcaatttcccttatcattttaatagctgtctttacattcttcccattaagattcatcttctatcattgccaaaaactgcaattccatgggagtgttc

SEQ ID NO: 42541 - DNA, 510 bp, Chicken  19866894279557_1
acaaattagagtaacgcgttgtagttgtacctccaaaatcagaaagtggtgaaagagactttcagtttgctatttatcaagggtttctatgtgtaaaaaccacaggcaaagccagctgtagctgccactacaaacatacccggattcagcatcgctgatgtttctcctaaggaaaattgatgttgtaatcctgttagaaactccagacactgaggtacttgcttgcatgtgtaacctcaccgaacaaatgtgaattcagactgagcaaccaaaggcaagaagccaattctgattgcgtayaatgcggggcaaagatgatttttttttgaatcctgaaaacttgaaaaaagttacatcctctggtattcaaaatccagaagctacaaactaaactgattttttatttttaaagatacgtcatgcttttccttgaaagaaatctccattatcctgacaggtttagctggcagcacccttgtgaggggaacagcacctgcagctgcctgtggg

SEQ ID NO: 42542 - DNA, 600 bp, Chicken  19866894279559_1
tttcacagggtaagatattaacaagagctaagattaagtacattatgaattttcttcatggaagcgtgctcccaacatttaaccatacctgttctaaatgactgcaagaaagatcttggactttctttgagcctaaagagactttgaggatcctatcgctttttatctttttgttagaaagctttcatggtacacaatcccctcttttcttttaccaagctaatcttttgatatgttttctgtatttgtttaataaaaataccttttttcctctcatttccttcctttacattatcccawtatattttgaactgtcttcttcaagtgtccatgcatttctctgatcagtgttggttgattctttaagttgtatcttatatttcaagattttctgtccttttaattgctggaacttgcatctagtccagttgtccttcctgacaaagctggtaacagagtctaccagaggaagtgccccactaaacctgctgcttacagagaaggaatggtgggagatgtggttgaaagctgccttgggcagagcgaccatgaaatggtagagttctctattcttgttgaaatggggaaagtcagcaaaac

SEQ ID NO: 42543 - DNA, 599 bp, Chicken  19866894279561_1
  misc_feature (1)..(89): n is any nucleotide
nnnnnnnnnnnnnnnnnnnnnnnnnnnnnnnnnnnnnnnnnnnnnnnnnnnnnnnnnnnnnnnnnnnnnnnnnnnnnnnnnnnnnnnnnccttgggttgagacaatctgtatcgtatcatccgaacatactgctctataacagcttatgtacaatgcgatcctatttataaaattcatggacaagactacagctgaatgttaaactgtaagcctctggttcataactttgggttttttatcatgtgtgcaaatcgacctgttttgcactgtactgtaacttatttaactctaaggcagtragacagatgttggtgcaatacaaaatctcgtgatgcattcatttagacagcagcaaacgactccgccagttacaactgcatgtatgacctttagaagctgtaaataagatcagttgtctacttccatgctgacagtaagaagcatcacacctagtttcatttgtatcgggtaaataaatttattctacaatacatacctggcgtgttatttgatgcactttgttttctgcaggtacatgtgtgcgtccttcagcctgttcttaccttaatgccggatggcacattctcacaccaacagc

SEQ ID NO: 42544 - DNA, 599 bp, Chicken  19866894279563_1
  misc_feature (1)..(144): n is any nucleotide
nnnnnnnnnnnnnnnnnnnnnnnnnnnnnnnnnnnnnnnnnnnnnnnnnnnnnnnnnnnnnnnnnnnnnnnnnnnnnnnnnnnnnnnnnnnnnnnnnnnnnnnnnnnnnnnnnnnnnnnnnnnnnnnnnnnnnnnnnnnnnnnntgctttgacatgcggttcagaatgactggagactggagcaaacagctatatttctgttcttgtttttatataatgactttgaggatagaacccagagcacaatatttttggggtccattcccagatctattgctgcagttttgcagaaacagaaaytgtggtaaattacaggccactcgtggtcagtcctgcagaaatcatattcattaaaagcaataaaactaatatcagccttttgtagcaccctggaattaccttgggttttatcgaaggtgaagactctcttctttcagctccaagctatcacatttagtttttccaaagatcattaagcaccgacaggtgcttatgtatggcacataactacacttttgacatgcttaaaaatgtgtgctatgatctgttgcacctttaataccttctagctggtggtgaatcttcacaggcagatacat

SEQ ID NO: 42545 - DNA, 573 bp, Chicken  19866894279563_2
attacaggccactcgtggtcagtcctgcagaaatcatattcattaaaagcaataaaactaatatcagccttttgtagcaccctggaattaccttgggttttatcgaaggtgaagactctcttctttcagctccaagctatcacatttagtttttccaaagatcattaagcaccgacaggtgcttatgtatggcacataactacacttttgacatgcttaaaaatgtgtgctatgatctgttgcacctttaataccttctagctggtggtgaatcttcacaggcagatacattatacttgygctggtggtatacatttcagtgctgacgtggtggggctggccttagtgcaattgtgtgctgtgtccttgctaaccatgagaggaaaaacagaattcagatttcttagacatcaggagaggcctggtgaatacagatcatattgtttttatgataagagctgccccgtgttacaatatttacaaactgagtcccatatgcaaaaaatataaaataagcataagaaatttgtagtttttcattattttccagttgttcatatgttaatctactat

SEQ ID NO: 42546 - DNA, 600 bp, Chicken  19866894279568_1
tacgctgcaatcttctctgctagaagaaaacatgatgggcatattccactacagcttgctgcttgcagccattacaaataatccattaaaatggagattagtttggcaagtttcattaagatgagcatcagcacctcccagactcataacaccctgtgcaccgagcagacagctctatgactgttaatttcccatcctgtgaatgcacaccttctgatgctccacctccgcagactgcttgcaggaaagcaattgttttctatacaaagatcccctcagtacgttagccccagcctagcrtatcacctgggagtattttgattcactgctagcgtgtattgaactacatcaktgagatggagcagaccctactgggcacaaacaggctctgaagaygggacttgctgtctgccccaagcatataactaaaggcagattacgtcccattccctgctgctgctacagcagcccctaacacagctggcttaagaaccagtatcaaatgtgagcagggcagtggcttaccagtatctatgcaagcaatcatggggaatcacatcgtccctatggaaacctcaaggtctgtgacatgcacagtga

SEQ ID NO: 42547 - DNA, 574 bp, Chicken  19866894279568_2
agcttgctgcttgcagccattacaaataatccattaaaatggagattagtttggcaagtttcattaagatgagcatcagcacctcccagactcataacaccctgtgcaccgagcagacagctctatgactgttaatttcccatcctgtgaatgcacaccttctgatgctccacctccgcagactgcttgcaggaaagcaattgttttctatacaaagatcccctcagtacgttagccccagcctagcrtatcacctgggagtattttgattcactgctagcgtgtattgaactacatcaktgagatggagcagaccctactgggcacaaacaggctctgaagaygggacttgctgtctgccccaagcatataactaaaggcagattacgtcccattccctgctgctgctacagcagcccctaacacagctggcttaagaaccagtatcaaatgtgagcagggcagtggcttaccagtatctatgcaagcaatcatggggaatcacatcgtccctatggaaacctcaaggtctgtgacatgcacagtgattactgccagtgattaatgcactaaa

SEQ ID NO: 42548 - DNA, 530 bp, Chicken  19866894279568_3
attagtttggcaagtttcattaagatgagcatcagcacctcccagactcataacaccctgtgcaccgagcagacagctctatgactgttaatttcccatcctgtgaatgcacaccttctgatgctccacctccgcagactgcttgcaggaaagcaattgttttctatacaaagatcccctcagtacgttagccccagcctagcrtatcacctgggagtattttgattcactgctagcgtgtattgaactacatcaktgagatggagcagaccctactgggcacaaacaggctctgaagaygggacttgctgtctgccccaagcatataactaaaggcagattacgtcccattccctgctgctgctacagcagcccctaacacagctggcttaagaaccagtatcaaatgtgagcagggcagtggcttaccagtatctatgcaagcaatcatggggaatcacatcgtccctatggaaacctcaaggtctgtgacatgcacagtgattactgccagtgattaatgcactaaa

SEQ ID NO: 42549 - DNA, 600 bp, Chicken  19866894279580_1
gtaagctatcacagaatttgttcagagatttgcaaattgggattctttgttttcccagataactgcttatcttaataaaatcttttaataaaagaaagcatacagaattaatttggagttcttaccattagactttcatctttatcctcacagttgtaacggttatgttcaaggtaatctagggatacaaggcatgaagtttgtagagtcagattattaggccaacaggtacagctgaaaaaacaaacacccagatcctaacaacccatggttcagtctgaaatacaagcagtcaaagcycatgcaagtgtctgtttattacaaaaaaaaatcctaaagatgaatcctaatgtgtagtgatcacttcccacaatttagttttaaaaattcttctgttgtttcacatacatacaagttctaacaaacaagatgcaaaactgaaccatgtgaacacgtatacaaatgcagatatgaagtactattttgcttttaagtgccaataattgctgctacatttctattatacaaaaattgacctttagatagcatttgaatttatattcagatacactctgttaaaaaacaagacaaaatattatt

SEQ ID NO: 42550 - DNA, 600 bp, Chicken  19866894279581_1
gccaaaggtctctgttcagccagttgggcctccttgcccgtcagctcatcttccatgacttggggatgatcagctcctgcacctttaaaataacttccttaaagtattcccagccttcctgggttcccatgcccttcaaaactacctcccaagggaccctctcaaccatggtcctgaagaggttaaagtctgccttccagaagtccaaggtggcagttctgctgactcccctctgtggttcaacaaggattgagaaatctagcatctcgtgatcattatactgcagacagcctccaaccyttacaaccctcacaagaccttctctgttagcaaacagcaggtccaggatttagcttcyccttgttgkctccatcaccagctgtgttaagaagttatctcacacacactctaagaacctctgggttcacctgttccctatctgctgtattataaatcctgtcacctgtttgtaaggctgtagagggtgatgtactccatgtggagactcagctggctgccaagatctcggggccggtagggtttggcatcaccaatccatctccctctcacattcctttatgctcctcagcctctccacct

SEQ ID NO: 42551 - DNA, 600 bp, Chicken  19866894279581_2
cttggggatgatcagctcctgcacctttaaaataacttccttaaagtattcccagccttcctgggttcccatgcccttcaaaactacctcccaagggaccctctcaaccatggtcctgaagaggttaaagtctgccttccagaagtccaaggtggcagttctgctgactcccctctgtggttcaacaaggattgagaaatctagcatctcgtgatcattatactgcagacagcctccaaccyttacaaccctcacaagaccttctctgttagcaaacagcaggtccaggatttagcttcyccttgttgkctccatcaccagctgtgttaagaagttatctcacacacactctaagaacctctgggttcacctgttccctatctgctgtattataaatcctgtcacctgtttgtaaggctgtagagggtgatgtactccatgtggagactcagctggctgccaagatctcggggccggtagggtttggcatcaccaatccatctccctctcacattcctttatgctcctcagcctctccacctcatccttcaggtcaaccacaaagctgaataagtcatttacctggtcacatcttacaca

SEQ ID NO: 42552 - DNA, 600 bp, Chicken  19866894279581_3
gatcagctcctgcacctttaaaataacttccttaaagtattcccagccttcctgggttcccatgcccttcaaaactacctcccaagggaccctctcaaccatggtcctgaagaggttaaagtctgccttccagaagtccaaggtggcagttctgctgactcccctctgtggttcaacaaggattgagaaatctagcatctcgtgatcattatactgcagacagcctccaaccyttacaaccctcacaagaccttctctgttagcaaacagcaggtccaggatttagcttcyccttgttgkctccatcaccagctgtgttaagaagttatctcacacacactctaagaacctctgggttcacctgttccctatctgctgtattataaatcctgtcacctgtttgtaaggctgtagagggtgatgtactccatgtggagactcagctggctgccaagatctcggggccggtagggtttggcatcaccaatccatctccctctcacattcctttatgctcctcagcctctccacctcatccttcaggtcaaccacaaagctgaataagtcatttacctggtcacatcttacacaagtgctgtc

SEQ ID NO: 42553 - DNA, 599 bp, Chicken  19866894279588_1
  misc_feature (1)..(88): n is any nucleotide
nnnnnnnnnnnnnnnnnnnnnnnnnnnnnnnnnnnnnnnnnnnnnnnnnnnnnnnnnnnnnnnnnnnnnnnnnnnnnnnnnnnnnnnnttgcctgtgtgagtaacccttccctgcataaggagcctcaattcaaggtgacatgcggtctgtgcttggtcactatccactgtgtcacaggtttgcaggtgtcactgctgcacatttcacctaaacacacagaagtggaagctctaagaaatctattggattttttttttccccaatattattaggatgtaactgacccacagcatttcctkaatgcatcaggaatctttgtgagccacacatctctccccattatcrtttgtctgaacagtctgactgccctacstattggtgccagtgtgacagctaacccactgccatgccatgaccgagctcatcagtgggagctgctgtgagagcaaaactgagggaatgaccgaagagttttaccaggaataaaaggagtgactgaagagatrggggaacaccacagtatcacctccccttcccccgggcacagccattcccagcagtcccaatcctttccatttttcatcttatctgagataac

SEQ ID NO: 42554 - DNA, 599 bp, Chicken  19866894279588_2
  misc_feature (1)..(42): n is any nucleotide
nnnnnnnnnnnnnnnnnnnnnnnnnnnnnnnnnnnnnnnnnnttgcctgtgtgagtaacccttccctgcataaggagcctcaattcaaggtgacatgcggtctgtgcttggtcactatccactgtgtcacaggtttgcaggtgtcactgctgcacatttcacctaaacacacagaagtggaagctctaagaaatctattggattttttttttccccaatattattaggatgtaactgacccacagcatttcctkaatgcatcaggaatctttgtgagccacacatctctccccattatcrtttgtctgaacagtctgactgccctacstattggtgccagtgtgacagctaacccactgccatgccatgaccgagctcatcagtgggagctgctgtgagagcaaaactgagggaatgaccgaagagttttaccaggaataaaaggagtgactgaagagatrggggaacaccacagtatcacctccccttcccccgggcacagccattcccagcagtcccaatcctttccatttttcatcttatctgagataactaaaaaggaaaagcattccccaaataaagatatcaacatctgagat

SEQ ID NO: 42555 - DNA, 599 bp, Chicken  19866894279588_3
  misc_feature (1)..(14): n is any nucleotide
nnnnnnnnnnnnnnttgcctgtgtgagtaacccttccctgcataaggagcctcaattcaaggtgacatgcggtctgtgcttggtcactatccactgtgtcacaggtttgcaggtgtcactgctgcacatttcacctaaacacacagaagtggaagctctaagaaatctattggattttttttttccccaatattattaggatgtaactgacccacagcatttcctkaatgcatcaggaatctttgtgagccacacatctctccccattatcrtttgtctgaacagtctgactgccctacstattggtgccagtgtgacagctaacccactgccatgccatgaccgagctcatcagtgggagctgctgtgagagcaaaactgagggaatgaccgaagagttttaccaggaataaaaggagtgactgaagagatrggggaacaccacagtatcacctccccttcccccgggcacagccattcccagcagtcccaatcctttccatttttcatcttatctgagataactaaaaaggaaaagcattccccaaataaagatatcaacatctgagattcctccctttaatctgcacccctccatc

SEQ ID NO: 42556 - DNA, 600 bp, Chicken  19866894279588_4
cctaaacacacagaagtggaagctctaagaaatctattggattttttttttccccaatattattaggatgtaactgacccacagcatttcctkaatgcatcaggaatctttgtgagccacacatctctccccattatcrtttgtctgaacagtctgactgccctacstattggtgccagtgtgacagctaacccactgccatgccatgaccgagctcatcagtgggagctgctgtgagagcaaaactgagggaatgaccgaagagttttaccaggaataaaaggagtgactgaagagatrggggaacaccacagtatcacctccccttcccccgggcacagccattcccagcagtcccaatcctttccatttttcatcttatctgagataactaaaaaggaaaagcattccccaaataaagatatcaacatctgagattcctccctttaatctgcacccctccatcagccaagaccctcccatcagctctgtgctggtgtgtgatttcattaaatgaatagccaattgtacagcaattacaaccttccctgggctgctgcttttttggtggttgttgttgttcctgtttgttttaatttc

SEQ ID NO: 42557 - DNA, 599 bp, Chicken  19866894279591_1
  misc_feature (1)..(241): n is any nucleotide
nnnnnnnnnnnnnnnnnnnnnnnnnnnnnnnnnnnnnnnnnnnnnnnnnnnnnnnnnnnnnnnnnnnnnnnnnnnnnnnnnnnnnnnnnnnnnnnnnnnnnnnnnnnnnnnnnnnnnnnnnnnnnnnnnnnnnnnnnnnnnnnnnnnnnnnnnnnnnnnnnnnnnnnnnnnnnnnnnnnnnnnnnnnnnnnnnnnnnnnnnnnnnnnnnnnnnnnnnnnnnnnnnnnnnnnnnnnnnnnnngattgaggagcattcgtattgcatagctttttgctcaaccactgccttgttagactcaytcttgaggccttgtgcctccccaactgatttcctctttcagcctggctcttatgcccaagcccttgctcaagactgctaatacagtcttgctaagagagcaaaggggcacaaatctgtcttgtaccayggggctgaaagaactaatggcagacacttggttcaacaactgaaaackaaatgagcatgcactaaatcatatgactatgagtcagtcatcttatccygtaaatactgagtggcccaagagccccttgagcaatcctgcatggcagctggcctgggtgacaggatcttccct

SEQ ID NO: 42558 - DNA, 599 bp, Chicken  19866894279591_2
  misc_feature (1)..(113): n is any nucleotide
nnnnnnnnnnnnnnnnnnnnnnnnnnnnnnnnnnnnnnnnnnnnnnnnnnnnnnnnnnnnnnnnnnnnnnnnnnnnnnnnnnnnnnnnnnnnnnnnnnnnnnnnnnnnnnnnngattgaggagcattcgtattgcatagctttttgctcaaccactgccttgttagactcaytcttgaggccttgtgcctccccaactgatttcctctttcagcctggctcttatgcccaagcccttgctcaagactgctaatacagtcttgctaagagagcaaaggggcacaaatctgtcttgtaccayggggctgaaagaactaatggcagacacttggttcaacaactgaaaackaaatgagcatgcactaaatcatatgactatgagtcagtcatcttatccygtaaatactgagtggcccaagagccccttgagcaatcctgcatggcagctggcctgggtgacaggatcttccctgcagcatgggggtccactctgaayctccaaaccaggaaggtcgcctggatgagcatgtccttgcagtttccatgcagaaagtgctctttcatgctaacctgataagttattaagagaagaaattgccc

SEQ ID NO: 42559 - DNA, 599 bp, Chicken  19866894279591_3
  misc_feature (1)..(65): n is any nucleotide
nnnnnnnnnnnnnnnnnnnnnnnnnnnnnnnnnnnnnnnnnnnnnnnnnnnnnnnnnnnnnnnnngattgaggagcattcgtattgcatagctttttgctcaaccactgccttgttagactcaytcttgaggccttgtgcctccccaactgatttcctctttcagcctggctcttatgcccaagcccttgctcaagactgctaatacagtcttgctaagagagcaaaggggcacaaatctgtcttgtaccayggggctgaaagaactaatggcagacacttggttcaacaactgaaaackaaatgagcatgcactaaatcatatgactatgagtcagtcatcttatccygtaaatactgagtggcccaagagccccttgagcaatcctgcatggcagctggcctgggtgacaggatcttccctgcagcatgggggtccactctgaayctccaaaccaggaaggtcgcctggatgagcatgtccttgcagtttccatgcagaaagtgctctttcatgctaacctgataagttattaagagaagaaattgccctgaaagcagacaaggacagcagtatgggaacatgggtggaaaatagtg

SEQ ID NO: 42560 - DNA, 599 bp, Chicken  19866894279591_4
  misc_feature (1)..(16): n is any nucleotide
nnnnnnnnnnnnnnnngattgaggagcattcgtattgcatagctttttgctcaaccactgccttgttagactcaytcttgaggccttgtgcctccccaactgatttcctctttcagcctggctcttatgcccaagcccttgctcaagactgctaatacagtcttgctaagagagcaaaggggcacaaatctgtcttgtaccayggggctgaaagaactaatggcagacacttggttcaacaactgaaaackaaatgagcatgcactaaatcatatgactatgagtcagtcatcttatccygtaaatactgagtggcccaagagccccttgagcaatcctgcatggcagctggcctgggtgacaggatcttccctgcagcatgggggtccactctgaayctccaaaccaggaaggtcgcctggatgagcatgtccttgcagtttccatgcagaaagtgctctttcatgctaacctgataagttattaagagaagaaattgccctgaaagcagacaaggacagcagtatgggaacatgggtggaaaatagtggaaaatgggattgttgggggtggagctggagctgtgtgctcttccaggt

SEQ ID NO: 42561 - DNA, 600 bp, Chicken  19866894279591_5
actgatttcctctttcagcctggctcttatgcccaagcccttgctcaagactgctaatacagtcttgctaagagagcaaaggggcacaaatctgtcttgtaccayggggctgaaagaactaatggcagacacttggttcaacaactgaaaackaaatgagcatgcactaaatcatatgactatgagtcagtcatcttatccygtaaatactgagtggcccaagagccccttgagcaatcctgcatggcagctggcctgggtgacaggatcttccctgcagcatgggggtccactctgaayctccaaaccaggaaggtcgcctggatgagcatgtccttgcagtttccatgcagaaagtgctctttcatgctaacctgataagttattaagagaagaaattgccctgaaagcagacaaggacagcagtatgggaacatgggtggaaaatagtggaaaatgggattgttgggggtggagctggagctgtgtgctcttccaggtgcctgcaagtagcagtagttagcagtgtggttgtaacacttgctgtgatttgtcttgtttctgtgactctttcagggacagccagacaccctgttgcaa

SEQ ID NO: 42562 - DNA, 600 bp, Chicken  19866894279592_1
ctcctttgtcagtgtcctagcttgtagcagttccttaattaagcagtgagagattttgtggataggaattactaatttaattcagttttaagatggatcctgtttcttatatgattgtttcaccatgctggccattatttcaacaaagtaggcttaattatatattatttctctgttaagaattggaaatataagcaacgtaatgtcccattacttattcaacctgattcaaaaatgaaatcttgctctacaaattgacagcttactcacagtacaaagtaatttcctttcagtttactrtgtttgaaaccttttgaaaaatctttataaactttagtttataatcacataaatrtatgtcactaatgccttccaagaggtacagttttgtagcgcagatcgagaaagctcatgatgcgtatgtcctcgctgaccataaattatgcttgcatgcctatgtctattattacaaatgcactccttactgtaatatatgtgaaggtatttgagtaatacattaactctgtatggattggccacatcagggagcttcaacttccattgcatacccattctgctttttgatcacgtgattgcaaa

SEQ ID NO: 42563 - DNA, 600 bp, Chicken  19866894279592_2
ttgtggataggaattactaatttaattcagttttaagatggatcctgtttcttatatgattgtttcaccatgctggccattatttcaacaaagtaggcttaattatatattatttctctgttaagaattggaaatataagcaacgtaatgtcccattacttattcaacctgattcaaaaatgaaatcttgctctacaaattgacagcttactcacagtacaaagtaatttcctttcagtttactrtgtttgaaaccttttgaaaaatctttataaactttagtttataatcacataaatrtatgtcactaatgccttccaagaggtacagttttgtagcgcagatcgagaaagctcatgatgcgtatgtcctcgctgaccataaattatgcttgcatgcctatgtctattattacaaatgcactccttactgtaatatatgtgaaggtatttgagtaatacattaactctgtatggattggccacatcagggagcttcaacttccattgcatacccattctgctttttgatcacgtgattgcaaactggcaaatgtgttttctttttgctgaaaatgccctcttcactgaagcagtgatt

SEQ ID NO: 42564 - DNA, 600 bp, Chicken  19866894279595_1
catagttttactataattaaatcatttttaattttactaaattttaacctttctagctgaaatctttcagtctggttctttgcctcaggagacaattttatatgaagtatcaaccaaaagaatacatctaatgaggttgggtaacatttatatgcttttgtattgttaatgtactctgacaatacttattctaaaaagaattgatgccttgaagcagcaggtgggaatcatgagccagtggaactgaaaatcaagtgatgggagagcaggggctagtgagatcagatgagagctggagamagatgaggtgctggatgtcagataggtgaagggctgacaaccaagtgagaacatacatgcaaataaatatggactggagggtggagagatcaaacatggtaactggtggtggctggtggagaactgctaggacagtgtcacttgaaagacaattgagcctgcatgggaagccagcttgagaacagggtgaaagttgagaactctttcctaagcccaaggtaaagaagatgctatgtaagccagaagatgaagagtagaatgaaagagatggaagagatggggtaagtcggtgttggtgag

SEQ ID NO: 42565 - DNA, 600 bp, Chicken  19866894279597_1
tttcttgctggaaaaaatatttgtagtagttatatttatttggatgttgtgaccatggcataccagagccagctcacattcatgtgttgaggagaacaaatcagttattgagaacatcatcaatgatttcatagaatcagagaatcattagatgacttgtgttgaaagggacctgaaatatcaccttatctaacccctcctgccagaggcagggttgccaacagttagatcaagtactaggtcaggttgcccagggtcccatccaacctggccctaaacacctccaaggatggggcatcyacaacctctacgggtaacttgttacagcacctcaccacctgctcagtaaaaaacttccccctgacacttaatctaaatcttccctcctttagcttaaaaccatttccccttgtcttatcactatcaacccaagaaaaagttgttttccctcctctttataatctctttttaagtattggaaggccacaaagaggtctccctgcagccttctcttctccagacagaacaagtccagttcttccagcttgtctttgtagaagaggtactctggccctcagattgtcttcatggccctcctct

SEQ ID NO: 42566 - DNA, 600 bp, Chicken  19866894279597_2
cacttaatctaaatcttccctcctttagcttaaaaccatttccccttgtcttatcactatcaacccaagaaaaagttgttttccctcctctttataatctctttttaagtattggaaggccacaaagaggtctccctgcagccttctcttctccagacagaacaagtccagttcttccagcttgtctttgtagaagaggtactctggccctcagattgtcttcatggccctcctctggaccttttctcaaagctccacatatttcctgtcttggggactcagtcccaggcagagtacctmaaatggggcttcacgaggtctgagtagagagsgacaatcacctctctctccatgctggccacccctcttctgatgaagcctaggatactgtctgccttcttggctacaagcgcacaatgatgtctcacgttcagtttttcatctatgaggacccctacgtctttctcagcagggctactctcagagagttctctcagcatgcatacatgtctgagattactcctacccaaatgcaaaaccttggacttcactttgttggacctcattatgttcacataggttcccgtttccagtttaccg

SEQ ID NO: 42567 - DNA, 600 bp, Chicken  19866894279597_3
aaaccatttccccttgtcttatcactatcaacccaagaaaaagttgttttccctcctctttataatctctttttaagtattggaaggccacaaagaggtctccctgcagccttctcttctccagacagaacaagtccagttcttccagcttgtctttgtagaagaggtactctggccctcagattgtcttcatggccctcctctggaccttttctcaaagctccacatatttcctgtcttggggactcagtcccaggcagagtacctmaaatggggcttcacgaggtctgagtagagagsgacaatcacctctctctccatgctggccacccctcttctgatgaagcctaggatactgtctgccttcttggctacaagcgcacaatgatgtctcacgttcagtttttcatctatgaggacccctacgtctttctcagcagggctactctcagagagttctctcagcatgcatacatgtctgagattactcctacccaaatgcaaaaccttggacttcactttgttggacctcattatgttcacataggttcccgtttccagtttaccgaggcccctatggatagcatcccttcctttggc

SEQ ID NO: 42568 - DNA, 599 bp, Chicken  19866894279605_1
  misc_feature (1)..(104): n is any nucleotide
nnnnnnnnnnnnnnnnnnnnnnnnnnnnnnnnnnnnnnnnnnnnnnnnnnnnnnnnnnnnnnnnnnnnnnnnnnnnnnnnnnnnnnnnnnnnnnnnnnnnnnnntaacccatgttagcatgggtaccttgatggtgtgtgacaaatagtgagaagtacctaaatcttttccctgttggcttatctcaaaatgtaaaaagctctgcgtttttcttccctctttctctcatagttagtgactccattttaaacacttctccactatatccagcagcaaaaaatttaatgtaattaagtaggmgtttttataatttaactatacagatacactattcagagtgtgtactttacttcaatttacctcaactgataagctgttccctggacagttccatgacaaatgctactgtgcccctctctaaaacctgtggttttcctagtgtgattccctctgatccagacatgttctttcatacaaggccacttctgttatctgactgtgagaagcccttcaattaaacaaggagcagtgacacaggaaagagatccaggtcaaytcctatgtcctctgtgagacagggatctccccagtgtcacttt

SEQ ID NO: 42569 - DNA, 600 bp, Chicken  19866894279605_2
tccactatatccagcagcaaaaaatttaatgtaattaagtaggmgtttttataatttaactatacagatacactattcagagtgtgtactttacttcaatttacctcaactgataagctgttccctggacagttccatgacaaatgctactgtgcccctctctaaaacctgtggttttcctagtgtgattccctctgatccagacatgttctttcatacaaggccacttctgttatctgactgtgagaagcccttcaattaaacaaggagcagtgacacaggaaagagatccaggtcaaytcctatgtcctctgtgagacagggatctccccagtgtcactttaatcctctgtttcagccttaggtctgagaagttcagtgtgctcagcacttcctccagcttgtatccactggcagatggagctgctaattttgctttgcaggcatgaatggtaactgatttaaaataaaacaaacaggaagggaagatccctgctgctgtcatgctggaggcttctgcttctgtagcagctgcactaacattggagcctggatggctgaaatgtgtcatctccagcacagtggtgggagaagaaggaa

SEQ ID NO: 42570 - DNA, 600 bp, Chicken  19866894279608_1
gtgtcagaaaacaaaacaacagtcaatggaattaatttttgcgtggcaaatgtgacacacaaagcaagagaaggaacatatagcccacctggatggtatagaagcagttgtgcataacagggatgaggaagttgatatccactgtttgcatttctttgatgtgggcggtgattgactggaacgctgacaggcgtacatcaaagttgatatcatcaagatgccgttgatcaaaggcattcaactaaaagagagcaagaagtcattcatgaaaaaggctagagacacgacagcacaatgttrggggaaaaaagtgagcaaagaagctggacataccttaacaacatctgtaatgtatttcaagtcactgtccaaatcagataaagtctaaaaagaaacataaaggaaaatagtttaaaactgttgtaactggaggactccagacttacttccaactgtaaccatctgagatttaaaaaaataataataataattttaaaaaaaattacaatatcagtccttttataagcttaataagagccattttgccctcagtgtatttcttctctaagtcagactaaggatcttttaacttcctaagtt

SEQ ID NO: 42571 - DNA, 600 bp, Chicken  19866894279614_1
ctgtctatactctgtctgtcccgttctgcacttgtattgtcaaaatagttgtttttatattttaagattagtgaaagcattgtctcaacagagccctttggttcccaacactaacttgaatcacaaaggctgctgtcagctctcataatacttgttttctgtatttgtgcttttctcatgagccaggtacatttacagtaaagcctatttaagtgcgttcctgtacgactcagctcaaaggttgtactgttttgtcccaaatattctctgtatgctttagaacgcttcctgctcagcagrcttcatggaatgtaactgtgaatggtaaagctttacttgcatatgaggtttccagtatccaagtactcttttcctatcattcacaactcccatctcctccaaaatattttagaaatatccttgtaaaacttcctttggttcattattgactatgaagagtactggaatggtttgttcatgattacagtggatagctgtgtgcagctgtcatcctacaaaaagatcaccctggtaacaccaatcaacaagcagagtaagatgatccatatataacaaaaaccttctaaacattgtctttca

SEQ ID NO: 42572 - DNA, 600 bp, Chicken  19866894279616_1
caagtgttctcagctgttgctttctgatctttagttgtttatgctgttcttacagttgggagtattttaaagacagaaatcttcacctattattccacctcgcagaaataaggaacacctctgtgctgcctccacatgttcctgggtagatgcaaagctcagcatcttaagtgcagttctgaagggcccttttactctgctggtctgagcccccagtccatgcccaagtgttgtgctgggggcacggctgctgaggaggcccccacctgctgcaggtagagcagcgtgtggcaggagccraggagcttgttccttgcttgtcccttggtgcagcagtacgtggtgctggcagtgcactgctcktctgttcagagcggttctctggaggattttcagacctggaagcccaaacacatttttcaaggactcgtgattcctgcattgttttaaattcctcttgtccatggcacgcttgtctctcttaaggtaaatatgtgctaactgtgaatgttgtgttttttttcttaatccatccagggagcctttggaagcgtacatctattttggccctgtctattaccagaaactgaagcacatggt

SEQ ID NO: 42573 - DNA, 600 bp, Chicken  19866894279616_2
attttaaagacagaaatcttcacctattattccacctcgcagaaataaggaacacctctgtgctgcctccacatgttcctgggtagatgcaaagctcagcatcttaagtgcagttctgaagggcccttttactctgctggtctgagcccccagtccatgcccaagtgttgtgctgggggcacggctgctgaggaggcccccacctgctgcaggtagagcagcgtgtggcaggagccraggagcttgttccttgcttgtcccttggtgcagcagtacgtggtgctggcagtgcactgctcktctgttcagagcggttctctggaggattttcagacctggaagcccaaacacatttttcaaggactcgtgattcctgcattgttttaaattcctcttgtccatggcacgcttgtctctcttaaggtaaatatgtgctaactgtgaatgttgtgttttttttcttaatccatccagggagcctttggaagcgtacatctattttggccctgtctattaccagaaactgaagcacatggtgttggataaaatgcacgcgagagctcgaggacccagagcagtgcttaccaggtactgttcaag

SEQ ID NO: 42574 - DNA, 600 bp, Chicken  19866894279619_1
aacctatttttgttccatttttcttgaacaggaaattcagtcctgcaacctcaagtggagcaggaggaaacgaggatgtcattagcagagggcagcagctccaagccatgttcacatccatgctacagcttgaaaaagagacatattcagcaggggcaagtcaggaatttgttggctttgtcctcaacaaaacaaggatgatttgctttttgttattcataagataataaagaagtcattacttaaaaattcactgtaaattcattgagtgcaaggcacttagggtaataaggaagtaargtgaagtctacagctgaccacagttaatttaccttacagcaaaacttgaggtgcttggtatccctgtgtttttgcagccagcaattaacgcatgctccttactgtgtggtacgtccgggaggggctgagaaaggagctgtcctcacattgccatgcttccttactcaatcttctgttgaaagttgatatagttgaaaatgttttaaataacagtatctccatatgtgaattacaaatactgatttctgggttgttttttgggttttgttttgttttgttgtggttttttttgttcgtttt

SEQ ID NO: 42575 - DNA, 600 bp, Chicken  19866894279622_1
gcatggtggtgatgagctgaccattggattaatgatcataaaggtcttggccaattgtaacgattctatgaagaacattttatttcaaatggctttcagtgctcagcagctgcaatgccaagggttcccagtcaggctgaggaccacacgtgggaaggggagcttaacaccaacagaaagcaaccacaccagataaaactcaccctcatatctatcagaaatagtgtgttttttctggatctctagtacagagacaagaaaatgatccgtttaacctgtagaaacccagaaagcatctaytgtgctatgcattcttccctgaaggcccagaacaggcagtgagttctggctgctccatgtttgccctcttgcagacacaggaagggatgtgactgcaagacatggtaygctgagtgactcaccacacacatggcccccagtcacagctcaaggaacaaaggcattagaaatgatgtccccaacacgcttcagcatgaacccctccttcaggccactccttcaggacacagcagagccctaatgctgcctcacctgtgatattttcccactgctggggatgtgagggaacccatcaggctc

SEQ ID NO: 42576 - DNA, 600 bp, Chicken  19866894279622_2
gctgcaatgccaagggttcccagtcaggctgaggaccacacgtgggaaggggagcttaacaccaacagaaagcaaccacaccagataaaactcaccctcatatctatcagaaatagtgtgttttttctggatctctagtacagagacaagaaaatgatccgtttaacctgtagaaacccagaaagcatctaytgtgctatgcattcttccctgaaggcccagaacaggcagtgagttctggctgctccatgtttgccctcttgcagacacaggaagggatgtgactgcaagacatggtaygctgagtgactcaccacacacatggcccccagtcacagctcaaggaacaaaggcattagaaatgatgtccccaacacgcttcagcatgaacccctccttcaggccactccttcaggacacagcagagccctaatgctgcctcacctgtgatattttcccactgctggggatgtgagggaacccatcaggctctgyctgccctcagcactgccttgggtttctctgaatgacccctcagagactyrctgcctgttccacagatgctctactctgaaggtgccctgatgaagaactgtgtgc

SEQ ID NO: 42577 - DNA, 600 bp, Chicken  19866894279622_3
gctatgcattcttccctgaaggcccagaacaggcagtgagttctggctgctccatgtttgccctcttgcagacacaggaagggatgtgactgcaagacatggtaygctgagtgactcaccacacacatggcccccagtcacagctcaaggaacaaaggcattagaaatgatgtccccaacacgcttcagcatgaacccctccttcaggccactccttcaggacacagcagagccctaatgctgcctcacctgtgatattttcccactgctggggatgtgagggaacccatcaggctctgyctgccctcagcactgccttgggtttctctgaatgacccctcagagactyrctgcctgttccacagatgctctactctgaaggtgccctgatgaagaactgtgtgcttgttcctgtacaaaatccagatgttctacctgaaacagccagccaggggttaaccttcaggccaagcaaggcccgggcagtctcttgctcataaatgcagaagccagcttgaagtccttgctgctctttaacctcttagttacagtctgacccccgttttcagacttgctacaagactcactacttatcttttt

SEQ ID NO: 42578 - DNA, 570 bp, Chicken  19866894279622_4
ctccatgtttgccctcttgcagacacaggaagggatgtgactgcaagacatggtaygctgagtgactcaccacacacatggcccccagtcacagctcaaggaacaaaggcattagaaatgatgtccccaacacgcttcagcatgaacccctccttcaggccactccttcaggacacagcagagccctaatgctgcctcacctgtgatattttcccactgctggggatgtgagggaacccatcaggctctgyctgccctcagcactgccttgggtttctctgaatgacccctcagagactyrctgcctgttccacagatgctctactctgaaggtgccctgatgaagaactgtgtgcttgttcctgtacaaaatccagatgttctacctgaaacagccagccaggggttaaccttcaggccaagcaaggcccgggcagtctcttgctcataaatgcagaagccagcttgaagtccttgctgctctttaacctcttagttacagtctgacccccgttttcagacttgctacaagactcactacttatcttttttcaactttaatgtctgtca

SEQ ID NO: 42579 - DNA, 569 bp, Chicken  19866894279622_5
tccatgtttgccctcttgcagacacaggaagggatgtgactgcaagacatggtaygctgagtgactcaccacacacatggcccccagtcacagctcaaggaacaaaggcattagaaatgatgtccccaacacgcttcagcatgaacccctccttcaggccactccttcaggacacagcagagccctaatgctgcctcacctgtgatattttcccactgctggggatgtgagggaacccatcaggctctgyctgccctcagcactgccttgggtttctctgaatgacccctcagagactyrctgcctgttccacagatgctctactctgaaggtgccctgatgaagaactgtgtgcttgttcctgtacaaaatccagatgttctacctgaaacagccagccaggggttaaccttcaggccaagcaaggcccgggcagtctcttgctcataaatgcagaagccagcttgaagtccttgctgctctttaacctcttagttacagtctgacccccgttttcagacttgctacaagactcactacttatcttttttcaactttaatgtctgtca

SEQ ID NO: 42580 - DNA, 600 bp, Chicken  19866894279627_1
atagtcagtgtatcatcttcagcaaatccccacatgaccagtcaagaatcaagtctgctcttcctccaagtgactgagaactgcagtgttttacagctgacaagaaagtatagcagccagcatgcccacatgctcctccatgctgtggatctgctagaagatggcagcagataccagctaatgtcaaacctgtttcccttctggtaaggcactgcaacaagggtcagcaaactatcattgggttccttaagctcagctgcataacaaaatactaatggttagaagctgcatggcagtagygaaggtcactagcacatctcgggacacaccgaaaatattccatcttcaaccaagccaaagccaactgtgctcccaaggctcttagagaaacctcagccatgtacttgcagataacagttcttcgaagmtgttcacgctctcacccacatctggtctgcctctctctttagttatcctgtgtgcccaacttcttggcttgcctggaaaaatttgcttgatgttattgttttggatattgggcaacatcttccatcaacaaaagttgaatcttttcagagaacttgctgacatcagtgaaac

SEQ ID NO: 42581 - DNA, 600 bp, Chicken  19866894279627_2
catgctcctccatgctgtggatctgctagaagatggcagcagataccagctaatgtcaaacctgtttcccttctggtaaggcactgcaacaagggtcagcaaactatcattgggttccttaagctcagctgcataacaaaatactaatggttagaagctgcatggcagtagygaaggtcactagcacatctcgggacacaccgaaaatattccatcttcaaccaagccaaagccaactgtgctcccaaggctcttagagaaacctcagccatgtacttgcagataacagttcttcgaagmtgttcacgctctcacccacatctggtctgcctctctctttagttatcctgtgtgcccaacttcttggcttgcctggaaaaatttgcttgatgttattgttttggatattgggcaacatcttccatcaacaaaagttgaatcttttcagagaacttgctgacatcagtgaaactccaagaaagaataaygtataaccaccatacaatcatcatgccctgccagcacttacaatacagttattaaaaacattcctgtagtccttaaaatcttttttttattttcctttaaaagtataagaaa

SEQ ID NO: 42582 - DNA, 528 bp, Chicken  19866894279627_3
tctcgggacacaccgaaaatattccatcttcaaccaagccaaagccaactgtgctcccaaggctcttagagaaacctcagccatgtacttgcagataacagttcttcgaagmtgttcacgctctcacccacatctggtctgcctctctctttagttatcctgtgtgcccaacttcttggcttgcctggaaaaatttgcttgatgttattgttttggatattgggcaacatcttccatcaacaaaagttgaatcttttcagagaacttgctgacatcagtgaaactccaagaaagaataaygtataaccaccatacaatcatcatgccctgccagcacttacaatacagttattaaaaacattcctgtagtccttaaaatcttttttttattttcctttaaaagtataagaaaaaaataatcacatcttacaaaatcctgagtcacttgtgacatgagtccagacatacagattcattaaaagtgtggacttcgttactggtacgtagaagctgaacatattaatattt

SEQ ID NO: 42583 - DNA, 600 bp, Chicken  19866894279640_1
tcacaatgtgtttatatatgtactgctatgctgagaaccaccgtacatactacaaaatgttgagctataatagaaatatttgggtataacttgataccaactgagggaaaaatatggacactggtgcttcaattgttctttgttagcaaatagtgtctcatggagaaagagggaagcagatttcagagaggacttgttttcatttcctgctggggatctagctcagttgccagaactttgaactatctctgttctgaatcatgggctgaatgtctgttagcagctaaaatgaagcagttrtgtttctaagcatgtttttttttcctgaaaagaattgtgtttgttagagcatcaagatatatttttacaatgtcaatcaaagcatactaaatgggagcagttgggagattgacctcagaagcatgctgcttgtctgagctaaagagctagtgtggatgtaycactttaagttctgtctgaacagagtccagattttatgttcattctttcagatgctacatgcaacaaattccttcatgttttaaagcaatactgttaacctgtgctgggggaagaggtaagtatgagagaggagaaagc

SEQ ID NO: 42584 - DNA, 600 bp, Chicken  19866894279640_2
ggagaaagagggaagcagatttcagagaggacttgttttcatttcctgctggggatctagctcagttgccagaactttgaactatctctgttctgaatcatgggctgaatgtctgttagcagctaaaatgaagcagttrtgtttctaagcatgtttttttttcctgaaaagaattgtgtttgttagagcatcaagatatatttttacaatgtcaatcaaagcatactaaatgggagcagttgggagattgacctcagaagcatgctgcttgtctgagctaaagagctagtgtggatgtaycactttaagttctgtctgaacagagtccagattttatgttcattctttcagatgctacatgcaacaaattccttcatgttttaaagcaatactgttaacctgtgctgggggaagaggtaagtatgagagaggagaaagctcctgtgaagaaatgttgctgtggaaccttgtttgtcacctacttcgtagctttgccagtataactgctgtgttgatagctcttcaaaggaaatgttattttcacctgtcagttcccttgatgcaagacattagccagatttcttgaggtagcataactct

SEQ ID NO: 42585 - DNA, 599 bp, Chicken  19866894279657_1
  misc_feature (1)..(191): n is any nucleotide
nnnnnnnnnnnnnnnnnnnnnnnnnnnnnnnnnnnnnnnnnnnnnnnnnnnnnnnnnnnnnnnnnnnnnnnnnnnnnnnnnnnnnnnnnnnnnnnnnnnnnnnnnnnnnnnnnnnnnnnnnnnnnnnnnnnnnnnnnnnnnnnnnnnnnnnnnnnnnnnnnnnnnnnnnnnnnnnnnnnnnnnnnnnnnnntctctaagagatgttaattagagccttccctctgggggaggctcctgcagcggagccttctcaagtgcttcaattgctctcttctttgccgtgtccatcacaccagtcyatatcaggtatttaattggctctcccacaaagtgagaggtgtctctcacaccaagttcagcgttttcatatcttaaagagcccttggrctggggttcactgctaatttttcttgtttttagctcagcaatttgaattcccaaagaacagccgtgaattaagaagtcccaccttccctgctgcaggccccacagcttctgcctttataacatgggattcaagaggacttcacttaactcctatgaaatgctgaatctgatcctcagtgtgaagcaggtgctggattgtgtgtcctgtatc

SEQ ID NO: 42586 - DNA, 599 bp, Chicken  19866894279657_2
  misc_feature (1)..(103): n is any nucleotide
nnnnnnnnnnnnnnnnnnnnnnnnnnnnnnnnnnnnnnnnnnnnnnnnnnnnnnnnnnnnnnnnnnnnnnnnnnnnnnnnnnnnnnnnnnnnnnnnnnnnnnntctctaagagatgttaattagagccttccctctgggggaggctcctgcagcggagccttctcaagtgcttcaattgctctcttctttgccgtgtccatcacaccagtcyatatcaggtatttaattggctctcccacaaagtgagaggtgtctctcacaccaagttcagcgttttcatatcttaaagagcccttggrctggggttcactgctaatttttcttgtttttagctcagcaatttgaattcccaaagaacagccgtgaattaagaagtcccaccttccctgctgcaggccccacagcttctgcctttataacatgggattcaagaggacttcacttaactcctatgaaatgctgaatctgatcctcagtgtgaagcaggtgctggattgtgtgtcctgtatctgtctgtctgtctgtactgacaacacattgcatctttcattccaaccatctacaaccagaatgcagaggatgagcaccacaaagatac

SEQ ID NO: 42587 - DNA, 600 bp, Chicken  19866894279657_3
tattaccagaatttaccctcatccccagtgcctggcagcaggcaatgcttgcctcccacacttctggacacttgtgttagctcctgtatccgcactggggaatttaactcaagaatcacttacttccatatatatatacagtgctgatcttcaggatcctttcccacgagacactcagaagatcctcatctggtctgcctttaaacaggtctcatctcctttgttgcactctttcaccaaaccttcattaaatatcatcatgagctgcttcattctggtggaaacgtagtgcgtacccargacagaaatcttgctgcaatgcaatcagttgaaaactgcacatgaaataagtgcataactgaatttttattgtaagctttgcttgcatttgtaatttctttgcacaattgtattttcccacgaactagtcatggtttttccaaaggcaccgtagtcgcacttctacaaggaaaacttaaaatgtaaaattttgcaagcatctaattaactttcttttgctctgtagttaaaatgtagttaaaccctaagcattcattcaactttaatgaggatgggaaagtaattgcatatgtattcctg

SEQ ID NO: 42588 - DNA, 600 bp, Chicken  19866894279657_4
acagaaatcttgctgcaatgcaatcagttgaaaactgcacatgaaataagtgcataactgaatttttattgtaagctttgcttgcatttgtaatttctttgcacaattgtattttcccacgaactagtcatggtttttccaaaggcaccgtagtcgcacttctacaaggaaaacttaaaatgtaaaattttgcaagcatctaattaactttcttttgctctgtagttaaaatgtagttaaaccctaagcattcattcaactttaatgaggatgggaaagtaattgcatatgtattcctgyataattatgacttaattgcattactagtagatttatctttgcttatttagccaagctcacaaaataatgtattaaaaatgagttgatgtttgtttggaccgtgccaaaaaacaacacgattaggaacagagtactcacacaggagtacatacaagaaatgtatgtaatacaaattttgacagaacagagtctttctaaaggctgactttgcatgcttgttatcagttgtgggggtgataaatcactccaaagatcagcaggaatccaagatacagatctttctagtgtccattctttctg

SEQ ID NO: 42589 - DNA, 600 bp, Chicken  19866894279661_1
gagtcctaatatggatgtagtcctagtcatttaaatcacttctacctacatagcttgtttccataaatatatgtgaaggcactgctgatgaaagcatagaactagacaatcactgatggggtagtatcatctttgattacagataaatgacgtcactttgggggtattcaaattattattcacgagtaaatcctaataaggagagtgtctatgaaattaacttgttagtgaagagaaggattgagtctggaatcaaataaattaatttaaaaagcagtctttacactgtgaagctcagtmtaagcacagataggtttgctacagaatctttcgattcaccatgaraataatattgagaaatacctcagtattttaaccaatttagagaattctagcacactggggaaaatatatatgttttttttttcttgtttaattttatttgcaattcaccaacaaattattttaaatgaaaattaactgtaagtttttaagggtctgagggtgatcgccatgtttatagacacagttacctatgtatgtagcacatacattaattataagttgtgctkcttctttagaactactaattaaatctct

SEQ ID NO: 42590 - DNA, 600 bp, Chicken  19866894279661_2
ctacatagcttgtttccataaatatatgtgaaggcactgctgatgaaagcatagaactagacaatcactgatggggtagtatcatctttgattacagataaatgacgtcactttgggggtattcaaattattattcacgagtaaatcctaataaggagagtgtctatgaaattaacttgttagtgaagagaaggattgagtctggaatcaaataaattaatttaaaaagcagtctttacactgtgaagctcagtmtaagcacagataggtttgctacagaatctttcgattcaccatgaraataatattgagaaatacctcagtattttaaccaatttagagaattctagcacactggggaaaatatatatgttttttttttcttgtttaattttatttgcaattcaccaacaaattattttaaatgaaaattaactgtaagtttttaagggtctgagggtgatcgccatgtttatagacacagttacctatgtatgtagcacatacattaattataagttgtgctkcttctttagaactactaattaaatctctcgttctttcaagaaatgtgtttcttgatgactctgtgaatgccat

SEQ ID NO: 42591 - DNA, 600 bp, Chicken  19866894279661_3
agcagtctttacactgtgaagctcagtmtaagcacagataggtttgctacagaatctttcgattcaccatgaraataatattgagaaatacctcagtattttaaccaatttagagaattctagcacactggggaaaatatatatgttttttttttcttgtttaattttatttgcaattcaccaacaaattattttaaatgaaaattaactgtaagtttttaagggtctgagggtgatcgccatgtttatagacacagttacctatgtatgtagcacatacattaattataagttgtgctkcttctttagaactactaattaaatctctcgttctttcaagaaatgtgtttcttgatgactctgtgaatgccatacacatttaaaacaggtcaaatgctgcagttctttttctttgtaggaagagcatgtaggaaatctctagagaaagaaatacttgcaactctgaacttacaagcctagggctgatgaccctgagactgcagtttgactgagggtttggtcctctgttatgcatcacccaagactcccagcagtgctaatgcgtgctgtgagagcactgcatcctttccctccctggga

SEQ ID NO: 42592 - DNA, 600 bp, Chicken  19866894279665_1
tgatagtgtcctccttgttttgcttgctccttctggcacttttcaggctacaggatcactgactgtattaacactgtcagcaattaatctaagacaacaattaaatgacggagagggtaatctcagaagtgggctgagtgaaaagctaaagatattactcatcacttagttttttgctacttccctaaatttccttatttggatataggcaaaatgaggtacacttgtgggttttcatactgggtctgggattcatttcaaccacctacagctatttctagtggggttaattgttagtakttgtttatttgtttaaggaagaataccatgcgcctgcacaaaaatgcagtccattctaatgcaagtatgaatttccctctgagtacttctgctgcacctcttggttgtttccatctctgggctctgacagatgtaatgagacatcagagtatgatttccagcatttccctctgtcttgtaaaataccatcttttttaacatactgtattttgtaaatcatatttgaaatagtctatcatcaacgaagagggaaactaggcttctaatctggatttgtgagctccactcctgaaacttgat

SEQ ID NO: 42593 - DNA, 600 bp, Chicken  19866894279668_1
ggatgtgtaggacagggtttgttgtctgtagcaaatgaggagtatcccaggtctaactcaccagtcagattactgcagaaatactctctatatcacaccatgcttttgcttgagatagtttgcccttttgaaagcgtaggctatacaaatttagattaggctatacagatttagattcaagagaggcatattggatttttttaaaattctttttttaaaccaacagtaaaactttgtgtaaagaagcgcatttctgctaatgggaaacaaatgcttggctcgtattcctcatctgtgatygcagagccaacggagttgccctggaggattctggcttgatcctgtgtcttgtgcacccttccccatcgttgtgcaaagtagctttgtttgcagaagaaactgcygtgtcttgggagtgctgttttaagttgtttgtggctaatggcactgagggcatggtgggctcttagtatttgtgtgggagggagtaataaggtggtggccaagtcagcagaaaaggtgtgaactgagcaagtgaaatgtgatggctgaaggtattgtgagctcgtatttgtgtgtaaagtgcaaagaacggaaggg

SEQ ID NO: 42594 - DNA, 600 bp, Chicken  19866894279668_2
tttgcttgagatagtttgcccttttgaaagcgtaggctatacaaatttagattaggctatacagatttagattcaagagaggcatattggatttttttaaaattctttttttaaaccaacagtaaaactttgtgtaaagaagcgcatttctgctaatgggaaacaaatgcttggctcgtattcctcatctgtgatygcagagccaacggagttgccctggaggattctggcttgatcctgtgtcttgtgcacccttccccatcgttgtgcaaagtagctttgtttgcagaagaaactgcygtgtcttgggagtgctgttttaagttgtttgtggctaatggcactgagggcatggtgggctcttagtatttgtgtgggagggagtaataaggtggtggccaagtcagcagaaaaggtgtgaactgagcaagtgaaatgtgatggctgaaggtattgtgagctcgtatttgtgtgtaaagtgcaaagaacggaagggatgctgaccaaccaagcaagatgtagatgaagataaatgaggatgaagagtgttaagaaagatgcagtcctagatttagactgcacgtttgactgctgttcagt

SEQ ID NO: 42595 - DNA, 600 bp, Chicken  19866894279671_1
tgatgacaagcttagaaactggcataaggtgacaaaacatttaaaaaacaaacccacaaacttgtgtaatcataggttgagcatatcatttcaataaatatctcactctgactcacattttatattaattgtttaaatctgttttatttctggtgctgaaatacgcttggactgagttcaaaatatttcccaaagtttatgtgcccatcatctaaaattaatggcttgaatacattcctatggccattaattgcagtctggtctaataacctttattcatattgatgggatctattcctsagtggtaagaactcaactgagcagtgattaattacatatagtacagtttaaaatgacaaacatactttcaaaacccaggaaaacaaagccaaaatctatttaaaggaaatgagattatttggagtgggctactggatccactaatgtcagcagttttgtcattcatatcagaggaacctttccagatgcctggctagttattcaggctttagatctgtctgaatgcaaaatagaagtgggatggtttttttgtttaccaatacaattacgttgcattggtatgcactgtaattatattaa

SEQ ID NO: 42596 - DNA, 600 bp, Chicken  19866894279674_1
ccagcagtttatttaccgaagtataggttggattaattgaaaggatattgaatccaactgattccgtaatttgttagccttggcaaggatgtctcagcagctcacagagcgggagcattatggctggcagagcaaactgaacagagagaggtatgaataagcttaatctaatgtaggtttcaggctcaacagaagcaaacttcagggagttcgtctgcaagttagaaggctctgattacacagattccttttgatggccatgcaccgcttccacatctgtctcccaagcacaaaacacamaacctctattaaaatatgatgccagagtcaacactgttgtgccatgcacagagaaaatgtggaagccagaagagcagcttacagctgatgaatttttacacttctcagagtaagcytttttcaggtatacagcagaataacttggtttcttttaaaaaatggggagaacaagctctcaaagagagaacactgaaatacagtgccaaccataaaggcttggtgtaaaatggtgtaaaaataacattaattgactcagcgactcctattgtaccatgtarcaatccaattgtaggaacgaga

SEQ ID NO: 42597 - DNA, 600 bp, Chicken  19866894279674_2
attatggctggcagagcaaactgaacagagagaggtatgaataagcttaatctaatgtaggtttcaggctcaacagaagcaaacttcagggagttcgtctgcaagttagaaggctctgattacacagattccttttgatggccatgcaccgcttccacatctgtctcccaagcacaaaacacamaacctctattaaaatatgatgccagagtcaacactgttgtgccatgcacagagaaaatgtggaagccagaagagcagcttacagctgatgaatttttacacttctcagagtaagcytttttcaggtatacagcagaataacttggtttcttttaaaaaatggggagaacaagctctcaaagagagaacactgaaatacagtgccaaccataaaggcttggtgtaaaatggtgtaaaaataacattaattgactcagcgactcctattgtaccatgtarcaatccaattgtaggaacgagatgatctttaaggtcccctccaacctaagccattctrtgatagactgatgtctaatgattgtatctcactttgcaaacatctctttttgtgagggttgttcgcttgttctcttattt

SEQ ID NO: 42598 - DNA, 600 bp, Chicken  19866894279674_3
gtctcccaagcacaaaacacamaacctctattaaaatatgatgccagagtcaacactgttgtgccatgcacagagaaaatgtggaagccagaagagcagcttacagctgatgaatttttacacttctcagagtaagcytttttcaggtatacagcagaataacttggtttcttttaaaaaatggggagaacaagctctcaaagagagaacactgaaatacagtgccaaccataaaggcttggtgtaaaatggtgtaaaaataacattaattgactcagcgactcctattgtaccatgtarcaatccaattgtaggaacgagatgatctttaaggtcccctccaacctaagccattctrtgatagactgatgtctaatgattgtatctcactttgcaaacatctctttttgtgagggttgttcgcttgttctcttatttggaaggtaaagtttcccagcttgagtgctttggtttcctatgtactctactggatgtaagtggaggattcagaagaccaattttttaatttttatttatttatttttaagtgcaaatctaaaactcttgtaaaagggtggaggagagaagcttaaatctcac

SEQ ID NO: 42599 - DNA, 600 bp, Chicken  19866894279674_4
ttgtgccatgcacagagaaaatgtggaagccagaagagcagcttacagctgatgaatttttacacttctcagagtaagcytttttcaggtatacagcagaataacttggtttcttttaaaaaatggggagaacaagctctcaaagagagaacactgaaatacagtgccaaccataaaggcttggtgtaaaatggtgtaaaaataacattaattgactcagcgactcctattgtaccatgtarcaatccaattgtaggaacgagatgatctttaaggtcccctccaacctaagccattctrtgatagactgatgtctaatgattgtatctcactttgcaaacatctctttttgtgagggttgttcgcttgttctcttatttggaaggtaaagtttcccagcttgagtgctttggtttcctatgtactctactggatgtaagtggaggattcagaagaccaattttttaatttttatttatttatttttaagtgcaaatctaaaactcttgtaaaagggtggaggagagaagcttaaatctcactccttcaccttccttgtgtgcttcagagctaccactgctaatttttccatgcaactta

SEQ ID NO: 42600 - DNA, 599 bp, Chicken  19866894279676_1
  misc_feature (1)..(36): n is any nucleotide
nnnnnnnnnnnnnnnnnnnnnnnnnnnnnnnnnnnnccgtggggcatcgtgctgagctccccgcccccctctttccgcagttcaacagcttcgagcagctgtgcatcaacttcaccaacgagaagctgcagcagttcttcaaccaccacatgttcgtgctggagcaggaggagtacaagaaggagggcatcgagtgggagttcatcgacttcggcatggacctccaggcctgcatcgacctcatcgagaaggtgccgcctcccctgcagtccttctgggggtgtttacccacacggagcycacgggggaccccagaaggggtcaatgggagcgctgctccccgcccgaccgagtcccgtcctccgcagccgatggggatcatgtccatcttggaggaggagtgcatgttccccaaggccacggatatgaccttcaaggccaaactcttcgacaaccacttggggaagtcggccaacttcgggaagccccgcaacatcaagggaaagccggaagctcacttcgccctcgtgcactacgcgggcacggtggactacaacatcatcggctggctgcagaagaacaaggatccgctcaacgag

SEQ ID NO: 42601 - DNA, 600 bp, Chicken  19866894279676_2
aggagaatctcaacaagctgatgaccaaccttcgttccacccacccccactttgtccgctgcatcatccccaacgagaccaagtctcccggtgagccaacggaacgattcagtggggtcagacggggccccgccatggctgccaacggtcccctttccgcacccaggtgtgatggacaaccccctggtgatgcaccagctccgctgcaatggcgtgctggagggcatccgcatctgccgcaagggtttccccaaccgcatcctctacggggacttccgtcagaggtgagagtggccaacsggggcccgaaggtgggaccggaacccacccggcgctcattttggggtgggatcctcccattctttcccaggtaccgcatcctgaacccggcagccatccccgaggggcagttcattgacagccgcaaaggcgccgagaaactcctggggtccctcgatatcgaccacaaccagtacaaatttgggcacaccaaggtgagggctggcaggtcgtggttctccacggtgccaccatccgcatatctgcttatgggcctgcacagtctgtccaccgaaccgcccatctgcccatgcgttcaac

SEQ ID NO: 42602 - DNA, 599 bp, Chicken  19866894279691_1
  misc_feature (1)..(211): n is any nucleotide
nnnnnnnnnnnnnnnnnnnnnnnnnnnnnnnnnnnnnnnnnnnnnnnnnnnnnnnnnnnnnnnnnnnnnnnnnnnnnnnnnnnnnnnnnnnnnnnnnnnnnnnnnnnnnnnnnnnnnnnnnnnnnnnnnnnnnnnnnnnnnnnnnnnnnnnnnnnnnnnnnnnnnnnnnnnnnnnnnnnnnnnnnnnnnnnnnnnnnnnnnnnnnnnnnnntaattacattaacgcttccgtcttgtttccattgaacattgatggtagctatcttgataacttgtggcagcgctttgtattttagttcrtcctcaaggctgtgaactagatgtggcagtatgtgggaggtcaaggttattgtgctgggtccttctgaagagctaaacgtttttgctttctaatgctatttgtttcacacttctaggtgtcatattttgaaatatacttggataaaataagggaccttttggatggtaagtctcttatttactttgagcataggaagtaaacygcttggtagagagatktatagaacaaaagctttaagataayactgagagaaatgtgttatgttaataagtaacccatctctgatacagatacgtaa

SEQ ID NO: 42603 - DNA, 599 bp, Chicken  19866894279691_2
  misc_feature (1)..(8): n is any nucleotide
nnnnnnnntaattacattaacgcttccgtcttgtttccattgaacattgatggtagctatcttgataacttgtggcagcgctttgtattttagttcrtcctcaaggctgtgaactagatgtggcagtatgtgggaggtcaaggttattgtgctgggtccttctgaagagctaaacgtttttgctttctaatgctatttgtttcacacttctaggtgtcatattttgaaatatacttggataaaataagggaccttttggatggtaagtctcttatttactttgagcataggaagtaaacygcttggtagagagatktatagaacaaaagctttaagataayactgagagaaatgtgttatgttaataagtaacccatctctgatacagatacgtaaaaatgagacagcgtgttgctaatctatataataaagctgtaactgcagtagtggtcgtttgatgtatgttccatttttacktggatctgttgtgaatgtctcattctgtgaagaaatcatacrtaccttagctttagaactttttctcttcyagtttcaaagaccaatctttctgttcatgaagacaaaaatagagttcccta

SEQ ID NO: 42604 - DNA, 600 bp, Chicken  19866894279691_3
ttaacgcttccgtcttgtttccattgaacattgatggtagctatcttgataacttgtggcagcgctttgtattttagttcrtcctcaaggctgtgaactagatgtggcagtatgtgggaggtcaaggttattgtgctgggtccttctgaagagctaaacgtttttgctttctaatgctatttgtttcacacttctaggtgtcatattttgaaatatacttggataaaataagggaccttttggatggtaagtctcttatttactttgagcataggaagtaaacygcttggtagagagatktatagaacaaaagctttaagataayactgagagaaatgtgttatgttaataagtaacccatctctgatacagatacgtaaaaatgagacagcgtgttgctaatctatataataaagctgtaactgcagtagtggtcgtttgatgtatgttccatttttacktggatctgttgtgaatgtctcattctgtgaagaaatcatacrtaccttagctttagaactttttctcttcyagtttcaaagaccaatctttctgttcatgaagacaaaaatagagttccctatgtaaaggttagtgtca

SEQ ID NO: 42605 - DNA, 600 bp, Chicken  19866894279691_4
gaacattgatggtagctatcttgataacttgtggcagcgctttgtattttagttcrtcctcaaggctgtgaactagatgtggcagtatgtgggaggtcaaggttattgtgctgggtccttctgaagagctaaacgtttttgctttctaatgctatttgtttcacacttctaggtgtcatattttgaaatatacttggataaaataagggaccttttggatggtaagtctcttatttactttgagcataggaagtaaacygcttggtagagagatktatagaacaaaagctttaagataayactgagagaaatgtgttatgttaataagtaacccatctctgatacagatacgtaaaaatgagacagcgtgttgctaatctatataataaagctgtaactgcagtagtggtcgtttgatgtatgttccatttttacktggatctgttgtgaatgtctcattctgtgaagaaatcatacrtaccttagctttagaactttttctcttcyagtttcaaagaccaatctttctgttcatgaagacaaaaatagagttccctatgtaaaggttagtgtcattytgatattgttttgatcttttgc

SEQ ID NO: 42606 - DNA, 600 bp, Chicken  19866894279691_5
ttttgctttctaatgctatttgtttcacacttctaggtgtcatattttgaaatatacttggataaaataagggaccttttggatggtaagtctcttatttactttgagcataggaagtaaacygcttggtagagagatktatagaacaaaagctttaagataayactgagagaaatgtgttatgttaataagtaacccatctctgatacagatacgtaaaaatgagacagcgtgttgctaatctatataataaagctgtaactgcagtagtggtcgtttgatgtatgttccatttttacktggatctgttgtgaatgtctcattctgtgaagaaatcatacrtaccttagctttagaactttttctcttcyagtttcaaagaccaatctttctgttcatgaagacaaaaatagagttccctatgtaaaggttagtgtcattytgatattgttttgatcttttgcttccawtttactccattttcttctggcttattggtgttttattttgttttggtattacttaaaagggttgcacagagcgttttgtatgtagtccagaagaagttatggatactatagatgaaggaaaatcaaatcg

SEQ ID NO: 42607 - DNA, 600 bp, Chicken  19866894279691_6
tattttgaaatatacttggataaaataagggaccttttggatggtaagtctcttatttactttgagcataggaagtaaacygcttggtagagagatktatagaacaaaagctttaagataayactgagagaaatgtgttatgttaataagtaacccatctctgatacagatacgtaaaaatgagacagcgtgttgctaatctatataataaagctgtaactgcagtagtggtcgtttgatgtatgttccatttttacktggatctgttgtgaatgtctcattctgtgaagaaatcatacrtaccttagctttagaactttttctcttcyagtttcaaagaccaatctttctgttcatgaagacaaaaatagagttccctatgtaaaggttagtgtcattytgatattgttttgatcttttgcttccawtttactccattttcttctggcttattggtgttttattttgttttggtattacttaaaagggttgcacagagcgttttgtatgtagtccagaagaagttatggatactatagatgaaggaaaatcaaatcgacatgtagcagttacaagtaagtactatccctacctgcttta

SEQ ID NO: 42608 - DNA, 600 bp, Chicken  19866894279691_7
ggaccttttggatggtaagtctcttatttactttgagcataggaagtaaacygcttggtagagagatktatagaacaaaagctttaagataayactgagagaaatgtgttatgttaataagtaacccatctctgatacagatacgtaaaaatgagacagcgtgttgctaatctatataataaagctgtaactgcagtagtggtcgtttgatgtatgttccatttttacktggatctgttgtgaatgtctcattctgtgaagaaatcatacrtaccttagctttagaactttttctcttcyagtttcaaagaccaatctttctgttcatgaagacaaaaatagagttccctatgtaaaggttagtgtcattytgatattgttttgatcttttgcttccawtttactccattttcttctggcttattggtgttttattttgttttggtattacttaaaagggttgcacagagcgttttgtatgtagtccagaagaagttatggatactatagatgaaggaaaatcaaatcgacatgtagcagttacaagtaagtactatccctacctgctttagtgctttatcagttgtcttcttgacttct

SEQ ID NO: 42609 - DNA, 600 bp, Chicken  19866894279691_8
agaacaaaagctttaagataayactgagagaaatgtgttatgttaataagtaacccatctctgatacagatacgtaaaaatgagacagcgtgttgctaatctatataataaagctgtaactgcagtagtggtcgtttgatgtatgttccatttttacktggatctgttgtgaatgtctcattctgtgaagaaatcatacrtaccttagctttagaactttttctcttcyagtttcaaagaccaatctttctgttcatgaagacaaaaatagagttccctatgtaaaggttagtgtcattytgatattgttttgatcttttgcttccawtttactccattttcttctggcttattggtgttttattttgttttggtattacttaaaagggttgcacagagcgttttgtatgtagtccagaagaagttatggatactatagatgaaggaaaatcaaatcgacatgtagcagttacaagtaagtactatccctacctgctttagtgctttatcagttgtcttcttgacttcttaaaacatagcgtaaggcaaggatggtgaagtaaattcaggttgttgagaatgtttagtacaagcagttgt

SEQ ID NO: 42610 - DNA, 600 bp, Chicken  19866894279691_9
agaaatgtgttatgttaataagtaacccatctctgatacagatacgtaaaaatgagacagcgtgttgctaatctatataataaagctgtaactgcagtagtggtcgtttgatgtatgttccatttttacktggatctgttgtgaatgtctcattctgtgaagaaatcatacrtaccttagctttagaactttttctcttcyagtttcaaagaccaatctttctgttcatgaagacaaaaatagagttccctatgtaaaggttagtgtcattytgatattgttttgatcttttgcttccawtttactccattttcttctggcttattggtgttttattttgttttggtattacttaaaagggttgcacagagcgttttgtatgtagtccagaagaagttatggatactatagatgaaggaaaatcaaatcgacatgtagcagttacaagtaagtactatccctacctgctttagtgctttatcagttgtcttcttgacttcttaaaacatagcgtaaggcaaggatggtgaagtaaattcaggttgttgagaatgtttagtacaagcagttgtgacgtgtctttaagtaccaagtctttca

SEQ ID NO: 42611 - DNA, 599 bp, Chicken  19866894279702_1
  misc_feature (1)..(179): n is any nucleotide
nnnnnnnnnnnnnnnnnnnnnnnnnnnnnnnnnnnnnnnnnnnnnnnnnnnnnnnnnnnnnnnnnnnnnnnnnnnnnnnnnnnnnnnnnnnnnnnnnnnnnnnnnnnnnnnnnnnnnnnnnnnnnnnnnnnnnnnnnnnnnnnnnnnnnnnnnnnnnnnnnnnnnnnnnnnnnnnnnnnaccctggagtgaaccctggagttgccagaggcaacaggctgcagcctgcggatcgggcagtttgcaacagcggagcactgtgaacgtgcacgtttaggtgccattcaccagcacacaagcrcgtgtcaaggtcttttggcaacgaaaaatctacgagaccatccattctcagcccagaatctccccagcatcactctgggtggaacacactgaaggcactcgttgcccccaagccgcgtcccaccgccgcgcccactcacccgatgcgctcctgctccatctcctccatcttttcggcacgggcaatgacgcggttgatgatctccttctcctcatctgtcagctcctctcccttgcgctgccgctcgggctgcccgccccgcgctgcccatcccgcagggatcctgcagggagagggtg

SEQ ID NO: 42612 - DNA, 572 bp, Chicken  19866894279702_2
tctccccagcatcactctgggtggaacacactgaaggcactcgttgcccccaagccgcgtcccaccgccgcgcccactcacccgatgcgctcctgctccatctcctccatcttttcggcacgggcaatgacgcggttgatgatctccttctcctcatctgtcagctcctctcccttgcgctgccgctcgggctgcccgccccgcgctgcccatcccgcagggatcctgcagggagagggtggggggcagccgggcaccacattcccccgggaaggggaaaaatcgtgcaagccccccctrttctccatactctcctcctggctggaagccgatgttcccattttccatttgtgcagagcgtggcctatgcattcttccccctaattcccaaccccttgtgctcagctccctatggccatgtcctgttggctgygcacgtggcatggccacacctgtccttgaacaccaccgtccccagcacagtctctcaccggactccatgcaatccacagagacactaattataattaacccgtggctgagaccgatgctgcaaaattaaagcccatctg

SEQ ID NO: 42613 - DNA, 439 bp, Chicken  19866894279702_3
ggttgatgatctccttctcctcatctgtcagctcctctcccttgcgctgccgctcgggctgcccgccccgcgctgcccatcccgcagggatcctgcagggagagggtggggggcagccgggcaccacattcccccgggaaggggaaaaatcgtgcaagccccccctrttctccatactctcctcctggctggaagccgatgttcccattttccatttgtgcagagcgtggcctatgcattcttccccctaattcccaaccccttgtgctcagctccctatggccatgtcctgttggctgygcacgtggcatggccacacctgtccttgaacaccaccgtccccagcacagtctctcaccggactccatgcaatccacagagacactaattataattaacccgtggctgagaccgatgctgcaaaattaaagcccatctg

SEQ ID NO: 42614 - DNA, 599 bp, Chicken  19866894279711_1
  misc_feature (1)..(60): n is any nucleotide
nnnnnnnnnnnnnnnnnnnnnnnnnnnnnnnnnnnnnnnnnnnnnnnnnnnnnnnnnnnnttttcagcacttagaaaagcacgcaatgactatttatgcttactgcataatacgtgtcattataccttgaatagtaattaagctgtcttatacaaaccaaccgtgcttcagcaccggggaggctgggtgcatttcttccttcgtcttcctttggcaccaagggcattaaagtctctaatgctcttttgagggccatcgcttccccttctgactgctctgctaaccgtgcagctcagcacrtttctcactcaagctgttggtcttccagaarcgctgtaaaaattgtagtttagtacggttcttatgaaagctcagtgatgctcaacaagcagaagtttgggagtcttttggttagatttctgctctccattccatccaagctttggtggaattactgtgaatttaagctgaagtcaggctgggactcaaaagatgtgaccaactactgtaattgagcrctgtatcaacacatmtcagttctgatgtatttccttgtcctgctgtttcatctgccattctaactgcagctgtgacccaat

SEQ ID NO: 42615 - DNA, 599 bp, Chicken  19866894279711_2
  misc_feature (1)..(29): n is any nucleotide
nnnnnnnnnnnnnnnnnnnnnnnnnnnnnttttcagcacttagaaaagcacgcaatgactatttatgcttactgcataatacgtgtcattataccttgaatagtaattaagctgtcttatacaaaccaaccgtgcttcagcaccggggaggctgggtgcatttcttccttcgtcttcctttggcaccaagggcattaaagtctctaatgctcttttgagggccatcgcttccccttctgactgctctgctaaccgtgcagctcagcacrtttctcactcaagctgttggtcttccagaarcgctgtaaaaattgtagtttagtacggttcttatgaaagctcagtgatgctcaacaagcagaagtttgggagtcttttggttagatttctgctctccattccatccaagctttggtggaattactgtgaatttaagctgaagtcaggctgggactcaaaagatgtgaccaactactgtaattgagcrctgtatcaacacatmtcagttctgatgtatttccttgtcctgctgtttcatctgccattctaactgcagctgtgacccaatgtttatttttcyccaatagaatgtggcagta

SEQ ID NO: 42616 - DNA, 600 bp, Chicken  19866894279711_3
aagggcattaaagtctctaatgctcttttgagggccatcgcttccccttctgactgctctgctaaccgtgcagctcagcacrtttctcactcaagctgttggtcttccagaarcgctgtaaaaattgtagtttagtacggttcttatgaaagctcagtgatgctcaacaagcagaagtttgggagtcttttggttagatttctgctctccattccatccaagctttggtggaattactgtgaatttaagctgaagtcaggctgggactcaaaagatgtgaccaactactgtaattgagcrctgtatcaacacatmtcagttctgatgtatttccttgtcctgctgtttcatctgccattctaactgcagctgtgacccaatgtttatttttcyccaatagaatgtggcagtagcaagaaaccacttggatctgtgttagaaaagtttatggtggctccttaagaaaaagtgaggggtcccacagtattacaatgttaatatctcaggagatttgttagaagtaacagtgttgtagttttcatgttgatttttctccagggagatacattattaggactgttaatgttgttttgtagccac

SEQ ID NO: 42617 - DNA, 600 bp, Chicken  19866894279711_4
tctaatgctcttttgagggccatcgcttccccttctgactgctctgctaaccgtgcagctcagcacrtttctcactcaagctgttggtcttccagaarcgctgtaaaaattgtagtttagtacggttcttatgaaagctcagtgatgctcaacaagcagaagtttgggagtcttttggttagatttctgctctccattccatccaagctttggtggaattactgtgaatttaagctgaagtcaggctgggactcaaaagatgtgaccaactactgtaattgagcrctgtatcaacacatmtcagttctgatgtatttccttgtcctgctgtttcatctgccattctaactgcagctgtgacccaatgtttatttttcyccaatagaatgtggcagtagcaagaaaccacttggatctgtgttagaaaagtttatggtggctccttaagaaaaagtgaggggtcccacagtattacaatgttaatatctcaggagatttgttagaagtaacagtgttgtagttttcatgttgatttttctccagggagatacattattaggactgttaatgttgttttgtagccactgttttgtagccacc

SEQ ID NO: 42618 - DNA, 600 bp, Chicken  19866894279711_5
aagctgttggtcttccagaarcgctgtaaaaattgtagtttagtacggttcttatgaaagctcagtgatgctcaacaagcagaagtttgggagtcttttggttagatttctgctctccattccatccaagctttggtggaattactgtgaatttaagctgaagtcaggctgggactcaaaagatgtgaccaactactgtaattgagcrctgtatcaacacatmtcagttctgatgtatttccttgtcctgctgtttcatctgccattctaactgcagctgtgacccaatgtttatttttmyccaatagaatgtggcagtagcaagaaaccacttggatctgtgttagaaaagtttatggtggctccttaagaaaaagtgaggggtcccacagtattacaatgttaatatctcaggagatttgttagaagtaacagtgttgtagttttcatgttgatttttctccagggagatacattattaggactgttaatgttgttttgtagccactgttttgtagccaccattttaagtctgacttcaaaagaatgcagaaaattgtttgccttcagcttgtaacagacgcattctgctgcaaaggt

SEQ ID NO: 42619 - DNA, 600 bp, Chicken  19866894279711_6
agctgttggtcttccagaarcgctgtaaaaattgtagtttagtacggttcttatgaaagctcagtgatgctcaacaagcagaagtttgggagtcttttggttagatttctgctctccattccatccaagctttggtggaattactgtgaatttaagctgaagtcaggctgggactcaaaagatgtgaccaactactgtaattgagcrctgtatcaacacatmtcagttctgatgtatttccttgtcctgctgtttcatctgccattctaactgcagctgtgacccaatgtttatttttcyccaatagaatgtggcagtagcaagaaaccacttggatctgtgttagaaaagtttatggtggctccttaagaaaaagtgaggggtcccacagtattacaatgttaatatctcaggagatttgttagaagtaacagtgttgtagttttcatgttgatttttctccagggagatacattattaggactgttaatgttgttttgtagccactgttttgtagccaccattttaagtctgacttcaaaagaatgcagaaaattgtttgccttcagcttgtaacagacgcattctgctgcaaaggtg

SEQ ID NO: 42620 - DNA, 600 bp, Chicken  19866894279711_7
ttcattctctgttcctctttgttttgcaattcatcattagactcatttaactaaatcatgtttaagtatgtatgcaagcttaagacgctgaggtcacttcacttgatctatttaaataattgtcgggagggcaaccggtgtttgaaagtattttatttctgaacttctttcctttgtgtttattttacagcaacaactttctttcatcacatcaacttacaatatagtacaatctcagaattctgtacaggagagtcgtgtcagaccatggcagtgtgcaatacgtaagtcactatttaytactacagggtttccacaaagcctggagaggagcttgggggaggatattggaattaggtggcacggggcaggcagatctcttcgctcagtaaggacatggcagctgggcatccttttccctcttgtctgctaaaggtggtggtgttgtgaaggactaggaggactggatctttgactgttcagagctggttttataaggtcagatcggagaggcaaattaccgtgggtgcagcctacagggggaggggaagaaaaaagagaaaactgtccttactggtaacactactgagatgccataga

SEQ ID NO: 42621 - DNA, 364 bp, Chicken  19866894279724_1
ggaccctataaagtgggggggggtcccgaagctttggggggggtcctggagttgtggggtgcagagagggaccccataaagtgggggggggtcccggggctttgaggggtcccggagttgtggggtgcacagagggaccccataaagtgggggggggtcccggggctttgaggggtcccggagttgtggggtgcacagacggaccccataaatggggggggtcccggagttgtggggtacacagaaggggaccccataaattggggggcggatcccagagttttggggtgtgcagagggycataaagtgggggggggatcccagagttgtggggtgcagagagggaccccataatgtggggggg

SEQ ID NO: 42622 - DNA, 599 bp, Chicken  19866894279736_1
  misc_feature (1)..(89): n is any nucleotide
nnnnnnnnnnnnnnnnnnnnnnnnnnnnnnnnnnnnnnnnnnnnnnnnnnnnnnnnnnnnnnnnnnnnnnnnnnnnnnnnnnnnnnnnnacacgtttacatatgtgaaatacttattaaagccactcttcacaagtcaaatgggaaatagcttttgacttgtatgtagtagagcattacgtcttccagcaaaaataaaactgttgctactgcttatgtctttaacgcaagcagttcacaggggagtcctaaatgtcttaactcatgaaagtggcaatttttaaatcaataacgacattargactctctgtagaaaacttgattttctgtccttatctgttctccttgctcttttttgtctcttcagcttccatgcctccttcccttatctgacacttgtaaatacttgttcatcttttacagtcaatgctggttatgactacagggtaatgtgacagtttaacttttgtggtgtrcttgcttcctgctctgtgctctctgtcactttttgaactttagactctaagggcaactcattttgcgagttcactaatgcataaagacaccattcaggaccactttcttttaatatgtttgaag

SEQ ID NO: 42623 - DNA, 600 bp, Chicken  19866894279736_2
ttacgtcttccagcaaaaataaaactgttgctactgcttatgtctttaacgcaagcagttcacaggggagtcctaaatgtcttaactcatgaaagtggcaatttttaaatcaataacgacattargactctctgtagaaaacttgattttctgtccttatctgttctccttgctcttttttgtctcttcagcttccatgcctccttcccttatctgacacttgtaaatacttgttcatcttttacagtcaatgctggttatgactacagggtaatgtgacagtttaacttttgtggtgtrcttgcttcctgctctgtgctctctgtcactttttgaactttagactctaagggcaactcattttgcgagttcactaatgcataaagacaccattcaggaccactttcttttaatatgtttgaaggatttgagagttttagctgtggcaagtatttgtttgtagattttgcaaattgctttggaaacctggctggttagccttttaatggaaatattgtgttgcaaacgatgctacatgtgtaaagatgtttactgtaaagacttagactgtggaggacagttattagaactaaaaggctg

SEQ ID NO: 42624 - DNA, 600 bp, Chicken  19866894279742_1
gtgcacgaggatcggagctgtgtgtgacacgtgagagtcatagagtcatgaaggttggcccagctgtccacctattgcccactaacccgtgtccctcagtatcacatccgtgtgtttcttggatgcctcccgggacagcctgcaccagtgcctcaccgctcttatggagaagtttttcttaacattcaaccttttcctaatgtccaagaaggtgcagtatggaagggctgtgtacacagggatgggatgctatatgaaggccaccagcttggttaggcatgaccttcccctggatgcccygtccctagaggtgttcaaggccaggttggatggggccctgggcagccttgtctagtattaaaatgtggaggttggtggccctgcctgaggtggggggggggttgagcttcatgatccttgaggtgccctccaacctgagccattctatgactatgtgaaatgatttgggtttgaggaaggagagcgtggtgggaagggcagcgcagcacgttggagccagagggtctgtaggtgagggtttctctgaacgttgcctggtgctgttgccatcttctatctcagggcgctgacactgtattt

SEQ ID NO: 42625 - DNA, 600 bp, Chicken  19866894279744_1
aagagcaaacctaatgtttaggtctgactacttgaagctgaatactgaatctgaagtagtaagagatgtgttaaaataaggagttaaaatgtgcttttatattttttcagactattgtaacagggtaattaagttttccaagtgtaaggtaaaagtagacctcatttttaaattttcaccataatgttacgtggagcagcaggctgtttggtgtctctatctaaaatgaacttatagagcagtagacatatcttgtggactcatagcactatacttaatgcatgcaatttgtattgcaaratacaaccagctgtgagggcttgttggttctgtgcacttccakaacttgaraaatgcaggtagttgtggcccagggttctgctgcagctgtttcaaattgctcttgtctctttctaacatcactcttcccaccctcctgcaaggcaagtcacttactatatgtggatagggtttggagtcaatgactgtttctgttgccacaaattcaacttaaattgttggtttgaaaccataatgtagtgaaagtgtcattgcctttggagcagcaaaaaaaaaaaaaagcttattttataagtatgg

SEQ ID NO: 42626 - DNA, 600 bp, Chicken  19866894279744_2
actgaatctgaagtagtaagagatgtgttaaaataaggagttaaaatgtgcttttatattttttcagactattgtaacagggtaattaagttttccaagtgtaaggtaaaagtagacctcatttttaaattttcaccataatgttacgtggagcagcaggctgtttggtgtctctatctaaaatgaacttatagagcagtagacatatcttgtggactcatagcactatacttaatgcatgcaatttgtattgcaaratacaaccagctgtgagggcttgttggttctgtgcacttccakaacttgaraaatgcaggtagttgtggcccagggttctgctgcagctgtttcaaattgctcttgtctctttctaacatcactcttcccaccctcctgcaaggcaagtcacttactatatgtggatagggtttggagtcaatgactgtttctgttgccacaaattcaacttaaattgttggtttgaaaccataatgtagtgaaagtgtcattgcctttggagcagcaaaaaaaaaaaaaagcttattttataagtatggactatctgcaaactcaggtggctgacttgcttcaggtcagtgt

SEQ ID NO: 42627 - DNA, 600 bp, Chicken  19866894279744_3
tgaagtagtaagagatgtgttaaaataaggagttaaaatgtgcttttatattttttcagactattgtaacagggtaattaagttttccaagtgtaaggtaaaagtagacctcatttttaaattttcaccataatgttacgtggagcagcaggctgtttggtgtctctatctaaaatgaacttatagagcagtagacatatcttgtggactcatagcactatacttaatgcatgcaatttgtattgcaaratacaaccagctgtgagggcttgttggttctgtgcacttccakaacttgaraaatgcaggtagttgtggcccagggttctgctgcagctgtttcaaattgctcttgtctctttctaacatcactcttcccaccctcctgcaaggcaagtcacttactatatgtggatagggtttggagtcaatgactgtttctgttgccacaaattcaacttaaattgttggtttgaaaccataatgtagtgaaagtgtcattgcctttggagcagcaaaaaaaaaaaaaagcttattttataagtatggactatctgcaaactcaggtggctgacttgcttcaggtcagtgtttggtggt

SEQ ID NO: 42628 - DNA, 600 bp, Chicken  19866894279760_1
agctctcctcagtagtctcaggctagagatttttttgagtatatggctttcagtctctcttctgcacacatgtagagacaattgcgggctgttcaaagcccatccggcttctgttcaaaagtagaacacgagaagcatagaggtggctgcctttcagctcccacacactcattttctgctgcatctctaaaaactgtcagtaatacacacaggtttggtacgtgtgaaacttaaaataggtctcatggaaagcaaggtatgaatagtctatttacatatttctatttacatattctcaaygtggagggcatttaaaatattttagttaaaaaatcatcacaaatggaggttcttacattacctggagcatgtgaaaacagaatacttcatagattgacctcacaagaaagtttcacctgcccctacgctgttatcctcagtaaccagaaatgctcccccacactgaaacgtgcagcaccacaatttgcacggaagcctcagtgataagcaggacaagataaggttgtagaagaaaacatgctatctggagatggaatctgaactaatgaaacgtaaatgtcatatcaaatggaaaaaaaa

SEQ ID NO: 42629 - DNA, 600 bp, Chicken  19866894279760_2
aatcaggtattggtttgggagaattgatattatgttctaaaggtaaattctgtttttgtagtgttcagatatgtactggcaaaatccaaatgacataaaaattggattttggtggtttaaaagcagattaaaattaaaagtggattacaagcaaattttcttttggtctagaataatggaagtgaataaaactgatgaaggaaagatgtagggtaatacaaaaaaagagaaaagaaaaatgtaacttcagtacaatactaccatgaaataaaccccaggcgaagccttctgctatcaaasttgattttagatgttcaaatattttataatgttgagctcacatgttctccagtttctaggtggaaattccgaggctctgaactgactatggcacatttayrtgttaccaacagtcataaaaagaatgtaaatatttttattctctgtctccagaataccaagaactagagctacaatggaagctctgaagaaattaatatcacttttctttaagcttttcttggagagtgatgaaaacaacacaaggccacttaatccattttttgttaaattagaattttaaatattgctgaataattt

SEQ ID NO: 42630 - DNA, 600 bp, Chicken  19866894279760_3
attggattttggtggtttaaaagcagattaaaattaaaagtggattacaagcaaattttcttttggtctagaataatggaagtgaataaaactgatgaaggaaagatgtagggtaatacaaaaaaagagaaaagaaaaatgtaacttcagtacaatactaccatgaaataaaccccaggcgaagccttctgctatcaaasttgattttagatgttcaaatattttataatgttgagctcacatgttctccagtttctaggtggaaattccgaggctctgaactgactatggcacatttayrtgttaccaacagtcataaaaagaatgtaaatatttttattctctgtctccagaataccaagaactagagctacaatggaagctctgaagaaattaatatcacttttctttaagcttttcttggagagtgatgaaaacaacacaaggccacttaatccattttttgttaaattagaattttaaatattgctgaataatttgaatgaaaggcactgttttcctacaatagtgctttctcctacatggaagcattagtcagagaaacactgtaaagtatctgatgtcatctaatgaagaatt

SEQ ID NO: 42631 - DNA, 600 bp, Chicken  19866894279760_4
ttggattttggtggtttaaaagcagattaaaattaaaagtggattacaagcaaattttcttttggtctagaataatggaagtgaataaaactgatgaaggaaagatgtagggtaatacaaaaaaagagaaaagaaaaatgtaacttcagtacaatactaccatgaaataaaccccaggcgaagccttctgctatcaaasttgattttagatgttcaaatattttataatgttgagctcacatgttctccagtttctaggtggaaattccgaggctctgaactgactatggcacatttayrtgttaccaacagtcataaaaagaatgtaaatatttttattctctgtctccagaataccaagaactagagctacaatggaagctctgaagaaattaatatcacttttctttaagcttttcttggagagtgatgaaaacaacacaaggccacttaatccattttttgttaaattagaattttaaatattgctgaataatttgaatgaaaggcactgttttcctacaatagtgctttctcctacatggaagcattagtcagagaaacactgtaaagtatctgatgtcatctaatgaagaatta

SEQ ID NO: 42632 - DNA, 600 bp, Chicken  19866894279761_1
aagaacaaaacagtgaacttacaaatatttgctctcagtctaacagtgcaaaaccagttcgttgcaggagtcttgccccttgagattgacacctatattattacaaggtttgcagatcgtttgaatatgaaaacataccatgatagtctcaaaaaaactctttacaggcagaagcagatactaactaccagctacccaaacaactttacccagcagaagaaaaagactcccagcctctctcataaaagcactatagaaagattacaagttgttgtagttttgtttttgttttggtggggrttttttttttttttggtagaacaataaaatctctgcaagaaatgacccttcttagataacatcctgtctgaatttttacttttacaaaaatattgtgctctaagttgatgcttcgcacctctctcaggagacaggccatcccaaacactcaattttttttcaacgtcatgacagtgacaacagacccacttcaaaaactggcacgtctgtctgagatgattttacaataccactgaaaagcaccagtttactaaagctgaaatacgctgcatcacgtgttttggtacaaaatcccaagaa

SEQ ID NO: 42633 - DNA, 600 bp, Chicken  19866894279761_2
agaacaaaacagtgaacttacaaatatttgctctcagtctaacagtgcaaaaccagttcgttgcaggagtcttgccccttgagattgacacctatattattacaaggtttgcagatcgtttgaatatgaaaacataccatgatagtctcaaaaaaactctttacaggcagaagcagatactaactaccagctacccaaacaactttacccagcagaagaaaaagactcccagcctctctcataaaagcactatagaaagattacaagttgttgtagttttgtttttgttttggtgggggrtttttttttttttggtagaacaataaaatctctgcaagaaatgacccttcttagataacatcctgtctgaatttttacttttacaaaaatattgtgctctaagttgatgcttcgcacctctctcaggagacaggccatcccaaacactcaattttttttcaacgtcatgacagtgacaacagacccacttcaaaaactggcacgtctgtctgagatgattttacaataccactgaaaagcaccagtttactaaagctgaaatacgctgcatcacgtgttttggtacaaaatcccaagaag

SEQ ID NO: 42634 - DNA, 462 bp, Chicken  19866894279766_1
ataaatggacactgcctgatcatgacctaaccagagttctagagtattgcagactgttttttaatgggaaaaaataataataataatcagttataagacaaacatcctgcagatttttctctgctttcttgcactgactttaagatagttctgtaggcaattaagttagacttgtattccaaaggaaagctgggatactgcacattttcattttgaaaccttgctacacagtgtactcaggagtgagttaagggaagttccaaggttaataatgcatagacaagatctcccataaatatyttctgtttcccttgagattcattttgtagtttatttctgtacaaaaacaaacgtttaccaagtaggccttattttagaggatactgggccatccagatacagccatctagtaaaatcaatttctttctaaatgaaaatatactgggtatgacagggtaggat

SEQ ID NO: 42635 - DNA, 599 bp, Chicken  19866894279775_1
  misc_feature (1)..(116): n is any nucleotide
nnnnnnnnnnnnnnnnnnnnnnnnnnnnnnnnnnnnnnnnnnnnnnnnnnnnnnnnnnnnnnnnnnnnnnnnnnnnnnnnnnnnnnnnnnnnnnnnnnnnnnnnnnnnnnnnnnnnaaatttggtgctaaatttaaggaagattttttttttagctagtagaataatttaaaaccaaaacttcactaagcactgatcataaaactgatagaaatgggagtgcagatgtgcttaagttaagcatgtgtgcaagcactttggcagattgggctctaatcaagaaaacagtgaaaagcaccawctgttcagtgacatttcacaagacagtgaaaaaattctgaggtctaatcttcattgcagatgaaaaagagatctgtccagagcaacaagctatcacaaaattaatttaacaacagaaactagaatttctccacagtactggcctcttcagcctcctcacattaattttgtaggtcagaataaaaataaattataatacaaccctactgtaggcacacagctcagtaaggatgaggaaaaagtgtaattttgtttttcctgttatgtggtaataatggtgaaagaaatcaaacatcttat

SEQ ID NO: 42636 - DNA, 600 bp, Chicken  19866894279777_1
gctgtgcttaacttgcactgtgcatgttaccaacatgatgggcacagtgcttgtggcattttattagctggggttttaatgaagtgtagttctaaaggaagcaaacaaacacagctctctctccaaatcccaaaatttggcagttgtcttcctgtgacagtgcctttcaccttgccagtctctctttgtgggaagcccactgacccatggacgagcggtgcagacatcacgggcagtaatttatcctgtcacacacacagtaaggaattcagagaattcatcatcagaaatgtggactcrcatacatttgtgaagtgtcagtttgacagaaatgctgacagctggcatccttccagcaggccagcaattgcttaactgtgaaaaatggcagaagatagagattttcttttcctaatacatttgtctaaaatacagaggtgttgctgatgtgatttaattcatcagcagctcgtcgctgttacagagtcattttcgactctttgggtctgtccttctttctcctctggcaagcgatgtactttatgacaggtagctggtgagaggtcagtgactgaaatcagatggtcttgtgccttgttt

SEQ ID NO: 42637 - DNA, 600 bp, Chicken  19866894279777_2
gtcagtttgacagaaatgctgacagctggcatccttccagcaggccagcaattgcttaactgtgaaaaatggcagaagatagagattttcttttcctaatacatttgtctaaaatacagaggtgttgctgatgtgatttaattcatcagcagctcgtcgctgttacagagtcattttcgactctttgggtctgtccttctttctcctctggcaagcgatgtactttatgacaggtagctggtgagaggtcagtgactgaaatcagatggtcttgtgccttgtttggtctttgtccacttmttcctgcccacgttttgagaccaaagtaggactgatttggctacatgcatcttacaaatgtttttctcgggttatagaagtacaggaattaagcattcatttctactgaggttcttaagtatttaaatgagtaatttatgtaaggggaattcctackgattcctaaaatgatcatttctyataatttgcatttgggtttccatattcaattaatctaaaawttctattcctttagtcttactcccttattagctctttatattaaaatgtgttctcaatgcttgccaacaggcctgtatt

SEQ ID NO: 42638 - DNA, 600 bp, Chicken  19866894279777_3
cgctgttacagagtcattttcgactctttgggtctgtccttctttctcctctggcaagcgatgtactttatgacaggtagctggtgagaggtcagtgactgaaatcagatggtcttgtgccttgtttggtctttgtccacttmttcctgcccacgttttgagaccaaagtaggactgatttggctacatgcatcttacaaatgtttttctcgggttatagaagtacaggaattaagcattcatttctactgaggttcttaagtatttaaatgagtaatttatgtaaggggaattcctackgattcctaaaatgatcatttctyataatttgcatttgggtttccatattcaattaatctaaaawttctattcctttagtcttactcccttattagctctttatattaaaatgtgttctcaatgcttgccaacaggcctgtattttaagctaattatgattgtcatccttatcatacttgattactttttcccaagggcagaaattgttgggcaagtggcatgggggtggaaattggtacttggagccaacaaatgtaacagcgacagaactgggacacattacctgatcactgaaatgac

SEQ ID NO: 42639 - DNA, 600 bp, Chicken  19866894279777_4
ctctttgggtctgtccttctttctcctctggcaagcgatgtactttatgacaggtagctggtgagaggtcagtgactgaaatcagatggtcttgtgccttgtttggtctttgtccacttmttcctgcccacgttttgagaccaaagtaggactgatttggctacatgcatcttacaaatgtttttctcgggttatagaagtacaggaattaagcattcatttctactgaggttcttaagtatttaaatgagtaatttatgtaaggggaattcctackgattcctaaaatgatcatttctyataatttgcatttgggtttccatattcaattaatctaaaawttctattcctttagtcttactcccttattagctctttatattaaaatgtgttctcaatgcttgccaacaggcctgtattttaagctaattatgattgtcatccttatcatacttgattactttttcccaagggcagaaattgttgggcaagtggcatgggggtggaaattggtacttggagccaacaaatgtaacagcgacagaactgggacacattacctgatcactgaaatgactcagaccacttgcagatgaattg

SEQ ID NO: 42640 - DNA, 600 bp, Chicken  19866894279777_5
actttatgacaggtagctggtgagaggtcagtgactgaaatcagatggtcttgtgccttgtttggtctttgtccacttmttcctgcccacgttttgagaccaaagtaggactgatttggctacatgcatcttacaaatgtttttctcgggttatagaagtacaggaattaagcattcatttctactgaggttcttaagtatttaaatgagtaatttatgtaaggggaattcctackgattcctaaaatgatcatttctyataatttgcatttgggtttccatattcaattaatctaaaawttctattcctttagtcttactcccttattagctctttatattaaaatgtgttctcaatgcttgccaacaggcctgtattttaagctaattatgattgtcatccttatcatacttgattactttttcccaagggcagaaattgttgggcaagtggcatgggggtggaaattggtacttggagccaacaaatgtaacagcgacagaactgggacacattacctgatcactgaaatgactcagaccacttgcagatgaattgtttcccctgttaattcatgctaacgtggcctggagattaaa

SEQ ID NO: 42641 - DNA, 600 bp, Chicken  19866894279781_1
tcaggtggtttaagtggatacataaagaaaaaaaagatatatggaaataattgaaaggcaatcttccacccactgtttaaagacaaaagattagaaatggcagatgggaacactgagtcatgtttagatttttaattttatccctttcatttgatgatctgtataaatatagaacttactgtaaacccttgattgtacagcaatacagatatacatttgtactgtactcttcatgagatgaattgtccctgaattagtttgaaaaccatatctcaaattgttcaaattttcccatttttwtccttttcaatagactgtgaagcatgcatttaggcaattattcatctgcactgagatttctgttctctgactttcctttgaattgctcttcaatatgtatgtggtgctgcaactttttagactgagatgtctgcttagagatgcatttccaagagtatttgattgggcaaaatggtttctagaactttaagtagaatccaagtacactgagagaaacacttagaaagatagaaagagactgagtgagtgaggttgtctcttcattatttgtctactcttattttggacagaagtttttag

SEQ ID NO: 42642 - DNA, 600 bp, Chicken  19866894279781_2
taatgctaagcaaaggactcagaaaataaatttaggaattggcatcaatcacttacagtacttgttttctaaattcttcagcaaaaaaattcagcaacacatgctgtaccaatataacttgttgcagttgttaagtgatatcaaatataaggatgaggagacaaactccagttcataaagtcctaagctacagggtgtcagaagctgtgatgtgacaaagtattaattaattattgaaattggccactgtctaacactgtatgtgaaattagacaagccttttatcttgcccattaccaytgcttttatgagcacttcacactctaatcttctactgatgtaaactaaagagaacatttaactgctgatttttttatgtggactaacatacgagtaagccattaaatttaagttgctctatttgcatgtataataacttgttatggttagttgggtgacgatcctaaatagtcactatgttgcaggtcattgcagagtgtgatagacatgggattgaaagacaaagctcacataaactaccagtaaaaaacttcactttgagctagagttaaaacttgagtacaaaacttcatttttgtt

SEQ ID NO: 42643 - DNA, 600 bp, Chicken  19866894279783_1
atatatcccccccccatacatatatatatatatattatatgctagtttgaatttcatggcttttacttggttcctcaaaatactccccccatttactacctaggctggatggtaaatagcagatattatgaagaggaggggacagactcatgcttaaggtaatcaagaataccccagaaaaccatatttcttttccccgtgacagtcctcagatagcatgctgcaagataagtcacatgtgtgatgtgggttcataaattacttcctacttcttaagtatctgatcagatgtgctaaatrcttgcagctaaaattagcaacgatgaaaactatttaatttataaagcccaacacaaaatgaataaacaatttgcatctaaatcactctgtctcaatttccatctggagaamgtgaataaaaataaatgctgctggaraaaagtgtgaagtactcgcatggtagtgtaatgagtgccatagacagcaaaacctaaagggaaactaataattgtgtttttataaggatttgattaatattcagtaaatactgaactttctgacctgtgagcaatgagagtaaaattaatgtttgttagctaa

SEQ ID NO: 42644 - DNA, 600 bp, Chicken  19866894279783_2
gtaaatagcagatattatgaagaggaggggacagactcatgcttaaggtaatcaagaataccccagaaaaccatatttcttttccccgtgacagtcctcagatagcatgctgcaagataagtcacatgtgtgatgtgggttcataaattacttcctacttcttaagtatctgatcagatgtgctaaatrcttgcagctaaaattagcaacgatgaaaactatttaatttataaagcccaacacaaaatgaataaacaatttgcatctaaatcactctgtctcaatttccatctggagaamgtgaataaaaataaatgctgctggaraaaagtgtgaagtactcgcatggtagtgtaatgagtgccatagacagcaaaacctaaagggaaactaataattgtgtttttataaggatttgattaatattcagtaaatactgaactttctgacctgtgagcaatgagagtaaaattaatgtttgttagctaaaagtaaatactctagcactgaaagtgtcatggtcacctgaaaaaaaatctgaattgggattgtgttatactataatcagcttaaattcagcaacttcccaaatttaaactg

SEQ ID NO: 42645 - DNA, 600 bp, Chicken  19866894279783_3
ggggacagactcatgcttaaggtaatcaagaataccccagaaaaccatatttcttttccccgtgacagtcctcagatagcatgctgcaagataagtcacatgtgtgatgtgggttcataaattacttcctacttcttaagtatctgatcagatgtgctaaatrcttgcagctaaaattagcaacgatgaaaactatttaatttataaagcccaacacaaaatgaataaacaatttgcatctaaatcactctgtctcaatttccatctggagaamgtgaataaaaataaatgctgctggaraaaagtgtgaagtactcgcatggtagtgtaatgagtgccatagacagcaaaacctaaagggaaactaataattgtgtttttataaggatttgattaatattcagtaaatactgaactttctgacctgtgagcaatgagagtaaaattaatgtttgttagctaaaagtaaatactctagcactgaaagtgtcatggtcacctgaaaaaaaatctgaattgggattgtgttatactataatcagcttaaattcagcaacttcccaaatttaaactgtctggctttgcaaccttatgatggat

SEQ ID NO: 42646 - DNA, 600 bp, Chicken  19866894279790_1
acatttctggacactgtaggccgaaacgccctttggcacagcccagggtgcatccgttgcctccatccatcggccaatagttttccccaagatgctgcccccgctgctctgcacttttagcccgttcccaggaaagctgcttgctttattccactgatccacccgcaagcgagcccctttggttgggttttgttggggtgaggaggaaggttctcctctttcctcttaccgtagagccatccccgctgtcagaccccctgcactgtccctccatggggtgagtccaggcttattccccakcaccttccccatcccacactgaggagcagcgtgaggtcagggcacatttcctgctgccccagaaaggatattggtccacacagcatcaatctgcccctatgtctgcaatccctgctccggggctcaactccagcatctactgtgcctggagtcagagctatgagaagggcactgcctgcttgtggccaagctgagtctgtgtgcttcttgtggcctctccacatctcttcctcgcttgctgtcacagctctctgctctgcagccatgtgcacattcacccttgctctccccgtgttgcag

SEQ ID NO: 42647 - DNA, 600 bp, Chicken  19866894279791_1
atacacagcaaattcttagtgccttggtgtgctgccttctacaaacttgtggaaactaggtaaatctgtatcccaggattcattctgatcatcatgaggagtgtgatgtagttaagcacatactctggaatttctggcatttctcttcatgctatgttttactggggattctccctagcacactgtggtgagccattgcactctttccccttcaaatccatggaaacacacacccagactcaataaagctacttatttttcttgccatgttgctttcctttccttgcatctctccagtckttttagtgtatggatataagtatgrtgtaagcattgtgaagcaagcagtttgtatccggatgcagcaccactcagcagctaacagctatcatgtaatgtaagtaataaaaaacaaggtacatctttaaggtaaatcatatcaatgagtgcttatgactagattttgaggatatgtagggcgtgattttttagttttttttaccaaatatttgttctctttaaatttgtgccactgagccacgagccatagcttcactttgatttattcagaaagactttaccactacagcaagtaactga

SEQ ID NO: 42648 - DNA, 600 bp, Chicken  19866894279791_2
ggtgtgctgccttctacaaacttgtggaaactaggtaaatctgtatcccaggattcattctgatcatcatgaggagtgtgatgtagttaagcacatactctggaatttctggcatttctcttcatgctatgttttactggggattctccctagcacactgtggtgagccattgcactctttccccttcaaatccatggaaacacacacccagactcaataaagctacttatttttcttgccatgttgctttcctttccttgcatctctccagtckttttagtgtatggatataagtatgrtgtaagcattgtgaagcaagcagtttgtatccggatgcagcaccactcagcagctaacagctatcatgtaatgtaagtaataaaaaacaaggtacatctttaaggtaaatcatatcaatgagtgcttatgactagattttgaggatatgtagggcgtgattttttagttttttttaccaaatatttgttctctttaaatttgtgccactgagccacgagccatagcttcactttgatttattcagaaagactttaccactacagcaagtaactgaaaacagcctgaaatcagcaatgttt

SEQ ID NO: 42649 - DNA, 375 bp, Chicken  19866894279799_1
tgacaaggcatgctaaagcattttattctagttgggactgatggctatacgcccagaaatggtgttttttttctatggttgagattagaaatgacaaatttttcccttgggtttgagaacaatctgataaatgcagatgaagggatagcatttaattacagtaaccaaactagaaagctgctaaaccgttctgtctgctctccttcacaggctgtgaaagatgaaaaggccagtgtgttggtgcactgctctgatgggtgggaccgcacagcacaggtctgctccctggctagcctcctyttagatccgttttataggacttttaaaggcttcatggtaagaacacagatgttggaatttcaaacataaaaaata

SEQ ID NO: 42650 - DNA, 600 bp, Chicken  19866894279812_1
aggctggagcaggctttcagccccagcagcccagccccattcagccatgagtgatatgcccttgccttgacagcctagaagttccctgttagcaagaaggctgcagcagttttccctgcttgaacacttcatacctgtgtccagacctgagggtcctctgtcagggtgaatccagccctgaaaatttttccatggatatacttaattgttccataaatatttgggaacagagagactgtagcagtgcatttagatgtccagagtaggaggaaaggtatttatgagaatttgctgttcagytggagtttgatttttatgcctctttaatgatgtcctctcttcatcgagcagcatgagtaacaattccccctttgtatgtattttgtatctattcctatttcctattgaaattcctaggaaagagactatccaagtacagagttgaaaatttcatcttaaaataagccagatgtccaaccttcctttaactgccaagcccaaaagagttcaagaaagatgttaaaatccgtcttcctggctgtgaaaaactaattgcatagcataggtgatgatcccagtctcccaggagaaggaataaaa

SEQ ID NO: 42651 - DNA, 599 bp, Chicken  19866894279822_1
  misc_feature (1)..(58): n is any nucleotide
nnnnnnnnnnnnnnnnnnnnnnnnnnnnnnnnnnnnnnnnnnnnnnnnnnnnnnnnnncacttctttggctgtttttagcccttatgggccacctgttcctgggtgggtctttgaactccagaaaactgctgacttctgctattaaaccccaaaaagtagttacagacattttttaatcctctagcggagttttgtcctgaaggagctacattccatcagaaacatctgtactgcagagtttattgcaaaatcaattgaaaacactgcctgttgactccaagttattcactagaacagaytgtaggtttcataggtctatgatgctcagggtgatgagtaaagaagtaaagaataaactgggctatctgaagttgatgaaatgaaccatcttcacatacttctgtcttccaagaaggacaacataactgcttaaattcttcatgaaatgaaggcagggagccagaggagctcagaatatcttcataccatcatgctactgacacaggtactgctaccacaaaggctgtgaaagttaaggttctatctagcagaaaaactctatcagctcaattcattgctgtttagtagtctcagcaga

SEQ ID NO: 42652 - DNA, 600 bp, Chicken  19866894279822_2
ctactgacacaggtactgctaccacaaaggctgtgaaagttaaggttctatctagcagaaaaactctatcagctcaattcattgctgtttagtagtctcagcagatgggaagataatcagcagttgttgctggagacagttcatgcacttacagatctgttaaagcctaacacaaatatcagcagccaagagcatcaggcagattgcagatacacctaggagaataaacatgcttcaagatgctatgcggtgatgactacttgcttacaaaataaatcagtgcatgcactgtattgctcrtattaagctgcaggaacatgtcctatattcctaaytcagagaactccagaaattcatgtctcagcctgaaaatatctttgaaacactgatgaaaatgactttctatcatccataaatgtattcacacctcagcaagaagctaaataaggacactatttggggagcgtcccagacactgaactattgtttttaatcctcttacttaaatacgcacaagtacagaaatctcctaaggtgcttagcgtagtatttgacagaaacaatccatggctgtacaaaggtagacagagagggagctaa

SEQ ID NO: 42653 - DNA, 600 bp, Chicken  19866894279822_3
aaagttaaggttctatctagcagaaaaactctatcagctcaattcattgctgtttagtagtctcagcagatgggaagataatcagcagttgttgctggagacagttcatgcacttacagatctgttaaagcctaacacaaatatcagcagccaagagcatcaggcagattgcagatacacctaggagaataaacatgcttcaagatgctatgcggtgatgactacttgcttacaaaataaatcagtgcatgcactgtattgctcrtattaagctgcaggaacatgtcctatattcctaaytcagagaactccagaaattcatgtctcagcctgaaaatatctttgaaacactgatgaaaatgactttctatcatccataaatgtattcacacctcagcaagaagctaaataaggacactatttggggagcgtcccagacactgaactattgtttttaatcctcttacttaaatacgcacaagtacagaaatctcctaaggtgcttagcgtagtatttgacagaaacaatccatggctgtacaaaggtagacagagagggagctaagtagacatgtctatatttgcgagcagagaaagttc

SEQ ID NO: 42654 - DNA, 600 bp, Chicken  19866894279829_1
atgtaaactgaagtgacgctcagaaacaccggaaggacaaaatccatttctatagggttgatcagagtaaataagaagcatcttaatgagacaaaacattaattggtgtatcagtggtaagcaagaaattactttttccacatataggtataaaactgccccctccttccttgtgggaaaaatcaaaagatttgtcaacctccagttaataatataatcttcaatctcccatcctggaatgcttacatgctactcaacacaatgatgtattagcagtctgccacaagctgatggttgcaytgaatttatgtaagcggggcagcctgcagccacccaaaccttatttatggaatgtgtacatcataggctggaagtgcatccttctaccacactacagaacaatctctggaatccttatgggatatatcaggtcagatgccacagacaactttagaattttatgaatcatcttttggctatgcagtccattttggccacaattaaatccaagcaaaacaccactaatgctacaaatccagacatgcacaggagaggaaggcatgagtgtcttctgaagacatgaatccataggatttcttc

SEQ ID NO: 42655 - DNA, 600 bp, Chicken  19866894279831_1
cttgctgtttcgcactatctactatatctcaatatatgctattccaatagcagagcaaatccatttgaatgtcagagctcaacattatattttttctaatttttctatcaatagttttttttgttttggttttgattttttttaagagtagattttttaacccagtgtaaggagaccacccagtttagagagctgaggtgtttcactccaatttagatgaaaaagtaagtggacttgaggatccattaacctgattgagcaaaacaaattctactgccccatgtatatatctgaacataktgaataactgattattattataactgcactttttgaaagaaaaagtgttctttgaccracagcatctggatggctgcttctcactgctgcaagcatttgtgagtggtcagtgaaaattctgggaagataaaattgcattcacttgacagtgaagtccctgcctgagctcctgtagaaccctgttccagaaaagaaagcattttgttggaaaatcttatgtttgaccatcatgagttgaatagaaccagtggccaccaaagcatccctatagaccacaaggttcatggcaaggaaactata

SEQ ID NO: 42656 - DNA, 600 bp, Chicken  19866894279831_2
atccatttgaatgtcagagctcaacattatattttttctaatttttctatcaatagttttttttgttttggttttgattttttttaagagtagattttttaacccagtgtaaggagaccacccagtttagagagctgaggtgtttcactccaatttagatgaaaaagtaagtggacttgaggatccattaacctgattgagcaaaacaaattctactgccccatgtatatatctgaacataktgaataactgattattattataactgcactttttgaaagaaaaagtgttctttgaccracagcatctggatggctgcttctcactgctgcaagcatttgtgagtggtcagtgaaaattctgggaagataaaattgcattcacttgacagtgaagtccctgcctgagctcctgtagaaccctgttccagaaaagaaagcattttgttggaaaatcttatgtttgaccatcatgagttgaatagaaccagtggccaccaaagcatccctatagaccacaaggttcatggcaaggaaactataaagtagtatagagcaggtcagtctcaggtggctcagcaggtttcagacatcttatggc

SEQ ID NO: 42657 - DNA, 600 bp, Chicken  19866894279839_1
actgaagttgatgttcttatttatttagcttgcctgaagggcaaaatgtctgtcccctcaactgagaagacaaaaacaactgactttgtactttaccttttgattaaaaattatctacccaatggtgaagctgtgcagctttcccattggcatgtttaatctatcactgcgagaggaggagggagagaaattatgttttgagaacgggggaaatttctcaagaagcagaatttttctattgcagcatttgtataaaacctcccctttcaaatacaaaacacttttgtacagaaagagttraaaaaaagacaaaaagaaacaccatcctacttgaactaattggcggaagtcttgggagcagagmctacaggatgcccctctcaagctctgtgctgattccagtggctctggcccgtgtgttatgcacaaagtcctcacccacttccctgtggagtaaaagcagtggtcattcaaaaatgagtaatagttctctaaaggttttggtgagccctgatgccaccttcccagcctccrtgcccagcytccatgctggatggggtattggggtattccatgggctgctttcggagccatgcaccc

SEQ ID NO: 42658 - DNA, 600 bp, Chicken  19866894279839_2
agaagacaaaaacaactgactttgtactttaccttttgattaaaaattatctacccaatggtgaagctgtgcagctttcccattggcatgtttaatctatcactgcgagaggaggagggagagaaattatgttttgagaacgggggaaatttctcaagaagcagaatttttctattgcagcatttgtataaaacctcccctttcaaatacaaaacacttttgtacagaaagagttaaaaaaaagacaaaaagaaacaccatcctacttgaactaattggcggaagtcttgggagcagagmctacaggatgcccctctcaagctctgtgctgattccagtggctctggcccgtgtgttatgcacaaagtcctcacccacttccctgtggagtaaaagcagtggtcattcaaaaatgagtaatagttctctaaaggttttggtgagccctgatgccaccttcccagcctccrtgcccagcytccatgctggatggggtattggggtattccatgggctgctttcggagccatgcacccactgctctgtggttcccgtatgccactaaggaagcatgttgctattttgtaggcaagcaaatga

SEQ ID NO: 42659 - DNA, 457 bp, Chicken  19866894279839_3
tctattgcagcatttgtataaaacctcccctttcaaatacaaaacacttttgtacagaaagagttaaaaaaaagacaaaaagaaacaccatcctacttgaactaattggcggaagtcttgggagcagagmctacaggatgcccctctcaagctctgtgctgattccagtggctctggcccgtgtgttatgcacaaagtcctcacccacttccctgtggagtaaaagcagtggtcattcaaaaatgagtaatagttctctaaaggttttggtgagccctgatgccaccttcccagcctccrtgcccagcytccatgctggatggggtattggggtattccatgggctgctttcggagccatgcacccactgctctgtggttcccgtatgccactaaggaagcatgttgctattttgtaggcaagcaaatgataccgagacggcttaaacgggcgtggt

SEQ ID NO: 42660 - DNA, 448 bp, Chicken  19866894279839_4
gcatttgtataaaacctcccctttcaaatacaaaacacttttgtacagaaagagttaaaaaaaagacaaaaagaaacaccatcctacttgaactaattggcggaagtcttgggagcagagmctacaggatgcccctctcaagctctgtgctgattccagtggctctggcccgtgtgttatgcacaaagtcctcacccacttccctgtggagtaaaagcagtggtcattcaaaaatgagtaatagttctctaaaggttttggtgagccctgatgccaccttcccagcctccrtgcccagcytccatgctggatggggtattggggtattccatgggctgctttcggagccatgcacccactgctctgtggttcccgtatgccactaaggaagcatgttgctattttgtaggcaagcaaatgataccgagacggcttaaacgggcgtggt

SEQ ID NO: 42661 - DNA, 599 bp, Chicken  19866894279840_1
  misc_feature (1)..(15): n is any nucleotide
nnnnnnnnnnnnnnntcctttgtaggttgataaattggttaagtcaattgaatattgactgggagtcagattgggatatttttgatgtagaaggatattcattgaaagtagtaattgagaatgtgacatctcttttcctgtagcgtttctgcaacctctgaacatcattatagagatggtgaagatcagtggctaaaagaagcttatattttggattgactacaggctagtcaatacacattctttttaacgtataaggaattgcccagagcattttttcagttaaaaaagccacatgamatgattctttgtcttacaaatatgagaagataagcaggttttgaagccttaaactaggcccatggcatatcttcattaaagcttactaagtttagcaaatgtagttggaacagagagagatgatatcgctcacctgagcagtgtaccttgtatctgtgtgaggcggagtgaggaatctaagaaggctgtatgagccttatgtacagagaatgccatttttaactaactgagcttgattttcacaaagtagacaatacaactctttcagggctgttttccttcttaaatgacttcattac

SEQ ID NO: 42662 - DNA, 600 bp, Chicken  19866894279847_1
tgtctttaacaatctcctgtgcactggtgagcaccaggtccagcaatgcttcacctctggttgatctgtccagtacctgaacctgaaagttattgttgatggacttaataatctcctgaatttcttgcagctcactgtattattttcgcaaaagatatctgattggttgaaatcccctatcaggatgagagccttcaagagtgacactttttgcagctgaagaaagaaggcctcatcaataggctccccttgatcaagtggcaagtggccagtggcccttgatcaagtgaccctgaccaycaactgtcaattattggtcccattcccagtcttaacctgtgttctctcaacctgtttctgactgtttctcagagggagctcctcacaccctatccactttttaacatagagagcaactccttgccaaacccttctaaaaagcttatagccctcagtagtggtattccagttatgtaaatcatcccaccatgtttctgtgattgagacaaaatcacagttttccaagtgcaccactgtttctaactccccccgctcatttcccatgctgcctgcattggcatagaggcactccagctgggc

SEQ ID NO: 42663 - DNA, 600 bp, Chicken  19866894279852_1
actgagaaaaataaatgggagcttgtgaaaatgttacagtattttctctcaatctaagttataagcgttcaactgcaaaaattcaaagtaaaatgatcttttttccttgaatatatggctcaattatgtaaatcagaagattataaacactaagaagaaactgaaattacagcaataagcacatgaaatgaagcaacccagattagttattgacaaaatctgatctgacatcaaaatctatagccaaacattagtgactaagatattcctgatttttggagggacagtgttcaacatctkctttaaaatcctcctcyataaatatgtttattaatgaagaaaacctgtactaarggcattaagaatggagacaaaaatttaaagatgcataggcactttatgtcctttaatttcaaaagaaatgtctgacctttctgggtggctgatctcatcaaacagaaggaatgagcagcaaatgtgtatgtttctattagagctgtgatcccttgtatagacatttctttcatgggattttttttttattattatttttttttagaattagaaatcagtacaggattttcaggtagaacagagatt

SEQ ID NO: 42664 - DNA, 600 bp, Chicken  19866894279852_2
ggagcttgtgaaaatgttacagtattttctctcaatctaagttataagcgttcaactgcaaaaattcaaagtaaaatgatcttttttccttgaatatatggctcaattatgtaaatcagaagattataaacactaagaagaaactgaaattacagcaataagcacatgaaatgaagcaacccagattagttattgacaaaatctgatctgacatcaaaatctatagccaaacattagtgactaagatattcctgatttttggagggacagtgttcaacatctkctttaaaatcctcctcyataaatatgtttattaatgaagaaaacctgtactaarggcattaagaatggagacaaaaatttaaagatgcataggcactttatgtcctttaatttcaaaagaaatgtctgacctttctgggtggctgatctcatcaaacagaaggaatgagcagcaaatgtgtatgtttctattagagctgtgatcccttgtatagacatttctttcatgggattttttttttattattatttttttttagaattagaaatcagtacaggattttcaggtagaacagagattggtcaaataataaataa

SEQ ID NO: 42665 - DNA, 600 bp, Chicken  19866894279852_3
taagttataagcgttcaactgcaaaaattcaaagtaaaatgatcttttttccttgaatatatggctcaattatgtaaatcagaagattataaacactaagaagaaactgaaattacagcaataagcacatgaaatgaagcaacccagattagttattgacaaaatctgatctgacatcaaaatctatagccaaacattagtgactaagatattcctgatttttggagggacagtgttcaacatctkctttaaaatcctcctcyataaatatgtttattaatgaagaaaacctgtactaarggcattaagaatggagacaaaaatttaaagatgcataggcactttatgtcctttaatttcaaaagaaatgtctgacctttctgggtggctgatctcatcaaacagaaggaatgagcagcaaatgtgtatgtttctattagagctgtgatcccttgtatagacatttctttcatgggattttttttttattattatttttttttagaattagaaatcagtacaggattttcaggtagaacagagattggtcaaataataaataatttataaaatagaacagtccaagagagtgatctaatc

SEQ ID NO: 42666 - DNA, 600 bp, Chicken  19866894279853_1
gcagcaggggctgtagaggggagcagcggctgactccgctggggaatgcagaacaaatctcttccagatggggcaggggccacgctcagctctttgtgggttgccccctcctcccctttcttctccttttcttcctcgcctgtgctcagagcatccctgtgcactgggccatgctctgtttccaggagagcagctggaaaccccctctcctgctccacaaaccttgtggttttgtgtctgtgccagccaagctgtccctttggggatgatgttgaagtgtgttggagacctgtagggtaygtgctgactccaggaytcagccctcatcccagccactgcgcacaaagtgatgtgaatagccccactataccctggcctggactgtttcctccctaatccccctccttgtctattgagctgcctggaaagtgaatctgtataaacctgcttcccagcccttccttctactgtacatctgctcctatctgtccctgtaagagacgtagtgggtctggatggtcttgcagagccaccgcagaacccataggtgcccagggcaatagctaatggctggacccctcccagccccattgtcccaga

SEQ ID NO: 42667 - DNA, 600 bp, Chicken  19866894279853_2
aggggagcagcggctgactccgctggggaatgcagaacaaatctcttccagatggggcaggggccacgctcagctctttgtgggttgccccctcctcccctttcttctccttttcttcctcgcctgtgctcagagcatccctgtgcactgggccatgctctgtttccaggagagcagctggaaaccccctctcctgctccacaaaccttgtggttttgtgtctgtgccagccaagctgtccctttggggatgatgttgaagtgtgttggagacctgtagggtaygtgctgactccaggaytcagccctcatcccagccactgcgcacaaagtgatgtgaatagccccactataccctggcctggactgtttcctccctaatccccctccttgtctattgagctgcctggaaagtgaatctgtataaacctgcttcccagcccttccttctactgtacatctgctcctatctgtccctgtaagagacgtagtgggtctggatggtcttgcagagccaccgcagaacccataggtgcccagggcaatagctaatggctggacccctcccagccccattgtcccagacatccagctgccttat

SEQ ID NO: 42668 - DNA, 600 bp, Chicken  19866894279853_3
atctgcctgttacttccctgctctgacaccagctctgtgggtaccacatcacccatcaccccatggcttctccattgggatgatggtcccttagcctggtgatgatgcttgggaggaggatccttgtgctgcaccgtggatggaaagcagacagcagaatggcactcatgggagaagggctggtttgacgctgtaggagcccacttatgctctgaagagggggaaaccaagggaataggatcaaccacatcctgctgttgggtttgcaaagggggggggtgcttcttcctgggcagctgrgccaggaatgttaagccttggggttcaccaaagcccaggaggaggtagggacatattctcgggcttgctgcttccctgccctctgcctatctcctgctatcccaaatgttttcatcctcctccccccttttgcccatggccttctcctctcatgcttgtgcacatgggggtgttgcaggtggaagatggagaggcaaactctggcacagaagggagggaaggggtgctttgggacacggcagggagggggatgggggttgttgcataaagcagaagcaatcctagaacagctgcctgtag

SEQ ID NO: 42669 - DNA, 600 bp, Chicken  19866894279857_1
gcactcacagcttctgcctgtcctgcattaccaagtacagccaactgggagctggctgctggtgaacttaatccccagggaggtgaatgaagaagacttagaggcctggaatgaacgcacatcctctggagatggtgcctgtggcagccagagctctgtgggtagggccctggggagaaggtatgggcagagcagactacttcttccccactgcatcccagcgctattctaaatgcccttcagtggggccatgggaaaagggctgggactgagttaacgtcaccttccatcctgcccccyttttttttttttcctggatactttgtatttcatgtgttaatattggcattgttataatagtgttgtgttttgctcacttaggcagataggtttagctgaagcagtgtgtggagttgactggcggtgcctccaagttgaggactgcatggatgttttgaaagaactaatagctgagtgctcagctggtctaagatagcaataactaattgatcttaatgctggacrggtgggccatctgaactctagaaagtgcctaaatcagcaagatctcaggtcagtttagaacagggaagggtgtga

SEQ ID NO: 42670 - DNA, 600 bp, Chicken  19866894279857_2
attctaaatgcccttcagtggggccatgggaaaagggctgggactgagttaacgtcaccttccatcctgcccccyttttttttttttcctggatactttgtatttcatgtgttaatattggcattgttataatagtgttgtgttttgctcacttaggcagataggtttagctgaagcagtgtgtggagttgactggcggtgcctccaagttgaggactgcatggatgttttgaaagaactaatagctgagtgctcagctggtctaagatagcaataactaattgatcttaatgctggacrggtgggccatctgaactctagaaagtgcctaaatcagcaagatctcaggtcagtttagaacagggaagggtgtgaatactcagagaagagatgaggctgccatgagaggatgcttagagggctctaaacctaaaacacatgtaaatctttccttaccttaccttctttctcatctctctgctgttctctttccattgctgttcctttgctcttccctttgtattcttccagttaaaatctgtaatgagcaaatgatgtaatcccagtgcatttcatcctttgcaggacgtcagtaccatc

SEQ ID NO: 42671 - DNA, 600 bp, Chicken  19866894279857_3
catcacatagccttgagcactgagcatcctggagggcagttgtttggtatttcagtcaccatcagctctttccttcttcttttcacaaactacttctgtcttgttatttactgcatgaacatagcacaggagaatcctgaaatgaaacataacaccattgtacagtgctacagctccacccagctgaatggcacgaaatgggactggctctctgtctctgcttacagtaactctcaaatcttgatggaaatgagcaaaacctgactactgactttcattactttaacaccatatacacayatgtatctagaaagtcttagtctctgcagtcatgcaaagagcttaaactcataaatatatttgaatatacagcttaggactgttgacattgttattaactttgctgtgattattcacccagttagttgtgtccaccagcccagtgcttaactgtcaataatgtaagggtttttattatcccgctgcttaacctggtcatgttttctctgagggttatacagataagtgattaaatgtgtcaccttaaagaaggaacagatacaaaacatctccaagcaactggaaacaactgaagaggac

SEQ ID NO: 42672 - DNA, 600 bp, Chicken  19866894279857_4
ctagaaagtcttagtctctgcagtcatgcaaagagcttaaactcataaatatatttgaatatacagcttaggactgttgacattgttattaactttgctgtgattattcacccagttagttgtgtccaccagcccagtgcttaactgtcaataatgtaagggtttttattatcccgctgcttaacctggtcatgttttctctgagggttatacagataagtgattaaatgtgtcaccttaaagaaggaacagatacaaaacatctccaagcaactggaaacaactgaagaggacatcaayatcttgagaaaggatctcagtgaaacaaaggtacctcttgtccttcactacctgcaattagtttgttcccctgtgattccacagccacctggaaacctccgactgcccaaaatctcactgcaggcaatgcaggacagtatcaaatgcattttattcctttgaatacatctaggtgtttctggtcagtcagagaccacatgagatgggacagtaaactcttgtacttcacttgtcttcttttctaacaaaaaccagatctctctgttttctgcctttcaggaatgtacatctcagatcaaa

SEQ ID NO: 42673 - DNA, 600 bp, Chicken  19866894279861_1
ataaaaaaaaagacatttcttccccattatcctcagtacccagcagctccaaggccaagctctcacatgtactgctgctgggaggagtgtcagtgtagccttcatcttcccaacacatccctgctatagaaagcaaaagcaagagattcccagcaacaaaaatccaccctgttgcaaattcaagaacaaaactctttttgcttaagatctttgtaaatctttagccgaaagcttttcaaaacaggctttcatgtcgtggatgaatgtaaaaacatgaagtcttctaaaattatttttagraatgaagggttacatttaaatgaagagaagttttatttttgtctcaaytgaaaagagtttgggttgcttcctctaacgaaagctggcagaacagaatcctggtttttgatcctcacagaccttttcctctccttcttggtgttagtacttaaatctgaatgctgaaccctcatatcttgccacttctgtggcaatagtgtccaatttctaactgcacggtgtttctgaaagacagagaaagtaggtggggagagagagtatttgggtgcaggaaacttggatttatttataacaactgct

SEQ ID NO: 42674 - DNA, 600 bp, Chicken  19866894279861_2
cccattatcctcagtacccagcagctccaaggccaagctctcacatgtactgctgctgggaggagtgtcagtgtagccttcatcttcccaacacatccctgctatagaaagcaaaagcaagagattcccagcaacaaaaatccaccctgttgcaaattcaagaacaaaactctttttgcttaagatctttgtaaatctttagccgaaagcttttcaaaacaggctttcatgtcgtggatgaatgtaaaaacatgaagtcttctaaaattatttttagraatgaagggttacatttaaatraagagaagttttatttttgtctcaaytgaaaagagtttgggttgcttcctctaacgaaagctggcagaacagaatcctggtttttgatcctcacagaccttttcctctccttcttggtgttagtacttaaatctgaatgctgaaccctcatatcttgccacttctgtggcaatagtgtccaatttctaactgcacggtgtttctgaaagacagagaaagtaggtggggagagagagtatttgggtgcaggaaacttggatttatttataacaactgctttaaatatctgcacaagagaaa

SEQ ID NO: 42675 - DNA, 600 bp, Chicken  19866894279861_3
ccattatcctcagtacccagcagctccaaggccaagctctcacatgtactgctgctgggaggagtgtcagtgtagccttcatcttcccaacacatccctgctatagaaagcaaaagcaagagattcccagcaacaaaaatccaccctgttgcaaattcaagaacaaaactctttttgcttaagatctttgtaaatctttagccgaaagcttttcaaaacaggctttcatgtcgtggatgaatgtaaaaacatgaagtcttctaaaattatttttagraatgaagggttacatttaaatgragagaagttttatttttgtctcaaytgaaaagagtttgggttgcttcctctaacgaaagctggcagaacagaatcctggtttttgatcctcacagaccttttcctctccttcttggtgttagtacttaaatctgaatgctgaaccctcatatcttgccacttctgtggcaatagtgtccaatttctaactgcacggtgtttctgaaagacagagaaagtaggtggggagagagagtatttgggtgcaggaaacttggatttatttataacaactgctttaaatatctgcacaagagaaag

SEQ ID NO: 42676 - DNA, 600 bp, Chicken  19866894279861_4
cattatcctcagtacccagcagctccaaggccaagctctcacatgtactgctgctgggaggagtgtcagtgtagccttcatcttcccaacacatccctgctatagaaagcaaaagcaagagattcccagcaacaaaaatccaccctgttgcaaattcaagaacaaaactctttttgcttaagatctttgtaaatctttagccgaaagcttttcaaaacaggctttcatgtcgtggatgaatgtaaaaacatgaagtcttctaaaattatttttagraatgaagggttacatttaaatgargagaagttttatttttgtctcaaytgaaaagagtttgggttgcttcctctaacgaaagctggcagaacagaatcctggtttttgatcctcacagaccttttcctctccttcttggtgttagtacttaaatctgaatgctgaaccctcatatcttgccacttctgtggcaatagtgtccaatttctaactgcacggtgtttctgaaagacagagaaagtaggtggggagagagagtatttgggtgcaggaaacttggatttatttataacaactgctttaaatatctgcacaagagaaagt

SEQ ID NO: 42677 - DNA, 600 bp, Chicken  19866894279861_5
ccaaggccaagctctcacatgtactgctgctgggaggagtgtcagtgtagccttcatcttcccaacacatccctgctatagaaagcaaaagcaagagattcccagcaacaaaaatccaccctgttgcaaattcaagaacaaaactctttttgcttaagatctttgtaaatctttagccgaaagcttttcaaaacaggctttcatgtcgtggatgaatgtaaaaacatgaagtcttctaaaattatttttagraatgaagggttacatttaaatgaagagaagttttatttttgtctcaaytgaaaagagtttgggttgcttcctctaacgaaagctggcagaacagaatcctggtttttgatcctcacagaccttttcctctccttcttggtgttagtacttaaatctgaatgctgaaccctcatatcttgccacttctgtggcaatagtgtccaatttctaactgcacggtgtttctgaaagacagagaaagtaggtggggagagagagtatttgggtgcaggaaacttggatttatttataacaactgctttaaatatctgcacaagagaaagtgaagccattggcactttgcattca

SEQ ID NO: 42678 - DNA, 600 bp, Chicken  19866894279866_1
ccacatcatcaacatcacagccaccaacccagctttctttccccatctgttagctgtacaagcctcagccatccttatttctcccatcccacactagtgcaaccacgctgagtcagccactattgtctgtgtcaaacagtcctgtgcagcacgaacctgcgtgggaaagttcagcttaatcctagctgttaatcagtttatgccctgaagtacttattgtgctaaggcttgcacttttacacaggtttgcatcatcgggaggacagtgccactaatagcttgtcacacactcggcagctygaggaaaaaatttcttctggctgaaggaagtttctcttttgggagtttaatggctgtgtggcaggttcctcatcacacatttctgctgacaagccgtgctcagaaagcatcacaagatagagtactgtctccctacttctycattcactcacatttatcatgtagccgtgctgtgctgatcacatttaccttttgcaaaaagccatccagcacacaayggtaccacaccagccatgagaggtctgaagagccactacctgaaagcggagaccgccaaccagggagggccaacagcagctc

SEQ ID NO: 42679 - DNA, 573 bp, Chicken  19866894279866_2
ctgtgcagcacgaacctgcgtgggaaagttcagcttaatcctagctgttaatcagtttatgccctgaagtacttattgtgctaaggcttgcacttttacacaggtttgcatcatcgggaggacagtgccactaatagcttgtcacacactcggcagctygaggaaaaaatttcttctggctgaaggaagtttctcttttgggagtttaatggctgtgtggcaggttcctcatcacacatttctgctgacaagccgtgctcagaaagcatcacaagatagagtactgtctccctacttctycattcactcacatttatcatgtagccgtgctgtgctgatcacatttaccttttgcaaaaagccatccagcacacaayggtaccacaccagccatgagaggtctgaagagccactacctgaaagcggagaccgccaaccagggagggccaacagcagctcttgctctttattcacctttttgaaaagcctggagaaaagggatgaatcgtgttgatggaaacaggagctgctcacctccaggttactgattcaggctcaatccccagtctaaag

SEQ ID NO: 42680 - DNA, 496 bp, Chicken  19866894279866_3
gtgctaaggcttgcacttttacacaggtttgcatcatcgggaggacagtgccactaatagcttgtcacacactcggcagctygaggaaaaaatttcttctggctgaaggaagtttctcttttgggagtttaatggctgtgtggcaggttcctcatcacacatttctgctgacaagccgtgctcagaaagcatcacaagatagagtactgtctccctacttctycattcactcacatttatcatgtagccgtgctgtgctgatcacatttaccttttgcaaaaagccatccagcacacaayggtaccacaccagccatgagaggtctgaagagccactacctgaaagcggagaccgccaaccagggagggccaacagcagctcttgctctttattcacctttttgaaaagcctggagaaaagggatgaatcgtgttgatggaaacaggagctgctcacctccaggttactgattcaggctcaatccccagtctaaag

SEQ ID NO: 42681 - DNA, 600 bp, Chicken  19866894279872_1
gagggtgtgcccatcacttcggggggctttgacttgtctggctttggcagccgctactgtggcagaaggtgcccaccctgctaaaaccactggccatggtcccggagaaattcatccataaaccagaaacatggttctggatgaagaaggaatcttcaagccactgctttcagactatctgaccctactgaaaactccaggaaatgcagacaggaaggggcaatcccgtgctttctgaaaacatgactcatgtgttttattgttaccctctacctaaccctttctctccattttctttcyttctctctttctttctttatttctttcttttttttttcsttttcctcccttcwtctgctatgggctatgaggctcctcagaaccatcatgttcccttccaaaaaggcaggcacaagccttgcatgagctcagacttgggattggatgaattttccactgtggagcctctgctcagggtgacttcattttcctctgtaaacattcattaaagatttctgcatctcatttgagcttttgattactctttccaccttgtatggcctccagaactgcccagggagaatggctttgctcctggtg

SEQ ID NO: 42682 - DNA, 600 bp, Chicken  19866894279872_2
ggctttggcagccgctactgtggcagaaggtgcccaccctgctaaaaccactggccatggtcccggagaaattcatccataaaccagaaacatggttctggatgaagaaggaatcttcaagccactgctttcagactatctgaccctactgaaaactccaggaaatgcagacaggaaggggcaatcccgtgctttctgaaaacatgactcatgtgttttattgttaccctctacctaaccctttctctccattttctttcyttctctctttctttctttatttctttcttttttttttcsttttcctcccttcwtctgctatgggctatgaggctcctcagaaccatcatgttcccttccaaaaaggcaggcacaagccttgcatgagctcagacttgggattggatgaattttccactgtggagcctctgctcagggtgacttcattttcctctgtaaacattcattaaagatttctgcatctcatttgagcttttgattactctttccaccttgtatggcctccagaactgcccagggagaatggctttgctcctggtgggtaagagatgagtgtttacggagacccttctcctttgc

SEQ ID NO: 42683 - DNA, 600 bp, Chicken  19866894279872_3
ctactgtggcagaaggtgcccaccctgctaaaaccactggccatggtcccggagaaattcatccataaaccagaaacatggttctggatgaagaaggaatcttcaagccactgctttcagactatctgaccctactgaaaactccaggaaatgcagacaggaaggggcaatcccgtgctttctgaaaacatgactcatgtgttttattgttaccctctacctaaccctttctctccattttctttcyttctctctttctttctttatttctttcttttttttttcsttttcctcccttcwtctgctatgggctatgaggctcctcagaaccatcatgttcccttccaaaaaggcaggcacaagccttgcatgagctcagacttgggattggatgaattttccactgtggagcctctgctcagggtgacttcattttcctctgtaaacattcattaaagatttctgcatctcatttgagcttttgattactctttccaccttgtatggcctccagaactgcccagggagaatggctttgctcctggtgggtaagagatgagtgtttacggagacccttctcctttgccagcagaatgggag

SEQ ID NO: 42684 - DNA, 599 bp, Chicken  19866894279876_1
  misc_feature (1)..(86): n is any nucleotide
nnnnnnnnnnnnnnnnnnnnnnnnnnnnnnnnnnnnnnnnnnnnnnnnnnnnnnnnnnnnnnnnnnnnnnnnnnnnnnnnnnnnnnaaatgtgctgcccgactttgctttccgttttgaatgtttgaaacacctcggttacaggtctagagatcactttttcacagttgtgcttcctcgttacagcatttttctttctgcattcagaatcttctcagtctctcttcgtattcaaaataatgctgtgtattaggtaaatgcaccattttctctactagtccacagaaaataagaatctagytctggtgttggctggcccattagtaccttaatttgagtattcaagccaggtggttcgcttcactactcamcctgaatatggtaaggtcagtgcctcaagttaaattatatctctcaaagtgggatttgtgggtgagaggatttatcgtacagctctgactgcttgttcagatggtcatcacctgcacagagacgtgcacagatttacatttcagatgcaaaatatgcgaaacttttgacttaagaacacattcctgagtcactaaagcttgttctttatatagtatttaatttgttttg

SEQ ID NO: 42685 - DNA, 599 bp, Chicken  19866894279876_2
  misc_feature (1)..(16): n is any nucleotide
nnnnnnnnnnnnnnnnaaatgtgctgcccgactttgctttccgttttgaatgtttgaaacacctcggttacaggtctagagatcactttttcacagttgtgcttcctcgttacagcatttttctttctgcattcagaatcttctcagtctctcttcgtattcaaaataatgctgtgtattaggtaaatgcaccattttctctactagtccacagaaaataagaatctagytctggtgttggctggcccattagtaccttaatttgagtattcaagccaggtggttcgcttcactactcamcctgaatatggtaaggtcagtgcctcaagttaaattatatctctcaaagtgggatttgtgggtgagaggatttatcgtacagctctgactgcttgttcagatggtcatcacctgcacagagacgtgcacagatttacatttcagatgcaaaatatgcgaaacttttgacttaagaacacattcctgagtcactaaagcttgttctttatatagtatttaatttgttttggagttaaagtgttttttccccaccctcctctgatggggggtgttctagaacagctgcatttgcgattttg

SEQ ID NO: 42686 - DNA, 600 bp, Chicken  19866894279878_1
aagagacctcagaggctatgtgctagcattccctagcagaggcaaactatggaaaaggtaaagaaatatcatcaggaatgttttagaaggggtccaatagatggcaacaaaggaaaagaatatgtctgacattgtggacagagtaacttatccagcctctctgacacttgccgccaaagaaacaataaagaacagcttctgtgaggaacattcaatggaaaagccatctataatacagacatattatgtaacagctatcttctgtgttcagtggttatgagtttgtcctttataaaatgrtctctatctgtaattcctgtgtcatgtggaggaagtcctcaatgactgcttatcagtctcttccgtgctttcatttacaatctgtgacctctgagcctcataaaaagcattttattaaaatgacatacttcactgttgcatgtttaagacctgacagtaagaaatagctttttatgattgctgcaactgtgtaagaccatactctccagaaggatgactttcacacttagtccatcacatgctgcagtttcaatcataaaacagaaccaagggatcataatcagtcctttaggaaaggaa

SEQ ID NO: 42687 - DNA, 599 bp, Chicken  19866894279896_1
  misc_feature (1)..(114): n is any nucleotide
nnnnnnnnnnnnnnnnnnnnnnnnnnnnnnnnnnnnnnnnnnnnnnnnnnnnnnnnnnnnnnnnnnnnnnnnnnnnnnnnnnnnnnnnnnnnnnnnnnnnnnnnnnnnnnnnnncagctgaatgcgtgtactgtggtgagctgatgatccggtccattgacaaaccttttattgatcctcagaagtacgaagaggagatgcagagctggctgtagttctccaaatctgcaactgtcattataccagagaggttttgctcacaacttgtaaagcttctgtggtggaagtaaaatctccgaraatgggaacagagtggcttctgtggaactcttatggaaagagtaatggratcttgtcatcaggattatagtgaactaatcttcaaaaaagtgcagatatagctattgctgtctaagaactcaaaaactaattagagctaatctactggatttttgttttagcagatgtttgctgtttgcagttttgaggttctcagtgtgaaactaatggagtgccttgttgcccagaaggaattggggacagcctttgttttctcttccctgttgtgtggtatctgttttttggtgaagatgcactta

SEQ ID NO: 42688 - DNA, 599 bp, Chicken  19866894279896_2
  misc_feature (1)..(65): n is any nucleotide
nnnnnnnnnnnnnnnnnnnnnnnnnnnnnnnnnnnnnnnnnnnnnnnnnnnnnnnnnnnnnnnnncagctgaatgcgtgtactgtggtgagctgatgatccggtccattgacaaaccttttattgatcctcagaagtacgaagaggagatgcagagctggctgtagttctccaaatctgcaactgtcattataccagagaggttttgctcacaacttgtaaagcttctgtggtggaagtaaaatctccgaraatgggaacagagtggcttctgtggaactcttatggaaagagtaatggratcttgtcatcaggattatagtgaactaatcttcaaaaaagtgcagatatagctattgctgtctaagaactcaaaaactaattagagctaatctactggatttttgttttagcagatgtttgctgtttgcagttttgaggttctcagtgtgaaactaatggagtgccttgttgcccagaaggaattggggacagcctttgttttctcttccctgttgtgtggtatctgttttttggtgaagatgcacttaaattgaaggcagtgaggaacacttaacagtgtagtcttcattcatcact

SEQ ID NO: 42689 - DNA, 600 bp, Chicken  19866894279902_1
ggtcaggtcagggtttacctggggagctccacacgagggggatacagctctatgcatttttccatgggagctcatcagcattccacaccaccccgagctcactatgggtcctacccttccctcagctgctcagcctgcagtcactgcctctggaaagcactgtgtgtcatcaccaaacttcagcaaaactttcctgcagatcttccccttcatttcaagtttctgctggtagcaaaggcggatcaacactgctctgctgtgcacattcgagcacttttatttctccatcagagtcacaarttccaacagaaaactgaacaccgcttctccttctcccctttgcctcttccaggaaggagcaaacactttgtcaggaacaagcaggcggatacatttgtgcttgttttgcgtcctgcagctggcggaggtgtttgttatgcagaattgcttgtgccaatctcctgggaacaccatttggttggcagataaatccttacctaggctgctccgtgtcagctccgtacagtagttgagcattagtatgctgccctgctgctggtgatttatgtcactaagcaacacagcatgaactgcaatttt

SEQ ID NO: 42690 - DNA, 600 bp, Chicken  19866894279902_2
ccatttggttggcagataaatccttacctaggctgctccgtgtcagctccgtacagtagttgagcattagtatgctgccctgctgctggtgatttatgtcactaagcaacacagcatgaactgcaatttttacaatcaaatatacaatttacgctacattttttggtgcatattttaggagatgagcttaaaattgcttgccggcagtgcttgagccactgaggagttgggaaagtcccagtcagtgctgcagccccagcttgggagtgagttacaactcacttctgcatggggggacayttacatcartgaacaccagtgtcacattgctgctagcagggaggaagctccttgtcctgggtttttcaccctaaatcctccaagcgcttctcatctcactgcctcacttttgcccttgcatccctggggtgcacctctaaggatgctcgggatgatcggggatgcttgggatgtttggggatgctcgggatgctcagggatgctcaaggatgcttgggatgctggcactgggagagccttctccaattggatccattggatgtcaccatgctgacagcattcccgggggcgcggggagga

SEQ ID NO: 42691 - DNA, 600 bp, Chicken  19866894279902_3
tggcagataaatccttacctaggctgctccgtgtcagctccgtacagtagttgagcattagtatgctgccctgctgctggtgatttatgtcactaagcaacacagcatgaactgcaatttttacaatcaaatatacaatttacgctacattttttggtgcatattttaggagatgagcttaaaattgcttgccggcagtgcttgagccactgaggagttgggaaagtcccagtcagtgctgcagccccagcttgggagtgagttacaactcacttctgcatggggggacayttacatcartgaacaccagtgtcacattgctgctagcagggaggaagctccttgtcctgggtttttcaccctaaatcctccaagcgcttctcatctcactgcctcacttttgcccttgcatccctggggtgcacctctaaggatgctcgggatgatcggggatgcttgggatgtttggggatgctcgggatgctcagggatgctcaaggatgcttgggatgctggcactgggagagccttctccaattggatccattggatgtcaccatgctgacagcattcccgggggcgcggggaggactttcccct

SEQ ID NO: 42692 - DNA, 600 bp, Chicken  19866894279909_1
ggaggaaaggctgcaaagcacttccccgtggtcctcaggctgcctcgtgctcatgttgatgggcttgcagcaggcaagaggctcctgcggttgtcgggtgccggagcagaaggtggatattttgttcattcttcaaatataacaggcgagctggcctgttgctatttcggcatccttccaccatctggtaggttggaagattgtaaacaaatggcatggtaaagctcttctaacaaaactgtcttatgtagagctaataggtggatgtgggggggaaaaaagaccacagcatttacttcrggaggagatggttggaatatgagtatcaagcatggacagagttaaagcacagtgatttttatagctgtggcaactttatctgcaatccactcttttragaaatggaatcaaggataagaatattgaaatattccttatatctgcttctacagttgtgatagtagagggctttttttttttttgtctgtggccttgaactattaaatgtgacagtaaaattaaatcccactgtttctttctcttgtttcccaaaggattcaccctcctgaacacttcaagaaaaagtatgctgtggatgag

SEQ ID NO: 42693 - DNA, 600 bp, Chicken  19866894279909_2
gtgccggagcagaaggtggatattttgttcattcttcaaatataacaggcgagctggcctgttgctatttcggcatccttccaccatctggtaggttggaagattgtaaacaaatggcatggtaaagctcttctaacaaaactgtcttatgtagagctaataggtggatgtgggggggaaaaaagaccacagcatttacttcrggaggagatggttggaatatgagtatcaagcatggacagagttaaagcacagtgatttttatagctgtggcaactttatctgcaatccactcttttragaaatggaatcaaggataagaatattgaaatattccttatatctgcttctacagttgtgatagtagagggctttttttttttttgtctgtggccttgaactattaaatgtgacagtaaaattaaatcccactgtttctttctcttgtttcccaaaggattcaccctcctgaacacttcaagaaaaagtatgctgtggatgaggttcactatgtgaatgaggtgagttgtctgaatacagaattaatatgtggcagtgattttgctccactgtttactgggtatctcttgacttggtgag

SEQ ID NO: 42694 - DNA, 600 bp, Chicken  19866894279915_1
tttttccccctctggttaaccacttgattttttccaaatgcaatcactgaaagcattaacaaatgctggcgggggccgtggctgcaggcagaagcggattcgatccaagtgcaaggccccgaatgccatggaggcaccttgtaagccaatacctagcaaagtccccaaagttttcttgcgcgttccttctgccacgctgagctcaggttgaagacagggtaacgtatgactggatggtgctaatggaagggtttccaaccggcccttggaaaagaagttttcagagctttaagtgtgggrcttctttttttttgatgtctttggaatctctttgtatgtcatgatatgcactggttcgtagcaacgtaagctcgtggtgcgtttaagatcttccttcttgaggaataagcacttgtctgtgtaacaaatgggataacagttgaaagggatatttgttttggcaagctgctttttttatctgggttcgtgatttgtatatgggagaaattcttgggcagtagacaggcaaacttgataaagtgcttgtgatttatggcagcggtatcagcgtggtatcacaacttgtgtgcgtggagctgg

SEQ ID NO: 42695 - DNA, 600 bp, Chicken  19866894279916_1
acaacaagtacgcagccgggaaatgctttcccttttaacaggaaccacatgaaaggctcctccccagataggattacaggagatcagcattttagtaggttgtgatggagcactggatacctaccccatgctgtctgaaatgctcaggtcagaaaaatacaaattgcacgtactgccaaagcctgctgctaacaggtgccatgccaaccactgaatttttcctgttgcaaagcccttaagtattgtttggctttgtaccgtttgaaagtatgtgaatggaatcttttttttttttttttwaagcagaattaataattttaactgtattaccatctacagagatacgaatccacagaatagaagttaaatatgcaaatgaagaaaggatttaaaataatcaagcatttgaaacaccggtacatttaattcttcaattacaaaggtaaacactctacctcacatttcttttgtgtctcagatttacgatacatctttggatgtacttcaggcaacaaaaatgtgctaacattcctcaacaaaaagagaaattgtctgcaaatacaaagtgagtatctggtgaagatttttggacaatgtcct

SEQ ID NO: 42696 - DNA, 600 bp, Chicken  19866894279921_1
gctgcagcactgagctgctgggaccgagctgtggtcagagcagagggccgcacgccggcaatgctggctgccatcagaactcagctgggagacccctttgtgtccccacccctgcaggaaggccctctgctcacccactgctgatgcacctcgagagcttcggggcttttcagcatttcccacagcgcatgcaaagcaggattcacatcaaagcggagttcaagaagagtcaaatatgtccaggatgtactgcttcacagcgactgcaccaagttctgacaacagactgctcctcccctygggctatcttcacaccaaccctccgtggtttgagacgttctctcctaaaaccaaacttgtaagtttaaacttcatgaaatctcagcctgttttactatttttaaatgaggcgcatctcaagtttaaaaaccaagacacgagcacttcctccagcttcttttgcgtcaagccatcttcagcacaaactctaaccagacaccaagctttcccytctcctcaagagaacatcaaaccattcttccttccttgtaggagagccagacagaaactgtcccgaaataaccgtctcagcatctacac

SEQ ID NO: 42697 - DNA, 600 bp, Chicken  19866894279921_2
agcggagttcaagaagagtcaaatatgtccaggatgtactgcttcacagcgactgcaccaagttctgacaacagactgctcctcccctygggctatcttcacaccaaccctccgtggtttgagacgttctctcctaaaaccaaacttgtaagtttaaacttcatgaaatctcagcctgttttactatttttaaatgaggcgcatctcaagtttaaaaaccaagacacgagcacttcctccagcttcttttgcgtcaagccatcttcagcacaaactctaaccagacaccaagctttcccytctcctcaagagaacatcaaaccattcttccttccttgtaggagagccagacagaaactgtcccgaaataaccgtctcagcatctacacacaccaacacctcgcagttgcacagagctccctgcagactggagcggttgctggtgtacgtgtaagggaagaactccactccaaagagcccaagtgtgggctgcaggagactggcacagctgaaggcacacgttgagagcggggatctgcagagcatgtgacaaacgctcgctctcctctgtgcaaacgatcccagtcgtactctcagtgt

SEQ ID NO: 42698 - DNA, 600 bp, Chicken  19866894279926_1
agggaaggagacatcatggtgggggtctgctataggccaactgataaggaagaccgagtagatgaggccctctataaacagataggagcagcttcacattcacaaaacatggtcctcacaggggacttaaaccaccttaatatctattggaaggacaacccccgcagtgcactagaaatcaaagaagttcctggaatgtgttgatgatagatttcttgtccaagtaccagaggaacccatgagaaaaggtgccatgctggaccttgtcctcaccaacgaggaacagctggtgaggagtgyggagctcaaaggcagccttggctgtagtgaccacaaaatggtggagttcaaaatcctcagggtgtcaaagagggtgtgcagcaagtttgctactctggactacaggagggctgactttgaactgcttaggagggcaacacgggagaaactcttggagggaagaggggccaacaagaaagccaattggtatcaaggaccayttcctccaagcgctgaagcagtgcattctgagaaaaaaacaagcaagraggccaggaggcctccaaggatcaacaaggaactcttggagctcaaaaagaa

SEQ ID NO: 42699 - DNA, 600 bp, Chicken  19866894279926_2
ttgatgatagatttcttgtccaagtaccagaggaacccatgagaaaaggtgccatgctggaccttgtcctcaccaacgaggaacagctggtgaggagtgyggagctcaaaggcagccttggctgtagtgaccacaaaatggtggagttcaaaatcctcagggtgtcaaagagggtgtgcagcaagtttgctactctggactacaggagggctgactttgaactgcttaggagggcaacacgggagaaactcttggagggaagaggggccaacaagaaagccaattggtatcaaggaccayttcctccaagcgctgaagcagtgcattctgagaaaaaaacaagcaagraggccaggaggcctccaaggatcaacaaggaactcttggagctcaaaaagaaagtctatagggagtggaagcaggaacaggttacctgggaggactacaaagaagttgcctgagcagccagagattaggttagcaaagctaaaccaccgacagaattatatctagccagtgccaccaaggggaacaaaaagaaattctatatatatgctatcaatacattctatatatacacttcgtatatgcactgtattt

SEQ ID NO: 42700 - DNA, 571 bp, Chicken  19866894279926_3
gtgccatgctggaccttgtcctcaccaacgaggaacagctggtgaggagtgyggagctcaaaggcagccttggctgtagtgaccacaaaatggtggagttcaaaatcctcagggtgtcaaagagggtgtgcagcaagtttgctactctggactacaggagggctgactttgaactgcttaggagggcaacacgggagaaactcttggagggaagaggggccaacaagaaagccaattggtatcaaggaccayttcctccaagcgctgaagcagtgcattctgagaaaaaaacaagcaagraggccaggaggcctccaaggatcaacaaggaactcttggagctcaaaaagaaagtctatagggagtggaagcaggaacaggttacctgggaggactacaaagaagttgcctgagcagccagagattaggttagcaaagctaaaccaccgacagaattatatctagccagtgccaccaaggggaacaaaaagaaattctatatatatgctatcaatacattctatatatacacttcgtatatgcactgtatttttttttttttttttttttt

SEQ ID NO: 42701 - DNA, 600 bp, Chicken  19866894279932_1
atcacagacttctaaagaactccacaggtcaagggaaattacttgggacgaaatctttcattaaaattttgagagagcttcctcacagactgaagctttcgttaaaaacacgagactggaggagatattcaggttactaagtccaaaaacttatcatacacaaatatgtgacattattcttttcattatattgctctgaacccttggtcttccaagacttaaagcccacagaattcaagccctaatatatttatggtcacttgttcttatttatgccagtgctgccttaatttaaatcastctttcctgttttgggtttctcttcctgctccacttaaatcaactagggaagagctgcaaagctacatctccatcacatgtccaggagcatgtgcttcagtaagcagcgctcaagaaggggaaatcacagtcatcccagccttctcagcataccctcctctagccacagctgctctcagattttagtttctgctcaggagaaacacaaccagcaatttccaacgtcacagtgcaccagtgctaataaaacagaaataagtagctccgggacagatgaaaacctctgagcagcaagggaga

SEQ ID NO: 42702 - DNA, 599 bp, Chicken  19866894279935_1
  misc_feature (1)..(120): n is any nucleotide
nnnnnnnnnnnnnnnnnnnnnnnnnnnnnnnnnnnnnnnnnnnnnnnnnnnnnnnnnnnnnnnnnnnnnnnnnnnnnnnnnnnnnnnnnnnnnnnnnnnnnnnnnnnnnnnnnnnnnnnnatttatgtatataattactttgtgttgtgtatggaatatatgttttctgtcaaagtattttaaatttatgatgaagtgtataaaataagtggtataaggtcatgtcatgtacctggggactaacagcaagaatttctgctaaggccaaaacattttcaaataagaggaacggagagagayccaggtatgttaatcagactgcagtaagacgtttttctgtccatttgtttcccctttgcctcgagaccattgtgtaatgcaaaatttcaggagcaccgtggtgtaagcaatttgctagttcacagagaaagacaggtgcttcctggttagagaagtacagatggtggtcaatgacaggtcaatgacagctctgcattctgctcatccagatgattccaacatgattacttcttctccccttcaatgtgtcccttctcaaaaacagtcccagtctttgttgtcttccttttgaaggcagc

SEQ ID NO: 42703 - DNA, 600 bp, Chicken  19866894279936_1
tacacagccccacagaatattcctggattgatttaataatataaagtataactgcacagttaactctgttcagcgttactagtaaatgggaattaaaaatacaacatgcagtacaatgcagaaagtacagaattgtaattctcagtgttttgatgtactcaaaatcatcacgtttgcaaaatatgtaagcattatgccaactatgcttatattgggcaacttggactcaggtgcaaatacatgaaaatatttgaaatatttccattttattatttttgattgaggagctcaatttcaaawcacatacaaaaaacactgaaagctgtggatacttggacactgaaaatcaagtcttcatttattgcagttggtagtcaatattagaacctcttaactatgttttgaaagtgacatataagatgagaacaaataaaatgcctgaattcccattatcaaaaaaaaaaaaaaaaaaaaaaagatgtatcaccagctgtctccaaacaaagtcagacacaaagtaataactttctctctgcaacacctgtattcaatttctaaggtacatctgtcattttattttaacaaattcaaacaagatca

SEQ ID NO: 42704 - DNA, 600 bp, Chicken  19866894279939_1
tatggaagtggatcgttttgacttgtgtctcatgggaagcctcggacaacacaagaatcagccacctgcacggcccgctgtcagcgcctcaccggtgccaggaggaggaagcacggcggtgtcacctgctgatgggctgtgcctgcagacatcattccagggagagcgctcctggccctgctctgtgctcagccactgctttggtttggcagaggggtgccggctcagtaattaatgcagtccatcaaaacctgattgctcagccacagctgcacagaaagcagcctaaggagtctggartgactgaactcctacgtgagaattattcagctgtctcctaaggatccaaataggtgtttgtaaaatgaatacgtgctactcaggtttcccacgtgaaagcagaagctctcagctaggagccagcacagtytttgccttcagaggctgtccaggcacttttctctgtaacccatagctaagatataccaggatggtttggacagtggcactttctagcacacagatagcccagtgacatctcccaaaaggcacctcggaggcaggagggttatctgggtcatcgtagaatagcttcatccc

SEQ ID NO: 42705 - DNA, 600 bp, Chicken  19866894279939_2
gatgggctgtgcctgcagacatcattccagggagagcgctcctggccctgctctgtgctcagccactgctttggtttggcagaggggtgccggctcagtaattaatgcagtccatcaaaacctgattgctcagccacagctgcacagaaagcagcctaaggagtctggartgactgaactcctacgtgagaattattcagctgtctcctaaggatccaaataggtgtttgtaaaatgaatacgtgctactcaggtttcccacgtgaaagcagaagctctcagctaggagccagcacagtytttgccttcagaggctgtccaggcacttttctctgtaacccatagctaagatataccaggatggtttggacagtggcactttctagcacacagatagcccagtgacatctcccaaaaggcacctcggaggcaggagggttatctgggtcatcgtagaatagcttcatcccattgggatgacatcctgtccagatatccccagtgtcaggatcgacagacaagttatcggcaagagtgtccagctgcagcgtctgtccagcacagagagagaataaggaaaagagagatgttaaagctgtc

SEQ ID NO: 42706 - DNA, 600 bp, Chicken  19866894279947_1
tggacattctgaagcttcatctccaccagcaatgagctgatgtttattagtattttctccttcaaacatctatgaatttcaagctctgtagcacaaataagattttcagcttgggttctttgcagatcacagtgaaaacaagaggagccataatctcctgaccaaagcatagaatgtagagtattctttttggcatttataggcccatactagaggtcatcagggaaatcagtgaagctgcctgggtctaatttacccttcataacacaaccacctgcccgttgcaagcactacacattycaaaaagtgtttgaaacagccaaataaaggaagtgctagaactacaaaaataacttagtcgatagggtatcaaaccaaatgctgactaccctttggcataagagccagcagtactttttcatgtgctgcactaaagagttggagctgaaatccagtgcactgagtcargaaaacggttgcaaagctgaatgttagctataccagaggtgtttttacaagtggctgcatggaaaaagtgagatgtaatctatcagcattgagattggcatcgttcatttataaatatcttcccttattcat

SEQ ID NO: 42707 - DNA, 600 bp, Chicken  19866894279947_2
atagaatgtagagtattctttttggcatttataggcccatactagaggtcatcagggaaatcagtgaagctgcctgggtctaatttacccttcataacacaaccacctgcccgttgcaagcactacacattycaaaaagtgtttgaaacagccaaataaaggaagtgctagaactacaaaaataacttagtcgatagggtatcaaaccaaatgctgactaccctttggcataagagccagcagtactttttcatgtgctgcactaaagagttggagctgaaatccagtgcactgagtcargaaaacggttgcaaagctgaatgttagctataccagaggtgtttttacaagtggctgcatggaaaaagtgagatgtaatctatcagcattgagattggcatcgttcatttataaatatcttcccttattcatgctacaaattcaaacaaatggtaatttccgttgttttaacagaatatgggtcattaatttccttgacatttatttatttatttacttatttatttattttgactgatgagtcgatctttaggaaccacgcagaatttctgcacagaatgataaaggaaatatatttct

SEQ ID NO: 42708 - DNA, 485 bp, Chicken  19866894279956_1
acaatctggttttgctagcagggagaaaaagaaaaaagaaaaaaacaaagtatatatcattgttggataaatccgctttgccaaattctcacccatcaaatcagtgttcagcctgtttagagctaagattgtataaaccctaaattattttaaagacagtgttattcttaagaatagaccaccccttattctcatgagttccttccttttcagatgttcaattgcaatgcaagaggatgttattagagacaatggtcgcatcttcctgagctgctccttgtggacaaagtataactgacytttccactcaatacaaaatgaaaaacaaaatttttagttgtaagaatttggaataatcctggaataatttgtaataatcctggaattatttgaataactggggaaaaacaaaaaacaaaaaaacaccaaaaccaaataacttctacggattttaagtcaggagttttgagtaccaaaaaagtgca

SEQ ID NO: 42709 - DNA, 600 bp, Chicken  19866894279960_1
aaagtgtgttactaattggcctttaatatgagtaacagtccttactactatttgacttgctactattatcctactcatggttcgtgggcaggatgttacacgccatgttcagatgttgctcacagccagtacaaaattagtgtattggaactgcttcagtgttcaactgcggtggtttcatttacttgctttcccactgcagcacaattcacttagtgaattgcttgtttattgaaaaaagatattaaaaaatcctttaaatatagtctttagtttaatgctaagttttgtggatgtagyaatacawtggaaatacaacagaacttgattaggctgctttggaattaaagcattcatcagtaaataagtgtctagagtagtctttggcaggtgtctcaaaacttgttatggaaaatatattacaggggccacctggacagaagggtgatcaaggtgctacagagataattgattataatggcaatattcatgaagctcttcaggtacgtaaacttaacaaggctggaatagtttagcctggtctgccaagaaacagtttgacgtaattgtattttccttctgcataaaccatgagaacac

SEQ ID NO: 42710 - DNA, 600 bp, Chicken  19866894279960_2
gttactaattggcctttaatatgagtaacagtccttactactatttgacttgctactattatcctactcatggttcgtgggcaggatgttacacgccatgttcagatgttgctcacagccagtacaaaattagtgtattggaactgcttcagtgttcaactgcggtggtttcatttacttgctttcccactgcagcacaattcacttagtgaattgcttgtttattgaaaaaagatattaaaaaatcctttaaatatagtctttagtttaatgctaagttttgtggatgtagyaatacawtggaaatacaacagaacttgattaggctgctttggaattaaagcattcatcagtaaataagtgtctagagtagtctttggcaggtgtctcaaaacttgttatggaaaatatattacaggggccacctggacagaagggtgatcaaggtgctacagagataattgattataatggcaatattcatgaagctcttcaggtacgtaaacttaacaaggctggaatagtttagcctggtctgccaagaaacagtttgacgtaattgtattttccttctgcataaaccatgagaacactattttt

SEQ ID NO: 42711 - DNA, 600 bp, Chicken  19866894279964_1
agatgtgcatacagatgtggccacgtgtgagacatggaggcagcgaggtgctgggtgctgacagggtgcagctcctgcacccggccctggctcttccctctttagtttggagctgcagttagggaaacagggctctgttttcaggaggaattgtaatagtttgaggaatgaatatgcggagtttgtggtatttgttgtagagctgcctctggtaataaaattgagaggattctgtttctctcggcgtcttatttggtgtgtatcttctctgatgttacttaaggaaaccatataggttgygtttcagagctaaattagagcaagcaggttcagaactaaggtwtttttaaggagcggatacatttaagtatcttttttcttagcaaatatgaaggagttctgtgttctgtggtgatgcaatgatgctcagtgttggcctctgcctggcagagcatgctgctagctcatgttcaacttgtaccagaactcccatgtctccttctggagcattccccagcatccagcycccacccagtgcacagggctggggctgccatgtcctagtgcagagtacaacacttctcttattaatcctcatgt

SEQ ID NO: 42712 - DNA, 600 bp, Chicken  19866894279964_2
cgaggtgctgggtgctgacagggtgcagctcctgcacccggccctggctcttccctctttagtttggagctgcagttagggaaacagggctctgttttcaggaggaattgtaatagtttgaggaatgaatatgcggagtttgtggtatttgttgtagagctgcctctggtaataaaattgagaggattctgtttctctcggcgtcttatttggtgtgtatcttctctgatgttacttaaggaaaccatataggttgygtttcagagctaaattagagcaagcaggttcagaactaaggtwtttttaaggagcggatacatttaagtatcttttttcttagcaaatatgaaggagttctgtgttctgtggtgatgcaatgatgctcagtgttggcctctgcctggcagagcatgctgctagctcatgttcaacttgtaccagaactcccatgtctccttctggagcattccccagcatccagcycccacccagtgcacagggctggggctgccatgtcctagtgcagagtacaacacttctcttattaatcctcatgtggctgccgatgcatatccctctaatttgtcaaggtctcactgc

SEQ ID NO: 42713 - DNA, 600 bp, Chicken  19866894279964_3
ggattctgtttctctcggcgtcttatttggtgtgtatcttctctgatgttacttaaggaaaccatataggttgygtttcagagctaaattagagcaagcaggttcagaactaaggtwtttttaaggagcggatacatttaagtatcttttttcttagcaaatatgaaggagttctgtgttctgtggtgatgcaatgatgctcagtgttggcctctgcctggcagagcatgctgctagctcatgttcaacttgtaccagaactcccatgtctccttctggagcattccccagcatccagcycccacccagtgcacagggctggggctgccatgtcctagtgcagagtacaacacttctcttattaatcctcatgtggctgccgatgcatatccctctaatttgtcaaggtctcactgcaaggcctctcaaccctccagggagtcaacagctcccactgatttagtaacatctgcagcttatgcataggaccttgcatagtaatttttcctcctgctctgtaactgttttgtctctgctgttagaaagacacccacttgtaggagcacagtactggaagagacttgctgactcagcatgtcc

SEQ ID NO: 42714 - DNA, 600 bp, Chicken  19866894279965_1
tgtgacagtactgtggctgctggtgacaggtttatgctgctgttcttgctgccctaaaggattttttgctgaaggtaggagtatagcacaggcagtgagaactacagggctgctcgttctgtttgctggctttgcttgtaataccacttggcatagcttgtaaggagatcttttgtgtaacccaaagtttgtcactgtcagctcagctgcaagctactcctttgtctctgactgcagttctttatttggtatatgaggaacatagatctgcattataggatagaggggaagatgtggggmttggggcaggaggagagaacctaactgtgccagctgcaaggaattcttatccacgtttaataacctgaagcataaaacaaatgttcagcacatcatgttgttctctagaaagcaaaagatttgattaagacatttttgagccaccagagatgtatttgaatacctttaaaactttcactccagtgctcatctcttgaatgcagaagtaggtgtggggaatgtggaacgcctggtttggttcatagaaataaatgtttatctgtgagcagtgcttttggggacctataatgcttttgaaaa

SEQ ID NO: 42715 - DNA, 600 bp, Chicken  19866894279971_1
gactggagtttactgctttctgtgcttgctgggaactgtcagactaccctaaaatagacattattatcaacatccattatatccaaggaaattctctccagtaatgaatgagcatccattccccttccacctacagaaacatacctgccattagtgactatcacaaaccgtgccaagtgttcttgtgggcaggaccctaattatttccctcagtttcccctcgtatccccttagcaaacctgccaatatcaccagctatcgctgagctgggagaatgtcactttggaaagaaagagcttrttaagggtcttttcaaagatggggtgcactgygggtgttgcactgacattaatgacacccgctccgaggtgtgtggtggctgtgatggctgtgacaggtgcagtgctgcatgtcactccgtgttgcagtcaccccatgtcacgtgtccgggctgtgcgtgcagaaaacaagggctgatggagatgccccagcagtcgctcctggcagctctgagcaccaccccttggtaatacagctttctagcaaagtctagtttacattacaaggaatttctttagtatttagcagtcaccttgaaca

SEQ ID NO: 42716 - DNA, 600 bp, Chicken  19866894279971_2
gaactgtcagactaccctaaaatagacattattatcaacatccattatatccaaggaaattctctccagtaatgaatgagcatccattccccttccacctacagaaacatacctgccattagtgactatcacaaaccgtgccaagtgttcttgtgggcaggaccctaattatttccctcagtttcccctcgtatccccttagcaaacctgccaatatcaccagctatcgctgagctgggagaatgtcactttggaaagaaagagcttrttaagggtcttttcaaagatggggtgcactgygggtgttgcactgacattaatgacacccgctccgaggtgtgtggtggctgtgatggctgtgacaggtgcagtgctgcatgtcactccgtgttgcagtcaccccatgtcacgtgtccgggctgtgcgtgcagaaaacaagggctgatggagatgccccagcagtcgctcctggcagctctgagcaccaccccttggtaatacagctttctagcaaagtctagtttacattacaaggaatttctttagtatttagcagtcaccttgaacatgtctgagcacagctacttcagtgactttctg

SEQ ID NO: 42717 - DNA, 600 bp, Chicken  19866894279972_1
ctgagaaggattttacaagcagcttcagtgcagccagtgtctaaaccatcgcctcttttgtgattcctttcctatttgtgatttctcaaacaaagccttgcaggatcattaaatattttttattttctacttgctagtttggttatctgtagtcatgagcagtgacacttctgcatattgaataatcagttaatgcaaccttgatttagaatttgtctgttgttagttgtaagatttttccttattactatcaaatgttttctagcatggatttttttgataatctttcatggcagaatyctactttatcaatttatttgtgaaaactgctttgtgaaaatttctcactgagatgctgcatacatactttgaatcttttttcattatgcgttcaccattactgtgccttttcagcctaaatccatctttatcccgcaagaaactcattcttctgaaaatgataatcaagggacaatcaagagatgcccagtatcagacagcccagcaaagtctgcatctcatgttccaccgaggccaccaccaccacggttacctccacagaagtctcatgttttaggtgagagtgatgccacgaagtgt

SEQ ID NO: 42718 - DNA, 600 bp, Chicken  19866894279974_1
aatggatttttaagaaccatgggtatacacttaacttcagaagtcctcgccatttcctcaccaaggcaagatcatgcaatacaaacctttccaacatccctatgcattagcctggaagaatacgtgaagagcttgcactgaaatttatggctaaaaatgagcactagcttgcagcccctccaacacccaaagtatcagttgcatctttatttcagattttaattatcttcttacgagaaagttgtttttctatagatgataggcaaggacattgcaactcttgagcaaatacttcatttkttatggagtgggtgttttcctcttcttctgattgacagaggaggaaggaagagaaacagcagacaaaaaactggctaacagaagacaacaggaggtaatgtcaacaggaggtaaccacttctgttgctattacaataagagcaataataataacactcaagaatgtcaaggggatccaggaaatgaggtgggaaagcaacgtgagggaatacaaaaaaggctgagtgagaactattatttgcacacccaatactgttgcacagctgggcaacaactacttacctacatccttactacgct

SEQ ID NO: 42719 - DNA, 600 bp, Chicken  19866894279974_2
acagaagacaacaggaggtaatgtcaacaggaggtaaccacttctgttgctattacaataagagcaataataataacactcaagaatgtcaaggggatccaggaaatgaggtgggaaagcaacgtgagggaatacaaaaaaggctgagtgagaactattatttgcacacccaatactgttgcacagctgggcaacaactacttacctacatccttactacgctttgctagaagatagaaagacaaataccctccaataaactacaaagctcagaaattaaagagtagggaaaaaataagmattaaaatactatactctatatcccaagaaagtagcctaactaaatgttttgggtttggttgtggttttttcattgttgttgttctaatatttgatagaagtcaatgccaactgtcaccaaagaaacctttccttaaccactaaacaaatacacctgtcacttcatgataaagtgcatacctcataaacgacacttgttccggtttcttcccaagccccacagttcttgcaaaaggcttgtcaatttattattatgctttacatcacagtgcatgctttgagcagtaacccagtaggtta

SEQ ID NO: 42720 - DNA, 599 bp, Chicken  19866894279975_1
  misc_feature (1)..(186): n is any nucleotide
nnnnnnnnnnnnnnnnnnnnnnnnnnnnnnnnnnnnnnnnnnnnnnnnnnnnnnnnnnnnnnnnnnnnnnnnnnnnnnnnnnnnnnnnnnnnnnnnnnnnnnnnnnnnnnnnnnnnnnnnnnnnnnnnnnnnnnnnnnnnnnnnnnnnnnnnnnnnnnnnnnnnnnnnnnnnnnnnnnnnnnnnnntttctgaaaactgttgataggaatctatgtaagaacatagaataaccaagtattaaacagaaaccaagacctgagatactaaatggatgaagaaggtgggtgtcatgaacttaytctgtgctatttggcaagtgagctttggctgtgtggtcaacaaattgacagatacagatggaggcagccaataaaagaacagagcatttaaaatgtcaaagaacttagttaaattcaagtacataaaccgcagattttctacatttattgaaactggttaagtttcttgacgagcacaatgaatgtagttaaaacatatgtgttgtctcttgaaaagatgttaaaaaaccaaactgaagcctctggaaaaacagtcagcagctggtttgatcttaaactggacagtataaattttcctg

SEQ ID NO: 42721 - DNA, 600 bp, Chicken  19866894279983_1
tttacttgcttgattctgcaggacaagaaaagcttggatgaggaatggtgaagatgagacttataactagccatatactgttatgtgggttgctgaggctattgctagtgctaacattgggtctgtggtttgtaactgaagagcttgaggaactgagcttattcctaaatatcagaggaccctgtggctggatgaaggctgatgtcaggcaggattttatgctgtgggaaagttgctccaggggaggtttgtgttggagatcaggaaaaacttctcagaagagcaatgagacactggcayaggctgcccagggagatagatggtagagtcaccgtccctggaggtgttcaagagctgtgtggatgtggcactgagagacatggttagcaggcatggtggggatgagttgacaattggactagatgatcttagtgatcttttccaactttagtgattctatgactctatgaaaagactctgcattggataatgtcttggctagtactgaaggtaataataacatctgaggcacaatatgctcaaggcttatcagtggcagagaaaaagtcaaaatccccaggcccaaagatgaagatcagg

SEQ ID NO: 42722 - DNA, 600 bp, Chicken  19866894279986_1
caaagacaagggtctcagtttgtaaggacacaactgtgtaaagagtactgagaatgaggcacctctgtgaagagcagagctgcagcaaagtgttgtgggaaatttacatccttaactccatgaaagctcctgtgctctgctggcccagtctttaggtgcagatgtgttacactggactaagtaaaaatgttttccaagtgttctgatttgagatattgcaagccccctgaatcagtttaaggggccatgtggtccagtgcacagcacactagtgatgctggagaatcccagcttccacaktgcggtgtagccaccttaggcattagcactgtcactctgtgtctgtttgtgatctcatagagaaggaggtttggttgctacataaaagtgaatgccatcagcaccatgttgggttcaagctaaaatactttaagagaaatttcaattagattaaaacctttagttcagtaaactagtttccttaaactagtgtaatttgtatatgacctagctggtagaaaccttgagaaactgctgatttcccagggctacactgacgtgctacagaagaatcaaattcatttcacaacaggggagcta

SEQ ID NO: 42723 - DNA, 600 bp, Chicken  19866894280002_1
gcagcacctgctcgggttcctgccgtgatgctgaaggtcatttccagcagcagccatcccgatttgcacaagggccatccggtaacgctgcgcagcgggaaggtgggagtggttggagcaggttggagctgtccggcgtcatacaaaacctccgtaaatacattcttctgcctctcccctctctcctcacgcatacccattgatttccagattgtgccaaaaatagcctctatttcctggctgtgaaatgtgcccccgagcggagcatctggactgatcccaatgggccattcccagggygaagggagaagtgggggtgctctgtgaggtcgggaccccacgggctctctgctggccgtggggatgctgtgcctggggccgggagcgtggctgctgcgtcaccttcccccattcccaaaccctctctaaaacacagctgggctttgttacggcagttttgctggaggttggggctgaagaggcacttgaaacccagcagcacctgagaggagggcggccccatgcacctcaggccttcagacagcacattcctctccaaattcctcccttggagtttgtcagatcactcgctctgcttcc

SEQ ID NO: 42724 - DNA, 600 bp, Chicken  19866894280006_1
tccagcggtaatgaaggaaaaataattgcatgcagaagcttagttgctggaaaaaagaaaaaaataaaaaaacaaccagaaagaagtgataataggatgggacggcttaaggcctgcttgagaaaaaatatgctatttgtttgttattgttgctacccaatcattttataaaacacttcttcagtactggtaggaaaatggtagactgcctcttaacttcccagcctacctctacacacagacctgacttctcccagcgtaacacagcagaggtgtgccaaaacacctcagtttttgtgytttttttttttagtttaacctttccctgtggtttgcttgtgacctgtgatgtctgcccttgggaccaacccgatcctgcaggttctcccttcctcatgcagtcgctccacgtgctgatacctccactcagctgaaccagactgcccaaaagagagaaggcagtttgtgcagagggttgcagggcccaaggaatgggggccaggcagaaatgcagcctgttatttccccagctataccccacacagcagtcaaatctcatgacgagttctcagctggcacattgaagggtgtctgtacaag

SEQ ID NO: 42725 - DNA, 600 bp, Chicken  19866894280006_2; identical to SEQ ID NO: 42724

SEQ ID NO: 42726 - DNA, 600 bp, Chicken  19866894280010_1
gattattttataaatatacagttttcctcttaagaagagtgagtgatgcagttcctactctctggcacagaaatcaggggctgaagattgatctttcctgtccctgagtgtctgtgacttgtttgacaagcctgagctggctcccagatgtttaaattgtcctcagcctgtgataatttatttatctgtttatgtgtgttaccagaaaaagtatctctcagactcttgactcatttgcaggggaatccagagggaacagtagcagcatataatgttactagaaagttttcttttaaaagmttttctccttctgctttggtcacaagaagggttggaaacgtgacattttgtaattttctcttctcctcctgacatccttagaccttacgtttaaacatatggccaaaccctctctgtcacagacttgtctgaatgtatagagcaagcctaaaaaaacccagaagctttgatctcggtacactttcagccataaaaaattatagtaacactcaaagtgtcagacattttttacttgttaaaagtgagctattatggtacagtgatttattgcattgcataaatctattggagcaagcagaa

SEQ ID NO: 42727 - DNA, 599 bp, Chicken  19866894280012_1
  misc_feature (1)..(113): n is any nucleotide
nnnnnnnnnnnnnnnnnnnnnnnnnnnnnnnnnnnnnnnnnnnnnnnnnnnnnnnnnnnnnnnnnnnnnnnnnnnnnnnnnnnnnnnnnnnnnnnnnnnnnnnnnnnnnnnnnctttcagaagaggaaacttcagctccccaaggggtggaggggtcagtgcttcatgttccagtgctgcttggaaatactgctgctcccctcaccttctagccccagcgtgagccacagcgagcagcccggttccatcccagtgggtataacggtgtgtgtgtggtgacccgcctggtggatgagggaraggatgagggaaactactgctgatgcggtctatctggactttagcaaagcctttacttctgtctcccacattattctcctgctggagctacagcccgtggtttggacagctgtactctgagggccaggcctggaaggtggtggcaaatggagttacaacctgctggcagctggtcagaagtggtgctccccaggggctggcactggggctggtcctgtttaatatctttattgatgatctggatgaggggattgcatgcactctcagtaattgtgtagatgacaccaagttggagggaa

SEQ ID NO: 42728 - DNA, 600 bp, Chicken  19866894280013_1
ccattaccttctgttaataagctccttttaagtatcatgaaatcaacattacagtctctcctaaaccctttcttctccagactgaacaagcccaacttccccagaagatccaagatggatcaccagtttcatcctggacatagacccatcaaccacaaccctccagtgcgatcatccatccaagtctttaaccaccgaatagaccacttttcacttccaggtctcaccggtttacacataaaactgtgctgtgggatcatagctaagaccctgcacaggtccagggggaagacatcagtkgctctttctttcaccactgatgctgtcactccactatagaagccatcagattggtgaggcacgatcagcccttggtggaaccactccggctaccttgaatcacttccttgactcgtacctattcactttcatcaggtagtctcagacttgctctttgcttacagtgggagggagtttgattcccccagtctccttccagatgttcaaggatttgagagatatgggaaacctgactggcagtgaagactgaggtaaagatcttgttcagtacctcagctttttctgtgtctgtttttgcca

SEQ ID NO: 42729 - DNA, 600 bp, Chicken  19866894280023_1
aattcagtcctgatcttcccgtctgtcttcatttcatgtcccattttggggttttgaatacactcccttttccccaaatatcctgtcgcataccagaggtgtaaccatatccacagtcttaactccaggtggctggaagctgattctgcataaattaaagagaaaaggtacattcttctcttccttcccagaacattgccccaaattaagcttatagaccataagtctagtcagaataaagctgtgtccacctctagttcaacagtgctccatactttgcagtcaaacaaacaagatttscttccagtcattgctgattctttgctttcctctgtagtccttgaagctcactggctttgcccagattctgacataacctgtacatatgagagaagtgggtaaccccacatttacggataactacaaaaagaaatgcactagatttcaattataaaaatagaactcaagaataggtcagactttattcctatttccagatgaaaattaattttgggcacattcatacgtgaagaaaatgttatgaagtccagctttttctaacatatacttgaagataatctggaactattgcaatggaga

SEQ ID NO: 42730 - DNA, 600 bp, Chicken  19866894280024_1
gaagtctgaggtaaaaatttcttaaatatgtagaactcattaattaccttgaatggatttaaatggagtgctctgtcaatgaaattcttactgaactggtagaatcaaacctcatttatcaagtcctgttgaaaacactgtcattcaattgattgaaatttgccttttgtagctatatccaggaagattatttctaacacttcattttcggtgagatatatacaaaatatttaggaaatgagatagctaacttgatttcattcacttcttaaatattggtcttggcttagtaatgggctytggttagattttttttcatttcttatcttgataggaacctttttatgttgccaaaggtatagtatatatgcattttcagaagaaatagctgtcattattgtctgtggaaaatcaatatatagtttaaatatggattgatgacattctaccaccagtactggagcctgggaattctagaggggtcaagaacaggacaactgagcacttgcatcatcaaagaagatgagatgcatttattcgggcaaattttcctctgggcctgcatttaacccctgaattgggaagaatgaaatatttacc

SEQ ID NO: 42731 - DNA, 599 bp, Chicken  19866894280026_1
  misc_feature (1)..(16): n is any nucleotide
nnnnnnnnnnnnnnnncaaagctttcaattagcaatgacccattgggttaaaacaaaaggtgctttgcatcacagtgaatgataaccacatttgcagaaataatccaagggtcagttgtgacccccagagacctttttatatcttctgttttagctacctctacctgaagggcttttttgtaaccgatgctggcatttgatcttcaaaacaatgatgggtagcaatctctgtctatttatgatgatggtaatttctgagcctgaggaatttatatgttcctgaaacagtttcaatacccrctcctgtcaatttcatttttttttttttctctttgagcttattgaagagtcaaccactgatatccttcaacttyctctctgtttaaacagcaggcacagtagtgaaacacagtgaaactattgatctcaaactacctcaagatttccttttgcaaaagtaaccttcctgttcaattcgcaacaggtcattcaacactgtgctgtatccacattaataatgaatgaatccattatgatcaatgactccacaatgaatatcaaataactcctccattactgagatcattacaggacactag

SEQ ID NO: 42732 - DNA, 600 bp, Chicken  19866894280026_2
gtgaatgataaccacatttgcagaaataatccaagggtcagttgtgacccccagagacctttttatatcttctgttttagctacctctacctgaagggcttttttgtaaccgatgctggcatttgatcttcaaaacaatgatgggtagcaatctctgtctatttatgatgatggtaatttctgagcctgaggaatttatatgttcctgaaacagtttcaatacccrctcctgtcaatttcatttttttttttttctctttgagcttattgaagagtcaaccactgatatccttcaacttyctctctgtttaaacagcaggcacagtagtgaaacacagtgaaactattgatctcaaactacctcaagatttccttttgcaaaagtaaccttcctgttcaattcgcaacaggtcattcaacactgtgctgtatccacattaataatgaatgaatccattatgatcaatgactccacaatgaatatcaaataactcctccattactgagatcattacaggacactagaggcaactgttcagttcacaggggtttagctgcatgatctcttttctcttaataggatttgtatgactaaaacat

SEQ ID NO: 42733 - DNA, 600 bp, Chicken  19866894280028_1
tttgcttctctgtccttagttgaaaattaaaatgaagaaaaaatgctagaaagtttactcctttcttgaataaaaacagtgcatccattctacaaacaaatgcaatgttacaacataaatgttactcgaaaactgagtagaattttaaaccaatagatttccaaggtagaatcaaagttcccaagtactgtgtctggatcattttgacagtaatctatgcccaccacgtttgctctgtcagctcataggaagtgccgtttaggtatgttacaacctcaattcttactcagattctaaaaratgttagatgaatatagaaaaatgcttttttgaaacaaacaaacaaacaaacaaaaataactttcctttagatatttgggttatgccatttacttcagagtacccttctttaggattttaccttattttgatttgttacctaggacagataactggacagatttcaaggatgtgtcacttgctctttcatctccagtttttctgcttgctaattggatgttaacattgtccgtggtttaagactagttcgtaccacatgactactgtatcaaggcaataagctcatatatctaacagcta

SEQ ID NO: 42734 - DNA, 599 bp, Chicken  19866894280039_1
  misc_feature (1)..(89): n is any nucleotide
nnnnnnnnnnnnnnnnnnnnnnnnnnnnnnnnnnnnnnnnnnnnnnnnnnnnnnnnnnnnnnnnnnnnnnnnnnnnnnnnnnnnnnnnntgccttgttctataaaataacaggcttctttgaaacttaaactaccagtagttatgagctagtgctgcactcgtaacaatcacccatcagtgtagtggttttctcttgaagccctcttatcattaaagaggtaagacaaaaactagcttgtcattactggaaggctgcactgctgtggaagtactacctattatacccattttttgttttrttgttgttatctagcaatacccagttcctactcctggactcttgggttaggttaattgcaaattctgggctagggttgccaacttcttaaaaaaaataaaataaaaaaaggcatgttttcaagagataagttttgtattcaataactaygtgaagagcaagacagtatagcaaatgyatgcaacactttacctggtggatgttgcctcggcatttaaatccatctccaatgtagtttggtttgcaggtgcaagtycgttctgttagctcggtgtctttacagatggcgaattcactgca

SEQ ID NO: 42735 - DNA, 600 bp, Chicken  19866894280039_2
agtgctgcactcgtaacaatcacccatcagtgtagtggttttctcttgaagccctcttatcattaaagaggtaagacaaaaactagcttgtcattactggaaggctgcactgctgtggaagtactacctattatacccattttttgttttrttgttgttatctagcaatacccagttcctactcctggactcttgggttaggttaattgcaaattctgggctagggttgccaacttcttaaaaaaaataaaataaaaaaaggcatgttttcaagagataagttttgtattcaataactaygtgaagagcaagacagtatagcaaatgyatgcaacactttacctggtggatgttgcctcggcatttaaatccatctccaatgtagtttggtttgcaggtgcaagtycgttctgttagctcggtgtctttacagatggcgaattcactgcagcctccattgttcttgtaagatcaaaatttaaagtattctgttgtttccaggtgtaataaaacaattctagtaaatctcttttattcccgtgtgtataggttaggaggatttaagccaaagtggcttttagaaaccagatcttactgaca

SEQ ID NO: 42736 - DNA, 600 bp, Chicken  19866894280039_3
agtgtagtggttttctcttgaagccctcttatcattaaagaggtaagacaaaaactagcttgtcattactggaaggctgcactgctgtggaagtactacctattatacccattttttgttttrttgttgttatctagcaatacccagttcctactcctggactcttgggttaggttaattgcaaattctgggctagggttgccaacttcttaaaaaaaataaaataaaaaaaggcatgttttcaagagataagttttgtattcaataactaygtgaagagcaagacagtatagcaaatgyatgcaacactttacctggtggatgttgcctcggcatttaaatccatctccaatgtagtttggtttgcaggtgcaagtycgttctgttagctcggtgtctttacagatggcgaattcactgcagcctccattgttcttgtaagatcaaaatttaaagtattctgttgtttccaggtgtaataaaacaattctagtaaatctcttttattcccgtgtgtataggttaggaggatttaagccaaagtggcttttagaaaccagatcttactgacacttacaactgtgtatatttgttcttgca

SEQ ID NO: 42737 - DNA, 600 bp, Chicken  19866894280039_4
gcactgctgtggaagtactacctattatacccattttttgttttrttgttgttatctagcaatacccagttcctactcctggactcttgggttaggttaattgcaaattctgggctagggttgccaacttcttaaaaaaaataaaataaaaaaaggcatgttttcaagagataagttttgtattcaataactaygtgaagagcaagacagtatagcaaatgyatgcaacactttacctggtggatgttgcctcggcatttaaatccatctccaatgtagtttggtttgcaggtgcaagtycgttctgttagctcggtgtctttacagatggcgaattcactgcagcctccattgttcttgtaagatcaaaatttaaagtattctgttgtttccaggtgtaataaaacaattctagtaaatctcttttattcccgtgtgtataggttaggaggatttaagccaaagtggcttttagaaaccagatcttactgacacttacaactgtgtatatttgttcttgcaaacaagaaagaacatataatgcacgtaagaaattgcattaactctccttttatccagataatgtgctttggaagcagc

SEQ ID NO: 42738 - DNA, 600 bp, Chicken  19866894280040_1
gatccagccctcgagcacctgcaatttccatcatattcaaaaggacatgcattcaaatgcagcgtgacattggctttgggcaggaacggtgtgagaaagttcctctccccaaagtcctatgggagggcacgttctgggctgagcctgcagccaagagagcagcgcacgtttatataaataaaagcagcacctgcacttcctaacaataaagtgaagagcctattaatcttcatgctgcagggtatcaggaaataatctccccctgcttgggacagcaatgcacaaccgcctcgttacagygtgagctcttttcctttccccagagtgcttttccagccccttttcctcattggtgtcattgtttccatgctgggagcaggtaaggcacagaagcaaatgggactttctaaggtttagcacacagctgtgctatgtacacagctctgattaagaaatatctttattctgcccatatactgcaggcatccactcctaccactcttgacaygataacccataaaagctatggactaatgcattaataatccacgagtaaaggtcccaaagtgcccattgacattatagccattaaggtgcagt

SEQ ID NO: 42739 - DNA, 544 bp, Chicken  19866894280040_2
aagtgaagagcctattaatcttcatgctgcagggtatcaggaaataatctccccctgcttgggacagcaatgcacaaccgcctcgttacagygtgagctcttttcctttccccagagtgcttttccagccccttttcctcattggtgtcattgtttccatgctgggagcaggtaaggcacagaagcaaatgggactttctaaggtttagcacacagctgtgctatgtacacagctctgattaagaaatatctttattctgcccatatactgcaggcatccactcctaccactcttgacaygataacccataaaagctatggactaatgcattaataatccacgagtaaaggtcccaaagtgcccattgacattatagccattaaggtgcagtgtgtcaataacaatacatagcacgagagcagacacgctgcctgcatgtacgcgagtgcgcataccctctgctgtttaatcctacgcagtcgcatcagctcctctctgatcttaggggactaacgtgacaaaaatcccttacaactgctaccg

SEQ ID NO: 42740 - DNA, 600 bp, Chicken  19866894280041_1
gatatgagactgactactaccattttctgggatcacagagcagacattcatgtacctatctacacttgacacatctgtttgcagatctgtttgcagattcacgaagtttcattaaatttagtaggctgtgattattcgcttcaaaagtcacatcagaaaggctttactgtatagtctagttcaaaaattcagtcatcagctcaagcagttgaatgtattacaagactggaatctacttacatacaaggaatatttaagaaaggagaaacaaattactgtctaaaataccttttcagaaastcttggttgagcagttatatataatgaagacatccttaaaatacagtgttattacttgagatctattaagtaaacaaggaaagaagtgggtataaaatgaatgctattcataatagaagacctgcctagttttgataacagctggaaagttggtttcaatttcaaggcattactatgaaacagctgactgataatttattacttcccacatacatacgagactctgctagagtaagactgtcagaaggtactcatgaaaacaacatagaaagatacagcagtaagatactggctcttttt

SEQ ID NO: 42741 - DNA, 599 bp, Chicken  19866894280043_1
  misc_feature (1)..(90): n is any nucleotide
nnnnnnnnnnnnnnnnnnnnnnnnnnnnnnnnnnnnnnnnnnnnnnnnnnnnnnnnnnnnnnnnnnnnnnnnnnnnnnnnnnnnnnnnnntgttggaattatgttcattcatatccataacagagaatcaacagaaagaattctgacacctgtcttattttgcctcttctgttacaattttttagcatattttctccaatgtatatttgtttgaggcagttcttggttaactcatatagtctggttagagataagcttaatccgtttggatgtggcgctcagggtcatgatttagcggarggctgttagttagggtagcatggttaggttgtggttcgacttgatgatctttaaggtcttttccaacctgagcaattctatgtatctggaggaagatctcatattacacttaactaatacaatttttctctcaagtctttttgccagtttggttggattcagctaacaggtttagatgcatacatctaactgaataaacacaatcacctgtaatgcccctaagttataaaaggcaatgaagattttgctggaattcagctgcttatgcatagaaatttaatcacatttgacattcccsa

SEQ ID NO: 42742 - DNA, 600 bp, Chicken  19866894280043_2
arggctgttagttagggtagcatggttaggttgtggttcgacttgatgatctttaaggtcttttccaacctgagcaattctatgtatctggaggaagatctcatattacacttaactaatacaatttttctctcaagtctttttgccagtttggttggattcagctaacaggtttagatgcatacatctaactgaataaacacaatcacctgtaatgcccctaagttataaaaggcaatgaagattttgctggaattcagctgcttatgcatagaaatttaatcacatttgacattcccsagggtacccaacacatccccagaggactcacacatttgacatgagatctgaaggagatgccaacagtgcattactgtgacaaattcttcagctttggagttatagctgtcacaggcagtgacagataatctcatctcacttgcaacagcagtttggatgcaaagcatgtatgtgtagatgagcatcagcatgtctacgtggtgtcaggaacaccagtgccttgtctgacaacccacttttttgttttcaagatgttttaaacctaattttctccatcatttgaatcagaagaactcaaac

SEQ ID NO: 42743 - DNA, 600 bp, Chicken  19866894280061_1
cagaagccaagagggaaatgcatcactttcctcgccccctcacccacagtatggggcagacacacactaagttttatgtattcttcagattgaggggaaaaaaaaaacctatcagtagtccagcaccaacaacaccctttctcagaatgctggagcacaacccaagggctataccaagggcatggctcaaaggttaacacagcaaaccatcacaagagcatttatttcagccatcaggctggaaaaccattcacaagcgatcattccaaccactccgcagccttaaaggaggaatttctsttcatccctctcccatctttcccctttcccagtgcctcacagttactgctcatggtcagccaccccaatcagtaattaacccacagttataacacaaacagtcccagctgggtaaggcagaaccacgcactgagcacaccctggcagcacagctgacctacctgcagaatggagcatgtccttaacccttcattttccagttcttctttgcttgcacgcatctttaaagtgccagtagtcgactcagggctgcgagagagcacattggacccaaagttaccactagaggtggggaggaga

SEQ ID NO: 42744 - DNA, 599 bp, Chicken  19866894280074_1
  misc_feature (1)..(144): n is any nucleotide
nnnnnnnnnnnnnnnnnnnnnnnnnnnnnnnnnnnnnnnnnnnnnnnnnnnnnnnnnnnnnnnnnnnnnnnnnnnnnnnnnnnnnnnnnnnnnnnnnnnnnnnnnnnnnnnnnnnnnnnnnnnnnnnnnnnnnnnnnnnnnnnnaaacgtgactgcagtcttttcatttgtgcctattgttatacaaggctttgccctgctctgttctggcaatggtggtcatctgtaaatgatagaaagtgctgacgagtgacatggacaaggaaagtacgtccctttctgctgggaagtaataaagcwtttttttaatgttagtgaataatgccatgaggagagaagtgacattggatctcagcattcagctggatatgttatgactacagatatctatttttcagagttgacaactatcttgccattccctacttaccttttcttctctatcctctttctttaaggcgttaagtgcttgggataggtgtaattcattgttccaaggcagattcactgtgttactgtgctgaacctagctcacgccttaaatcttgtcagggatgagaaacatggcagtgattcaggcaatgaaagcagactttcat

SEQ ID NO: 42745 - DNA, 600 bp, Chicken  19866894280074_2
ttctttaaggcgttaagtgcttgggataggtgtaattcattgttccaaggcagattcactgtgttactgtgctgaacctagctcacgccttaaatcttgtcagggatgagaaacatggcagtgattcaggcaatgaaagcagactttcatcatactgtcacgggccagctatgcatgtaatatgtatacaccaagcaatctggcattatgattatgtgcatcagctttgcgttatgtgaacacactgattaacatctagatccactcagactcctacatggctgtaaagaacaggcaacytattaattcctcctattgccaccctcctttgggataacagctggtggaaaacttgaagctaatctgatttgggattttataatgaacgcgaatctctgattaagacctctaattagaatatccacaactgttcctgaggaggcgttcagtgccaggttggatggagccctgggcagccttatctagtgggtaccttgcccacagcaggggaattaaagctggatgatctttaaggtcctgtccaacctgaggcattctgtgaatttgtgagaatagagaacatgactttgactgtaactt

SEQ ID NO: 42746 - DNA, 600 bp, Chicken  19866894280080_1
gcccgttgtacggtcggttccgggcgctgaaggtctctctggggtataaaggaaggagaaggctgcggttgctctgttgtagcgtgaggagctgagcggggtcagcagtgcggtgcgtggggcatgtggcgggccctcctctgtgctggtgctttgtggatggcttggtgcggctttttcctttctgcttttggaaaatgatgtatgggatgcagaacccggagggagaaagcgtccccacacaaagcccgtgcgggctggcacccagggacagggcaggaaagcagcggctctcctccrttgcattggggtgacagcagccatgggccctctgtgctcattgccctgatcacagcgacgaatggtccctgtaaactttatgccctgctgcaagcaaatggaaagtggccttgggaaataatctgtctcagagggaagatcagtgcgcrcwccagagcttgcccttgtcccgtgcagtgctgtggctgttccttctgtgctcagccctgagagcagcagagcagatgtcaaacaccatagggttgtgattgtttctcagaaataaccattgttgatctgaaggaattaaatatatatata

SEQ ID NO: 42747 - DNA, 600 bp, Chicken  19866894280080_2
tgctttgtggatggcttggtgcggctttttcctttctgcttttggaaaatgatgtatgggatgcagaacccggagggagaaagcgtccccacacaaagcccgtgcgggctggcacccagggacagggcaggaaagcagcggctctcctccrttgcattggggtgacagcagccatgggccctctgtgctcattgccctgatcacagcgacgaatggtccctgtaaactttatgccctgctgcaagcaaatggaaagtggccttgggaaataatctgtctcagagggaagatcagtgcgcrcwccagagcttgcccttgtcccgtgcagtgctgtggctgttccttctgtgctcagccctgagagcagcagagcagatgtcaaacaccatagggttgtgattgtttctcagaaataaccattgttgatctgaaggaattaaatatatatatatatatacacacttggagaattaggagcaaaataacatcaacgaaatccacctgttacgtgcaaggtgccgcactctcacctgtcagcaggttgtgctttctgttgctgcttgcatctctgtgcttccagccccactggagcaagctctg

SEQ ID NO: 42748 - DNA, 600 bp, Chicken  19866894280080_3
ctttgtggatggcttggtgcggctttttcctttctgcttttggaaaatgatgtatgggatgcagaacccggagggagaaagcgtccccacacaaagcccgtgcgggctggcacccagggacagggcaggaaagcagcggctctcctccrttgcattggggtgacagcagccatgggccctctgtgctcattgccctgatcacagcgacgaatggtccctgtaaactttatgccctgctgcaagcaaatggaaagtggccttgggaaataatctgtctcagagggaagatcagtgcgcrcwccagagcttgcccttgtcccgtgcagtgctgtggctgttccttctgtgctcagccctgagagcagcagagcagatgtcaaacaccatagggttgtgattgtttctcagaaataaccattgttgatctgaaggaattaaatatatatatatatatacacacttggagaattaggagcaaaataacatcaacgaaatccacctgttacgtgcaaggtgccgcactctcacctgtcagcaggttgtgctttctgttgctgcttgcatctctgtgcttccagccccactggagcaagctctgta

SEQ ID NO: 42749 - DNA, 599 bp, Chicken  19866894280089_1
  misc_feature (1)..(131): n is any nucleotide
nnnnnnnnnnnnnnnnnnnnnnnnnnnnnnnnnnnnnnnnnnnnnnnnnnnnnnnnnnnnnnnnnnnnnnnnnnnnnnnnnnnnnnnnnnnnnnnnnnnnnnnnnnnnnnnnnnnnnnnnnnnnnnnnnnntgattcccttagtctttaccttgtgctgccataagagcagcttaacagaatgatgtgttaagcatgagtaaagtacatcctgtatcttgttttccccatatacttactattgttgaggcttaatccttagtgtttggttacatattacaataattggacagaatatgtrggataaatggaaattgttctcagagttagattttgagcactctgatcacacacacaggcatttgttctgctacatacagaaatactgtataaaaccccaggawgcgtagattcggtgtgcacattactcaaatgtcagaggagactacaagggtttcattgcccagtatgtcactgtgcattacttaagttcctatctgaaatggggaagaaggaggaaacagtattcacacaaagggaagagacaagaagatatttttggcagttgtacacttccagattgtctttgctttttgaggg

SEQ ID NO: 42750 - DNA, 599 bp, Chicken  19866894280089_2
  misc_feature (1)..(28): n is any nucleotide
nnnnnnnnnnnnnnnnnnnnnnnnnnnntgattcccttagtctttaccttgtgctgccataagagcagcttaacagaatgatgtgttaagcatgagtaaagtacatcctgtatcttgttttccccatatacttactattgttgaggcttaatccttagtgtttggttacatattacaataattggacagaatatgtrggataaatggaaattgttctcagagttagattttgagcactctgatcacacacacaggcatttgttctgctacatacagaaatactgtataaaaccccaggawgcgtagattcggtgtgcacattactcaaatgtcagaggagactacaagggtttcattgcccagtatgtcactgtgcattacttaagttcctatctgaaatggggaagaaggaggaaacagtattcacacaaagggaagagacaagaagatatttttggcagttgtacacttccagattgtctttgctttttgagggagggcctgggaaattgctgtgtaatgtggtcacctgtcaggaaaattagcacttgtctccagcgttgagcttagttttttggaatgttccaagagccaaaaaa

SEQ ID NO: 42751 - DNA, 475 bp, Chicken  19866894280093_1
gaggcgcgggggctttcgccactcaggaccgtagggtgctggcatgcccttggtgggaacccagctttgtcctcgccagggctgtgccccgcagccctgccgtcctgccattagtccgtgccacctgcaggaacagctatcaagatgtgtgcatcctacgtgacatgaagacccacgtgccggtcctggagatccgcatcttggagtgccgaggtgagctcatgcacggggtgcagccacctctgcctttttccctgcaccaccgactgctctggggggtcatgggaggaaaagctggcrtgcatctacagcatcactgtccttccctggcagaacaagggtacaacgtccggctgcgagggattaagttcaagtccttctgggagagggacctgaacctcaacgcagacatgttccatatggcccagctggtgcgctacccactgctggaaggggtggacacaaatgtgctgta

SEQ ID NO: 42752 - DNA, 600 bp, Chicken  19866894280098_1
agaagaactctttttataaccagggaggccactcatctgcagcagcatggaaaataaagggagcctccagataagcagcatcagaattacacagcaatcaacaataggaagtacagggcagcaagaagtcccatctgaccccaggcgccaacaggggataatttatcaccctggcagcaaacgccccattgagcacgtctgtccccagagctctcctccttggagtggaaaaagttcttcattaaacaatagctgagcaatattaaatatagacatggcaatgacaagctggattcttcyccgttataaaattaygtttatagcatgagctgcctattcttgtttttcagagacgtgacatatgggggataagaggggctctactccactctgttgtgttagtgcaaagcaatccccagcccatccctcctgaggcgagtcagtggtgacagacagccagtgctgcaattaacctgctggcaggggctcactgggagcaaggaatggagataagatgaggaagttcccatccctcttcctctcctcagtctcgggttcatccaccaggcacagcaacgccagacgctgtgctccttacat

SEQ ID NO: 42753 - DNA, 600 bp, Chicken  19866894280098_2
ataaccagggaggccactcatctgcagcagcatggaaaataaagggagcctccagataagcagcatcagaattacacagcaatcaacaataggaagtacagggcagcaagaagtcccatctgaccccaggcgccaacaggggataatttatcaccctggcagcaaacgccccattgagcacgtctgtccccagagctctcctccttggagtggaaaaagttcttcattaaacaatagctgagcaatattaaatatagacatggcaatgacaagctggattcttcyccgttataaaattaygtttatagcatgagctgcctattcttgtttttcagagacgtgacatatgggggataagaggggctctactccactctgttgtgttagtgcaaagcaatccccagcccatccctcctgaggcgagtcagtggtgacagacagccagtgctgcaattaacctgctggcaggggctcactgggagcaaggaatggagataagatgaggaagttcccatccctcttcctctcctcagtctcgggttcatccaccaggcacagcaacgccagacgctgtgctccttacatagacctaaatatttt

SEQ ID NO: 42754 - DNA, 599 bp, Chicken  19866894280100_1
  misc_feature (1)..(58): n is any nucleotide
nnnnnnnnnnnnnnnnnnnnnnnnnnnnnnnnnnnnnnnnnnnnnnnnnnnnnnnnnntctttcgttggactttgtctaaagccacagaaacattaatactacttgggctttttccatacgtggactttataaagaagtcagctcagatactatctaaaaacaggaccacatccgggaagaacaccctactgtcttacattttttgaacagtagtcacagataaactaattcctagctgagtccttctcttggcaaaccataagtctccatagctaaccaggagactgtgatgtatggayggattcttagataaaactgcataatgccagagatacaaaagtatttacacagataacaccagttacatcaaaaagactatcagatatatgctttcttagtgaaactcatatctcaggttgtcatactaacatacatttagcgtcagaataccaacaattaaaaaaaaatttaaaaaaatatcataggcagaactaacttgacagtgacaaagctttgagaagctctcaatgtattttatttcataaagaatagcttcaggaagtctgcaagacatggatgctgcagcttcagacagcag

SEQ ID NO: 42755 - DNA, 600 bp, Chicken  19866894280100_2
tcaaaaagactatcagatatatgctttcttagtgaaactcatatctcaggttgtcatactaacatacatttagcgtcagaataccaacaattaaaaaaaaatttaaaaaaatatcataggcagaactaacttgacagtgacaaagctttgagaagctctcaatgtattttatttcataaagaatagcttcaggaagtctgcaagacatggatgctgcagcttcagacagcagacagtcaggaataagatcaagatgtcactaagctatctcagagcagcctaaaaacaaaagctctcttycttcctagcttccttcacaattcagatgctattaaacctgtaaagataagcaatggttcgtatgtagcacaaagctcggaactcgatagaaaacaattattactgcaattaatgagatactgatttgatgataaatgtgattaataaatccgtgttctaatcaacctttgcatgtgaagtttatatcatgagaatttatttttttaatgaatggtcttgcacaaagtacactttttacactgctttcagagacaaagcaagtaaaatcctttgagatacagttttaagtataatctctac

SEQ ID NO: 42756 - DNA, 600 bp, Chicken  19866894280102_1
agtaatgcatgtccctgctttctttgggaacagaaagtttaagaaggtctaaataatgttaaaactgttctcctgaagttctgcttctgtagtgactccctgatattagtgtctctggcattaatgtctggttagattccgtgaacgcatcttggggtctagcaggtttcttctgtttggaagaaaagtgtactttgcagacagatctcttgtttgaggtgggcaaagagctatacaataataatcaatcacacaaggaattcagcatccaaagtctgcttcttatagcttcaggtctargtccatttgtctccctttttcttttttaattgatttctttggtgtttctctgctttcctccaaracaaaagcatacatacaactgtacatataattgcagaagacttctctgctccctctttcagtactagaggaattgcttcatgtttatcttcaatgtagaaggatggcaccttcggtaaggtgatgtctttggtgagagggatgcagaagccttcactaggggggtaaggctcatttttgatagcgaagagaaggggaggtcaggcagggaaggaggctgagccttgatgattacac

SEQ ID NO: 42757 - DNA, 600 bp, Chicken  19866894280102_2
ctgttctcctgaagttctgcttctgtagtgactccctgatattagtgtctctggcattaatgtctggttagattccgtgaacgcatcttggggtctagcaggtttcttctgtttggaagaaaagtgtactttgcagacagatctcttgtttgaggtgggcaaagagctatacaataataatcaatcacacaaggaattcagcatccaaagtctgcttcttatagcttcaggtctargtccatttgtctccctttttcttttttaattgatttctttggtgtttctctgctttcctccaaracaaaagcatacatacaactgtacatataattgcagaagacttctctgctccctctttcagtactagaggaattgcttcatgtttatcttcaatgtagaaggatggcaccttcggtaaggtgatgtctttggtgagagggatgcagaagccttcactaggggggtaaggctcatttttgatagcgaagagaaggggaggtcaggcagggaaggaggctgagccttgatgattacacaggaagtagcttttgcctgcatgtaaaagagcttgtaaatgtgtgagctggttactgaattaat

SEQ ID NO: 42758 - DNA, 600 bp, Chicken  19866894280125_1
gcaaccttgccacgacaggggagttggaactggataatcttcaaggttcctttcaagccaagccattctgtgattctatgatcttccctctagcctcctccctcctttgtttaaaaatgctgcatctgcggcttcagctaccagtttgttcagaaatctgagatggaggtaaccactggcactctacccagccatctcaagctatctgtcctttcacatgaggtttttgttcatttattttcacttcatggtgttgtacgtttcctcagtacctttcatttgaaatcactcctgatccgyttaggtctgaaaccccttctcttcaagtttttcctctcagttttgggtaaccaaggctttggtaagaattagcagcaacagctgattcaaagcatatcacacaatagcatgttttgacatgtgagaacattaattttgtgccagatgccctagttttttatcaagttagtcctttttttcagtgtactaccccagtcccttaacacttcccagtaactaaagcatgttgcttgcttgacattgccaaaatatcctccaaaacagcctgcacacaagctgttaagatacgaaagtgttccc

SEQ ID NO: 42759 - DNA, 600 bp, Chicken  19866894280126_1
ccaagttacaggagagctctccatgacaggcacttcaacatcaacctcctcctgtctgaatcactgacagtccccttgcaacagctgccccactgctattatgcaaaatttggaatatctctgcagaacaggagtaatgtgtttgtgttcatactctgtgatattccatttgtcataaaaatcaatagaaaatttcagaaagggcatttctgtgctctgaatgtgctaatgtgacattcaccaggccaaatttatccctgcagcaacaactgccttcctggagttcatgctgtgcctgaytcaatgtaagtgcccagccttaatcttttcctkctgcttgcaacaggggaaattccacctttgctgttgcactgaagacagtagagaaattatgccagtwccagttcagatttgccatccccatttcagtctgtcagtctcagcctctgccacaataacatagacaagtttgtctcctatgattcactccccaccaccctctccttgttgyctggcactgcatcgcttatttcccagtgggagtttgtttcatctgcttggagcaatctgtgtggatgttgtgtcttacagccccattca

SEQ ID NO: 42760 - DNA, 600 bp, Chicken  19866894280126_2
ttcaacatcaacctcctcctgtctgaatcactgacagtccccttgcaacagctgccccactgctattatgcaaaatttggaatatctctgcagaacaggagtaatgtgtttgtgttcatactctgtgatattccatttgtcataaaaatcaatagaaaatttcagaaagggcatttctgtgctctgaatgtgctaatgtgacattcaccaggccaaatttatccctgcagcaacaactgccttcctggagttcatgctgtgcctgaytcaatgtaagtgcccagccttaatcttttcctkctgcttgcaacaggggaaattccacctttgctgttgcactgaagacagtagagaaattatgccagtwccagttcagatttgccatccccatttcagtctgtcagtctcagcctctgccacaataacatagacaagtttgtctcctatgattcactccccaccaccctctccttgttgyctggcactgcatcgcttatttcccagtgggagtttgtttcatctgcttggagcaatctgtgtggatgttgtgtcttacagccccattcagtttgcacaccasaatttccatcctggacaaaa

SEQ ID NO: 42761 - DNA, 600 bp, Chicken  19866894280126_3
atgcaaaatttggaatatctctgcagaacaggagtaatgtgtttgtgttcatactctgtgatattccatttgtcataaaaatcaatagaaaatttcagaaagggcatttctgtgctctgaatgtgctaatgtgacattcaccaggccaaatttatccctgcagcaacaactgccttcctggagttcatgctgtgcctgaytcaatgtaagtgcccagccttaatcttttcctkctgcttgcaacaggggaaattccacctttgctgttgcactgaagacagtagagaaattatgccagtwccagttcagatttgccatccccatttcagtctgtcagtctcagcctctgccacaataacatagacaagtttgtctcctatgattcactccccaccaccctctccttgttgyctggcactgcatcgcttatttcccagtgggagtttgtttcatctgcttggagcaatctgtgtggatgttgtgtcttacagccccattcagtttgcacaccasaatttccatcctggacaaaacattagccacccaggcatctgaatgtcaggggttttcaggtgtctccacccactaatggactgtagg

SEQ ID NO: 42762 - DNA, 600 bp, Chicken  19866894280126_4
gtgctctgaatgtgctaatgtgacattcaccaggccaaatttatccctgcagcaacaactgccttcctggagttcatgctgtgcctgaytcaatgtaagtgcccagccttaatcttttcctkctgcttgcaacaggggaaattccacctttgctgttgcactgaagacagtagagaaattatgccagtwccagttcagatttgccatccccatttcagtctgtcagtctcagcctctgccacaataacatagacaagtttgtctcctatgattcactccccaccaccctctccttgttgyctggcactgcatcgcttatttcccagtgggagtttgtttcatctgcttggagcaatctgtgtggatgttgtgtcttacagccccattcagtttgcacaccasaatttccatcctggacaaaacattagccacccaggcatctgaatgtcaggggttttcaggtgtctccacccactaatggactgtaggaacaagacaaggacctttgatttggtggatatgggcaattccgagaaygagcttattgtaaacctctctgtcccagatccttgggagaagtaagctggcttcccacagagc

SEQ ID NO: 42763 - DNA, 600 bp, Chicken  19866894280126_5
ccagccttaatcttttcctkctgcttgcaacaggggaaattccacctttgctgttgcactgaagacagtagagaaattatgccagtwccagttcagatttgccatccccatttcagtctgtcagtctcagcctctgccacaataacatagacaagtttgtctcctatgattcactccccaccaccctctccttgttgyctggcactgcatcgcttatttcccagtgggagtttgtttcatctgcttggagcaatctgtgtggatgttgtgtcttacagccccattcagtttgcacaccasaatttccatcctggacaaaacattagccacccaggcatctgaatgtcaggggttttcaggtgtctccacccactaatggactgtaggaacaagacaaggacctttgatttggtggatatgggcaattccgagaaygagcttattgtaaacctctctgtcccagatccttgggagaagtaagctggcttcccacagagctgatggctgtactccaccctactggacatcagcagagcatgtgctaaaactccaacatgagctttgaccactaccttgttccactgagatttaagacattga

SEQ ID NO: 42764 - DNA, 600 bp, Chicken  19866894280126_6
gccacaataacatagacaagtttgtctcctatgattcactccccaccaccctctccttgttgyctggcactgcatcgcttatttcccagtgggagtttgtttcatctgcttggagcaatctgtgtggatgttgtgtcttacagccccattcagtttgcacaccasaatttccatcctggacaaaacattagccacccaggcatctgaatgtcaggggttttcaggtgtctccacccactaatggactgtaggaacaagacaaggacctttgatttggtggatatgggcaattccgagaaygagcttattgtaaacctctctgtcccagatccttgggagaagtaagctggcttcccacagagctgatggctgtactccaccctactggacatcagcagagcatgtgctaaaactccaacatgagctttgaccactaccttgttccactgagatttaagacattgatcagacaaaggatggttagtgagttctggccttctgccagctggctttatccacagaaaaagcttaactacagaagtcatgcagactatcaagtggaacagcaactacacgttgtcagagacagaaacaaatagc

SEQ ID NO: 42765 - DNA, 600 bp, Chicken  19866894280126_7
ttaagacattgatcagacaaaggatggttagtgagttctggccttctgccagctggctttatccacagaaaaagcttaactacagaagtcatgcagactatcaagtggaacagcaactacacgttgtcagagacagaaacaaatagctttcaaaaggctcagcagtcacaagctagcatacactagcagggttgtactaaggattgatcaaaactaacagaagtcacaggtggtacttgagtcaaaagctaaaaaaaagaaaaaagaaaaaacacctttcagcagcccctttcctgggascctcatgtcccattgcagctcatcctcacacacctcactggggtctgcccaccatgcactgtctctctgtttgggcacatagttgcaacccaggttccccctccaaccagaatcacatgctattcttccccctggccagtacagctcagcagatagatcactaggctctgacaacataaagaggatggccagaacttgtatctgcagccatcaggtttagcagcttctcttggcagcaccccagaaaatccctttcacctccactgccatctagtgcagttatgagaaaataaaaaccca

SEQ ID NO: 42766 - DNA, 600 bp, Chicken  19866894280131_1
attttaaagtaaaacagacattaaaatatccactccaccagaaacttcagcatttgttttaaaatcgtgaattgaaataggccacagttttctacgtggacaatttaaaatggtgccactatacctcatgtcttctgaggggacaagcaagtgtaataactgtatttacagttgttttatggagtcattaaatattgctgggtatgttgaactaatttcaattgacttgaatgaaaaagtggatttattttccctccctccatgagtatatatgcctctcagggttccataagggacaayactgcatctccattacatgtgtcttataaaagcactcacaaacactaagcacaggagttgtgataaatagaaaaattccatgacaggttgttgtcctttggtgagacacaagaagtaaagtaaaagtgaacgtacagaaggatccatgagtctttgcacatgctgccattctccaatctggagtcttattgaactatggtatagtaacaacagcaaagtacattcatggctatgtctgctaactgtggtgaaatttctgccatggataagaagatccgtatttgatctccataaaaatga

SEQ ID NO: 42767 - DNA, 600 bp, Chicken  19866894280134_1
cctataactacaatctcccaaccaccaagaaaaacaaagagctctattcacccagctcctgctccaaaatctgtctcaatttttctctctgttctcaggggctgggagaggatgagcagaggcagcagtattaatctttcctaaagtacttgctcaaacctgccgaaatcgataaaagacttccagtgattctaacagactcggatcagagccctcagcagacacgatccagtttgagcacatgacatcctggagaaaaaaaaaggaattaaaaacaaagtgccttctgcttcctgcacmggtaccgttagtgactgctggataaaaactgctcaggcacggggagctcaggacttgcaggcaacttcactgaattttgtgattaatgccaccaaaaacaggagctgcttgttttttgtgcgttttgtttgcttgttttccctgatattgttttgatgttttctaaataaagcatcctcatgttttatttctaaacgactcttctaagatggactaagttacatcactggaaaacttttctgtatgaaacttttcaaaggctgccaattctttatttttgcagggaaaaaaaaaaaattg

SEQ ID NO: 42768 - DNA, 600 bp, Chicken  19866894280138_1
taccttctgccgtgaatttagaagttttttgaggttctgggccttcctctgtgtacatgacagccaggataccttcattattaaaaaagaaaagttaagtcacataccctgcaatatgagtcacaggaactggagctaagaagctactgaaacagttttgttcaactacagaaccataaatcagttactttctccaacaaatccaatttatacacatcgttgccattagttgtggaatcagaataaaagaatgcaattctttggacaaggtccttgagagcatatgaaacatccagactytactcataaaagacacacacygcacaagtttcttctggcaaacatggaaagccactcactgttagctattattttacttactttttttttaacttgctttaagtactaatacagctgagttattattcatgatctcaggttattcattcatgatctcaggttattcctgttgctgttcctggagtttagtgtctgatgcctagacacattttttttgctttaaatcttgtggatattcactctttctttgcaaccaataaatgtgagaaatactgactcaaagattttgcgttccaactc

SEQ ID NO: 42769 - DNA, 600 bp, Chicken  19866894280138_10
agatttgcttccacaacagtgaatatcttattttacagtctcacctcgtatctgtggttttctactgcccatctgctgtgtgagccatccatgaaacagcatcattgtctgcacaagagaacagtgaagagatggatgtttattatgtaattatttattgttatttttttgttaataatttattttaaattcataattattacaatcataaattataaattttgttaatttattgttaattatttattaatccattgatgatccctcttcaaggttacttctgtgttgagttcagtgaarctcagggtctgttgttgaagctcagctttactgccctttacatttcttctaaccattacttctgttaatggaaagaagaaagtgatgagagcatatacataaaaaacatttaagacacctggggatgtcattactgctttgaacttaaaaatagccagaagagcaamcaaaatatttcttattcttacatgtatttaatccatcataattccattttatgggtttcaccatttccagaatctttgctttcagggatcacccttttcaaacttataagtgagttaattaatttatttcatg

SEQ ID NO: 42770 - DNA, 600 bp, Chicken  19866894280138_11
tttgttaataatttattttaaattcataattattacaatcataaattataaattttgttaatttattgttaattatttattaatccattgatgatccctcttcaaggttacttctgtgttgagttcagtgaarctcagggtctgttgttgaagctcagctttactgccctttacatttcttctaaccattacttctgttaatggaaagaagaaagtgatgagagcatatacataaaaaacatttaagacacctggggatgtcattactgctttgaacttaaaaatagccagaagagcaamcaaaatatttcttattcttacatgtatttaatccatcataattccattttatgggtttcaccatttccagaatctttgctttcagggatcacccttttcaaacttataagtgagttaattaatttatttcatgtattgagcatttccagatgctaaaaatcttcctcccctgtcgatatatttattacttgttcttttccatttttcccacatattcttcactcaaatattattattttaataaataaggagtctttaagaagatagtattttattaataatgtagtaaattatacacca

SEQ ID NO: 42771 - DNA, 600 bp, Chicken  19866894280138_2
aagttttttgaggttctgggccttcctctgtgtacatgacagccaggataccttcattattaaaaaagaaaagttaagtcacataccctgcaatatgagtcacaggaactggagctaagaagctactgaaacagttttgttcaactacagaaccataaatcagttactttctccaacaaatccaatttatacacatcgttgccattagttgtggaatcagaataaaagaatgcaattctttggacaaggtccttgagagcatatgaaacatccagactytactcataaaagacacacacygcacaagtttcttctggcaaacatggaaagccactcactgttagctattattttacttactttttttttaacttgctttaagtactaatacagctgagttattattcatgatctcaggttattcattcatgatctcaggttattcctgttgctgttcctggagtttagtgtctgatgcctagacacattttttttgctttaaatcttgtggatattcactctttctttgcaaccaataaatgtgagaaatactgactcaaagattttgcgttccaactcactctgcacataatttgattg

SEQ ID NO: 42772 - DNA, 600 bp, Chicken  19866894280138_3
aaaaaagaaaagttaagtcacataccctgcaatatgagtcacaggaactggagctaagaagctactgaaacagttttgttcaactacagaaccataaatcagttactttctccaacaaatccaatttatacacatcgttgccattagttgtggaatcagaataaaagaatgcaattctttggacaaggtccttgagagcatatgaaacatccagactytactcataaaagacacacacygcacaagtttcttctggcaaacatggaaagccactcactgttagctattattttacttacyttttttttaacttgctttaagtactaatacagctgagttattattcatgatctcaggttattcattcatgatctcaggttattcctgttgctgttcctggagtttagtgtctgatgcctagacacattttttttgctttaaatcttgtggatattcactctttctttgcaaccaataaatgtgagaaatactgactcaaagattttgcgttccaactcactctgcacataatttgattgcagctgaaggagtttgagctaatagtatgagctgaagaaatactcccataacaaaatacac

SEQ ID NO: 42773 - DNA, 600 bp, Chicken  19866894280138_4
atacagctgagttattattcatgatctcaggttattcattcatgatctcaggttattcctgttgctgttcctggagtttagtgtctgatgcctagacacattttttttgctttaaatcttgtggatattcactctttctttgcaaccaataaatgtgagaaatactgactcaaagattttgcgttccaactcactctgcacataatttgattgcagctgaaggagtttgagctaatagtatgagctgaagaaatactcccataacaaaatacactttggcctcctctgtgcctgcaataygtctaagggaataatctgaaragaactctctgtaattaagcacaaatgaagagaaacagcaggctctgtcactgagaggctgatgtgtagcttcactgtcctggcagagctacagggatagagttcactsaagtgtgctttatgtgaattttggggatatttgatcattattatttgcatgcaacatggggagggagcttggatctgggctcagaggagtggctttggccacaagtagtgttcacagagcatttgcaatctcacactcctatgtctttaagtttatgaagttacagcttt

SEQ ID NO: 42774 - DNA, 600 bp, Chicken  19866894280138_5
tgatctcaggttattcattcatgatctcaggttattcctgttgctgttcctggagtttagtgtctgatgcctagacacattttttttgctttaaatcttgtggatattcactctttctttgcaaccaataaatgtgagaaatactgactcaaagattttgcgttccaactcactctgcacataatttgattgcagctgaaggagtttgagctaatagtatgagctgaagaaatactcccataacaaaatacactttggcctcctctgtgcctgcaataygtctaagggaataatctgaaragaactctctgtaattaagcacaaatgaagagaaacagcaggctctgtcactgagaggctgatgtgtagcttcactgtcctggcagagctacagggatagagttcactsaagtgtgctttatgtgaattttggggatatttgatcattattatttgcatgcaacatggggagggagcttggatctgggctcagaggagtggctttggccacaagtagtgttcacagagcatttgcaatctcacactcctatgtctttaagtttatgaagttacagctttgaccctttggctgcacttccg

SEQ ID NO: 42775 - DNA, 600 bp, Chicken  19866894280138_6
actctttctttgcaaccaataaatgtgagaaatactgactcaaagattttgcgttccaactcactctgcacataatttgattgcagctgaaggagtttgagctaatagtatgagctgaagaaatactcccataacaaaatacactttggcctcctctgtgcctgcaataygtctaagggaataatctgaaragaactctctgtaattaagcacaaatgaagagaaacagcaggctctgtcactgagaggctgatgtgtagcttcactgtcctggcagagctacagggatagagttcactsaagtgtgctttatgtgaattttggggatatttgatcattattatttgcatgcaacatggggagggagcttggatctgggctcagaggagtggctttggccacaagtagtgttcacagagcatttgcaatctcacactcctatgtctttaagtttatgaagttacagctttgaccctttggctgcacttccgatgccatgtgcacatgcacacttggccgagtcctatcagcaccggccttgctggcagccatcactacaccaaaaccgcagacatggcctcctccctgccttcagctgtt

SEQ ID NO: 42776 - DNA, 600 bp, Chicken  19866894280138_7
taagtttatgaagttacagctttgaccctttggctgcacttccgatgccatgtgcacatgcacacttggccgagtcctatcagcaccggccttgctggcagccatcactacaccaaaaccgcagacatggcctcctccctgccttcagctgttaggccagcagttagagtatgttttacttacccgccctcaaaccacccaagctgtcatgaactcctggtaggttttgctttttatggctgttggtaagtaaggaactctcctgagaaaggcgagggcagaagtcactgactcacagcrcccacgtgcaggagcagggctacactgrcagaggcagacacttgctaccaatgccacagccccttgggaaggcacatgtgagccatgtccgtcctaggcaggccaaggcaggtcggtcctcaccttcgtggctgtctggactcccctggcctccttgtgcctggagaaccagtggctaaggcargttgcttggcaccggcagcctctggtgcctgtatagaacaccacagttgtgcacacaaaatgagcagaagtctctaaattgctttttgtcctttcttctcaaggtgccgatatcac

SEQ ID NO: 42777 - DNA, 600 bp, Chicken  19866894280138_8
tttggctgcacttccgatgccatgtgcacatgcacacttggccgagtcctatcagcaccggccttgctggcagccatcactacaccaaaaccgcagacatggcctcctccctgccttcagctgttaggccagcagttagagtatgttttacttacccgccctcaaaccacccaagctgtcatgaactcctggtaggttttgctttttatggctgttggtaagtaaggaactctcctgagaaaggcgagggcagaagtcactgactcacagcrcccacgtgcaggagcagggctacactgrcagaggcagacacttgctaccaatgccacagccccttgggaaggcacatgtgagccatgtccgtcctaggcaggccaaggcaggtcggtcctcaccttcgtggctgtctggactcccctggcctccttgtgcctggagaaccagtggctaaggcargttgcttggcaccggcagcctctggtgcctgtatagaacaccacagttgtgcacacaaaatgagcagaagtctctaaattgctttttgtcctttcttctcaaggtgccgatatcacactagccagctttggacttctttaggta

SEQ ID NO: 42778 - DNA, 600 bp, Chicken  19866894280138_9
cgccctcaaaccacccaagctgtcatgaactcctggtaggttttgctttttatggctgttggtaagtaaggaactctcctgagaaaggcgagggcagaagtcactgactcacagcrcccacgtgcaggagcagggctacactgrcagaggcagacacttgctaccaatgccacagccccttgggaaggcacatgtgagccatgtccgtcctaggcaggccaaggcaggtcggtcctcaccttcgtggctgtctggactcccctggcctccttgtgcctggagaaccagtggctaaggcargttgcttggcaccggcagcctctggtgcctgtatagaacaccacagttgtgcacacaaaatgagcagaagtctctaaattgctttttgtcctttcttctcaaggtgccgatatcacactagccagctttggacttctttaggtattcccagtctttaaacaccacaaatgttccagcatgatgtcctagctatgcatctgatgtttcttgatggttttcagtcaacccttcagaccattctaacctactgcagaataattcatagatctgaggagaagagagaaccacttgacctcaaat

SEQ ID NO: 42779 - DNA, 572 bp, Chicken  19866894280139_1
  misc_feature (1)..(66): n is any nucleotide
nnnnnnnnnnnnnnnnnnnnnnnnnnnnnnnnnnnnnnnnnnnnnnnnnnnnnnnnnnnnnnnnnnagagacccatagagacccatagcgcccccaatgtgccctcatagagccccatagagccccatagcagcccatagaaccccttagtgacccatagcgcccccattgtgccctcatagagccccatagcaatccatagagaccccatagagacccatagcgcccccattgtgccctcatagggccccatagagatccatagagatccatagggacccatagagacccatagcgccyccattgtgccctcatagagccccatagtgccccttagagatccatagagacccacagcactccatagcgccccatagcaaccccattgtgccctcatagcaccccatagcgacccatagagttccatagagttccatagcgacccatagagaccccatagagacccatagcgcccccattttgcccttatagagccccaaagagccccctagagccccatagattcccatagagccccatagggccccatagcaccccatagaaccccttag

SEQ ID NO: 42780 - DNA, 600 bp, Chicken  19866894280143_1
gtataattgtttttgaagtttccaggcttccaagacatcccatctgtctcatgttattactgtttaatatagatcgtacagaaacattgaaaagaggggaactagtactaatggactagtccactagtccattagtccactaatgtccactagtactagtggactaaactcatatttgtgtgaagttttaaagcataggagaaatctgaagaaggaataatattaaaagagaccgtatcatcatatatggctattgtacatttgcacaccttggactatttaaaaaaaaaaaaaaaaaarataacatttttatttttttcactgattgtcttagtcagatccagtctgaacaagatctatctaaaaggggagatagtgcccagactttgcctcagtctcacagaacaattcagcctgtcctactttccaggattatctcaagtagagctacttgagctacttcattaggtgccttcctttagtctcccacatagacttagaagtggaaagatggatgcttatctccttcctacacctcacatttaatgagttacttggtacttaaattcagtaaaaagtccctggagaagactgaaatgt

SEQ ID NO: 42781 - DNA, 600 bp, Chicken  19866894280144_1
taatcttgagtttagcatgtatttgagtaatgaaaggaaaagactgaaggctataagcgctctcataaggaaagaagtcaactttcatttaagctgtaaggctagttactaactattgggcatgttgcaatcaagtaatctggcaacattgtaaaatagtgaagtgatagaatgggttataagggtttattataagccaatccataattcagaagtgttcaggaatgaaaactttctaaaaatatgggaaaaaatcttttaaaattatgctgtttcacttgtactgatgaagtaagaaarccwaagacaatagccatccgtcatgaatgcatagttttttaacattttgaagtatgtttaattatcaataagatttacgaatattaatggatgtgaatgtgttcttattgtcattatccatactagtataaatagcacatcatagtctagcaggtgaaaatctgtattttttagctggcttgcatcattttcttcaccatgcagtcttttyctcatatcaacaggagatgacaagctgcagcaatcagttctcacgaggggactatgcagagccttataaacacaatgctttgttcttgg

SEQ ID NO: 42782 - DNA, 600 bp, Chicken  19866894280144_2
tcttgagtttagcatgtatttgagtaatgaaaggaaaagactgaaggctataagcgctctcataaggaaagaagtcaactttcatttaagctgtaaggctagttactaactattgggcatgttgcaatcaagtaatctggcaacattgtaaaatagtgaagtgatagaatgggttataagggtttattataagccaatccataattcagaagtgttcaggaatgaaaactttctaaaaatatgggaaaaaatcttttaaaattatgctgtttcacttgtactgatgaagtaagaaarccwaagacaatagccatccgtcatgaatgcatagttttttaacattttgaagtatgtttaattatcaataagatttacgaatattaatggatgtgaatgtgttcttattgtcattatccatactagtataaatagcacatcatagtctagcaggtgaaaatctgtattttttagctggcttgcatcattttcttcaccatgcagtcttttyctcatatcaacaggagatgacaagctgcagcaatcagttctcacgaggggactatgcagagccttataaacacaatgctttgttcttggcct

SEQ ID NO: 42783 - DNA, 600 bp, Chicken  19866894280144_3
gaagtgttcaggaatgaaaactttctaaaaatatgggaaaaaatcttttaaaattatgctgtttcacttgtactgatgaagtaagaaarccwaagacaatagccatccgtcatgaatgcatagttttttaacattttgaagtatgtttaattatcaataagatttacgaatattaatggatgtgaatgtgttcttattgtcattatccatactagtataaatagcacatcatagtctagcaggtgaaaatctgtattttttagctggcttgcatcattttcttcaccatgcagtcttttyctcatatcaacaggagatgacaagctgcagcaatcagttctcacgaggggactatgcagagccttataaacacaatgctttgttcttggcctatacttaactgctcttcaatatagcagcagggttttgtattttgctggttcgcctaacaaatgttaaaaaattgttgccgactcagaatgcctgcataactaactgtgcggctgctaaaggtgtttggcaaattataactatttgtttgggaataaatggtgctggtgtgaactcatcttattagcttgtgtttgaataaaagtgagt

SEQ ID NO: 42784 - DNA, 600 bp, Chicken  19866894280150_1
gagttgctgtcgcactttggcagctcattttgaacttctcatcagccagcacccctaagtccctctactgctctcaatacattctctgcccggcttgtatttgtgcttggacttgcctcagccaaagtgcatttggcctttttgaatttcagggttcacaaaggcctgccttccaagcccatccaggtccctttggatagcatcccttcctctaacatgttgactgcaacacttagcttggtgtcattggcaaactttctgagggtacagtcagtcccactgacaaagatgttaaacagktccaggacccagtaatgacccctgggaatgctgcttgtcactgatctccatctgggaatcaagccattgaccacagctctttgtgaccatccaaccctttccttatccagtamgtggtccagccatcagatcyacatctttccaatttatagggagtgttgtggagatgagcagctgcaaaagcatgtagtagtagcataaatcttaaggaaatatagatgaaaagcagaagtagtatgcttggatttgtagtcctcttgtttttgtccgtgagaggcagaagttgcctaaaaggctgca

SEQ ID NO: 42785 - DNA, 600 bp, Chicken  19866894280150_2
tgcctcagccaaagtgcatttggcctttttgaatttcagggttcacaaaggcctgccttccaagcccatccaggtccctttggatagcatcccttcctctaacatgttgactgcaacacttagcttggtgtcattggcaaactttctgagggtacagtcagtcccactgacaaagatgttaaacagktccaggacccagtaatgacccctgggaatgctgcttgtcactgatctccatctgggaatcaagccattgaccacagctctttgtgaccatccaaccctttccttatccagtamgtggtccagccatcagatcyacatctttccaatttatagggagtgttgtggagatgagcagctgcaaaagcatgtagtagtagcataaatcttaaggaaatatagatgaaaagcagaagtagtatgcttggatttgtagtcctcttgtttttgtccgtgagaggcagaagttgcctaaaaggctgcacgtactgtcctggttggggtctgatagctgggttgtgatttgtcctgtttgaggtcatctttgaagttgatacttgatatcttcagccagttaactttgagtgttctgtctgt

SEQ ID NO: 42786 - DNA, 600 bp, Chicken  19866894280150_3
tggcctttttgaatttcagggttcacaaaggcctgccttccaagcccatccaggtccctttggatagcatcccttcctctaacatgttgactgcaacacttagcttggtgtcattggcaaactttctgagggtacagtcagtcccactgacaaagatgttaaacagktccaggacccagtaatgacccctgggaatgctgcttgtcactgatctccatctgggaatcaagccattgaccacagctctttgtgaccatccaaccctttccttatccagtamgtggtccagccatcagatcyacatctttccaatttatagggagtgttgtggagatgagcagctgcaaaagcatgtagtagtagcataaatcttaaggaaatatagatgaaaagcagaagtagtatgcttggatttgtagtcctcttgtttttgtccgtgagaggcagaagttgcctaaaaggctgcacgtactgtcctggttggggtctgatagctgggttgtgatttgtcctgtttgaggtcatctttgaagttgatacttgatatcttcagccagttaactttgagtgttctgtctgttccaggataatggctatgtg

SEQ ID NO: 42787 - DNA, 352 bp, Chicken  19866894280150_4
agcagctgcaaaagcatgtagtagtagcataaatcttaaggaaatatagatgaaaagcagaagtagtatgcttggatttgtagtcctcttgtttttgtccgtgagaggcagaagttgcctaaaaggctgcacgtactgtcctggttggggtctgatagctgggttgtgatttgtcctgtttgaggtcatctttgaagttgatacttgatatcttcagccagttaactttgagtgttctgtctgttccaggataatggctatgtgcatattcatactcccataattacatcaaacgactgygaaggtgctggggatctctttcaaattgaggtaagttggagtgggtagagtt

SEQ ID NO: 42788 - DNA, 526 bp, Chicken  19866894280154_1
tatgaaaataagttatgaacacaataagtttatgaacataaattactaatcttgtaagtggctaattttatttttcagtttcagagtttagctcgattagtttatttttgttgctgcacttgattatgcttttctaataggaagatggagagtccaattcattgttctcatttagatcatcatttgtctgctttgtcaaaatatgtgagtataggtttacaaaagcagcagaacagactaagttaaaaggattcggactgctctttagctgggaaatatgtgtgtagagaagtgtaaagygctgcttcttaatactggagaacctcagatgctttcccctgcagagaaarcaagtcacctgatctggagggctgggcatggggatcttatgcagatctctagtggggtagcttttatacagctttgtttcttagctgctgcctcaagaagccctgctcagaggcagtggcactgaaaaggttcatgggaagcactggtgaaactacataccttgtcgatgttgcat

SEQ ID NO: 42789 - DNA, 476 bp, Chicken  19866894280154_2
cttgtaagtggctaattttatttttcagtttcagagtttagctcgattagtttatttttgttgctgcacttgattatgcttttctaataggaagatggagagtccaattcattgttctcatttagatcatcatttgtctgctttgtcaaaatatgtgagtataggtttacaaaagcagcagaacagactaagttaaaaggattcggactgctctttagctgggaaatatgtgtgtagagaagtgtaaagygctgcttcttaatactggagaacctcagatgctttcccctgcagagaaarcaagtcacctgatctggagggctgggcatggggatcttatgcagatctctagtggggtagcttttatacagctttgtttcttagctgctgcctcaagaagccctgctcagaggcagtggcactgaaaaggttcatgggaagcactggtgaaactacataccttgtcgatgttgcat

SEQ ID NO: 42790 - DNA, 510 bp, Chicken  19866894280155_1
acttctccccccaaaagaacactgttctgctcattttgagcaaagaattacaaccccaacacacacagcttggtcagattgctttttcagtgagaggacatatgatgataaaatcatttgagtgggaatggacctgtaaaggccatctaatccaactcccctgcaatgaacagggacacctacactgagatcaggctgctcagagccccatgcaggctgaccttaagacatctccagggacagggcatccaccacctctctgggcaacctgttccagtgacatccaagatgacaaaagcrtttgcaatgctgcaggtgttacaaggtatttcagatgaagttaagaagcacatttgtgctatgtctttaaatctyattcattcttcagagattctttctgcctaccagtcactgctgcagaaatgaaaatgaaaagctctcacagcacaacactaccctgctcagcagaacaggtgacgacgcctaaagctatgactgagcaaaacagaa

SEQ ID NO: 42791 - DNA, 435 bp, Chicken  19866894280155_2
agattgctttttcagtgagaggacatatgatgataaaatcatttgagtgggaatggacctgtaaaggccatctaatccaactcccctgcaatgaacagggacacctacactgagatcaggctgctcagagccccatgcaggctgaccttaagacatctccagggacagggcatccaccacctctctgggcaacctgttccagtgacatccaagatgacaaaagcrtttgcaatgctgcaggtgttacaaggtatttcagatgaagttaagaagcacatttgtgctatgtctttaaatctyattcattcttcagagattctttctgcctaccagtcactgctgcagaaatgaaaatgaaaagctctcacagcacaacactaccctgctcagcagaacaggtgacgacgcctaaagctatgactgagcaaaacagaa

SEQ ID NO: 42792 - DNA, 599 bp, Chicken  19866894280157_1
  misc_feature (1)..(8): n is any nucleotide
nnnnnnnngagaggatgtggaggagcagcctgctgtcagcacattggtggcaaggtctagagcagctccagccgccgctgcatggattaatggtgtggacgttgggaggactggaagtggatgagtcctgaggatgggaaagtgagcacaggtgggtatggtgcagacactcaccacgttctcatctgagtgctgtttcagagggctggaaacgtgcaatggcgctctcccacctcccagccgccagcctcgcctcgctaaaagcccgaggtattaaagctctgctgcacgcgtggctcycgcctgctgcagccagctgtgatgatggatgtatctctcagtcctcggcaggaattgtacaacacctcctgactgcgctgcccgatcgattagtacatctccttccatcaagcagactattttgagtgagcctcgggctgcctctcccagccgtgggcttccacctggaggcacgcttggcgtcgaccacctccaagctggagtggttgggatttcctcctgccaaagccttcttcttctaggtcacctcattaggagctttctgataaataggctgtttgacatttttttatataaag

SEQ ID NO: 42793 - DNA, 600 bp, Chicken  19866894280157_2
attaggagctttctgataaataggctgtttgacatttttttatataaaggtcaacatcctctgatagactcgaggattttaagataagtggaggaaatggcattggcaggctgattttgataatgatgctaatctcgtgtctgatctttgataatgatactaacccctcggtgcactgctcacatctctgcaaatgtggctggtatctattttggcagaaccggtacctattagcgcacattatctttactgcagccttttcctcgtctgttggctgccgtatgagatgcacacgaggargcctgaatggctttcagaacaaattcaatcagagcaagcgttcttgtctaaacgtggttacaacctcctgagtcagctttaccaaatctgttacaggcgtgctaattaattaataagaattaattagtcactggaaaacatgagaagcagttcagcgcagggctgccctgcatcatcccgggcggtgattttgaagcaccttgcatgcgttatgtgtcggagaaggcttctgttagggggcagcagaaatgaattgttaggactggggagctttgcctgtccttcagtcccagcagttgc

SEQ ID NO: 42794 - DNA, 589 bp, Chicken  19866894280159_1
gcaattaaaacatatgtttcttttggttgaagttatggatgtgttttaaatgagttgtcagtttgcacactcaggacaaaatggaagaggagaacagcttgcctatcagtgccaagtctaatcattaacaaaaatctacgtaattgctacataattctcccagattttcttcctgcactccttggccacaggaaaaaaggttttccaaggcagagaacagggagatggacagggtaactgtcttccagggagggttaagccctgaattgcccgtatacttgttaaacttatcacaatgartttttaagtacagctgtccttaagtaccacaaagtacttcttaaatacctaagatacatgtttatctggctgagatgtgggtttcctgggggggggggggatttaatcactatgtataaatacaaaaattgtctgatattttatatttaagtgacatttaaaccactcaaaaatcagtcgtgcttggatttcttcaggggaacagatggatggtatcttatttaacctgtttcactctgcccttagttgttacaaccgtcaccccagaaagatgtcacaggagaattta

SEQ ID NO: 42795 - DNA, 600 bp, Chicken  19866894280168_1
tatgccctttttttctccagggctttcattgctcagagtcttaaaagtacagaaacactcaatggtaactgataagtaatcaacattggctactttgtgtcagtattgataaaaatgccttggaattaaaggaactgtcttgtgtcaacaaagttcttagggaacaggcacacagagctcttcctcattagagctgtgcagtagaggactgcatagaagtagcctatatccagacagtgtagttgcagggacacagggctaatgttaatcagagcttttctgccaatttgttgctttttrtgttttcttttttcagtgctcgggacttggagcttcattctgctacatgctttcatacttagtggggcgacctgttgtatacaaatacttaaccgaaaaagcagtgaagtggtcagaacaggtaaagttcctggataggctgagtcttctgatagaaaaygtgtagtagaataggatggaagataagaggatattgtgctcatacacctacaaggaaatgattctgatccctttctgacagcacgctgttacttcttgggtggtatgctaaagccagtctgggagtagaagaggctttga

SEQ ID NO: 42796 - DNA, 600 bp, Chicken  19866894280168_2
ggaacaggcacacagagctcttcctcattagagctgtgcagtagaggactgcatagaagtagcctatatccagacagtgtagttgcagggacacagggctaatgttaatcagagcttttctgccaatttgttgctttttrtgttttcttttttcagtgctcgggacttggagcttcattctgctacatgctttcatacttagtggggcgacctgttgtatacaaatacttaaccgaaaaagcagtgaagtggtcagaacaggtaaagttcctggataggctgagtcttctgatagaaaaygtgtagtagaataggatggaagataagaggatattgtgctcatacacctacaaggaaatgattctgatccctttctgacagcacgctgttacttcttgggtggtatgctaaagccagtctgggagtagaagaggctttgatryagtcctggtatcaggagctgggatagagttgaggatgatgaaatggactgcaagtaaaatatagactatcatggctgctcctgggtggcgttaatcctgggccttagaaagtaagggcagacaggccttaagacttctggcaacagccagctgatga

SEQ ID NO: 42797 - DNA, 600 bp, Chicken  19866894280168_3
ttttcttttttcagtgctcgggacttggagcttcattctgctacatgctttcatacttagtggggcgacctgttgtatacaaatacttaaccgaaaaagcagtgaagtggtcagaacaggtaaagttcctggataggctgagtcttctgatagaaaaygtgtagtagaataggatggaagataagaggatattgtgctcatacacctacaaggaaatgattctgatccctttctgacagcacgctgttacttcttgggtggtatgctaaagccagtctgggagtagaagaggctttgatryagtcctggtatcaggagctgggatagagttgaggatgatgaaatggactgcaagtaaaatatagactatcatggctgctcctgggtggcgttaatcctgggccttagaaagtaagggcagacaggccttaagacttctggcaacagccagctgatgaacttcatacccatggccagggtaagctttcaggcgaggagtacagcygtttttcaggtttgattacagtttagggcagaatgtgatgaggaacaaactttgttggtagttctgcaggggcttaaggagcaggatgccaagat

SEQ ID NO: 42798 - DNA, 600 bp, Chicken  19866894280168_4
tttcttttttcagtgctcgggacttggagcttcattctgctacatgctttcatacttagtggggcgacctgttgtatacaaatacttaaccgaaaaagcagtgaagtggtcagaacaggtaaagttcctggataggctgagtcttctgatagaaaaygtgtagtagaataggatggaagataagaggatattgtgctcatacacctacaaggaaatgattctgatccctttctgacagcacgctgttacttcttgggtggtatgctaaagccagtctgggagtagaagaggctttgatryagtcctggtatcaggagctgggatagagttgaggatgatgaaatggactgcaagtaaaatatagactatcatggctgctcctgggtggcgttaatcctgggccttagaaagtaagggcagacaggccttaagacttctggcaacagccagctgatgaacttcatacccatggccagggtaagctttcaggcgaggagtacagcygtttttcaggtttgattacagtttagggcagaatgtgatgaggaacaaactttgttggtagttctgcaggggcttaaggagcaggatgccaagatc

SEQ ID NO: 42799 - DNA, 600 bp, Chicken  19866894280168_5
ctacaaggaaatgattctgatccctttctgacagcacgctgttacttcttgggtggtatgctaaagccagtctgggagtagaagaggctttgatryagtcctggtatcaggagctgggatagagttgaggatgatgaaatggactgcaagtaaaatatagactatcatggctgctcctgggtggcgttaatcctgggccttagaaagtaagggcagacaggccttaagacttctggcaacagccagctgatgaacttcatacccatggccagggtaagctttcaggcgaggagtacagcygtttttcaggtttgattacagtttagggcagaatgtgatgaggaacaaactttgttggtagttctgcaggggcttaaggagcaggatgccaagatcgtagtgtttattggactgcagttagggagaggttgttgagctaatgttagaattaggcctgctgctgtgctgaattacttgttagctgattcaggcacaccattgccatgctttaccatggactggtatttccagacaagctatggtactttgtaatagtgattcaccagtgactgactcttgagacatcttttaactgacttg

SEQ ID NO: 42800 - DNA, 599 bp, Chicken  19866894280172_1
  misc_feature (1)..(44): n is any nucleotide
nnnnnnnnnnnnnnnnnnnnnnnnnnnnnnnnnnnnnnnnnnnnggatcgccaagcacagctgcaccatgaggccacgctgggctcctgctgggacctccacataccataaccccagggcttcgaggcattcatcccacagctccttgtgctgccccaagccaacctatcccattctttctccttgccagtactgggagaacatctctgtctttcttggcacaagtggaaaaatgtaagagggctcaagcagggttttacagcctgcatcctccctggctctgctcctgctcacaccagmtcacctggccaaaagtgccataagattcataccagaggatctttgtgcatgaaatgataacaaaaggtttgatctctgcctagtttcacaacaaagagcgtgtcctttggaccagayttctctttctgaagtcccagccattccatttagtacaggttgatttatacctacccattctgtggttcccatgagaagtcacaagctgagttataaaggcaaacctctaagtaaatttatagcctacatcaggtttttcatcttggaaagaagcaaagccataaatttcccatacgagtgca

SEQ ID NO: 42801 - DNA, 600 bp, Chicken  19866894280172_2
ggcttcgaggcattcatcccacagctccttgtgctgccccaagccaacctatcccattctttctccttgccagtactgggagaacatctctgtctttcttggcacaagtggaaaaatgtaagagggctcaagcagggttttacagcctgcatcctccctggctctgctcctgctcacaccagmtcacctggccaaaagtgccataagattcataccagaggatctttgtgcatgaaatgataacaaaaggtttgatctctgcctagtttcacaacaaagagcgtgtcctttggaccagayttctctttctgaagtcccagccattccatttagtacaggttgatttatacctacccattctgtggttcccatgagaagtcacaagctgagttataaaggcaaacctctaagtaaatttatagcctacatcaggtttttcatcttggaaagaagcaaagccataaatttcccatacgagtgcatcaaaaatcatcccctttttgattcattgtgcttgaaaatctttctgagccagaaaatgcagacctcactgggatattcattttgaaagttgagcaaaggactgaagcattgcttggg

SEQ ID NO: 42802 - DNA, 600 bp, Chicken  19866894280173_1
ccctctgtgcactgctgattctgctgacatccagtgcacaatgcagatgctctagataacttcacattgaagtttttccactaaacatacgacctgtgtctattctgctcctgggttgtctctgtcttggtgctaaataaattagttgcaccaaaccctggtactgtgctcacagttgcccttgccatttcctgctgcaagaagaagataggatttggaggtaacacctaagcctgggctgattttatgatgatgaaagggagctataagagagaaaggggcagacactttagcagggtmtgttgtgatcggacaaggggaaatggtttcagactaaaagargagagatttagattggatataaggaatatgttttttacagtcagagtggtaaggcattggcacagattgcccagagaggyggtggatgccccatccctggagacactcaaggtcaggctgggggatctctgagcagcctgatctgctgtaggtatccccatttgttgaaggggagttgrgctaagtgacctttaaggttccttccaactcaaatrattctatgattctacactgtaatggtgtagcaggacaccaagc

SEQ ID NO: 42803 - DNA, 600 bp, Chicken  19866894280173_2
gcagatgctctagataacttcacattgaagtttttccactaaacatacgacctgtgtctattctgctcctgggttgtctctgtcttggtgctaaataaattagttgcaccaaaccctggtactgtgctcacagttgcccttgccatttcctgctgcaagaagaagataggatttggaggtaacacctaagcctgggctgattttatgatgatgaaagggagctataagagagaaaggggcagacactttagcagggtmtgttgtgatcggacaaggggaaatggtttcagactaaaagargagagatttagattggatataaggaatatgttttttacagtcagagtggtaaggcattggcacagattgcccagagaggyggtggatgccccatccctggagacactcaaggtcaggctgggggatctctgagcagcctgatctgctgtaggtatccccatttgttgaaggggagttgrgctaagtgacctttaaggttccttccaactcaaatrattctatgattctacactgtaatggtgtagcaggacaccaagctgactgatacagcatctaaaacctgtgttgattccatattcc

SEQ ID NO: 42804 - DNA, 600 bp, Chicken  19866894280173_3
tgtcttggtgctaaataaattagttgcaccaaaccctggtactgtgctcacagttgcccttgccatttcctgctgcaagaagaagataggatttggaggtaacacctaagcctgggctgattttatgatgatgaaagggagctataagagagaaaggggcagacactttagcagggtmtgttgtgatcggacaaggggaaatggtttcagactaaaagargagagatttagattggatataaggaatatgttttttacagtcagagtggtaaggcattggcacagattgcccagagaggyggtggatgccccatccctggagacactcaaggtcaggctgggggatctctgagcagcctgatctgctgtaggtatccccatttgttgaaggggagttgrgctaagtgacctttaaggttccttccaactcaaatrattctatgattctacactgtaatggtgtagcaggacaccaagctgactgatacagcatctaaaacctgtgttgattccatattccttgttcttccaaggggccttgggctattatttcacaaagtgtatgtactcattactgtggattactttgtagagaagtca

SEQ ID NO: 42805 - DNA, 600 bp, Chicken  19866894280173_4
taacacctaagcctgggctgattttatgatgatgaaagggagctataagagagaaaggggcagacactttagcagggtmtgttgtgatcggacaaggggaaatggtttcagactaaaagargagagatttagattggatataaggaatatgttttttacagtcagagtggtaaggcattggcacagattgcccagagaggyggtggatgccccatccctggagacactcaaggtcaggctgggggatctctgagcagcctgatctgctgtaggtatccccatttgttgaaggggagttgrgctaagtgacctttaaggttccttccaactcaaatrattctatgattctacactgtaatggtgtagcaggacaccaagctgactgatacagcatctaaaacctgtgttgattccatattccttgttcttccaaggggccttgggctattatttcacaaagtgtatgtactcattactgtggattactttgtagagaagtcatattagttagctcttacttcagggctaagatgtgattagaactggctcagtgtttgagttgtaagccattttgtgtgactgtcagtggaattactactc

SEQ ID NO: 42806 - DNA, 600 bp, Chicken  19866894280173_5
agggagctataagagagaaaggggcagacactttagcagggtmtgttgtgatcggacaaggggaaatggtttcagactaaaagargagagatttagattggatataaggaatatgttttttacagtcagagtggtaaggcattggcacagattgcccagagaggyggtggatgccccatccctggagacactcaaggtcaggctgggggatctctgagcagcctgatctgctgtaggtatccccatttgttgaaggggagttgrgctaagtgacctttaaggttccttccaactcaaatrattctatgattctacactgtaatggtgtagcaggacaccaagctgactgatacagcatctaaaacctgtgttgattccatattccttgttcttccaaggggccttgggctattatttcacaaagtgtatgtactcattactgtggattactttgtagagaagtcatattagttagctcttacttcagggctaagatgtgattagaactggctcagtgtttgagttgtaagccattttgtgtgactgtcagtggaattactactctacagtttgagcaaatgttggctctcctttttctta

SEQ ID NO: 42807 - DNA, 600 bp, Chicken  19866894280178_1
gggttaatactccagttccatggattgacaaccttccagattccggcttctcaaaagagaagaactacatatcccagaggacctcacggccagagaaggaagatacgtcacggaagtcacgggatctaagtcacgggatctggctctcttgctccctctgtcactgccaggcagaggggtagatgtgtttccaagccgtgcgacttcattcaagtaggcatttcgttttcggaaactctctctcttattttatcagatttattagccttaatttcaattagattgtattatattgtgttwtcttgcattccrataccatagttagtaaaataagttttcctccttagattaattgccactgctccatttcttttccctctctgagcccagctgctgtttccctacccctttccctttttccttcccattttgggaagtcagggggcccacgggcctactgcccccctgccatgggcacagattgatctagataactccatgacagagcgcatccacaatggctcccagatcaaaagtgtgactctgccgtgcactaaaggaactaacagtaaggactgagttaacctgcttgatattttt

SEQ ID NO: 42808 - DNA, 600 bp, Chicken  19866894280178_2
cagttccatggattgacaaccttccagattccggcttctcaaaagagaagaactacatatcccagaggacctcacggccagagaaggaagatacgtcacggaagtcacgggatctaagtcacgggatctggctctcttgctccctctgtcactgccaggcagaggggtagatgtgtttccaagccgtgcgacttcattcaagtaggcatttcgttttcggaaactctctctcttattttatcagatttattagccttaatttcaattagattgtattatattgtgttwtcttgcattccrataccatagttagtaaaataagttttcctccttagattaattgccactgctccatttcttttccctctctgagcccagctgctgtttccctacccctttccctttttccttcccattttgggaagtcagggggcccacgggcctactgcccccctgccatgggcacagattgatctagataactccatgacagagcgcatccacaatggctcccagatcaaaagtgtgactctgccgtgcactaaaggaactaacagtaaggactgagttaacctgcttgatatttttatttcttataat

SEQ ID NO: 42809 - DNA, 600 bp, Chicken  19866894280186_1
aataaataaatgagctctctgcttcagcatgcattgaagacataatcctacattaaattgagactagatgttcataggtgtttgaacagctctttcgtactgaaataacttttggaattctggacttttgtgattaaaaagtttgattaaaaaaaaccaacctttatttgatggcctcttacacattatgcttattaggaaattgtacgaaaaaaagtcatatcatttgtgccctcattctatgcactatcaacaaatatacaattagcagagtggcatggttaggctgacattttacargttgtataactagaaggattaccacagtagaaaggaataatcaaaaataaacagaagtacttacctgcatcttggactcacaaacaaactccaaagggagaaatctccagaaaaacaccctcccccaggggcagtcagcccttaaatgggttctaggagagatacagccaggctccaccccttctggtcacacaggtgaattgtcttcacctgtgctcccatagctgactcagtgcttgcctcaggtgatcaatcagtggttcaggccatgattcagtagttcccatacattttgtgacc

SEQ ID NO: 42810 - DNA, 599 bp, Chicken  19866894280189_1
  misc_feature (1)..(18): n is any nucleotide
nnnnnnnnnnnnnnnnnnttggttttttaagttcagtaagaatttctttgctggttgttactattttttctaagctacctagctctaaccatcttctgaataaatatctcattagtattcttattttgctcctgaaacatctaattatcttttgcataatgagaatagcttatcactataaatgtttttctgctggggactgcaatttttctcttggaaaagctcttctctacagacttgcaatagcgtttatgcagaatcctgcaccttacattctttcaggactcattcgttcaaacrtatctcagattacacgtctcatgaaattatgttgtacagatgaaacactggtgtagaatggaatttaaaaaaaaacatatctcacttaatatttatgacttacaacagtgatatgtgagacttacaatcaaatggtctggacaatcaatttcctctttcttcataaagtcagacttagtaggctacttgtatgcagtaatatacagtaggttcaacaaacactatgctgaagcacttgagaaaataactatttagaaattacagtccgtaactgttgaacttggttwaccataatgccg

SEQ ID NO: 42811 - DNA, 600 bp, Chicken  19866894280189_2
attcgttcaaacrtatctcagattacacgtctcatgaaattatgttgtacagatgaaacactggtgtagaatggaatttaaaaaaaaacatatctcacttaatatttatgacttacaacagtgatatgtgagacttacaatcaaatggtctggacaatcaatttcctctttcttcataaagtcagacttagtaggctacttgtatgcagtaatatacagtaggttcaacaaacactatgctgaagcacttgagaaaataactatttagaaattacagtccgtaactgttgaacttggttwaccataatgccgattgaaatttcattaataggaagaaaaaaacccaaacacctgcttttcactgaattgtactaaatattataattgaagtgatgtcctgtagaacactcaggaatctctctagaatccatacaaaatcagtgtactgctggctttgggcagcctggtctagtgggtggtgaccctgcacatagtaggggtgtttaactaagatgatcattgtggtccttttcaacccaggccattctatgatgattctacgattttatcaataactacataagaacattaagagcattc

SEQ ID NO: 42812 - DNA, 600 bp, Chicken  19866894280197_1
tgaaaaatcctgttttcgttttaaaatgaaaacatccatggcctgctcacacctattataaaaacattactgatgaaattaaagagaaatgagaggctaagatgctagtttgttatttgagattgctctctgctcatctacagctcttctatacagatgatctagtctttgtgtaattttcacactcataacctgaggttagcagggttgcctatatcacattaacaactgtcaagtttgccaaggctcagtatctaaactgactttgaacactcccaatgatagggcatccacagcttytctaggcaaccagttccagtgtctcacaacctcaccaygaaaaatttattccttatatctggtctaaatctatcctccmtcagtttaaagccattgcctcttgtcctgtcacttcaggccctgggagagttccccatctgacagatcaatgtgtgtgacttcgataaacagggagggaacagcagaaagttgaaagagtctgtaggagcataacaaagtatgaaaaagttatcaaagatatgaaacaccttctctgccttcaccatcttgttttccttggatccccccacaacctctctc

SEQ ID NO: 42813 - DNA, 600 bp, Chicken  19866894280197_2
tggcctgctcacacctattataaaaacattactgatgaaattaaagagaaatgagaggctaagatgctagtttgttatttgagattgctctctgctcatctacagctcttctatacagatgatctagtctttgtgtaattttcacactcataacctgaggttagcagggttgcctatatcacattaacaactgtcaagtttgccaaggctcagtatctaaactgactttgaacactcccaatgatagggcatccacagcttytctaggcaaccagttccagtgtctcacaacctcaccaygaaaaatttattccttatatctggtctaaatctatcctccmtcagtttaaagccattgcctcttgtcctgtcacttcaggccctgggagagttccccatctgacagatcaatgtgtgtgacttcgataaacagggagggaacagcagaaagttgaaagagtctgtaggagcataacaaagtatgaaaaagttatcaaagatatgaaacaccttctctgccttcaccatcttgttttccttggatccccccacaacctctctcagatgtggtcatgggaaggcctcagagcataggaaaaa

SEQ ID NO: 42814 - DNA, 600 bp, Chicken  19866894280197_3
taaagagaaatgagaggctaagatgctagtttgttatttgagattgctctctgctcatctacagctcttctatacagatgatctagtctttgtgtaattttcacactcataacctgaggttagcagggttgcctatatcacattaacaactgtcaagtttgccaaggctcagtatctaaactgactttgaacactcccaatgatagggcatccacagcttytctaggcaaccagttccagtgtctcacaacctcaccaygaaaaatttattccttatatctggtctaaatctatcctccmtcagtttaaagccattgcctcttgtcctgtcacttcaggccctgggagagttccccatctgacagatcaatgtgtgtgacttcgataaacagggagggaacagcagaaagttgaaagagtctgtaggagcataacaaagtatgaaaaagttatcaaagatatgaaacaccttctctgccttcaccatcttgttttccttggatccccccacaacctctctcagatgtggtcatgggaaggcctcagagcataggaaaaaacaatggggtacaaaaaaaaaaagataacagccaccagaaa

SEQ ID NO: 42815 - DNA, 599 bp, Chicken  19866894280207_1
  misc_feature (1)..(6): n is any nucleotide
nnnnnntatctttaatatttaccttaggacaatgttttcctttgcagataccatggacaaaattgaaaacacatcccatctgtttggtgagttctgagatcagctcctaaatatacagtacagagcagaattcatctcaaatatttgtatctttctctcaaattgattctaaaagtagttgaagcattaatggttgcttactaactgaacctcttcaagaaggttgatatggttaacattaacaggattacagtaacaacctaggatacagcttttatataaataggatgtagaagatgraaataggactccaaaccagagwaaagtaaatgcaagaaatagcgtttattttgttctttattttttttagcaagtatactgggaaatgtggttagcatgagaaataatttacttgatggtggctaaactttcttaattggatttgcttaccaatgaattgtctgttaacagttgtgtttcctgaatttgctgtgagttcctgaatgtgcttctaattcctcagctctgaatcagacttggaaaaaaaaacatgttttaaatacttgatggatttactagtgacctagttgtagtgcact

SEQ ID NO: 42816 - DNA, 600 bp, Chicken  19866894280207_2
cttaggacaatgttttcctttgcagataccatggacaaaattgaaaacacatcccatctgtttggtgagttctgagatcagctcctaaatatacagtacagagcagaattcatctcaaatatttgtatctttctctcaaattgattctaaaagtagttgaagcattaatggttgcttactaactgaacctcttcaagaaggttgatatggttaacattaacaggattacagtaacaacctaggatacagcttttatataaataggatgtagaagatgraaataggactccaaaccagagwaaagtaaatgcaagaaatagcgtttattttgttctttattttttttagcaagtatactgggaaatgtggttagcatgagaaataatttacttgatggtggctaaactttcttaattggatttgcttaccaatgaattgtctgttaacagttgtgtttcctgaatttgctgtgagttcctgaatgtgcttctaattcctcagctctgaatcagacttggaaaaaaaaacatgttttaaatacttgatggatttactagtgacctagttgtagtgcactgatgtctgtactacttttcctga

SEQ ID NO: 42817 - DNA, 600 bp, Chicken  19866894280225_1
ctggaggagtttgggattccgtatgtggtgagtaatgcttcattcttgagaaggtggaaccagtatgaaaacttgacttgtgttagattacctttagcatataactataaaggaatgtacctcctacctgagcttttgcaagctgtcctacctgactagtaatactgtccactccgccttctttattgataataaaatagatccaaggtttgtctggggggcatctgagggattttttatttatttattggcattattttcagtgctcagctcaaggaacatgataaggtctacagcctmtgcaggctgtggtagtgttctggtaaactgtattgtaccacttctcsyaattagctgggagttttcagcctgccctgcaaaatgctccaggaactcttccagatgttccaggctagcagcaaaatcatmatcttttcctctcccaatcttctctttctggatccatacagatggtattaacaaaaattgaccgagcttccaagggactgttattaaagaatgttytggggatccagaagttcgtaaaggagaaaactcagggatgttttcctcagctattcctggtcaggtaatgatttg

SEQ ID NO: 42818 - DNA, 600 bp, Chicken  19866894280225_2
gagaaggtggaaccagtatgaaaacttgacttgtgttagattacctttagcatataactataaaggaatgtacctcctacctgagcttttgcaagctgtcctacctgactagtaatactgtccactccgccttctttattgataataaaatagatccaaggtttgtctggggggcatctgagggattttttatttatttattggcattattttcagtgctcagctcaaggaacatgataaggtctacagcctmtgcaggctgtggtagtgttctggtaaactgtattgtaccacttctcsyaattagctgggagttttcagcctgccctgcaaaatgctccaggaactcttccagatgttccaggctagcagcaaaatcatmatcttttcctctcccaatcttctctttctggatccatacagatggtattaacaaaaattgaccgagcttccaagggactgttattaaagaatgttytggggatccagaagttcgtaaaggagaaaactcagggatgttttcctcagctattcctggtcaggtaatgatttggtttttttcttgctgctgttccttatggatgatgatttgcactgaca

SEQ ID NO: 42819 - DNA, 600 bp, Chicken  19866894280225_3
agaaggtggaaccagtatgaaaacttgacttgtgttagattacctttagcatataactataaaggaatgtacctcctacctgagcttttgcaagctgtcctacctgactagtaatactgtccactccgccttctttattgataataaaatagatccaaggtttgtctggggggcatctgagggattttttatttatttattggcattattttcagtgctcagctcaaggaacatgataaggtctacagcctmtgcaggctgtggtagtgttctggtaaactgtattgtaccacttctcsyaattagctgggagttttcagcctgccctgcaaaatgctccaggaactcttccagatgttccaggctagcagcaaaatcatmatcttttcctctcccaatcttctctttctggatccatacagatggtattaacaaaaattgaccgagcttccaagggactgttattaaagaatgttytggggatccagaagttcgtaaaggagaaaactcagggatgttttcctcagctattcctggtcaggtaatgatttggtttttttcttgctgctgttccttatggatgatgatttgcactgacaa

SEQ ID NO: 42820 - DNA, 600 bp, Chicken  19866894280225_4
gagcttttgcaagctgtcctacctgactagtaatactgtccactccgccttctttattgataataaaatagatccaaggtttgtctggggggcatctgagggattttttatttatttattggcattattttcagtgctcagctcaaggaacatgataaggtctacagcctmtgcaggctgtggtagtgttctggtaaactgtattgtaccacttctcsyaattagctgggagttttcagcctgccctgcaaaatgctccaggaactcttccagatgttccaggctagcagcaaaatcatmatcttttcctctcccaatcttctctttctggatccatacagatggtattaacaaaaattgaccgagcttccaagggactgttattaaagaatgttytggggatccagaagttcgtaaaggagaaaactcagggatgttttcctcagctattcctggtcaggtaatgatttggtttttttcttgctgctgttccttatggatgatgatttgcactgacaaagctacctttgtctggaactgtgttagcagtagcaagctataactgattacattagaagtgcttactctgttaatgttgta

SEQ ID NO: 42821 - DNA, 600 bp, Chicken  19866894280225_5
tgagggattttttatttatttattggcattattttcagtgctcagctcaaggaacatgataaggtctacagcctmtgcaggctgtggtagtgttctggtaaactgtattgtaccacttctcsyaattagctgggagttttcagcctgccctgcaaaatgctccaggaactcttccagatgttccaggctagcagcaaaatcatmatcttttcctctcccaatcttctctttctggatccatacagatggtattaacaaaaattgaccgagcttccaagggactgttattaaagaatgttytggggatccagaagttcgtaaaggagaaaactcagggatgttttcctcagctattcctggtcaggtaatgatttggtttttttcttgctgctgttccttatggatgatgatttgcactgacaaagctacctttgtctggaactgtgttagcagtagcaagctataactgattacattagaagtgcttactctgttaatgttgtattgcactgtggggatgtaatttaatgcagccagtggttgagtttgcttgtcttgctccaagatamtgcagcatcaggcactgaacatacctttgtt

SEQ ID NO: 42822 - DNA, 542 bp, Chicken  19866894280225_6
gcttccaagggactgttattaaagaatgttytggggatccagaagttcgtaaaggagaaaactcagggatgttttcctcagctattcctggtcaggtaatgatttggtttttttcttgctgctgttccttatggatgatgatttgcactgacaaagctacctttgtctggaactgtgttagcagtagcaagctataactgattacattagaagtgcttactctgttaatgttgtattgcactgtggggatgtaatttaatgcagccagtggttgagtttgcttgtcttgctccaagatamtgcagcatcaggcactgaacatacctttgtttccacagttctgtggagttttcaggagtccacttgctaaggtgttttgtggcccatgttactggaaacctgcctactgtagaggccagctgaaaagtctggctcctgatctgctcagctcatctggaacaaaaggtactaaaactagaggtctggatttttgttgtaagaacctgaagcaccaacattatttttggataaacttgtataaa

SEQ ID NO: 42823 - DNA, 600 bp, Chicken  19866894280228_1
gaatgctgctggttttttggagcagtatctgcccatctcccaaatcagagcaatgtgccaccattcccaaggtttgctccagctctgcgttgttcttggactctgatgcttgctttcattgcagagcccctccctcacttcaggttgagcagaacttccatgaaaaacactacggagcacttggaagagaggcaatgaaataaacctcatccccaaccacgctgctccgcatcggcttcagacctcatggaaagttgggaatctctcctctctgctccagcatttgtcagatcatggcartgttttacttcttcaagcacttgaggggaaaagcacgtcccagaatcccactctgagaggaggaaacctctttcacaacagctagagcaggaaccaggcgcggctggagcagatttggggaggttttggtggctcccatggcactttgtgagcaaaaaggacatcggtgaaggtgcacctttaggagaaaccctgccycgtttgggcactttttggtgcatcgtttctgtgccaatcctcaggagcagagagttgggcagcacacccaggaccatggcacagctgccattagcatctcac

SEQ ID NO: 42824 - DNA, 600 bp, Chicken  19866894280228_2
aataaacctcatccccaaccacgctgctccgcatcggcttcagacctcatggaaagttgggaatctctcctctctgctccagcatttgtcagatcatggcartgttttacttcttcaagcacttgaggggaaaagcacgtcccagaatcccactctgagaggaggaaacctctttcacaacagctagagcaggaaccaggcgcggctggagcagatttggggaggttttggtggctcccatggcactttgtgagcaaaaaggacatcggtgaaggtgcacctttaggagaaaccctgccycgtttgggcactttttggtgcatcgtttctgtgccaatcctcaggagcagagagttgggcagcacacccaggaccatggcacagctgccattagcatctcaccccaccaccgccccactgcacagatctgtgcagcagatgaacagcagcacgaaatgtaggtcaggcaggggggggattttccatacacagcagtgctggatggaggcacggacacggaggaaccatcagtggcagcatgcagggaaaggacaggcagcttcctctcccacagcattgcctggtcgatgctctggggct

SEQ ID NO: 42825 - DNA, 600 bp, Chicken  19866894280231_1
acaggaagcctgaaggggaagcaaaatgtatgcctttgatgcaacagtgcacccatttgagcagcttctgggtatagttgccttgtctttctcatctctgccagagagccacgcaggcaattatttacatgactctgctgagccaccctgctgctttacacgcctcatcctctggccttgcaaacccatagacatttccctctccggcttctgatccttctataagtgcagtgaggtgccttccgctccccatgacccggtctgtggtggcccacacaaggctgtccaaagggtggtggytgtgtcctgcccaggcagcagcacatggcctggtaccaaagggagcacagttttccttcaaggtgcatggagacaagagtaaggtgcagctgggcatggtgttggagctggcacggtccctctcatcacagggggaatctcacttccttccagacagcaaaggatgtgctttgagctactgcgtcctgctcttcctaatttcaccttcctaaagtgctgcatatagttccccttccaccctcactgtcctgctcccctaagccgatagatcctgaagtgggccgttctcaggtatcctcc

SEQ ID NO: 42826 - DNA, 600 bp, Chicken  19866894280237_1
agcttcactcacattttgcatgctgaaatcaaaagcagcagtccccaaaaccagctgctgttcagtcttagagatagctggagcttttgggattcttaaacttggatatcaaagcttcccagtgctccaaaacagctttgaatcattctcaggtgtgcttcagaggtgaatgccctgcagcctagctcataccttaagcattttaccttaagcctggtatttcttactgctgtgcctggaggagctgatcagccagatactcccagagcataactagagaactgggctcagctgaatgtytttgcttaaagaatttcaaactagtatctccactattgccagagcgtgtcaraactgaatctgcacacagraatcaagcatttctagggcttgagagagagcatgtgtgtttgtatcagcactgcctgtctaatagccactttggtcatccaggaaaggaaaaggctgggtgctgatccagtagttatttaacacgaataaagcagtggcttggacagtgctgattgtctaaaacactgtgttatggagtcatgcagtcacgtgtgttcaactccaggatcagtaggagtgcattatcat

SEQ ID NO: 42827 - DNA, 600 bp, Chicken  19866894280237_2
agctgctgttcagtcttagagatagctggagcttttgggattcttaaacttggatatcaaagcttcccagtgctccaaaacagctttgaatcattctcaggtgtgcttcagaggtgaatgccctgcagcctagctcataccttaagcattttaccttaagcctggtatttcttactgctgtgcctggaggagctgatcagccagatactcccagagcataactagagaactgggctcagctgaatgtytttgcttaaagaatttcaaactagtatctccactattgccagagcgtgtcaraactgaatctgcacacagraatcaagcatttctagggcttgagagagagcatgtgtgtttgtatcagcactgcctgtctaatagccactttggtcatccaggaaaggaaaaggctgggtgctgatccagtagttatttaacacgaataaagcagtggcttggacagtgctgattgtctaaaacactgtgttatggagtcatgcagtcacgtgtgttcaactccaggatcagtaggagtgcattatcatctgcgttctgtgttcagtcctctgatcctaaatcagctggtagcctggtgat

SEQ ID NO: 42828 - DNA, 600 bp, Chicken  19866894280237_3
agatagctggagcttttgggattcttaaacttggatatcaaagcttcccagtgctccaaaacagctttgaatcattctcaggtgtgcttcagaggtgaatgccctgcagcctagctcataccttaagcattttaccttaagcctggtatttcttactgctgtgcctggaggagctgatcagccagatactcccagagcataactagagaactgggctcagctgaatgtytttgcttaaagaatttcaaactagtatctccactattgccagagcgtgtcaraactgaatctgcacacagraatcaagcatttctagggcttgagagagagcatgtgtgtttgtatcagcactgcctgtctaatagccactttggtcatccaggaaaggaaaaggctgggtgctgatccagtagttatttaacacgaataaagcagtggcttggacagtgctgattgtctaaaacactgtgttatggagtcatgcagtcacgtgtgttcaactccaggatcagtaggagtgcattatcatctgcgttctgtgttcagtcctctgatcctaaatcagctggtagcctggtgattagggcaccctgcctgcaa

SEQ ID NO: 42829 - DNA, 600 bp, Chicken  19866894280237_4
ggcttgagagagagcatgtgtgtttgtatcagcactgcctgtctaatagccactttggtcatccaggaaaggaaaaggctgggtgctgatccagtagttatttaacacgaataaagcagtggcttggacagtgctgattgtctaaaacactgtgttatggagtcatgcagtcacgtgtgttcaactccaggatcagtaggagtgcattatcatctgcgttctgtgttcagtcctctgatcctaaatcagctggtagcctggtgattagggcaccctgcctgcaagtgaggaaactcttgygctctctatgtgctgcacaggttttgcccagtctggatgtgcatcctgaacactgtgccctttgtgcagtgttttcctaaaggcygcagtttgtatgaagrcttgagtgctccatttcyctgcatgacatttaagttaccatttaccctctccattctggaaaatttatatgaatttttaagactgtcaaaataaagctggttatttagataagaatatttacactacctgaaatcctgtgagagagggaagagttaagatgtttcttcagtcaggatctgtggcggtctgtgaggcaat

SEQ ID NO: 42830 - DNA, 595 bp, Chicken  19866894280237_5
ctgatccagtagttatttaacacgaataaagcagtggcttggacagtgctgattgtctaaaacactgtgttatggagtcatgcagtcacgtgtgttcaactccaggatcagtaggagtgcattatcatctgcgttctgtgttcagtcctctgatcctaaatcagctggtagcctggtgattagggcaccctgcctgcaagtgaggaaactcttgygctctctatgtgctgcacaggttttgcccagtctggatgtgcatcctgaacactgtgccctttgtgcagtgttttcctaaaggcygcagtttgtatgaagrcttgagtgctccatttcyctgcatgacatttaagttaccatttaccctctccattctggaaaatttatatgaatttttaagactgtcaaaataaagctggttatttagataagaatatttacactacctgaaatcctgtgagagagggaagagttaagatgtttcttcagtcaggatctgtggcggtctgtgaggcaatgaatacttttggaaatgtagaaatggttgcacctcccttctcttcccaacatcctcttcttgtattaatatgcctgttcc

SEQ ID NO: 42831 - DNA, 579 bp, Chicken  19866894280237_6
ttaacacgaataaagcagtggcttggacagtgctgattgtctaaaacactgtgttatggagtcatgcagtcacgtgtgttcaactccaggatcagtaggagtgcattatcatctgcgttctgtgttcagtcctctgatcctaaatcagctggtagcctggtgattagggcaccctgcctgcaagtgaggaaactcttgygctctctatgtgctgcacaggttttgcccagtctggatgtgcatcctgaacactgtgccctttgtgcagtgttttcctaaaggcygcagtttgtatgaagrcttgagtgctccatttcyctgcatgacatttaagttaccatttaccctctccattctggaaaatttatatgaatttttaagactgtcaaaataaagctggttatttagataagaatatttacactacctgaaatcctgtgagagagggaagagttaagatgtttcttcagtcaggatctgtggcggtctgtgaggcaatgaatacttttggaaatgtagaaatggttgcacctcccttctcttcccaacatcctcttcttgtattaatatgcctgttcc

SEQ ID NO: 42832 - DNA, 561 bp, Chicken  19866894280237_7
tggcttggacagtgctgattgtctaaaacactgtgttatggagtcatgcagtcacgtgtgttcaactccaggatcagtaggagtgcattatcatctgcgttctgtgttcagtcctctgatcctaaatcagctggtagcctggtgattagggcaccctgcctgcaagtgaggaaactcttgygctctctatgtgctgcacaggttttgcccagtctggatgtgcatcctgaacactgtgccctttgtgcagtgttttcctaaaggcygcagtttgtatgaagrcttgagtgctccatttcyctgcatgacatttaagttaccatttaccctctccattctggaaaatttatatgaatttttaagactgtcaaaataaagctggttatttagataagaatatttacactacctgaaatcctgtgagagagggaagagttaagatgtttcttcagtcaggatctgtggcggtctgtgaggcaatgaatacttttggaaatgtagaaatggttgcacctcccttctcttcccaacatcctcttcttgtattaatatgcctgttcc

SEQ ID NO: 42833 - DNA, 600 bp, Chicken  19866894280255_1
caggaaaggatggagaagagtcactgaaaaatctttcagtgcgtgatagtagggagtgccagaattatctagaaatgtttactgtgatgcatcttaaaacatgttttccgtataaacttgcttgtttttagtttcagaggaagtcaacagaaggcacctcttacctgctgtttgcattggccatgctgggaaactgtacgtatggcctcagccttgtcctaaagatgcctgctgctgaatctgtccgggccctcttctttttacaccatcttccatggctccttgggagctttggagttytgttcctggatgtttttgtatccttttcctgtttgttagaaccttgtcaggttggacttgttcatatttactgatgatatcaagttcatatgaaatgtatacgtgaaagctgcattgcagaggttaagttctgtcttttagcatctttgcacttagctctattaactccaggtatgaaatgagatagaatgaagagtaatttcaacactgtgccatgctaaaggacgttgtgttaatctgttccatattccaaggaagttcttcaccaggtttacctggagcagttcaagaggttaggat

SEQ ID NO: 42834 - DNA, 600 bp, Chicken  19866894280255_2
gtatacgtgaaagctgcattgcagaggttaagttctgtcttttagcatctttgcacttagctctattaactccaggtatgaaatgagatagaatgaagagtaatttcaacactgtgccatgctaaaggacgttgtgttaatctgttccatattccaaggaagttcttcaccaggtttacctggagcagttcaagaggttaggattcccaggcactgaggttgtctttctgattaaagtaatgtgataagccattgcaatgtgcctaatgacgggacagctgaccctttgggtggactctsaagtcctgctgtcattcagaacagccatctgtgctttttgcatctacagccacgatggtttgagtgggcagtttagtaaaacgtttgcatkgtgggaacacaacagttgtgtgactgaatggtgctttgcagcctgttttgagataattttgtagttctacctgtagagacaatacagactgtagggggtcagggctgctcgttagcccagctggctgctctgagcactcaggccttttgttccatatgtgaagtagttactttttctccctccctacccccagatggaagcataaaact

SEQ ID NO: 42835 - DNA, 600 bp, Chicken  19866894280255_3
aatgaagagtaatttcaacactgtgccatgctaaaggacgttgtgttaatctgttccatattccaaggaagttcttcaccaggtttacctggagcagttcaagaggttaggattcccaggcactgaggttgtctttctgattaaagtaatgtgataagccattgcaatgtgcctaatgacgggacagctgaccctttgggtggactctsaagtcctgctgtcattcagaacagccatctgtgctttttgcatctacagccacgatggtttgagtgggcagtttagtaaaacgtttgcatkgtgggaacacaacagttgtgtgactgaatggtgctttgcagcctgttttgagataattttgtagttctacctgtagagacaatacagactgtagggggtcagggctgctcgttagcccagctggctgctctgagcactcaggccttttgttccatatgtgaagtagttactttttctccctccctacccccagatggaagcataaaactaccagtatttatttacaaaaaaataaataaaaatagaatttgatctggacaacccttaccgtacattatgtgcatatttggagatgccttt

SEQ ID NO: 42836 - DNA, 599 bp, Chicken  19866894280260_1
  misc_feature (1)..(45): n is any nucleotide
nnnnnnnnnnnnnnnnnnnnnnnnnnnnnnnnnnnnnnnnnnnnngagccacattccttcccgagcagagtgccagcagtgctctgcatctctgctgctaccccagggatcaaagcctctgggggagagcacgtccttgtgctgggagtgctggcaccaggctcatgccacccttctgttacccacggtgggatgggataggatgggctgggatggaatgggatgagatggaacaggacagagacagcaccaacagtgctactgtgctgcacattccatccagcttctaacggcctccayttcatgccacggtgctccagggacagcctgcagccttccaccaccacagagcagcctgaactggaggcactggcagcatcaacacgagtgctgcagaggtgcagggtgacagctgggcagcgctgctggctcaccccagctcaccaaaccacacagagcctggcctgccggaccaccccaccgccacgccatggcaagaagcccgaccacagctttctgaagtgtttgtccagttttctctttgcaaatatcgctcctttccctaggcaaggagagctggcagcccctcccctggtcct

SEQ ID NO: 42837 - DNA, 600 bp, Chicken  19866894280291_1
acttcatgaataacaatggacttatactgctattcagtaggcatgactatgtcccagacacctctctcaacatcatttttaaatattttactgatctttgagtatttacagagctcagacagagtctccctttctcttttaggtaagaacaattccatcagatgaatcacaaatatttgcacatcagcaaaccaaatccctgtgatacaatcctttacaatacacagcatttacaaaaaataaattaatgaagagtaaaacagaggaaagtgaactctacttcccctgtaagagcaagcygcttacttcattggaaattacactattttttccccattatgtttgtaactgacagactgcatgacgttttccctttacctggcatgttaaggctcctgcagttggactaagtgctataaaggagcgagcagaactgtgacttaagtataatgaatgatctgtcctcacctctgcagttcccattgctcacatgagcagtttgacagtgtgccagttctgtacagatctggccacccttttcccactgttacctttaacttagccaagtgaaagcacttatgttctggacaacaagaaaaa

SEQ ID NO: 42838 - DNA, 600 bp, Chicken  19866894280308_1
aggtccctctataaccacctcagtttggtcaggtttaacatctactttgcaagtactatcattttctgactatacaactgtttttcttaaaagcactcaaggaggcccaagtgtaagattttcaaatattgctgagttgcttatatgacacaactagcagatttcttaaacacagattacagtgagagcttatatacacagagctgtgcatatctggtgacagaaactgtggaaaaaacatagcaacacgaaaaccagaggataccgtaacagtaaaacttttccttctcctcctaaaarctaatagtaatactaacgcacatgttgagtagcagcagtttgtccacatgccagaggaaaatcacacaagccaagccttccaagagaaaaaacagccctttggataactgaacactttgtcctggcattagcgttgagagttgttattcttctcctgtgtgactacagtaatcttgaatgtctgcttacccttctgaggtccatgcaagaatctatttataatggtgggacagcagtgctagtgcatcatgacacatggcctcttactggaaacgttccttgatttactagcaacagaat

SEQ ID NO: 42839 - DNA, 600 bp, Chicken  19866894280316_1
attttcctggatttttatcattctacatcaaacactatgattcatcctccacttcaaatgacaaatagaagcttaaggggaagataacatcttttcctgtgaaagtatctgttatttcctgtcctgaataacaaggtttctaaagattaaatgaacttttggaaaaagcacagcaagttcataaaaagcccttaatctgaatgctataggaagccaaattacaaagttttttttccacatttcagacatactgaattagatacaaacaatatcattcataatgcgcctattttcacatcsgagaaaatgacagatactaaaggcaaatgtcccaastcagacaaatcaaaataccaaatactgtaccatttaatgagccaattggtttcagaggtgtgggacaacctgtagcttgttctgcctaccaagatgcaggtttcttctgtctaaaaccgatgctgttcattatgctgtaaacaagagaaagaagagcctgaagaggtcagtaggagaagcaagcattatcaaggctgatgggaaagttaaaagaattttctcccaccatcttgtttaagatctaactgttctaataacaggact

SEQ ID NO: 42840 - DNA, 600 bp, Chicken  19866894280316_2
atgattcatcctccacttcaaatgacaaatagaagcttaaggggaagataacatcttttcctgtgaaagtatctgttatttcctgtcctgaataacaaggtttctaaagattaaatgaacttttggaaaaagcacagcaagttcataaaaagcccttaatctgaatgctataggaagccaaattacaaagttttttttccacatttcagacatactgaattagatacaaacaatatcattcataatgcgcctattttcacatcsgagaaaatgacagatactaaaggcaaatgtcccaastcagacaaatcaaaataccaaatactgtaccatttaatgagccaattggtttcagaggtgtgggacaacctgtagcttgttctgcctaccaagatgcaggtttcttctgtctaaaaccgatgctgttcattatgctgtaaacaagagaaagaagagcctgaagaggtcagtaggagaagcaagcattatcaaggctgatgggaaagttaaaagaattttctcccaccatcttgtttaagatctaactgttctaataacaggactgaaatcaagtttagtcattttgttcttgacatgaaa

SEQ ID NO: 42841 - DNA, 600 bp, Chicken  19866894280324_1
gccctgggtgcgtgtgactgatcgtatggcgtcagcgacgcccgcagaaagacagcgcgtcacggaccgatagctgtggaagatgtgccacctggtggaaaaccagcagcagctcagggggctggcagctcttcagaggcggcgaggaaaggcgtttcgatagcttttgaaaatcgcgtgttctgacaccggagcagccaaaacaaacctgtgaggaggggaggagaggagggaaaagcacagtctctgatgtggccacgtgtagcctacgcagacctggcagctcacaaagagaacacsgtaaaagcagcagtcttcagcttgcagacctgacttgggcaagatttaccttgaagtcagtggaagttctgcctgaatgaaaaacaggactggtccagcatgagtttggcctcaccgtgcccttgcagagcaacgcattgcattcgggaaggacacgcaagttccagcgctaaaccaatgacaaagctgattttgaaatggttttaatgatagacaatctgcataccaattgactcatccgcgcatacgaatgcttggaacaataccagagaaatatgtagaaagtctgtaatgctctat

SEQ ID NO: 42842 - DNA, 600 bp, Chicken  19866894280328_1
ttgctaaggttggaaaagacccacaggatcatccagtccaaccattcacccttcaccaatggttctcgctaaaccatgtccctcaacacaacatccaaactccaccacccctctgggcagcctattccagtgcctgccaccctttcagagaagtagtaatatcagcacagtctttggtaggctttgagcaagcagtgcccagcccagagcagggcagaatggcaccaatcccacatcaggagcaggccaaccacagggagttacatacaggttgagaagggagggcttttatacctgtgratccaaaattatttggcagctcctgaacaaggtaacatccactctgcaatatgattgactgaaacacctcttgctcttcttttcactaatcagctaattaggtgggttttttttttcttactgcaaaatactgatgcacttgaaaaataactatgattataggatagtacatcaaaattattacagtatctcaaattactagaccaactcacatttccacaaaaatcctggaaagtagacaaagctttttaagtagtactcttcggagaaagttgatattgttctcccttctcttgacca

SEQ ID NO: 42843 - DNA, 600 bp, Chicken  19866894280329_1
cttctttaaaggtgagcaatttcaggttataattttctcatctgtaaaaaatgatttttctatagaatggtcggtttgctttaaatagctataactggagactgtagaagaacagccttctggtggggaaaaagacaaaccaacagctgtgattcaggtgtaaacaagaaatttcttataacatacatttcacattatttgctttaaatatcttttaggagtgacaaagtaaaaaaaggaaaaagtatgtgtaaatcctgtgaagcggaagcatccttcagcctgcctcaggcagtcctyttcaacaaggcctggaacattgaattgattgatactagccagatctaaagtacgatataaggaattagagaatttatgccaccctttccatgtattcttacacaacattgctggaagtcctattcttctactccctgaaacacacaaataatgatgtctttcccaaaaatacgtattgacttacccactcttcccaatttgctatcctttcagccctttcctcagcttctctacgctcccgttcagctttttctttagcttctctggcaaggcattcctcagctgctttacgttccaaac

SEQ ID NO: 42844 - DNA, 600 bp, Chicken  19866894280330_1
agcttagcagctgcattcaagtagaaacaagtcacccttttctgcagaaatactaaggttttcctcacacggtagaatagaaggtgtagtatctcagatcttcagcctgtgaatgagcaccagcacagtgtaaaatgcttagcggtagacaggcttatcttaattaagaaatgaattactcatattttcaggaatttgtcatgctttttagcagagatttttatggtgtgtgttgtttttgtttctaatgctttatgtatgtaattccttttgaaacttttgctgcttacttttgtttcygatttgtcctcattttccatgaaactgacagagcagaaaatgaatttacctttgtatagattttttcttaagaaaaaacaggtcatcgtgagtgagatcacacagcatgtgtaggatgacaggggaatcaggcccaatcaggctaaaaggcttgtcctatttgaccaacctgatctccttctatgaccaggtgacctgtctggtggatgagggaaaggctgttgatgtagtctaccttgactttagcaaaacttttcatactgtctcctacagtttttctctttgggaagctggcagccc

SEQ ID NO: 42845 - DNA, 600 bp, Chicken  19866894280332_1
tttggatagctacaaaaccacaaatattaaagtgagagccaactggtagtggcacaacacagacgaatgctaaaaccagcctacgtgaggtcatttccagtgccagagtctgattacactgagcagaaaaaccatcaccacataggccgtaattcaacaaggtgcttaaaagtgtctcattcaagcatgggaattatgcaagttgtgcatgactcagcaagtaccttgctgaactaaggtcttcagcgtacaaatacagttacagtatcatagactcacaaaggttggagaagacctccragatcacccagtccaaccataattggaattatcacattaaggaaagcatgagagctgtaactgctagaaaaatcttcagtcaaaaaacagtttgctgatccaaaccattgcgctgcaaactgaaccctgcatacgtacagcccattccttgaaattcagaaagtgcatattagtgtattctaaatgtgcacgcagctttagccagcatgcctgagattcatcaacccgatgacataaattctccacttaatcagacaaaacgacaccacacagctagctaattgcatgaatcctgcaatc

SEQ ID NO: 42846 - DNA, 600 bp, Chicken  19866894280338_1
tagtaaaatccaatttgcaaagaacctgcttctggaaattaggcgttaccttttggtggtaaaagtctaaatatgggaaatcatgaagcactgctgggagtgctgtgaaagagaaataagtgtttgtaatgacaagctgtaggtcggtgctgatgctgaaataagcggtcttgatatcctgtttttcaatcctgtccttacaccccgtgtgctcacacaaccagtaaactgaattgagaagctgatcaaaatcagtaatacttttctttccccataggtatcttggttgatttttagccysttcccaaagctcagaatgaacctcgtaccaatggcacgtmctgtattgcaagaattctgtcgactatatgcttccatgcacagatgcrggttgtttgatatggttttgcttttttttgttgtttaagtgtttgactcattcctcacatttgcaaatagtgaccgttcctgaagtcttatgctgtgcttccagccctggctgtgtttyggaggctttctctgaatactgggttccttctgctctggtagtgtgatgcaggttgctcaggaaagccatgaaataatatctcatagctgtcc

SEQ ID NO: 42847 - DNA, 600 bp, Chicken  19866894280338_2
agtaaaatccaatttgcaaagaacctgcttctggaaattaggcgttaccttttggtggtaaaagtctaaatatgggaaatcatgaagcactgctgggagtgctgtgaaagagaaataagtgtttgtaatgacaagctgtaggtcggtgctgatgctgaaataagcggtcttgatatcctgtttttcaatcctgtccttacaccccgtgtgctcacacaaccagtaaactgaattgagaagctgatcaaaatcagtaatacttttctttccccataggtatcttggttgatttttagccysttcccaaagctcagaatgaacctcgtaccaatggcacgtmctgtattgcaagaattctgtcgactatatgcttccatgcacagatgcrggttgtttgatatggttttgcttttttttgttgtttaagtgtttgactcattcctcacatttgcaaatagtgaccgttcctgaagtcttatgctgtgcttccagccctggctgtgtttyggaggctttctctgaatactgggttccttctgctctggtagtgtgatgcaggttgctcaggaaagccatgaaataatatctcatagctgtcct

SEQ ID NO: 42848 - DNA, 600 bp, Chicken  19866894280338_3
ggcgttaccttttggtggtaaaagtctaaatatgggaaatcatgaagcactgctgggagtgctgtgaaagagaaataagtgtttgtaatgacaagctgtaggtcggtgctgatgctgaaataagcggtcttgatatcctgtttttcaatcctgtccttacaccccgtgtgctcacacaaccagtaaactgaattgagaagctgatcaaaatcagtaatacttttctttccccataggtatcttggttgatttttagccysttcccaaagctcagaatgaacctcgtaccaatggcacgtmctgtattgcaagaattctgtcgactatatgcttccatgcacagatgcrggttgtttgatatggttttgcttttttttgttgtttaagtgtttgactcattcctcacatttgcaaatagtgaccgttcctgaagtcttatgctgtgcttccagccctggctgtgtttyggaggctttctctgaatactgggttccttctgctctggtagtgtgatgcaggttgctcaggaaagccatgaaataatatctcatagctgtcctctgtacttagccttttacaagctgtcaatatttaggagtt

SEQ ID NO: 42849 - DNA, 600 bp, Chicken  19866894280338_4
actgctgggagtgctgtgaaagagaaataagtgtttgtaatgacaagctgtaggtcggtgctgatgctgaaataagcggtcttgatatcctgtttttcaatcctgtccttacaccccgtgtgctcacacaaccagtaaactgaattgagaagctgatcaaaatcagtaatacttttctttccccataggtatcttggttgatttttagccysttcccaaagctcagaatgaacctcgtaccaatggcacgtmctgtattgcaagaattctgtcgactatatgcttccatgcacagatgcrggttgtttgatatggttttgcttttttttgttgtttaagtgtttgactcattcctcacatttgcaaatagtgaccgttcctgaagtcttatgctgtgcttccagccctggctgtgtttyggaggctttctctgaatactgggttccttctgctctggtagtgtgatgcaggttgctcaggaaagccatgaaataatatctcatagctgtcctctgtacttagccttttacaagctgtcaatatttaggagttctccatatgcagaggctcggtttgatctgcaagtgaatccagagagga

SEQ ID NO: 42850 - DNA, 575 bp, Chicken  19866894280338_5
gtgctcacacaaccagtaaactgaattgagaagctgatcaaaatcagtaatacttttctttccccataggtatcttggttgatttttagccysttcccaaagctcagaatgaacctcgtaccaatggcacgtmctgtattgcaagaattctgtcgactatatgcttccatgcacagatgcrggttgtttgatatggttttgcttttttttgttgtttaagtgtttgactcattcctcacatttgcaaatagtgaccgttcctgaagtcttatgctgtgcttccagccctggctgtgtttyggaggctttctctgaatactgggttccttctgctctggtagtgtgatgcaggttgctcaggaaagccatgaaataatatctcatagctgtcctctgtacttagccttttacaagctgtcaatatttaggagttctccatatgcagaggctcggtttgatctgcaagtgaatccagagaggaagggaatttgagaggagagcaaaatgagtgggctgttcgctgtgttctcagagcttctcagctgctgctcccgctctgtcttgcagcacagaat

SEQ ID NO: 42851 - DNA, 600 bp, Chicken  19866894280339_1
attaatccaagagtaaatatttttacgttgagacagaacatgcagataccattagtgcctgtgtccatgtaacccatgttttagacagactgtctaattacggggcaatggcgatttccctcttctccttagttagatctttagataacatcagggaaaagaaattgctgccaactaacaccagtatttcacaacccttacacataagtttaaacaattcgtagttgttaccgttcggataggaaattgtctggaaaaaaaaaaaaagatattactgatcttaaatctactcatgttacrgcattttattccagaaattttgcttgcccttatcttcagcaaacagaaacttaaggcctcaaggacatttgaaaatattacagttaagtataagggacaaagtctttttacagcttctatgcttgcaaatctcagcctcgatgcagtcgtcattaccctatctttttttcccttctaattagaaagggaacatagaagtcgatgaagttaagcaaggattatgctggatacaccactctctaggcacagcttaagtgagcctggcatcacaggctgcctacggctgagagggctgcgggg

SEQ ID NO: 42852 - DNA, 600 bp, Chicken  19866894280348_1
actggcaccaaaacagtcaaagcacagagcttaattctctccttaataagacaattaaagaagagtatttggatacggcagcctgcaagtaccaacacagagcactgctatctccaaaggcgtgttgatctgaaggctttatcacagagcatctgtcgcaaccagatgccaccaacacctgagaaaagtgggaaataaagtgggttaatgttgctgtgatgcacacagagattcgcgctgtccaagtttccacttccgagcatgttggagggggcatgataaaagctgtcttacgaatgscttaatatacacggatgaattaggtacacagatgaggatggacacacgcgactgcccatacrgtggaggctcccraccacatcagcctacaagttcccagtcaagcaattctccggtgtttcctcttagcaggcttcaccccacagagctgaaccatagctagagcaaaagataaccacagcgatataagagctaattagtcatttgattagctggcgagaagacagggcactgcaattctgtgacctaaaagcgccaccaatgaccttaaaactccaccttaaggatgtacagaaatct

SEQ ID NO: 42853 - DNA, 600 bp, Chicken  19866894280348_2
gagtatttggatacggcagcctgcaagtaccaacacagagcactgctatctccaaaggcgtgttgatctgaaggctttatcacagagcatctgtcgcaaccagatgccaccaacacctgagaaaagtgggaaataaagtgggttaatgttgctgtgatgcacacagagattcgcgctgtccaagtttccacttccgagcatgttggagggggcatgataaaagctgtcttacgaatgscttaatatacacggatgaattaggtacacagatgaggatggacacacgcgactgcccatacrgtggaggctcccraccacatcagcctacaagttcccagtcaagcaattctccggtgtttcctcttagcaggcttcaccccacagagctgaaccatagctagagcaaaagataaccacagcgatataagagctaattagtcatttgattagctggcgagaagacagggcactgcaattctgtgacctaaaagcgccaccaatgaccttaaaactccaccttaaggatgtacagaaatctgcagcgcacagagagcgaggcagaaatgggatgatgtctaaactccattagctcacaggaag

SEQ ID NO: 42854 - DNA, 595 bp, Chicken  19866894280348_3
cggcagcctgcaagtaccaacacagagcactgctatctccaaaggcgtgttgatctgaaggctttatcacagagcatctgtcgcaaccagatgccaccaacacctgagaaaagtgggaaataaagtgggttaatgttgctgtgatgcacacagagattcgcgctgtccaagtttccacttccgagcatgttggagggggcatgataaaagctgtcttacgaatgscttaatatacacggatgaattaggtacacagatgaggatggacacacgcgactgcccatacrgtggaggctcccraccacatcagcctacaagttcccagtcaagcaattctccggtgtttcctcttagcaggcttcaccccacagagctgaaccatagctagagcaaaagataaccacagcgatataagagctaattagtcatttgattagctggcgagaagacagggcactgcaattctgtgacctaaaagcgccaccaatgaccttaaaactccaccttaaggatgtacagaaatctgcagcgcacagagagcgaggcagaaatgggatgatgtctaaactccattagctcacaggaagtgttgaaa

SEQ ID NO: 42855 - DNA, 599 bp, Chicken  19866894280349_1
  misc_feature (1)..(231): n is any nucleotide
nnnnnnnnnnnnnnnnnnnnnnnnnnnnnnnnnnnnnnnnnnnnnnnnnnnnnnnnnnnnnnnnnnnnnnnnnnnnnnnnnnnnnnnnnnnnnnnnnnnnnnnnnnnnnnnnnnnnnnnnnnnnnnnnnnnnnnnnnnnnnnnnnnnnnnnnnnnnnnnnnnnnnnnnnnnnnnnnnnnnnnnnnnnnnnnnnnnnnnnnnnnnnnnnnnnnnnnnnnnnnnnnnnnnnnntcccagctacaaacatgaggatattcaaaaagatgtttcttacattgttattctatttaatagcatacrctgttgttatagtaactgaggtggagaaacatgtattttagctttatgttgacagtgctcctttaaacaacaaagggaaaagcagaaaatagcrtttcacaagatgttaaaatatagctcaacaaagacaatctttctttttagcagctgtgttgcttctacatgtataatctacacatccatcatttttttctcttcactctgaatttactgttttgtgggagcaggatatgatggtagatgatatataatggcaataattatcacagtattatttagtaatacaaagatattctcca

SEQ ID NO: 42856 - DNA, 599 bp, Chicken  19866894280349_2
  misc_feature (1)..(137): n is any nucleotide
nnnnnnnnnnnnnnnnnnnnnnnnnnnnnnnnnnnnnnnnnnnnnnnnnnnnnnnnnnnnnnnnnnnnnnnnnnnnnnnnnnnnnnnnnnnnnnnnnnnnnnnnnnnnnnnnnnnnnnnnnnnnnnnnnnnnnnnnntcccagctacaaacatgaggatattcaaaaagatgtttcttacattgttattctatttaatagcatacrctgttgttatagtaactgaggtggagaaacatgtattttagctttatgttgacagtgctcctttaaacaacaaagggaaaagcagaaaatagcrtttcacaagatgttaaaatatagctcaacaaagacaatctttctttttagcagctgtgttgcttctacatgtataatctacacatccatcatttttttctcttcactctgaatttactgttttgtgggagcaggatatgatggtagatgatatataatggcaataattatcacagtattatttagtaatacaaagatattctccaaacacaaattttagtgaagtgtagcaaaaattcctsttattccccaaagttttcctaacttttatgttggatttctcattctggttgtattaag

SEQ ID NO: 42857 - DNA, 599 bp, Chicken  19866894280349_3
  misc_feature (1)..(45): n is any nucleotide
nnnnnnnnnnnnnnnnnnnnnnnnnnnnnnnnnnnnnnnnnnnnntcccagctacaaacatgaggatattcaaaaagatgtttcttacattgttattctatttaatagcatacrctgttgttatagtaactgaggtggagaaacatgtattttagctttatgttgacagtgctcctttaaacaacaaagggaaaagcagaaaatagcrtttcacaagatgttaaaatatagctcaacaaagacaatctttctttttagcagctgtgttgcttctacatgtataatctacacatccatcarttttttctcttcactctgaatttactgttttgtgggagcaggatatgatggtagatgatatataatggcaataattatcacagtattatttagtaatacaaagatattctccaaacacaaattttagtgaagtgtagcaaaaattcctsttattccccaaagttttcctaacttttatgttggatttctcattctggttgtattaagaacagcggtgtgaacatcgctttgtcagtcttgacaaaatgcagcacacgtaattgatgtcttctattgtacttttttcctccatgtatagg

SEQ ID NO: 42858 - DNA, 600 bp, Chicken  19866894280349_4
ttttagctttatgttgacagtgctcctttaaacaacaaagggaaaagcagaaaatagcrtttcacaagatgttaaaatatagctcaacaaagacaatctttctttttagcagctgtgttgcttctacatgtataatctacacatccatcatttttttctcttcactctgaatttactgttttgtgggagcaggatatgatggtagatgatatataatggcaataattatcacagtattatttagtaatacaaagatattctccaaacacaaattttagtgaagtgtagcaaaaattcctsttattccccaaagttttcctaacttttatgttggatttctcattctggttgtattaagaacagcggtgtgaacatcgctttgtcagtcttgacaaaatgcagcacacgtaattgatgtcttctattgtacttttttcctccatgtataggctttatgttttcagaagagcagatgacccgaactttataactggcatttgtgcatgccttaatccttcttcctgacattctaatgtttttcatctgtagtcctatttctcctgcttcccatctaatcatgctttttaacattttcactct

SEQ ID NO: 42859 - DNA, 600 bp, Chicken  19866894280353_1
gatcctttgtctgaaatcactgagcaagagaaggacttcctctggagccacaggtattgaggaaaaacaaaaacaaatgcacaaaacaaaaatgacattttgtacaaacaactttcattctctttttcagacactattgtgtaaatacgccagaaattctgcccaaattacttctgtctgttaaatggaattctagagatgaagtggctcaggtaacaaatgtcactgaagaagttttaagttttgaagtagctttaaaatctggatgttttagtgttaaaataacatatgtggtttttwtaagttgaatgaaaacagacgtgagctgctgctgtaactagttgatcattctgtatttgttgtatgcagtctgtttgcctgtttgaggaaaggtcttgtgttctcattgttgagctcagtctgagtcttagctttttcctggtggcattacttgagtccttgttatgttgctgattattatttcaatgtgagattttgtttttattcttggataaaataagtggataaaataagtcaactgacaccaatgaaaaataattttttagaagggagtggcaagtaaacagtttatattcagca

SEQ ID NO: 42860 - DNA, 600 bp, Chicken  19866894280354_1
acaacaatacataatggggcagaggtacacacagatgagatgtcctcataccttgaaccacttaaagccaaaatggttgacctcatgcactgattcattaaacagcttcagacaggcagtgaagtggcagaatggtagagaacaagataaacagaagagaggaaataaaaagcatgcaattaaaagaaaattataatcattttggacaatattaaaatttccaactcacacatatacaatttgtatttggcctaagaatgatatcatcacctgtaaagatcaaaagattaatatcctacrtaaaaaacaaagccttgcattactagaactgcaaagttacctaagggcttcggtcataactctacagaatatagagcaaagcaggcattctcttaagtaacygaagaaatgaaaaatatttgaaggaacgtatccccctcacatttgaggtgaaaaacagccacttgccatcactccgtgacttgaccatatccaataaagaacaataaccgggcaaactatggggcacgatggggcaaaacagctatcttgtagctggaacaagactggctgcttttctgtgtgacgttctatcggtca

SEQ ID NO: 42861 - DNA, 600 bp, Chicken  19866894280354_2
cagcttcagacaggcagtgaagtggcagaatggtagagaacaagataaacagaagagaggaaataaaaagcatgcaattaaaagaaaattataatcattttggacaatattaaaatttccaactcacacatatacaatttgtatttggcctaagaatgatatcatcacctgtaaagatcaaaagattaatatcctacrtaaaaaacaaagccttgcattactagaactgcaaagttacctaagggcttcggtcataactctacagaatatagagcaaagcaggcattctcttaagtaacygaagaaatgaaaaatatttgaaggaacgtatccccctcacatttgaggtgaaaaacagccacttgccatcactccgtgacttgaccatatccaataaagaacaataaccgggcaaactatggggcacgatggggcaaaacagctatcttgtagctggaacaagactggctgcttttctgtgtgacgttctatcggtcattccattgtatacagtaagatgtgccacagagggcagtttagttattctgctggactaagacacagctctcataatcagtgatggtgtgaattagaggtctt

SEQ ID NO: 42862 - DNA, 600 bp, Chicken  19866894280357_1
acataaaggcttacaaagcagccaacagaaagttgactaccccaaacatagtgtctcatttctgtaacttagagcagttagcaatggtagagctagagcttcagaaattgggtagtgttacttggacatctgtatttgttaagcatgttgttgataaccaggaaataaggcacaagatagacaggaaggaactgagactgaaaatggctttttactcatttttagaatttgtctgcacacaaattgtcagtgacatggatgcaagcattaacagctgtagcaatgcccagccacaccagkttttcatgacatatagagctggtaatatgcacatttactctttttgagaaaaccaagatggaacctgagcaaaacagcataacgaacaacgtaataatgaagtctccaagtaagaaattactactgcgtagctttggaattaacccagtgacaactgagtttgagtagaattcaaaaggatatttcagcaaaagccacaagctcagttggtgagaacaaagtcacatatagcaaggttacctactgctgagtgacagacactaaaacaagttttagggaaaactaaagacacactggacc

SEQ ID NO: 42863 - DNA, 600 bp, Chicken  19866894280362_1
taacatcttggatccttaatttttttctttaaacttcttatgaggacttgtcatagcaacacaatacaaacagctttagactcgtgggagatttttccccccggtaagatgaggggaatttatacactcttctgatttcaacaacacaactgagtctctgtccttctgaaatacccatcctttgatgttcagatccaccctcaagtactggagaaagcactgtagaacacatttcttgtctttcttttagtgaggttcattcagaggtcaaatatccaagtattcagcttctgaccctasttaatctgactagcaggaaaactgtctgtmgtgaagtgacagaatggcaagtggtgagacaaacttccctaccacatgtcctacaggacagagtgttgtyaaatttccatttaccatcagggaaagcatagtgttgtatcaagtgaagccctccaccatggtccagtcaccccttgctgccctgcggaagtcaataatagtggtgatttttgtcatgggatagtgaactgtaatttaagtgggggcattcatcattcagaagtcacagtcgaacaagctgctcagtgatgaccctagggc

SEQ ID NO: 42864 - DNA, 600 bp, Chicken  19866894280362_2
aaacttcttatgaggacttgtcatagcaacacaatacaaacagctttagactcgtgggagatttttccccccggtaagatgaggggaatttatacactcttctgatttcaacaacacaactgagtctctgtccttctgaaatacccatcctttgatgttcagatccaccctcaagtactggagaaagcactgtagaacacatttcttgtctttcttttagtgaggttcattcagaggtcaaatatccaagtattcagcttctgaccctasttaatctgactagcaggaaaactgtctgtmgtgaagtgacagaatggcaagtggtgagacaaacttccctaccacatgtcctacaggacagagtgttgtyaaatttccatttaccatcagggaaagcatagtgttgtatcaagtgaagccctccaccatggtccagtcaccccttgctgccctgcggaagtcaataatagtggtgatttttgtcatgggatagtgaactgtaatttaagtgggggcattcatcattcagaagtcacagtcgaacaagctgctcagtgatgaccctagggcactctcagtcacaaaaccagattcaaatag

SEQ ID NO: 42865 - DNA, 600 bp, Chicken  19866894280362_3
ccggtaagatgaggggaatttatacactcttctgatttcaacaacacaactgagtctctgtccttctgaaatacccatcctttgatgttcagatccaccctcaagtactggagaaagcactgtagaacacatttcttgtctttcttttagtgaggttcattcagaggtcaaatatccaagtattcagcttctgaccctasttaatctgactagcaggaaaactgtctgtmgtgaagtgacagaatggcaagtggtgagacaaacttccctaccacatgtcctacaggacagagtgttgtyaaatttccatttaccatcagggaaagcatagtgttgtatcaagtgaagccctccaccatggtccagtcaccccttgctgccctgcggaagtcaataatagtggtgatttttgtcatgggatagtgaactgtaatttaagtgggggcattcatcattcagaagtcacagtcgaacaagctgctcagtgatgaccctagggcactctcagtcacaaaaccagattcaaatagtgagctggggatataaatgctcatgtttagagacaagtgtttacattctctctctcactacttctattgt

SEQ ID NO: 42866 - DNA, 600 bp, Chicken  19866894280371_1
ggatgaatgacaagatggtatgcttgtaacatttgcagagttcaaaccagaacaagttgcaaatgttcactttaatagcagttaaattttaaataatgttaatgagtgaaaggcgtagcttgatatcagtgtgatgtaagtcaacagatgctaagtaaagtgttcaaaatggaaattttaaatgcatgaataaagcaggataataagtaactattgaatagtactgaagaaaacgcttcggattttcagtaaatcagacacctaatttaagtcaagaatgtgacaggattaaaaaagggyattccaggagatgtttggagggccatcaggtacaagacacaagagttgttcaacataggggagatataacctwcagtgccttgtgtgctattgagcactaccatgtattacaaagataactgctgctctgggagataactcagtgataacaagaatgtaagagatttagaaaatatagcctgcaaggaaatgctgaaagattactccgtcttaaaaaaaataaaaataaagaagtaaaaaaatcattttgaggaaatttagggatattgttgccatacatgaaagggttttataggtagt

SEQ ID NO: 42867 - DNA, 600 bp, Chicken  19866894280371_2
aatagcagttaaattttaaataatgttaatgagtgaaaggcgtagcttgatatcagtgtgatgtaagtcaacagatgctaagtaaagtgttcaaaatggaaattttaaatgcatgaataaagcaggataataagtaactattgaatagtactgaagaaaacgcttcggattttcagtaaatcagacacctaatttaagtcaagaatgtgacaggattaaaaaagggyattccaggagatgtttggagggccatcaggtacaagacacaagagttgttcaacataggggagatataacctwcagtgccttgtgtgctattgagcactaccatgtattacaaagataactgctgctctgggagataactcagtgataacaagaatgtaagagatttagaaaatatagcctgcaaggaaatgctgaaagattactccgtcttaaaaaaaataaaaataaagaagtaaaaaaatcattttgaggaaatttagggatattgttgccatacatgaaagggttttataggtagtataagacccactgttcttcatacccttcgcagatttgacaaaaaagattaaggtttgctaccagtaagaactt

SEQ ID NO: 42868 - DNA, 600 bp, Chicken  19866894280372_1
tgtgtgtctgaacgcgaaacaaattacactgagctctcactgttgtgattaaagtgagagatcaaatgaatcatactgaagagagatcttagatgactatttcaggatggtgtggatactctttgttaccaaatgaggtatctgttgattcagcatctctagaaagagcctcaactgactggattgggtttagatttctaatgggtcccaacaaatctaatgaattcattcagtgtggatacagagtagcagtaatgtaattttaggaaaatagatttgtaaatttttagctattcagcrtccaatgtgggaatcttaccctgtctcttttgaaaaattcttcagctttgaagaatttagtcattaaagcaacaggtatcatcttggagagttatagaagcactgggagagaatactacttgagtgatstataatccaagctgagccatgagatctgtttattcaaaacagttgttttcttgccacattttctctcagccttcatactcacttgggtratgttttatcagtgtgtctttgtagcagctgtttgacggaagcagtaagacttccttctctgtagtgtgactcagattgttg

SEQ ID NO: 42869 - DNA, 600 bp, Chicken  19866894280372_2
caaatgaggtatctgttgattcagcatctctagaaagagcctcaactgactggattgggtttagatttctaatgggtcccaacaaatctaatgaattcattcagtgtggatacagagtagcagtaatgtaattttaggaaaatagatttgtaaatttttagctattcagcrtccaatgtgggaatcttaccctgtctcttttgaaaaattcttcagctttgaagaatttagtcattaaagcaacaggtatcatcttggagagttatagaagcactgggagagaatactacttgagtgatstataatccaagctgagccatgagatctgtttattcaaaacagttgttttcttgccacattttctctcagccttcatactcacttgggtratgttttatcagtgtgtctttgtagcagctgtttgacggaagcagtaagacttccttctctgtagtgtgactcagattgttgtttcaaaaatatagaccaaaacttcagtctgaatagtaacaataagatgatcaactcccagttttagatttttgcagtaaagaaagattaaaaagtcattaggaaaattttagaattttctttggagtg

SEQ ID NO: 42870 - DNA, 582 bp, Chicken  19866894280372_3
aatgaattcattcagtgtggatacagagtagcagtaatgtaattttaggaaaatagatttgtaaatttttagctattcagcrtccaatgtgggaatcttaccctgtctcttttgaaaaattcttcagctttgaagaatttagtcattaaagcaacaggtatcatcttggagagttatagaagcactgggagagaatactacttgagtgatstataatccaagctgagccatgagatctgtttattcaaaacagttgttttcttgccacattttctctcagccttcatactcacttgggtratgttttatcagtgtgtctttgtagcagctgtttgacggaagcagtaagacttccttctctgtagtgtgactcagattgttgtttcaaaaatatagaccaaaacttcagtctgaatagtaacaataagatgatcaactcccagttttagatttttgcagtaaagaaagattaaaaagtcattaggaaaattttagaattttctttggagtgtcttagacaagcctatttcttaagtcggatatgcataactaataaaacattttgtttagtaaaaaggatca

SEQ ID NO: 42871 - DNA, 600 bp, Chicken  19866894280373_1
aaggaattccattgcacccctttgctttgcgcatacttccatgtcagacgtcattttgtcagactgcccttctgctgccatctgtcacatggcaacaacatgtaatggaatactgttgagaggttcaacctctactgccataccaccaacatccaaagagagcaggacacaggagtcgttggtcagactgttaagtagattgtttctaaaattttatgttctgtcaatataaaggctggctttgctttctgttggtttggttttcttttttcttttacgtcttctgtgaatgatgtttcrcaagaaaaaaaagaaaagtctagtaggtctgtctgattttgcacttgttcaattatagagtgctgcgggagtttccaattttgattcatcagtcaattttaagaatactgttgtagtactttttttttgaatactactactcggtgcgtgcaggtaatgggagcaacaagaaaaaagcctggtctggttgtgttgaaattctgtgagcttaaaaatgattctcagtactgacagttctttaagagcagtattcactcacaatggtgtaaagacagatattttctagaaagcactgtatca

SEQ ID NO: 42872 - DNA, 600 bp, Chicken  19866894280381_1
ccagcatgatgagagtctgtctgatcctcctttggataagaatcctggtccagccacacatacttcagcttaaagcaggtaagtccttttccttccagcaacggcagtgttccagacagcagttttacatccaggaataaaatggcacttatctgcagaaacaagacagcatagaacaccgttggcagcagctctggtccctgtcctggtacatcgagaaccttaatgttggtgggttttttgtgggcatctccacaaggaacattttggagcaagcagttcagggcagtttgtgtgggrgttttctaactcttcaggaggccacttccctaatgcagaacacttgcatgaaagttgaacaaacgggcattaaaagctgcctgggacatggcaaatgagggaggacgggctctgaagcactctagaaatggaagggagtagattgataatttcactgcattgctatttatatgctaacatctctccccagcatgagatcttcttcatttccataagagctccaggaatcccttttgccttgtcattttaaattatcattcccatcctttctatgttttcttccatttacgcataattcct

SEQ ID NO: 42873 - DNA, 600 bp, Chicken  19866894280382_1
tttgcacagttaaataaaataacgtggataggaaaaaaaaaaaaaacccttactcaaaatcttgtttcttcttttcttttttctttttgcctttggatttctgaggctcttgttcttttgcagcgcctgcaccttctatctcagcagcaagggcatcaatatcaatatcatcttttgcactacaatgcaaaaggaaagtagggttatcaagagtttaaaagttcatctaaatagaagtcattcaaatcattacacttatttgatcctgtaggaaaaaaggaaacctttgcatgcgtattstctgcttgaagggagaaagaatggtaaaacatattcagatcttccagtattgactgttataactcagatgtgagatttgataaaacttcttggaacttcttgctcaagtaacctcatctgcaaccaagaagtaaaggctcttctcctttcttttatcaataactgtaaatcaaatgcactttttccctttacttgtaccagcagaaaggagcaaagactaagtctagtgcccagaggtttgtcttgtgattgtactcacaatgcagctgcgagaaaggtgacatgcaaatcccccacttc

SEQ ID NO: 42874 - DNA, 600 bp, Chicken  19866894280382_2
tccagtattgactgttataactcagatgtgagatttgataaaacttcttggaacttcttgctcaagtaacctcatctgcaaccaagaagtaaaggctcttctcctttcttttatcaataactgtaaatcaaatgcactttttccctttacttgtaccagcagaaaggagcaaagactaagtctagtgcccagaggtttgtcttgtgattgtactcacaatgcagctgcgagaaaggtgacatgcaaatcccccacttcacacttaaaatttaggattttagacctattaaagtagtaagsaataggatactactcatatcacagcttgcaggcttgtttttttttttaatcatttaatcttctattgatatctcagcttacttcctcttaggtatatggggagaaaactatccactgactcaaagtttcactgtcccaatcattgccacccacttataccagccagacctccaagatcatccagtccaactgtccacctatcaccactatttcccactaaaccatgcccctcagtacagcatctaattgtttcttgaacaccaccagggtcagtgactccaccacctccctgggcagccc

SEQ ID NO: 42875 - DNA, 600 bp, Chicken  19866894280384_1
gaccgcagccatccatcagcctgatggggcgtgaaagccataagctctttggtggagctgttccagccccattgggctgcactccgctcctgaaatcagccccgcgtttgggggctgggatgggtgcccacgtgggtatggtggccctggggtgctgagggtccccatgttgtttaggatgccaggcagccaatgtttcctccaaagcagctgtgcgtgtagggccttgtggtgtggctcctgcagcccccagcacacaaggatggattctatgctctgatcccagcaccacagggtgayactgttccattgtcccttctgtgccacccgcacccagcctggggcagccgcccttcagcgtcccgggcacagagcacagggtggcatgtccttaggtgargagcttcctcagggcatgggctgatgtacgaggtgacaaacacaacacaaaccacacacaagtctggctgtccctccctgctgtgcctaggagtcatgcactcacagtgaggtgtgagcctatggyactgaggggcccatggggacgtggcacatgcaatgcacatccctcaccatcccttcccttgcatccccacagcc

SEQ ID NO: 42876 - DNA, 600 bp, Chicken  19866894280384_2
gcactccgctcctgaaatcagccccgcgtttgggggctgggatgggtgcccacgtgggtatggtggccctggggtgctgagggtccccatgttgtttaggatgccaggcagccaatgtttcctccaaagcagctgtgcgtgtagggccttgtggtgtggctcctgcagcccccagcacacaaggatggattctatgctctgatcccagcaccacagggtgayactgttccattgtcccttctgtgccacccgcacccagcctggggcagccgcccttcagcgtcccgggcacagagcacygggtggcatgtccttaggtgargagcttcctcagggcatgggctgatgtacgaggtgacaaacacaacacaaaccacacacaagtctggctgtccctccctgctgtgcctaggagtcatgcactcacagtgaggtgtgagcctatggyactgaggggcccatggggacgtggcacatgcaatgcacatccctcaccatcccttcccttgcatccccacagcccatccccaccatacatggctctggctgcagctgtgcaactctctgcccatcccacgccactgtgctgtggttgacact

SEQ ID NO: 42877 - DNA, 600 bp, Chicken  19866894280384_3
cccgcgtttgggggctgggatgggtgcccacgtgggtatggtggccctggggtgctgagggtccccatgttgtttaggatgccaggcagccaatgtttcctccaaagcagctgtgcgtgtagggccttgtggtgtggctcctgcagcccccagcacacaaggatggattctatgctctgatcccagcaccacagggtgayactgttccattgtcccttctgtgccacccgcacccagcctggggcagccgcccttcagcgtcccgggcacagagcacagggtggcatgtccttaggtgargagcttcctcagggcatgggctgatgtacgaggtgacaaacacaacacaaaccacacacaagtctggctgtccctccctgctgtgcctaggagtcatgcactcacagtgaggtgtgagcctatggyactgaggggcccatggggacgtggcacatgcaatgcacatccctcaccatcccttcccttgcatccccacagcccatccccaccatacatggctctggctgcagctgtgcaactctctgcccatcccacgccactgtgctgtggttgacactgagcacccaagaacacaagctg

SEQ ID NO: 42878 - DNA, 600 bp, Chicken  19866894280384_4
ttgtggtgtggctcctgcagcccccagcacacaaggatggattctatgctctgatcccagcaccacagggtgayactgttccattgtcccttctgtgccacccgcacccagcctggggcagccgcccttcagcgtcccgggcacagagcacagggtggcatgtccttaggtgargagcttcctcagggcatgggctgatgtacgaggtgacaaacacaacacaaaccacacacaagtctggctgtccctccctgctgtgcctaggagtcatgcactcacagtgaggtgtgagcctatggyactgaggggcccatggggacgtggcacatgcaatgcacatccctcaccatcccttcccttgcatccccacagcccatccccaccatacatggctctggctgcagctgtgcaactctctgcccatcccacgccactgtgctgtggttgacactgagcacccaagaacacaagctgcttctgctgccctgtgccaaaggtgtgggctcagtgctctgtccccaagaggctgctgtccctgctgtcctccagaggccgtttgctttacgatctgtgaacatcaggaagaaatgaagcagtggt

SEQ ID NO: 42879 - DNA, 600 bp, Chicken  19866894280387_1
ttgcccttgctgcagtctgctcctattcactcccctgaaaagcagcaccagctgctgagagctgcttgagtcctttagtaatatgagatgcaactctccaggagggatctggtgtctgcttcacatcagtgctattggttgttttcctgatttataatgtcagggcaaactcattcctgcttaaatctggaaacccatcagaagtggatagtgcccctcctgtaagcagaaaggtgggctggtgggccagcaccagggagtgggggtgcaagtgcagggtctgtgcaggaagggagcccrctggtaccgttaacgagacaccaatacrtgaatatgtgaaggatggcactgcaccacttctccgacaaatccttctgtgacaatagacaagcacaatattcccagagcggcttcctggctgcaatcaatcatttctgcaagtggcagtgccaggaatgaggcattagcaacttccagccatgtcagccctgccctgcacagacagcacagttactgggaagtgacctggattctttgttttgcaccagctgaagtgtttgccaagatctaatcacctgcacctgtgaaatgccaccaatt

SEQ ID NO: 42880 - DNA, 600 bp, Chicken  19866894280387_2
actcccctgaaaagcagcaccagctgctgagagctgcttgagtcctttagtaatatgagatgcaactctccaggagggatctggtgtctgcttcacatcagtgctattggttgttttcctgatttataatgtcagggcaaactcattcctgcttaaatctggaaacccatcagaagtggatagtgcccctcctgtaagcagaaaggtgggctggtgggccagcaccagggagtgggggtgcaagtgcagggtctgtgcaggaagggagcccrctggtaccgttaacgagacaccaatacrtgaatatgtgaaggatggcactgcaccacttctccgacaaatccttctgtgacaatagacaagcacaatattcccagagcggcttcctggctgcaatcaatcatttctgcaagtggcagtgccaggaatgaggcattagcaacttccagccatgtcagccctgccctgcacagacagcacagttactgggaagtgacctggattctttgttttgcaccagctgaagtgtttgccaagatctaatcacctgcacctgtgaaatgccaccaattgcaccatcatcccaccagtgtcaccagg

SEQ ID NO: 42881 - DNA, 600 bp, Chicken  19866894280389_1
tggttatgtctgtaatttcttggggttccctatttccctctgaaatcctgaagtataaggcatgtacccattatgtacgcttgaaatttctgggaacactgcaaaccttgggactttaatcctattatatggtttatatttaattgattgctagtcagagatggaaatttcacagatcttctgaaagaatgaatatttttaatcatcacgtttagcttgcagtcaggatgcacatcctctctaaaccagcatttcacagtgctgtgcgggttccagggactgaggaagtcagttaccctraaaaaaaaaaaaataaaacaactccttataaattaatccaaagctaaattagtgacatgattgtattcccattacattccacttaaatgcatatgtttacaatatcctttaataataattattattaaacatagtaaaatacttccaaacttggctcatagcataattgtacttctagtggaaaaaaaattatctgaagccttgtcaatatgccacttcctcctcccccatcttttaacagaagcagcctccagtgaaataatccaagctgtgttcaagaagttggcaagtgggtccaat

SEQ ID NO: 42882 - DNA, 600 bp, Chicken  19866894280389_2
ggttatgtctgtaatttcttggggttccctatttccctctgaaatcctgaagtataaggcatgtacccattatgtacgcttgaaatttctgggaacactgcaaaccttgggactttaatcctattatatggtttatatttaattgattgctagtcagagatggaaatttcacagatcttctgaaagaatgaatatttttaatcatcacgtttagcttgcagtcaggatgcacatcctctctaaaccagcatttcacagtgctgtgcgggttccagggactgaggaagtcagttaccctaraaaaaaaaaaaataaaacaactccttataaattaatccaaagctaaattagtgacatgattgtattcccattacattccacttaaatgcatatgtttacaatatcctttaataataattattattaaacatagtaaaatacttccaaacttggctcatagcataattgtacttctagtggaaaaaaaattatctgaagccttgtcaatatgccacttcctcctcccccatcttttaacagaagcagcctccagtgaaataatccaagctgtgttcaagaagttggcaagtgggtccaatt

SEQ ID NO: 42883 - DNA, 600 bp, Chicken  19866894280389_3
gttatgtctgtaatttcttggggttccctatttccctctgaaatcctgaagtataaggcatgtacccattatgtacgcttgaaatttctgggaacactgcaaaccttgggactttaatcctattatatggtttatatttaattgattgctagtcagagatggaaatttcacagatcttctgaaagaatgaatatttttaatcatcacgtttagcttgcagtcaggatgcacatcctctctaaaccagcatttcacagtgctgtgcgggttccagggactgaggaagtcagttaccctaaraaaaaaaaaaataaaacaactccttataaattaatccaaagctaaattagtgacatgattgtattcccattacattccacttaaatgcatatgtttacaatatcctttaataataattattattaaacatagtaaaatacttccaaacttggctcatagcataattgtacttctagtggaaaaaaaattatctgaagccttgtcaatatgccacttcctcctcccccatcttttaacagaagcagcctccagtgaaataatccaagctgtgttcaagaagttggcaagtgggtccaatta

SEQ ID NO: 42884 - DNA, 600 bp, Chicken  19866894280393_1
tttcagtggaagcaaccaggaatgaataaatcaactgcaaatgtctgaatgagtagcattccattctaccgcttttttgggggctataaatacatctggttgaaatggccaggttttggagtaagagcaaaatgatcagatttaatctgagtttgtcttagagtctataaccacactgtaaatactccgatatcaactgagacttacttaaattactgtcttaagggaggaagcctgttttctgagtgtctgtggtcaagtagcttaatcaacatttttataagcatttatgtaagtatytaagtaaacattataaactggatgaattacaccagccagtatacagatgaattaacgataaatttccatcatgcctatctgcatatacaggaaaaaaaaagttagaacgtaattgtctaagtaaagcttttttgatgtaacaactgtttttaaagttcaaacgaatgtcgacacgcactgtatatataagcaggcagaaaatactttttttaaaagaaatgagacaactactctatgccaaagaaaaacaattcctttgccaaactacacattgttaacttaaaatgtgttccatgtgga

SEQ ID NO: 42885 - DNA, 422 bp, Chicken  19866894280393_2
tgatgtaacaactgtttttaaagttcaaacgaatgtcgacacgcactgtatatataagcaggcagaaaatactttttttaaaagaaatgagacaactactctatgccaaagaaaaacaattcctttgccaaactacacattgttaacttaaaatgtgttccatgtggaagtaggaagactgatctgatggaaaggctagtgatctaaagtcagctggctcgctgcctgtcaactacactttctggcttccagttttacagttagaatcagaattattatttttttctttttctcttggawgggggaggcatagtttttttttcttttttggtgatgcaatgaatttgccagtaaacttgcatatttaattttccagactttaaacaaagagaatatttggatcatttgtacattgtgtgttt

SEQ ID NO: 42886 - DNA, 600 bp, Chicken  19866894280398_1
atgcatattacatcctggggcatgaggataaacaaatcaacataaccaaaaggaaagtcatagtgttaaacaaaacaaactataagaaagattgctaaaactgttgtcttctcattatgggtttactctttttactccgatttagtaagagaggggatatgatccttcattaggtgcagtaatagggatacagtcctgaattcagagtttgtaatagccctgcttttttattttagatagaccaagaatggccctttgataaaaacagcacagaagagagtctcaagcataggaacttayaggaacagctgtaataatgtcattagttatttgccaatagctctacagtgcctggatacccactgttgctactgtaccactgtgctaacagaaagagtgaaaaagctttttggtcttcacaagytcttctaaataaaaaatgcttctagttacaaatacttctctcagctacccaaagctatagtaacctgttccacactctctcagtagcacatactgagctgtgtgaaagattttcaattaaccacttttgcttctgttagagcattttctcatacagttatgggttattttttgcat

SEQ ID NO: 42887 - DNA, 600 bp, Chicken  19866894280398_2
actctttttactccgatttagtaagagaggggatatgatccttcattaggtgcagtaatagggatacagtcctgaattcagagtttgtaatagccctgcttttttattttagatagaccaagaatggccctttgataaaaacagcacagaagagagtctcaagcataggaacttayaggaacagctgtaataatgtcattagttatttgccaatagctctacagtgcctggatacccactgttgctactgtaccactgtgctaacagaaagagtgaaaaagctttttggtcttcacaagytcttctaaataaaaaatgcttctagttacaaatacttctctcagctacccaaagctatagtaacctgttccacactctctcagtagcacatactgagctgtgtgaaagattttcaattaaccacttttgcttctgttagagcattttctcatacagttatgggttattttttgcatgtgttttgtatgaaggcttctattgctctttaaattttttatttttattttaatattggtggaatcgacattttagcccatgattttccagacaatacacatcggtgaccctctaaaagtaatg

SEQ ID NO: 42888 - DNA, 599 bp, Chicken  19866894280403_1
  misc_feature (1)..(216): n is any nucleotide
nnnnnnnnnnnnnnnnnnnnnnnnnnnnnnnnnnnnnnnnnnnnnnnnnnnnnnnnnnnnnnnnnnnnnnnnnnnnnnnnnnnnnnnnnnnnnnnnnnnnnnnnnnnnnnnnnnnnnnnnnnnnnnnnnnnnnnnnnnnnnnnnnnnnnnnnnnnnnnnnnnnnnnnnnnnnnnnnnnnnnnnnnnnnnnnnnnnnnnnnnnnnnnnnnnnnnnnntgactgccaatgtttgtgaacctgagcttttctctgtgaccaagccaagcaaaccaaatgagcagccagttgtatctcagttcygtaagtaagagatctcacttcacagatttctcatttccttggacttgctgcagcaagaagacctagttgtgttggcagccaggtgtcttctctagcagggctgatttgagtggcctgagcacccagaggctaaagctcatggaagagattattcttggcccagtctaaccgcagccttgcacctccatcccagatctacaaaacaagggttgatcataycatccccatgcttataggaatgctctgagaatcggtactttgaaggacactgaatgcttggatttagtggtaacaggaag

SEQ ID NO: 42889 - DNA, 600 bp, Chicken  19866894280403_2
ctgccaatgtttgtgaacctgagcttttctctgtgaccaagccaagcaaaccaaatgagcagccagttgtatctcagttcygtaagtaagagatctcacttcacagatttctcatttccttggacttgctgcagcaagaagacctagttgtgttggcagccaggtgtcttctctagcagggctgatttgagtggcctgagcacccagaggctaaagctcatggaagagattattcttggcccagtctaaccgcagccttgcacctccatcccagatctacaaaacaagggttgatcataycatccccatgcttataggaatgctctgagaatcggtactttgaaggacactgaatgcttggatttagtggtaacaggaagttaggtgcaatattgcaagctaacgtagcactatcttgcagaattcctttctcttgtctaagtaggtaataattggttttagaaagataagtatctaccacttaacttcatcatcatggctgtgtgatgaaaagtctgaggctgtttatgcttgtaaaatctcacagccacttctcctgactgataacacagtaatataagagttaacagtcactagaag

SEQ ID NO: 42890 - DNA, 600 bp, Chicken  19866894280405_1
acaacttaataaaacaatttctgataaaaaagagcaacattcctaaatttgtttggtgatcagaatgctgacttctgtatctaaaagtactgagatgtactctctcagcaaagaggctacctactactgaacagtaatttggagtccaactacaagctaataacttcactgaaatacagtatctcagaattgttagctcatgtgagagccactgctgccatggtcggtttctgtcaatgtttcagagccattataaagattaattatctcccattcatcttccatagctccaatctgtcyccattaatgtgcaaaactttactgagaagcttaaggaggaaacaatcactcataagaacagtcagtcagttctctttcttcttctcttccttgtgcagtgggtttatgtgtaataattattgcaagataaagtggctcctgccatttttggttgcaggacatgaacttcaaggacacagagaacagtttgtcaaatttcacttgatgactggggggcttgaacatacagttttttaataacttgtaacagaaaatttgagaaacagaatgaatcattttttccaaattgctaayacatag

SEQ ID NO: 42891 - DNA, 600 bp, Chicken  19866894280405_2
ctgtcyccattaatgtgcaaaactttactgagaagcttaaggaggaaacaatcactcataagaacagtcagtcagttctctttcttcttctcttccttgtgcagtgggtttatgtgtaataattattgcaagataaagtggctcctgccatttttggttgcaggacatgaacttcaaggacacagagaacagtttgtcaaatttcacttgatgactggggggcttgaacatacagttttttaataacttgtaacagaaaatttgagaaacagaatgaatcattttttccaaattgctaayacatagtaagatttcaactagttcagttctttgaaatgcattaattttcatgtcaaagttggagaaagcaaagaatgtttggaattgtaaaatacatctgtatcagagtccttcattagaaaggggcactgaaaaaatcacactgaaattccaytcacagaactgaagttctatctgctctgttactaaaaaaagaacaaagacacaatgactggaagcaaaaacttccaagaaccctcacataaaagcagtatagacaaaaatgagaatatcatgtaacaagaatctcagtctcgcaat

SEQ ID NO: 42892 - DNA, 600 bp, Chicken  19866894280405_3
tggttgcaggacatgaacttcaaggacacagagaacagtttgtcaaatttcacttgatgactggggggcttgaacatacagttttttaataacttgtaacagaaaatttgagaaacagaatgaatcattttttccaaattgctaayacatagtaagatttcaactagttcagttctttgaaatgcattaattttcatgtcaaagttggagaaagcaaagaatgtttggaattgtaaaatacatctgtatcagagtccttcattagaaaggggcactgaaaaaatcacactgaaattccaytcacagaactgaagttctatctgctctgttactaaaaaaagaacaaagacacaatgactggaagcaaaaacttccaagaaccctcacataaaagcagtatagacaaaaatgagaatatcatgtaacaagaatctcagtctcgcaatgaagggatttactatatgaacattcaaaaggtgctcccattatgacagagaccacaatcaaccaatcacaatatactcttactgcattttctttctcctgatacgttccattacatttccttaccccagtctgttccatctcccgaacttctcg

SEQ ID NO: 42893 - DNA, 599 bp, Chicken  19866894280407_1
ggcattgctgcttctcaaggggtgacacaagctttttgagtgcatttagagtaatcagtgaaggtattaaaacagtggaagatagaatgaatagtgaaagggaagttgatcctttttaacagaaccatgtggacaaaaaatactaaggcctttgcatttttaggtacaacatcctctctgaaccttcagctggattgtatgagggaaatgacttactggctttctactaactgcaagcagtaaatgattgtcattcatctctaacaaatattttttccccttggataaacagacaaatamtgtatgatattccctgtttacttccagaggagacgagcaacaattgactcctgttatgactgcactcggattcaggctgtcccacaagtcccctgtgtcagtcatccccctcttcccgcaaagcccttgtgcttgcatgggtaattacaaccattctgaatttttgatctctcaggtttttgcttttttgcttctctcctgcttccattcctctctccagccttgtaatactctgcagactgtgaacaatggattagctgttccctccagttaaggtttccagaaatagtctttagagt

SEQ ID NO: 42894 - DNA, 599 bp, Chicken  19866894280408_1
  misc_feature (1)..(108): n is any nucleotide
nnnnnnnnnnnnnnnnnnnnnnnnnnnnnnnnnnnnnnnnnnnnnnnnnnnnnnnnnnnnnnnnnnnnnnnnnnnnnnnnnnnnnnnnnnnnnnnnnnnnnnnnnnnncacagcttggtgcatgtgagggccatgcatggtcagcacccctcggcagcagctcctgtgcctgctccgtccccagcctgcagggccatcacagaaaggcaagaaggcactcagggcacctgcacccactaggagcagccatcgcaggtggcaccagcagcaccccctgcccacagcccagcccctcaccarcatcctgcatgaggrcttgaggcagccatgcagcagygagggagacatcttagccagggcaggagcagctcccacctgttgcactcgctggcctgagacacagcacgtgcttggacgtggcagtgaactgacccagctcctgcaaggcagtcagcatccccccgagcaggcacgggcgagtcaagcgccaggatggggcacgaggtggctgcaggcactctgcagcrcccgacgagcagcgctcttggctgtgcctccccccggaacggtccctgcacaaccagcttcggagccgggct

SEQ ID NO: 42895 - DNA, 599 bp, Chicken  19866894280408_2
  misc_feature (1)..(93): n is any nucleotide
nnnnnnnnnnnnnnnnnnnnnnnnnnnnnnnnnnnnnnnnnnnnnnnnnnnnnnnnnnnnnnnnnnnnnnnnnnnnnnnnnnnnnnnnnnnnncacagcttggtgcatgtgagggccatgcatggtcagcacccctcggcagcagctcctgtgcctgctccgtccccagcctgcagggccatcacagaaaggcaagaaggcactcagggcacctgcacccactaggagcagccatcgcaggtggcaccagcagcaccccctgcccacagcccagcccctcaccarcatcctgcatgaggrcttgaggcagccatgcagcagygagggagacatcttagccagggcaggagcagctcccacctgttgcactcgctggcctgagacacagcacgtgcttggacgtggcagtgaactgacccagctcctgcaaggcagtcagcatccccccgagcaggcacgggcgagtcaagcgccaggatggggcacgaggtggctgcaggcactctgcagcrcccgacgagcagcgctcttggctgtgcctccccccggaacggtccctgcacaaccagcttcggagccgggctcatcccccgtgctgg

SEQ ID NO: 42896 - DNA, 599 bp, Chicken  19866894280408_3
  misc_feature (1)..(71): n is any nucleotide
nnnnnnnnnnnnnnnnnnnnnnnnnnnnnnnnnnnnnnnnnnnnnnnnnnnnnnnnnnnnnnnnnnnnnnncacagcttggtgcatgtgagggccatgcatggtcagcacccctcggcagcagctcctgtgcctgctccgtccccagcctgcagggccatcacagaaaggcaagaaggcactcagggcacctgcacccactaggagcagccatcgcaggtggcaccagcagcaccccctgcccacagcccagcccctcaccarcatcctgcatgaggrcttgaggcagccatgcagcagygagggagacatcttagccagggcaggagcagctcccacctgttgcactcgctggcctgagacacagcacgtgcttggacgtggcagtgaactgacccagctcctgcaaggcagtcagcatccccccgagcaggcacgggcgagtcaagcgccaggatggggcacgaggtggctgcaggcactctgcagcrcccgacgagcagcgctcttggctgtgcctccccccggaacggtccctgcacaaccagcttcggagccgggctcatcccccgtgctgggaaagggacggagggcaggagc

SEQ ID NO: 42897 - DNA, 600 bp, Chicken  19866894280408_4
ctgcacccactaggagcagccatcgcaggtggcaccagcagcaccccctgcccacagcccagcccctcaccarcatcctgcatgaggrcttgaggcagccatgcagcagygagggagacatcttagccagggcaggagcagctcccacctgttgcactcgctggcctgagacacagcacgtgcttggacgtggcagtgaactgacccagctcctgcaaggcagtcagcatccccccgagcaggcacgggcgagtcaagcgccaggatggggcacgaggtggctgcaggcactctgcagcrcccgacgagcagcgctcttggctgtgcctccccccggaacggtccctgcacaaccagcttcggagccgggctcatcccccgtgctgggaaagggacggagggcaggagccggcacagctcccgcacggctctcagcagagcagttgggctcctggaagcgctttatttgcacgggtgcagtcagaataaaaaaaaggagaaaaagaaccacctcccgagcaggcagaagtttgcagaggcagcacgcacagacccacggctgcacgcacgcagtccccaccgagcgtcaaacacgagcac

SEQ ID NO: 42898 - DNA, 600 bp, Chicken  19866894280410_1
ctattatgtagtctttactccacagtgcacatgaagcagctataatcaatgttcagtatgttaagtttggtgcccattgtagaaatttctttagaactgcatgggccattgtagtctgaaaaaaaacccttacatttctcactggaaacatgtcagagtcaaaaagtcacagtatctctctgaagtagtaacaaagtttaagtttaccacttccttatggtactgactgctgtgctcatagccagtacagtttttctttaacgtagtacaggttaaaaacaaatatgttttacctcactyagatatgacacgcatacacttctaataatgcttaggtgttaggaaaagtcacatggtactgaccaaactgcccatacagacaggagaactttccagcacacttgcaagtagctctgtattgcttgctcttctcagcctctttgcacaatctgttgaaatcatccagtcacaatttctaatcctggagtcatttttttttccgcttgtttttatttccatcaagataattggctaaatttaaagatagtaaacctaatacagcatggatagaaacatattattattaaaaacctttcagac

SEQ ID NO: 42899 - DNA, 600 bp, Chicken  19866894280415_1
aaagttctttaaaaaaaacaaacaaaaacaatcaaaaactggatctgtacatggattggtgtggttatgaaaaatgtgatgcataccagcagattattaatatagctttgctttaaaaggaatggggtttccagtcttttcccttctaacccaggtaaatgcagtccaagattgccaaagcccaccgtgaggagcgtgctttgaagacccttgaaatcttcacacagttctaacaagatctactggccatctccttcaacccttctcttgcgaactataacaaaacagaaaaagatgtaytttaaaatattattgtcactatattacatatttctacatcattggtatgtagtatggttccctactttgctgcacaaaggctcatgcaatacaatctaaagtaacacttaatattatccaccatttacacaagaacagmtgcaaatatttgttaggagarttgtataaggaacattattcattttactttaagtaagcagatttaacaagttagtctttgtttttattgccatagygtttacttggctttgaaagaaacaatgtaagactttcaagaatacccagtaagatttacacaca

SEQ ID NO: 42900 - DNA, 600 bp, Chicken  19866894280415_2
tcccttctaacccaggtaaatgcagtccaagattgccaaagcccaccgtgaggagcgtgctttgaagacccttgaaatcttcacacagttctaacaagatctactggccatctccttcaacccttctcttgcgaactataacaaaacagaaaaagatgtaytttaaaatattattgtcactatattacatatttctacatcattggtatgtagtatggttccctactttgctgcacaaaggctcatgcaatacaatctaaagtaacacttaatattatccaccatttacacaagaacagmtgcaaatatttgttaggagarttgtataaggaacattattcattttactttaagtaagcagatttaacaagttagtctttgtttttattgccatagygtttacttggctttgaaagaaacaatgtaagactttcaagaatacccagtaagatttacacacattcaaatttatacacactccaataaacaaaactaaattaaaaaacccttcaagatgttctgctcaatagcctaaagcattcaatttattaataaaaatattcagttgccataaaatgcaaaagcaacaaagatccatga

SEQ ID NO: 42901 - DNA, 600 bp, Chicken  19866894280415_3
gcagtccaagattgccaaagcccaccgtgaggagcgtgctttgaagacccttgaaatcttcacacagttctaacaagatctactggccatctccttcaacccttctcttgcgaactataacaaaacagaaaaagatgtaytttaaaatattattgtcactatattacatatttctacatcattggtatgtagtatggttccctactttgctgcacaaaggctcatgcaatacaatctaaagtaacacttaatattatccaccatttacacaagaacagmtgcaaatatttgttaggagarttgtataaggaacattattcattttactttaagtaagcagatttaacaagttagtctttgtttttattgccatagygtttacttggctttgaaagaaacaatgtaagactttcaagaatacccagtaagatttacacacattcaaatttatacacactccaataaacaaaactaaattaaaaaacccttcaagatgttctgctcaatagcctaaagcattcaatttattaataaaaatattcagttgccataaaatgcaaaagcaacaaagatccatgaataaaatcaccaacgctcaca

SEQ ID NO: 42902 - DNA, 600 bp, Chicken  19866894280415_4
gatctactggccatctccttcaacccttctcttgcgaactataacaaaacagaaaaagatgtaytttaaaatattattgtcactatattacatatttctacatcattggtatgtagtatggttccctactttgctgcacaaaggctcatgcaatacaatctaaagtaacacttaatattatccaccatttacacaagaacagmtgcaaatatttgttaggagarttgtataaggaacattattcattttactttaagtaagcagatttaacaagttagtctttgtttttattgccatagygtttacttggctttgaaagaaacaatgtaagactttcaagaatacccagtaagatttacacacattcaaatttatacacactccaataaacaaaactaaattaaaaaacccttcaagatgttctgctcaatagcctaaagcattcaatttattaataaaaatattcagttgccataaaatgcaaaagcaacaaagatccatgaataaaatcaccaacgctcacacgctgctctggctttatgcaagatccactgaatgccttcaaattctgcagtcatgcagttaaaggcaatatgcaca

SEQ ID NO: 42903 - DNA, 599 bp, Chicken  19866894280420_1
  misc_feature (1)..(34): n is any nucleotide
nnnnnnnnnnnnnnnnnnnnnnnnnnnnnnnnnntgtattgagtattgtgaacaatatctggtggggctgagttctgctgcttggctctggcatcacagtggccaagctactggccaagtctgtgattccaggagctgcatatctgggaaccacgcaggatgtggctgaaagggctgagtttccaaagagtgtagtaatactcctgaagaatcaaagtcattcttaagcacacgtgtaagcttgaagtgtttaaactcagtgtattcttctgaaaaccaaaaccgtggtatttaacattyctgacctatggattatgtgttaagagcacttatctgccaagcttatctagraagactgaagatgaaatagggtggaatcatccaacgtcgaaaaagatgtctgtaataaaaacaggagagattttagtcgttctggggcatggtctaaaatgaccttctgagatcccttgtggtgctrctttttgcagtcttagacattcttgtttgtctatgcaagcatgtcacctcctgcgttggagtgctcagcagatgctatctctgcttgaggactgytctagagtacagttcacaggcaggtt

SEQ ID NO: 42904 - DNA, 600 bp, Chicken  19866894280420_2
acaatatctggtggggctgagttctgctgcttggctctggcatcacagtggccaagctactggccaagtctgtgattccaggagctgcatatctgggaaccacgcaggatgtggctgaaagggctgagtttccaaagagtgtagtaatactcctgaagaatcaaagtcattcttaagcacacgtgtaagcttgaagtgtttaaactcagtgtattcttctgaaaaccaaaaccgtggtatttaacattyctgacctatggattatgtgttaagagcacttatctgccaagcttatctagraagactgaagatgaaatagggtggaatcatccaacgtcgaaaaagatgtctgtaataaaaacaggagagattttagtcgttctggggcatggtctaaaatgaccttctgagatcccttgtggtgctrctttttgcagtcttagacattcttgtttgtctatgcaagcatgtcacctcctgcgttggagtgctcagcagatgctatctctgcttgaggactgytctagagtacagttcacaggcaggtttacggaagagagagtgcccacctggtggcctcagggagggcatttcctgaag

SEQ ID NO: 42905 - DNA, 600 bp, Chicken  19866894280420_3
gtttccaaagagtgtagtaatactcctgaagaatcaaagtcattcttaagcacacgtgtaagcttgaagtgtttaaactcagtgtattcttctgaaaaccaaaaccgtggtatttaacattyctgacctatggattatgtgttaagagcacttatctgccaagcttatctagraagactgaagatgaaatagggtggaatcatccaacgtcgaaaaagatgtctgtaataaaaacaggagagattttagtcgttctggggcatggtctaaaatgaccttctgagatcccttgtggtgctrctttttgcagtcttagacattcttgtttgtctatgcaagcatgtcacctcctgcgttggagtgctcagcagatgctatctctgcttgaggactgytctagagtacagttcacaggcaggtttacggaagagagagtgcccacctggtggcctcagggagggcatttcctgaaggaagagctgctgatttcaatttcaaggcaggttaacaaaataggcttgtgttctgaagatttggttccaaaatatatgcaagcttccattgcaaagcattggctgagcaggtgacagcttattgctg

SEQ ID NO: 42906 - DNA, 600 bp, Chicken  19866894280420_4
aaaccaaaaccgtggtatttaacattyctgacctatggattatgtgttaagagcacttatctgccaagcttatctagraagactgaagatgaaatagggtggaatcatccaacgtcgaaaaagatgtctgtaataaaaacaggagagattttagtcgttctggggcatggtctaaaatgaccttctgagatcccttgtggtgctrctttttgcagtcttagacattcttgtttgtctatgcaagcatgtcacctcctgcgttggagtgctcagcagatgctatctctgcttgaggactgytctagagtacagttcacaggcaggtttacggaagagagagtgcccacctggtggcctcagggagggcatttcctgaaggaagagctgctgatttcaatttcaaggcaggttaacaaaataggcttgtgttctgaagatttggttccaaaatatatgcaagcttccattgcaaagcattggctgagcaggtgacagcttattgctggggaatggtgcagacagcacaaggttctcatacccttgaccttaaggcattatctttagagcagcgaggataacctcgttcccaaatcccaagct

SEQ ID NO: 42907 - DNA, 600 bp, Chicken  19866894280420_5
ttacggaagagagagtgcccacctggtggcctcagggagggcatttcctgaaggaagagctgctgatttcaatttcaaggcaggttaacaaaataggcttgtgttctgaagatttggttccaaaatatatgcaagcttccattgcaaagcattggctgagcaggtgacagcttattgctggggaatggtgcagacagcacaaggttctcatacccttgaccttaaggcattatctttagagcagcgaggataacctcgttcccaaatcccaagctgcttttagcttctgtgccaggactsccagtagaaaaakmaaaaaaacaacaaaccacactggtggtggagatattttgtgctctctatgtttgtccttttaagagcaaagcagagacttctcttcttgttatcagtgggggctgcccagcttctttatcctcccttccccagcctgcctggtcctgtctgtttcttaggagccgtcttctccctgtgtgaggttgatttccttagcattggcagcccatggtgaccaaagtcccaggaatgctgctaagatgtgatgtggattagcacaagctcaagagtctctcagtgcgatgg

SEQ ID NO: 42908 - DNA, 587 bp, Chicken  19866894280420_6
agtgcccacctggtggcctcagggagggcatttcctgaaggaagagctgctgatttcaatttcaaggcaggttaacaaaataggcttgtgttctgaagatttggttccaaaatatatgcaagcttccattgcaaagcattggctgagcaggtgacagcttattgctggggaatggtgcagacagcacaaggttctcatacccttgaccttaaggcattatctttagagcagcgaggataacctcgttcccaaatcccaagctgcttttagcttctgtgccaggactsccagtagaaaaakmaaaaaaacaacaaaccacactggtggtggagatattttgtgctctctatgtttgtccttttaagagcaaagcagagacttctcttcttgttatcagtgggggctgcccagcttctttatcctcccttccccagcctgcctggtcctgtctgtttcttaggagccgtcttctccctgtgtgaggttgatttccttagcattggcagcccatggtgaccaaagtcccaggaatgctgctaagatgtgatgtggattagcacaagctcaagagtctctcagtgcgatgg

SEQ ID NO: 42909 - DNA, 586 bp, Chicken  19866894280420_7
gtgcccacctggtggcctcagggagggcatttcctgaaggaagagctgctgatttcaatttcaaggcaggttaacaaaataggcttgtgttctgaagatttggttccaaaatatatgcaagcttccattgcaaagcattggctgagcaggtgacagcttattgctggggaatggtgcagacagcacaaggttctcatacccttgaccttaaggcattatctttagagcagcgaggataacctcgttcccaaatcccaagctgcttttagcttctgtgccaggactsccagtagaaaaakmaaaaaaacaacaaaccacactggtggtggagatattttgtgctctctatgtttgtccttttaagagcaaagcagagacttctcttcttgttatcagtgggggctgcccagcttctttatcctcccttccccagcctgcctggtcctgtctgtttcttaggagccgtcttctccctgtgtgaggttgatttccttagcattggcagcccatggtgaccaaagtcccaggaatgctgctaagatgtgatgtggattagcacaagctcaagagtctctcagtgcgatgg

SEQ ID NO: 42910 - DNA, 478 bp, Chicken  19866894280425_1
ctcagaacagtggaattcattagtattgtccaaatgggaaggaaatgaaatagcaattatcctcacataaattaaagaaaaatgctggttattgatagcatttttgaatgaaaagggatagcagatgaccagccacggtaattcacaaaaccattataaaagctcactatcgttaggtaaacaagcacattcagatactctagagccttacaaacaaacatgtcccaaacttaccagaactgatgcatctcgtgtagtattctctggaatgacaacttcatagctgtctctttcccactstggaggctggttttttgcactagtaacagttaccacaagttcaactttactgctcctattacctccatctgtagcaataatatctccaattatagatgacctctgaacagtaaaaatgggttcattacagactgttttgattagggctcaggtgagttgttttttttttttttttttt

SEQ ID NO: 42911 - DNA, 600 bp, Chicken  19866894280427_1
gaaaggcctttttttccagttcttgaattacttctgtgactctttgatgtgctggtagagaatccttcggtgctctttttaaatggggtcactccagcaggatatgtattccagaaacggtttcacgcagcgcttttgatccctgcccacttctcaccaattgtgtatccaaagacggtcaacaccttattccccatcacactgggagctcctactgagttgcttctctgttccgacctttcttaagtatttcagagtcactgtatactctctgaaactcacctcctgcaaatataaccygtatttcttctttttaggtatctaatttagctagatatctcaaaactgtactgagacatgtcttgttgggaagggctccctacagagcagtcctggccactccgtgtgattcttgttctcatcattatttgctatctggtgagtgtttccactcgctattttcctggcagaaatgttatgttttctctcaagtattgataaaaactcacagaactcacagaatcatctgagttggaagggacctttagaggtcatctggtccaactccscttcaatggacagtgacaccaacagctaggt

SEQ ID NO: 42912 - DNA, 600 bp, Chicken  19866894280427_2
ctctgaaactcacctcctgcaaatataaccygtatttcttctttttaggtatctaatttagctagatatctcaaaactgtactgagacatgtcttgttgggaagggctccctacagagcagtcctggccactccgtgtgattcttgttctcatcattatttgctatctggtgagtgtttccactcgctattttcctggcagaaatgttatgttttctctcaagtattgataaaaactcacagaactcacagaatcatctgagttggaagggacctttagaggtcatctggtccaactccscttcaatggacagtgacaccaacagctaggtcaggttgctccaaaaacactgaatagcactaagtctaatactgctccacacagacttccctatagtagcacccattctttaacagctctcctcagtcatttatgttttctcagtccaccatgtctcgtgtcctttcacatactgattttatacatagtacatagtttctcaaaagtaaaataattaaattatatataaataaatcagaccattatgtgattcttcttcaaatagcctgtggcggtgcctcgccacctgctgagtgaatg

SEQ ID NO: 42913 - DNA, 600 bp, Chicken  19866894280439_1
ccttgatagacacatttcagctacctagttgatacccagacagcgtttcctatcagtgctctcatccaaatggatatttccagagcacttactacattaattctcttcaggcaagcaggttgatgggatccagcccttctccaggccctgttcctgccacgtgtgtaggtgcaggtggccctgctggtgtggcgctgcccctggggctcaggtgtgttttgggcaggagtgaggacaagtgcttggggaaagcataggtgctgcatcatggtattgtgagtgcagagagagaaatgcttktatgtgtgcacacaattgctatatatattccatattttttatattttataaagtgtgtgtgtatatatatatatgcattataaagggtcaattaatgctagtgttctccttgctttattagaggactgcagtttatggcacgtgggggaatgcgttgctctcctccctttctgctccttccttttgcctttagccagaggaacaaaaacaaaaggcaaagcaatgtgtgcagctgctggagggagttgctgcaaagcaggcgctccctgcacaaaaagcagtgatggtgaaagtggtttt

SEQ ID NO: 42914 - DNA, 600 bp, Chicken  19866894280439_10
actttgggttccatatgtctccttgagctgcatgagtgttcctgacatatgagatggtggtggttgtggggtcaaccagagtaacttccraaaacatgtggaaggagaaagtctcccattttcccttctgcagctgagtattttcttctgagtatttgtccatgccctgctttgggatcgtggaacaaaggggatggatcacatggaggtcgctttctcttggggggattctatatggagctaggagttggactcagtgatccacgtgggtcccttccaacttgaggtattctgtggtgygtgagcatgggctgaccctaaatgtagggtgaatggggcagccaccccccctgctgccatgggaggtggtgatggggctgatgtgygggtactgaccgtgctggggtcactgcttctccccatgcctcrgtgaatgtgaaaatccaccttgcagcaaagtgagacccctctattaatagaggtgctcgcaggcttgccagatgaaagaaatgcagaacaccgtgatcacttcttttatgatcattaataataggatagcttacctgaaaggcacagtgcatgtctccagtggttttgatc

SEQ ID NO: 42915 - DNA, 600 bp, Chicken  19866894280439_11
tccraaaacatgtggaaggagaaagtctcccattttcccttctgcagctgagtattttcttctgagtatttgtccatgccctgctttgggatcgtggaacaaaggggatggatcacatggaggtcgctttctcttggggggattctatatggagctaggagttggactcagtgatccacgtgggtcccttccaacttgaggtattctgtggtgygtgagcatgggctgaccctaaatgtagggtgaatggggcagccaccccccctgctgccatgggaggtggtgatggggctgatgtgygggtactgaccgtgctggggtcactgcttctccccatgcctcrgtgaatgtgaaaatccaccttgcagcaaagtgagacccctctattaatagaggtgctcgcaggcttgccagatgaaagaaatgcagaacaccgtgatcacttcttttatgatcattaataataggatagcttacctgaaaggcacagtgcatgtctccagtggttttgatctgtcatgcctggctatgcgggacggggaaggctctgtctcttcggggagttgtgagatgagaaaacaggcagcagagatttctcca

SEQ ID NO: 42916 - DNA, 600 bp, Chicken  19866894280439_12
gcagctgagtattttcttctgagtatttgtccatgccctgctttgggatcgtggaacaaaggggatggatcacatggaggtcgctttctcttggggggattctatatggagctaggagttggactcagtgatccacgtgggtcccttccaacttgaggtattctgtggtgygtgagcatgggctgaccctaaatgtagggtgaatggggcagccaccccccctgctgccatgggaggtggtgatggggctgatgtgygggtactgaccgtgctggggtcactgcttctccccatgcctcrgtgaatgtgaaaatccaccttgcagcaaagtgagacccctctattaatagaggtgctcgcaggcttgccagatgaaagaaatgcagaacaccgtgatcacttcttttatgatcattaataataggatagcttacctgaaaggcacagtgcatgtctccagtggttttgatctgtcatgcctggctatgcgggacggggaaggctctgtctcttcggggagttgtgagatgagaaaacaggcagcagagatttctccaccccctgcttcgctctattcccagcactgcaccgctcccgagg

SEQ ID NO: 42917 - DNA, 600 bp, Chicken  19866894280439_13
ggcttgccagatgaaagaaatgcagaacaccgtgatcacttcttttatgatcattaataataggatagcttacctgaaaggcacagtgcatgtctccagtggttttgatctgtcatgcctggctatgcgggacggggaaggctctgtctcttcggggagttgtgagatgagaaaacaggcagcagagatttctccaccccctgcttcgctctattcccagcactgcaccgctcccgaggatcgatatctgaactgagaaattatattattaagctgcatctcataaccacacatcaagtrcagtccactgctttcccctcggtgcccggtcgtgggccctgatggagtgatgttccttttgaaaagattaagagcatccagcaatgcaaaatgcgtggggtgcaggaggggggacggtccttctgcagagcgcctgactactctgtgccgatcgctcctcctgaatttgcattacagaaaaacaatcttttatttatttaagttggaaatccctttgcatccgaacttcaagtgtgcagcaaacacactttgatcattttaatgcagaagtcactgatttacaataaatattgggttttc

SEQ ID NO: 42918 - DNA, 600 bp, Chicken  19866894280439_14
tcagctgtcctgagctggggacagaacgctacagtgctgagctgtgggcgcttggttcctggtgcagttcattggggtggggaggaaaagggatgtgatgtttgggaatcatcctttggctgtagagcatcagatgggactggtgtgtggcccagggaggaggtgaagtctccagaggtggggattgctgtgactaaagaaacctgggaagcacctttggggtctcctcagtgcatgctttccagcttgagcccagcccgtcatctttgctttccttctgtgatgatttattattatacrggactacaatcccatataataatcccaaaagtgcttcaccctcaattacaccctactgygttacctctacagaatgaccrgaggcagcccctaatcctgagcatctcacacaaacagagctgggggcagtggcaatgtaaacaactccagctgccctttttggagagctgtgatcactccttaggggttgttcccatgcagaacactgagcccacgcagcatttccagttattrcccaatgcccgagcttaggtttcccagtgacaatacagcagaaagtgattagcacttataactcca

SEQ ID NO: 42919 - DNA, 600 bp, Chicken  19866894280439_15
tggtgcagttcattggggtggggaggaaaagggatgtgatgtttgggaatcatcctttggctgtagagcatcagatgggactggtgtgtggcccagggaggaggtgaagtctccagaggtggggattgctgtgactaaagaaacctgggaagcacctttggggtctcctcagtgcatgctttccagcttgagcccagcccgtcatctttgctttccttctgtgatgatttattattatacrggactacaatcccatataataatcccaaaagtgcttcaccctcaattacaccctactgygttacctctacagaatgaccrgaggcagcccctaatcctgagcatctcacacaaacagagctgggggcagtggcaatgtaaacaactccagctgccctttttggagagctgtgatcactccttaggggttgttcccatgcagaacactgagcccacgcagcatttccagttattrcccaatgcccgagcttaggtttcccagtgacaatacagcagaaagtgattagcacttataactccatccaggtcctcctcagtaaagctccttgctttgtttgggggctcggaagaggaactgta

SEQ ID NO: 42920 - DNA, 600 bp, Chicken  19866894280439_16
ggaggaaaagggatgtgatgtttgggaatcatcctttggctgtagagcatcagatgggactggtgtgtggcccagggaggaggtgaagtctccagaggtggggattgctgtgactaaagaaacctgggaagcacctttggggtctcctcagtgcatgctttccagcttgagcccagcccgtcatctttgctttccttctgtgatgatttattattatacrggactacaatcccatataataatcccaaaagtgcttcaccctcaattacaccctactgygttacctctacagaatgaccrgaggcagcccctaatcctgagcatctcacacaaacagagctgggggcagtggcaatgtaaacaactccagctgccctttttggagagctgtgatcactccttaggggttgttcccatgcagaacactgagcccacgcagcatttccagttattrcccaatgcccgagcttaggtttcccagtgacaatacagcagaaagtgattagcacttataactccatccaggtcctcctcagtaaagctccttgctttgtttgggggctcggaagaggaactgtacattacattgcttgaaagagt

SEQ ID NO: 42921 - DNA, 600 bp, Chicken  19866894280439_17
atgctttccagcttgagcccagcccgtcatctttgctttccttctgtgatgatttattattatacrggactacaatcccatataataatcccaaaagtgcttcaccctcaattacaccctactgygttacctctacagaatgaccrgaggcagcccctaatcctgagcatctcacacaaacagagctgggggcagtggcaatgtaaacaactccagctgccctttttggagagctgtgatcactccttaggggttgttcccatgcagaacactgagcccacgcagcatttccagttattrcccaatgcccgagcttaggtttcccagtgacaatacagcagaaagtgattagcacttataactccatccaggtcctcctcagtaaagctccttgctttgtttgggggctcggaagaggaactgtacattacattgcttgaaagagtgtcctctgttgtgggaaatctccatctattttgcttccatgttatctgcatggctgtaattagaaaacgatgtgcctgctacgtgacctcctcataaagaacatagctaaagcgaggcaataacattcaattccctttctaaaccatcaaaaag

SEQ ID NO: 42922 - DNA, 600 bp, Chicken  19866894280439_2
ctttattagaggactgcagtttatggcacgtgggggaatgcgttgctctcctccctttctgctccttccttttgcctttagccagaggaacaaaaacaaaaggcaaagcaatgtgtgcagctgctggagggagttgctgcaaagcaggcgctccctgcacaaaaagcagtgatggtgaaagtggttttcctgcaccatctggagaggtgggggcgaggcggtggggctgtgtcctgcaacctcaccttccaaagcgaggagaaacccttcaggcctttgaaggaagcagtgcatggccgscagtggctccaaggtgctgcaggagttgccagggctttgatctctcccacctcatctgtgcgttgctcacgattttcccaacgttgcgctcctttgcgtaaaaactcacctttgtgttgctgcacataatgactgaatagcgataataacaataaaactcccgggaaatctccccgtggcaacaagtaattgacccggggattctcactggaaggaattattgttgttttatttctcttaataaccacacagcattggagatccgcgcgtccgtcgggggatgcaccgccattgttctcg

SEQ ID NO: 42923 - DNA, 600 bp, Chicken  19866894280439_3
aggaggaggaatttttttttagatgactggctattttgatctgcaaggtctgtgcgcagtgtgagggaacaaacatcactaaatcattaagggggaaaggaagggtatgcataatggaaaggaggaacacaaaagccactgctcagtggtagggacgggcgctgggtgcggtgcctctccagccctggtttctctgaaacttggcagggttaccttctgacattgtcaggttgtgttccttggttataagtcgctttcagtcccttatgcctttagaaataatgggcattaagcaggatrtctgactggagcagcggttccttccaacccatcatgccatggtcccatagccatgggtcctacagccttgcccccatctgtggtgctgcaccgctcgccctgccctcctgcagccaacagcactagtgaaagccaagatctctcctggagctgtgtgccataggataatgcacagacacacttcccgttcagatgttcctcttctgttttgggagataataaaataccacatgcatggaggaaaaaaggttagcctgtcactaaggaaaaatccttctatttagcatgataattctttaa

SEQ ID NO: 42924 - DNA, 600 bp, Chicken  19866894280439_4
ctctcctggagctgtgtgccataggataatgcacagacacacttcccgttcagatgttcctcttctgttttgggagataataaaataccacatgcatggaggaaaaaaggttagcctgtcactaaggaaaaatccttctatttagcatgataattctttaaaaaaaaaaagtgttacctgctaattatgggactcacagtatacatagaatcactgaatcattaagacatgtctccatgaccatcctacctgggctgagcgccctctgtgtgatggtttccatctggacccaagctctgyagcacaattcttgcttaggacctacagtcatattaagcttgttctggttttgtgaaaaattgttaatacctggtattatttcttccaaatctggatatctgcaattgagattggatcatgttgtggttgaacttttctgtttctctgtggatcgtgggaagtggcttgcttaagctgcagatggcaactgaacttagttccctaaatgctgacccttactttctctaaatgttgacccccattactcaccagttttagatttagttcaggattctgcaaacacttaggcacatgttttac

SEQ ID NO: 42925 - DNA, 600 bp, Chicken  19866894280439_5
gtgaaaaattgttaatacctggtattatttcttccaaatctggatatctgcaattgagattggatcatgttgtggttgaacttttctgtttctctgtggatcgtgggaagtggcttgcttaagctgcagatggcaactgaacttagttccctaaatgctgacccttactttctctaaatgttgacccccattactcaccagttttagatttagttcaggattctgcaaacacttaggcacatgttttacttcacacacttaatggcatcatttgcttatatgccattaaacacatgtacygttcttcatgggatccaagagcctgccacamatactttgggttcagcttccactttgcatcccctgaattagagctggcmttgtttcaggaacagcctagtgccctggctggttgctttaatgtgctgactcccttcctgctctctgcrcacactgacatgagcctgtccctaatctccagcagtgactttgggttccatatgtctccttgagctgcatgagtgttcctgacatatgagatggtggtggttgtggggtcaaccagagtaacttccraaaacatgtggaaggagaaagtct

SEQ ID NO: 42926 - DNA, 600 bp, Chicken  19866894280439_6
ttccaaatctggatatctgcaattgagattggatcatgttgtggttgaacttttctgtttctctgtggatcgtgggaagtggcttgcttaagctgcagatggcaactgaacttagttccctaaatgctgacccttactttctctaaatgttgacccccattactcaccagttttagatttagttcaggattctgcaaacacttaggcacatgttttacttcacacacttaatggcatcatttgcttatatgccattaaacacatgtacygttcttcatgggatccaagagcctgccacamatactttgggttcagcttccactttgcatcccctgaattagagctggcmttgtttcaggaacagcctagtgccctggctggttgctttaatgtgctgactcccttcctgctctctgcrcacactgacatgagcctgtccctaatctccagcagtgactttgggttccatatgtctccttgagctgcatgagtgttcctgacatatgagatggtggtggttgtggggtcaaccagagtaacttccraaaacatgtggaaggagaaagtctcccattttcccttctgcagctgagtattttc

SEQ ID NO: 42927 - DNA, 600 bp, Chicken  19866894280439_7
cttttctgtttctctgtggatcgtgggaagtggcttgcttaagctgcagatggcaactgaacttagttccctaaatgctgacccttactttctctaaatgttgacccccattactcaccagttttagatttagttcaggattctgcaaacacttaggcacatgttttacttcacacacttaatggcatcatttgcttatatgccattaaacacatgtacygttcttcatgggatccaagagcctgccacamatactttgggttcagcttccactttgcatcccctgaattagagctggcmttgtttcaggaacagcctagtgccctggctggttgctttaatgtgctgactcccttcctgctctctgcrcacactgacatgagcctgtccctaatctccagcagtgactttgggttccatatgtctccttgagctgcatgagtgttcctgacatatgagatggtggtggttgtggggtcaaccagagtaacttccraaaacatgtggaaggagaaagtctcccattttcccttctgcagctgagtattttcttctgagtatttgtccatgccctgctttgggatcgtggaacaaagggga

SEQ ID NO: 42928 - DNA, 600 bp, Chicken  19866894280439_8
cctaaatgctgacccttactttctctaaatgttgacccccattactcaccagttttagatttagttcaggattctgcaaacacttaggcacatgttttacttcacacacttaatggcatcatttgcttatatgccattaaacacatgtacygttcttcatgggatccaagagcctgccacamatactttgggttcagcttccactttgcatcccctgaattagagctggcmttgtttcaggaacagcctagtgccctggctggttgctttaatgtgctgactcccttcctgctctctgcrcacactgacatgagcctgtccctaatctccagcagtgactttgggttccatatgtctccttgagctgcatgagtgttcctgacatatgagatggtggtggttgtggggtcaaccagagtaacttccraaaacatgtggaaggagaaagtctcccattttcccttctgcagctgagtattttcttctgagtatttgtccatgccctgctttgggatcgtggaacaaaggggatggatcacatggaggtcgctttctcttggggggattctatatggagctaggagttggactcagtgatcc

SEQ ID NO: 42929 - DNA, 600 bp, Chicken  19866894280439_9
tatatgccattaaacacatgtacygttcttcatgggatccaagagcctgccacamatactttgggttcagcttccactttgcatcccctgaattagagctggcmttgtttcaggaacagcctagtgccctggctggttgctttaatgtgctgactcccttcctgctctctgcrcacactgacatgagcctgtccctaatctccagcagtgactttgggttccatatgtctccttgagctgcatgagtgttcctgacatatgagatggtggtggttgtggggtcaaccagagtaacttccraaaacatgtggaaggagaaagtctcccattttcccttctgcagctgagtattttcttctgagtatttgtccatgccctgctttgggatcgtggaacaaaggggatggatcacatggaggtcgctttctcttggggggattctatatggagctaggagttggactcagtgatccacgtgggtcccttccaacttgaggtattctgtggtgygtgagcatgggctgaccctaaatgtagggtgaatggggcagccaccccccctgctgccatgggaggtggtgatggggctgatgtgygggt

SEQ ID NO: 42930 - DNA, 600 bp, Chicken  19866894280443_1
ccttactccacaggagtttaggcttgtttgcattcagaactctaaaatgccaagagtttttcctctgtgctccatgagttccgcacagttaatggtgcctgttgtttgaatggtctctggtagcacttgtgaaagctgaaggagtgaggataatcaaaatgcctacaaatgagctgagcaaagtcagggatcagaggacatcacatttgttacggtagaaattgaattcagagttgcctttagagtctcagtagagcacttttctgtggagaacagcttattcaagttcaataagaaatratttttccaggaagcttgttctaagaaggctttaggtagaaaacacttatgtcatcattgatatgtaacaatgtgtgcctaaaatatgtatatgagatggtgaatgtcaaattcagtatgtggaataggacttgggatggagtgagatgtcagcaatcaaaattgcattcctgaataatttatggatttttgggggctcttagaactcttgcggtggcaccctgtcaccagtaggagtgaaaaatttcaactctaagaatttttttttttcctggatactcttgaataattttatgtcct

SEQ ID NO: 42931 - DNA, 600 bp, Chicken  19866894280459_1
ctccccacagaagccagcagcctgtggttaacaccatgtcgtgtgttggtgggaacacacttgagcaatgagcactcaggacgaaatgcagctttgtgtcttttctcttacactggaggaatgggacaaatgttccatagataatgtcacttgaaaaagttgaagggcaaggttggggaaccaagttagtttgttaaatgaagctttagacttggaggtaatcggatgatgccagtgaatcactgaagaaaatgtttgacaagatgaaccaatacttctgcctgaggagtttattttgtrttttctttcattgctttctctgagagagagcaaggtaacaaacgcaggctgagtggaggctgtttgtcactgagtggtggatgcccttgatttcagtgggaaattctccatccattttattctatttatatgaatgaagaaagtaaatatttttggtcagcctgacgtgaagtgaaagaaagatcagcagtggaacaacattgggtgggggaatgtgatcagcatataaagctcttctgcattagaatgcatttgctttaggcatgtgactatttattcccttatagttttatgtatgtg

SEQ ID NO: 42932 - DNA, 600 bp, Chicken  19866894280471_1
aaaagctccactccttgatttcttcggggtgtgtagtcaatttgttctggtgaaaatggatttctgcagttcaaatgcagctgaggggctgctcagccagccagggtattgatgcccaatggagaaatcacagggagtgcccactgatttttgtgttacattttgattgcaggtcttctgtagataaacacgactaattgatgatttatgtgtatcctgattgctttagatggacactatcttgcagtgtctgtttcaatccttgctgcatttgtcatctaaatgtttctatttcccctycataaaacaaacctgcagagtaatgacctgaggatgtaaactctttacgttcctctcaacctgctggatgcttccaccatagagttctcttgcagagctctggctgcctctggatttattgtgtcctggttaaaaacctgtgtctgataaaagcttcatacgcttcagatcagtgtcttagaaaagtgataggcaaaggtcacacctgtccatacatgagtgttctaaccttgagtaacgtgcaaatgtttaagcagactttattctggatatccaacagttttaactgcttgcaagttc

SEQ ID NO: 42933 - DNA, 600 bp, Chicken  19866894280471_2
agttgagtgtgagaatgagatgttaagaggccctgaaaccccttggacaaatgcttcgaaagagagctggacaagaaagtaataaaagctgtggcagctttatgagcagcctggttctgttattgataaacatctttatacactcagtcccctgggaagagcactgcccttggcttataagtgaatttattttcctgaattattcattggctttattaattcacttctccacaggtagtaaaaccattccattattgccagtgtggtttggaaagggaaaccaaccaaacagcaaagcartgtgcaggggatggctctggcttcaggttttggaatgrgataaggaaggagccaccatcagcacagctccttggatgcttgtgtttcagccttgcagcctcayacgtttctctacatwggagtgcatgctaaaataagcactctccaatagctggggagcaggtctggatttcacatgtctgctcagacttgacaggaacgcagcagcactgttaggtatacagctggtcactgctgtgggggtctggaagagagacaggggagtcttggagctgtgtgagcctcacttacctgtcccta

SEQ ID NO: 42934 - DNA, 600 bp, Chicken  19866894280471_3
ccccttggacaaatgcttcgaaagagagctggacaagaaagtaataaaagctgtggcagctttatgagcagcctggttctgttattgataaacatctttatacactcagtcccctgggaagagcactgcccttggcttataagtgaatttattttcctgaattattcattggctttattaattcacttctccacaggtagtaaaaccattccattattgccagtgtggtttggaaagggaaaccaaccaaacagcaaagcartgtgcaggggatggctctggcttcaggttttggaatgrgataaggaaggagccaccatcagcacagctccttggatgcttgtgtttcagccttgcagcctcayacgtttctctacatwggagtgcatgctaaaataagcactctccaatagctggggagcaggtctggatttcacatgtctgctcagacttgacaggaacgcagcagcactgttaggtatacagctggtcactgctgtgggggtctggaagagagacaggggagtcttggagctgtgtgagcctcacttacctgtccctattactgtagtgctttctttttgcagcctcttgctattt

SEQ ID NO: 42935 - DNA, 600 bp, Chicken  19866894280471_4
gagcagcctggttctgttattgataaacatctttatacactcagtcccctgggaagagcactgcccttggcttataagtgaatttattttcctgaattattcattggctttattaattcacttctccacaggtagtaaaaccattccattattgccagtgtggtttggaaagggaaaccaaccaaacagcaaagcartgtgcaggggatggctctggcttcaggttttggaatgrgataaggaaggagccaccatcagcacagctccttggatgcttgtgtttcagccttgcagcctcayacgtttctctacatwggagtgcatgctaaaataagcactctccaatagctggggagcaggtctggatttcacatgtctgctcagacttgacaggaacgcagcagcactgttaggtatacagctggtcactgctgtgggggtctggaagagagacaggggagtcttggagctgtgtgagcctcacttacctgtccctattactgtagtgctttctttttgcagcctcttgctatttgtggatgaagcagatgcatttctgaggaagagagccacggtgagtgctttctctctggtcattat

SEQ ID NO: 42936 - DNA, 600 bp, Chicken  19866894280471_5
gttattgataaacatctttatacactcagtcccctgggaagagcactgcccttggcttataagtgaatttattttcctgaattattcattggctttattaattcacttctccacaggtagtaaaaccattccattattgccagtgtggtttggaaagggaaaccaaccaaacagcaaagcartgtgcaggggatggctctggcttcaggttttggaatgrgataaggaaggagccaccatcagcacagctccttggatgcttgtgtttcagccttgcagcctcayacgtttctctacatwggagtgcatgctaaaataagcactctccaatagctggggagcaggtctggatttcacatgtctgctcagacttgacaggaacgcagcagcactgttaggtatacagctggtcactgctgtgggggtctggaagagagacaggggagtcttggagctgtgtgagcctcacttacctgtccctattactgtagtgctttctttttgcagcctcttgctatttgtggatgaagcagatgcatttctgaggaagagagccacggtgagtgctttctctctggtcattatctgtgcatgttgcag

SEQ ID NO: 42937 - DNA, 600 bp, Chicken  19866894280474_1
ttttaatcacagacacacgtacacatttcccaggatctttcaaatctccctgccagatcccctttttaatgaatgagcaaggtattgaaaccagcaggaatcctgctttctcaaggcctaggaacacaattcttgcaaatctcaaatcctgctgggtaagagaagccaatagaccacacaatacacacaggatggggaccaagattattgctaactccgactgctttggagccaggatttcatcagttccacatttcagtaagcatcccttgaatatcatgcaaaaaggagcagaatgcractgcaatgcagtcttgctttctttgggtacccagagcactagatgaccttgcaagtaccagaaacagtgccagaaggtattactagtgcctcccaggtacctttctgtggtagtgatgctgcttctctacagctgtaccgcctccaggcatcatctgcctgatttggtgtgggtgctttgaggtagacctaactctccagccctctgtcttgacaatacascccatagaacaccacacacaccatgcctgaaacacggtgacatgagttagcgtgatctaaaagcagatttgctctaag

SEQ ID NO: 42938 - DNA, 600 bp, Chicken  19866894280474_2
gctttggagccaggatttcatcagttccacatttcagtaagcatcccttgaatatcatgcaaaaaggagcagaatgcractgcaatgcagtcttgctttctttgggtacccagagcactagatgaccttgcaagtaccagaaacagtgccagaaggtattactagtgcctcccaggtacctttctgtggtagtgatgctgcttctctacagctgtaccgcctccaggcatcatctgcctgatttggtgtgggtgctttgaggtagacctaactctccagccctctgtcttgacaatacascccatagaacaccacacacaccatgcctgaaacacggtgacatgagttagcgtgatctaaaagcagatttgctctaaggtgcaggactgtgaagcagagaggttgtgttcctaacaccagctctgctgtggaaagacacgcctctacgcagcaggacggtacgcaaaccactgaagggcaatgacatcacagactgctgcagctgtttgttcagcagaagtcagagctgcaaaataaatccaggcactatgaggagcagtgttaaacaaatctgctgttagaaggattagatatcttcca

SEQ ID NO: 42939 - DNA, 600 bp, Chicken  19866894280480_1
tcaagacgttggtaaagatttaagaagatttttctcttcagataactatttcagattgatcactgatatgaattacagaaataaataacatctattttatggcagcttatgtgaaattagttcacaggccaggatctctactggccacatgtccctatcatcatcattatcatcatatctgctgttggtcagcagatcatactgcttacatctcaagtcaaaaagcagtccactggggaactgcaatggaataagccagaagtgcatttcattctcttttcattagcctttctattattwttattagaataacaacagattagaagtatgtcttcattttaaagttaacttgaatgtatccctaacacaccctctatctagagattacatctggatgcagaactctcaccctttaatacaagatttactgatcaaaatggcgtagaraatcattctgcagaggatctctgaatgcattgaacaccatgaatcttataatacctccttcccattccctgtacagaaatataccccacatcagccgtctgcagaagacttaatctaatcatttgtggggttttttttgtttgtttgtttatt

SEQ ID NO: 42940 - DNA, 600 bp, Chicken  19866894280480_2
catgtccctatcatcatcattatcatcatatctgctgttggtcagcagatcatactgcttacatctcaagtcaaaaagcagtccactggggaactgcaatggaataagccagaagtgcatttcattctcttttcattagcctttctattattwttattagaataacaacagattagaagtatgtcttcattttaaagttaacttgaatgtatccctaacacaccctctatctagagattacatctggatgcagaactctcaccctttaatacaagatttactgatcaaaatggcgtagaraatcattctgcagaggatctctgaatgcattgaacaccatgaatcttataatacctccttcccattccctgtacagaaatataccccacatcagccgtctgcagaagacttaatctaatcatttgtggggttttttttgtttgtttgtttatttgtctgtttttaaacagcattacccaggctgggatttctgatcctaatatctaatgatgtagcatatgcacatcaaaagtaaactgcctaggttatattagattactgtgctggtggtgacctgcctccttgcattagctccaacac

SEQ ID NO: 42941 - DNA, 600 bp, Chicken  19866894280486_1
actgaatactgcacagcaaaggccaaccagtgcagttcctggaagatgtcagcagcgatacgcccgtagcagggctcatccctatcctgcagccaccccttccagaagctgtgcacccacacagcccttgcacaggactactgagaaaccgagcaggattgggaactgcagcaataggccttgtcattggcttggacctgcttccaagaaaaacacaagaatcacagctctcaatatgacaaacaattacggtgagagtggggtcaaagccatgagaaaacataatgatgttcaatacarccatccagtatctggaagcaagcttcaaagtaaagtgacaaaacttgcaggtgacacatttctgtgtcagaaaaatacaaaatggggaagaaaacaaggtgcatgagcaactagatgacatactacattttgttttgaggaatgtatccatttgtatcagctcaaagcatggctgggttctaagtctgcatacctttccaagagaagggcatagaactgtaaaaggctgaatgaagtaatcagtgtatgattagaaagatgacaccacagaggaaatggcaatagtactgcagttattgc

SEQ ID NO: 42942 - DNA, 600 bp, Chicken  19866894280491_1
aagatgaagcccttcctgctttcctcgcttttcagtatcgctgctgttctctctacgctctctcctccttgctttgaccatggggtacctgcaggttcccatcctgctctgcacaaaaggcagtgtgaggagctgcagatgctgcagataagcacccgagacgcagcccttgcttcctcaatgaggccgtgtgtttgcatgggtagggcagcaggagcagggcttatgagtgacagagcaaaaatcagcgattactacttggcaggagatgcttaaactttgtcaaaccaggcaagtatmtccattgtggtctctgactcacaatccaaatatgctgggaacatttgagggggctgggtcagttcttcaagcagtgggaaaaacaaggctctaatacatcayggcagagcattggatctgtgcttcactgttctccttttctttgaggaaactggtgtggctgccggggtggagagggaggtgttgtgaaaccacacacacacacacacacaaacacatgcgccaggcctgattttgatcctttttgacaatgttcaattctccttgggctgtggtgaaggagatgcaacgcttgtgact

SEQ ID NO: 42943 - DNA, 600 bp, Chicken  19866894280491_2
cctgctctgcacaaaaggcagtgtgaggagctgcagatgctgcagataagcacccgagacgcagcccttgcttcctcaatgaggccgtgtgtttgcatgggtagggcagcaggagcagggcttatgagtgacagagcaaaaatcagcgattactacttggcaggagatgcttaaactttgtcaaaccaggcaagtatmtccattgtggtctctgactcacaatccaaatatgctgggaacatttgagggggctgggtcagttcttcaagcagtgggaaaaacaaggctctaatacatcayggcagagcattggatctgtgcttcactgttctccttttctttgaggaaactggtgtggctgccggggtggagagggaggtgttgtgaaaccacacacacacacacacacaaacacatgcgccaggcctgattttgatcctttttgacaatgttcaattctccttgggctgtggtgaaggagatgcaacgcttgtgacttatccttgccggggtgaaccgaggtgcagatcacaaycacggcccacatcccgcatcctggctgagctgtgccacgtggatgggtgcatggaaggcactgct

SEQ ID NO: 42944 - DNA, 600 bp, Chicken  19866894280491_3
ggaacatttgagggggctgggtcagttcttcaagcagtgggaaaaacaaggctctaatacatcayggcagagcattggatctgtgcttcactgttctccttttctttgaggaaactggtgtggctgccggggtggagagggaggtgttgtgaaaccacacacacacacacacacaaacacatgcgccaggcctgattttgatcctttttgacaatgttcaattctccttgggctgtggtgaaggagatgcaacgcttgtgacttatccttgccggggtgaaccgaggtgcagatcacaaycacggcccacatcccgcatcctggctgagctgtgccacgtggatgggtgcatggaaggcactgctaaagcacaagtgatgcttgacctgaaagcagtcggccagtttggaagggaaggtgggtgggaccaggcatcttctcccagatcgcgttgcagcaatggatcctctcctgcctggggatgctcctggtgcctggggtgtgggcggccagttgaggggtggctgcgtggcagggcagctgttggctccatcgctgggatatgagaggctctgctgggctcggatcacagcctggctt

SEQ ID NO: 42945 - DNA, 599 bp, Chicken  19866894280494_1
  misc_feature (1)..(96): n is any nucleotide
nnnnnnnnnnnnnnnnnnnnnnnnnnnnnnnnnnnnnnnnnnnnnnnnnnnnnnnnnnnnnnnnnnnnnnnnnnnnnnnnnnnnnnnnnnnnnnnnaaaactttggtaattgtagtttgtatgaagttatatcagctttaaggctcttctgaattccttcttctgtaaggagctcaacagtagttttcaggagaaaaaaagcaccttaggaatgaggtagaaatgttcactgtgcaagaattaattcacgtcatagaatcacagaatggcctgggttgaaaagaaccacaatgatcattragtttcaaccccyctgctrtgtgcagggtcgccaaccaccagaccaggctgcccagagccacatccagcctggccttgaatgcttccagggatggggcatccacagcctccttgggcaacctgttccagtgtgtcaccaccctctgaatgaaaaacttcctcctaaacctcccctgtctcagtttaaaaccattcttccttgtcctatcactgtgtacctattcattccccactgttttttctttgtgtcagaggaggctttttgtaaggatagaaacctagtaatagtctagtcctac

SEQ ID NO: 42946 - DNA, 599 bp, Chicken  19866894280494_2
  misc_feature (1)..(83): n is any nucleotide
nnnnnnnnnnnnnnnnnnnnnnnnnnnnnnnnnnnnnnnnnnnnnnnnnnnnnnnnnnnnnnnnnnnnnnnnnnnnnnnnnnnaaaactttggtaattgtagtttgtatgaagttatatcagctttaaggctcttctgaattccttcttctgtaaggagctcaacagtagttttcaggagaaaaaaagcaccttaggaatgaggtagaaatgttcactgtgcaagaattaattcacgtcatagaatcacagaatggcctgggttgaaaagaaccacaatgatcattragtttcaaccccyctgctrtgtgcagggtcgccaaccaccagaccaggctgcccagagccacatccagcctggccttgaatgcttccagggatggggcatccacagcctccttgggcaacctgttccagtgtgtcaccaccctctgaatgaaaaacttcctcctaaacctcccctgtctcagtttaaaaccattcttccttgtcctatcactgtgtacctattcattccccactgttttttctttgtgtcagaggaggctttttgtaaggatagaaacctagtaatagtctagtcctacacagttgacttaa

SEQ ID NO: 42947 - DNA, 599 bp, Chicken  19866894280494_3
  misc_feature (1)..(77): n is any nucleotide
nnnnnnnnnnnnnnnnnnnnnnnnnnnnnnnnnnnnnnnnnnnnnnnnnnnnnnnnnnnnnnnnnnnnnnnnnnnnnaaaactttggtaattgtagtttgtatgaagttatatcagctttaaggctcttctgaattccttcttctgtaaggagctcaacagtagttttcaggagaaaaaaagcaccttaggaatgaggtagaaatgttcactgtgcaagaattaattcacgtcatagaatcacagaatggcctgggttgaaaagaaccacaatgatcattragtttcaaccccyctgctrtgtgcagggtcgccaaccaccagaccaggctgcccagagccacatccagcctggccttgaatgcttccagggatggggcatccacagcctccttgggcaacctgttccagtgtgtcaccaccctctgaatgaaaaacttcctcctaaacctcccctgtctcagtttaaaaccattcttccttgtcctatcactgtgtacctattcattccccactgttttttctttgtgtcagaggaggctttttgtaaggatagaaacctagtaatagtctagtcctacacagttgacttaataataa

SEQ ID NO: 42948 - DNA, 600 bp, Chicken  19866894280495_1
ttgaaactttatttcccctctcttagaaatggatgtaggggaatttttgctcactttcctttcccctgaggaccatccgggctgcaggcagcgctgccattcctgcatcccatcagtgggacagtgtgaggctcgcactgcatcctcccctatcgcttgattgggatcacactgagcgctcccaaaagcatttaggaagacagtgcttctcattgtaatggctgcatagcagccaagtgagctgtgagtgctgagatgctgtcttccagggactgagaattcagatttcccatcctcctrcactggatggctggtcctgctgtaacaggctgtagctttgtcccttgcagctgaatctgaagctgcagtctcttgcctggcattgcccacccctcacacattgtgctgctctgtcacactgggaagccgaggggtgcagctgctttccctrctggagcctcaggcctgagggacccgggttaatgctgtgtttctctttccccagagatcatcgacgacctcacgaacctggtggagaacacggacagcaagcttcgcactcagacacggcacgtgaagatggtggacagaaagtcaacg

SEQ ID NO: 42949 - DNA, 600 bp, Chicken  19866894280495_2
atcgcttgattgggatcacactgagcgctcccaaaagcatttaggaagacagtgcttctcattgtaatggctgcatagcagccaagtgagctgtgagtgctgagatgctgtcttccagggactgagaattcagatttcccatcctcctrcactggatggctggtcctgctgtaacaggctgtagctttgtcccttgcagctgaatctgaagctgcagtctcttgcctggcattgcccacccctcacacattgtgctgctctgtcacactgggaagccgaggggtgcagctgctttccctrctggagcctcaggcctgagggacccgggttaatgctgtgtttctctttccccagagatcatcgacgacctcacgaacctggtggagaacacggacagcaagcttcgcactcagacacggcacgtgaagatggtggacagaaagtcaacgtcctgcggtaggaaacgagcacaaatcccatgctgttactaaatgcaacggcacaggtcgtgccctgaggctgtgtgcgctgtgcttctcccaaggaaggtttcctatggagggaggaagccgtctctccaacctccatgtgccttcagcc

SEQ ID NO: 42950 - DNA, 600 bp, Chicken  19866894280497_1
gtctgaactatatgatcttgttccttaggcactgctacttcctgtcttcttgacagtacaaatgataacattcacgcttagaatctactatcttcccagttatagtgcagaatatgtgagcatccaagcatccacagctatctacaccgagacataagtggattgcaattcatcagtctgcttatgcatagtgggcactgcaaatcacacccgagaggactgtctgcagaagatgtctagagaaaatctggaggaatctacaccgaaaaacagatatgctgttaaggcaggggaaaaaawaaaaaaaawaaaaaaaatcaaacccacagctgccttcaagcaagtacagcatgtcacattcagctgtgcttacactcagaaaaatctttcttggaaagactgcaaattttattacttttttcttcaattttagctttttcttttttcctttttctaaagatagtatagtacagaaccaagaccacagacatacatctttcaaagaggaaacaacctcacctgagaaccttctgagaaagacactgatcagtggcctctctgttaccaatgtgttctccccaccattactgcaattcgtca

SEQ ID NO: 42951 - DNA, 600 bp, Chicken  19866894280497_2
atatgatcttgttccttaggcactgctacttcctgtcttcttgacagtacaaatgataacattcacgcttagaatctactatcttcccagttatagtgcagaatatgtgagcatccaagcatccacagctatctacaccgagacataagtggattgcaattcatcagtctgcttatgcatagtgggcactgcaaatcacacccgagaggactgtctgcagaagatgtctagagaaaatctggaggaatctacaccgaaaaacagatatgctgttaaggcaggggaaaaaawaaaaaaaawaaaaaaaatcaaacccacagctgccttcaagcaagtacagcatgtcacattcagctgtgcttacactcagaaaaatctttcttggaaagactgcaaattttattacttttttcttcaattttagctttttcttttttcctttttctaaagatagtatagtacagaaccaagaccacagacatacatctttcaaagaggaaacaacctcacctgagaaccttctgagaaagacactgatcagtggcctctctgttaccaatgtgttctccccaccattactgcaattcgtcacttgcattc

SEQ ID NO: 42952 - DNA, 600 bp, Chicken  19866894280501_1
acctcaatgcttatatccactggagtcttgtagatttcgggataaaaggaccaactttatctttcagaaagagaagcagccataggtaagtgtttaacagaataagtcccttagaatccttgaagatgctgtaagcttatgttctaaaattccacccccaaatcacatcagtgttctaccaggcccctgcgactgactgtccttggctgaagatgccagccaaggggcacagaggaccagtttagacatacagtgtgcctgagaaagaattggcatgcctaagagaatgggatacagtgyagggaarcccaaaggagcacagagctgggtttcctgtgaggcactatgaatctctaagcacaaatgctgtctgccttctgtgcttggactttgcttgctcacacaacacccaacatttgtattgcacttgaaattcctacagttcttgggttagggcactttgtgtgcccattggctccatcacactcaagaagagccagcacagaagcaccatcttccacaaagtctcagagaacccttcataatgttaacatgtttatccctcctatttttgttcctcaaaagcactaggactagctc

SEQ ID NO: 42953 - DNA, 600 bp, Chicken  19866894280501_2
tgcttatatccactggagtcttgtagatttcgggataaaaggaccaactttatctttcagaaagagaagcagccataggtaagtgtttaacagaataagtcccttagaatccttgaagatgctgtaagcttatgttctaaaattccacccccaaatcacatcagtgttctaccaggcccctgcgactgactgtccttggctgaagatgccagccaaggggcacagaggaccagtttagacatacagtgtgcctgagaaagaattggcatgcctaagagaatgggatacagtgyagggaarcccaaaggagcacagagctgggtttcctgtgaggcactatgaatctctaagcacaaatgctgtctgccttctgtgcttggactttgcttgctcacacaacacccaacatttgtattgcacttgaaattcctacagttcttgggttagggcactttgtgtgcccattggctccatcacactcaagaagagccagcacagaagcaccatcttccacaaagtctcagagaacccttcataatgttaacatgtttatccctcctatttttgttcctcaaaagcactaggactagctctacctgg

SEQ ID NO: 42954 - DNA, 599 bp, Chicken  19866894280504_1
  misc_feature (1)..(92): n is any nucleotide
nnnnnnnnnnnnnnnnnnnnnnnnnnnnnnnnnnnnnnnnnnnnnnnnnnnnnnnnnnnnnnnnnnnnnnnnnnnnnnnnnnnnnnnnnnnntccaattgaagcattcagaaacacagttttgaattttgacaaaaacaagtgcaggagataactctaggcactaagtagtttgtcttgactttctttactgcaaacagaggaagagcgctcggtttaggaccttgcctgaatcactgtttacagaatcccttcatccatctctttttccacagaccacagatgcatcctaaacagaatwcgctcaaagtcagactttgagaataccttcagctcctttcttagccaattctccaggcaggtgattacagtgagaggtccagacattcctacacatggtttgctatgcaaacacagaaaagatagcaagacataatggaaaaaaaaaacaaagaacaacatactgttcctaaacattcactgtggttacaagggacaatataatgaataaattggaactgctgtttttgcagcaaatattatcttggtgtatgctggtactcaggacagaaattgttgaactctttactttaaaatata

SEQ ID NO: 42955 - DNA, 600 bp, Chicken  19866894280504_2
accttcagctcctttcttagccaattctccaggcaggtgattacagtgagaggtccagacattcctacacatggtttgctatgcaaacacagaaaagatagcaagacataatggaaaaaaaaaacaaagaacaacatactgttcctaaacattcactgtggttacaagggacaatataatgaataaattggaactgctgtttttgcagcaaatattatcttggtgtatgctggtactcaggacagaaattgttgaactctttactttaaaatatacatagccacaaaccttctgtgcagrttctggtacttttagtagttctttgtcaattttccttaaaactgataattttccaggtaatcttcaggcaattttttttttttttaatctggctattgaatttttttgtgtgtaggctaattcttkaagatcatacaggtgctaaagtgttcatagactatacatgatcctcatgcaaagattaagtagtgtgaagtaatcacttgttattttcattcaaatttcttcttgggatcttgtttatctatcagtgcagttgaaagtgtaggttgcattcataaacccaaaaatggtcctggg

SEQ ID NO: 42956 - DNA, 600 bp, Chicken  19866894280504_3
aagaacaacatactgttcctaaacattcactgtggttacaagggacaatataatgaataaattggaactgctgtttttgcagcaaatattatcttggtgtatgctggtactcaggacagaaattgttgaactctttactttaaaatatacatagccacaaaccttctgtgcagrttctggtacttttagtagttctttgtcaattttccttaaaactgataattttccaggtaatcttcaggcaattttttttttttttaatctggctattgaatttttttgtgtgtaggctaattcttkaagatcatacaggtgctaaagtgttcatagactatacatgatcctcatgcaaagattaagtagtgtgaagtaatcacttgttattttcattcaaatttcttcttgggatcttgtttatctatcagtgcagttgaaagtgtaggttgcattcataaacccaaaaatggtcctgggatgcagcatttttagctgctgcctctccctacgcttctcacaactactgcagttcattgatgactttaccatctgcctgtaaacctgaaatgcttggtttaaatatataaaagcaagacagagaac

SEQ ID NO: 42957 - DNA, 600 bp, Chicken  19866894280507_1
gcttggcatcttttatgttgccagttcataaagggatctaatgactcatggctggaaatggctcttgctctacagacgatttgttttacgcatgagaagtagagtgtgacctagcatagagtagacttgaaaaaatgggccatcctcaaatcctaatgtgtcttaggaccttgcagtccctcctggtgtgccacccaccattatccatctatctctatgtatttcctgtatgctcatatacgaggagtttctgaaaggcacagaagtggctacctgctgaggtgcaggaacccactgccyggacacgtaccgggctgggtcctctccagaggctgcctggggagcagccagggatccgttctgttctccagcacctacaggtcagtctgtgctgtccgttgttgcaggaagmattggagttgctgacagcctgcctactgcagtaaatcccaaaaggaccactcctctgtgtccctccagctcccgttagaccttatccaatcccaagccccacactgggaccgttaggggaggcagcacaggatctttacaccagaaaggaagtcactcattcctgagccctttctgagttctttccag

SEQ ID NO: 42958 - DNA, 600 bp, Chicken  19866894280507_2
agcatagagtagacttgaaaaaatgggccatcctcaaatcctaatgtgtcttaggaccttgcagtccctcctggtgtgccacccaccattatccatctatctctatgtatttcctgtatgctcatatacgaggagtttctgaaaggcacagaagtggctacctgctgaggtgcaggaacccactgccyggacacgtaccgggctgggtcctctccagaggctgcctggggagcagccagggatccgttctgttctccagcacctacaggtcagtctgtgctgtccgttgttgcaggaagmattggagttgctgacagcctgcctactgcagtaaatcccaaaaggaccactcctctgtgtccctccagctcccgttagaccttatccaatcccaagccccacactgggaccgttaggggaggcagcacaggatctttacaccagaaaggaagtcactcattcctgagccctttctgagttctttccaggcagaactcaccccagaccttgccttccatgcatgtgaaagatacagtgtgccctttcctgccggagacaacagccctaagcaagggaatgcaggcatccgatgcgaacagc

SEQ ID NO: 42959 - DNA, 600 bp, Chicken  19866894280509_1
cttcaggaatgaatttgctccatggcttatagaatactactttgaaatgaataatgtttatttccattcagtttaaacactcataaacattttcacataatttacaaatgtgttttttccttgtataagttgtgtacattgcctatgtaaaaagcagtgagtcttcctgtagtttgtttaattttttaagtgcacacaaaggtggatataccactgaatttgtcagtacagtcattgcatttagttctcttgcctgacagcagcattaactactaacactgaacccatgtattacaacartagtggtagttctttgtaatattggcaagtttttggagaaggctttgtcctccagaggcttaatatgtctaaccaatttggagtgattgctagggacccyattactgttccctacaactgttcattgtgactatgattcaaagaaaactgctcatgttatgaatagaatccttatatgtattaaatctgtgttaaataagtgttctggcaatcctatacagatgaatgacttgtacatgatttctgagctttggagttcaagttgtaggtcaattccattaacaaattcagaactaaggc

SEQ ID NO: 42960 - DNA, 600 bp, Chicken  19866894280509_2
tttacaaatgtgttttttccttgtataagttgtgtacattgcctatgtaaaaagcagtgagtcttcctgtagtttgtttaattttttaagtgcacacaaaggtggatataccactgaatttgtcagtacagtcattgcatttagttctcttgcctgacagcagcattaactactaacactgaacccatgtattacaacartagtggtagttctttgtaatattggcaagtttttggagaaggctttgtcctccagaggcttaatatgtctaaccaatttggagtgattgctagggacccyattactgttccctacaactgttcattgtgactatgattcaaagaaaactgctcatgttatgaatagaatccttatatgtattaaatctgtgttaaataagtgttctggcaatcctatacagatgaatgacttgtacatgatttctgagctttggagttcaagttgtaggtcaattccattaacaaattcagaactaaggcttgattagcattgctcatttcatggaaaacttcttttagattatggcaggcaggctgctggtcaccttctcagttcatctgatgtttttgtactgaagcc

SEQ ID NO: 42961 - DNA, 600 bp, Chicken  19866894280509_3
acagatgaatgacttgtacatgatttctgagctttggagttcaagttgtaggtcaattccattaacaaattcagaactaaggcttgattagcattgctcatttcatggaaaacttcttttagattatggcaggcaggctgctggtcaccttctcagttcatctgatgtttttgtactgaagcctttgataactactaatccagcaaaggtttagtatatttttaaagtcagtttcttgttttctcagaaagcaccaggtgctgctttgatctctctttttcagtgttatttaaagttacygtgtccattttggagttttgtaaacatgctcacatctgctcttctgtaattcatcagagaaacctgctcacaattttatcatcttaaaaataaattccttgtatgctaccagcrtttctctttcttgatgtgwgaagatagctaataattagagtcccaaggatcctttgtggtaaaggagaaaatgacaatgagattgaatccctctttgtactttgttgtgaaataaagagggtcatgtcaaagtcctattcatgaagcacagtatggtaatgaactgtgcttttattcacaggttca

SEQ ID NO: 42962 - DNA, 600 bp, Chicken  19866894280509_4
tcttttagattatggcaggcaggctgctggtcaccttctcagttcatctgatgtttttgtactgaagcctttgataactactaatccagcaaaggtttagtatatttttaaagtcagtttcttgttttctcagaaagcaccaggtgctgctttgatctctctttttcagtgttatttaaagttacygtgtccattttggagttttgtaaacatgctcacatctgctcttctgtaattcatcagagaaacctgctcacaattttatcatcttaaaaataaattccttgtatgctaccagcrtttctctttcttgatgtgwgaagatagctaataattagagtcccaaggatcctttgtggtaaaggagaaaatgacaatgagattgaatccctctttgtactttgttgtgaaataaagagggtcatgtcaaagtcctattcatgaagcacagtatggtaatgaactgtgcttttattcacaggttcagtttgtccacctgactgctttgttgcctgctatgtctgttctctgactttttttttaatcacccagactcaaagaaaggctgtattaagtgagctgagtaaacaccgcactcac

SEQ ID NO: 42963 - DNA, 583 bp, Chicken  19866894280509_5
caggctgctggtcaccttctcagttcatctgatgtttttgtactgaagcctttgataactactaatccagcaaaggtttagtatatttttaaagtcagtttcttgttttctcagaaagcaccaggtgctgctttgatctctctttttcagtgttatttaaagttacygtgtccattttggagttttgtaaacatgctcacatctgctcttctgtaattcatcagagaaacctgctcacaattttatcatcttaaaaataaattccttgtatgctaccagcrtttctctttcttgatgtgwgaagatagctaataattagagtcccaaggatcctttgtggtaaaggagaaaatgacaatgagattgaatccctctttgtactttgttgtgaaataaagagggtcatgtcaaagtcctattcatgaagcacagtatggtaatgaactgtgcttttattcacaggttcagtttgtccacctgactgctttgttgcctgctatgtctgttctctgactttttttttaatcacccagactcaaagaaaggctgtattaagtgagctgagtaaacaccgcactcacat

SEQ ID NO: 42964 - DNA, 599 bp, Chicken  19866894280510_1
  misc_feature (1)..(71): n is any nucleotide
nnnnnnnnnnnnnnnnnnnnnnnnnnnnnnnnnnnnnnnnnnnnnnnnnnnnnnnnnnnnnnnnnnnnnnnaagaggaatgttaagttttcacattctggggaatcccttatatgcaaaaggagctacgaaatattatgactggttgttcatacccttttggaatcgagtagactcacatggactctgagttacccttaagatgccccttcttttagggagatacagtgcccatttgtttctttaggaatgagttgccatgggaatttattttccagacaagtatacaacccgaacctgrtttctggtttaaaggccatgttttgctacctcatttgcactcatcagcataagctgataaaggcaaatgtgagaagaaaacctgacaactggatgtgtttctaggagttgttctccaaaacctcattgcaattttgyattgccagctttttgggcagcactttaaaatgagtaggttcactaaacagagctgaaatgaaacagcatccctrtcattcacaaaatacaagaaacttcccttagccaagtttgtatcccattcctcactcagaacattattatttttatttattttataat

SEQ ID NO: 42965 - DNA, 600 bp, Chicken  19866894280510_2
tgactggttgttcatacccttttggaatcgagtagactcacatggactctgagttacccttaagatgccccttcttttagggagatacagtgcccatttgtttctttaggaatgagttgccatgggaatttattttccagacaagtatacaacccgaacctgrtttctggtttaaaggccatgttttgctacctcatttgcactcatcagcataagctgataaaggcaaatgtgagaagaaaacctgacaactggatgtgtttctaggagttgttctccaaaacctcattgcaattttgyattgccagctttttgggcagcactttaaaatgagtaggttcactaaacagagctgaaatgaaacagcatccctrtcattcacaaaatacaagaaacttcccttagccaagtttgtatcccattcctcactcagaacattattatttttatttattttataatagatgctgatacggtttgcacagttgcattcacagatgttaaggctgtaagccatcttatgaccaattctgactcttcatcatggttcatgagctcatctgcaactgattcccacttgaacaagagaagggcaygaga

SEQ ID NO: 42966 - DNA, 600 bp, Chicken  19866894280510_3
ttttagggagatacagtgcccatttgtttctttaggaatgagttgccatgggaatttattttccagacaagtatacaacccgaacctgrtttctggtttaaaggccatgttttgctacctcatttgcactcatcagcataagctgataaaggcaaatgtgagaagaaaacctgacaactggatgtgtttctaggagttgttctccaaaacctcattgcaattttgyattgccagctttttgggcagcactttaaaatgagtaggttcactaaacagagctgaaatgaaacagcatccctrtcattcacaaaatacaagaaacttcccttagccaagtttgtatcccattcctcactcagaacattattatttttatttattttataatagatgctgatacggtttgcacagttgcattcacagatgttaaggctgtaagccatcttatgaccaattctgactcttcatcatggttcatgagctcatctgcaactgattcccacttgaacaagagaagggcaygagaaagactagaaaaggcattcaattctatcacattgtattgtaaatgattgcagttcttacctatccttaatgcaa

SEQ ID NO: 42967 - DNA, 600 bp, Chicken  19866894280510_4
ttgyattgccagctttttgggcagcactttaaaatgagtaggttcactaaacagagctgaaatgaaacagcatccctrtcattcacaaaatacaagaaacttcccttagccaagtttgtatcccattcctcactcagaacattattatttttatttattttataatagatgctgatacggtttgcacagttgcattcacagatgttaaggctgtaagccatcttatgaccaattctgactcttcatcatggttcatgagctcatctgcaactgattcccacttgaacaagagaagggcaygagaaagactagaaaaggcattcaattctatcacattgtattgtaaatgattgcagttcttacctatccttaatgcaacttaaattatgygccttcagctttgtgctggatttccttgtatattttccaccagagtgaaatgtcccctgttagtgtctgttccacatgaaagcacttacaaaccataatcaagttattctttagcttttactctgacatactaaatctaaatagacttatactgtggttttgctccattttacaacctttcattttttttcattcatattctcatgggtc

SEQ ID NO: 42968 - DNA, 600 bp, Chicken  19866894280510_5
tacaagaaacttcccttagccaagtttgtatcccattcctcactcagaacattattatttttatttattttataatagatgctgatacggtttgcacagttgcattcacagatgttaaggctgtaagccatcttatgaccaattctgactcttcatcatggttcatgagctcatctgcaactgattcccacttgaacaagagaagggcaygagaaagactagaaaaggcattcaattctatcacattgtattgtaaatgattgcagttcttacctatccttaatgcaacttaaattatgygccttcagctttgtgctggatttccttgtatattttccaccagagtgaaatgtcccctgttagtgtctgttccacatgaaagcacttacaaaccataatcaagttattctttagcttttactctgacatactaaatctaaatagacttatactgtggttttgctccattttacaacctttcattttttttcattcatattctcatgggtcttctcagaactacctctagtttgccaacatccttcttaagttgctgacatcagtgctgacattattccagtagctttcaccaatgcccag

SEQ ID NO: 42969 - DNA, 600 bp, Chicken  19866894280511_1
gctgtatttgcaaaatcctctatatcctgccacctcttcttgcctttttgaattgttactgttgaagcgtatggcctgcttctctcccccctccattactgtggacttgtttcattctctaaactgatgctatgtgcatgtgacatcaggagcagtgtaagtggaagataaaaagtaaggcccgtgcaagtgatcacgaatgaggtgacctcatctgatctgacacagatctacgttccacttatgctccggaaaatcttggatgctgtattttagtaaaaacctcatttctgcacaaaygcgtgatacagaagaagcccaaccagcaaaacctgaagatgtatcccatggcatctccatgacaacgtatagatgcacattctgctccatacatccgcacgggcagacggcttgctctcagctcacccactacagagctgaaggcaggccaagggctgctgcagtgaaaggtgctgggatttaatgtggaaactgcagctcatcgttcacacaggataaaactgtggcaaatgaaagagccttctcagagggtgagctgtgtactcgagctctggttgctgagctgctcggtgccaggga

SEQ ID NO: 42970 - DNA, 600 bp, Chicken  19866894280517_1
ttgtcacgagacgcagagactgacagggccagcattgtggagaacagttttgacagggcactctgataatggtctgcctgcatgatgccagaacgactgcacttctcttacacaaaaatccacccagttaaccctaggctccctgactgctgggggcatttcccaagcccaggcaggggtgggagcaccatggaggctaaggccagtgtttcctgggggtacaggcaatcaagaagctttgggaccaaagctggtactggtccccatcaagcacattgatcagtttaagggtaattcatyacccactgtgagctgtaggttagttggatattccagtgcaactcctggaagggggaagaggaagggccgcgattaactccaatcatataaggtctaccactatgggaagcatatggcacaatacacccctcagtattggattcctataaacaaaatgaatgtggtaatttttaatttagaattgccaygtgtaggtcacagggtaacaggcaacacagcagcttggatgcttagagaatattcataatataaagaacctttatgctgcctttggctactgcaaggactgcaatgccttct

SEQ ID NO: 42971 - DNA, 600 bp, Chicken  19866894280517_2
catggaggctaaggccagtgtttcctgggggtacaggcaatcaagaagctttgggaccaaagctggtactggtccccatcaagcacattgatcagtttaagggtaattcatyacccactgtgagctgtaggttagttggatattccagtgcaactcctggaagggggaagaggaagggccgcgattaactccaatcatataaggtctaccactatgggaagcatatggcacaatacacccctcagtattggattcctataaacaaaatgaatgtggtaatttttaatttagaattgccaygtgtaggtcacagggtaacaggcaacacagcagcttggatgcttagagaatattcataatataaagaacctttatgctgcctttggctactgcaaggactgcaatgccttcttttagaaatacacacacattcactcttaattttaacagtatattcaagtaatgcacaactctagagcacaaatacttaaagatactgacatatcagtggtgtaactgtttttgagaaaggaacgctgcagattaaaattataagagaagagtattatttttaacctgtgaaatttctcagcatcagct

SEQ ID NO: 42972 - DNA, 571 bp, Chicken  19866894280518_1
tcaactcttacccgtataaatagctgagatgtaactgttggagcttcagcaccgcaacagctgtttctcgtgtcctcagaaataattggttgttacagaggctatttaaatgtgagaaactgactttggttttataattagtttatttctaaggaaaaacataactgccctttgttaaggaggcgaggatttcaggtgggatggagggacagccattcaggcgctgacttacggtgacatgaagcagaaagtaaaaccagaggctttgtgacactgagttactaatctcatagcagagcygtgctggaggaaagccagctttcctgagctcgctgtggggtcaggcaggttttgggacggagcaggatggctgtgtgaagtggctgtgctagccgtgatggtagcgtttcatgggttcctcagrgcagattctgtggttttaatgcatgcattcatcagcgagcgctgggtctctgggtgcagccaaacttggcaacacctgaaacccaccaacgtgtgggtttggacaaggggaagtggtttcagactaaaagaggggaaatttagcctg

SEQ ID NO: 42973 - DNA, 447 bp, Chicken  19866894280518_2
tttggttttataattagtttatttctaaggaaaaacataactgccctttgttaaggaggcgaggatttcaggtgggatggagggacagccattcaggcgctgacttacggtgacatgaagcagaaagtaaaaccagaggctttgtgacactgagttactaatctcatagcagagcygtgctggaggaaagccagctttcctgagctcgctgtggggtcaggcaggttttgggacggagcaggatggctgtgtgaagtggctgtgctagccgtgatggtagcgtttcatgggttcctcagrgcagattctgtggttttaatgcatgcattcatcagcgagcgctgggtctctgggtgcagccaaacttggcaacacctgaaacccaccaacgtgtgggtttggacaaggggaagtggtttcagactaaaagaggggaaatttagcctg

SEQ ID NO: 42974 - DNA, 599 bp, Chicken  19866894280523_1
  misc_feature (1)..(174): n is any nucleotide
nnnnnnnnnnnnnnnnnnnnnnnnnnnnnnnnnnnnnnnnnnnnnnnnnnnnnnnnnnnnnnnnnnnnnnnnnnnnnnnnnnnnnnnnnnnnnnnnnnnnnnnnnnnnnnnnnnnnnnnnnnnnnnnnnnnnnnnnnnnnnnnnnnnnnnnnnnnnnnnnnnnnnnnnnnnnnncatttctcttattgagagagctagctgcatgccacattgtgcactggaataatacacaaactacctcctgccatccactcactcagggtagaaactcccattttattactacaatccctaaaacayacaaggtgcgtacggtactcagttaagcacacaggcagggccaacatccaatgcattttactgactttagagagtctttaaaaaacccaagccactagggtatgtttgaagataaccagaggcacctattgctacacagacacagacaaatacagccagcgttacctggtgttaaacacagtataaggaagaatcagttgtatcacagaagcatctgaatgaggtttatgtcacatgagataatgagttagtgtggaacaggaaagagaaggacacgtcatccaacaagaaccccagat

SEQ ID NO: 42975 - DNA, 600 bp, Chicken  19866894280528_1
agtgtaaaggatatggatagctgctcacccttaagatgattctatgacatgcccaattttggaaaaaaaaagttggtttgcttcaatacaacagcagataccccaattatcactcccacagcaatctattttgcttaaaaaacagtgacagttttgactatctgattcaattccttctctcttgtgtatgacatagggcatgcagttaaaaatctaatatcactgctattaatagggcctaaatctctaagtcaataaagtaatttttagagtgctatgaattagacttttgaatccacygtcactcacaaagcaacaaccatttctccctctgattactagtgggcagaagcaagactaatttgtctgaccaaaagcatgcaagtgcatgcacttggtaagattacccaaacagcactgctgtcttaagtcccattgccttttttttttcccccacatttcggaaagttctttcccatcctggcaatctttttgccaaggtcttcattcacaaccaagctgccagtagaaagaccagctgaaatttaacaagaaatcatagctacaacaatcacatcagaaacccaatcattcactctt

SEQ ID NO: 42976 - DNA, 600 bp, Chicken  19866894280537_1
ttgtcctctgatagcacacagcatttagggagctctttcatctattgatgctgcacacagactattatctttatgttcagatggacgcagggaggggcatacaaaggcactgtggcttttcatttttttttctcctaaacacagttgtggttgttttgggattccagagcctcaataaaagccagaaccaaggcaaaaccaggggctgaaactaccaaagacaagattaggtgaatgagcccaaaacaggtacttccaaaacacacatgggagtcaaagggctgtaaaggcaatgcaatscaggactccattagttaagatcctccatagggatggtttgaatatagcaataacatacagcattagctcagtcttccgctgggactgctttgcaggtttcaaggacagacaayggaagaactttctttcataacaaaacaccsacrttcagaagtttttatgctaaagagaggactggattcgattaaaagggccaatttttcattctagttacctaaatctaggttgacatctatactcacaatgcctgcaggaatcctctttgtggacaagtggcaaagagggatccctaactcacat

SEQ ID NO: 42977 - DNA, 600 bp, Chicken  19866894280537_2
ggcttttcatttttttttctcctaaacacagttgtggttgttttgggattccagagcctcaataaaagccagaaccaaggcaaaaccaggggctgaaactaccaaagacaagattaggtgaatgagcccaaaacaggtacttccaaaacacacatgggagtcaaagggctgtaaaggcaatgcaatscaggactccattagttaagatcctccatagggatggtttgaatatagcaataacatacagcattagctcagtcttccgctgggactgctttgcaggtttcaaggacagacaayggaagaactttctttcataacaaaacaccsacrttcagaagtttttatgctaaagagaggactggattcgattaaaagggccaatttttcattctagttacctaaatctaggttgacatctatactcacaatgcctgcaggaatcctctttgtggacaagtggcaaagagggatccctaactcacatttcatgcctgctctccccgtggtaactacatgtgaaatgaaagccccgcagagacatcattttcttagacaagttaatcatcccgtccaggcactccttcctccctgctgcat

SEQ ID NO: 42978 - DNA, 600 bp, Chicken  19866894280537_3
gttgtggttgttttgggattccagagcctcaataaaagccagaaccaaggcaaaaccaggggctgaaactaccaaagacaagattaggtgaatgagcccaaaacaggtacttccaaaacacacatgggagtcaaagggctgtaaaggcaatgcaatscaggactccattagttaagatcctccatagggatggtttgaatatagcaataacatacagcattagctcagtcttccgctgggactgctttgcaggtttcaaggacagacaayggaagaactttctttcataacaaaacaccsacrttcagaagtttttatgctaaagagaggactggattcgattaaaagggccaatttttcattctagttacctaaatctaggttgacatctatactcacaatgcctgcaggaatcctctttgtggacaagtggcaaagagggatccctaactcacatttcatgcctgctctccccgtggtaactacatgtgaaatgaaagccccgcagagacatcattttcttagacaagttaatcatcccgtccaggcactccttcctccctgctgcattgcacagctctgctgagctacaggctgctc

SEQ ID NO: 42979 - DNA, 600 bp, Chicken  19866894280537_4
gtggttgttttgggattccagagcctcaataaaagccagaaccaaggcaaaaccaggggctgaaactaccaaagacaagattaggtgaatgagcccaaaacaggtacttccaaaacacacatgggagtcaaagggctgtaaaggcaatgcaatscaggactccattagttaagatcctccatagggatggtttgaatatagcaataacatacagcattagctcagtcttccgctgggactgctttgcaggtttcaaggacagacaayggaagaactttctttcataacaaaacaccsacrttcagaagtttttatgctaaagagaggactggattcgattaaaagggccaatttttcattctagttacctaaatctaggttgacatctatactcacaatgcctgcaggaatcctctttgtggacaagtggcaaagagggatccctaactcacatttcatgcctgctctccccgtggtaactacatgtgaaatgaaagccccgcagagacatcattttcttagacaagttaatcatcccgtccaggcactccttcctccctgctgcattgcacagctctgctgagctacaggctgctccga

SEQ ID NO: 42980 - DNA, 600 bp, Chicken  19866894280539_1
tcatgtaagagatctgcatgttaaacagctgaaggttgcactgggctactctatctgtggaaagtcacttgctggtaaaatatgctcatgcacctgggaatgttttcttcctccaaaggagagtctagtccatgaaacaaaaaattatctaagtttggatattttccccttcccagctaatcaagaacaaattgatataatagtttcacatatgacagtcataccttcaagaatgacctcagctaattttcctcatgagggtcattcagacctggtactccgaggatggtctgatggagmgctacagattcattattgtgtcttcaatgaattgctgtccctctaattgttttgtacactttttatcatcaaacatctcagattaaaatattttactgatcctgagcccaaaccacttcattttctgctgtgtgactgtaaaatctggtacttaaagatatwttggccgccttaatttatggagcaaatcctgaaaaattctaaatctggattagtgtctgttaacttgtattaaattctatttggcatttgaccaaagcatcacattcccctttgttcagtatctaatgctggaggaag

SEQ ID NO: 42981 - DNA, 600 bp, Chicken  19866894280539_2
tttccccttcccagctaatcaagaacaaattgatataatagtttcacatatgacagtcataccttcaagaatgacctcagctaattttcctcatgagggtcattcagacctggtactccgaggatggtctgatggagmgctacagattcattattgtgtcttcaatgaattgctgtccctctaattgttttgtacactttttatcatcaaacatctcagattaaaatattttactgatcctgagcccaaaccacttcattttctgctgtgtgactgtaaaatctggtacttaaagatatwttggccgccttaatttatggagcaaatcctgaaaaattctaaatctggattagtgtctgttaacttgtattaaattctatttggcatttgaccaaagcatcacattcccctttgttcagtatctaatgctggaggaaggcacaagtacaatatcaagtggaaaaatgcgtccaggacaaaactgtaactatgagcccaaattctctgctggcataactcaaagtaattccaagccaggtctttcagaatggcccctttgtctcgaattatttttttgtattcattttttactaagcgact

SEQ ID NO: 42982 - DNA, 498 bp, Chicken  19866894280539_3
ttggcatttgaccaaagcatcacattcccctttgttcagtatctaatgctggaggaaggcacaagtacaatatcaagtggaaaaatgcgtccaggacaaaactgtaactatgagcccaaattctctgctggcataactcaaagtaattccaagccaggtctttcagaatggcccctttgtctcgaattatttttttgtattcattttttactaagcgactttccaagcaataacggtttttatctgcatgactcctattaaagtcaataggagtcatgtggctaaaaccctgtgtgatgmttgaatttattggaaattggcatctgatgctgtttggtcttcctgcccaaacacttctactgtttggtcttcctgcccaagcattgctttttgcctggtcatgtcacctcttagtttcctacttgggtggaatctcaatgcctaacctttctattccatccccaatattctttcccacttaaaataaaagtctcctct

SEQ ID NO: 42983 - DNA, 600 bp, Chicken  19866894280540_1
aatgtgtaaaaggagatgtccatttttttaattattatttttaaagaggatatctttattttgtgtggcattgagtgatttcagtctgatagaagtgctctgtaaatttttatcaagccaagccccacagtgaatttaggtgaaatgctggttatagcaaaccaggagttttaggtacttgaagaacagtcataccaaatgaaaaccttctgcatagcattggtgccccaggaatgaggaggggtcagaaggtgtccatatcctttttttcagagttgcataactccagtttgtcatggyctcatcacttcagcaccttccacaacctccagcatcatcttacagcacctaaatctctactgctttacaagctgctgtcaggaatttagtaccttaaggctgacttcaacacctttcttttatgttttatgttttttccagttttatagccattacacaactgcagtaaatggcaacaaatcaagagaatgactttagcaccacagaaaaaaaaatcccatatctgctcatgctgctctctctaaaagagttaagtgcttattagagtaataagtaatattttgacctgcaaaacagcac

SEQ ID NO: 42984 - DNA, 600 bp, Chicken  19866894280541_1
gtctaaaaccaggacttctatttgtttttaatcctttctgctaaacctacaaagcacagataacgcctatcagtttggaaagctaaggataaatccatagctctggaccttgagaacattcaggagtttgcagcctcatcaaattttatcaaaaaccatgaggacatctgatttttatagcaatgtgaagggagccaacaaaaccagacctcctgcctgcccctgcaccatactttgcaccctcagaagcagatccacagagctcaagcaaagaaggtttatcacctgcctgtagacacrcagccattctgaggcagattaatgggatgggcaacctggcaccacaaactgcaggcaacactgctcccattatctgcacccaagggcaggggtgaaaggcaattttctttgcagtggtttctgcactaaaaataatgtcagagctcctgcagataaggctgtacctgctgctttgtacggctgtgctctatcaagatgcaattggcaataagctggttgctttcccttggtatgtagctgttgagcacacaggcagagaagcaaacggcagcctgggctgacaggcctcatgttaggaaa

SEQ ID NO: 42985 - DNA, 599 bp, Chicken  19866894280542_1
  misc_feature (1)..(26): n is any nucleotide
nnnnnnnnnnnnnnnnnnnnnnnnnnttcaggctggagaacagaaggggaaggtttccaggtgacctgataatgacctttaggtatctaaatggggactgtaagaaagaaaggtacagactcctttagcaggatctattgtgacagaacaagggggaatggtttcaaactaaaacgggagatttagattggatataaggaagacgcttttacattaagggtagtgaagcactggaacagattgcccagagaggttgttgattctccatccccggagacattgaaggtcaggctacatggrgttctgagcagcctgatctagctstaggtgttcctgctcattgcaggagagttagactagatgacctttaaaggtctctgccaactctcaagtattctatgattctatgaatgttaawttccctcaaatataaaaatgaagtcatgtagtaagttcaggtgtaaaagtttttattacaagtgcccaaaattgagtgaggaaccagaaaataartggtcagatatagawatattcttgtcataagtctcaaaaacattcagtagacatctagatataaaatgttagaaccacaggcacga

SEQ ID NO: 42986 - DNA, 599 bp, Chicken  19866894280542_2
  misc_feature (1)..(2): n is any nucleotide
nnttcaggctggagaacagaaggggaaggtttccaggtgacctgataatgacctttaggtatctaaatggggactgtaagaaagaaaggtacagactcctttagcaggatctattgtgacagaacaagggggaatggtttcaaactaaaacgggagatttagattggatataaggaagacgcttttacattaagggtagtgaagcactggaacagattgcccagagaggttgttgattctccatccccggagacattgaaggtcaggctacatggrgttctgagcagcctgatctagctstaggtgttcctgctcattgcaggagagttagactagatgacctttaaaggtctctgccaactctcaagtattctatgattctatgaatgttaawttccctcaaatataaaaatgaagtcatgtagtaagttcaggtgtaaaagtttttattacaagtgcccaaaattgagtgaggaaccagaaaataartggtcagatatagawatattcttgtcataagtctcaaaaacattcagtagacatctagatataaaatgttagaaccacaggcacgaagggacctcatctcctggtttcat

SEQ ID NO: 42987 - DNA, 600 bp, Chicken  19866894280542_3
actcctttagcaggatctattgtgacagaacaagggggaatggtttcaaactaaaacgggagatttagattggatataaggaagacgcttttacattaagggtagtgaagcactggaacagattgcccagagaggttgttgattctccatccccggagacattgaaggtcaggctacatggrgttctgagcagcctgatctagctstaggtgttcctgctcattgcaggagagttagactagatgacctttaaaggtctctgccaactctcaagtattctatgattctatgaatgttaawttccctcaaatataaaaatgaagtcatgtagtaagttcaggtgtaaaagtttttattacaagtgcccaaaattgagtgaggaaccagaaaataartggtcagatatagawatattcttgtcataagtctcaaaaacattcagtagacatctagatataaaatgttagaaccacaggcacgaagggacctcatctcctggtttcatctgggacagaattattttcttcacagtttctgttatgatgctatgtcatatggctttagtaaaatggtgttgataacataccagtgttttagttg

SEQ ID NO: 42988 - DNA, 600 bp, Chicken  19866894280542_4
ttaagggtagtgaagcactggaacagattgcccagagaggttgttgattctccatccccggagacattgaaggtcaggctacatggrgttctgagcagcctgatctagctstaggtgttcctgctcattgcaggagagttagactagatgacctttaaaggtctctgccaactctcaagtattctatgattctatgaatgttaawttccctcaaatataaaaatgaagtcatgtagtaagttcaggtgtaaaagtttttattacaagtgcccaaaattgagtgaggaaccagaaaataartggtcagatatagawatattcttgtcataagtctcaaaaacattcagtagacatctagatataaaatgttagaaccacaggcacgaagggacctcatctcctggtttcatctgggacagaattattttcttcacagtttctgttatgatgctatgtcatatggctttagtaaaatggtgttgataacataccagtgttttagttgttkctgagcagggctgtacagaaccaagtacatttcaatttttcagcttcttgtactgtcctgacagtaaggaagctgggaaagcacacgaagct

SEQ ID NO: 42989 - DNA, 600 bp, Chicken  19866894280542_5
cactggaacagattgcccagagaggttgttgattctccatccccggagacattgaaggtcaggctacatggrgttctgagcagcctgatctagctstaggtgttcctgctcattgcaggagagttagactagatgacctttaaaggtctctgccaactctcaagtattctatgattctatgaatgttaawttccctcaaatataaaaatgaagtcatgtagtaagttcaggtgtaaaagtttttattacaagtgcccaaaattgagtgaggaaccagaaaataartggtcagatatagawatattcttgtcataagtctcaaaaacattcagtagacatctagatataaaatgttagaaccacaggcacgaagggacctcatctcctggtttcatctgggacagaattattttcttcacagtttctgttatgatgctatgtcatatggctttagtaaaatggtgttgataacataccagtgttttagttgttkctgagcagggctgtacagaaccaagtacatttcaatttttcagcttcttgtactgtcctgacagtaaggaagctgggaaagcacacgaagctgggaggggacagaac

SEQ ID NO: 42990 - DNA, 544 bp, Chicken  19866894280542_6
cctcaaatataaaaatgaagtcatgtagtaagttcaggtgtaaaagtttttattacaagtgcccaaaattgagtgaggaaccagaaaataartggtcagatatagawatattcttgtcataagtctcaaaaacattcagtagacatctagatataaaatgttagaaccacaggcacgaagggacctcatctcctggtttcatctgggacagaattattttcttcacagtttctgttatgatgctatgtcatatggctttagtaaaatggtgttgataacataccagtgttttagttgttkctgagcagggctgtacagaaccaagtacatttcaatttttcagcttcttgtactgtcctgacagtaaggaagctgggaaagcacacgaagctgggaggggacagaaccagaatagctgaaataagcaagcacaccataaggtatgacatatggtggaggaatctcaccatatgacataagggtggaggaatttgctggagcagggcagccattgcttagagactggttggacactggtcagcaa

SEQ ID NO: 42991 - DNA, 600 bp, Chicken  19866894280543_1
aagggtatctgtaggttgcatgtgggtgggacctaacaacatggttttcttggtgatggttcttcttgatagtggggcctgtcagggaagagggcaatggcgtggatgggaacactgactaaaatgtccactgcaactcctttgccactatagcaccactattcctcacctacttggaaagaagaacaattgccccagaaggatgctgcagctgacaattttgtctcaaagcaactttatgaatggagagaaaggaaagaaattctcgctttgaagaaggtgataagtcatcactcaatrcttccaacagaaaattctcatctttatttctttcttgaacttgtttgcagattcacagattcacagacctggtttcattgctcagagacccattttttttgcatggataaacgtttgtggtggataacaagctcagctatgataacagactgtgatcttttaagaagaaaaaatcacatccttgcttattctttcgttgcagctatagctatgctaccacctcttcaaagcatcttcacatctgtagatttcatagagtagcgaatgcagtctgggagaaatttctttgagatatttctt

SEQ ID NO: 42992 - DNA, 600 bp, Chicken  19866894280544_1
aatcctgtgcttaacatttaacccttaaaaaagaaaaagcaaaacaagatccctgtctttcatgctgtattattattgctatgatccgtgattctttcatggatcagaggtgatagaagttcttctagctgctggcttaaaaagtatataattgaggttggggttttttttgaactgcttattttttgtcagtttgtcttataacccatgtagctgttcagcagctttaatagtaaatataaatgttttatgaggattgctcttggcttgccaattctactgccattaaattaatgactwtatgcttcattttttattaaggatgatcaggcttataggagcattttctgaactgctttgattacagawaagttgtgactgtgaatatcttattttgtaggtccagctcttccagtaaatagttatttccagcaagagtttcccagtctgccggcagctggggatcaagaaaagtcaggcaaagataaagatgcatctgaagaggcccatggacccagcttgagaccacaaagtaagtatatggtagaaattttagtgaaattgcatgcagttgtgtggaatgtgtatttgctccccata

SEQ ID NO: 42993 - DNA, 600 bp, Chicken  19866894280544_2
ttattattgctatgatccgtgattctttcatggatcagaggtgatagaagttcttctagctgctggcttaaaaagtatataattgaggttggggttttttttgaactgcttattttttgtcagtttgtcttataacccatgtagctgttcagcagctttaatagtaaatataaatgttttatgaggattgctcttggcttgccaattctactgccattaaattaatgactwtatgcttcattttttattaaggatgatcaggcttataggagcattttctgaactgctttgattacagawaagttgtgactgtgaatatcttattttgtaggtccagctcttccagtaaatagttatttccagcaagagtttcccagtctgccggcagctggggatcaagaaaagtcaggcaaagataaagatgcatctgaagaggcccatggacccagcttgagaccacaaagtaagtatatggtagaaattttagtgaaattgcatgcagttgtgtggaatgtgtatttgctccccatacaaaagaaatgtatgaatactgttttaaggattcatttctgcaataaacgaacacctacaaacagtcct

SEQ ID NO: 42994 - DNA, 600 bp, Chicken  19866894280544_3
tccagtaaatagttatttccagcaagagtttcccagtctgccggcagctggggatcaagaaaagtcaggcaaagataaagatgcatctgaagaggcccatggacccagcttgagaccacaaagtaagtatatggtagaaattttagtgaaattgcatgcagttgtgtggaatgtgtatttgctccccatacaaaagaaatgtatgaatactgttttaaggattcatttctgcaataaacgaacacctacaaacagtcctcctgcctgaaagtcttgtaactctcttctctgttaaatggytttattgtttaagatcttgttrtaaagatttttgtgtttggttccttttctgctttactgtgttcctggtgtggaaaacaggtatttaattgtatcctacagttcactacatatttgcccaggctgatrctctgaggagagtttgttgcacagtattggtgttttcttccacctgctagatgccatgacagctagaatgtatattcaagaactatccttacaaccagtraaatacaaccctcatcacttctattccatcatttatcagagatacaagccagtatctagatacatcttcac

SEQ ID NO: 42995 - DNA, 600 bp, Chicken  19866894280544_4
caagagtttcccagtctgccggcagctggggatcaagaaaagtcaggcaaagataaagatgcatctgaagaggcccatggacccagcttgagaccacaaagtaagtatatggtagaaattttagtgaaattgcatgcagttgtgtggaatgtgtatttgctccccatacaaaagaaatgtatgaatactgttttaaggattcatttctgcaataaacgaacacctacaaacagtcctcctgcctgaaagtcttgtaactctcttctctgttaaatggytttattgtttaagatcttgttrtaaagatttttgtgtttggttccttttctgctttactgtgttcctggtgtggaaaacaggtatttaattgtatcctacagttcactacatatttgcccaggctgatrctctgaggagagtttgttgcacagtattggtgttttcttccacctgctagatgccatgacagctagaatgtatattcaagaactatccttacaaccagtraaatacaaccctcatcacttctattccatcatttatcagagatacaagccagtatctagatacatcttcactttgaaatgtaacgcgcagatg

SEQ ID NO: 42996 - DNA, 600 bp, Chicken  19866894280544_5
tatggtagaaattttagtgaaattgcatgcagttgtgtggaatgtgtatttgctccccatacaaaagaaatgtatgaatactgttttaaggattcatttctgcaataaacgaacacctacaaacagtcctcctgcctgaaagtcttgtaactctcttctctgttaaatggytttattgtttaagatcttgttrtaaagatttttgtgtttggttccttttctgctttactgtgttcctggtgtggaaaacaggtatttaattgtatcctacagttcactacatatttgcccaggctgatrctctgaggagagtttgttgcacagtattggtgttttcttccacctgctagatgccatgacagctagaatgtatattcaagaactatccttacaaccagtraaatacaaccctcatcacttctattccatcatttatcagagatacaagccagtatctagatacatcttcactttgaaatgtaacgcgcagatgtgtcattttgagctgcttgagaagtttgtgatactcctcttagaaagaagtttgatctttccattggcagcatctgtgcatcaaaccagcagwggctcacttatcac

SEQ ID NO: 42997 - DNA, 600 bp, Chicken  19866894280544_6
tgcaataaacgaacacctacaaacagtcctcctgcctgaaagtcttgtaactctcttctctgttaaatggytttattgtttaagatcttgttrtaaagatttttgtgtttggttccttttctgctttactgtgttcctggtgtggaaaacaggtatttaattgtatcctacagttcactacatatttgcccaggctgatrctctgaggagagtttgttgcacagtattggtgttttcttccacctgctagatgccatgacagctagaatgtatattcaagaactatccttacaaccagtraaatacaaccctcatcacttctattccatcatttatcagagatacaagccagtatctagatacatcttcactttgaaatgtaacgcgcagatgtgtcattttgagctgcttgagaagtttgtgatactcctcttagaaagaagtttgatctttccattggcagcatctgtgcatcaaaccagcagwggctcacttatcacagctaaagctgttttctatcttgtactattatcaacatctttttcaaatggcactrtgttttagaaggtagagaaaaacagctagagctgtctattaatt

SEQ ID NO: 42998 - DNA, 573 bp, Chicken  19866894280544_7
tgcccaggctgatrctctgaggagagtttgttgcacagtattggtgttttcttccacctgctagatgccatgacagctagaatgtatattcaagaactatccttacaaccagtraaatacaaccctcatcacttctattccatcatttatcagagatacaagccagtatctagatacatcttcactttgaaatgtaacgcgcagatgtgtcattttgagctgcttgagaagtttgtgatactcctcttagaaagaagtttgatctttccattggcagcatctgtgcatcaaaccagcagwggctcacttatcacagctaaagctgttttctatcttgtactattatcaacatctttttcaaatggcactrtgttttagaaggtagagaaaaacagctagagctgtctattaatttaactcttaccctttgggatcacagctgtaygtagggctgaagaggattaaaaaacgacttccattttcttagtagtaaatgtccatctgcccagatagctatgtcattgaaaactgcctaggaagatcaagtatgggtcttcttttctttactgactc

SEQ ID NO: 42999 - DNA, 503 bp, Chicken  19866894280544_8
tgacagctagaatgtatattcaagaactatccttacaaccagtraaatacaaccctcatcacttctattccatcatttatcagagatacaagccagtatctagatacatcttcactttgaaatgtaacgcgcagatgtgtcattttgagctgcttgagaagtttgtgatactcctcttagaaagaagtttgatctttccattggcagcatctgtgcatcaaaccagcagwggctcacttatcacagctaaagctgttttctatcttgtactattatcaacatctttttcaaatggcactrtgttttagaaggtagagaaaaacagctagagctgtctattaatttaactcttaccctttgggatcacagctgtaygtagggctgaagaggattaaaaaacgacttccattttcttagtagtaaatgtccatctgcccagatagctatgtcattgaaaactgcctaggaagatcaagtatgggtcttcttttctttactgactc

SEQ ID NO: 43000 - DNA, 428 bp, Chicken  19866894280544_9
tttatcagagatacaagccagtatctagatacatcttcactttgaaatgtaacgcgcagatgtgtcattttgagctgcttgagaagtttgtgatactcctcttagaaagaagtttgatctttccattggcagcatctgtgcatcaaaccagcagwggctcacttatcacagctaaagctgttttctatcttgtactattatcaacatctttttcaaatggcactrtgttttagaaggtagagaaaaacagctagagctgtctattaatttaactcttaccctttgggatcacagctgtaygtagggctgaagaggattaaaaaacgacttccattttcttagtagtaaatgtccatctgcccagatagctatgtcattgaaaactgcctaggaagatcaagtatgggtcttcttttctttactgactc

SEQ ID NO: 43001 - DNA, 600 bp, Chicken  19866894280545_1
ggggctcagaggaaaactcaccaatatatacctgaagggtgtaagggggatggagccgtgcacttggtagtggtgcccagtggcaggacaagaggctgtgggcacacactgcaacacagaggtgctgtctgaacaccaggcagcacttctgtgctgtgcaggtggctgagcactggcacagctgcccacaggctctggatcttctccttggagatcttcagaagccgcctggctgtggccctgggcatcctgctctacatgtccctgctggggtagggattgggcagagggacacagagkgcactgccagcctcagccatgctgtggttctgtaacaggaggaygagtacagcacagtgctgtacygtatttagtggtcacacatcaattaaaawactactattgatataacttttaatattcaatcacaggacgcgatccctgtgttggctgaattgaaaatatttctgttaaagctctcattaaawagaggtgtttatagatgtgttttgaatataaaatttttaatcacaaaaagtagcccagggcaagatgatctttcttatccatatccaggatatgatgaatacagtgaagaaa

SEQ ID NO: 43002 - DNA, 600 bp, Chicken  19866894280545_2
gggggatggagccgtgcacttggtagtggtgcccagtggcaggacaagaggctgtgggcacacactgcaacacagaggtgctgtctgaacaccaggcagcacttctgtgctgtgcaggtggctgagcactggcacagctgcccacaggctctggatcttctccttggagatcttcagaagccgcctggctgtggccctgggcatcctgctctacatgtccctgctggggtagggattgggcagagggacacagagkgcactgccagcctcagccatgctgtggttctgtaacaggaggaygagtacagcacagtgctgtacygtatttagtggtcacacatcaattaaaawactactattgatataacttttaatattcaatcacaggacgcgatccctgtgttggctgaattgaaaatatttctgttaaagctctcattaaawagaggtgtttatagatgtgttttgaatataaaatttttaatcacaaaaagtagcccagggcaagatgatctttcttatccatatccaggatatgatgaatacagtgaagaaatgcccaccatttattccaagcacaacactgaggctatttttaag

SEQ ID NO: 43003 - DNA, 600 bp, Chicken  19866894280545_3
gtagtggtgcccagtggcaggacaagaggctgtgggcacacactgcaacacagaggtgctgtctgaacaccaggcagcacttctgtgctgtgcaggtggctgagcactggcacagctgcccacaggctctggatcttctccttggagatcttcagaagccgcctggctgtggccctgggcatcctgctctacatgtccctgctggggtagggattgggcagagggacacagagkgcactgccagcctcagccatgctgtggttctgtaacaggaggaygagtacagcacagtgctgtacygtatttagtggtcacacatcaattaaaawactactattgatataacttttaatattcaatcacaggacgcgatccctgtgttggctgaattgaaaatatttctgttaaagctctcattaaawagaggtgtttatagatgtgttttgaatataaaatttttaatcacaaaaagtagcccagggcaagatgatctttcttatccatatccaggatatgatgaatacagtgaagaaatgcccaccatttattccaagcacaacactgaggctatttttaaggattattcaagtaatctcagat

SEQ ID NO: 43004 - DNA, 600 bp, Chicken  19866894280545_4
ctgtgggcacacactgcaacacagaggtgctgtctgaacaccaggcagcacttctgtgctgtgcaggtggctgagcactggcacagctgcccacaggctctggatcttctccttggagatcttcagaagccgcctggctgtggccctgggcatcctgctctacatgtccctgctggggtagggattgggcagagggacacagagkgcactgccagcctcagccatgctgtggttctgtaacaggaggaygagtacagcacagtgctgtacygtatttagtggtcacacatcaattaaaawactactattgatataacttttaatattcaatcacaggacgcgatccctgtgttggctgaattgaaaatatttctgttaaagctctcattaaawagaggtgtttatagatgtgttttgaatataaaatttttaatcacaaaaagtagcccagggcaagatgatctttcttatccatatccaggatatgatgaatacagtgaagaaatgcccaccatttattccaagcacaacactgaggctatttttaaggattattcaagtaatctcagatacattctcaatatatatggggaatcaggg

SEQ ID NO: 43005 - DNA, 600 bp, Chicken  19866894280545_5
caggctctggatcttctccttggagatcttcagaagccgcctggctgtggccctgggcatcctgctctacatgtccctgctggggtagggattgggcagagggacacagagkgcactgccagcctcagccatgctgtggttctgtaacaggaggaygagtacagcacagtgctgtacygtatttagtggtcacacatcaattaaaawactactattgatataacttttaatattcaatcacaggacgcgatccctgtgttggctgaattgaaaatatttctgttaaagctctcattaaawagaggtgtttatagatgtgttttgaatataaaatttttaatcacaaaaagtagcccagggcaagatgatctttcttatccatatccaggatatgatgaatacagtgaagaaatgcccaccatttattccaagcacaacactgaggctatttttaaggattattcaagtaatctcagatacattctcaatatatatggggaatcagggtccattcagattagtgtattttgctactgtaccatttttttcatacacagatagctatcatcctcataaatgcctgaaaatagattcctttaa

SEQ ID NO: 43006 - DNA, 600 bp, Chicken  19866894280554_1
aaatgaggcagaaaggtgccaagacaggatttttattcatttaaagtgtctcgggtgcctagacctgagcgggcaatggattgcaatgctaagggatctgctctgcacaagcatttgttctcagcaccatgccatcctcttctggcaaaagcacgaagagaattgggcatccagccgaaagtattttctttttttttactgagttattttctaacaggattgtttccctgagctgtttctcagtaaggatgcacaagtacttgccttggcacaagatagatggccattttaggacatggytgggcgtttggagagtttaatgatgcttaaataccaaaacaaaaagcaaacaaacaaacaaatgcaatacaactatgctttgctgtttgagctcttatcagagttcttacgtttacactcacttgactttattgtctattagaaaatgtcctgctgttagttctgctcagctgatgtaatcagacaattttaaggtttaaaatgttgtaactaaatgagtaattatttcatttaatattgggtttgccagctttcacattcagctcctaagctgtgattcctgtcagttaaacccgtttt

SEQ ID NO: 43007 - DNA, 600 bp, Chicken  19866894280559_1
agtgaaggctgacttctgatacactgagtagaagacaaatatttgtctttgtctttttctaagagggcatttttttcttacaggtaagttttgttacctacctatcccttgctgatgcatcttaatctgtgtcctctagtcattcctcatcacatgctatgctttcatatatgttgtttctagatttcatttttttgtatgatttccaccagaggtcaagagcaagctcatggtttaggcaactgtctctttctttactgaagacattttagaaatatcaaaataaaaaatgatccgaaytcctgttaattcaattaatgcattactgcatcctttgcaggtcttgactctggttgtgaaggccaatgaatagttctggagaagtatttctgcagtgaaaataaaggattcttccagtgctctaaattattgacttctataaatactgaaaaccttataatcactacaaaagagaaaatgaaacacatatatgcaaacacagagacagagagagttcaccttttcctcgaactgcaaaaatcaaaacaaacaaggcaaaagacatcacaggaaactgtgaaaatctgttttataccataa

SEQ ID NO: 43008 - DNA, 600 bp, Chicken  19866894280559_2
attgttttagtagaagacaagaaatgcttgtattagttttaaaaagattaaaaagaaagagcaaatgaaattaaaaaagaaaaacaacactctttgaagtagtttttctgtactgagaatcacctaatttactgtttcacaaaaggcatacagcaatccagcaatgtgtcttttagaaaattgagttcccagtctaaccgcctgctgataacacagaatcaagtgcttttcaagtccctagagaactgtaataaattacatcaggcagaataaaaagttacagtactgggaaagtggtgwctgtaaacatttttcataaccaataaaataatgcacaacctggctcagtccccctttctcctgagatctacacaggtartacagatgcttggagccacagctgtagctgtggtacttaccaaataacttaaatttttataatacctgtatagctgttaaataattgtagttgtggacaaactggcactgcacaggctggggtaactctccatacaagagaataacccagtgtttgctgctgtcagtcctgacttaaatattcaaggcctgacattaaagttctgattctatgatttgtta

SEQ ID NO: 43009 - DNA, 600 bp, Chicken  19866894280559_3
aaaaacaacactctttgaagtagtttttctgtactgagaatcacctaatttactgtttcacaaaaggcatacagcaatccagcaatgtgtcttttagaaaattgagttcccagtctaaccgcctgctgataacacagaatcaagtgcttttcaagtccctagagaactgtaataaattacatcaggcagaataaaaagttacagtactgggaaagtggtgwctgtaaacatttttcataaccaataaaataatgcacaacctggctcagtccccctttctcctgagatctacacaggtartacagatgcttggagccacagctgtagctgtggtacttaccaaataacttaaatttttataatacctgtatagctgttaaataattgtagttgtggacaaactggcactgcacaggctggggtaactctccatacaagagaataacccagtgtttgctgctgtcagtcctgacttaaatattcaaggcctgacattaaagttctgattctatgatttgttattctcaaattctgcgtggaaaaagtgtgataagtattacttaatttcaggcactttagatgctaagctaagaggttact

SEQ ID NO: 43010 - DNA, 600 bp, Chicken  19866894280565_1
tggggcaaccaggtggctgccgtggctgccggagccagagcggcaggggtgcaggcctgtgcgactgaaaccatcgataccagcaaagtctttcttaaggctcctctggagtttgtgacctcccagatagacgcaccttccaaaatatccttaaatccagatgagccagtggtgcattggcacagagaaggcatctccttccatttcacgcctgttttggtgtgcaaagatcctgtgcggactgtgggacttggggatgctatttcagctgaaggactgctatattcagaaatatatctycagtagaggactgaagtcccctttgtctccagtactgtacggtgtctgaggaactgtgctgttagcattaggatttcagccagtgctgatataggaacagaatcagggtgcagtatgtcttctggatataacagaagagccaaagaataattccaggtgtaaaccrtcagatacattccagtcattttgcagtgactagaacgctttatgaagtgcagaggttttcgtatttaatgtgaaaattggcttttctttgtcttaagcatgtggggagggacaaaaataatcaaaatccacatt

SEQ ID NO: 43011 - DNA, 600 bp, Chicken  19866894280565_2
cagtggtgcattggcacagagaaggcatctccttccatttcacgcctgttttggtgtgcaaagatcctgtgcggactgtgggacttggggatgctatttcagctgaaggactgctatattcagaaatatatctycagtagaggactgaagtcccctttgtctccagtactgtacggtgtctgaggaactgtgctgttagcattaggatttcagccagtgctgatataggaacagaatcagggtgcagtatgtcttctggatataacagaagagccaaagaataattccaggtgtaaaccrtcagatacattccagtcattttgcagtgactagaacgctttatgaagtgcagaggttttcgtatttaatgtgaaaattggcttttctttgtcttaagcatgtggggagggacaaaaataatcaaaatccacatttggagcaggtctgctctttgtaactgcacatggcccttgtctgctagtgctggaaagtgtggcagccctgagagcttcctccccatggatcccagggaragcacagcgctgctcagccctgtcttgcttatgataaagtaaaaatagaaagcttctgcattatctc

SEQ ID NO: 43012 - DNA, 600 bp, Chicken  19866894280565_3
gaatcagggtgcagtatgtcttctggatataacagaagagccaaagaataattccaggtgtaaaccrtcagatacattccagtcattttgcagtgactagaacgctttatgaagtgcagaggttttcgtatttaatgtgaaaattggcttttctttgtcttaagcatgtggggagggacaaaaataatcaaaatccacatttggagcaggtctgctctttgtaactgcacatggcccttgtctgctagtgctggaaagtgtggcagccctgagagcttcctccccatggatcccagggaragcacagcgctgctcagccctgtcttgcttatgataaagtaaaaatagaaagcttctgcattatctcctcacagcacatggctaggtggcaggagcaaaccttccgctcgttcagtgggctgatgaaatctgttcctgacaaaattacctctcaacctcagtgcccctgcagcggagggagccagagcccgaaaatgtgatgcacactgtacccactccttaaatgcacagggaaaggtgggctcaaggcagtttaaatcatgttgggtatctgttgtttctgtgactgacaggattcag

SEQ ID NO: 43013 - DNA, 600 bp, Chicken  19866894280572_1
tgctagcgtttgtaacagtgtcagtgctgcctttgaaagttgctttccctctctctcctgatctcagtgataatcaaatgtcaccagcctctttccagagccctgtgctcatcgcaggcagcacatcagctaacagcctgcagcagtctctctctacacctcttggactggaaaaatttcactctgaaaaaatttggtcttaagcactggagcctgagctggaaagcaaaaataggccagtttgaggaatgtggagatgcagcagggatcagccctacatctggcagtttctcatcccgyggtaaggcactagccagaacaggcacctctgaagcctctatgaggagaaggttgaaggaggagcttgcaagcccaagtgctctaccactggagagccaaacagatggactcctgttgtttggkcctgttgaacacagctcatctggaaacaaggcttgcacagcaaggtttttcctgtcagaactgataggagcacagagggtggatctgcttccccagctggactggggcaggcagagggcttccagaggtgtggagctgctggcagtcttgagaagagtaacagctcraacactggct

SEQ ID NO: 43014 - DNA, 600 bp, Chicken  19866894280572_2
catcagctaacagcctgcagcagtctctctctacacctcttggactggaaaaatttcactctgaaaaaatttggtcttaagcactggagcctgagctggaaagcaaaaataggccagtttgaggaatgtggagatgcagcagggatcagccctacatctggcagtttctcatcccgyggtaaggcactagccagaacaggcacctctgaagcctctatgaggagaaggttgaaggaggagcttgcaagcccaagtgctctaccactggagagccaaacagatggactcctgttgtttggkcctgttgaacacagctcatctggaaacaaggcttgcacagcaaggtttttcctgtcagaactgataggagcacagagggtggatctgcttccccagctggactggggcaggcagagggcttccagaggtgtggagctgctggcagtcttgagaagagtaacagctcraacactggctccaaacccaactaccgcctcatgtaaggtggttgagtttagtgtggtactcagagcttgaactgctgaccttattggttcttaaaggtcttgcttttctttggacttggccagtgtgtatttg

SEQ ID NO: 43015 - DNA, 475 bp, Chicken  19866894280572_3
ctcatcccgyggtaaggcactagccagaacaggcacctctgaagcctctatgaggagaaggttgaaggaggagcttgcaagcccaagtgctctaccactggagagccaaacagatggactcctgttgtttggkcctgttgaacacagctcatctggaaacaaggcttgcacagcaaggtttttcctgtcagaactgataggagcacagagggtggatctgcttccccagctggactggggcaggcagagggcttccagaggtgtggagctgctggcagtcttgagaagagtaacagctcraacactggctccaaacccaactaccgcctcatgtaaggtggttgagtttagtgtggtactcagagcttgaactgctgaccttattggttcttaaaggtcttgcttttctttggacttggccagtgtgtatttgcttgccttcaccaagctctcgtcacgtttccaacagtaaaag

SEQ ID NO: 43016 - DNA, 600 bp, Chicken  19866894280575_1
ggaatgggctgcggagcgcggaccctacatcgccccgagagcggctagctctgcggggagctgtggagcgagcgggcggcctccccactctgcaccgcaaacttcaccgagttctgaggaaagtgggagggccggcggtgcccgaaggagggaaggtagcagggggctggggcgggggggagctgtccatggtcctgcactctgctgcggtccttggctcctgggcgcccggccacgagtgcagtttgtggtggacagtgctgagaatgcaccgtgcaaaactgggggcttagcgtgtgkttggaaggaaaaataagtaagtgatggtgtgaaacttaaagtgagtgtgtttgtgtgttaaagtctttttaagcactcagtcctttttgtgtgtgtggaggatggagggaatgcgagggggtggatttctgcagcactgacctttgaaatgataaggtacaattaaaggccagaaggtaagaaatgggaatttgacttgatgtgactttgaaaacacctgagaagcctcctccttttaaaaatgaatgaatgaataaataaataaataaaataataacgtaatggtgagaaatgaaatgt

SEQ ID NO: 43017 - DNA, 600 bp, Chicken  19866894280578_1
tatacatatttcatagatcatgaattcactgttcatagttgttttaattaatagttaattcattactctagattccagaagtcagtagactgcttaaaattaaagctcctcagtgtagagaatacctctttctagcatgcttagatgatttcagcacatacttccacgtgcgaaatacttaggacacatttgttcactaattaagctcttccaggtggaaacatacagtagagttgatcaacatggagacagtttgctgattaccttccaaaccagattgtatttaattcgtatatctgkctgtttaaaccaaatctgctcagtttctaggacaggctggtgattgaaagtatacttcttccagcatcctgtccagatcagtggaagaccaaataaatataattttgtagcatctgcttagatattagaacattagtgattttgtcaattctcataatctcatcattaagcatttcttaaagcttaagccgtggccaagccctctgatttgaagacaaatgaatgaaataatgttagcttttaaattactttggagtaaaaaaaaatatatgtacctattatatatataaaaaagaaagc

SEQ ID NO: 43018 - DNA, 600 bp, Chicken  19866894280578_2
taatctcatcattaagcatttcttaaagcttaagccgtggccaagccctctgatttgaagacaaatgaatgaaataatgttagcttttaaattactttggagtaaaaaaaaatatatgtacctattatatatataaaaaagaaagcagcctactgtctgctcagagagctgaattcagctttctattttgtcaccacaaaatatctgtgcttcttatcaatccaggagccagtctgggttttctgcaaaggtccggtctgacgcagacagaatttctccagcacttattcttgccctccytttgtaataactggaagactctctgaaagttggaaaaggcacttaatcattgactgtattttttttcagccacagaaaatagaacttttatttwaaaaattacattaagaattcctgattctgtctaataaaggagtgaattatatcacactacattgtggaggtcatactgacatctggtggccttttgtacctattaatattgctcccaccaatttcagcaaatacttcatgcaagaatagtaataatatcaaaatgacaatgtgcttgtgtttgtttcctcatgggtttactgggca

SEQ ID NO: 43019 - DNA, 600 bp, Chicken  19866894280578_3
ctttggagtaaaaaaaaatatatgtacctattatatatataaaaaagaaagcagcctactgtctgctcagagagctgaattcagctttctattttgtcaccacaaaatatctgtgcttcttatcaatccaggagccagtctgggttttctgcaaaggtccggtctgacgcagacagaatttctccagcacttattcttgccctccytttgtaataactggaagactctctgaaagttggaaaaggcacttaatcattgactgtattttttttcagccacagaaaatagaacttttatttwaaaaattacattaagaattcctgattctgtctaataaaggagtgaattatatcacactacattgtggaggtcatactgacatctggtggccttttgtacctattaatattgctcccaccaatttcagcaaatacttcatgcaagaatagtaataatatcaaaatgacaatgtgcttgtgtttgtttcctcatgggtttactgggcactagttgaaacttgagctaagaggtaataagtcaactccacacagtaccatgctgaagtacagccttttaattagttcccatgttaagcctcat

SEQ ID NO: 43020 - DNA, 600 bp, Chicken  19866894280578_4
tcttcgagtggggcagagaagcagtctgggccactactgcatccacataatggtagaagaaagacaaatgagcttctgctgttagctgtcattgagaagttcattttagctcaagagaacgaaattctgtcaggaaaggttttcctgtcaactgccaggctgctgactccgtcacaggagattattaagaacttgagcctccattccagagaaatcgggctccagtaaaaaatgttttattcaatgaaataaacttcattttgaatctgcctgaggaggtacacgtagatatttcccatrgaaaagacattctgaaggacatctcacagcactaacactcctcatttctcttatgtcattttgattcatttaattttctgtactgcaatgctgtaagaccaaggttgacatagccaacttgtggtttatgggatagatctttatagtgcctgaataattcattcagcctgctgcctaccagctaccagyctctttccccaaggttctacagattcaggaagaaagcagaccataagtcagaaaaaaattattctcatagcccagcacttgattcctgaaacctcttatcccattgtcccc

SEQ ID NO: 43021 - DNA, 600 bp, Chicken  19866894280578_5
aacttgagcctccattccagagaaatcgggctccagtaaaaaatgttttattcaatgaaataaacttcattttgaatctgcctgaggaggtacacgtagatatttcccatrgaaaagacattctgaaggacatctcacagcactaacactcctcatttctcttatgtcattttgattcatttaattttctgtactgcaatgctgtaagaccaaggttgacatagccaacttgtggtttatgggatagatctttatagtgcctgaataattcattcagcctgctgcctaccagctaccagyctctttccccaaggttctacagattcaggaagaaagcagaccataagtcagaaaaaaattattctcatagcccagcacttgattcctgaaacctcttatcccattgtccccattcacatgatcaaactggaaacctaacttccatgcgcacttccatctcttggttgctatgagtccattgcatggcatatcacaaatgttttttgtagagatgtgtcagcaaagagcgcaagggtgcactgccctttgcacacaagtaatgtgttgccaaagtgaacagagaactagaatatcagtaca

SEQ ID NO: 43022 - DNA, 600 bp, Chicken  19866894280594_1
attatgaaattgactgttaatggtttctgttttgaatcattttcaatctgaaaatcacttcactggtccaaaaattaataagatctttagtgaagctgttagaatgaacaaaataaatgtctaatggcttgtgagagtctgaataagaacagctgaaaagcttttgtacagaacctaatatgctaatactggtttgtatcaagcttatttaaaatatctgttggaaattacataaaaagggaatggaaaggtgcatgactagggagcacatgaattttaaacttcagtagttaacctatsaaatgttttcataataaactgaggttcctttataagaaggatgtggtcaggaatatttttattacaagagttcttccccctcctgctatgctacagcaatcataaatctaagctacctctgttttcaaaaataatctgcagaaagaaacaaaggtcagacttgcaaaaatacacctagcacattatgctagttcaagatctgtggctatgtttcctattatttcttttctgttcagaactagtgtagagcttcactttgtcatttttctcaacataaatatctctcaccttttttttttt

SEQ ID NO: 43023 - DNA, 599 bp, Chicken  19866894280595_1
  misc_feature (1)..(6): n is any nucleotide
nnnnnnaaaagaaggaggacctgaaaaactcaagaggaagtcaagggaggaaaaagtgaagagagggagggagtggtgggacaggaagaggaggcctgaaagcatttaagacaatgggacaggcagagcaaagcaagtaggcagtgcacagcaggaaaggaaagtggaagaggcagtaaagataggaaaaggaaataatggagccaaaagaaacccaccaaaaaaaaacagcaatccacaaccagaaacacaggaaaagcaagaggagcagcaggggaaagacagaaaaaagtggggggraaaggaaaatcaggagaaaaattaaaagctgaaagatgggaagagggaaaaacaaaaaaaagtgagaagggcagaaatgggatgggaataaggggatgggagtaaagagaaggagaaagaagaggatctcaggtggggaagaaagagaggaagcaaaggccatacagtgtttctgtttctcaaagggaaattaaatacagtttctactgaaaataaaatgagacgttttttaaagtgatttcagtcaaaattagtatgcttactaatctgaaataactcagaccaaaagttctaacatt

SEQ ID NO: 43024 - DNA, 600 bp, Chicken  19866894280597_1
ctgatatgaattctaatatggccaataaattaatgattcagtattccatcagtgacagacatgggatcaattctgtccatcactggaatcatcctatgccgtaactaatattaatgtcttttcttcacagtttcagatgaaaaataaaatgaatataaaaactgtcagtttcttcagctgtagaggtaactttcatattggcgttacatctctcaatgtcatacatcaaacaagatatgcatcagttcctttctgtatatacttcttgactttcagttagaagactttattcttcggaaytgccaggacagagagctttagctactcaaatagtggagagcttttctgtaacgggagataccaacagagaaactgttgctcagctgtatgccatcattgtcactataaagggcaccggcaactgaaaagtatctgacaaattgacaacttgacagggacatgagatggtgaattaatccaccttggcagaaggctgttgctgaatatttaaataggttaacagtcaacattaaagccctgaaaccaaatacgggctggcagcagaagagaacaggtaaatctgatatctaaattatgctc

SEQ ID NO: 43025 - DNA, 600 bp, Chicken  19866894280598_1
agacttggtctctgtagcagtgcctggcacaggagactggtgtttggcatctcacactttccagccagccaaaaccatgcgtggtgccagcttcaacttaccctgagagaggaaaccgccttggttttcagataatccgtgggaaagcagcatgtcagataaaatgaagcacaacacagcagtcaggatgtgcattttgtcccaggtttgctgctggtgctcattggctgtgcaaagaaagctgtctgagcagttctcttctgacacataatgtggagttgcagggtaaagggcttggtwgaaagctgaatggtatgtggacaaaatccctggctctactgcaccaaaaaatgccatttaaatgcagtaatagagttgatttagtgcagagtggaactttttattgctgctgaaagcagctaacaagcagyttaggactaaactgtgtgcatgtattaataaacaaatgacccagctaacgagcagcgtgacccagtatcatgctgtgagcaacttggagagttcaagtgcagctgatggaaagtactcctctcctcatatcacctttttttgtggctgttaaggttgagaaactcttta

SEQ ID NO: 43026 - DNA, 600 bp, Chicken  19866894280598_2
ataatccgtgggaaagcagcatgtcagataaaatgaagcacaacacagcagtcaggatgtgcattttgtcccaggtttgctgctggtgctcattggctgtgcaaagaaagctgtctgagcagttctcttctgacacataatgtggagttgcagggtaaagggcttggtwgaaagctgaatggtatgtggacaaaatccctggctctactgcaccaaaaaatgccatttaaatgcagtaatagagttgatttagtgcagagtggaactttttattgctgctgaaagcagctaacaagcagyttaggactaaactgtgtgcatgtattaataaacaaatgacccagctaacgagcagcgtgacccagtatcatgctgtgagcaacttggagagttcaagtgcagctgatggaaagtactcctctcctcatatcacctttttttgtggctgttaaggttgagaaactctttaaacaaaagcatagaatgcctttttagttgtatgaggtgacaactcttccttctactggcatttttaaccccagtttttaggcatctcatgctggttgttctcacaagcatcagggaccatgagatggatgt

SEQ ID NO: 43027 - DNA, 570 bp, Chicken  19866894280598_3
tgtgtgcatgtattaataaacaaatgacccagctaacgagcagcgtgacccagtatcatgctgtgagcaacttggagagttcaagtgcagctgatggaaagtactcctctcctcatatcacctttttttgtggctgttaaggttgagaaactctttaaacaaaagcatagaatgcctttttagttgtatgaggtgacaactcttccttctactggcatttttaaccccagtttttaggcatctcatgctggttgttctcacaagcatcagggaccatgagatggatgttgtgctgtaaartgcatgttttcttttactttttgctactttcttgccatctgctgagtcctgtgattccacatctgagagtgaaagctagctgagtgctggggagtctgggatctttatggtcccatcacctactgtaagtgcaggtacttatcttcagtgattggtctaataaaatatatctccccaacttacagaccatgcctcccaagcatttacctgactgttatactaacacataggcaccaaaccaccagaacattaagctttacaatgcccaag

SEQ ID NO: 43028 - DNA, 600 bp, Chicken  19866894280603_1
atagagtttatacaaataattggtccgtgttggagtcggaggagcatgagttgtgttattaaaaaaagaaagaagtctttaaaagctgtgtaaactctctgtagctaaatacaagttcaaagacatgtctctttcacatcacttaccaaaaaatcatggccacaacagtctttgattgttgggtgggattttttttcccctcccctcagtaatgcacagatttttctgcaacactttgatataacacaagggaaaaacacaatcaatgttgccataaaattaattcaaataagtaatgamttaaaaaataggcacaatgagcagtcttttgtttccattgtgctttctctctggccatcatgccagtgcttacatgtgtattagtgtcaagtatatatatcttcttgcaaaagtatccagtgaactgagtatagtgggagaagaaaaaaaatgtggaaatatattttagttatgttacggtaaaggaaaaacttttacaaaaattgatatgctacgatatctatgccaatatatcacttagaatatatatcaattatatagaagtgcttgtatatatgcttcattaatcctctatattaa

SEQ ID NO: 43029 - DNA, 600 bp, Chicken  19866894280603_2
gaagaaaaaaaatgtggaaatatattttagttatgttacggtaaaggaaaaacttttacaaaaattgatatgctacgatatctatgccaatatatcacttagaatatatatcaattatatagaagtgcttgtatatatgcttcattaatcctctatattaaactgccaacaaagttttgtatcccagatatatagagtattaatatttatattttaatataaatctaaatttattaatataaatttatattttaatatttttcacttggtcctcattgctttctaattctctccgtcttsttccttttagattatgttccttgctttttgattccactttccatctcatttcttagaatcatagaatccttagagttgaatgggacctctgaggtccatttagtccaactcccctgcaatcaacagggataccacagcaagatcaggttaaaacaaaaaaaaaaaagtgtattttcctctttcaacccaggaccatcatatctttcctcattgtaatgattttctttatttatttactcattttgcttttctttttcaacagttttatcaaccatcactcaagagttagcttttgaaaag

SEQ ID NO: 43030 - DNA, 599 bp, Chicken  19866894280604_1
  misc_feature (1)..(123): n is any nucleotide
nnnnnnnnnnnnnnnnnnnnnnnnnnnnnnnnnnnnnnnnnnnnnnnnnnnnnnnnnnnnnnnnnnnnnnnnnnnnnnnnnnnnnnnnnnnnnnnnnnnnnnnnnnnnnnnnnnnnnnnnnnnaaaaatatccatatgatttggtggttttggtaaaggaggtgttatttttctagttgtttggatagtactattttgcaggtgtccttgccttttttgcagaagaaataagtacagaactacgaatcactctcacagctctcagtgttgacaccatcactccctttgcactcttctctmtmtatatatagatatatatatacactcagaaagatgaacaaaaagcagaggcactgcaatctggtggcaatgtttaaagtagaaactaaaggaaaacaatacagttgtggcaggcaaagagagtgctaggcctgagggaacaccagagcagccctcagcattcgtgccccaaagggtgggagcatcagtccctggggcttcctgcaggctcttccatctgcagggagcatgtttgtgctgctgacaacaacacatcagtctccaccttcttyggacatcacggctgctggagcagcact

SEQ ID NO: 43031 - DNA, 599 bp, Chicken  19866894280604_2
  misc_feature (1)..(121): n is any nucleotide
nnnnnnnnnnnnnnnnnnnnnnnnnnnnnnnnnnnnnnnnnnnnnnnnnnnnnnnnnnnnnnnnnnnnnnnnnnnnnnnnnnnnnnnnnnnnnnnnnnnnnnnnnnnnnnnnnnnnnnnnnaaaaatatccatatgatttggtggttttggtaaaggaggtgttatttttctagttgtttggatagtactattttgcaggtgtccttgccttttttgcagaagaaataagtacagaactacgaatcactctcacagctctcagtgttgacaccatcactccctttgcactcttctctmtmtatatatagatatatatatacactcagaaagatgaacaaaaagcagaggcactgcaatctggtggcaatgtttaaagtagaaactaaaggaaaacaatacagttgtggcaggcaaagagagtgctaggcctgagggaacaccagagcagccctcagcattcgtgccccaaagggtgggagcatcagtccctggggcttcctgcaggctcttccatctgcagggagcatgtttgtgctgctgacaacaacacatcagtctccaccttcttyggacatcacggctgctggagcagcactaa

SEQ ID NO: 43032 - DNA, 600 bp, Chicken  19866894280604_3
accatcactccctttgcactcttctctmtmtatatatagatatatatatacactcagaaagatgaacaaaaagcagaggcactgcaatctggtggcaatgtttaaagtagaaactaaaggaaaacaatacagttgtggcaggcaaagagagtgctaggcctgagggaacaccagagcagccctcagcattcgtgccccaaagggtgggagcatcagtccctggggcttcctgcaggctcttccatctgcagggagcatgtttgtgctgctgacaacaacacatcagtctccaccttcttyggacatcacggctgctggagcagcactaagaaaagggaggtaaaatacatatatcagccctcctggtacttagatatctgggctttgttagttagcactctttgcgtgtaataataatagcttagataaggttcctgagccttaaaactccttgtttttgtttttttttccctgacatttttctcttctttttataaaataaagctcaatttttaacttggaaaacactcttctatccattcaccaacctctacaagtatagctttcttaatgatctgagaatttgctctgcctctccct

SEQ ID NO: 43033 - DNA, 599 bp, Chicken  19866894280611_1
  misc_feature (1)..(234): n is any nucleotide
nnnnnnnnnnnnnnnnnnnnnnnnnnnnnnnnnnnnnnnnnnnnnnnnnnnnnnnnnnnnnnnnnnnnnnnnnnnnnnnnnnnnnnnnnnnnnnnnnnnnnnnnnnnnnnnnnnnnnnnnnnnnnnnnnnnnnnnnnnnnnnnnnnnnnnnnnnnnnnnnnnnnnnnnnnnnnnnnnnnnnnnnnnnnnnnnnnnnnnnnnnnnnnnnnnnnnnnnnnnnnnnnnnnnnnnnnnatgactgctttggaaagagacttcaagcttgattagatgaaattaagttagaagtttgatttttgyttttcttactttccaaatgcaatgatttttatagcaaaagggtgatttataggcatcagtattcaggaggacatatgtttatctcatggcagactgtgactgtacaartgtttactttttactttacattgttcgccaaagctacttttttttattcaggttttctctgttgactacataattyaaacacactaaaatgcaaacttttgctttcttaatagtgaagaggaaaaaaagttcaaaaacagaagccaagggcactgtgactaaagtaacagggaaaaaaataacgaagatca

SEQ ID NO: 43034 - DNA, 599 bp, Chicken  19866894280611_2
  misc_feature (1)..(126): n is any nucleotide
nnnnnnnnnnnnnnnnnnnnnnnnnnnnnnnnnnnnnnnnnnnnnnnnnnnnnnnnnnnnnnnnnnnnnnnnnnnnnnnnnnnnnnnnnnnnnnnnnnnnnnnnnnnnnnnnnnnnnnnnnnnnnnatgactgctttggaaagagacttcaagcttgattagatgaaattaagttagaagtttgatttttgyttttcttactttccaaatgcaatgatttttatagcaaaagggtgatttataggcatcagtattcaggaggacatatgtttatctcatggcagactgtgactgtacaartgtttactttttactttacattgttcgccaaagctacttttttttattcaggttttctctgttgactacataattyaaacacactaaaatgcaaacttttgctttcttaatagtgaagaggaaaaaaagttcaaaaacagaagccaagggcactgtgactaaagtaacagggaaaaaaataacgaagatcattggtttaggaaagaaaaagccatcaacagatgaacagacctcgtcagctgaagaagatgttccaacatgtggtaaatcctttttctttttgggtcttcaaggcagct

SEQ ID NO: 43035 - DNA, 599 bp, Chicken  19866894280611_3
  misc_feature (1)..(50): n is any nucleotide
nnnnnnnnnnnnnnnnnnnnnnnnnnnnnnnnnnnnnnnnnnnnnnnnnnatgactgctttggaaagagacttcaagcttgattagatgaaattaagttagaagtttgatttttgyttttcttactttccaaatgcaatgatttttatagcaaaagggtgatttataggcatcagtattcaggaggacatatgtttatctcatggcagactgtgactgtacaartgtttactttttactttacattgttcgccaaagctacttttttttattcaggttttctctgttgactacataattyaaacacactaaaatgcaaacttttgctttcttaatagtgaagaggaaaaaaagttcaaaaacagaagccaagggcactgtgactaaagtaacagggaaaaaaataacgaagatcattggtttaggaaagaaaaagccatcaacagatgaacagacctcgtcagctgaagaagatgttccaacatgtggtaaatcctttttctttttgggtcttcaaggcagcttgtgactaaaaattttaacactctagcctagaaagtcccatgaatttgcttttactgctgtaatttttacctctgc

SEQ ID NO: 43036 - DNA, 599 bp, Chicken  19866894280619_1
  misc_feature (1)..(11): n is any nucleotide
nnnnnnnnnnncctttcctgtccgtcctttatttatgtattcaattcatagttatgttcctattcattctgttctcccaaaattccttattttttctctctgatttaatctttttttttttaaattctgttggactaagcagtcattggagtggtttttatccatgcaactcactctgtgaccatagtacttttccactgcagttctagttgcctttaaacttaactcagtgtgatttggaggaaggaatagggatgttcctatagctgcatagcagcaggcaggtgggaaggctgcatyccatcacckttaccactttatttggatgctgtagcataataccagtcctgcagaaagctttcctcactttgtttcctcccaatgttgtaatcatctgctggtttgagcttaaaaattgttttcctctttctccattcaagagtggttccatctgtttacttatgtctgcaagcttctggaagtgttgaagcaagtaatttactgctaatacagttgtggccttaggaattttacagttttacttaacgttacacaaaggatttttcttctgtgaaatacagctgacttttccatcaggt

SEQ ID NO: 43037 - DNA, 599 bp, Chicken  19866894280619_2
  misc_feature (1)..(2): n is any nucleotide
nncctttcctgtccgtcctttatttatgtattcaattcatagttatgttcctattcattctgttctcccaaaattccttattttttctctctgatttaatctttttttttttaaattctgttggactaagcagtcattggagtggtttttatccatgcaactcactctgtgaccatagtacttttccactgcagttctagttgcctttaaacttaactcagtgtgatttggaggaaggaatagggatgttcctatagctgcatagcagcaggcaggtgggaaggctgcatyccatcacckttaccactttatttggatgctgtagcataataccagtcctgcagaaagctttcctcactttgtttcctcccaatgttgtaatcatctgctggtttgagcttaaaaattgttttcctctttctccattcaagagtggttccatctgtttacttatgtctgcaagcttctggaagtgttgaagcaagtaatttactgctaatacagttgtggccttaggaattttacagttttacttaacgttacacaaaggatttttcttctgtgaaatacagctgacttttccatcaggtcgttaaact

SEQ ID NO: 43038 - DNA, 600 bp, Chicken  19866894280619_3
tttcctcactttgtttcctcccaatgttgtaatcatctgctggtttgagcttaaaaattgttttcctctttctccattcaagagtggttccatctgtttacttatgtctgcaagcttctggaagtgttgaagcaagtaatttactgctaatacagttgtggccttaggaattttacagttttacttaacgttacacaaaggatttttcttctgtgaaatacagctgacttttccatcaggtcgttaaactgcggaacgtgtagtaaatttgggaggagccttgtgctaattactaccacrttccccacagtgagccctgaccactagagaagaatttccctgtggaattgtgtggttgatattttaaatggtcgttgcagacgatgcaggagtcaaggattcgagagctgtctttgaatgcttaatttcaggttcagtcaaccctcaccttttggaagatgggccagtggaagaagtgccctgcatggagtgttttcaaggaactgcagagcagctctgcactctctcactgacctgatgcttcccaagcactcgcttggaatgcctgactggagaatctgcttttacattggatcttca

SEQ ID NO: 43039 - DNA, 508 bp, Chicken  19866894280622_1
aaaaagatttctctgggatttcattactaaaaattataattggaaaaagcatcctgaagtctgggaactagaattgccagtcataaagtgaaaatgaactagatcacattgagattatctatatgataagccttaccctgggggtaactgaatattttctgggtggtgataagtgcacagatttaagacagcatcaatcagctggattctctctaccctgaggacctcaacatctggaggagaggaaaagacaaagcaagttattgaccagtctaccttgctgaaagtccttcaaggaarccaacaaagcaacaaaaattcagcttcaagcaactacgttattgtgggtcttgttctcacgatattataggattaaaaaaaacacaactaaaaaagcagaaacagctgaaacaagccataaggatattaagcctaacgtaacataaatgagaagactacagaacacgtgggttaatttctttaacttccaacactttcacttttgaat

SEQ ID NO: 43040 - DNA, 599 bp, Chicken  19866894280623_1
  misc_feature (1)..(118): n is any nucleotide
nnnnnnnnnnnnnnnnnnnnnnnnnnnnnnnnnnnnnnnnnnnnnnnnnnnnnnnnnnnnnnnnnnnnnnnnnnnnnnnnnnnnnnnnnnnnnnnnnnnnnnnnnnnnnnnnnnnnnntgctcgctgctaccgggctctggcagctgctgcagcctttggggatgtgtgaccctacgctggcagcagtggggttgcaatgttctgacatccctgcgctcgatttgcagctggataagcaaatgctggatgcacgcggggctgctgggtgcacagtgctggggttctgtgctttgggcagygctggtcactgctgctccgtagaggscatcaggttggtggcacccccagagctctgctgtatccgtgtcaccgtgtcctgcaaggatgcagcaggggcagcattgctgcaggatgctctcattccccagcctggagcatctcttagtggtccagcraaggtgggacagtggggtgcagggtgttgggagccgacctgagcacagtttgccctcattcctggaggtgctgcacccccaggggggcagacagagccaccaaccagcacagctgggacagccacagtttcaagaggttcctg

SEQ ID NO: 43041 - DNA, 599 bp, Chicken  19866894280623_2
  misc_feature (1)..(92): n is any nucleotide
nnnnnnnnnnnnnnnnnnnnnnnnnnnnnnnnnnnnnnnnnnnnnnnnnnnnnnnnnnnnnnnnnnnnnnnnnnnnnnnnnnnnnnnnnnnntgctcgctgctaccgggctctggcagctgctgcagcctttggggatgtgtgaccctacgctggcagcagtggggttgcaatgttctgacatccctgcgctcgatttgcagctggataagcaaatgctggatgcacgcggggctgctgggtgcacagtgctggggttctgtgctttgggcagygctggtcactgctgctccgtagaggscatcaggttggtggcacccccagagctctgctgtatccgtgtcaccgtgtcctgcaaggatgcagcaggggcagcattgctgcaggatgctctcattccccagcctggagcatctcttagtggtccagcraaggtgggacagtggggtgcagggtgttgggagccgacctgagcacagtttgccctcattcctggaggtgctgcacccccaggggggcagacagagccaccaaccagcacagctgggacagccacagtttcaagaggttcctggagccattcccaggaatgagggatgg

SEQ ID NO: 43042 - DNA, 600 bp, Chicken  19866894280623_3
ttggggatgtgtgaccctacgctggcagcagtggggttgcaatgttctgacatccctgcgctcgatttgcagctggataagcaaatgctggatgcacgcggggctgctgggtgcacagtgctggggttctgtgctttgggcagygctggtcactgctgctccgtagaggscatcaggttggtggcacccccagagctctgctgtatccgtgtcaccgtgtcctgcaaggatgcagcaggggcagcattgctgcaggatgctctcattccccagcctggagcatctcttagtggtccagcraaggtgggacagtggggtgcagggtgttgggagccgacctgagcacagtttgccctcattcctggaggtgctgcacccccaggggggcagacagagccaccaaccagcacagctgggacagccacagtttcaagaggttcctggagccattcccaggaatgagggatgggagggagggaggagagcagcagggagagctcctcaatgctgctggtgaggcagcccagggccgtggctgtggggaggtgggatgagccgcaggaagagggagaggtcagtggaggggtgaggcttctcccg

SEQ ID NO: 43043 - DNA, 600 bp, Chicken  19866894280634_1
gtttttaattttgtcttgttattaattagccattttgttcagcattttccttcaggagtccaatcaaagcaaatatttatctctagttcttccaaagttgtgtggatataaaaatcgaacacctatatccattctcaaaatcctcacttcacttaatatacaatgtactattttctgaatgtactgaaaatttcattgctttgtagttacaaattgaaacctataatgctcatctctaggaatcaatcattaatgcctttttttaacagtagaatatacttagtcttgcaattttggcasacagtgccttttgaaagtattttcttaaatgaaccagtaatagctagttattccttgtaatatattactcagtgatgaaatagttataatccaaacacaaaccttttctagctgcaaggactatagaaacatgagagatccttaaactgtgggatgattctttcctctgccatccaaagtagcttagggccagaatatggccttgccagttttttttattattattatttggacagctttctacatattcccagaattgttaaatattgcactatttcccacactgcatatagttcaatt

SEQ ID NO: 43044 - DNA, 600 bp, Chicken  19866894280634_2
aaatgaaccagtaatagctagttattccttgtaatatattactcagtgatgaaatagttataatccaaacacaaaccttttctagctgcaaggactatagaaacatgagagatccttaaactgtgggatgattctttcctctgccatccaaagtagcttagggccagaatatggccttgccagttttttttattattattatttggacagctttctacatattcccagaattgttaaatattgcactatttcccacactgcatatagttcaattagagagattctttttgtgagcatttytcttgtgctcctccaactgccccatggcacagctgtcatggctgatgtcctgctctgattcacagttcccagcaaatatttcccattggcttttctgaatagctttaatgataatgcataattatttgaaaactctgaagacttctggtatttgttacaaatgaacaccactttacacctagtcttttcagggcactttctttctctatcagaaataacttctgagacgaagacttgtacatcagccttccagttgtagacccttaaaaatcaaaatctcttttaagtggaagcacattt

SEQ ID NO: 43045 - DNA, 600 bp, Chicken  19866894280636_1
attaaaaaaaaatagaaataaaaaaattcatctcaatgtgttctgagatcacttatttctgatgggtttattttgataggtgatctaggaattcataacttacttgtaaatgcagccaaaagaagtttgtaaatactctaagttccgtgtaatattgtttcacagtgacactccccaagaaatcttcctttcttacagagcgatgactttattttgcagctagtaattaactttcaaaagatattaggtatcatctcattttatttgtttccaaaacctaaaatttcagggagagattgyagggtggctagaattttactccgtttaattacaattgttttcttgttctcttagttatctgataagggagtagatgcgtacaaaagtacaaatgaattcaagaaaatatcacagatttgcctgtaactggctattatacccaatgtctaaatgaagacaccaggtgaagtttaccaagagagtggtaattcatcacctgtcttgctttgaagataaaaatttagttagaagataaaaatattttcgtaggctacaacacatttttaatatggatactttttattccagaccttggtcatt

SEQ ID NO: 43046 - DNA, 600 bp, Chicken  19866894280639_1
ggaacaggttgcccagtgaggttgtggatgcctcctccctgggaacattcaaggccaggctgacaggactttgagcaacctggtctaatgggaggtgtccctgcctatagcatagggactagatgatcttaaaggtcccttccaactaaatcattctatgattctagagcataacagaagtctgagaaatcatgaacagaatgaagaaaatggatcttgagccttaccacatgagaactaaggaatgtaaaatgaagaaggtacaaacttctttgtacaataggaggtacgttcattgtrtgatgatgctgtggatgtatagacgaagggaagaaactagataagtaggagacttactaaaaatactggctacatctaaagaaaatcctttgagctgggcatagctgaaggcwggtagaacagcaagaggaagcatcacgtagagacaggtgctgggctagatgggcctttggtctttctagtaatggctcttagtgtgatcttctaacagactgccccacctgcattattcaaaatatgattggctgactaagatgagggagtaacacacgctatgctacgtgactcagaggtggtagg

SEQ ID NO: 43047 - DNA, 600 bp, Chicken  19866894280639_2
agggactagatgatcttaaaggtcccttccaactaaatcattctatgattctagagcataacagaagtctgagaaatcatgaacagaatgaagaaaatggatcttgagccttaccacatgagaactaaggaatgtaaaatgaagaaggtacaaacttctttgtacaataggaggtacgttcattgtrtgatgatgctgtggatgtatagacgaagggaagaaactagataagtaggagacttactaaaaatactggctacatctaaagaaaatcctttgagctgggcatagctgaaggcwggtagaacagcaagaggaagcatcacgtagagacaggtgctgggctagatgggcctttggtctttctagtaatggctcttagtgtgatcttctaacagactgccccacctgcattattcaaaatatgattggctgactaagatgagggagtaacacacgctatgctacgtgactcagaggtggtaggtttctccaaccttatgtcaatacagatagaggataactggtagctggcagaagtcaatgaacagcagaagtagaccttttaagaaatacgtgaagctccttaactcacatcaa

SEQ ID NO: 43048 - DNA, 600 bp, Chicken  19866894280646_1
tgctctggggaaagtgtctttaaatgtcattctgtcttgctttaagttatacagatttttcttgttttctgatcacctccagctccaagttcggtctgatagagtgacagctattcttgaagctggctattactcaacagctgtgttcagggacctaaactggaaagaaatagatcaccctttcatcctctgagtgaatcattttcaaactgagatatcctgaaagcattccagtgaaggtgagaaaaatcctatacagtgatttaagcatctactaacagcaggctttcttaacttggmatatatgctgggaagcatccctctgaaaggtttacggtcttaaaaattacctttacctttgctgactcacagcagtcaaccaacaatacatattataaaaagctttaagtaaaacttggaatgcttaagatgaaaaawayggaataagatgacaaatgtggagtaagacattgggattcttactccagttgtattttgttactgaccttgctgagaagacagagattttgattgcaggacagaagattttacaaataagggttaaaatacagtgacttggaagtttttttaggtctacac

SEQ ID NO: 43049 - DNA, 496 bp, Chicken  19866894280646_2
agctgtgttcagggacctaaactggaaagaaatagatcaccctttcatcctctgagtgaatcattttcaaactgagatatcctgaaagcattccagtgaaggtgagaaaaatcctatacagtgatttaagcatctactaacagcaggctttcttaacttggmatatatgctgggaagcatccctctgaaaggtttacggtcttaaaaattacctttacctttgctgactcacagcagtcaaccaacaatacatattataaaaagctttaagtaaaacttggaatgcttaagatgaaaaawayggaataagatgacaaatgtggagtaagacattgggattcttactccagttgtattttgttactgaccttgctgagaagacagagattttgattgcaggacagaagattttacaaataagggttaaaatacagtgacttggaagtttttttaggtctacacttccttccattttcacctacatttttctactttt

SEQ ID NO: 43050 - DNA, 494 bp, Chicken  19866894280646_3
ctgtgttcagggacctaaactggaaagaaatagatcaccctttcatcctctgagtgaatcattttcaaactgagatatcctgaaagcattccagtgaaggtgagaaaaatcctatacagtgatttaagcatctactaacagcaggctttcttaacttggmatatatgctgggaagcatccctctgaaaggtttacggtcttaaaaattacctttacctttgctgactcacagcagtcaaccaacaatacatattataaaaagctttaagtaaaacttggaatgcttaagatgaaaaawayggaataagatgacaaatgtggagtaagacattgggattcttactccagttgtattttgttactgaccttgctgagaagacagagattttgattgcaggacagaagattttacaaataagggttaaaatacagtgacttggaagtttttttaggtctacacttccttccattttcacctacatttttctactttt

SEQ ID NO: 43051 - DNA, 600 bp, Chicken  19866894280647_1
ttaacttccatttagaatctaatctaattaaattttatttaactttataaatagggattctaaacaaatctttcttcatgtacatactacttataaaagttgccaggataaagttctttcaacaatgttgtccagactccagtgtcagtgacgattctgatttccttattgagtggttgtacatgttctttcaagcaggagctatcatataatatcaagtcaactttgtttaagagtacactttaattcaggaaagtactcagtttcattttggtttgtcttttttttttaagagtttgyttttaatcatgaaatattataagcaatcattagaagtgtggtagaaaaatgccagactatgtataagtattgaacgtgagatacttacagtcgttcaagttgctttagatcctgaaacgctccacgttctatcacactgatctgattttcttccaagtgtctgcaattccagaaatatcagttaattttaacacaggataactgtttccccacttcacacatgttataaaatagcttttcacagaagtaacagttcaatctctttaggtcactagcaggaaacggattaaaaaattgcct

SEQ ID NO: 43052 - DNA, 600 bp, Chicken  19866894280647_2
atcagttaattttaacacaggataactgtttccccacttcacacatgttataaaatagcttttcacagaagtaacagttcaatctctttaggtcactagcaggaaacggattaaaaaattgcctcctgactgccagattcagtaaccatttttgctccaaaacatttgtaaccatcatgttcagaatgatattggtttagagactaattcttacattctggagtacatacttctagcttacctaaagttaataagatgactgaatgctacagcaaatagcagaaaaatcaaggtaaaaawttttatccagtctttatgttctgcaaagatttcgggcttaccacagagtatgctgtttgtaagcagtccaaaacattttggtctcttgcagccataccagttatgtctgacaacagtacacagtcccactgcacatcagagtgaaaaataagagaaaattctcagatttccactattcccagtgcgggcccttgcttttcttcaccctctgaggcaaggataagtaataaacaatggaaaccgagttctctttgttttacactgtgcaggaaacgatgactacttcatacagcagaagtg

SEQ ID NO: 43053 - DNA, 488 bp, Chicken  19866894280647_3
tgtttgtaagcagtccaaaacattttggtctcttgcagccataccagttatgtctgacaacagtacacagtcccactgcacatcagagtgaaaaataagagaaaattctcagatttccactattcccagtgcgggcccttgcttttcttcaccctctgaggcaaggataagtaataaacaatggaaaccgagttctctttgttttacactgtgcaggaaacgatgactacttcatacagcagaagtgctcttcacaggtaaagtgcaagccaagcactagatacatcatttaagctaacyttctctctcagtgctgacttccagcacacaccaagttctgcttccataaaagcactcagataacagtatgaactccaggccctctgaatattgtacatggttttagctaagacaacacagaaaggaagaatgtaattcatagtaagcttggcttcaggtcagactgtaataagtgaaaatgcactctt

SEQ ID NO: 43054 - DNA, 600 bp, Chicken  19866894280649_1
atttctcatgaattttctccttatttgcttgaagcagaatatgttttgaggagttgggcagcagcaatgaaaaggactgtatataaaaaagcagatgctgaagtctacaagaactgaagagacctgtgagacctgtggtccagctcagagacagagaatttatgtgttgtacagtgtatgattttattccagattattcaaatcgcagtattatttagaagatgaattttcttggcttaaaccagttgtggctaaccaccgccagtgaaaggacaggcagcatattgagttcactatttytctcagaaattatttccttctttatattaatttaacctaatttgatcaataaatacaataaaaaatatgcttcaactgtaatgtgaaagttatgggcaaccacatgggttgtggttgtttgaagactgcctaagctagacgtctgtgaaacagtgggaaaaaaagtagaaagttctagtaaagcagctcttgatcttgaggcctcatttttttcagagatgttgaatataatatgctcagtaaacaaaacatgaagacctgactgtggcatccatcgtctcaagctggatgaccgggcca

SEQ ID NO: 43055 - DNA, 600 bp, Chicken  19866894280649_2
tttatgtgttgtacagtgtatgattttattccagattattcaaatcgcagtattatttagaagatgaattttcttggcttaaaccagttgtggctaaccaccgccagtgaaaggacaggcagcatattgagttcactatttytctcagaaattatttccttctttatattaatttaacctaatttgatcaataaatacaataaaaaatatgcttcaactgtaatgtgaaagttatgggcaaccacatgggttgtggttgtttgaagactgcctaagctagacgtctgtgaaacagtgggyaaaaaagtagaaagttctagtaaagcagctcttgatcttgaggcctcatttttttcagagatgttgaatataatatgctcagtaaacaaaacatgaagacctgactgtggcatccatcgtctcaagctggatgaccgggccagaaactcactgtggtatatgtgacacggacataaaggtaaacaagtctctaaagttagaagagaaatgatagaaaagaactgttctctgttcaaaattgcactgaatggtctgtatttttctgacaagatgatgctggtctgaagaataatgagccca

SEQ ID NO: 43056 - DNA, 599 bp, Chicken  19866894280651_1
  misc_feature (1)..(81): n is any nucleotide
nnnnnnnnnnnnnnnnnnnnnnnnnnnnnnnnnnnnnnnnnnnnnnnnnnnnnnnnnnnnnnnnnnnnnnnnnnnnnnnnnctgccgtgagcagagcagcgcggcgggcactgcccctgcggtgatggacttaagggagagtgagaacgctgtgcaacggcaatgagggtgaggaaacgggggagaaacagccctgtgggcatccgagtgagggcagaagatggtccgggcgcagagcagcagctccctgcagcccaggagaggcccacggtggagcaggctgtccctccacagcccacrggcaccacacggagcagatctccctttgctgccatgggggaacctgtggtgcagcagtggatgtgggctgaaggagatgcagcccacggagccccacaggagcagggcctgggccggagctgcagcccgtggagaagagctgcagggagcagagggaccgggggagctgaagcagcacccagaggatgggccccatggtatcgagccacagcagagcaatgcttggagctgcagcccatgggaaggccatgtgggatcagttcgggaaggacagcatccatgggaggggcctttgatgg

SEQ ID NO: 43057 - DNA, 600 bp, Chicken  19866894280659_1
gtacaggggtgtctgctgtgctctgggcaatgactctgcactgggcacaaatttcagtaaatacagaagaggcaaagaggtatgaaaggagattcaggctctttcttgctcaatcctccagcctgttaatattgaactttccatctcctaaggattattgatagcatcacagtgttctgtggtacttcacccctcttgggttcaagatagtggtaattttccaagcatgtagcataaagccctgagatgttcatcatgatctactacttgaagagacagagcagagtcatttcagaggaygtggctgtsacagaacaccacagcatttccctctgagccttcagcagccaagatcccagagagagaccaccttttcttgccttcttgcctgcttagtgtcttctggagaactggtggtgatattcagtgccatgctccattctcttcagtgtgttgttttacccaggctgagaacactcgctcactcatggcaagccctgcggtggaaacagaggatagtgatactactctggctcatttggctgctggcttgaaagaagaaaactgagagataagaaaacaggaatcgattggatcaga

SEQ ID NO: 43058 - DNA, 600 bp, Chicken  19866894280659_2
tgtctgctgtgctctgggcaatgactctgcactgggcacaaatttcagtaaatacagaagaggcaaagaggtatgaaaggagattcaggctctttcttgctcaatcctccagcctgttaatattgaactttccatctcctaaggattattgatagcatcacagtgttctgtggtacttcacccctcttgggttcaagatagtggtaattttccaagcatgtagcataaagccctgagatgttcatcatgatctactacttgaagagacagagcagagtcatttcagaggaygtggctgtsacagaacaccacagcatttccctctgagccttcagcagccaagatcccagagagagaccaccttttcttgccttcttgcctgcttagtgtcttctggagaactggtggtgatattcagtgccatgctccattctcttcagtgtgttgttttacccaggctgagaacactcgctcactcatggcaagccctgcggtggaaacagaggatagtgatactactctggctcatttggctgctggcttgaaagaagaaaactgagagataagaaaacaggaatcgattggatcagaacgttcagc

SEQ ID NO: 43059 - DNA, 600 bp, Chicken  19866894280660_1
aagctcagagtcggcaataggcagaaattgatctagcctgtgctagtctgtgttctgcagcaccaacaaaaagccaaagcagatccgaccacaaataactgtaatgctcctactcagaaggtcccaagggacaaaagaacaaaatgagattcaagaggacctgcaccaaaaacagcgttccttcaaaccctgagctgcctggtaggcatctgcccacgagttacttcacctcccctatgagaaaaaaattaccaagaggaaaaagggtaccaaactttatttttggttttaagcaatggragtgatctgcccactccccccgtgtactcaccagctgaaacacactcaagtgttaaagaagctgaaggcgaacacccagtctaggaaccttctgctttctgctgcttcagttctacaggagcatgaacaatttagtgcagggccagaagcattgcctattcccacctattatagttgctccttcttcctgtatttctgttatttgctattgtagacaactttcagataaaggtactaattcagctgacaacatggagcttccatttatctcccaaaggattaaggaaaagcagctggctt

SEQ ID NO: 43060 - DNA, 600 bp, Chicken  19866894280663_1
ggagatgtgagtgttgccctgcgagcaatgaaaaaagctccgtgtgctctccttgcctgcaagggatactttgatttaccgctatggaaatgtgaggctttattaatgagcagcaaagcttgccaaaactcttcagagggaagcacaggatctcttctcatccccataaggctcagtcactgttttgttggtaactgcaagcggggaataacccgatgccttcagccttcctaattccatatcgaagccctcggcgcagttaatccatccggatctcctacctgcctgcctacgtttcgytgggcttttggcagagtcctggcaggtgataaacgttgctgatactgttttgygaggtggattccaacccaggtgactaatgagtggcrtttgccagctctgtcacgctgcctgccttaacacacacttataatctgggcaggaatagccccagttataactggcacggggaaggcgagtcgaatctctctctcgtgcattccgaccaaggtttgttttcaacctcaagaatgtgataggtgctcagggctgctctcttggctgcaggcgatgtccccggacggggaggccatcgtgaca

SEQ ID NO: 43061 - DNA, 600 bp, Chicken  19866894280663_2
tgcctgcaagggatactttgatttaccgctatggaaatgtgaggctttattaatgagcagcaaagcttgccaaaactcttcagagggaagcacaggatctcttctcatccccataaggctcagtcactgttttgttggtaactgcaagcggggaataacccgatgccttcagccttcctaattccatatcgaagccctcggcgcagttaatccatccggatctcctacctgcctgcctacgtttcgytgggcttttggcagagtcctggcaggtgataaacgttgctgatactgttttgygaggtggattccaacccaggtgactaatgagtggcrtttgccagctctgtcacgctgcctgccttaacacacacttataatctgggcaggaatagccccagttataactggcacggggaaggcgagtcgaatctctctctcgtgcattccgaccaaggtttgttttcaacctcaagaatgtgataggtgctcagggctgctctcttggctgcaggcgatgtccccggacggggaggccatcgtgacaggagctggagatgaaaccctgcggttctggaacgtcttcagtaaaactcgctc

SEQ ID NO: 43062 - DNA, 600 bp, Chicken  19866894280663_3
atgtgaggctttattaatgagcagcaaagcttgccaaaactcttcagagggaagcacaggatctcttctcatccccataaggctcagtcactgttttgttggtaactgcaagcggggaataacccgatgccttcagccttcctaattccatatcgaagccctcggcgcagttaatccatccggatctcctacctgcctgcctacgtttcgytgggcttttggcagagtcctggcaggtgataaacgttgctgatactgttttgygaggtggattccaacccaggtgactaatgagtggcrtttgccagctctgtcacgctgcctgccttaacacacacttataatctgggcaggaatagccccagttataactggcacggggaaggcgagtcgaatctctctctcgtgcattccgaccaaggtttgttttcaacctcaagaatgtgataggtgctcagggctgctctcttggctgcaggcgatgtccccggacggggaggccatcgtgacaggagctggagatgaaaccctgcggttctggaacgtcttcagtaaaactcgctccacaaaggtaagggcacgtgcagctgcagcaggaac

SEQ ID NO: 43063 - DNA, 600 bp, Chicken  19866894280664_1
cttcctatagcttccagctgggattcgggggggtggaggggtaggcaggtgggtgacagagaacattttccagctgtccttcccctgcactctgttctgtggctcctgctgcccttcactccccttgccaggggctgtgtacatgagagctgctgcactgaccatgcagaaagcagagggataggctgttctgtgccctcagtggcactcccagagaacagctcctcctctctggggagggctcacatggcgtgaggtattgcttctgtgctgcccaccccgtcctatttgtacagcacrtgggtgggaggactacacatggagggtattttattgatgctaatgacattgaacgtggagagcacggctctgaacccattaacctctgactgcgtggcagaatcagggatgagttagctgcacggcatcattaccttgtcttcatcattaattaagtatatgaacattctctctgctggacaaaagagcctcattagatgagagatgcatcatcagcrcaaggtcactcctgcctgacccatcttgctgcccttagctsgggcagcccacatcccataagcctcagttgattgcagtgat

SEQ ID NO: 43064 - DNA, 600 bp, Chicken  19866894280664_2
cagctcctcctctctggggagggctcacatggcgtgaggtattgcttctgtgctgcccaccccgtcctatttgtacagcacrtgggtgggaggactacacatggagggtattttattgatgctaatgacattgaacgtggagagcacggctctgaacccattaacctctgactgcgtggcagaatcagggatgagttagctgcacggcatcattaccttgtcttcatcattaattaagtatatgaacattctctctgctggacaaaagagcctcattagatgagagatgcatcatcagcrcaaggtcactcctgcctgacccatcttgctgcccttagctsgggcagcccacatcccataagcctcagttgattgcagtgattcaggcattcctctgccaactgaactgctgtgaatctaggtamgtttttaatgctggaggtggagaaataatcgcaaccaacaggagggaagggatagcctggccgtatctactgaatktgtgttttgtattcattaccttggtgtttttctgcaaccagcacttagatttacaacaagggacagytccatacgagtcccctgtttgctcctgttctg

SEQ ID NO: 43065 - DNA, 600 bp, Chicken  19866894280664_3
ttgcttctgtgctgcccaccccgtcctatttgtacagcacrtgggtgggaggactacacatggagggtattttattgatgctaatgacattgaacgtggagagcacggctctgaacccattaacctctgactgcgtggcagaatcagggatgagttagctgcacggcatcattaccttgtcttcatcattaattaagtatatgaacattctctctgctggacaaaagagcctcattagatgagagatgcatcatcagcrcaaggtcactcctgcctgacccatcttgctgcccttagctsgggcagcccacatcccataagcctcagttgattgcagtgattcaggcattcctctgccaactgaactgctgtgaatctaggtamgtttttaatgctggaggtggagaaataatcgcaaccaacaggagggaagggatagcctggccgtatctactgaatktgtgttttgtattcattaccttggtgtttttctgcaaccagcacttagatttacaacaagggacagytccatacgagtcccctgtttgctcctgttctgctcccagctcaaccacaaaaaggttttctgcattttgaggc

SEQ ID NO: 43066 - DNA, 600 bp, Chicken  19866894280664_4
tgacattgaacgtggagagcacggctctgaacccattaacctctgactgcgtggcagaatcagggatgagttagctgcacggcatcattaccttgtcttcatcattaattaagtatatgaacattctctctgctggacaaaagagcctcattagatgagagatgcatcatcagcrcaaggtcactcctgcctgacccatcttgctgcccttagctsgggcagcccacatcccataagcctcagttgattgcagtgattcaggcattcctctgccaactgaactgctgtgaatctaggtamgtttttaatgctggaggtggagaaataatcgcaaccaacaggagggaagggatagcctggccgtatctactgaatktgtgttttgtattcattaccttggtgtttttctgcaaccagcacttagatttacaacaagggacagytccatacgagtcccctgtttgctcctgttctgctcccagctcaaccacaaaaaggttttctgcattttgaggcacagttctgcgggcatgaatagctgtgagtacagaactgagtgtgcacctcatttatgctcagaaataactgtgtgccttaaaa

SEQ ID NO: 43067 - DNA, 600 bp, Chicken  19866894280664_5
gcacggcatcattaccttgtcttcatcattaattaagtatatgaacattctctctgctggacaaaagagcctcattagatgagagatgcatcatcagcrcaaggtcactcctgcctgacccatcttgctgcccttagctsgggcagcccacatcccataagcctcagttgattgcagtgattcaggcattcctctgccaactgaactgctgtgaatctaggtamgtttttaatgctggaggtggagaaataatcgcaaccaacaggagggaagggatagcctggccgtatctactgaatktgtgttttgtattcattaccttggtgtttttctgcaaccagcacttagatttacaacaagggacagytccatacgagtcccctgtttgctcctgttctgctcccagctcaaccacaaaaaggttttctgcattttgaggcacagttctgcgggcatgaatagctgtgagtacagaactgagtgtgcacctcatttatgctcagaaataactgtgtgccttaaaacccaatttatgagtgcatcgcattttgatttgcaaagtgacattaattgctgttgcagtgacttgtgccagaggca

SEQ ID NO: 43068 - DNA, 600 bp, Chicken  19866894280664_6
ctgctggacaaaagagcctcattagatgagagatgcatcatcagcrcaaggtcactcctgcctgacccatcttgctgcccttagctsgggcagcccacatcccataagcctcagttgattgcagtgattcaggcattcctctgccaactgaactgctgtgaatctaggtamgtttttaatgctggaggtggagaaataatcgcaaccaacaggagggaagggatagcctggccgtatctactgaatktgtgttttgtattcattaccttggtgtttttctgcaaccagcacttagatttkcaacaagggacagytccatacgagtcccctgtttgctcctgttctgctcccagctcaaccacaaaaaggttttctgcattttgaggcacagttctgcgggcatgaatagctgtgagtacagaactgagtgtgcacctcatttatgctcagaaataactgtgtgccttaaaacccaatttatgagtgcatcgcattttgatttgcaaagtgacattaattgctgttgcagtgacttgtgccagaggcatctcaatgtttttccttgtgtctgtgcttatttgcactgttctttttcagtgc

SEQ ID NO: 43069 - DNA, 600 bp, Chicken  19866894280664_7
tgctggacaaaagagcctcattagatgagagatgcatcatcagcrcaaggtcactcctgcctgacccatcttgctgcccttagctsgggcagcccacatcccataagcctcagttgattgcagtgattcaggcattcctctgccaactgaactgctgtgaatctaggtamgtttttaatgctggaggtggagaaataatcgcaaccaacaggagggaagggatagcctggccgtatctactgaatktgtgttttgtattcattaccttggtgtttttctgcaaccagcacttagatttakaacaagggacagytccatacgagtcccctgtttgctcctgttctgctcccagctcaaccacaaaaaggttttctgcattttgaggcacagttctgcgggcatgaatagctgtgagtacagaactgagtgtgcacctcatttatgctcagaaataactgtgtgccttaaaacccaatttatgagtgcatcgcattttgatttgcaaagtgacattaattgctgttgcagtgacttgtgccagaggcatctcaatgtttttccttgtgtctgtgcttatttgcactgttctttttcagtgca

SEQ ID NO: 43070 - DNA, 600 bp, Chicken  19866894280664_8
gctggacaaaagagcctcattagatgagagatgcatcatcagcrcaaggtcactcctgcctgacccatcttgctgcccttagctsgggcagcccacatcccataagcctcagttgattgcagtgattcaggcattcctctgccaactgaactgctgtgaatctaggtamgtttttaatgctggaggtggagaaataatcgcaaccaacaggagggaagggatagcctggccgtatctactgaatktgtgttttgtattcattaccttggtgtttttctgcaaccagcacttagatttackacaagggacagytccatacgagtcccctgtttgctcctgttctgctcccagctcaaccacaaaaaggttttctgcattttgaggcacagttctgcgggcatgaatagctgtgagtacagaactgagtgtgcacctcatttatgctcagaaataactgtgtgccttaaaacccaatttatgagtgcatcgcattttgatttgcaaagtgacattaattgctgttgcagtgacttgtgccagaggcatctcaatgtttttccttgtgtctgtgcttatttgcactgttctttttcagtgcaa

SEQ ID NO: 43071 - DNA, 597 bp, Chicken  19866894280664_9
agcctcattagatgagagatgcatcatcagcrcaaggtcactcctgcctgacccatcttgctgcccttagctsgggcagcccacatcccataagcctcagttgattgcagtgattcaggcattcctctgccaactgaactgctgtgaatctaggtamgtttttaatgctggaggtggagaaataatcgcaaccaacaggagggaagggatagcctggccgtatctactgaatktgtgttttgtattcattaccttggtgtttttctgcaaccagcacttagatttacaacaagggacagytccatacgagtcccctgtttgctcctgttctgctcccagctcaaccacaaaaaggttttctgcattttgaggcacagttctgcgggcatgaatagctgtgagtacagaactgagtgtgcacctcatttatgctcagaaataactgtgtgccttaaaacccaatttatgagtgcatcgcattttgatttgcaaagtgacattaattgctgttgcagtgacttgtgccagaggcatctcaatgtttttccttgtgtctgtgcttatttgcactgttctttttcagtgcaaagagccctt

SEQ ID NO: 43072 - DNA, 600 bp, Chicken  19866894280666_1
cagtgaatcagaaagataccacaggcagttgatagtccagtaggtgaccccaaatccttatcacgtatatgtgattaatttataactgactgttctgagtttcagaaaggaatgctcagaactgcgtttgccattttccccgaaccatgaaatataaatgcaaatgaaaacataaaatgattgatacagtgtcatctttcctcattacataccttagaaaacaccctaatacccttggtggaaacttatttgcaaacagtatactactacattccataggtacattgtgttaaactgtgmtgaattcatctgcattatgtagcacttgggagtaaattctggcttgttattatcctccatttctgtgctacattctaacaggaaaataccagaaagagcagagtagaactattacacagtttcttttaaaaaaaattgtttcttttttctcatttatttggccgggcttaccaccagaggtttaaactagatgtaatggggaagggggatgtactgctgagtggtagggaagggccagaaaacactgtcactttaggatgcatcaggagacatcatcagatttgtccccgtgaaatctag

SEQ ID NO: 43073 - DNA, 600 bp, Chicken  19866894280669_1
gccttggccaaatgcacaacagctaacctgatgccagaatggcctcaatgtcttgctgctcaggtaaagcagcaggaggagaaaacagtattttgaaagcaatacaactgcttttaacaactgctttactttgaatacaagcttttaactgttatgaaaggcagggaaagagggtcatgggaagttttcccctttagagttttatttttcatttgactaagtcaggtttttgtacattctctgtctgggatcacctgccagggacatggctctgaaataaagagatcatagaagcagaakttgaattaccagggaaacagaaggctgagagtacaacaagctacagcttatctgcacaactgcagcagggaagtgcatagattgtatgcacaacaccagctacagccagtaaaytcttggaacttaagtgaagaaaattttccccatgcagacagcatttgttgaccaaagatgaacatctggccatgttcagatgggtattatcacacatctgggaacacaccacagccagctgatgtcacataccacaggctatgacaagctaatgcagtgcaggcctcacagcaagcctgataggaa

SEQ ID NO: 43074 - DNA, 600 bp, Chicken  19866894280669_2
taacaactgctttactttgaatacaagcttttaactgttatgaaaggcagggaaagagggtcatgggaagttttcccctttagagttttatttttcatttgactaagtcaggtttttgtacattctctgtctgggatcacctgccagggacatggctctgaaataaagagatcatagaagcagaakttgaattaccagggaaacagaaggctgagagtacaacaagctacagcttatctgcacaactgcagcagggaagtgcatagattgtatgcacaacaccagctacagccagtaaaytcttggaacttaagtgaagaaaattttccccatgcagacagcatttgttgaccaaagatgaacatctggccatgttcagatgggtattatcacacatctgggaacacaccacagccagctgatgtcacataccacaggctatgacaagctaatgcagtgcaggcctcacagcaagcctgataggaactcctctctgcgatgccacagatcttgcaacgctaagggacaaactgaggggcccgagttgcttggcacaaggacgccagcactaggaaccgcaccagagcagccgaagccagt

SEQ ID NO: 43075 - DNA, 600 bp, Chicken  19866894280671_1
aacccacagctgcaacaacaccatatcaaatacaggttagagttgaaatgtagagccagcagcacagcgtctccagcaggtgcatgcagagtgttttttaacccccttggttttggaatagttcccttatttatctattggctttgatttaaagaccatttaatcactggtatagattccacattagagtgcgtacatactcatcgacgaatgtcctagacgtgcaagtcacttttttctgtgtctcctatttcctgatttttctggtgaataataatccaaagattgaggatctcgtgktttgggccaaagatgggcaatcccatcctgctggccccttccccaggctgctccatgcacccacygaatctcttacatttctggcaggcactactgctttggagcaaggagaggcaggaaggagtaatgtatcaaggagaggaagagggagtaatagttctgtttagaaataagggaaaatagagcatgtgtttggactgatgacagcaaaactagcgatccaggcgtgctgggaaaaaggaaaaaggccgacagtcaaccacacatccactcactcagaaaccagtgggaaacctaaca

SEQ ID NO: 43076 - DNA, 600 bp, Chicken  19866894280671_2
agcgtctccagcaggtgcatgcagagtgttttttaacccccttggttttggaatagttcccttatttatctattggctttgatttaaagaccatttaatcactggtatagattccacattagagtgcgtacatactcatcgacgaatgtcctagacgtgcaagtcacttttttctgtgtctcctatttcctgatttttctggtgaataataatccaaagattgaggatctcgtgktttgggccaaagatgggcaatcccatcctgctggccccttccccaggctgctccatgcacccacygaatctcttacatttctggcaggcactactgctttggagcaaggagaggcaggaaggagtaatgtatcaaggagaggaagagggagtaatagttctgtttagaaataagggaaaatagagcatgtgtttggactgatgacagcaaaactagcgatccaggcgtgctgggaaaaaggaaaaaggccgacagtcaaccacacatccactcactcagaaaccagtgggaaacctaacatcaagtttcttaatgtgtcttacatgctgtatatgtaatgtgctgggttgtgtggacatactgaa

SEQ ID NO: 43077 - DNA, 600 bp, Chicken  19866894280675_1
ttctcatggaatatactcagtaatccaaagactgaatgctaccatcagcaaaccaaactaccctgccctctggccaactcctgtcacaagtggctgatctctcataattttctcccacagctaatgggctcaagagtttttagtttggtggtttgcaaaaatatttaatcagaaaaaaaatattaaacacttccattgtttttaatacgtattagtagcattacctccaaaaaagtagcattaccaaaaaagtaaaagggtgcatgccctaagaacaataaattttgttccaacaattargcactttcctattatttttcaggaaaacatgaaaataaagctccttggctatctagcatattattcctgaagaattttcaccatttgaaatcactttttgccactaagttttcttcccatcatcatttccccctgttggcatattagatttctatttgatatgttgtagcgtatttctaatcagcaggaacaccctgtttccaatctagaacttggaaatgtgtttttccagaccacaaaattgcctgggttgaaaaggaccataaagatcatcaagtttcaacccccctgctaagtgca

SEQ ID NO: 43078 - DNA, 599 bp, Chicken  19866894280676_1
  misc_feature (1)..(123): n is any nucleotide
nnnnnnnnnnnnnnnnnnnnnnnnnnnnnnnnnnnnnnnnnnnnnnnnnnnnnnnnnnnnnnnnnnnnnnnnnnnnnnnnnnnnnnnnnnnnnnnnnnnnnnnnnnnnnnnnnnnnnnnnnnntatacctcacaatctgagaatacagctctgtgatacttggagtccaaacaacaacacttgttctggggacacagaaacattttctgtgtctacatgttctctgcttcccagcacaccagtagagctctttatggatgcagttcacaaaacagtctcttgtgtttcgttttgtcttcygtaattcagatgttattcctttacacaattgagttagttaaccaatgttaactctgagggagacaacttcagctcaccactatgccaatttgccagtggccacagaaacatttttttcatacctgtttgtagtagcgtgacatgctaagagtccttgaggaaagctttcttgacctgtgtactgataaacgtcacctccacttggcaggcatcgtatgtacatgaaygtacctgaagcattgcattccatcatgtacacagtgaactgctgcatgcttcaatagctaaggaaccttaat

SEQ ID NO: 43079 - DNA, 600 bp, Chicken  19866894280676_2
ttcccagcacaccagtagagctctttatggatgcagttcacaaaacagtctcttgtgtttcgttttgtcttcygtaattcagatgttattcctttacacaattgagttagttaaccaatgttaactctgagggagacaacttcagctcaccactatgccaatttgccagtggccacagaaacatttttttcatacctgtttgtagtagcgtgacatgctaagagtccttgaggaaagctttcttgacctgtgtactgataaacgtcacctccacttggcaggcatcgtatgtacatgaaygtacctgaagcattgcattccatcatgtacacagtgaactgctgcatgcttcaatagctaaggaaccttaatccttgcttagcatcagctattagaatgctcaagattcaccctttccttgggatggatacatagaatatctaacctgtcttttaaaatgctgagtgacagagaatatatcacagcccttggataactgccactgctgataacaacacaggttttattttagtccaatctgttccagctttaatgtcagctatttacatcttttacctcctacttgatatttccctgtag

SEQ ID NO: 43080 - DNA, 599 bp, Chicken  19866894280678_1
  misc_feature (1)..(86): n is any nucleotide
nnnnnnnnnnnnnnnnnnnnnnnnnnnnnnnnnnnnnnnnnnnnnnnnnnnnnnnnnnnnnnnnnnnnnnnnnnnnnnnnnnnnnncctccgaagctatatgtatgtttggctaaaccaatgctgagtttgctgagctctcagtgggtcaggcctgagggctgcttcatcccctgcttgtgggcagagagctgcggatgtccaacagctcaggacaaagcccaggaagaaaatgccttcctgctatcctgccaggaaggaggatttcttctgtcccttcttaaaacatctttttaaatgyggctcatccaccattcctgctggagttggagtggtgraaaacactgctgaaaaatcagtttggatttggacacctcttctggaggggtgrtgtgttcttatttcccctcacccccactggtaacagctacatacgtggctgtagagctgctgaggtggttacttcattgcagccttttgttttgtttcattggaaaccaaagtttggctgtgtctaggactgaattcttccatggtgtttttaatccgggctcgatgacttgctcaggtcccagaggtagaaaacagagcagcaataaa

SEQ ID NO: 43081 - DNA, 599 bp, Chicken  19866894280678_2
  misc_feature (1)..(49): n is any nucleotide
nnnnnnnnnnnnnnnnnnnnnnnnnnnnnnnnnnnnnnnnnnnnnnnnncctccgaagctatatgtatgtttggctaaaccaatgctgagtttgctgagctctcagtgggtcaggcctgagggctgcttcatcccctgcttgtgggcagagagctgcggatgtccaacagctcaggacaaagcccaggaagaaaatgccttcctgctatcctgccaggaaggaggatttcttctgtcccttcttaaaacatctttttaaatgyggctcatccaccattcctgctggagttggagtggtgraaaacactgctgaaaaatcagtttggatttggacacctcttctggaggggtgrtgtgttcttatttcccctcacccccactggtaacagctacatacgtggctgtagagctgctgaggtggttacttcattgcagccttttgttttgtttcattggaaaccaaagtttggctgtgtctaggactgaattcttccatggtgtttttaatccgggctcgatgacttgctcaggtcccagaggtagaaaacagagcagcaataaatacagggaaggaactgctgggatgtaaaagtcccagc

SEQ ID NO: 43082 - DNA, 600 bp, Chicken  19866894280678_3
cgaagctatatgtatgtttggctaaaccaatgctgagtttgctgagctctcagtgggtcaggcctgagggctgcttcatcccctgcttgtgggcagagagctgcggatgtccaacagctcaggacaaagcccaggaagaaaatgccttcctgctatcctgccaggaaggaggatttcttctgtcccttcttaaaacatctttttaaatgyggctcatccaccattcctgctggagttggagtggtgraaaacactgctgaaaaatcagtttggatttggacacctcttctggaggggtgrtgtgttcttatttcccctcacccccactggtaacagctacatacgtggctgtagagctgctgaggtggttacttcattgcagccttttgttttgtttcattggaaaccaaagtttggctgtgtctaggactgaattcttccatggtgtttttaatccgggctcgatgacttgctcaggtcccagaggtagaaaacagagcagcaataaatacagggaaggaactgctgggatgtaaaagtcccagcagctgggcagaaagcctctgtcagtttttgtgatatggccttatgaaggctctg

SEQ ID NO: 43083 - DNA, 600 bp, Chicken  19866894280678_4
tcacccccactggtaacagctacatacgtggctgtagagctgctgaggtggttacttcattgcagccttttgttttgtttcattggaaaccaaagtttggctgtgtctaggactgaattcttccatggtgtttttaatccgggctcgatgacttgctcaggtcccagaggtagaaaacagagcagcaataaatacagggaaggaactgctgggatgtaaaagtcccagcagctgggcagaaagcctctgtcagtttttgtgatatggccttatgaaggctctgtgaatctctgggtaaaragagatcacagagctctcaccctcaggcagaccagcccaggagcatctgcttcctggggctggagaccttggcttgaggctgaaagccctccctgggttcctctggctgcagggagggctccaggctctctgtacaacagacttctcatgggatggcagttattgtcctgtttgtgcctggaggtgatagcaaccaaagtgacgtttctgctgtggctgagcagcctttacccagggctatgtttgcaaccaggagagtttcacttgctgccttatctgccttatctattgctccctgca

SEQ ID NO: 43084 - DNA, 462 bp, Chicken  19866894280678_5
ctccctgggttcctctggctgcagggagggctccaggctctctgtacaacagacttctcatgggatggcagttattgtcctgtttgtgcctggaggtgatagcaaccaaagtgacgtttctgctgtggctgagcagcctttacccagggctatgtttgcaaccaggagagtttcacttgctgccttatctgccttatctattgctccctgcagcagccagcacctgaggagtgttttcttctcatttatctgtgcacccaccctagcaattggccagaggagctggggactgctgcagayaccsaaacaaatctttttcttctgatgcacatacgttactccagcaattaattttactgcattacttaccagtgtgaatagggcaccgcttttcccacttacaggctcagcaccaaaacaaagcagaatctcctggaaagcccaactcccccctttgccccc

SEQ ID NO: 43085 - DNA, 458 bp, Chicken  19866894280678_6
ctgggttcctctggctgcagggagggctccaggctctctgtacaacagacttctcatgggatggcagttattgtcctgtttgtgcctggaggtgatagcaaccaaagtgacgtttctgctgtggctgagcagcctttacccagggctatgtttgcaaccaggagagtttcacttgctgccttatctgccttatctattgctccctgcagcagccagcacctgaggagtgttttcttctcatttatctgtgcacccaccctagcaattggccagaggagctggggactgctgcagayaccsaaacaaatctttttcttctgatgcacatacgttactccagcaattaattttactgcattacttaccagtgtgaatagggcaccgcttttcccacttacaggctcagcaccaaaacaaagcagaatctcctggaaagcccaactcccccctttgccccc

SEQ ID NO: 43086 - DNA, 599 bp, Chicken  19866894280683_1
  misc_feature (1)..(140): n is any nucleotide
nnnnnnnnnnnnnnnnnnnnnnnnnnnnnnnnnnnnnnnnnnnnnnnnnnnnnnnnnnnnnnnnnnnnnnnnnnnnnnnnnnnnnnnnnnnnnnnnnnnnnnnnnnnnnnnnnnnnnnnnnnnnnnnnnnnnnnnnnnnnaatctgggaggaggcacaaacagccttgcctcagaatgtgcatcctttacactgtactggcacaatcattttcttactattgggtaaaacttctgcaagcctttttcccatttttttttctcttaagtcatgttgcttgtgatctgcccctgtgtttatytgtgaagtaaaaaaatgtgggytgaaaaactcttacagatttgaggttacttcagaaaaagaaaaacaarcaagtcagccttgggaagtctttggctctcttttgaaaaacagtgtctagagagagaacaagggagaggtaaagtaaatcacagcctcttccatgttttttctcttttctctgacctcactgtgaccacagaaggggggagaatstcttgtattccaataactcaakgaaaagtggcaagagatttggatgacagcaaggaatcagcacagtgacctccatgctaattg

SEQ ID NO: 43087 - DNA, 599 bp, Chicken  19866894280683_2
  misc_feature (1)..(118): n is any nucleotide
nnnnnnnnnnnnnnnnnnnnnnnnnnnnnnnnnnnnnnnnnnnnnnnnnnnnnnnnnnnnnnnnnnnnnnnnnnnnnnnnnnnnnnnnnnnnnnnnnnnnnnnnnnnnnnnnnnnnnnaatctgggaggaggcacaaacagccttgcctcagaatgtgcatcctttacactgtactggcacaatcattttcttactattgggtaaaacttctgcaagcctttttcccatttttttttctcttaagtcatgttgcttgtgatctgcccctgtgtttatytgtgaagtaaaaaaatgtgggytgaaaaactcttacagatttgaggttacttcagaaaaagaaaaacaarcaagtcagccttgggaagtctttggctctcttttgaaaaacagtgtctagagagagaacaagggagaggtaaagtaaatcacagcctcttccatgttttttctcttttctctgacctcactgtgaccacagaaggggggagaatstcttgtattccaataactcaakgaaaagtggcaagagatttggatgacagcaaggaatcagcacagtgacctccatgctaattggtgccatctcctagtactcaag

SEQ ID NO: 43088 - DNA, 599 bp, Chicken  19866894280683_3
  misc_feature (1)..(70): n is any nucleotide
nnnnnnnnnnnnnnnnnnnnnnnnnnnnnnnnnnnnnnnnnnnnnnnnnnnnnnnnnnnnnnnnnnnnnnaatctgggaggaggcacaaacagccttgcctcagaatgtgcatcctttacactgtactggcacaatcattttcttactattgggtaaaacttctgcaagcctttttcccatttttttttctcttaagtcatgttgcttgtgatctgcccctgtgtttatytgtgaagtaaaaaaatgtgggytgaaaaactcttacagatttgaggttacttcagaaaaagaaaaacaarcaagtcagccttgggaagtctttggctctcttttgaaaaacagtgtctagagagagaacaagggagaggtaaagtaaatcacagcctcttccatgttttttctcttttctctgacctcactgtgaccacagaaggggggagaatstcttgtattccaataactcaakgaaaagtggcaagagatttggatgacagcaaggaatcagcacagtgacctccatgctaattggtgccatctcctagtactcaagctagcatcatggaacaggtctggatggagtcagacaagaggtctgcta

SEQ ID NO: 43089 - DNA, 600 bp, Chicken  19866894280683_4
actattgggtaaaacttctgcaagcctttttcccatttttttttctcttaagtcatgttgcttgtgatctgcccctgtgtttatytgtgaagtaaaaaaatgtgggytgaaaaactcttacagatttgaggttacttcagaaaaagaaaaacaarcaagtcagccttgggaagtctttggctctcttttgaaaaacagtgtctagagagagaacaagggagaggtaaagtaaatcacagcctcttccatgttttttctcttttctctgacctcactgtgaccacagaaggggggagaatstcttgtattccaataactcaakgaaaagtggcaagagatttggatgacagcaaggaatcagcacagtgacctccatgctaattggtgccatctcctagtactcaagctagcatcatggaacaggtctggatggagtcagacaagaggtctgctagtcaccaggtaggtccctagcaacacatcaggtccagaggcaagccagtggtctataccagccagtacttagaactgagcacagtgtagctacagtgaagctcaagcagggaccacaggtgaggaccagagcttaaacacaagttg

SEQ ID NO: 43090 - DNA, 587 bp, Chicken  19866894280683_5
agcctttttcccatttttttttctcttaagtcatgttgcttgtgatctgcccctgtgtttatytgtgaagtaaaaaaatgtgggytgaaaaactcttacagatttgaggttacttcagaaaaagaaaaacaarcaagtcagccttgggaagtctttggctctcttttgaaaaacagtgtctagagagagaacaagggagaggtaaagtaaatcacagcctcttccatgttttttctcttttctctgacctcactgtgaccacagaaggggggagaatstcttgtattccaataactcaakgaaaagtggcaagagatttggatgacagcaaggaatcagcacagtgacctccatgctaattggtgccatctcctagtactcaagctagcatcatggaacaggtctggatggagtcagacaagaggtctgctagtcaccaggtaggtccctagcaacacatcaggtccagaggcaagccagtggtctataccagccagtacttagaactgagcacagtgtagctacagtgaagctcaagcagggaccacaggtgaggaccagagcttaaacacaagttgggagtgatg

SEQ ID NO: 43091 - DNA, 600 bp, Chicken  19866894280690_1
ctgcttccttatcaagacagcaacacaaaatatttgtatgcatctcaggcattcccaaagaggaaaaaagcgttcaatcaacaaacataagtgacagggaagatcatggtgacatacctaggaatcaaattcctgttcttttcataaaacattctcaaatcttgaggactattggcctgtcaaataaaaatgtatattaattaataagctcagtctaactgagaaagtagcttctgtaccaatgcacacatacaccaagcacagcactgatttcagtactgagtatccttctacatttgmcctgcactgaacacactgctgtcaaaaaacaagtacaagcaatttctcccttggtatcctcwagctatctggtctttcaagcatcatcattcaaacatctctatttatctctgttttcatgcctggaaggaaaagctctaggaatttccatgagactgtaaagagtaaaagaaagagggaaacagaaataaaagtgttacctgaaaaggtggttttccaacaagacattgataaatcacagttcctatgctccacagatctgctttagcatcatagtgttgagacataatcacttcaggg

SEQ ID NO: 43092 - DNA, 600 bp, Chicken  19866894280690_2
gaaaaaagcgttcaatcaacaaacataagtgacagggaagatcatggtgacatacctaggaatcaaattcctgttcttttcataaaacattctcaaatcttgaggactattggcctgtcaaataaaaatgtatattaattaataagctcagtctaactgagaaagtagcttctgtaccaatgcacacatacaccaagcacagcactgatttcagtactgagtatccttctacatttgmcctgcactgaacacactgctgtcaaaaaacaagtacaagcaatttctcccttggtatcctcwagctatctggtctttcaagcatcatcattcaaacatctctatttatctctgttttcatgcctggaaggaaaagctctaggaatttccatgagactgtaaagagtaaaagaaagagggaaacagaaataaaagtgttacctgaaaaggtggttttccaacaagacattgataaatcacagttcctatgctccacagatctgctttagcatcatagtgttgagacataatcacttcaggggcctggaaagtacaggaagatctcagaaggcaaagcaaaagacaaagccacaacaatatgaa

SEQ ID NO: 43093 - DNA, 599 bp, Chicken  19866894280692_1
  misc_feature (1)..(14): n is any nucleotide
nnnnnnnnnnnnnnaaagaaggagtactatcgtgaaatctcagcccttctgtggtcctgtttctcataagagaatctttaaaatttcctcaaatatatgtttgctggcattcccagtttaattatgtattggttttttttgcatgttatgtgtttttttgttttgttttgttttgtttgtttgtttgttttgtctctactaaaacaattatttctagaggtgctgtagatttggcttgttttgcacttatacactagctggcttcctgttgccttcacctgagagcaatttactcccacrttctccctcctggctctatgcagattgctagaatcttttaatcaatcaaattcackgcattttagaaatacttgagttgtgaaaaataaggccttatcatgacgttctagattgctctcagattgtaatggtgttactcttaagcattcatttttatttacaagttattaatagaaaactctttccatttgtgaaatccctgtaaatttttcaaacctgagagatagtggttgatatgcaagtggagttatgttagggagctttctatctgaaaattgcttatttttcactggcatgcc

SEQ ID NO: 43094 - DNA, 600 bp, Chicken  19866894280692_2
ctgtttctcataagagaatctttaaaatttcctcaaatatatgtttgctggcattcccagtttaattatgtattggttttttttgcatgttatgtgtttttttgttttgttttgttttgtttgtttgtttgttttgtctctactaaaacaattatttctagaggtgctgtagatttggcttgttttgcacttatacactagctggcttcctgttgccttcacctgagagcaatttactcccacrttctccctcctggctctatgcagattgctagaatcttttaatcaatcaaattcackgcattttagaaatacttgagttgtgaaaaataaggccttatcatgacgttctagattgctctcagattgtaatggtgttactcttaagcattcatttttatttacaagttattaatagaaaactctttccatttgtgaaatccctgtaaatttttcaaacctgagagatagtggttgatatgcaagtggagttatgttagggagctttctatctgaaaattgcttatttttcactggcatgcctgctccagatccagggctgcttacttgaaggggtgagatacaaattactcatttcct

SEQ ID NO: 43095 - DNA, 599 bp, Chicken  19866894280695_1
  misc_feature (1)..(66): n is any nucleotide
nnnnnnnnnnnnnnnnnnnnnnnnnnnnnnnnnnnnnnnnnnnnnnnnnnnnnnnnnnnnnnnnnngtaagtgtgtaagaggagagcactgagaaaaggatccagccccagcaggagtaaacacagtgcaactgatgagctcctcaactaatgtttgtttgaacaaattccctgtatttatttcttcaccctagatgaaagccagaattatggacagtgctgatgcaaagacctcccaggcttctatgggttggtttagctttgatgtcaacacaaggtggagcgttggcgtggctcacrtggtgggtctattcgtgggacatcatggagccggtcacatacttcatcacctatgggagcgctatggctttctatgcctactttgttcttactaaacaggtgattcccccttctgtaaatgtctggaatattgtaaagaaggagtacraaaactgaaaatcctagtgcttgaactctgattaaaatgtaatatattaagtagccttgccatcagactgggggagttgaaatggatttctgatgggatttgataaaaatgccttacattatcaggccaagtactgttacacctgcactac

SEQ ID NO: 43096 - DNA, 600 bp, Chicken  19866894280695_2
taatgtttgtttgaacaaattccctgtatttatttcttcaccctagatgaaagccagaattatggacagtgctgatgcaaagacctcccaggcttctatgggttggtttagctttgatgtcaacacaaggtggagcgttggcgtggctcacrtggtgggtctattcgtgggacatcatggagccggtcacatacttcatcacctatgggagcgctatggctttctatgcctactttgttcttactaaacaggtgattcccccttctgtaaatgtctggaatattgtaaagaaggagtacraaaactgaaaatcctagtgcttgaactctgattaaaatgtaatatattaagtagccttgccatcagactgggggagttgaaatggatttctgatgggatttgataaaaatgccttacattatcaggccaagtactgttacacctgcactacagacaagcttctgagtagaactactagctgtaaaactccatcagccaggatatgagaagtgattaatgaaatctgttgttttatttaaatttttgtaggtcatcttgaatagtaaattgcatctggctcattgctgtaaagggagagca

SEQ ID NO: 43097 - DNA, 600 bp, Chicken  19866894280698_1
gttggggctggagtgaatggtcatctgcacttaaacacagacacacctctccagcctcagctggctggtcttttgagttttaggctaagagagtctttcagtctactcacccttccacggaagcagtgtttctgacaggcttaaatatgtatccctgcagtaccacagactgcagaactacttgctctcagggtcactgagttcagttggcaacacaaatgcagagcaggaccataaacacagataccacttctctctgcagcaggacggtttctgctcctgagggtacagcctgtatcytttccctcatctggacctcctagtttgtcagcatcacacatgaatgcactctggcaggcatttctgcttgttccagtcagacaagagaaattctctgttctccaaagcaaataacaggaaccgcctcaaggctcattagcttctcagagacaaacagttgaagtgtattcagctacaaaagctgaatactggtaatgtttggatgctctttccaaaactgacctctggctgtaagtgctgggaatggtaaagagtttctaggaaagactgtctcattcacagtcaacattctttcataag

SEQ ID NO: 43098 - DNA, 600 bp, Chicken  19866894280700_1
gaagcaagccagcagagccagctgaaggcatggaaacccgcttggagagcagcaagggaagcgagggtcgggcagccgagtcctcaaggctaaggaaataaataacttctcagatgcgcaggtctggtggacaagaaagccagtgcagcaaaacaccaagcgtccttcaggagggttaaaaataaataagtgaagctcggctttttctcaggaacgcgttcgtttgcagctctgctggcaggaagggggtagttctttaaataaagggaacaaaaaccggttctagcacgcctgcacgcygagctgcctttgcccatcgctccgatcctggctggagaaaatactcgtgatggctgggaaggagatcccaaacgtccccgagacggagcatcccgctgggctgagtgggctgggctgggctggaatcctcccccgcctcagcgcgggtcctgcagcaggacctgccccgcacagcycgcacccactttccagcgcagtgtttctgaagcagggagaagggtcgggatgcgcagagatgaaggtttgcagcccacgggatgcccgggwtgtctggctgcctctgggctgcagctctttgca

SEQ ID NO: 43099 - DNA, 600 bp, Chicken  19866894280700_2
taaaaataaataagtgaagctcggctttttctcaggaacgcgttcgtttgcagctctgctggcaggaagggggtagttctttaaataaagggaacaaaaaccggttctagcacgcctgcacgcygagctgcctttgcccatcgctccgatcctggctggagaaaatactcgtgatggctgggaaggagatcccaaacgtccccgagacggagcatcccgctgggctgagtgggctgggctgggctggaatcctcccccgcctcagcgcgggtcctgcagcaggacctgccccgcacagcycgcacccactttccagcgcagtgtttctgaagcagggagaagggtcgggatgcgcagagatgaaggtttgcagcccacgggatgcccgggwtgtctggctgcctctgggctgcagctctttgcacccgccttagtctcgagttcggtttctcctcttcaggaaaaagaagctgctcttctggggagggcccagcagcattggcacttggcttttatgtgtaattttgacctaaaaataaacagatgcagctcagcgagcggctcccagccgtgagtcacgctctggccgggctccgagca

SEQ ID NO: 43100 - DNA, 600 bp, Chicken  19866894280700_3
gaacaaaaaccggttctagcacgcctgcacgcygagctgcctttgcccatcgctccgatcctggctggagaaaatactcgtgatggctgggaaggagatcccaaacgtccccgagacggagcatcccgctgggctgagtgggctgggctgggctggaatcctcccccgcctcagcgcgggtcctgcagcaggacctgccccgcacagcycgcacccactttccagcgcagtgtttctgaagcagggagaagggtcgggatgcgcagagatgaaggtttgcagcccacgggatgcccgggwtgtctggctgcctctgggctgcagctctttgcacccgccttagtctcgagttcggtttctcctcttcaggaaaaagaagctgctcttctggggagggcccagcagcattggcacttggcttttatgtgtaattttgacctaaaaataaacagatgcagctcagcgagcggctcccagccgtgagtcacgctctggccgggctccgagcacccccgcctcagcggctcccctccatccctgtccccccagggacttacrgtgcaggatggctgcatccagggctccccgtccacctgcatg

SEQ ID NO: 43101 - DNA, 600 bp, Chicken  19866894280700_4
atgcgcagagatgaaggtttgcagcccacgggatgcccgggwtgtctggctgcctctgggctgcagctctttgcacccgccttagtctcgagttcggtttctcctcttcaggaaaaagaagctgctcttctggggagggcccagcagcattggcacttggcttttatgtgtaattttgacctaaaaataaacagatgcagctcagcgagcggctcccagccgtgagtcacgctctggccgggctccgagcacccccgcctcagcggctcccctccatccctgtccccccagggacttacrgtgcaggatggctgcatccagggctccccgtccacctgcatgggcagcagcttggaggtcctgcaagagggaataggggatcacgcagccgcccgcttccgctgcccatcagggcatgccctgtgcagggacgggcgcagatacctgatggtgacggccgaacactgggccagcctcttcccagcgctcttcagccccgtgtagatctgccccatctccatggcgccctccagccccaccacctccagcaggtggtcactgaggtctgtgagaaatagagctcagtcagtgccaagctcc

SEQ ID NO: 43102 - DNA, 599 bp, Chicken  19866894280702_1
  misc_feature (1)..(105): n is any nucleotide
nnnnnnnnnnnnnnnnnnnnnnnnnnnnnnnnnnnnnnnnnnnnnnnnnnnnnnnnnnnnnnnnnnnnnnnnnnnnnnnnnnnnnnnnnnnnnnnnnnnnnnnnnacgtgaagatgatatggcccaggataagccatacataacctggggtcactaactgtatggcaaccatgggtcaatgctcagtaggactggacaccattctaaagggcaaacctagccaagactgacaatttgagagaaaatgcaaaggtgagctgggtggaaattacacaactctgcataaagagctgctttctyaggaaagccttgtctgagctctgtgcaaatcagtgtcccaagatggagccacattcagcaggagccccacatctggcccaggccaggacaaggcagagcttttaggtacctacacactgttcgtgttctcattcaatatttttgaatgctttcctaccctgtagctacatgagtcctctctccacaaatcatagctaggtaagggatctgtgtggccaggcctgcaatacgatgcactaatttattctacgttttggcatggggcttcttcagcactcttagtgtgatcatattcaacc

SEQ ID NO: 43103 - DNA, 600 bp, Chicken  19866894280702_2
aggacaaggcagagcttttaggtacctacacactgttcgtgttctcattcaatatttttgaatgctttcctaccctgtagctacatgagtcctctctccacaaatcatagctaggtaagggatctgtgtggccaggcctgcaatacgatgcactaatttattctacgttttggcatggggcttcttcagcactcttagtgtgatcatattcaaccttcaaattctcctctgactttagataatgcgttttctacttctgtaactgcgttctcaatattcctacagaccgtccttaacacrctcattcctgaaagtaagacaaaacagtcctctggtgaagtagcaccactaggaactcaacgatgttcctactacagtctggaaaacaacataatatactcatcccatcagcatctttagcataatggtgatctttacttctctcttccaataagtacacaaatacaaatatatatttgatagaacaaaggttgatttccctcttgcaagtatcacagactacagaaaaccaattttctagcaaaagaagtaatctcactaagctaaattcaatttcctcctaacctttgcctgtatgag

SEQ ID NO: 43104 - DNA, 600 bp, Chicken  19866894280705_1
caagtgaaagaccagataatcacttacaaacggcacatgggtgcataggggatttggagtctgaaatgggctggaaggagacttgtagctagaacggaacaggcagcacaaagcaattctcattccctctttcccaactcccttattcatatgaacaaaccctatcagaggactctttgcttttacttcccaccacacacaggcgtttcgcttgctcacctccccagttacagcacaaggtgagcacttgcttacaacacaaaagccaagaggaaacagatgtcctctccctcacaaccyraawtttcwctagctcgctctcacccatagcacagatgtggctgggaggtgcagagcagagcagtaaaacctggaccccgtgatacaatcttagggaaggacacagactttctgaaatctaaacacttgacttggaccaaaaaccctcccagccataattaagttcgccaggcttggagctcgctggctgccagatgtggagcacaaggccaggcatgcttttaagggacacagcctaggtcaaatctggctacactgttaggttctgcatgcacgcacttttagaaaagccaagatata

SEQ ID NO: 43105 - DNA, 600 bp, Chicken  19866894280705_2
aagtgaaagaccagataatcacttacaaacggcacatgggtgcataggggatttggagtctgaaatgggctggaaggagacttgtagctagaacggaacaggcagcacaaagcaattctcattccctctttcccaactcccttattcatatgaacaaaccctatcagaggactctttgcttttacttcccaccacacacaggcgtttcgcttgctcacctccccagttacagcacaaggtgagcacttgcttacaacacaaaagccaagaggaaacagatgtcctctccctcacaaccyraawtttcwctagctcgctctcacccatagcacagatgtggctgggaggtgcagagcagagcagtaaaacctggaccccgtgatacaatcttagggaaggacacagactttctgaaatctaaacacttgacttggaccaaaaaccctcccagccataattaagttcgccaggcttggagctcgctggctgccagatgtggagcacaaggccaggcatgcttttaagggacacagcctaggtcaaatctggctacactgttaggttctgcatgcacgcacttttagaaaagccaagatatac

SEQ ID NO: 43106 - DNA, 600 bp, Chicken  19866894280705_3
tgaaagaccagataatcacttacaaacggcacatgggtgcataggggatttggagtctgaaatgggctggaaggagacttgtagctagaacggaacaggcagcacaaagcaattctcattccctctttcccaactcccttattcatatgaacaaaccctatcagaggactctttgcttttacttcccaccacacacaggcgtttcgcttgctcacctccccagttacagcacaaggtgagcacttgcttacaacacaaaagccaagaggaaacagatgtcctctccctcacaaccyraawtttcwctagctcgctctcacccatagcacagatgtggctgggaggtgcagagcagagcagtaaaacctggaccccgtgatacaatcttagggaaggacacagactttctgaaatctaaacacttgacttggaccaaaaaccctcccagccataattaagttcgccaggcttggagctcgctggctgccagatgtggagcacaaggccaggcatgcttttaagggacacagcctaggtcaaatctggctacactgttaggttctgcatgcacgcacttttagaaaagccaagatataccac

SEQ ID NO: 43107 - DNA, 600 bp, Chicken  19866894280705_4
gaccagataatcacttacaaacggcacatgggtgcataggggatttggagtctgaaatgggctggaaggagacttgtagctagaacggaacaggcagcacaaagcaattctcattccctctttcccaactcccttattcatatgaacaaaccctatcagaggactctttgcttttacttcccaccacacacaggcgtttcgcttgctcacctccccagttacagcacaaggtgagcacttgcttacaacacaaaagccaagaggaaacagatgtcctctccctcacaaccyraawtttcwctagctcgctctcacccatagcacagatgtggctgggaggtgcagagcagagcagtaaaacctggaccccgtgatacaatcttagggaaggacacagactttctgaaatctaaacacttgacttggaccaaaaaccctcccagccataattaagttcgccaggcttggagctcgctggctgccagatgtggagcacaaggccaggcatgcttttaagggacacagcctaggtcaaatctggctacactgttaggttctgcatgcacgcacttttagaaaagccaagatataccactttct

SEQ ID NO: 43108 - DNA, 600 bp, Chicken  19866894280713_1
tgtatgtgaagcagaaatacacattaataagactaatttcttatttcttaaaaaaaaaaaaaaaaaaaaaccaaaagaatctacaggttgggtttcttcgtatgcactaaaatggactttcttccaataactgctaaccataaaaggcagaattcaaaggacttccttttttttctttttttttttcctgtttagttttgagcacgtacaaggctgcgtaggactcatttctctgtatatacaattccagttccaaacaacctatgtaggaagcacgctgtgctgccctctcctctcctkcatcttcagctgtgtcactgcttcctgattgctggggtgggtggtggggcggaatgggtctgagacaggaggagaaactgttgagatgagggycatgaattccgttggtttgctgttatgtttggtttggtattttttttaatcaattgggcagctcccttttccacaagcctttgtgactgtagaactattgtagaaaaagaagttcttttctatatataaaaagaaattatccaacacagtaatattggtacctaccattttttcacttctgtttaaaaagaaaagaaataaatgtat

SEQ ID NO: 43109 - DNA, 600 bp, Chicken  19866894280713_2
ttcttcgtatgcactaaaatggactttcttccaataactgctaaccataaaaggcagaattcaaaggacttccttttttttctttttttttttcctgtttagttttgagcacgtacaaggctgcgtaggactcatttctctgtatatacaattccagttccaaacaacctatgtaggaagcacgctgtgctgccctctcctctcctkcatcttcagctgtgtcactgcttcctgattgctggggtgggtggtggggcggaatgggtctgagacaggaggagaaactgttgagatgagggycatgaattccgttggtttgctgttatgtttggtttggtattttttttaatcaattgggcagctcccttttccacaagcctttgtgactgtagaactattgtagaaaaagaagttcttttctatatataaaaagaaattatccaacacagtaatattggtacctaccattttttcacttctgtttaaaaagaaaagaaataaatgtatttttagcaagataacttgggtaatcttctaaaagaaatgaaaaaaatctcactgttagtgactttgatgccttttaaaataagagctttttca

SEQ ID NO: 43110 - DNA, 599 bp, Chicken  19866894280717_1
  misc_feature (1)..(89): n is any nucleotide
nnnnnnnnnnnnnnnnnnnnnnnnnnnnnnnnnnnnnnnnnnnnnnnnnnnnnnnnnnnnnnnnnnnnnnnnnnnnnnnnnnnnnnnnntaaatggactctggctggctgttttaatgtgtggcattcttttctactttcatatctgctaaaacactgattggccaaacattgtccaaagtgtatggtacagacaaacctcactgagttccttgtgtttgctttattttttatagaactacctgcattgaacttgcatgatgaattttttctgcgtctagaaaggaaataaaagtatgcrtctgaattttggttgtgaacagaatactcctttctgcagtttcttatttccccctgtatttatcagtttgttgcagctattgtagttgatgtgatccaaactgttctcagggatatgtatgcatgtggttcctgatgtctgaatctctaacacatctaattactgtgtggctcagcctaaataagtgtccttaatgtgatccaagacagcccagctttgagcagggggtggacaggatcaccctggatgtctcttggtggacagaattttaagattatatctttttgaggtggctcctt

SEQ ID NO: 43111 - DNA, 600 bp, Chicken  19866894280717_2
ctgttctcagggatatgtatgcatgtggttcctgatgtctgaatctctaacacatctaattactgtgtggctcagcctaaataagtgtccttaatgtgatccaagacagcccagctttgagcagggggtggacaggatcaccctggatgtctcttggtggacagaattttaagattatatctttttgaggtggctccttgtgtgctgaactcagctagcaagatctcataaagacagactgatctgtccatagcagcccgatggctttggagggtattgaggagcgtgccctctggtttmtattttcctcatagtacagaggattactctgggtaggtactcactgctgtggcagaggtgttgtctccgtaaaaaagatgactggatgttttgcagaaacttgctgtgtatgctagtatgttaggagggcataatggtaatggagatgttagtgcactgtttgtggcatgccttaatacatccagagaaagcaagctgagagactaagctgagctgtggcagaggttggagccatgttagtgtgttcatgtgctcacgtgctgagcacactcaagcagtgatgctgagacagctgtgaac

SEQ ID NO: 43112 - DNA, 600 bp, Chicken  19866894280717_3
acagaggattactctgggtaggtactcactgctgtggcagaggtgttgtctccgtaaaaaagatgactggatgttttgcagaaacttgctgtgtatgctagtatgttaggagggcataatggtaatggagatgttagtgcactgtttgtggcatgccttaatacatccagagaaagcaagctgagagactaagctgagctgtggcagaggttggagccatgttagtgtgttcatgtgctcacgtgctgagcacactcaagcagtgatgctgagacagctgtgaacccagagattacaccrccatgaaaagaaagacccagaagatggaggtagaaggaggttttggcttaaagcaggccaatggccagtaattaaccctagcttaaaagcttcctatgctgcattgcactgacctacagccttacctgtgattgcaagctgatttgtggtggtgcctgcttgcagctttatttaaataattaaaaaaaaaaagcctttttataaaacaatctttttccaacctcatgtgcaagcaccagtcatataacctttctcaaatgcagaaaagcctcacagaaaaggcccaagcattgtgaggag

SEQ ID NO: 43113 - DNA, 600 bp, Chicken  19866894280718_1
aggcgctctacaacataaccctcatgctcttctggtattaacctaattctttccttttctcattagcttttttccattccctgctatctctacagcacgttgggatccagtcccacactagaaatgactcaacccatacatctgacgtggatttttgctcagccttattgttagcgtgagcacgctgcagccctaggagcagcagcagactcccaacagctttttctgcttggatttcctccagctcacagaaacaatcagcatttgcaaacccacctgcagccactttcttcatgcaaraactccatctcagcaccttgctggtaaaccaagttctctccacctggcatttttttttttggaaaacagtgacaggaagggagaaaaataagtgtctgccaacaatttagccaccagaccaagtgtactgctttcaaaccaccctgtggcatttccatgctgaccaaagccagcagtaccaacacaacaaaacccaacaatgagcaggctgaaatgctgaaaccattcactcactcactaaataaatcaaacactcacagcagccttatttgattagatatacccatgaaactaacaaca

SEQ ID NO: 43114 - DNA, 599 bp, Chicken  19866894280719_1
  misc_feature (1)..(163): n is any nucleotide
nnnnnnnnnnnnnnnnnnnnnnnnnnnnnnnnnnnnnnnnnnnnnnnnnnnnnnnnnnnnnnnnnnnnnnnnnnnnnnnnnnnnnnnnnnnnnnnnnnnnnnnnnnnnnnnnnnnnnnnnnnnnnnnnnnnnnnnnnnnnnnnnnnnnnnnnnnnnnnnnnnnccaattgctgcagctgaaaagttggcaatgtcccaggaaaaaaacccagcttgagtctccaaaagcagggcagtgccatgatcagactcacaggtaagagcctatcatgatctagtctgctaaagtattctgcacaractctgtcaatcagtcctcaggcccttcaccctttttttgggtcctagctacacagatatttcagttttgcaaaatgaagctctgtgaaggtaaataacttgactgtatctcgaaattgtaaagtggcattctcctggtcattgtgagtgtggctgatactaaagacaatggacgtatgtttcaaaaagcaattcattttcttctactaaaccttgcttcaacacaagtatcctaatggatgattctcaaatgtctgccttctgtaaacaaaatctgctatctttgctgaaatgttgca

SEQ ID NO: 43115 - DNA, 534 bp, Chicken  19866894280719_2
agtgtggctgatactaaagacaatggacgtatgtttcaaaaagcaattcattttcttctactaaaccttgcttcaacacaagtatcctaatggatgattctcaaatgtctgccttctgtaaacaaaatctgctatctttgctgaaatgttgcaaatgattttcctgaactgttcctttgttacaacacttcgtccactgaaacattattaaagatcttcttgaacttattggacttctagcagtgcagggctaatttatgttgtgattcttttcagaggtatctttcagtgatcccaagwagtggtttgtactgttgaagcagttatgtgaaagggttgagaactctgctctttcagtttccctgctgttgattaattcatgttatgagtttctttattttaagtttattgatttaattagtttaatttattttttatacaatggcataaaaaaaaaaaaagaaaacatttttttattgtgattgtattttgttcagagttatatggaccctacagacatgcataatttgcaca

SEQ ID NO: 43116 - DNA, 599 bp, Chicken  19866894280720_1
  misc_feature (1)..(140): n is any nucleotide
nnnnnnnnnnnnnnnnnnnnnnnnnnnnnnnnnnnnnnnnnnnnnnnnnnnnnnnnnnnnnnnnnnnnnnnnnnnnnnnnnnnnnnnnnnnnnnnnnnnnnnnnnnnnnnnnnnnnnnnnnnnnnnnnnnnnnnnnnnnnatttcatatctatttactgataggagttgaagaaattgatatggattttcaagccagaaaatatgtaagacattcccccaaaccatttttgcttgtttttaagctgaaatgctgggcagagtaaatattgtataagtcctacctggtgcactgattcctstgaagtcaatgtcaggttgtgccatgtcttaagacttatttttgccgtcttggcaactctgcaatgggtgtcttttcccttacagtaaaggaatttgctttcgtacatggtcttttgctatataatctacctagttatttcctgtcagtaattggccattagcttgctattccaattaaaacattcagcatttgatgaacaggcaaaaaagaaaaatcaaaaactttctgtctctgtagctattcttgcaataactttaagaaaacattgacattcaatgtcaagcagactcactaggg

SEQ ID NO: 43117 - DNA, 600 bp, Chicken  19866894280720_2
gacattcaatgtcaagcagactcactagggaacttaacatcaataataaagaacttctaaaaagatgtaatggactgttgcaagtagattggataggcaaagtccaagctctccaatatgttggttaaggttctccaatgtactgaagttatacagaagtgttatttggattccatcgatttaccaatgtgatagagagatattttaaaaaagaaagttaacgtggtggattttcactaggggagctttcccacaccagttcatagtgacaagccaagcagtgataaaatcttaatcaawtttttctgcaggttcatggagccattcacactgaagatctggttgcaatggactggagataaaattatttgyatgtggagtatgcaaatgccccagcaggtcatagacygatgaagtgcgagaaaagaaggcattgctgctcaagaagttctgtcaaaaatrcttcaagagcacaactttttgaatgtaacttcataacaataatttttgtcctctcatctccatataggccacagtagattttraggtgaagaaaggcacagaaggcttcaaataaaagaagcatgccctagatggtct

SEQ ID NO: 43118 - DNA, 600 bp, Chicken  19866894280720_3
gactgttgcaagtagattggataggcaaagtccaagctctccaatatgttggttaaggttctccaatgtactgaagttatacagaagtgttatttggattccatcgatttaccaatgtgatagagagatattttaaaaaagaaagttaacgtggtggattttcactaggggagctttcccacaccagttcatagtgacaagccaagcagtgataaaatcttaatcaawtttttctgcaggttcatggagccattcacactgaagatctggttgcaatggactggagataaaattatttgyatgtggagtatgcaaatgccccagcaggtcatagacygatgaagtgcgagaaaagaaggcattgctgctcaagaagttctgtcaaaaatrcttcaagagcacaactttttgaatgtaacttcataacaataatttttgtcctctcatctccatataggccacagtagattttraggtgaagaaaggcacagaaggcttcaaataaaagaagcatgccctagatggtctgaatacaaaagggataaaagctgaaatgtcaaaagccatgtgttgaagagcaatttttttctgttctaaaag

SEQ ID NO: 43119 - DNA, 600 bp, Chicken  19866894280720_4
tctccaatatgttggttaaggttctccaatgtactgaagttatacagaagtgttatttggattccatcgatttaccaatgtgatagagagatattttaaaaaagaaagttaacgtggtggattttcactaggggagctttcccacaccagttcatagtgacaagccaagcagtgataaaatcttaatcaawtttttctgcaggttcatggagccattcacactgaagatctggttgcaatggactggagataaaattatttgyatgtggagtatgcaaatgccccagcaggtcatagacygatgaagtgcgagaaaagaaggcattgctgctcaagaagttctgtcaaaaatrcttcaagagcacaactttttgaatgtaacttcataacaataatttttgtcctctcatctccatataggccacagtagattttraggtgaagaaaggcacagaaggcttcaaataaaagaagcatgccctagatggtctgaatacaaaagggataaaagctgaaatgtcaaaagccatgtgttgaagagcaatttttttctgttctaaaagatagttatttttccttcygtagagacctatgaaccca

SEQ ID NO: 43120 - DNA, 600 bp, Chicken  19866894280720_5
tatttggattccatcgatttaccaatgtgatagagagatattttaaaaaagaaagttaacgtggtggattttcactaggggagctttcccacaccagttcatagtgacaagccaagcagtgataaaatcttaatcaawtttttctgcaggttcatggagccattcacactgaagatctggttgcaatggactggagataaaattatttgyatgtggagtatgcaaatgccccagcaggtcatagacygatgaagtgcgagaaaagaaggcattgctgctcaagaagttctgtcaaaaatrcttcaagagcacaactttttgaatgtaacttcataacaataatttttgtcctctcatctccatataggccacagtagattttraggtgaagaaaggcacagaaggcttcaaataaaagaagcatgccctagatggtctgaatacaaaagggataaaagctgaaatgtcaaaagccatgtgttgaagagcaatttttttctgttctaaaagatagttatttttccttcygtagagacctatgaacccaaaatatttgagtcacacatgttcacagcagtgtcaggtctgcatcctgaaaca

SEQ ID NO: 43121 - DNA, 600 bp, Chicken  19866894280720_6
ctttcccacaccagttcatagtgacaagccaagcagtgataaaatcttaatcaawtttttctgcaggttcatggagccattcacactgaagatctggttgcaatggactggagataaaattatttgyatgtggagtatgcaaatgccccagcaggtcatagacygatgaagtgcgagaaaagaaggcattgctgctcaagaagttctgtcaaaaatrcttcaagagcacaactttttgaatgtaacttcataacaataatttttgtcctctcatctccatataggccacagtagattttraggtgaagaaaggcacagaaggcttcaaataaaagaagcatgccctagatggtctgaatacaaaagggataaaagctgaaatgtcaaaagccatgtgttgaagagcaatttttttctgttctaaaagatagttatttttccttcygtagagacctatgaacccaaaatatttgagtcacacatgttcacagcagtgtcaggtctgcatcctgaaacaagatttacagtgatgaattaacctcatctaacttcagatatctatagtggagtgtcagcatcaaagcttcttccccagctctt

SEQ ID NO: 43122 - DNA, 542 bp, Chicken  19866894280720_7
ccccagcaggtcatagacygatgaagtgcgagaaaagaaggcattgctgctcaagaagttctgtcaaaaatrcttcaagagcacaactttttgaatgtaacttcataacaataatttttgtcctctcatctccatataggccacagtagattttraggtgaagaaaggcacagaaggcttcaaataaaagaagcatgccctagatggtctgaatacaaaagggataaaagctgaaatgtcaaaagccatgtgttgaagagcaatttttttctgttctaaaagatagttatttttccttcygtagagacctatgaacccaaaatatttgagtcacacatgttcacagcagtgtcaggtctgcatcctgaaacaagatttacagtgatgaattaacctcatctaacttcagatatctatagtggagtgtcagcatcaaagcttcttccccagctcttcttacagtcattgaagagctggtcaacagaatttatattgaaccaaaacaaggcatctgtttaagcagactaatcacatcctgaagt

SEQ ID NO: 43123 - DNA, 600 bp, Chicken  19866894280724_1
gagggcaactccacagacagaaattcaattctctttagtcatctgcatgtctgtttgaaaatgtcttgcagacttttttagatacttgtgcagctcttactggtaaatttgaaaaattcagtaccaaagatctttttcttggcaaatggttaagttttatatttcacccttatagtcactcctactgtgcttcccccagtggtaatgctgaaatagttctgaactagtaaaataaacttttaaaagtttcaaacagattttcttgatttaaaaatgatgatttatgattatgcgaactcrgtttaatatgcattaggaattcaaatgctgttgcaataattttttagtaaaagctgctttttagaactacctttgcacattctctccacaagcaataattcttcatctatagagtaatttatttcttctggttttaatatgttacagatgaatggttgtatgtctttcctgttagagcattacaagacaggccacttttgcattagactggtactacaacagatacctgtggtgctcttcatggttcatgtggtactaatttaaatgggaagttgcacatatttcattgaaacacttggt

SEQ ID NO: 43124 - DNA, 600 bp, Chicken  19866894280725_1
taatcctttaatggttatatctttatggaaagtaaaaagaaataaacaaaatttcacaggaatgtgaaatacaaaatctcagtcagatgttaactaaaaactgacttgtgttgtggacctgtgcacacacataattatcccaagtccattttcagaaggtttaattcttatattttagctattaaatatttaaggttgttaaatattctctaaataagccatatgcataggttactctgaaattaatgccaggggaaatacatcagatacagagtataaataatgtatccataaagaagyggatagcaaaaacarcgaaagaaggctaggacagcactcattgtagtctccttcttactacacttaaggaggagaggttttctactgtaatttctctggagatagggagtttatgtttagggttaaatacaaagtatgaggataaaaaaaataagagagaattgagttgaaacaacccagtgctaaggaacaaaatcagcaaaagttgctttttaaratgagtgtgggtgctttatcagttttctgatgtttgtatagtaaatacctcacagcatcttttatatttgattcaaagtgtaa

SEQ ID NO: 43125 - DNA, 600 bp, Chicken  19866894280725_2
tatatctttatggaaagtaaaaagaaataaacaaaatttcacaggaatgtgaaatacaaaatctcagtcagatgttaactaaaaactgacttgtgttgtggacctgtgcacacacataattatcccaagtccattttcagaaggtttaattcttatattttagctattaaatatttaaggttgttaaatattctctaaataagccatatgcataggttactctgaaattaatgccaggggaaatacatcagatacagagtataaataatgtatccataaagaagyggatagcaaaaacarcgaaagaaggctaggacagcactcattgtagtctccttcttactacacttaaggaggagaggttttctactgtaatttctctggagatagggagtttatgtttagggttaaatacaaagtatgaggataaaaaaaataagagagaattgagttgaaacaacccagtgctaaggaacaaaatcagcaaaagttgctttttaaratgagtgtgggtgctttatcagttttctgatgtttgtatagtaaatacctcacagcatcttttatatttgattcaaagtgtaaagtgtgatttaagta

SEQ ID NO: 43126 - DNA, 600 bp, Chicken  19866894280725_3
gccatatgcataggttactctgaaattaatgccaggggaaatacatcagatacagagtataaataatgtatccataaagaagyggatagcaaaaacarcgaaagaaggctaggacagcactcattgtagtctccttcttactacacttaaggaggagaggttttctactgtaatttctctggagatagggagtttatgtttagggttaaatacaaagtatgaggataaaaaaaataagagagaattgagttgaaacaacccagtgctaaggaacaaaatcagcaaaagttgctttttaaratgagtgtgggtgctttatcagttttctgatgtttgtatagtaaatacctcacagcatcttttatatttgattcaaagtgtaaagtgtgatttaagtaagtcagtgatagttattttgtgccaaagtgtcttagcaactattgtttttctgcttgctatgaatttctcattttgtcattatttctctggttagaaggagctgctattattcagtgactttcagaggtccatcagtatacatgagaagtgaatgctgcaaaatctggacacaaactcttgtttccacctttgcaaatttct

SEQ ID NO: 43127 - DNA, 600 bp, Chicken  19866894280727_1
ttttccctaatatccaacctgagaggtccagactgaatggacctgattgctcatgctttagcaagtcataattttcagaaacaacaccaccctaaacaaaattgcccagaacgtgggagcactcactcatctcataagaaaaccattatctttttcctctgagcaaaaccatagcatggcaggcagagtcacagcaatagctcttgttcacataaagctgtagtcgtgttttttggggggataatatttcagtctgtgacacacacaacaggtctagttttcccaggtagctggcaaatsctaatgttacattctcagtagtacttcacagctaattcatcattttcctaagacagacctgatgaaaaagcacgactctgtgcaatatcccacacaatcaacagcaccccaatgaaactgcattattaattctctctttgttctaccccctgactactcaatcactcccaaaccaccatgtaagagaagcaatcccaataggctatttgcagtccaacataaagtgccatagatatttttggagcactttggtcactttggagggacttgagagagattagactctttactgcttgagcc

SEQ ID NO: 43128 - DNA, 600 bp, Chicken  19866894280731_1
cccaaattctggttgaacatttcctatttccaccaagctgaggcttgtttgaacggccactgccgcctcctcctcttccaccgctgccacctcctcctctcccttttcctcctcctcctcctctccctcttcctcctcctctgttgggccttcctcttctctttgctcctgagctcatgtttcttgctgaggaagagaaagaaaaaatagcccttagttatgaaggtgtcttagtacaaaataaccatctgggtgcacattatttgtttttccatgtgacaagagaagctctcttctcawaacacagttaatcaactgtgtgctcatgtatcatgcacctgaagcaaagcaaattcttccaaaacacagttacacaagctctatggttttagaacacaaaagggatccaaatttttctcacagccaccctaattgcaggtcctgagaaggcagggtgagcctatcagcagtgctgcccagccctggagctccagatctgtactctgatggcacttccttgagcatcggagtgcaaagaacaaacctccacgggacacctcaaagcagagagcttaaatccactcctgacctatttcttct

SEQ ID NO: 43129 - DNA, 600 bp, Chicken  19866894280733_1
tccaaatatttttatagatgatagctttccttggcgtatttgaactattattattattattattttactgtaactagtgtgttacctagtcatggtagctagtgtgattgaagccatacaagctgcaattatacaactcaaagtccagtgatgaaatctaaaaaaacacatttccttcactgttctccctctactttatttttcttgatattttgaaagctcagattacttctactcccaggaaaatatatatatttttaatttttgtaccttttggggggtaaaagtaattaaaaaackgaaaattccacagaacacaactattagtttgtaggtgcttttcatagagataatcagaattctccattctggataatacttttgattgtagtttttttagagaaacatactcatcctactctggttgcatctgtcagtgatgwcattttgaaggaagaaggttttaaagaaatattttggtggttgtrcatcaactcaaatcatataaaaaactccctcgttggaataatttatgccagtttctactgtgactttatctgataaaacaatcacatgtaaagttcactttctgatgactga

SEQ ID NO: 43130 - DNA, 600 bp, Chicken  19866894280733_2
tccagtgatgaaatctaaaaaaacacatttccttcactgttctccctctactttatttttcttgatattttgaaagctcagattacttctactcccaggaaaatatatatatttttaatttttgtaccttttggggggtaaaagtaattaaaaaackgaaaattccacagaacacaactattagtttgtaggtgcttttcatagagataatcagaattctccattctggataatacttttgattgtagtttttttagagaaacatactcatcctactctggttgcatctgtcagtgatgwcattttgaaggaagaaggttttaaagaaatattttggtggttgtrcatcaactcaaatcatataaaaaactccctcgttggaataatttatgccagtttctactgtgactttatctgataaaacaatcacatgtaaagttcactttctgatgactgaagaattggattatacagaaaaaaaaaaaaaaaaacccacaaaactggcagagcaaatcacctcagctgttggctataagggaaaaaggaatacaaagatagtctctgttaaaaagaaaaactgttactgaagaatcatttcta

SEQ ID NO: 43131 - DNA, 600 bp, Chicken  19866894280733_3
ctctactttatttttcttgatattttgaaagctcagattacttctactcccaggaaaatatatatatttttaatttttgtaccttttggggggtaaaagtaattaaaaaackgaaaattccacagaacacaactattagtttgtaggtgcttttcatagagataatcagaattctccattctggataatacttttgattgtagtttttttagagaaacatactcatcctactctggttgcatctgtcagtgatgwcattttgaaggaagaaggttttaaagaaatattttggtggttgtrcatcaactcaaatcatataaaaaactccctcgttggaataatttatgccagtttctactgtgactttatctgataaaacaatcacatgtaaagttcactttctgatgactgaagaattggattatacagaaaaaaaaaaaaaaaaacccacaaaactggcagagcaaatcacctcagctgttggctataagggaaaaaggaatacaaagatagtctctgttaaaaagaaaaactgttactgaagaatcatttctacatttcggagacttcttttgaaaaatgatgaccctggtaactggg

SEQ ID NO: 43132 - DNA, 600 bp, Chicken  19866894280733_4
tcaaagggacactatcctctttttgggcagattctattgtctgtttcttatgtagtttaaatgaaagtgtaagccaagttttatagtggaaattcatgttcagtacaggaaaaaaactgcttattgcactaagagagggtctactaaagaataacaggctaaaagctgaaaataggaaatttttcatggtgacatttactggatagattcccaagataaatggtaaggcaggattttcaatgtaaatctgggctgcattactgaaaatttctagaattatagagataattggaaaggatrgatgatacatgacaaggtattagcccatgttccaggaaaatatctcagccatttgtttctagtatgaacrcaggcaaataccttggaagatatcagtgtaatgcaatgatgtgcaggagtattcaacctagcttgtattctgggactctggaaatctgacttctctaaccatttcaatgtatgctttgtaatttctgtcacctaaattaacttcttaaacccagatctttgagtatactttctggactctgcctacagtcactgggaaaagagaagcaatttttaaggtggagttggata

SEQ ID NO: 43133 - DNA, 600 bp, Chicken  19866894280733_5
aagccaagttttatagtggaaattcatgttcagtacaggaaaaaaactgcttattgcactaagagagggtctactaaagaataacaggctaaaagctgaaaataggaaatttttcatggtgacatttactggatagattcccaagataaatggtaaggcaggattttcaatgtaaatctgggctgcattactgaaaatttctagaattatagagataattggaaaggatrgatgatacatgacaaggtattagcccatgttccaggaaaatatctcagccatttgtttctagtatgaacrcaggcaaataccttggaagatatcagtgtaatgcaatgatgtgcaggagtattcaacctagcttgtattctgggactctggaaatctgacttctctaaccatttcaatgtatgctttgtaatttctgtcacctaaattaacttcttaaacccagatctttgagtatactttctggactctgcctacagtcactgggaaaagagaagcaatttttaaggtggagttggatatttgcatttttatacactatctattctttccagatgcgtttgtttttccacagactttagaagaagcctg

SEQ ID NO: 43134 - DNA, 600 bp, Chicken  19866894280737_1
ggaaagtgatggttattcccttaagagcaggttaagtggtgtttagccagcccaggtaagccaacgcacagggccccagttcccatcaaacgcttcctgagctgtatgcacggcataggacgcacgctgacatcatggctcatcagttctgtcaaaaccaaaccaacatcccccacctcccagaacagtcgtttctggtaaccacactgctccaatgatggattagtcatgttctgcaactacaggcaatcacaaaataaattctggtcatgtatttatgtataggattatgtattaggkaataggagcctgcctattagctaagtgttatttacatgagaaaatsagtttccatttcagaggctaaaatttaaacacaagaaactaaaaaaagacaacaaaaatgatagaaacaacaacattccagagctgcttttgcataaaatgccacaaaggtggtttacaaaatgcaatccataaagcttgcagccactacttacatggaatgcttaaggctgaactcaggtatctgacaccactgtgagatacctggattgatgaacagaacaccttcccagttaactcagagctgctgcacag

SEQ ID NO: 43135 - DNA, 600 bp, Chicken  19866894280737_2
ccagcccaggtaagccaacgcacagggccccagttcccatcaaacgcttcctgagctgtatgcacggcataggacgcacgctgacatcatggctcatcagttctgtcaaaaccaaaccaacatcccccacctcccagaacagtcgtttctggtaaccacactgctccaatgatggattagtcatgttctgcaactacaggcaatcacaaaataaattctggtcatgtatttatgtataggattatgtattaggkaataggagcctgcctattagctaagtgttatttacatgagaaaatsagtttccatttcagaggctaaaatttaaacacaagaaactaaaaaaagacaacaaaaatgatagaaacaacaacattccagagctgcttttgcataaaatgccacaaaggtggtttacaaaatgcaatccataaagcttgcagccactacttacatggaatgcttaaggctgaactcaggtatctgacaccactgtgagatacctggattgatgaacagaacaccttcccagttaactcagagctgctgcacagtggatcattggttgatttgtttgtatttaacatgatgaggtcacat

SEQ ID NO: 43136 - DNA, 600 bp, Chicken  19866894280738_1
agtgatattaaactgcgctgaaattacttgaagagttttttgatgcacagatcatgtttaagcttaggcactgaatggcagatgttatttcactgatgtatgtgctttcttgcagtgatagtttggactaattatactagctattttaaactacagtcaagattatatagttttagtttctactacttcccctcttcagggaaaaaggggagaagcactacaaggagtagtgacacttacattttatttccaagacaaattgtgtatctttgaaacacaagaaagcaagaagagattttytcaagactctttgttctccttccataatctttttttaaatcaacttacaaaggtagagagccccctgtagcataagaatagctaagaacaaggtgagtgctgctgtacagtcggtgggtggagagccataatcagggctcacacgttayatcacccacagcaacattcacctctatgggcatgtataaatgaaataactcccatctgaaaaaggcaaagcagtagtgattaaagccttctttgcttcatgtgcctccctctgagaaaatgtgtttcttcacrttgttttttttttttttt

SEQ ID NO: 43137 - DNA, 600 bp, Chicken  19866894280738_2
actacagtcaagattatatagttttagtttctactacttcccctcttcagggaaaaaggggagaagcactacaaggagtagtgacacttacattttatttccaagacaaattgtgtatctttgaaacacaagaaagcaagaagagattttytcaagactctttgttctccttccataatctttttttaaatcaacttacaaaggtagagagccccctgtagcataagaatagctaagaacaaggtgagtgctgctgtacagtcggtgggtggagagccataatcagggctcacacgttayatcacccacagcaacattcacctctatgggcatgtataaatgaaataactcccatctgaaaaaggcaaagcagtagtgattaaagccttctttgcttcatgtgcctccctctgagaaaatgtgtttcttcacrttgtttttttttttttttttttaacagtttctgagcttgaaaaagaggaagctagaggtggagataagctgaggctgagagaatcaatctgaataatgctttggtgttgcaagatcaaaaaaaaggtgcaaacagtatttaacatttctgagttataatggcaatgg

SEQ ID NO: 43138 - DNA, 600 bp, Chicken  19866894280738_3
aagcaagaagagattttytcaagactctttgttctccttccataatctttttttaaatcaacttacaaaggtagagagccccctgtagcataagaatagctaagaacaaggtgagtgctgctgtacagtcggtgggtggagagccataatcagggctcacacgttayatcacccacagcaacattcacctctatgggcatgtataaatgaaataactcccatctgaaaaaggcaaagcagtagtgattaaagccttctttgcttcatgtgcctccctctgagaaaatgtgtttcttcacrttgtttttttttttttttttttaacagtttctgagcttgaaaaagaggaagctagaggtggagataagctgaggctgagagaatcaatctgaataatgctttggtgttgcaagatcaaaaaaaaggtgcaaacagtatttaacatttctgagttataatggcaatggttttgagttattagtgttcatcagcttagcccatgcccgtgtactcctggcatgtcccaggtgaaaaatggacctcctaaaactgtttagctaaggcatgtagtagtatattttaccatgaggtaaaatgagg

SEQ ID NO: 43139 - DNA, 599 bp, Chicken  19866894280739_1
  misc_feature (1)..(69): n is any nucleotide
nnnnnnnnnnnnnnnnnnnnnnnnnnnnnnnnnnnnnnnnnnnnnnnnnnnnnnnnnnnnnnnnnnnnnccctgagctgaattaatgattgtagaacaattgtggtatctttcatgcttccaggggtcagtgattgagactttttttgttttcttctgctaaagcttttttttttttcctgaatatggtgaataatggaattagctgttccttaacatcgcttgttttggaagaatcatattgtcccagtgggcattgctcggggatggttgactaagagggaagttgtcttttcagatraagaatgagatcactacagcatgttctcatggatactgtcctagaaatttgtagaagcactaattaggtgctgtttacttttcaaagaaatgtctttgctgggctaatcttgtaggacaatcttatttttcaaaacattattygaacattactggcctaagttttctgcaggttaatgagacatccatsaagttttctaacaatgtcttctaaagctagaatactacaagaactaacgtgactgtaacatctgtggctttgaacaaaattaaagttggtggagatgacaaataattcag

SEQ ID NO: 43140 - DNA, 600 bp, Chicken  19866894280739_2
ttttgttttcttctgctaaagcttttttttttttcctgaatatggtgaataatggaattagctgttccttaacatcgcttgttttggaagaatcatattgtcccagtgggcattgctcggggatggttgactaagagggaagttgtcttttcagatraagaatgagatcactacagcatgttctcatggatactgtcctagaaatttgtagaagcactaattaggtgctgtttacttttcaaagaaatgtctttgctgggctaatcttgtaggacaatcttatttttcaaaacattattygaacattactggcctaagttttctgcaggttaatgagacatccatsaagttttctaacaatgtcttctaaagctagaatactacaagaactaacgtgactgtaacatctgtggctttgaacaaaattaaagttggtggagatgacaaataattcagagctcatggataaagctgaacagtagcactgtggtaacttcatcttgtttaatcttgcaatctgaggaatgcagtgcaaataaagcattactgtagaactgttgctaattgctctttatggctttgattgaaagattcattgca

SEQ ID NO: 43141 - DNA, 600 bp, Chicken  19866894280739_3
gaataatggaattagctgttccttaacatcgcttgttttggaagaatcatattgtcccagtgggcattgctcggggatggttgactaagagggaagttgtcttttcagatraagaatgagatcactacagcatgttctcatggatactgtcctagaaatttgtagaagcactaattaggtgctgtttacttttcaaagaaatgtctttgctgggctaatcttgtaggacaatcttatttttcaaaacattattygaacattactggcctaagttttctgcaggttaatgagacatccatsaagttttctaacaatgtcttctaaagctagaatactacaagaactaacgtgactgtaacatctgtggctttgaacaaaattaaagttggtggagatgacaaataattcagagctcatggataaagctgaacagtagcactgtggtaacttcatcttgtttaatcttgcaatctgaggaatgcagtgcaaataaagcattactgtagaactgttgctaattgctctttatggctttgattgaaagattcattgcagttttttttacaagtgtcactttgctttgttgatacagcatccatc

SEQ ID NO: 43142 - DNA, 600 bp, Chicken  19866894280739_4
ctcatggataaagctgaacagtagcactgtggtaacttcatcttgtttaatcttgcaatctgaggaatgcagtgcaaataaagcattactgtagaactgttgctaattgctctttatggctttgattgaaagattcattgcagttttttttacaagtgtcactttgctttgttgatacagcatccatcttttaaaaatgggtactctcctggtaactacttgagagaatagcaggattagggggatttgactcttcataaagcactttagtgaaggtacagttctcttcttaacattgawcaagttattttggctctagcagcattttgttgtcyggctagaactggatagcttccaagttaactcaaaataaagccccctcaaaaaaccaaaccaaaaatgttctttaagctcagagtgatgtgctatgtgtgatggtaccaactacggtgtgactcattcttatttactcttcgcaagggatatcctttcaaagagatttggtgacttaattttatcaagcatccttcaccactgcttttctcaagaagactgtattaaaatctagtgatttagtcacaaataagacctttaaacttc

SEQ ID NO: 43143 - DNA, 600 bp, Chicken  19866894280739_5
cttcatcttgtttaatcttgcaatctgaggaatgcagtgcaaataaagcattactgtagaactgttgctaattgctctttatggctttgattgaaagattcattgcagttttttttacaagtgtcactttgctttgttgatacagcatccatcttttaaaaatgggtactctcctggtaactacttgagagaatagcaggattagggggatttgactcttcataaagcactttagtgaaggtacagttctcttcttaacattgawcaagttattttggctctagcagcattttgttgtcyggctagaactggatagcttccaagttaactcaaaataaagccccctcaaaaaaccaaaccaaaaatgttctttaagctcagagtgatgtgctatgtgtgatggtaccaactacggtgtgactcattcttatttactcttcgcaagggatatcctttcaaagagatttggtgacttaattttatcaagcatccttcaccactgcttttctcaagaagactgtattaaaatctagtgatttagtcacaaataagacctttaaacttcttaataacacaaaattatgttacttggaatgtgtc

SEQ ID NO: 43144 - DNA, 541 bp, Chicken  19866894280740_1
caccttagaccacatatcatactgttttttgtaagaaaaagtacattaagcatcagaactaccttcactttttccactcagtcttattgctaggaacccaccacaaaacacaaagatgcccaaatatgacatttttaatagaggaaggaattacagacaactttttctactctataatgcaacagaaacaggaggagagacttcaagccatgttcattcagaatgagaagcacttcgaaaaaaaaaaataagaccagattaatacagtcttatttacttcatttagttcttttcaagagratttgcaaagagtaataaaaatactatttataaatttaaagtgggagggatgggggcaaaggagggaagaaaaagcattaccttataccctatcgtcttacgataatatagaatttctttttccagaagttcaaataaccgcgggggaaaaaactggaaatcctgaatatttggctgttttggaggtcgcggagcctttaaacacagacaggtgtattaacatttacataagcttgatttt

SEQ ID NO: 43145 - DNA, 600 bp, Chicken  19866894280741_1
acactgtgccgggcaggtgggtcgtgtgacaggttgccatcgtgggcactgcatggtttagagtgataatagtgtgtgacctcagcaccagaatggagggatttcttcccagaatttggtcctttaacccagaggacgttgctccctgccaccacgagtggcccagctgacagcggccgagcaaaccattgctgcctgagcgatgggaaagcgctggtggctgtcccagtgtggcaggacacattgtgccaagccctcccccagtgggagtactgctgggctgtgctggagcaatgcagycagatgtgtttcatgcaaaccagcattcaygtctttgagaccatgacttccctgacctgtcatttccacaaagcttaggaaacagccttgtgtcatactgcactcagcaagctccaaacagctgggaaaggtgcttgaacctggaattagaggggatgaaacactgctgaactctggttcccaacttccatctgctttaaagctgccagctcagcactaacccagctcccactctgttttcagatttgaaaccaggtattggtcagactccttccctatgcttttgttctttccttcctg

SEQ ID NO: 43146 - DNA, 600 bp, Chicken  19866894280741_2
aggttgccatcgtgggcactgcatggtttagagtgataatagtgtgtgacctcagcaccagaatggagggatttcttcccagaatttggtcctttaacccagaggacgttgctccctgccaccacgagtggcccagctgacagcggccgagcaaaccattgctgcctgagcgatgggaaagcgctggtggctgtcccagtgtggcaggacacattgtgccaagccctcccccagtgggagtactgctgggctgtgctggagcaatgcagycagatgtgtttcatgcaaaccagcattcaygtctttgagaccatgacttccctgacctgtcatttccacaaagcttaggaaacagccttgtgtcatactgcactcagcaagctccaaacagctgggaaaggtgcttgaacctggaattagaggggatgaaacactgctgaactctggttcccaacttccatctgctttaaagctgccagctcagcactaacccagctcccactctgttttcagatttgaaaccaggtattggtcagactccttccctatgcttttgttctttccttcctgcccctttgccacccagctactaccaaagtt

SEQ ID NO: 43147 - DNA, 600 bp, Chicken  19866894280752_1
cctctcttgtcatttgaaaataataaaattgtgattttttttgcccttgaaattatatatatgcatatatatatatctatatataacggatatgagatagtgatggttaacagtgggagtcaggcaagagttcacagggtgaatgaatagatgaagcacaggcagggcagatgcctggagatacatggtctgcagtaggaataactgcaatatatcattcctaatgggtgtttgatgtaaatatgtgtaagactagagaaaaaggagtattgtaaagatatagtgtgcacactggtgtgrcatttccgaatggccatcaccttggaaacaactggacagtgaccatggagccgtgtggcctcctcttccatctttcttaccatgaagccaaaaaacagtgccatcggatgcttgtttgtctctgcctgccatgtgtatctaacaggctggtggtatttgcctacaacatcccaaccttttttcagcaggcagcttaatattaaactcagacataaggaaggtgggagaggcttttgaagagcagttgtgaaacatgagcagtcatcacagaggggagaacaccaggcttagcttttgttt

SEQ ID NO: 43148 - DNA, 581 bp, Chicken  19866894280758_1
ctgtgcatgtcagtctgggatgtgacttgtctttcatatcactgtttctactgctgaaatgtatcacccaccacctcagtgtggtaggcttgcatccgctatttggtctccataaacattcagcaagtactgatgaatgtcaataggtgccatttgttctgtgtggaggaattagatgacacacctttgttttatatgcacttccatgtcagatgtcattttgtcagactgctgctctgctgctatctgttaagtggcaacaaaatgtaatggaacatgggtgggaaggttggttcaacmtytactaccmtaccaccatctgcctctctgacactgtgggccaacataataaagtagaaggcattactttcggagcaccactcatatttgtttttaattgtaatcttcttctgtaactaaaaaaaaaaaaaagagtggctcaaatacagaggcactcaaatattgcagatagtaattatgtaatggtgagtactgcttggtctggaaaacatggtttcttataaatatttttgtgtttatctatgtatgctctcaataagaggtgttttaaaaaggtattt

SEQ ID NO: 43149 - DNA, 579 bp, Chicken  19866894280758_2
gtgcatgtcagtctgggatgtgacttgtctttcatatcactgtttctactgctgaaatgtatcacccaccacctcagtgtggtaggcttgcatccgctatttggtctccataaacattcagcaagtactgatgaatgtcaataggtgccatttgttctgtgtggaggaattagatgacacacctttgttttatatgcacttccatgtcagatgtcattttgtcagactgctgctctgctgctatctgttaagtggcaacaaaatgtaatggaacatgggtgggaaggttggttcaacmtytactaccmtaccaccatctgcctctctgacactgtgggccaacataataaagtagaaggcattactttcggagcaccactcatatttgtttttaattgtaatcttcttctgtaactaaaaaaaaaaaaaagagtggctcaaatacagaggcactcaaatattgcagatagtaattatgtaatggtgagtactgcttggtctggaaaacatggtttcttataaatatttttgtgtttatctatgtatgctctcaataagaggtgttttaaaaaggtattt

SEQ ID NO: 43150 - DNA, 571 bp, Chicken  19866894280758_3
cagtctgggatgtgacttgtctttcatatcactgtttctactgctgaaatgtatcacccaccacctcagtgtggtaggcttgcatccgctatttggtctccataaacattcagcaagtactgatgaatgtcaataggtgccatttgttctgtgtggaggaattagatgacacacctttgttttatatgcacttccatgtcagatgtcattttgtcagactgctgctctgctgctatctgttaagtggcaacaaaatgtaatggaacatgggtgggaaggttggttcaacmtytactaccmtaccaccatctgcctctctgacactgtgggccaacataataaagtagaaggcattactttcggagcaccactcatatttgtttttaattgtaatcttcttctgtaactaaaaaaaaaaaaaagagtggctcaaatacagaggcactcaaatattgcagatagtaattatgtaatggtgagtactgcttggtctggaaaacatggtttcttataaatatttttgtgtttatctatgtatgctctcaataagaggtgttttaaaaaggtattt

SEQ ID NO: 43151 - DNA, 600 bp, Chicken  19866894280769_1
ggtcactgtaaggagaaaagtccttgaagctgggaatgagaggagatgtgagtgctttctgattaattagaagcttgtgaggggcaaatgttatgctttcctttctctggttctgcagccattggcagcctctgtctgctgccctgactccaagcagtgcatggcacaggcagaggccgtttcctgaagcacagagatgctttttctccctgcacagtcctcagcctgcaccaacaagctcagcgggtacactactaacaaacctggcttctctttgcaggcctgaagcgcagctacacrtgcaacatctgtaacgtcacactgaactccatagagcagtaccacgcgcacctgaagggctccaagcaccagaccaagtgggtaccgctgcgctccgggggccctctgtccatctgtgcctattggggtgttgaggcactataggaagcaatgcctcatgcttcttgctgagggctgatggtgctctgtgtgtgtgttggggtgctgtgggcccccatggtcacactgtgctgggagcacctttggtgtgctgagccccagcagaggcactgggggctggacaggaccaggtgtttccaa

SEQ ID NO: 43152 - DNA, 599 bp, Chicken  19866894280771_1
  misc_feature (1)..(28): n is any nucleotide
nnnnnnnnnnnnnnnnnnnnnnnnnnnnagaaatttacaggggagaaaagactcccttggagaggggagctgtgcatcaatttaatagataaatgaggcgtaatgaaatcttcaggtatctcttatgcacacacttcatgaaagggattaagatatttttaaactgttatataaatgaagcaaaatatttttctaatgatttccccgcgcaacataacagagacgcaaagcagagcctaatcttgatattatcagagtggattctagctggattctagctagttctcccactccctgacrgtgggtacacagtgtggagaggagctcactggtcttcctcacarcctctgcacatggtcgaacacccascattcaccaggcagtgcctcactttccttatccttaaaarcagaggcagaggtacttagctccttgaagcacagcacctgagagaggaggtgcttctgttgaggtcagactggtgccaagggaaggagcgtcacctcatgttctctttcgctttgctgctgtgtggtacgagctggtgtgatgctcaccctccccatggcagtaaggtgctgtgacttgtgctaacacct

SEQ ID NO: 43153 - DNA, 600 bp, Chicken  19866894280771_2
gaaaagactcccttggagaggggagctgtgcatcaatttaatagataaatgaggcgtaatgaaatcttcaggtatctcttatgcacacacttcatgaaagggattaagatatttttaaactgttatataaatgaagcaaaatatttttctaatgatttccccgcgcaacataacagagacgcaaagcagagcctaatcttgatattatcagagtggattctagctggattctagctagttctcccactccctgacrgtgggtacacagtgtggagaggagctcactggtcttcctcacarcctctgcacatggtcgaacacccascattcaccaggcagtgcctcactttccttatccttaaaarcagaggcagaggtacttagctccttgaagcacagcacctgagagaggaggtgcttctgttgaggtcagactggtgccaagggaaggagcgtcacctcatgttctctttcgctttgctgctgtgtggtacgagctggtgtgatgctcaccctccccatggcagtaaggtgctgtgacttgtgctaacacctccattccacaggaaagctgtgcagccaggtgttgctttgtcaagt

SEQ ID NO: 43154 - DNA, 600 bp, Chicken  19866894280771_3
ctgtgcatcaatttaatagataaatgaggcgtaatgaaatcttcaggtatctcttatgcacacacttcatgaaagggattaagatatttttaaactgttatataaatgaagcaaaatatttttctaatgatttccccgcgcaacataacagagacgcaaagcagagcctaatcttgatattatcagagtggattctagctggattctagctagttctcccactccctgacrgtgggtacacagtgtggagaggagctcactggtcttcctcacarcctctgcacatggtcgaacacccascattcaccaggcagtgcctcactttccttatccttaaaarcagaggcagaggtacttagctccttgaagcacagcacctgagagaggaggtgcttctgttgaggtcagactggtgccaagggaaggagcgtcacctcatgttctctttcgctttgctgctgtgtggtacgagctggtgtgatgctcaccctccccatggcagtaaggtgctgtgacttgtgctaacacctccattccacaggaaagctgtgcagccaggtgttgctttgtcaagtgttttttcatctagaagcccatgcc

SEQ ID NO: 43155 - DNA, 600 bp, Chicken  19866894280771_4
cttcaggtatctcttatgcacacacttcatgaaagggattaagatatttttaaactgttatataaatgaagcaaaatatttttctaatgatttccccgcgcaacataacagagacgcaaagcagagcctaatcttgatattatcagagtggattctagctggattctagctagttctcccactccctgacrgtgggtacacagtgtggagaggagctcactggtcttcctcacarcctctgcacatggtcgaacacccascattcaccaggcagtgcctcactttccttatccttaaaarcagaggcagaggtacttagctccttgaagcacagcacctgagagaggaggtgcttctgttgaggtcagactggtgccaagggaaggagcgtcacctcatgttctctttcgctttgctgctgtgtggtacgagctggtgtgatgctcaccctccccatggcagtaaggtgctgtgacttgtgctaacacctccattccacaggaaagctgtgcagccaggtgttgctttgtcaagtgttttttcatctagaagcccatgccaggctcacactgtctgttgtccttttcccaccacgtcctg

SEQ ID NO: 43156 - DNA, 600 bp, Chicken  19866894280771_5
ggtgccaagggaaggagcgtcacctcatgttctctttcgctttgctgctgtgtggtacgagctggtgtgatgctcaccctccccatggcagtaaggtgctgtgacttgtgctaacacctccattccacaggaaagctgtgcagccaggtgttgctttgtcaagtgttttttcatctagaagcccatgccaggctcacactgtctgttgtccttttcccaccacgtcctgtttttagatagtttctctgctttggcaagaccattttgagtgcctcagctctttcctgcatgctggcagayctcctgccctggtcatgtgcaaactcaataattatactcaatgctctcagccatggagccttaatgattctatgaccaactctggacatatctgacagggatgatctcctgactcagccacctcccctggcaagcacaccatggagggaaatgagctgttctgcagccaaagcacatctgttgctcacacagaacggcagcttccacttttaccctcttacaggagaaacctgaagtgggtttcatatttgttcctcattaatctatgtttgccatcactcatctgcttggcatctttcg

SEQ ID NO: 43157 - DNA, 600 bp, Chicken  19866894280776_1
actaaaatagggggggttaggtcagatgtcaggtgggaaatatttcctctgaggataatgaggcgctgcccagagctgtgggtgccccatccctggaggtgcccaaggctgattatggggccctgggcagcctgagctgggggaggtgtccctgcctcagaactaggtgatatttaaggtttcttccaacccagcctctttctgtggctctggtcacaaacccctgtgttgagacccagtcgttgctgagcagaagggtggctcgccaggcatgcacagcttctacctgctgcttttctkctgatccccatttcctgcasggctggaagttatcaaaacctgtgtttctctctttctttgtccagtaagggagcagctgaaggagctcaccaagcaatatgagaagtcagaaaatgatctcaaggccttgcagagcgttgggcaggtatgtaagaggcaaagttataacagcctatggctgtggatggtgagcttgcctagaagtagctggagcaacttgcctagcagttgttaagttyatttaattacaaaggaaaaagtaagtggaaatgtacagcaaacagaaaggaggaccttacc

SEQ ID NO: 43158 - DNA, 600 bp, Chicken  19866894280776_2
gtcagatgtcaggtgggaaatatttcctctgaggataatgaggcgctgcccagagctgtgggtgccccatccctggaggtgcccaaggctgattatggggccctgggcagcctgagctgggggaggtgtccctgcctcagaactaggtgatatttaaggtttcttccaacccagcctctttctgtggctctggtcacaaacccctgtgttgagacccagtcgttgctgagcagaagggtggctcgccaggcatgcacagcttctacctgctgcttttctkctgatccccatttcctgcasggctggaagttatcaaaacctgtgtttctctctttctttgtccagtaagggagcagctgaaggagctcaccaagcaatatgagaagtcagaaaatgatctcaaggccttgcagagcgttgggcaggtatgtaagaggcaaagttataacagcctatggctgtggatggtgagcttgcctagaagtagctggagcaacttgcctagcagttgttaagttyatttaattacaaaggaaaaagtaagtggaaatgtacagcaaacagaaaggaggaccttaccacgaggaactgtcataccat

SEQ ID NO: 43159 - DNA, 600 bp, Chicken  19866894280776_3
tcgttgctgagcagaagggtggctcgccaggcatgcacagcttctacctgctgcttttctkctgatccccatttcctgcasggctggaagttatcaaaacctgtgtttctctctttctttgtccagtaagggagcagctgaaggagctcaccaagcaatatgagaagtcagaaaatgatctcaaggccttgcagagcgttgggcaggtatgtaagaggcaaagttataacagcctatggctgtggatggtgagcttgcctagaagtagctggagcaacttgcctagcagttgttaagttyatttaattacaaaggaaaaagtaagtggaaatgtacagcaaacagaaaggaggaccttaccacgaggaactgtcataccatgcgtatcagttagaaaggttttctttgtttgtcctggctaatagaaattgttaatagaaattaaagcactagtgtgaaacttgaagcaggagaaagaatttcaaagacatcttctatgtgctgaaacatactttaaatactgtttggcaagggttacttaatttgtaggctaatactgcatttattcctttgcagatcgtcggcgaggtgcttaaacag

SEQ ID NO: 43160 - DNA, 599 bp, Chicken  19866894280778_1
  misc_feature (1)..(33): n is any nucleotide
nnnnnnnnnnnnnnnnnnnnnnnnnnnnnnnnnaaaaagtaacattctgcccttcaaagcttcagcaatgcccttgttttttatttttatagcagttgctaatggcttacttgcatgttcctcctttatgtcatacacctgactattttttgtcaccgtggtgacagccattctgttatttaagcatatctttcccttgtatctgatataagcacaagcctgtttgcaaacctgaggctgtgccctcttacaagcagaactcctgtgaactgcagcaagagaatcaaatcccgttcacaractttcccagtgtaaaagttctcagcaaaaggaagaaatatgcraatttcagtgggagcttccaaaccaagatctacgtcctgccacaggcagaacaatgcttttcccagccttggaagagagctgagtactgtgtagagattgactgggattgttgaagagagctgtatgggtggcctgagacctcttcagaactcttcaaacttctcagacagacaaccagcaccatcagaccttcaacccaaagtctttccaaaaacttcactccaggcaacagaatcagtgatctgatggccagc

SEQ ID NO: 43161 - DNA, 600 bp, Chicken  19866894280778_2
ttctgcccttcaaagcttcagcaatgcccttgttttttatttttatagcagttgctaatggcttacttgcatgttcctcctttatgtcatacacctgactattttttgtcaccgtggtgacagccattctgttatttaagcatatctttcccttgtatctgatataagcacaagcctgtttgcaaacctgaggctgtgccctcttacaagcagaactcctgtgaactgcagcaagagaatcaaatcccgttcacaractttcccagtgtaaaagttctcagcaaaaggaagaaatatgcraatttcagtgggagcttccaaaccaagatctacgtcctgccacaggcagaacaatgcttttcccagccttggaagagagctgagtactgtgtagagattgactgggattgttgaagagagctgtatgggtggcctgagacctcttcagaactcttcaaacttctcagacagacaaccagcaccatcagaccttcaacccaaagtctttccaaaaacttcactccaggcaacagaatcagtgatctgatggccagcaaagccaagagccaggatcttccagagtggtaggatattcaacac

SEQ ID NO: 43162 - DNA, 599 bp, Chicken  19866894280790_1
  misc_feature (1)..(136): n is any nucleotide
nnnnnnnnnnnnnnnnnnnnnnnnnnnnnnnnnnnnnnnnnnnnnnnnnnnnnnnnnnnnnnnnnnnnnnnnnnnnnnnnnnnnnnnnnnnnnnnnnnnnnnnnnnnnnnnnnnnnnnnnnnnnnnnnnnnnnnnnaaatgaacaggacctgtattaactattcataaaacaaaccactaacataggaagttctttaacccttcagaggaaagggttacctgacatatcactagtctccaggtaacttccaataatgtttcattccagagctgtgcttctgccttttcctaactgatgcrcacccaagatttcaacccaaatttcacccagtaattctacaactacttattaagctgttgggtaagaaatgtaattgccttttactgtaatgcaaacaaagcatacgaaaaataatatgtgcaaagagaatacttccacgtaatgtttaaatgtacaccatacttacagatgagaggaaatctgcgccagyattttccaagaccacgactcacacagttcaacatcccagggaagaaatgcttacttttatcagaaaattatttgaatccctgacagcatataaattctggagattcag

SEQ ID NO: 43163 - DNA, 600 bp, Chicken  19866894280790_2
tctttaacccttcagaggaaagggttacctgacatatcactagtctccaggtaacttccaataatgtttcattccagagctgtgcttctgccttttcctaactgatgcrcacccaagatttcaacccaaatttcacccagtaattctacaactacttattaagctgttgggtaagaaatgtaattgccttttactgtaatgcaaacaaagcatacgaaaaataatatgtgcaaagagaatacttccacgtaatgtttaaatgtacaccatacttacagatgagaggaaatctgcgccagyattttccaagaccacgactcacacagttcaacatcccagggaagaaatgcttacttttatcagaaaattatttgaatccctgacagcatataaattctggagattcagctttgtgtgcatggccaccattaccattcctcattttcagcttctgaggaaaagcagaggccactacactggtttttcccttccaatattctgatgctgcttgtgtcaggagagctaaatgtttattgcaaaagaggatataaactgcctgccctccttgacatttattgaaccaatactcaacattaaatt

SEQ ID NO: 43164 - DNA, 599 bp, Chicken  19866894280792_1
  misc_feature (1)..(29): n is any nucleotide
nnnnnnnnnnnnnnnnnnnnnnnnnnnnnatccaagcaaaaaaggcacaagaaggacagattgctgagatgcaatgggtgccacttccctggagactttcaaggcctggctggaccaggctctgagcacctgatggagctgtgcatgtccctgttcactgcaggggagttggagcaggtgacctttaaaggtcccttctggctctaaggattctatgattctgtgattctgtgacatcatagatctatgacctcagtaacatgggtatggtggatggaagcacagtgggagattatatgyttcctttaattctagcaatagcaaagacataattttgactctcaatacatctgatgagtttctcataattactaagaaaacaccctatgcatttagtttattcatgtttggcaatgaccatgtcttgaattactgacatgtartatagaaaaacagttatttaaattcaaatttaaagaatgtattactgaagtataacctgtaatatcgaagagtgtgatttcccaattgtgaaatggtgtaacagcaggccttacaaaatactatcacagtacacactrtttgcagaaagaactact

SEQ ID NO: 43165 - DNA, 600 bp, Chicken  19866894280792_2
catgtccctgttcactgcaggggagttggagcaggtgacctttaaaggtcccttctggctctaaggattctatgattctgtgattctgtgacatcatagatctatgacctcagtaacatgggtatggtggatggaagcacagtgggagattatatgyttcctttaattctagcaatagcaaagacataattttgactctcaatacatctgatgagtttctcataattactaagaaaacaccctatgcatttagtttattcatgtttggcaatgaccatgtcttgaattactgacatgtartatagaaaaacagttatttaaattcaaatttaaagaatgtattactgaagtataacctgtaatatcgaagagtgtgatttcccaattgtgaaatggtgtaacagcaggccttacaaaatactatcacagtacacactrtttgcagaaagaactactgtggcttctaaaaagactttctatttaaaagattaagaagcttgcattatgctacagcactcctttggataagtgcaaggggctcctctgttccaatgagctgctactcacaatctttcatgtgtgaatttgtaggttggtttt

SEQ ID NO: 43166 - DNA, 582 bp, Chicken  19866894280792_3
acagtgggagattatatgyttcctttaattctagcaatagcaaagacataattttgactctcaatacatctgatgagtttctcataattactaagaaaacaccctatgcatttagtttattcatgtttggcaatgaccatgtcttgaattactgacatgtartatagaaaaacagttatttaaattcaaatttaaagaatgtattactgaagtataacctgtaatatcgaagagtgtgatttcccaattgtgaaatggtgtaacagcaggccttacaaaatactatcacagtacacactrtttgcagaaagaactactgtggcttctaaaaagactttctatttaaaagattaagaagcttgcattatgctacagcactcctttggataagtgcaaggggctcctctgttccaatgagctgctactcacaatctttcatgtgtgaatttgtaggttggttttatggggaggttggtaaaaaggaaaatacgtacaggtaaacataagaaactcttagaaaataaaagccatattttcagctgaaagttattttaaaagtgtagtaaggaaacagaatatatg

SEQ ID NO: 43167 - DNA, 489 bp, Chicken  19866894280793_1
aagggaaacaatcatggtcgaaaatctagagtcattcttaaaatctttcttaagcactcacagactcctcagtccatctgttgcaaaaagttatatggatatcatggtttattatagcatagcttattccattttttcttactgaaagaaactgaactggtataaaactatgtttatagccatacagctgcatcagcattagtgtttctgttgtgcaaccagcacaagtttcataatagcataacgaggacggcgaagcctaattgtagctcattgagccatatgctcacgtataatagyatcatatggaataaccaccctgaacgagaatcacccagaaatcttacctggaaatttccacctytaataagcatgattttaagctttgtcccattttcaaaagtaagcaattataacacatcttctgaaggcttgcttggtgcttccacgggagagaggtccaaggccacgtctacactgcaagcagaa

SEQ ID NO: 43168 - DNA, 425 bp, Chicken  19866894280793_2
ctcctcagtccatctgttgcaaaaagttatatggatatcatggtttattatagcatagcttattccattttttcttactgaaagaaactgaactggtataaaactatgtttatagccatacagctgcatcagcattagtgtttctgttgtgcaaccagcacaagtttcataatagcataacgaggacggcgaagcctaattgtagctcattgagccatatgctcacgtataatagyatcatatggaataaccaccctgaacgagaatcacccagaaatcttacctggaaatttccacctytaataagcatgattttaagctttgtcccattttcaaaagtaagcaattataacacatcttctgaaggcttgcttggtgcttccacgggagagaggtccaaggccacgtctacactgcaagcagaa

SEQ ID NO: 43169 - DNA, 600 bp, Chicken  19866894280800_1
ctaacttatcccaattccttgatactactaataaatattgaggagcgaacactaaatgatgttcagtaatcatagttctactgcttccctaattaatagataaaacaataatgaggtatctctcctaatcaatagataaattgtattcagctttctctgaggctcagatttacattcacagaacatctaatacagctttcactttcatgtgaactgttaaaatcttcagcgattccctgagcaccaacgggttgtccaataataatggcagtaatcctttatctgagtgagtactcaacygctaatatacacataaagtctgatccagacattctgttttaataataatgctaaatattaaacattatatatttaaattattttaatccgtatctttaaaattgcaaggaatttacagaattttatttttaattagcaataagcaatgaattccacctgtgaatcaaaattttcctgtggttatgtatgtttaattccctgtgattcactraaaatgctttgtgggtgtggatgtctcagagcagaagttggcctaatttttgttatgttttatacagtaatgtggtacctgaataaaat

SEQ ID NO: 43170 - DNA, 600 bp, Chicken  19866894280800_2
aactgttaaaatcttcagcgattccctgagcaccaacgggttgtccaataataatggcagtaatcctttatctgagtgagtactcaacygctaatatacacataaagtctgatccagacattctgttttaataataatgctaaatattaaacattatatatttaaattattttaatccgtatctttaaaattgcaaggaatttacagaattttatttttaattagcaataagcaatgaattccacctgtgaatcaaaattttcctgtggttatgtatgtttaattccctgtgattcactraaaatgctttgtgggtgtggatgtctcagagcagaagttggcctaatttttgttatgttttatacagtaatgtggtacctgaataaaattacctggaggatcagcagccagtttctactagactcataacatttccaagcactgcaggcatatttggagcacattagtttcaaagtctcttctgtcaaaatttgcttgcgtaataaaacactagaggttcttgtgagatccacaagactgtaggaattcagcagtaaataaaggtcggaaaaattagaatgcttagagaaaaaccttgtt

SEQ ID NO: 43171 - DNA, 600 bp, Chicken  19866894280814_1
gcttgcatgagcatgcagtattaaaaataaactttgctgcttcattcatgttgatggctacttgcaatgagttttttgtgtatgcgttttccctcctgatgcagagcctataacatggtctcagcttctgatttttgagttttatttgaagtacgcagtggtttgcttgctagaggtaagcctgaagcattggggaggcaactttaaaaattcattgacactcactggcttgctccagagatgggagatagtgtgcttttttgaactagcttgcaaatgtcttccaataacaagctaacwgaagtacatcaaactccttttgaagacatcatctgtgatagtctggctccttgagccagtttgcatgagattgtctgaattctaagctctcaccactttyaaagtaagcactaattsagtaaagggatwtttggggctttggagaacgtaatgttggccacgtgagtattaatagtgaatatttttttcctccttttttagggaaaaaagttgccatacagtcttggagcagatgctgaggaagggagaagtttctgatgaggacagtgctgatgaaattgaagacgactgcaagctgaa

SEQ ID NO: 43172 - DNA, 600 bp, Chicken  19866894280814_2
gcagagcctataacatggtctcagcttctgatttttgagttttatttgaagtacgcagtggtttgcttgctagaggtaagcctgaagcattggggaggcaactttaaaaattcattgacactcactggcttgctccagagatgggagatagtgtgcttttttgaactagcttgcaaatgtcttccaataacaagctaacwgaagtacatcaaactccttttgaagacatcatctgtgatagtctggctccttgagccagtttgcatgagattgtctgaattctaagctctcaccactttyaaagtaagcactaattsagtaaagggatwtttggggctttggagaacgtaatgttggccacgtgagtattaatagtgaatatttttttcctccttttttagggaaaaaagttgccatacagtcttggagcagatgctgaggaagggagaagtttctgatgaggacagtgctgatgaaattgaagacgactgcaagctgaaatcctgctatgtatgtgcatgtacacatttcccagaactaccatttcttgcatacgtatttcataatcctacttgctattgttagcagactaagttttta

SEQ ID NO: 43173 - DNA, 600 bp, Chicken  19866894280814_3
gtctcagcttctgatttttgagttttatttgaagtacgcagtggtttgcttgctagaggtaagcctgaagcattggggaggcaactttaaaaattcattgacactcactggcttgctccagagatgggagatagtgtgcttttttgaactagcttgcaaatgtcttccaataacaagctaacwgaagtacatcaaactccttttgaagacatcatctgtgatagtctggctccttgagccagtttgcatgagattgtctgaattctaagctctcaccactttyaaagtaagcactaattsagtaaagggatwtttggggctttggagaacgtaatgttggccacgtgagtattaatagtgaatatttttttcctccttttttagggaaaaaagttgccatacagtcttggagcagatgctgaggaagggagaagtttctgatgaggacagtgctgatgaaattgaagacgactgcaagctgaaatcctgctatgtatgtgcatgtacacatttcccagaactaccatttcttgcatacgtatttcataatcctacttgctattgttagcagactaagtttttaaacttggattgctaggt

SEQ ID NO: 43174 - DNA, 598 bp, Chicken  19866894280814_4
gatttttgagttttatttgaagtacgcagtggtttgcttgctagaggtaagcctgaagcattggggaggcaactttaaaaattcattgacactcactggcttgctccagagatgggagatagtgtgcttttttgaactagcttgcaaatgtcttccaataacaagctaacwgaagtacatcaaactccttttgaagacatcatctgtgatagtctggctccttgagccagtttgcatgagattgtctgaattctaagctctcaccactttyaaagtaagcactaattsagtaaagggatwtttggggctttggagaacgtaatgttggccacgtgagtattaatagtgaatatttttttcctccttttttagggaaaaaagttgccatacagtcttggagcagatgctgaggaagggagaagtttctgatgaggacagtgctgatgaaattgaagacgactgcaagctgaaatcctgctatgtatgtgcatgtacacatttcccagaactaccatttcttgcatacgtatttcataatcctacttgctattgttagcagactaagtttttaaacttggattgctaggtcaggtcatta

SEQ ID NO: 43175 - DNA, 600 bp, Chicken  19866894280819_1
tcctgtgtggcacgtgacggcacgctgccttcccactcctcgcccaaaacaagagccacggttggtactgaggagcaggatgtgggctgcaggggctgcccgtctccatcgggcctcaatcaagccagggcacgctgcctgctgtcaaaaggacccggcagggacccctggtcttgtcagaaggcttcggagctgggacggatctggtgatcccccccgctgccgacacggtcttctggaggtggaaaagggaacatctgggcaccgcagcacagagggcaaagggagctcttacagggmgaaaaaatggacatggytgctttgctggggtggggaatggaaaagaaaaaggacttttacactttgtaggagtttctctgccgctccatcgtgccctgtgtcagccacaagatgcccagcacaatttcctcctgctggaaacccccaaggaatgctctccaaacacagtgcacagcgcatcagcctctgggctgcggagaacaccccggggcagagtagggctttccttcccaccctgccgatgggaaccaagcgctgctgtcctcagcgttcccaacctgcccaacctgctccgtgctc

SEQ ID NO: 43176 - DNA, 600 bp, Chicken  19866894280819_2
cggcacgctgccttcccactcctcgcccaaaacaagagccacggttggtactgaggagcaggatgtgggctgcaggggctgcccgtctccatcgggcctcaatcaagccagggcacgctgcctgctgtcaaaaggacccggcagggacccctggtcttgtcagaaggcttcggagctgggacggatctggtgatcccccccgctgccgacacggtcttctggaggtggaaaagggaacatctgggcaccgcagcacagagggcaaagggagctcttacagggmgaaaaaatggacatggytgctttgctggggtggggaatggaaaagaaaaaggacttttacactttgtaggagtttctctgccgctccatcgtgccctgtgtcagccacaagatgcccagcacaatttcctcctgctggaaacccccaaggaatgctctccaaacacagtgcacagcgcatcagcctctgggctgcggagaacaccccggggcagagtagggctttccttcccaccctgccgatgggaaccaagcgctgctgtcctcagcgttcccaacctgcccaacctgctccgtgctcagggccagccctccgct

SEQ ID NO: 43177 - DNA, 600 bp, Chicken  19866894280820_1
gaagtattactgccccattactggttgggttcagtgatgtatgacagtaaaggtatgagaaaccccttgttggggtttctcatagcgatgatgccttaatacagaaaacacaaagcaggtgaaatctaagggaaatgtgaaagattattttactttatgatgctcttcttatacttggttaatgcaggtattcaaagctttgtgtcgtcacattcttaaatggcatttcttctcttttaggaaatgcccagttctgtctttttggtgatggaggtatgtgtttgtatatatgttcctttygggttaatttttaaatactttttgggaaaaaaacaaatccttctttgcacagctgcaaagtaagaagtaattgtgaaaacaaggttattaattgtctgtgcagtgctaagtttaccagcagtgtttgtaccataaatcattcttttatatttcatgatactataagcattgatgaagtgttacgcctcaaattggtaattacaaatagctgagaaaaacaaagttaaacatctggaaagggtcttctaattgcagtgaaaagataactaagtagaaattaacacacaggatttcagagct

SEQ ID NO: 43178 - DNA, 599 bp, Chicken  19866894280826_1
  misc_feature (1)..(185): n is any nucleotide
nnnnnnnnnnnnnnnnnnnnnnnnnnnnnnnnnnnnnnnnnnnnnnnnnnnnnnnnnnnnnnnnnnnnnnnnnnnnnnnnnnnnnnnnnnnnnnnnnnnnnnnnnnnnnnnnnnnnnnnnnnnnnnnnnnnnnnnnnnnnnnnnnnnnnnnnnnnnnnnnnnnnnnnnnnnnnnnnnnnnnnnnntctgcaccctaattgttagatggaatctgctgccactgccacccatgcagaaaagttaaagcaaaacttggaaaaatacatgaaagagatgaacaaggcttatcacatttttcargttgtttggtccaaggagtgataaaggagacaagaagtctttgtgctggagaagagataactgaaaggatgcaaagaaggaagtctgtaaaataaagagtaggaaacatgcagtggagtaggaagagattagtaaatgtttctcccagaaggggagaatatttggaaataggtttaaaactagaaagaaacagtcttttttcccaactttaataaaccgtggaatgctgctgcaaaagattgtcaatataaaaataaaaaaattgactggtttcaattcagtactataaaggtgggtca

SEQ ID NO: 43179 - DNA, 599 bp, Chicken  19866894280828_1
  misc_feature (1)..(126): n is any nucleotide
nnnnnnnnnnnnnnnnnnnnnnnnnnnnnnnnnnnnnnnnnnnnnnnnnnnnnnnnnnnnnnnnnnnnnnnnnnnnnnnnnnnnnnnnnnnnnnnnnnnnnnnnnnnnnnnnnnnnnnnnnnnnnnaaaaactgacagctttaaatcctgtgaacacgaaagccctggagggtcaggatttcagatcgctctctaagaaggagttagaggtgacaattagtcacgttgtgtctcctactaaaatctttattcagtggctgtcatcggaaagcaaactgaaaaggtactgaaattgagacraatcttctggagttaaagcatttgtgttacttattttttgaagtgtaattagagtaaactctgccattgaattagtcgtggcattaaatgaataccccgccttctaatgttgtcaagagaaaatagtctgtttttcaaataatgggatacagaaggtccaggatctctctgaataattcagctgttagagttttaattgggttgtgtctgtttcacagctttgtttcatgtatttctaacatgccataaagaaaaactgcaatcttatgctcctgttaaacagctaataaagttcttcc

SEQ ID NO: 43180 - DNA, 599 bp, Chicken  19866894280829_1
  misc_feature (1)..(102): n is any nucleotide
nnnnnnnnnnnnnnnnnnnnnnnnnnnnnnnnnnnnnnnnnnnnnnnnnnnnnnnnnnnnnnnnnnnnnnnnnnnnnnnnnnnnnnnnnnnnnnnnnnnnnntataatacccctatctgaaaggggcccataaggatcgctgagtccaactcctggcttcacgcagcaccattgcaaaatcagaccagatgcctgagagcattgtccagtaaccccatctgtaataaccttttgggcccatcagccaattgctcacccactgcattacgtttttgtctagtggtatgctgaatgcttttyccagaaggatactgtgagaaacagcattgaaagctttatgaaatccagwaagataacatcaactgtcttcctttggccaaccagctgggtgaccttgtcataaaagcagattaagttagttaaacgggactttcctctcatgaactcgtgttggcagtgaccgatgatcacattgtccttcgaatgtttttcaataaaacaagccaaggagtttccttttctgttaccatgccttgctgttattgcactattagctcacgacctggcttgcatggtttcatctttcattctttcagctg

SEQ ID NO: 43181 - DNA, 599 bp, Chicken  19866894280829_2
  misc_feature (1)..(53): n is any nucleotide
nnnnnnnnnnnnnnnnnnnnnnnnnnnnnnnnnnnnnnnnnnnnnnnnnnnnntataatacccctatctgaaaggggcccataaggatcgctgagtccaactcctggcttcacgcagcaccattgcaaaatcagaccagatgcctgagagcattgtccagtaaccccatctgtaataaccttttgggcccatcagccaattgctcacccactgcattacgtttttgtctagtggtatgctgaatgcttttyccagaaggatactgtgagaaacagcattgaaagctttatgaaatccagwaagataacatcaactgtcttcctttggccaaccagctgggtgaccttgtcataaaagcagattaagttagttaaacgggactttcctctcatgaactcgtgttggcagtgaccgatgatcacattgtccttcgaatgtttttcaataaaacaagccaaggagtttccttttctgttaccatgccttgctgttattgcactattagctcacgacctggcttgcatggtttcatctttcattctttcagctgtcactgctgccaaaggaaatgctcagattttgtgtgaaatgactttgtg

SEQ ID NO: 43182 - DNA, 600 bp, Chicken  19866894280831_1
aagagccaatttatacagcactcacctgcagcctgtgtgctacatgagtcttacctagggtctgtaaagctgcccatccctgtggtgtaaaagcaaggaccaaataggttaatatatcacgtaggaaagatggggaaggcagaggaacaggaatgctgcaaaggatcttgcagatagaagggtcacagttcagttgcctgagcgtggttaactaatgttacatatttaaggtgacctatagggcattaaaggtacatggcagataaacggcagatacatgaagggatttaggaaggtggytacatcccatatcatctggtgtggaactaggtgggatacacctgcctaactcaaaacactttgtatgtaaataacagaaataaatccaggtgaagaatatcttgattccaggctaacatgtttaagctaggcatctctatttagatgtctatgtaaattggtgtctaaacttctattttttgacagtataagactgactcaactgaagaaatgtaagcgattcagttgcctaaccatggatttctactagcgttcataatgccatagggtattcccctctggcttgcatctttgcctcag

SEQ ID NO: 43183 - DNA, 600 bp, Chicken  19866894280837_1
acttgagtgttaaaatgagttcaagcctctaaaagcagagctgggttgggttcttgagagccagcctggggcatacatccaaaccttgttctgaaagagcactttccatggggagagacatccacgttagttccacttccagaatattttgtgtttgcacaattgctgtaaagttaccgtctttcattaacttctgtttgctgtcacctactccattataagcctccttggggcactaaagccttcagaaatgagaatggatagaaactcagtgtaaatccaaacaagaagaaagcactrcatattatttagaattagtatttgatgcctcacggaatatttgctcccatttttgttggccttttgctgagaatgtgctgtgctctggggactgagcatgggaaactcacttggggttgtgtgtgaaggattagaggtgaaggagggagaaaatctggcctcatccaaaggaattaagaaagtttctgctaaacgatggcttcagaatttagttttccaaattgaaatgactttacagctcatcttgaggcaggtgttccaaatgccgtgtgccaaatgtctctttaaaattaaattcat

SEQ ID NO: 43184 - DNA, 600 bp, Chicken  19866894280844_1
tgcctactccccattgctgatatgggtccaaaaaagaatgaagtcaatggaaaaaaaatccagagaagtcagaccatcttagcttcaacaggagtagtctcaggttcttatcttattaattagagtcattattaccttgggaaggagttagaactgggtgacaatgctcgtaggaatagaaatagactcaatttaagaactgactgaggccattgacctgcccattaattaatccttgctatctggagcggtcttacagaaattttttagacgtgatcaagtttgaagaatgtctgattytacactattagattagaagttctttatttcctagaatcactgaatggcttgggttggcagggacctcagagatcatccggttctatttctaggagtcagaaccataaaggtttgaaaasatcctctcagctcctccacaaagccttacrttcacacttgagaaaagaaacttcttcgttacaatggaacagatactgaatactctatgtagtgtatagtgcagaaaaaaccctcagatctttaggcctctgaaggattctagtgttgcctaattgtaaaacgattatgctacagatagtt

SEQ ID NO: 43185 - DNA, 600 bp, Chicken  19866894280844_2
ttagagtcattattaccttgggaaggagttagaactgggtgacaatgctcgtaggaatagaaatagactcaatttaagaactgactgaggccattgacctgcccattaattaatccttgctatctggagcggtcttacagaaattttttagacgtgatcaagtttgaagaatgtctgattytacactattagattagaagttctttatttcctagaatcactgaatggcttgggttggcagggacctcagagatcatccggttctatttctaggagtcagaaccataaaggtttgaaaasatcctctcagctcctccacaaagccttacrttcacacttgagaaaagaaacttcttcgttacaatggaacagatactgaatactctatgtagtgtatagtgcagaaaaaaccctcagatctttaggcctctgaaggattctagtgttgcctaattgtaaaacgattatgctacagatagttaaaccagttaacaagacaagcactgtcccttagtagcagtaatccaaaatattctgcattactgggatgcctgctttccagttttcaagcactttgcaaaccattaactcaaaatgaat

SEQ ID NO: 43186 - DNA, 600 bp, Chicken  19866894280844_3
agaactgggtgacaatgctcgtaggaatagaaatagactcaatttaagaactgactgaggccattgacctgcccattaattaatccttgctatctggagcggtcttacagaaattttttagacgtgatcaagtttgaagaatgtctgattytacactattagattagaagttctttatttcctagaatcactgaatggcttgggttggcagggacctcagagatcatccggttctatttctaggagtcagaaccataaaggtttgaaaasatcctctcagctcctccacaaagccttacrttcacacttgagaaaagaaacttcttcgttacaatggaacagatactgaatactctatgtagtgtatagtgcagaaaaaaccctcagatctttaggcctctgaaggattctagtgttgcctaattgtaaaacgattatgctacagatagttaaaccagttaacaagacaagcactgtcccttagtagcagtaatccaaaatattctgcattactgggatgcctgctttccagttttcaagcactttgcaaaccattaactcaaaatgaattaattcgcacccttgcagtacaaggagcat

SEQ ID NO: 43187 - DNA, 600 bp, Chicken  19866894280845_1
taccaggccacaacgcatctctcacattcctgttctcaaatacaacagcttgccttattagcgagcccttgctacagcacactgcctgcctagaagcaagcaaagccctggatctgcctttgcaactattttctgcttgtagcacctcctggttgagcaccacctgcaatgctcactcccatgctgcctctccctgcctccagctcactaacgaagctgttaaataggaagcactgattgccatgcaagccccctccaccctacacacagctgcagcaccccatccctcccatcacccayccctcccatcacccatccctcccctctgcttgcagccctcyaggcaatctytgctctttatgacagtgtttacaacccaggctgctaaatctcagcccragacaaagatttcacgtgaatctgcacccaaatgcatccgtgaatctgggtgttgcacggtctcttcattctgtcattccaacctaaagggcagagccagctgagatgcttttgtcagagccctgaggaatcacatctgtttcccaaaccctcaaacctctcttctgaaatggatcctgaagcttcattttcattggtggg

SEQ ID NO: 43188 - DNA, 600 bp, Chicken  19866894280845_2
acaacagcttgccttattagcgagcccttgctacagcacactgcctgcctagaagcaagcaaagccctggatctgcctttgcaactattttctgcttgtagcacctcctggttgagcaccacctgcaatgctcactcccatgctgcctctccctgcctccagctcactaacgaagctgttaaataggaagcactgattgccatgcaagccccctccaccctacacacagctgcagcaccccatccctcccatcacccayccctcccatcacccatccctcccctctgcttgcagccctcyaggcaatctytgctctttatgacagtgtttacaacccaggctgctaaatctcagcccragacaaagatttcacgtgaatctgcacccaaatgcatccgtgaatctgggtgttgcacggtctcttcattctgtcattccaacctaaagggcagagccagctgagatgcttttgtcagagccctgaggaatcacatctgtttcccaaaccctcaaacctctcttctgaaatggatcctgaagcttcattttcattggtggggaaatatatatatacatatatatatatatatataacgttat

SEQ ID NO: 43189 - DNA, 600 bp, Chicken  19866894280845_3
gccttattagcgagcccttgctacagcacactgcctgcctagaagcaagcaaagccctggatctgcctttgcaactattttctgcttgtagcacctcctggttgagcaccacctgcaatgctcactcccatgctgcctctccctgcctccagctcactaacgaagctgttaaataggaagcactgattgccatgcaagccccctccaccctacacacagctgcagcaccccatccctcccatcacccayccctcccatcacccatccctcccctctgcttgcagccctcyaggcaatctytgctctttatgacagtgtttacaacccaggctgctaaatctcagcccragacaaagatttcacgtgaatctgcacccaaatgcatccgtgaatctgggtgttgcacggtctcttcattctgtcattccaacctaaagggcagagccagctgagatgcttttgtcagagccctgaggaatcacatctgtttcccaaaccctcaaacctctcttctgaaatggatcctgaagcttcattttcattggtggggaaatatatatatacatatatatatatatatataacgttatttgtgatgcc

SEQ ID NO: 43190 - DNA, 600 bp, Chicken  19866894280845_4
gcaaagccctggatctgcctttgcaactattttctgcttgtagcacctcctggttgagcaccacctgcaatgctcactcccatgctgcctctccctgcctccagctcactaacgaagctgttaaataggaagcactgattgccatgcaagccccctccaccctacacacagctgcagcaccccatccctcccatcacccayccctcccatcacccatccctcccctctgcttgcagccctcyaggcaatctytgctctttatgacagtgtttacaacccaggctgctaaatctcagcccragacaaagatttcacgtgaatctgcacccaaatgcatccgtgaatctgggtgttgcacggtctcttcattctgtcattccaacctaaagggcagagccagctgagatgcttttgtcagagccctgaggaatcacatctgtttcccaaaccctcaaacctctcttctgaaatggatcctgaagcttcattttcattggtggggaaatatatatatacatatatatatatatatataacgttatttgtgatgcctgcgaattatggagagcaaggtgctcccatgtttgcaaaccagctggg

SEQ ID NO: 43191 - DNA, 600 bp, Chicken  19866894280846_1
actccagtcatgagtggtgggctgccatggaaagggcttggacagaaggctgaaacaccaacagctccatgctgttggacagtagacttctgatagtcatccctttcatcttcatgcaatttggattttaaaaagcttctgctgaatggtttagttttagggctccaagagatcttgcgtagggtcattgcatttagcacaggcatgtgatgagcgcacatttggagagactaggggctcaggagccctcgggaaggcatgatgtaggagagagctgctgctgtccttacagaaaggtakgcaaccttcagccctttccctgcttgcgtctggagcccttgaggaagctggcagccagagagagcttcttgaatgtctcttttggagaaaccagcttcttcctggccactttcccagatgctcctcaataaaacaggaaatgggagcatgatctggacagtgcatagcagtaaatctgatcattttgagtgctcaaaagtcctggctgcaatgaggtgtaatgttattctggtgcaatattattctacttgtatgcatctgcatcagagatcttctctgctccggatctttaggttatat

SEQ ID NO: 43192 - DNA, 600 bp, Chicken  19866894280848_1
actgacatctgtgctgctgttgattttacattccctcgtggtctttcattcccacttgcggctctctggagggaactccatctcctaaccaggccacttctttaaagcacagctgtccacttttcctctgcttcactctctctccttgtgcatgctgcccaaagagctgacagcctgaatccaaacatgtcaacagggcaaaacgatgggcgttgtcatacacttcaaaagccattgtcacaccttgctctcagtcttctcatccagtttaatgtctggaccattcaacttctgcgcttsctttttagatcttacatggtcacggggcagacctatagtcgcaaggtggatattgaagtcctgtctgtactggccagtctgggggcatctgttcacaaggtgagcaccctttgcatattcagcagggagaaggatgagaaggtgcttgyggtgctgaacgcttgctttgggaaatattaattggtgtttgttgttcggttcctctttgggatcacgtaaatcaccattgggtgcatgcctaggcatcagatatcaaagtccaggtgttagtctaatctgtgctgaattggtccaagcaga

SEQ ID NO: 43193 - DNA, 571 bp, Chicken  19866894280848_2
gcatgctgcccaaagagctgacagcctgaatccaaacatgtcaacagggcaaaacgatgggcgttgtcatacacttcaaaagccattgtcacaccttgctctcagtcttctcatccagtttaatgtctggaccattcaacttctgcgcttsctttttagatcttacatggtcacggggcagacctatagtcgcaaggtggatattgaagtcctgtctgtactggccagtctgggggcatctgttcacaaggtgagcaccctttgcatattcagcagggagaaggatgagaaggtgcttgyggtgctgaacgcttgctttgggaaatattaattggtgtttgttgttcggttcctctttgggatcacgtaaatcaccattgggtgcatgcctaggcatcagatatcaaagtccaggtgttagtctaatctgtgctgaattggtccaagcagagtaaatgtctttcccagtgcatgtgagtttttaaatttcaccattttctccccatcagttgcgtctctgataatagtgctattctggctggccttgtggattcttctcatttatttatct

SEQ ID NO: 43194 - DNA, 600 bp, Chicken  19866894280851_1
ttctgtgcagctcatgctgttagagttgtgctgcacgctattctgctgctgctcatttattaatttgggatcggctgaaacgtgacactgcgtaataaggaactcaccagctttaataacattaggaataaaaggaagcctctgtggggccagagattcgagcacaaaggaaaggccacccctctgagcaagcccttggccctgtgtctccggccttcagccgacacctcctcctggttgtgcttttcccagtttccagacctgaagttgggatcgtcagcaacaaaggagtaatagcgkggagaaagtcaggtgggcaataarggatttccactaygtagattatgtagataactaagacaagtctctccaaaacagtgatttttctgyctttgcattggtgctttccatttctcaagttccttatggagagcctcagcggggctcccctggacatgccgcagttcccccgcctctcctcagccccaagggactcctgagaaagatgaygtgctcgccacagagccactgtgatcctctcccactaatggaaggagagggggcagggtggtgtagctgtaattaaggctgtgaagagtt

SEQ ID NO: 43195 - DNA, 600 bp, Chicken  19866894280851_2
gttgtgctgcacgctattctgctgctgctcatttattaatttgggatcggctgaaacgtgacactgcgtaataaggaactcaccagctttaataacattaggaataaaaggaagcctctgtggggccagagattcgagcacaaaggaaaggccacccctctgagcaagcccttggccctgtgtctccggccttcagccgacacctcctcctggttgtgcttttcccagtttccagacctgaagttgggatcgtcagcaacaaaggagtaatagcgkggagaaagtcaggtgggcaataarggatttccactaygtagattatgtagataactaagacaagtctctccaaaacagtgatttttctgyctttgcattggtgctttccatttctcaagttccttatggagagcctcagcggggctcccctggacatgccgcagttcccccgcctctcctcagccccaagggactcctgagaaagatgaygtgctcgccacagagccactgtgatcctctcccactaatggaaggagagggggcagggtggtgtagctgtaattaaggctgtgaagagtttagctgaagagaaattagatttat

SEQ ID NO: 43196 - DNA, 600 bp, Chicken  19866894280851_3
ctattctgctgctgctcatttattaatttgggatcggctgaaacgtgacactgcgtaataaggaactcaccagctttaataacattaggaataaaaggaagcctctgtggggccagagattcgagcacaaaggaaaggccacccctctgagcaagcccttggccctgtgtctccggccttcagccgacacctcctcctggttgtgcttttcccagtttccagacctgaagttgggatcgtcagcaacaaaggagtaatagcgkggagaaagtcaggtgggcaataarggatttccactaygtagattatgtagataactaagacaagtctctccaaaacagtgatttttctgyctttgcattggtgctttccatttctcaagttccttatggagagcctcagcggggctcccctggacatgccgcagttcccccgcctctcctcagccccaagggactcctgagaaagatgaygtgctcgccacagagccactgtgatcctctcccactaatggaaggagagggggcagggtggtgtagctgtaattaaggctgtgaagagtttagctgaagagaaattagatttatttacatgttgctc

SEQ ID NO: 43197 - DNA, 600 bp, Chicken  19866894280851_4
cgtaataaggaactcaccagctttaataacattaggaataaaaggaagcctctgtggggccagagattcgagcacaaaggaaaggccacccctctgagcaagcccttggccctgtgtctccggccttcagccgacacctcctcctggttgtgcttttcccagtttccagacctgaagttgggatcgtcagcaacaaaggagtaatagcgkggagaaagtcaggtgggcaataarggatttccactaygtagattatgtagataactaagacaagtctctccaaaacagtgatttttctgyctttgcattggtgctttccatttctcaagttccttatggagagcctcagcggggctcccctggacatgccgcagttcccccgcctctcctcagccccaagggactcctgagaaagatgaygtgctcgccacagagccactgtgatcctctcccactaatggaaggagagggggcagggtggtgtagctgtaattaaggctgtgaagagtttagctgaagagaaattagatttatttacatgttgctctgatgctgatgaagcaccagctatttgggagaacttctaattaaccctaattt

SEQ ID NO: 43198 - DNA, 600 bp, Chicken  19866894280851_5
cggccttcagccgacacctcctcctggttgtgcttttcccagtttccagacctgaagttgggatcgtcagcaacaaaggagtaatagcgkggagaaagtcaggtgggcaataarggatttccactaygtagattatgtagataactaagacaagtctctccaaaacagtgatttttctgyctttgcattggtgctttccatttctcaagttccttatggagagcctcagcggggctcccctggacatgccgcagttcccccgcctctcctcagccccaagggactcctgagaaagatgaygtgctcgccacagagccactgtgatcctctcccactaatggaaggagagggggcagggtggtgtagctgtaattaaggctgtgaagagtttagctgaagagaaattagatttatttacatgttgctctgatgctgatgaagcaccagctatttgggagaacttctaattaaccctaatttagttgatatgctctttagaagccccattccctctgtactttgcacgaggtaaaaagcaataataacaacaaattaacagtcttaaaaagggacacttctttgcatgaactgagcccccag

SEQ ID NO: 43199 - DNA, 600 bp, Chicken  19866894280853_1
attaaaaccattttcatatttccatgtgaaaagtcacccagctgcaaaaattgatagagtatctgacttctgtaatactgtacaataatcactcgttcaataattattggagaaaaaaaatcatgttagattgtaatatgactgcaagtatagattcagctaaacactcactcaccaagaattcataggtggtctcatcacagtctaattagatgcttcacttagagaagaaattgctggacttggatctgtttaaacatattttaagtacattggcctcagttcagctccagaagtttyagaggtcctttacaatctggcaaagtttaaaaagttgacgaaggtaattcattgccatttcactaaagaatgacacaatcctttttcatttgaaatgatctgcaaaaatgtttaactaatgattaataaaatcacatggttgaaattttccagaatctttaataaatcaacgttcaaaatatttggatttataaatacaaggttacaatggtargtaaatactttaacctttcataaaataatatttttcacaaatagtatcacatcccccttgtcttagtagaaaggaaatcaattccc

SEQ ID NO: 43200 - DNA, 587 bp, Chicken  19866894280853_2
gcttcacttagagaagaaattgctggacttggatctgtttaaacatattttaagtacattggcctcagttcagctccagaagtttyagaggtcctttacaatctggcaaagtttaaaaagttgacgaaggtaattcattgccatttcactaaagaatgacacaatcctttttcatttgaaatgatctgcaaaaatgtttaactaatgattaataaaatcacatggttgaaattttccagaatctttaataaatcaacgttcaaaatatttggatttataaatacaaggttacaatggtargtaaatactttaacctttcataaaataatatttttcacaaatagtatcacatcccccttgtcttagtagaaaggaaatcaattcccttcccatttaaagcggtataaaaataacatttgcccttttccaaatatcaaagaaaaacaatgaactaatgacactatgatgctgtaaggaacaacatttgcattactggcattgtctgccagccttttctaaaacagatggcaacataagtcagaaatttctatactagctgacagtttgccagtgtcactgagcaacaa

SEQ ID NO: 43201 - DNA, 457 bp, Chicken  19866894280859_1
tcaagaaaggagagtgctaccgagattcaagaagtactgatgatttttaaacacacagcaatttctctcagtggttgtctcaacacatattttcataaaacatgccccaaattaccgtgagtccaatacgtgcaggagcaactgctgaagtgttgtcccatttaaatcataggatcacagaatgttccgagtaggaagggacacacggagatcagagtcaaactcccagccccacaaaggatcacctataaatcaaactacagatctgagagcactgcccaaatgtttcttaaactcagkcttgttgttgtgaccacttctctgggggggctgttccagtgccccaaagtcttatataattacagaaattgatccagaaggtgtaccctgtaacagtgctgtcagattctctttctgtcttatgccaggaaatacacagagtatgttagccctcaca

SEQ ID NO: 43202 - DNA, 600 bp, Chicken  19866894280866_1
tgttaagattgttattaaactttatggaccataaaccccatggaaacaaggaaagtgaacagctatgctattacaatagtgtcaaaacaggagacatatttcataccttcaaaactgtaagcctgcctacgtgcagcatctcagctcttgtgggctgcctcaaactacagcatttatttaatctctaaattaaacgcaatatagctaatacacagagcctggaaaaatatgttccttttagtttaaagttcagcttcataaatctagctttgcagactgctttctgaaatgggagtcgakttttttttttataaatatttgtcagacatccatcatctcttaatatttcctgtcatgggaatctacttaattccaaactaaatccatcttgatttccactaaatgccccgactcactcagtacaacaacagagtcctgattaggggagacagacaaacaaggggatgaaaacacatttgacacacagttgtgggggtgggaggagggaaagcagagatgctaaatgcagcctggctgaacaggggtatctatttactttcaaatatatttatttkgagagaggaactgtcaagctctgtg

SEQ ID NO: 43203 - DNA, 440 bp, Chicken  19866894280866_2
actgctttctgaaatgggagtcgatttttttttttataaatatttgtcagacatccatcatctcttaatatttcctgtcatgggaatctacttaattccaaactaaatccatcttgatttccactaaatgccccgactcactcagtacaacaacagagtcctgattaggggagacagacaaacaaggggatgaaaacacatttgacacacagttgtgggggtgggaggagggaaagcagagatgctaaatgcagcctggctgaacaggggtatctatttactttcaaatatatttatttkgagagaggaactgtcaagctctgtgtgtgactgtgtttaatgtgttagcaggcctgtcccttgtacgtctatatttgcttttcagcgtcctcctgcaaattgcttttgactgggccaagttacagcagtttaaatatcat

SEQ ID NO: 43204 - DNA, 599 bp, Chicken  19866894280869_1
  misc_feature (1)..(17): n is any nucleotide
nnnnnnnnnnnnnnnnncttgaagggaacatataaagaggagggggaacggctgtttatgagggtggatagtgataggacaagggggggtagttttaaactgacacaggggaggtttaggccggatattaggaagaagtttttcacccagagggtggtgacgcactgaacaggttgcccaaggaggctgtggatgccccatccctgcaggcattcaaggccaggctggatgtggctctgggcagcctggtctgctggttggtgaccctgcacatagcagggggttggaactggatgagcrytgtggtccttttcaayccaggccattctatgattctatgaaacctcccaaatgcacagaaagacagctggaagaagcatcactgcagtgctggggcctggtcacagcagagaaggcagtaagcaaacagatgtggtcaacatgatttttagaatattatgaagtcgtgttgcagtaggatgccagaaatgagcacctagtgcacygaatgaaagcatctttcctgcaaactgcctccccttggttttctctacctgcmtatcaatggctggtgtttgggtaaggtatggtttgctaca

SEQ ID NO: 43205 - DNA, 599 bp, Chicken  19866894280869_2
  misc_feature (1)..(16): n is any nucleotide
nnnnnnnnnnnnnnnncttgaagggaacatataaagaggagggggaacggctgtttatgagggtggatagtgataggacaagggggggtagttttaaactgacacaggggaggtttaggccggatattaggaagaagtttttcacccagagggtggtgacgcactgaacaggttgcccaaggaggctgtggatgccccatccctgcaggcattcaaggccaggctggatgtggctctgggcagcctggtctgctggttggtgaccctgcacatagcagggggttggaactggatgagcrytgtggtccttttcaayccaggccattctatgattctatgaaacctcccaaatgcacagaaagacagctggaagaagcatcactgcagtgctggggcctggtcacagcagagaaggcagtaagcaaacagatgtggtcaacatgatttttagaatattatgaagtcgtgttgcagtaggatgccagaaatgagcacctagtgcacygaatgaaagcatctttcctgcaaactgcctccccttggttttctctacctgcmtatcaatggctggtgtttgggtaaggtatggtttgctacat

SEQ ID NO: 43206 - DNA, 600 bp, Chicken  19866894280869_3
cttgaagggaacatataaagaggagggggaacggctgtttatgagggtggatagtgataggacaagggggggtagttttaaactgacacaggggaggtttaggccggatattaggaagaagtttttcacccagagggtggtgacgcactgaacaggttgcccaaggaggctgtggatgccccatccctgcaggcattcaaggccaggctggatgtggctctgggcagcctggtctgctggttggtgaccctgcacatagcagggggttggaactggatgagcrytgtggtccttttcaayccaggccattctatgattctatgaaacctcccaaatgcacagaaagacagctggaagaagcatcactgcagtgctggggcctggtcacagcagagaaggcagtaagcaaacagatgtggtcaacatgatttttagaatattatgaagtcgtgttgcagtaggatgccagaaatgagcacctagtgcacygaatgaaagcatctttcctgcaaactgcctccccttggttttctctacctgcmtatcaatggctggtgtttgggtaaggtatggtttgctacatcataaccatcatgaagc

SEQ ID NO: 43207 - DNA, 600 bp, Chicken  19866894280869_4
caggcattcaaggccaggctggatgtggctctgggcagcctggtctgctggttggtgaccctgcacatagcagggggttggaactggatgagcrytgtggtccttttcaayccaggccattctatgattctatgaaacctcccaaatgcacagaaagacagctggaagaagcatcactgcagtgctggggcctggtcacagcagagaaggcagtaagcaaacagatgtggtcaacatgatttttagaatattatgaagtcgtgttgcagtaggatgccagaaatgagcacctagtgcacygaatgaaagcatctttcctgcaaactgcctccccttggttttctctacctgcmtatcaatggctggtgtttgggtaaggtatggtttgctacatcataaccatcatgaagcggttaaacaaggagaactctggcagtcttttcctggagtcttgcaatctgtagcaaaaggtgagatggatgcaggggtagttgttattatgatgagtgggttactgttacctcctctgcagattaagccaataatatctagacaggctgtctcctcatcccctcaggggttcagaagaagatctgtgtg

SEQ ID NO: 43208 - DNA, 600 bp, Chicken  19866894280869_5
ggtgaccctgcacatagcagggggttggaactggatgagcrytgtggtccttttcaayccaggccattctatgattctatgaaacctcccaaatgcacagaaagacagctggaagaagcatcactgcagtgctggggcctggtcacagcagagaaggcagtaagcaaacagatgtggtcaacatgatttttagaatattatgaagtcgtgttgcagtaggatgccagaaatgagcacctagtgcacygaatgaaagcatctttcctgcaaactgcctccccttggttttctctacctgcmtatcaatggctggtgtttgggtaaggtatggtttgctacatcataaccatcatgaagcggttaaacaaggagaactctggcagtcttttcctggagtcttgcaatctgtagcaaaaggtgagatggatgcaggggtagttgttattatgatgagtgggttactgttacctcctctgcagattaagccaataatatctagacaggctgtctcctcatcccctcaggggttcagaagaagatctgtgtgctctgtgttcttccattcttctctcctctgatgagtacaggtctgtaaaatga

SEQ ID NO: 43209 - DNA, 600 bp, Chicken  19866894280869_6
gcaatctgtagcaaaaggtgagatggatgcaggggtagttgttattatgatgagtgggttactgttacctcctctgcagattaagccaataatatctagacaggctgtctcctcatcccctcaggggttcagaagaagatctgtgtgctctgtgttcttccattcttctctcctctgatgagtacaggtctgtaaaatgaagaaacacagaaaaaaagccctcttaccacccaacaggtgcctcgcttttctcaccccttcacctgtttcaaaaagtcccttcctaaagtcttaagtagrgtattgtatcccatggaaaacgtttgggatagttcagttctccagcactgtcataaatggtcttccttgtatgtgccacctgccctgtgccaaagggtagatctgttcctggggcccttcctatagcctgggctcttcttgcttctcaggggaaaggaggaagaagaggagaagaggaggccatcagctgctgaaggacaagcaccttccaagccccgaaccgctgcttcctgcatcagaattggttctgagatcgagtcaccattaagaacagctgggtttttgtaactgctccctggc

SEQ ID NO: 43210 - DNA, 599 bp, Chicken  19866894280878_1
  misc_feature (1)..(94): n is any nucleotide
nnnnnnnnnnnnnnnnnnnnnnnnnnnnnnnnnnnnnnnnnnnnnnnnnnnnnnnnnnnnnnnnnnnnnnnnnnnnnnnnnnnnnnnnnnnnnnattcgcactgagacagaggtctcttccttgaagaactcatggatagactttaaaaatcactacttactgttgcatcaacgtgtgcagcctatggcttcacaaatgcatcatgctgagtaaccagcatatgtcagtaggaaaacataactgaaggttattcagaagtcctattgagagaatgatggtctaagtccagtcattctctygtgcttaccctcgtttgtgacatgatcatttttagtaatcttttcccccagcrgctgagttgtatagtgtggtacttcaggtgcagatagtgttttttactatatgctctcctacagtttggtatttgttctccactttgggttttgcgtcacatactaaggactttaacagctgagatttattcattgaaagctatacattttgtcttaggtctgttgctgctaagaaagtgtgagagactgagagaaatatgaggcacacaaggcaggaatattcaataattgggtgttctgttgtt

SEQ ID NO: 43211 - DNA, 599 bp, Chicken  19866894280878_2
  misc_feature (1)..(41): n is any nucleotide
nnnnnnnnnnnnnnnnnnnnnnnnnnnnnnnnnnnnnnnnnattcgcactgagacagaggtctcttccttgaagaactcatggatagactttaaaaatcactacttactgttgcatcaacgtgtgcagcctatggcttcacaaatgcatcatgctgagtaaccagcatatgtcagtaggaaaacataactgaaggttattcagaagtcctattgagagaatgatggtctaagtccagtcattctctygtgcttaccctcgtttgtgacatgatcatttttagtaatcttttcccccagcrgctgagttgtatagtgtggtacttcaggtgcagatagtgttttttactatatgctctcctacagtttggtatttgttctccactttgggttttgcgtcacatactaaggactttaacagctgagatttattcattgaaagctatacattttgtcttaggtctgttgctgctaagaaagtgtgagagactgagagaaatatgaggcacacaaggcaggaatattcaataattgggtgttctgttgtttttttttctgctgtttacctagtttayttaatagaraattgaagaatttaatc

SEQ ID NO: 43212 - DNA, 600 bp, Chicken  19866894280878_3
catttttagtaatcttttcccccagcrgctgagttgtatagtgtggtacttcaggtgcagatagtgttttttactatatgctctcctacagtttggtatttgttctccactttgggttttgcgtcacatactaaggactttaacagctgagatttattcattgaaagctatacattttgtcttaggtctgttgctgctaagaaagtgtgagagactgagagaaatatgaggcacacaaggcaggaatattcaataattgggtgttctgttgtttttttttctgctgtttacctagtttayttaatagaraattgaagaatttaatctgcattatgtatatttttcagtttagttatcatgtgttaattacccaaagcagctgcctctccctgcccctcttaagtgttgcatgacttcttttttaagtgaagagaaaaccctaagagtttgaggccactagtagtttgcaatgtacagctttgtatggtttttcagaggacttctgttaaactgttttgctgcactttatcccagcgatcgtgtagacagcaacacgtttttgtatttatgctgtttattttactatgctagctctattac

SEQ ID NO: 43213 - DNA, 600 bp, Chicken  19866894280878_4
taatcttttcccccagcrgctgagttgtatagtgtggtacttcaggtgcagatagtgttttttactatatgctctcctacagtttggtatttgttctccactttgggttttgcgtcacatactaaggactttaacagctgagatttattcattgaaagctatacattttgtcttaggtctgttgctgctaagaaagtgtgagagactgagagaaatatgaggcacacaaggcaggaatattcaataattgggtgttctgttgtttttttttctgctgtttacctagtttayttaatagaraattgaagaatttaatctgcattatgtatatttttcagtttagttatcatgtgttaattacccaaagcagctgcctctccctgcccctcttaagtgttgcatgacttcttttttaagtgaagagaaaaccctaagagtttgaggccactagtagtttgcaatgtacagctttgtatggtttttcagaggacttctgttaaactgttttgctgcactttatcccagcgatcgtgtagacagcaacacgtttttgtatttatgctgtttattttactatgctagctctattactggaatacg

SEQ ID NO: 43214 - DNA, 600 bp, Chicken  19866894280878_5
tgggtgtctatgctttagaagtagtcttaagcatttgttgaattgtttgcgtgtgcactctcaatgcgtagataaaaaaaatgtataaaatacaatacaaacatctctacataaatctgtataagttatgtaactcactctgaaagtaatgcctcttatttatttctatggaaactaaaataaatataaagagcacaataacactgtttggtagagcagattctcagctacaaaacactattttcctacacaaccaccttcattagttatgcgctttttgccagcaatgaagaagagtcmgcatgctgtgtgagtcaaaatctgcaccactggaggtgattgactgtttctsttgccactgctgaaacacaccacccaccgcctcgccatgcccacatccgctgtttggtctccataaatgttctgcaagcatcaatgaatgccggtgggtgcagtgtttccttcatggaagaattcagtgacacacatttgcatcatatgcacttccatatcagatgccattctgtcagactgcccttctggtgccatctgtcacagagcaacaacatgtagtgggatactggtgggaagaatcaacct

SEQ ID NO: 43215 - DNA, 600 bp, Chicken  19866894280878_6
gtgcactctcaatgcgtagataaaaaaaatgtataaaatacaatacaaacatctctacataaatctgtataagttatgtaactcactctgaaagtaatgcctcttatttatttctatggaaactaaaataaatataaagagcacaataacactgtttggtagagcagattctcagctacaaaacactattttcctacacaaccaccttcattagttatgcgctttttgccagcaatgaagaagagtcmgcatgctgtgtgagtcaaaatctgcaccactggaggtgattgactgtttctsttgccactgctgaaacacaccacccaccgcctcgccatgcccacatccgctgtttggtctccataaatgttctgcaagcatcaatgaatgccggtgggtgcagtgtttccttcatggaagaattcagtgacacacatttgcatcatatgcacttccatatcagatgccattctgtcagactgcccttctggtgccatctgtcacagagcaacaacatgtagtgggatactggtgggaagaatcaacctctactgctgcaccacccacatctgccttaggtagcatgggctaacgtaataa

SEQ ID NO: 43216 - DNA, 600 bp, Chicken  19866894280888_1
cgagagcatcctccttgcccctgaaaacatcactgtccttacaacagctcagtatggcagacactaaaattcaaaccgctttttaggaagaagtgattcctttctaaatggcggaatgaaaaaaaaaataggagaaaatccccattttaagcgttaagaagaaaacgtttattttaatggcgatctctttgtatcatctaaaaatgttaagcagtgctgttgctcccacctaaagatgtgatgaaaccttgtagcacagaacaatcagaggacttctcaactccagccctgcctgttttkcagtttcatagctgcctaaaggaaaacacctttattggaagaaataccatgcagccataggagcggctgccttgtttgttccaacgcctgacgctcatttgaaggattaactcagccattccttattcccattttcacttctaatgcgtttctgtttgtgtatcttccaacagaacatactgtgcttctgtttaactgtctatttatagtcatacaagaaataaacatataaaataaatgcatcttgatgcatagctgtgcaggagtacagatgttttattaatgaaaatgaatctagct

SEQ ID NO: 43217 - DNA, 600 bp, Chicken  19866894280894_1
tttataacacttcagggcccagtgcaatagaaaatatatctggctttctggtagtatatgttttgcaagtagattctagtgaatttgagttttatataggcttttgtgatacagggcccaaacatattttttgttggattggaccattaggtagctatagcaattctcaaaggacagcataagtaacaagcattttgaaccccagtgaacatataaatcattgacaaaaagaccaggatgagaaatcctttatttgtcatttctagtattccttacatacttaaaagaaacattaatgtytctaaaatattacttggcattctttcatccatacaaagacaaacataactctgctaaacatgttttcttcttctcgtagctatcaaaataattgtaaatactttataatacagcagaatcaactcaagtaaaaagaattactgtctttaaggcacgaaaaatatcatgaacttagaataaaagaaatattaaaagtatttctactttatctacttttcaaaaaataattataaaaatgttaaattaattgaaccacacctattaaagatgcaccctttcatcttctcaaggccttcatac

SEQ ID NO: 43218 - DNA, 600 bp, Chicken  19866894280894_2
caaagacaaacataactctgctaaacatgttttcttcttctcgtagctatcaaaataattgtaaatactttataatacagcagaatcaactcaagtaaaaagaattactgtctttaaggcacgaaaaatatcatgaacttagaataaaagaaatattaaaagtatttctactttatctacttttcaaaaaataattataaaaatgttaaattaattgaaccacacctattaaagatgcaccctttcatcttctcaaggccttcatacaaaacctctgctatcacactttgataacttacrtatctgtttctcttcttmatacttctttattttaaatgaaacatcagtgtgtccaaccttttcctttcctaataaatattattactaccgatttcacctccattgttcagggttgtcagctgagcattatctccagattctcagattcagatccgccattcactcccgcagaacagccttgctaagccagcctttcctatctagtcacaaagctgaagctttggtccagacactcattattatgatgacagatgagtgcaacatcttcatgtctctgatgaatccaacctggctccttct

SEQ ID NO: 43219 - DNA, 600 bp, Chicken  19866894280894_3
tgctaaacatgttttcttcttctcgtagctatcaaaataattgtaaatactttataatacagcagaatcaactcaagtaaaaagaattactgtctttaaggcacgaaaaatatcatgaacttagaataaaagaaatattaaaagtatttctactttatctacttttcaaaaaataattataaaaatgttaaattaattgaaccacacctattaaagatgcaccctttcatcttctcaaggccttcatacaaaacctctgctatcacactttgataacttacrtatctgtttctcttcttmatacttctttattttaaatgaaacatcagtgtgtccaaccttttcctttcctaataaatattattactaccgatttcacctccattgttcagggttgtcagctgagcattatctccagattctcagattcagatccgccattcactcccgcagaacagccttgctaagccagcctttcctatctagtcacaaagctgaagctttggtccagacactcattattatgatgacagatgagtgcaacatcttcatgtctctgatgaatccaacctggctccttcttaatgctttgcaggattc

SEQ ID NO: 43220 - DNA, 600 bp, Chicken  19866894280896_1
tactaatttccttttagatattctgttcatcccaaaatacctcttccagcctcagcatggttagatctggtcaggacagctgcacccccatctctccctgcctgtaagtcctaggagggtcctgccagttgtcccagtgcccaaggagccaggatgagctggtaggggcctgctgtgtcctgcctgcagccgggacagtccagtccagcacataccttccccctcctgagctggacaggagtcgttgcattcatttcctcctctgaaagcagcacgtgagctgagagctgtgcagcctcrgtcagctgcgtgggggcagagaggcagccggcattccccagggaaaggcgggcttaggggtatggtattgatttgttgagtggcaaagaaagaacagagcatctgggtcctgcgagaggatggcttaccccgccagagatcaatctgccagaagttagaagggcacaagtttcctttgtcccttttgtttcagggaaaaataaaaataaaaaatagaggtttttaaggattctggccctgaatatagagaatgacataacctctttatttggtggctgctttaaaaaacctgctcctggt

SEQ ID NO: 43221 - DNA, 600 bp, Chicken  19866894280896_2
ccctcctgagctggacaggagtcgttgcattcatttcctcctctgaaagcagcacgtgagctgagagctgtgcagcctcrgtcagctgcgtgggggcagagaggcagccggcattccccagggaaaggcgggcttaggggtatggtattgatttgttgagtggcaaagaaagaacagagcatctgggtcctgcgagaggatggcttaccccgccagagatcaatctgccagaagttagaagggcacaagtttcctttgtcccttttgtttcagggaaaaataaaaataaaaaatagaggrttttaaggattctggccctgaatatagagaatgacataacctctttatttggtggctgctttaaaaaacctgctcctggtgttttttaaagaactttaatggcgtctataactgaggaaatggtgactgctaaggatgggggatctagagagtatagtgcatgtttgttgcgttacttttggtttgaaatgagggcagcttcagggacaagtggccaagttcccaagctgtattttgtggttttacaatcacactttcaaaaatgttttctccttcctgttgctgtgtggaagatccact

SEQ ID NO: 43222 - DNA, 600 bp, Chicken  19866894280896_3
cctcctgagctggacaggagtcgttgcattcatttcctcctctgaaagcagcacgtgagctgagagctgtgcagcctcrgtcagctgcgtgggggcagagaggcagccggcattccccagggaaaggcgggcttaggggtatggtattgatttgttgagtggcaaagaaagaacagagcatctgggtcctgcgagaggatggcttaccccgccagagatcaatctgccagaagttagaagggcacaagtttcctttgtcccttttgtttcagggaaaaataaaaataaaaaatagaggtrtttaaggattctggccctgaatatagagaatgacataacctctttatttggtggctgctttaaaaaacctgctcctggtgttttttaaagaactttaatggcgtctataactgaggaaatggtgactgctaaggatgggggatctagagagtatagtgcatgtttgttgcgttacttttggtttgaaatgagggcagcttcagggacaagtggccaagttcccaagctgtattttgtggttttacaatcacactttcaaaaatgttttctccttcctgttgctgtgtggaagatccacta

SEQ ID NO: 43223 - DNA, 600 bp, Chicken  19866894280897_1
tgacatctcccaaacacattaaagcgtttctctcagtagggataaatgtatctctgttattaataggaatcatgactagcagcttactaatacataggtaaaatgtctgtatatgtagcaaagtacataaaggcagatgagtaaaatactgagcacttcaaaaaagaggaggcacataagttaaaaatagaaatgattattatattatgaagttctttataaattttggaatatcttacatcattctacagcactgggattagaaaaaaataacactgtgtggagttacatggagcatayttttaaatgtttatgagagagaaatgatcaaagggaaataccacgtggttaaaccagaggtttgtcacttgtgaacactaatattcaaaactttacgttatgtgtacaggtccaatttaatgcaaagaggtgttctgttttttctctctctctctctcttttattttcattaaaagagccaaccaggtaatttgagaaacgtacaacagtggtttacatttaacatattcctactgctgacatacaatcccatgttcacctgctcgctcagggtatgataatccaaaacacgttctgttt

SEQ ID NO: 43224 - DNA, 600 bp, Chicken  19866894280899_1
ttgtgagtcttcaaaagcaaaccatcaacatttcaagattcttagtaaaattttggcacactgctattttggtacttctgctgtgcagcagctgtctctccttctcagatttcaactatttccagccatataaatagtgaaaatccacatatgcctgcttttcctattaggccatgaatcacctgttgttccttcttatagcacaaagcaaatttccatacctctcacattccagagaagtctatgctcttcatttcttccacaaattcctttttaccttaattttcatcacttggcacrcttctcagagatggaatgaaagctttccatttttatacacttcaaacatcgctccatttgccacaattattttaagaactgcagaaatacatcaaaccaaataaaaaggagattttcatcgtagcattttcttgtaagttaaatctaatacaaaccractcccgttcctgtacccaaattatcttycttcaccactaggaaagcccaacagtatcagatatctgttattccaaggctggccattaacttttaatattcttaccctcctcgcaaacagtaatcaaccactgcagctccaaa

SEQ ID NO: 43225 - DNA, 600 bp, Chicken  19866894280899_2
cttttcctattaggccatgaatcacctgttgttccttcttatagcacaaagcaaatttccatacctctcacattccagagaagtctatgctcttcatttcttccacaaattcctttttaccttaattttcatcacttggcacrcttctcagagatggaatgaaagctttccatttttatacacttcaaacatcgctccatttgccacaattattttaagaactgcagaaatacatcaaaccaaataaaaaggagattttcatcgtagcattttcttgtaagttaaatctaatacaaaccractcccgttcctgtacccaaattatcttycttcaccactaggaaagcccaacagtatcagatatctgttattccaaggctggccattaacttttaatattcttaccctcctcgcaaacagtaatcaaccactgcagctccaaataactccagcccagacatcactgaaagcaagtacactgcagccactttccatctcagtcttaagtcagttttaaagagtactgcagttgttattatatatttggcaactggaatatgtagcagtagtatgtttataacaggtgtgacaattggtact

SEQ ID NO: 43226 - DNA, 600 bp, Chicken  19866894280899_3
tgttccttcttatagcacaaagcaaatttccatacctctcacattccagagaagtctatgctcttcatttcttccacaaattcctttttaccttaattttcatcacttggcacrcttctcagagatggaatgaaagctttccatttttatacacttcaaacatcgctccatttgccacaattattttaagaactgcagaaatacatcaaaccaaataaaaaggagattttcatcgtagcattttcttgtaagttaaatctaatacaaaccractcccgttcctgtacccaaattatcttycttcaccactaggaaagcccaacagtatcagatatctgttattccaaggctggccattaacttttaatattcttaccctcctcgcaaacagtaatcaaccactgcagctccaaataactccagcccagacatcactgaaagcaagtacactgcagccactttccatctcagtcttaagtcagttttaaagagtactgcagttgttattatatatttggcaactggaatatgtagcagtagtatgtttataacaggtgtgacaattggtactaaaataaacaacccttccctatatataca

SEQ ID NO: 43227 - DNA, 600 bp, Chicken  19866894280905_1
catggaaattaacacctcctggcaggctgcacaatggcaacagcccttgtgaactgaagagttcattcctacccctgcatacagcaagcaaaggtggccacaagaaagggtaggtgttttgcaaagcttgaggcagtatctctgggaactgaagcctcttactgaagcagtagtaccttccttgcccagacatatcaaggcttcatatatatatacatggatggatagatatgcacacacacacaatggtcttcttccattaattccgtaaaaatctcttctctatcaccatgcaagtgyttaacatgtagcaaacctgactacaygaattctgagctgccctcctggcagtggagacaagacctcaagcaggtgttgcccaacctaatgcctctacagctttttcacctttctagcacagttcaattgtcccatgactgctcctgcccttctttcctaaggattcctcaaacataagccagtgttacaataaattttgccctgctcacaattgtgtgagctatttgtggaaatgtgagaaacaaaatgagttttaagatcccttccaacccaaactcttctgtgattgctcacaaaagt

SEQ ID NO: 43228 - DNA, 600 bp, Chicken  19866894280905_2
ctgcacaatggcaacagcccttgtgaactgaagagttcattcctacccctgcatacagcaagcaaaggtggccacaagaaagggtaggtgttttgcaaagcttgaggcagtatctctgggaactgaagcctcttactgaagcagtagtaccttccttgcccagacatatcaaggcttcatatatatatacatggatggatagatatgcacacacacacaatggtcttcttccattaattccgtaaaaatctcttctctatcaccatgcaagtgyttaacatgtagcaaacctgactacaygaattctgagctgccctcctggcagtggagacaagacctcaagcaggtgttgcccaacctaatgcctctacagctttttcacctttctagcacagttcaattgtcccatgactgctcctgcccttctttcctaaggattcctcaaacataagccagtgttacaataaattttgccctgctcacaattgtgtgagctatttgtggaaatgtgagaaacaaaatgagttttaagatcccttccaacccaaactcttctgtgattgctcacaaaagtgcgttgcactgcacaccactcctgct

SEQ ID NO: 43229 - DNA, 597 bp, Chicken  19866894280910_1
  misc_feature (1)..(44): n is any nucleotide
nnnnnnnnnnnnnnnnnnnnnnnnnnnnnnnnnnnnnnnnnnnnttgggttttcctcttgccgcagtgttgcagctgcaggaactaaccataacagtaacagcagaagcaactcaaagcagtatatgtatattgccccatgggggataggaggggctttgtctttcagctgggaagtttaaagccaaaagctgtttgtccgtcctggtcctactggggttaccatagcagttaatccacgcacagtgtcaccagagctgcagattaagtgcagcctccctggcacaacagggctaattgwggctyttgggaatgcagaggctactgctgtgggcagatggggtcagagccatttatttacacagagccttgtccttcttggatgaaataagggggattagagacagacaggagtgtagacatcagttttcaggctcagcttgatttttcaataatcactttgggcagaggcgagacctgagattcatggggataaggagckggcggagcagcagctattctgcatccagcatgagtaggctgcagatacacccatcaccatcagatttcatgagaaatatttagggggggggggggg

SEQ ID NO: 43230 - DNA, 592 bp, Chicken  19866894280910_2
  misc_feature (1)..(39): n is any nucleotide
nnnnnnnnnnnnnnnnnnnnnnnnnnnnnnnnnnnnnnnttgggttttcctcttgccgcagtgttgcagctgcaggaactaaccataacagtaacagcagaagcaactcaaagcagtatatgtatattgccccatgggggataggaggggctttgtctttcagctgggaagtttaaagccaaaagctgtttgtccgtcctggtcctactggggttaccatagcagttaatccacgcacagtgtcaccagagctgcagattaagtgcagcctccctggcacaacagggctaattgwggctyttgggaatgcagaggctactgctgtgggcagatggggtcagagccatttatttacacagagccttgtccttcttggatgaaataagggggattagagacagacaggagtgtagacatcagttttcaggctcagcttgatttttcaataatcactttgggcagaggcgagacctgagattcatggggataaggagckggcggagcagcagctattctgcatccagcatgagtaggctgcagatacacccatcaccatcagatttcatgagaaatatttagggggggggggggg

SEQ ID NO: 43231 - DNA, 396 bp, Chicken  19866894280910_3
ttgggttttcctcttgccgcagtgttgcagctgcaggaactaaccataacagtaacagcagaagcaactcaaagcagtatatgtatattgccccatgggggataggaggggctttgtctttcagctgggaagtttaaagccaaaagctgtttgtccgtcctggtcctactggggttaccatagcagttaatccacgcacagtgtcaccagagctgcagattaagtgcagcctccctggcacaacagggctaattgwggctyttgggaatgcagaggctactgctgtgggcagatggggtkggcggagcagcagctattctgcatccagcatgagtaggctgcagatacacccatcaccatcagatttcatgagaaatatttagggggggggggggg

SEQ ID NO: 43232 - DNA, 600 bp, Chicken  19866894280911_1
aatgcttttgtttacacaaattcaactctgaattttatgagtagttcagagacagcttggaactttctatgtaatattcccctttagtctacattgtactaggtaatactgaagaagttatgtattgctatgtgaaagggggtgatgctgttatggcagatcacatacagtgatactatgtgtgcgtttttcagcaccaattacaatctagtgcagagtattctgccgtgccaatgttagtgcagtgtctggtttgggcttgctggggcatcgtcatcaggttaggaacaaaaacgtaaygcgataaggtgaaatcagatcaaagtaaaacagtacgttacatctccagtgtaatcctttctgggcaccacaattagaatttttcacttttatctrggaaggaaactgtttcaccaggaaatttcccaggacagcccaaacagtgtggctttgttctttgatttcttctctgaaacatgcagtgtctttcaggaatttcttctgttattattcttatttgctgcaattcatagcttgattattctttcagctggtacagattttgagtatttcatagacatgagatggagattttgaagg

SEQ ID NO: 43233 - DNA, 600 bp, Chicken  19866894280911_2
tactaggtaatactgaagaagttatgtattgctatgtgaaagggggtgatgctgttatggcagatcacatacagtgatactatgtgtgcgtttttcagcaccaattacaatctagtgcagagtattctgccgtgccaatgttagtgcagtgtctggtttgggcttgctggggcatcgtcatcaggttaggaacaaaaacgtaaygcgataaggtgaaatcagatcaaagtaaaacagtacgttacatctccagtgtaatcctttctgggcaccacaattagaatttttcacttttatctrggaaggaaactgtttcaccaggaaatttcccaggacagcccaaacagtgtggctttgttctttgatttcttctctgaaacatgcagtgtctttcaggaatttcttctgttattattcttatttgctgcaattcatagcttgattattctttcagctggtacagattttgagtatttcatagacatgagatggagattttgaaggcaagtgggaattcaagaataagggtttttttgcacttaaatcttactttgttactgtaattgtgtgtgtgtgttttcatagtattagcactcgttt

SEQ ID NO: 43234 - DNA, 600 bp, Chicken  19866894280914_1
tggcctctgcccacctcaggctgatcttgcttatgtaatgtcaaaagtcagttatttgatcctgggaccaactcctcacttctgtattcttccactgaggtgtttgttcttcttttgtcctatagtgttttcagaagaatgggacgcattgagcaccctgaacacctccagaaacagtgactacctgggcagcctgtgccaatgcattaccactctttctgagaagaattttttcctaatatccaaccaatatccaataaccactatctaatttcaagaggaaaaagattcagtgcaggrattttgatggtgaggctgataatatctggaaaatgtaaaaacagataagtttccagatccagtgtgattacaggagaaatgtcctcaatacaaagattccttctggtccactctttctctgttgaattaagcaagagttatcaagaatgcacaaaatgtagccatagttgcagagcgcaaagaagtggatgtgaatgttgaacaataatcactgtgctagaaaatatttctgaaatagtatgtgttttctctgtggttgggtttttttgtttgtttcttttgtttttaataacactaaat

SEQ ID NO: 43235 - DNA, 600 bp, Chicken  19866894280914_2
gaggctgataatatctggaaaatgtaaaaacagataagtttccagatccagtgtgattacaggagaaatgtcctcaatacaaagattccttctggtccactctttctctgttgaattaagcaagagttatcaagaatgcacaaaatgtagccatagttgcagagcgcaaagaagtggatgtgaatgttgaacaataatcactgtgctagaaaatatttctgaaatagtatgtgttttctctgtggttgggtttttttgtttgtttcttttgtttttaataacactaaatccagatagttktcaaagtcttagtctgcaagtggaccaygctgattttgargtgtaggagattatatttactgttggaggaagcttgtagggactttgtcttgaaaattatttttaacaggatgaaaaatgctctaattatctgtcackctttcctgtctatataataaaggaatgaaagatcacaaatcagtaaatgagaggaaaaaatgggaataacaccaggaaatagatcgagacacactgaacagtgctatgggaacagtaaattagaacagctgtttttggtttttctgggaaatcaagaagaaa

SEQ ID NO: 43236 - DNA, 600 bp, Chicken  19866894280914_3
aacagataagtttccagatccagtgtgattacaggagaaatgtcctcaatacaaagattccttctggtccactctttctctgttgaattaagcaagagttatcaagaatgcacaaaatgtagccatagttgcagagcgcaaagaagtggatgtgaatgttgaacaataatcactgtgctagaaaatatttctgaaatagtatgtgttttctctgtggttgggtttttttgtttgtttcttttgtttttaataacactaaatccagatagttktcaaagtcttagtctgcaagtggaccaygctgattttgargtgtaggagattatatttactgttggaggaagcttgtagggactttgtcttgaaaattatttttaacaggatgaaaaatgctctaattatctgtcackctttcctgtctatataataaaggaatgaaagatcacaaatcagtaaatgagaggaaaaaatgggaataacaccaggaaatagatcgagacacactgaacagtgctatgggaacagtaaattagaacagctgtttttggtttttctgggaaatcaagaagaaaaaaaaagatagatttctcttggactgca

SEQ ID NO: 43237 - DNA, 600 bp, Chicken  19866894280914_4
tccagatccagtgtgattacaggagaaatgtcctcaatacaaagattccttctggtccactctttctctgttgaattaagcaagagttatcaagaatgcacaaaatgtagccatagttgcagagcgcaaagaagtggatgtgaatgttgaacaataatcactgtgctagaaaatatttctgaaatagtatgtgttttctctgtggttgggtttttttgtttgtttcttttgtttttaataacactaaatccagatagttktcaaagtcttagtctgcaagtggaccaygctgattttgargtgtaggagattatatttactgttggaggaagcttgtagggactttgtcttgaaaattatttttaacaggatgaaaaatgctctaattatctgtcackctttcctgtctatataataaaggaatgaaagatcacaaatcagtaaatgagaggaaaaaatgggaataacaccaggaaatagatcgagacacactgaacagtgctatgggaacagtaaattagaacagctgtttttggtttttctgggaaatcaagaagaaaaaaaaagatagatttctcttggactgcacttctctttctg

SEQ ID NO: 43238 - DNA, 600 bp, Chicken  19866894280914_5
cacaaaatgtagccatagttgcagagcgcaaagaagtggatgtgaatgttgaacaataatcactgtgctagaaaatatttctgaaatagtatgtgttttctctgtggttgggtttttttgtttgtttcttttgtttttaataacactaaatccagatagttktcaaagtcttagtctgcaagtggaccaygctgattttgargtgtaggagattatatttactgttggaggaagcttgtagggactttgtcttgaaaattatttttaacaggatgaaaaatgctctaattatctgtcackctttcctgtctatataataaaggaatgaaagatcacaaatcagtaaatgagaggaaaaaatgggaataacaccaggaaatagatcgagacacactgaacagtgctatgggaacagtaaattagaacagctgtttttggtttttctgggaaatcaagaagaaaaaaaaagatagatttctcttggactgcacttctctttctgctctcaggctttccccaccccttggactttctgcttttctctgtcattttttcctccttttcttgaaacagttgcttcattgaaaaccaaactggagc

SEQ ID NO: 43239 - DNA, 600 bp, Chicken  19866894280916_1
tgcaggaggcttcagagatggctagaactagatggcctctctacactcctataggcaagctaggatctccaaggatcactggactggtgggaggaggcagcttgctccaggacctatgtgatgaagcacattgactttgttagatgttcagccttcaggatgtgaagacttcaggctgaatcttaggccatcaacagctatggaggaatctagggaattaagaaagtgggggttttgttatcaactgagctattagtaatggagaacgtacctctgcacaaagtgtggtatgcagctgcrgtgagcaatcctgtaactgggaaactacaaatacatcaaaaccgttaataaatatcttaaagtttttatgacaaaagttttactgcttgtcaatgtaagaataaaacaatgtaagaaaatgctcattaaggcctagattctattaaaatagacatttagagaggcttgagaaactgttttcttttgtgaagttgaacttgacagagcatactcagttctccataatgcttgaaatttcttggacagaggaatcccactctcaggcaggaagctactgtcttaaaactacacatttaaata

SEQ ID NO: 43240 - DNA, 600 bp, Chicken  19866894280918_1
atccaggatgaagaggtgtcctgggtcacacacacatggtgaatgaacttcttttacatagaaagcagtgcattttcaaaggcagatattcacgtattctcagtgatgccatgaaaataaggtgactgttttggaaatgaagggactgcttgttacagtctcacgtattaaaaactattggctgtcattaactttgttgctgactttttcattagcgggtgtgtggctgatatgcaggtgtccatattagatggaacttgcatggcccatcccagaagatctctgtggtggtgcagcatyatctcacatggcttcggctgtcaacctgcaagaaatggaggacctggggtgagtggagtatgaaagcagccatgtcagggcgttctcaccaggagcagcattgtgctttctccgctgcacaccccataagcttcaggtggtcccctcctatatcatattgcatggatctccagcatacgtgctagttctgttgttactcagctggaaatcagtgattattatgaagtttggagattggcagactgttttctgttcacatcttttaggttagtgctggtgttctggtgtaaatgtatcttg

SEQ ID NO: 43241 - DNA, 600 bp, Chicken  19866894280925_1
agtggactgtgttcattcagcagggcagaatgattccactcatttcactaccattttttctaagcacaagacgatctcactcccacatgttgatgctcaaacactttctgctgtccatgtgtttgtttgaacagaaggaaaacctccgaagactgcagtgacagcagccactaggaacagggtcctatttacagggcaggtatacaaaatacagggtgtggtgttccagccccaaacccataagcactcgtggggcttgctgtgcctgacaggcttttgggtctctgagcctgcagggaygggtgctggtgggctgctgggctctgctggtcgctaggtgtcaccgtgggactttgcagcgcagggccatgccatttctatcaaacacccctctgcccgatctcttcaagaggtcctgttttgttactcttctaacacaagaatctgactggtaaggatggacatggaatatttctcctctttcctaatagaagaatatccatttgtgaactggtcccccatcaaaacgctgctaatgcaaaatccagcaaaataactactgcttgactgtggcagtcactgcagctgtttcaatcactt

SEQ ID NO: 43242 - DNA, 600 bp, Chicken  19866894280925_2
ctttgcagcgcagggccatgccatttctatcaaacacccctctgcccgatctcttcaagaggtcctgttttgttactcttctaacacaagaatctgactggtaaggatggacatggaatatttctcctctttcctaatagaagaatatccatttgtgaactggtcccccatcaaaacgctgctaatgcaaaatccagcaaaataactactgcttgactgtggcagtcactgcagctgtttcaatcacttcagtaataggtccttagcaaaacctgaggtcctttatctatcatgtgctcrgtgacacgtggctctgagtaaagatctgtgctccatagcttagccctatctcattcttgttctcaaggaatttggacactaggcaaggtaaccacttggaagaggtgtgattttcttcaatgttcttccacgagttaccactttttgttattattttttttgtcttccctttttgttgttgttctagtctgacgtgtcaaaccccaaatcaaaygttcrttttccttagatagcagccaaagcagttctcaaggagaaaacactgaaaatttgcaaagacacatatccacaactgaaatg

SEQ ID NO: 43243 - DNA, 600 bp, Chicken  19866894280925_3
gactgtggcagtcactgcagctgtttcaatcacttcagtaataggtccttagcaaaacctgaggtcctttatctatcatgtgctcrgtgacacgtggctctgagtaaagatctgtgctccatagcttagccctatctcattcttgttctcaaggaatttggacactaggcaaggtaaccacttggaagaggtgtgattttcttcaatgttcttccacgagttaccactttttgttattattttttttgtcttccctttttgttgttgttctagtctgacgtgtcaaaccccaaatcaaaygttcrttttccttagatagcagccaaagcagttctcaaggagaaaacactgaaaatttgcaaagacacatatccacaactgaaatgtgagggagaagtccaaaacaaatccttccacgtgcatttgatttcagattcatataggcgtcagatgattcctcttagacatgcatttggggattatattaggcaacaatcctgctctgttctcttgcagttgataaagtccttaaagaactcatctatttatcaaagtactacagcgtctgcatgaaaagcttgtacttcgaattttcagtcc

SEQ ID NO: 43244 - DNA, 600 bp, Chicken  19866894280925_4
tggcagtcactgcagctgtttcaatcacttcagtaataggtccttagcaaaacctgaggtcctttatctatcatgtgctcrgtgacacgtggctctgagtaaagatctgtgctccatagcttagccctatctcattcttgttctcaaggaatttggacactaggcaaggtaaccacttggaagaggtgtgattttcttcaatgttcttccacgagttaccactttttgttattattttttttgtcttccctttttgttgttgttctagtctgacgtgtcaaaccccaaatcaaaygttcrttttccttagatagcagccaaagcagttctcaaggagaaaacactgaaaatttgcaaagacacatatccacaactgaaatgtgagggagaagtccaaaacaaatccttccacgtgcatttgatttcagattcatataggcgtcagatgattcctcttagacatgcatttggggattatattaggcaacaatcctgctctgttctcttgcagttgataaagtccttaaagaactcatctatttatcaaagtactacagcgtctgcatgaaaagcttgtacttcgaattttcagtccactcc

SEQ ID NO: 43245 - DNA, 600 bp, Chicken  19866894280929_1
gagacactgattatgttaatacttcttagcagcaattgcccacattatgaggtatactcaattatggattaagaaacaagcttattgtaccttttcctcaggcccataatcatcttactattgcaatatttcttctagagggaaataatatagcagtaatgatatactgatatttaatatggcaatttatgacaagaattgaatatcagttctgtaatgcccctattaacacatctttcagcatcacagttcatcagaaatgtctacagtaagtattgcaggaacagcatctgtctcatrttgtagagagttgcagtagagatgtttagattgataggaataaagacatatgggtgtgagaataccagagggagcaaatggcaagagawgaataacaatgtggtgatgccacttagattgtgaggtcatcaagattgtagcacatccttgtctttctttccaggatacccaacttgggaagcaaaagatggccatgaaaacctaatgactaggtaggacaggagacagagaccaatttgcaaggggaacaaaaacggtatcaaaaatcaccagtgcaagttgaactcagaggatgtgaag

SEQ ID NO: 43246 - DNA, 600 bp, Chicken  19866894280929_2
ccttttcctcaggcccataatcatcttactattgcaatatttcttctagagggaaataatatagcagtaatgatatactgatatttaatatggcaatttatgacaagaattgaatatcagttctgtaatgcccctattaacacatctttcagcatcacagttcatcagaaatgtctacagtaagtattgcaggaacagcatctgtctcatrttgtagagagttgcagtagagatgtttagattgataggaataaagacatatgggtgtgagaataccagagggagcaaatggcaagagawgaataacaatgtggtgatgccacttagattgtgaggtcatcaagattgtagcacatccttgtctttctttccaggatacccaacttgggaagcaaaagatggccatgaaaacctaatgactaggtaggacaggagacagagaccaatttgcaaggggaacaaaaacggtatcaaaaatcaccagtgcaagttgaactcagaggatgtgaagaggaactggcctgattctttttgcccactgtgtcaccacaagcaatcttggtctgcctgtctgcacaccagcatcttagtgctccaata

SEQ ID NO: 43247 - DNA, 600 bp, Chicken  19866894280930_1
acttaaaaatggaaagccattgtctttcttgtgtgtccttcatcagaactaacacattgactactcatttgtcttgagttgttacagcaaataacgactaccaagcatttccccttatgtaatatacttcaggaagattaatttacttctactctttttctccaattcttttttgtctagtaagagttttttgacatcttttaacaccctcccagctcccactctcccgcttcctcttcgacattttaacagcatgcacttaagtcagggagcaatcactaaaactggctattgtaatcyttaactatgttgtcctccgctgctgtgggtatagctccattctaggctgactttgtctccacttgtgatggtggggacatggacttcaggtggctgttcattaaaaataacatctagatggtcagtttatttcaacaatctctcatgcatgggtaatcacattgtcttagacgactccactaagatgaatgcaggctagtcataggactacataatataggctcaaaacacatgacactgaaatagagacttatttttatagctaagcagccatttttctttctatgcatatattccttc

SEQ ID NO: 43248 - DNA, 600 bp, Chicken  19866894280939_1
aatgaatgctgtagttgagagtgttcgcttatcacccagaacagagggaagagtcgcttctccccactaccttcaggcatgctgctttttctgctttttcttatttgccactcctcttcttctgcactattttccaaatgttcaaaaactcctttgatttttgttctaccctgaagaatttttaatattttacaaattttctgaatgcagatccctagcaggatataattcactccgaaatcagctagaacataattatggcaaaaatatcctgtatcaggaaatagatgttatgaattrgaagatgtttgatctgttccatgcgattcattctttgttggagatccagcttaggcctttcaagctscaagtttaaaggtgtgtagatggcagagtgtcttsagttctctctgcctgtgtacagcttgctgacagctttccactaccaaaggatagttgttttaaaatatattcacaactcactgaaagttatatgtatttcttaatcatagctgtcagcaaatatacaccctgtggtgtgttgtcactaaggtaatccacaatgagtaatgaaaatacatttagtttggrgctcttaac

SEQ ID NO: 43249 - DNA, 600 bp, Chicken  19866894280939_2
taccttcaggcatgctgctttttctgctttttcttatttgccactcctcttcttctgcactattttccaaatgttcaaaaactcctttgatttttgttctaccctgaagaatttttaatattttacaaattttctgaatgcagatccctagcaggatataattcactccgaaatcagctagaacataattatggcaaaaatatcctgtatcaggaaatagatgttatgaattrgaagatgtttgatctgttccatgcgattcattctttgttggagatccagcttaggcctttcaagctscaagtttaaaggtgtgtagatggcagagtgtcttsagttctctctgcctgtgtacagcttgctgacagctttccactaccaaaggatagttgttttaaaatatattcacaactcactgaaagttatatgtatttcttaatcatagctgtcagcaaatatacaccctgtggtgtgttgtcactaaggtaatccacaatgagtaatgaaaatacatttagtttggrgctcttaacaagtaaaggaactcagcaagaagttctgaagtttgactttgatgaacaaaatattgagctggtgatg

SEQ ID NO: 43250 - DNA, 600 bp, Chicken  19866894280939_3
atttgccactcctcttcttctgcactattttccaaatgttcaaaaactcctttgatttttgttctaccctgaagaatttttaatattttacaaattttctgaatgcagatccctagcaggatataattcactccgaaatcagctagaacataattatggcaaaaatatcctgtatcaggaaatagatgttatgaattrgaagatgtttgatctgttccatgcgattcattctttgttggagatccagcttaggcctttcaagctscaagtttaaaggtgtgtagatggcagagtgtcttsagttctctctgcctgtgtacagcttgctgacagctttccactaccaaaggatagttgttttaaaatatattcacaactcactgaaagttatatgtatttcttaatcatagctgtcagcaaatatacaccctgtggtgtgttgtcactaaggtaatccacaatgagtaatgaaaatacatttagtttggrgctcttaacaagtaaaggaactcagcaagaagttctgaagtttgactttgatgaacaaaatattgagctggtgatgatatctgcaaagacatctgaatgaaaagaattctg

SEQ ID NO: 43251 - DNA, 600 bp, Chicken  19866894280939_4
tatgaattrgaagatgtttgatctgttccatgcgattcattctttgttggagatccagcttaggcctttcaagctscaagtttaaaggtgtgtagatggcagagtgtcttsagttctctctgcctgtgtacagcttgctgacagctttccactaccaaaggatagttgttttaaaatatattcacaactcactgaaagttatatgtatttcttaatcatagctgtcagcaaatatacaccctgtggtgtgttgtcactaaggtaatccacaatgagtaatgaaaatacatttagtttggrgctcttaacaagtaaaggaactcagcaagaagttctgaagtttgactttgatgaacaaaatattgagctggtgatgatatctgcaaagacatctgaatgaaaagaattctgatgctaagcttatgctgattttacaatcctcgtggactatcagccagccctgtctttatgtttcccacatgttggtagccatttctctcttagtttactccaattctgttccttgttcagagtcccataacttctttcaagactgcactagaaatggtatgttaaatattcgtattgatagcatgcagt

SEQ ID NO: 43252 - DNA, 599 bp, Chicken  19866894280940_1
  misc_feature (1)..(86): n is any nucleotide
nnnnnnnnnnnnnnnnnnnnnnnnnnnnnnnnnnnnnnnnnnnnnnnnnnnnnnnnnnnnnnnnnnnnnnnnnnnnnnnnnnnnnnctgacctttactggcacggagtgagagctaatcacatagagaaggatagagatttttgttcagatttacattaatttaaaatattcccaatgggataatgtggctctccccatcttctttcttaaatgtcctttagagaggctttcagcatgtaggatccctaccccagagcctattctggaagcctgctctgctagggtccacactgcggatyggcgtctcctgtttgcttttatgtttgtccccatgtagccaaatacagaataggaacatgatcccaaggaatgatggcatctgaggagcttcagcaagtcattttgtgactactgtacaacaagccatagtgacttcttctgacaaatacacccaacatggtaatttcaggccattttcaaattattgtctctccctaaggaaggaaaatatgggggatgaccattacaccctttctgcatttggcatgttatggtggtagtgagcacacgcataaagcttggtcacctgccaggagag

SEQ ID NO: 43253 - DNA, 600 bp, Chicken  19866894280940_2
tactgtacaacaagccatagtgacttcttctgacaaatacacccaacatggtaatttcaggccattttcaaattattgtctctccctaaggaaggaaaatatgggggatgaccattacaccctttctgcatttggcatgttatggtggtagtgagcacacgcataaagcttggtcacctgccaggagagactgggcagataaacttctgtagttcaaataagctctggatctggccaagctacaacattcacttagaataagtgaattgactgggaaaagaaagaaattggatgacaacwctttggcaatggcttttagctgtttatgagctgctaatacttactatcatgtagcaagtactgctgttactggcacatctgctctcgttaggcagctaagactaaatgaatgaggaaactgggatgtgttttctttctttattgttgctttcttttaamtttagtatctgaatgctgaatgattataaaatactgatgagcaagattgaactgctactacagtcttttatttttagagagacagcaattttcccatttaaattggaaagtttttcaagtgccaacaactactaaagaagt

SEQ ID NO: 43254 - DNA, 465 bp, Chicken  19866894280940_3
cgcataaagcttggtcacctgccaggagagactgggcagataaacttctgtagttcaaataagctctggatctggccaagctacaacattcacttagaataagtgaattgactgggaaaagaaagaaattggatgacaacwctttggcaatggcttttagctgtttatgagctgctaatacttactatcatgtagcaagtactgctgttactggcacatctgctctcgttaggcagctaagactaaatgaatgaggaaactgggatgtgttttctttctttattgttgctttcttttaamtttagtatctgaatgctgaatgattataaaatactgatgagcaagattgaactgctactacagtcttttatttttagagagacagcaattttcccatttaaattggaaagtttttcaagtgccaacaactactaaagaagttctatcacaaaaccctggggtcag

SEQ ID NO: 43255 - DNA, 599 bp, Chicken  19866894280944_1
  misc_feature (1)..(161): n is any nucleotide
nnnnnnnnnnnnnnnnnnnnnnnnnnnnnnnnnnnnnnnnnnnnnnnnnnnnnnnnnnnnnnnnnnnnnnnnnnnnnnnnnnnnnnnnnnnnnnnnnnnnnnnnnnnnnnnnnnnnnnnnnnnnnnnnnnnnnnnnnnnnnnnnnnnnnnnnnnnnnnnnnttaaaaacatttaccaggtacaccagagccagattatttatagcacagtagtaccaaagggctccgccaggacgagctgccgttgtgagagacaaaatgtaaacacggagcagcaaagtccctcacccggagagagtgygtctgggctggggcaggaggcgttgcaaaactctgcccatgtcatctagcaaatttagctactgctgggacaaatgcatgttgaaaatacacacrcaccraagtctgggagcttcagagtttaaatctagtctgaaatatgaggctgcgaacgtggaaaaaaaaaaagaaaggaaattgtacaattggtaaagagagctgaggaaaaaaagcaacttagtttaggaaatcttacgaaacgtttgttatgaaatataaaatcatctgcccttgccctgaagtagcaatcagcagctggca

SEQ ID NO: 43256 - DNA, 599 bp, Chicken  19866894280944_2
  misc_feature (1)..(66): n is any nucleotide
nnnnnnnnnnnnnnnnnnnnnnnnnnnnnnnnnnnnnnnnnnnnnnnnnnnnnnnnnnnnnnnnnnttaaaaacatttaccaggtacaccagagccagattatttatagcacagtagtaccaaagggctccgccaggacgagctgccgttgtgagagacaaaatgtaaacacggagcagcaaagtccctcacccggagagagtgygtctgggctggggcaggaggcgttgcaaaactctgcccatgtcatctagcaaatttagctactgctgggacaaatgcatgttgaaaatacacacrcaccraagtctgggagcttcagagtttaaatctagtctgaaatatgaggctgcgaacgtggaaaaaaaaaaagaaaggaaattgtacaattggtaaagagagctgaggaaaaaaagcaacttagtttaggaaatcttacgaaacgtttgttatgaaatataaaatcatctgcccttgccctgaagtagcaatcagcagctggcagcactttgccagcacagaacagaaacggtcctgacaaggggtgtgaagcagggaggtgcagaagggaaaaaatgtaataatggtttaagggagtc

SEQ ID NO: 43257 - DNA, 599 bp, Chicken  19866894280944_3
  misc_feature (1)..(61): n is any nucleotide
nnnnnnnnnnnnnnnnnnnnnnnnnnnnnnnnnnnnnnnnnnnnnnnnnnnnnnnnnnnnnttaaaaacatttaccaggtacaccagagccagattatttatagcacagtagtaccaaagggctccgccaggacgagctgccgttgtgagagacaaaatgtaaacacggagcagcaaagtccctcacccggagagagtgygtctgggctggggcaggaggcgttgcaaaactctgcccatgtcatctagcaaatttagctactgctgggacaaatgcatgttgaaaatacacacrcaccraagtctgggagcttcagagtttaaatctagtctgaaatatgaggctgcgaacgtggaaaaaaaaaaagaaaggaaattgtacaattggtaaagagagctgaggaaaaaaagcaacttagtttaggaaatcttacgaaacgtttgttatgaaatataaaatcatctgcccttgccctgaagtagcaatcagcagctggcagcactttgccagcacagaacagaaacggtcctgacaaggggtgtgaagcagggaggtgcagaagggaaaaaatgtaataatggtttaagggagtctacag

SEQ ID NO: 43258 - DNA, 526 bp, Chicken  19866894280946_1
cccgcgctctgcagccccacacaccgaccggtagcaccgggcgctcacggcgcacacccgcacggctccggcccaccaaggctccctgccgccgctctccccgcacggcagcaggccggctgcagcccagcactcacccagcagctcctgggtaccgtgcaggaacctccagcctccccgggcgggcacggccagcccggcgcccagcaccgggcgcccgcctcgcagcaacctcagcaccccggcgccgccgctccgccaccaggaggccgccatcttgcctcgccctcactgccggcwcggggctgcccctcgcgctgcctgaatggaaaagcaggaacgcccccgccctgccgtccgccgcgcgaccgcgggcgtttgaggtaacggcccgaggcacgcctccctacggcaggacccagcgcacgcaccggcgccatggctgccgccagcggccacggcctcgaactcgccaacggcggcgacgcaacgcaggtaaagaggaggcggccgtgccactgctcgc

SEQ ID NO: 43259 - DNA, 600 bp, Chicken  19866894280947_1
agtacttctgtattcacattttcccttgttttctagggattccttcaggcaggaatatgtgtttgctctgcctcagagatctggggtttctcatatattcagggccttcagcgattagaaagatacgctttggctgccagagcatgcagtgcttcatgtgacagcccagagcctccggctctcataggcagtgggtgcctgccagcctggcaagcatgcatggccctccactctctgcaaacagcagagatggtctcatctgcatgaaggcaaggaaaacttcttgcaaacctgcttgcrccgtctgccccactggtgtgtgctcagtggccatgccatcccttcagcatggaggaggtgaccctactgagggtatcattgcgttcccttctggcatccgcttggatttgccttgtaaggggaagttctggaagcaggcacccctcatcaataaacctggcaatgtcctgcctccgcaaggcttgattctgtggtacaggaagccagcagaatggtggggcctttgtggtcaaggcctctgcacagcagcattgtagggaacatcctcacaccagaccaagcgatgctgtgtgtggccca

SEQ ID NO: 43260 - DNA, 599 bp, Chicken  19866894280948_1
  misc_feature (1)..(76): n is any nucleotide
nnnnnnnnnnnnnnnnnnnnnnnnnnnnnnnnnnnnnnnnnnnnnnnnnnnnnnnnnnnnnnnnnnnnnnnnnnnngatggagatcggtgatgagtggtgtctgtcaggagtcagtgctgagaccgatactctttaatatcttcatcaatgacactgacagtggggtcaaaggtaccctcaacaagtttgctgatgacagcaggctgtggggtgtggttgactcaccagaggaaaggtgggacctagacaggttgagcagtgggcccaggtgaacctcctgaggttcagcaactccaaaygcaagatcttgaacctggattgaggctacccctgctaccaatacaagctgggggatgaaagggttgagcacagccctgccaaaaaagacctgggggtgctggtgggtgggaagctggacatgagccagcactgtttccttgcagcccagaaagccaactgtgtgttgggctgcattcaaagcagcgtggccagcagggcgagggaggtgatcctgccccactactctgcactggtgaggcctcacctggagcactgcatccagatgtggagtcctcagaagaggagagacatggagctg

SEQ ID NO: 43261 - DNA, 599 bp, Chicken  19866894280950_1
  misc_feature (1)..(88): n is any nucleotide
nnnnnnnnnnnnnnnnnnnnnnnnnnnnnnnnnnnnnnnnnnnnnnnnnnnnnnnnnnnnnnnnnnnnnnnnnnnnnnnnnnnnnnnntcagctgagatcccaggctcacagaccagggctccatttaagctcagacctggcacttggccttagcctgagctccatcagaagtgtacttgtgctcacttttgtctgctgctcttctggcttactgagtggttttcctaggtcacctccaaagcagtgctgttcctggctttgactccagtcctttttctggctgtgtgtctaggctggaygttatgcctgcattggagccctgtttcctgcttcaaactggagtctttcatcaccttgcctcatctggagatgtcagtgggaacctgttggcatcctggtgctgttcagatcctacaaaaggctattctgatggtgcgatccctgttgtgctcatacctgctcttgagaaatcacagtactgttatttcctgcagctgcagtgttggaagggcacagcttttcacttcgacatcagagaatagcaactctattcttccattggtttaagtcacgtagttttagtgtaagagatgtccca

SEQ ID NO: 43262 - DNA, 599 bp, Chicken  19866894280952_1
  misc_feature (1)..(20): n is any nucleotide
nnnnnnnnnnnnnnnnnnnnccggggcggggagggaagaatgcacagcaacgggacgggtggcatttcgtggcgcttcgtgtcagctgctgaccccatccggcagctggcaggagccgtgcccggcgcggcgccctctgcaccacgggctgctcctgctgggctggagcccatgcgatcccagcagcagggacacccccaaacgctcctccagcagcagggacagccccaaaacacccttccaacagcagggacaccaccaaacgcccctctgacagcagggacacctccaaaacgcccstccagcagcggcagggacaccaccagaacacccctccaacagcagggacaccaccaaacgcccctctgacagcagggacacccccacaacacccctctgacagcagacgtgtttggagagcacggccagcgtttgactccggaggacctcgggaggcagcccgcctcctgcagcgcagtgtgcgcacggcctggcggggagggttggacccggcgatctcagaggtctctgcacagaatcgcagcacggcctgggctggaagggacgtgaggatctccgagctccaaccacaagtgcct

SEQ ID NO: 43263 - DNA, 600 bp, Chicken  19866894280953_1
tgaagcgttactgtgtatcctcaccccagatcttgtttatgtgacattccctctcagtgcacctcagggaattttggcaggggaacaattcaaagtcaggctctaccctaaagaattacatatgattttcccatccaaatttctccaagtttctctctcctgagtgttttaaagtcttcaaataaaattctccctcatctgatcttccagatgttgccatgcctcaagtctcccattagcatacatctcccagcaagtctccgctctgaactgaaacagaggaaggtcctgaagagatgraaaagggttatgatcagtctcttyacatgttagctagtctgtaaaatgccactttttttycacacagggaacttcgacattgaaggatttgttttgcctaaggttactgtgacattacagagaattaagtgtagttcagcagagcaagtcttgcaccaaaaggaaagcctccttctgccacattgtctgttctgggacagaagaaaaagttttcctgtttaccagacatgctccctgtgcctaatgagtttacaacctaatagataggatttcacaaatcctgtgagtacacagctatag

SEQ ID NO: 43264 - DNA, 600 bp, Chicken  19866894280953_2
cccagatcttgtttatgtgacattccctctcagtgcacctcagggaattttggcaggggaacaattcaaagtcaggctctaccctaaagaattacatatgattttcccatccaaatttctccaagtttctctctcctgagtgttttaaagtcttcaaataaaattctccctcatctgatcttccagatgttgccatgcctcaagtctcccattagcatacatctcccagcaagtctccgctctgaactgaaacagaggaaggtcctgaagagatgraaaagggttatgatcagtctcttyacatgttagctagtctgtaaaatgccactttttttycacacagggaacttcgacattgaaggatttgttttgcctaaggttactgtgacattacagagaattaagtgtagttcagcagagcaagtcttgcaccaaaaggaaagcctccttctgccacattgtctgttctgggacagaagaaaaagttttcctgtttaccagacatgctccctgtgcctaatgagtttacaacctaatagataggatttcacaaatcctgtgagtacacagctatagagggctcaaagaggattaatagcc

SEQ ID NO: 43265 - DNA, 600 bp, Chicken  19866894280953_3
acctcagggaattttggcaggggaacaattcaaagtcaggctctaccctaaagaattacatatgattttcccatccaaatttctccaagtttctctctcctgagtgttttaaagtcttcaaataaaattctccctcatctgatcttccagatgttgccatgcctcaagtctcccattagcatacatctcccagcaagtctccgctctgaactgaaacagaggaaggtcctgaagagatgraaaagggttatgatcagtctcttyacatgttagctagtctgtaaaatgccactttttttycacacagggaacttcgacattgaaggatttgttttgcctaaggttactgtgacattacagagaattaagtgtagttcagcagagcaagtcttgcaccaaaaggaaagcctccttctgccacattgtctgttctgggacagaagaaaaagttttcctgtttaccagacatgctccctgtgcctaatgagtttacaacctaatagataggatttcacaaatcctgtgagtacacagctatagagggctcaaagaggattaatagccttctcacccttcccattcttatggagagtatttaag

SEQ ID NO: 43266 - DNA, 600 bp, Chicken  19866894280955_1
tgcatttctgtttcctctttccatcagcaaattgtacaatgcgagaacagtggctactggacactgtgattccctggttctgttctttttgctgagagacgggactatatttcagaggttcaagtcatggggcttcaagtgctttcagttgggaaaattacagccaattgtcctcaagcttctctcatagagtcatagaatcatagaattattaaggttggaaaagaccacttaagaccatctggtccaatcatcagcccatcaccaccatactactaaaccacatcagtccatgcaacrtctactgtcttcttggaaacctgaggagatggaggttatcacttacctgtcaaacactaatgacatgtgttggcatttacaagtaatctgttgctcttgtgggagtgctttcaagatactttttaaggtacagagggacacttggagcctctgccccaaggggtatgtctttgtaccttcactcttgcctggtgccgagcttctgaatgcaaaattcttggtaccaatactgctgtagggtttcagacctgcttcagtgctcacactgaagccctcactgttgtgctcgcagaacggtgc

SEQ ID NO: 43267 - DNA, 600 bp, Chicken  19866894280966_1
ccttccccttcttcttgttcttctttttgaacaagcatttcttacagagacaaaagcagcaggtaaggattaataggactgcaactatggctatggctattaaggcccaaggtggcactggaagagaaaaagaaacaaaagagagaaggtggtaaactgttagtagggttaaatttagaaacaagcacattcctcttacatctaaatcttttgcaaagaaaatgccttgcagaaatgcctgaaattctttctaaaacactctgtcatcttttgtatatttcccccaactgagcatttgcrcacacagygccaacatctatctatttacctgcctggtgacacatatcaaattaacttgcagctattctgaataaatcaaccatctgaaaacagtatgtccaaaatattcacaccgtgcagatctgtaaaatgttcagcatacttaggcagttgtttgctttctttaatcatctccacaacccacctggcattgtggctgaattgggcagaactggccaggaatttcctgttttcagaatggcatcagatccaacagccagttttgacgaacttcttctctgcctgctgctgtgtagactc

SEQ ID NO: 43268 - DNA, 600 bp, Chicken  19866894280966_2
ttcttcttgttcttctttttgaacaagcatttcttacagagacaaaagcagcaggtaaggattaataggactgcaactatggctatggctattaaggcccaaggtggcactggaagagaaaaagaaacaaaagagagaaggtggtaaactgttagtagggttaaatttagaaacaagcacattcctcttacatctaaatcttttgcaaagaaaatgccttgcagaaatgcctgaaattctttctaaaacactctgtcatcttttgtatatttcccccaactgagcatttgcrcacacagygccaacatctatctatttacctgcctggtgacacatatcaaattaacttgcagctattctgaataaatcaaccatctgaaaacagtatgtccaaaatattcacaccgtgcagatctgtaaaatgttcagcatacttaggcagttgtttgctttctttaatcatctccacaacccacctggcattgtggctgaattgggcagaactggccaggaatttcctgttttcagaatggcatcagatccaacagccagttttgacgaacttcttctctgcctgctgctgtgtagactcctcacaac

SEQ ID NO: 43269 - DNA, 599 bp, Chicken  19866894280968_1
  misc_feature (1)..(59): n is any nucleotide
nnnnnnnnnnnnnnnnnnnnnnnnnnnnnnnnnnnnnnnnnnnnnnnnnnnnnnnnnnncgcatgcagcagagttccccatggggcctgtgcggattttagcgcttgctaccagactccctgctgttgcaaagcaaggtctttggccacgctgcagttgtaaatagattggagccaagagggaaacaccagaactgctcaacgtgcagatgctggggtatgtcgattttaggagagtgatgatgagaaatacaacagaatgcgggataagcccttccaggcagctgaagttatttccacrttgcaaaatacttcaggaaacagacaatttttctactaaagcttgcaaaaagataaataaataaataaataaaaatgctrgagcccactggtcacacagctatgtttctttcctgggcaattaggaagcagttactgactsagtggctggatttttgtcagggtattttctgcatctcctcggtgggtctcttacrytgtgctcgctccctccagtcacttgtgcattgatacccaaaccacacagcccctttgtgactatcatcaaatcagtcatctcaaggtgttcttaatgccaac

SEQ ID NO: 43270 - DNA, 600 bp, Chicken  19866894280968_2
tggggcctgtgcggattttagcgcttgctaccagactccctgctgttgcaaagcaaggtctttggccacgctgcagttgtaaatagattggagccaagagggaaacaccagaactgctcaacgtgcagatgctggggtatgtcgattttaggagagtgatgatgagaaatacaacagaatgcgggataagcccttccaggcagctgaagttatttccacrttgcaaaatacttcaggaaacagacaatttttctactaaagcttgcaaaaagataaataaataaataaataaaaatgctrgagcccactggtcacacagctatgtttctttcctgggcaattaggaagcagttactgactsagtggctggatttttgtcagggtattttctgcatctcctcggtgggtctcttacrytgtgctcgctccctccagtcacttgtgcattgatacccaaaccacacagcccctttgtgactatcatcaaatcagtcatctcaaggtgttcttaatgccaacatttgtttctgtggttatgtggacttcttttaaaagaaattattggcattctactgaagtgatagctgtctgagactggct

SEQ ID NO: 43271 - DNA, 600 bp, Chicken  19866894280968_3
ttggccacgctgcagttgtaaatagattggagccaagagggaaacaccagaactgctcaacgtgcagatgctggggtatgtcgattttaggagagtgatgatgagaaatacaacagaatgcgggataagcccttccaggcagctgaagttatttccacrttgcaaaatacttcaggaaacagacaatttttctactaaagcttgcaaaaagataaataaataaataaataaaaatgctrgagcccactggtcacacagctatgtttctttcctgggcaattaggaagcagttactgactsagtggctggatttttgtcagggtattttctgcatctcctcggtgggtctcttacrytgtgctcgctccctccagtcacttgtgcattgatacccaaaccacacagcccctttgtgactatcatcaaatcagtcatctcaaggtgttcttaatgccaacatttgtttctgtggttatgtggacttcttttaaaagaaattattggcattctactgaagtgatagctgtctgagactggctgctgctggggctactgctggctcctatgttatggaattcatttcttttataactctacaac

SEQ ID NO: 43272 - DNA, 600 bp, Chicken  19866894280968_4
ctcaacgtgcagatgctggggtatgtcgattttaggagagtgatgatgagaaatacaacagaatgcgggataagcccttccaggcagctgaagttatttccacrttgcaaaatacttcaggaaacagacaatttttctactaaagcttgcaaaaagataaataaataaataaataaaaatgctrgagcccactggtcacacagctatgtttctttcctgggcaattaggaagcagttactgactsagtggctggatttttgtcagggtattttctgcatctcctcggtgggtctcttacrytgtgctcgctccctccagtcacttgtgcattgatacccaaaccacacagcccctttgtgactatcatcaaatcagtcatctcaaggtgttcttaatgccaacatttgtttctgtggttatgtggacttcttttaaaagaaattattggcattctactgaagtgatagctgtctgagactggctgctgctggggctactgctggctcctatgttatggaattcatttcttttataactctacaacacacgtgtcccaggttcaagaaatcccagcactcaaaaccccatcagaatgtatt

SEQ ID NO: 43273 - DNA, 600 bp, Chicken  19866894280968_5
tcaacgtgcagatgctggggtatgtcgattttaggagagtgatgatgagaaatacaacagaatgcgggataagcccttccaggcagctgaagttatttccacrttgcaaaatacttcaggaaacagacaatttttctactaaagcttgcaaaaagataaataaataaataaataaaaatgctrgagcccactggtcacacagctatgtttctttcctgggcaattaggaagcagttactgactsagtggctggatttttgtcagggtattttctgcatctcctcggtgggtctcttacrytgtgctcgctccctccagtcacttgtgcattgatacccaaaccacacagcccctttgtgactatcatcaaatcagtcatctcaaggtgttcttaatgccaacatttgtttctgtggttatgtggacttcttttaaaagaaattattggcattctactgaagtgatagctgtctgagactggctgctgctggggctactgctggctcctatgttatggaattcatttcttttataactctacaacacacgtgtcccaggttcaagaaatcccagcactcaaaaccccatcagaatgtatta

SEQ ID NO: 43274 - DNA, 599 bp, Chicken  19866894280969_1
  misc_feature (1)..(43): n is any nucleotide
nnnnnnnnnnnnnnnnnnnnnnnnnnnnnnnnnnnnnnnnnnntgaggtaacattaacgctgcccgttccaatgccccttcacaaaagttaagcccattcctttcctaagacctggatgctttctccaggcttccatattttcactgtcaagccacaggatgggcctgaggggtcagattcacagtctgccatgaagatcctctgagatgccttcctaatcctctgaatgcgtgctgatccacacacacagcgcactaagtgagggaaggacagcctgtgtgtacaggcatttacaatcygcactttcttctcgcattcgctgctgctcagcttattttctgattcccagaaatctgcttttataaccttctgaaacatctcatttaaccgaaggagtgtttgctcattagcgttccttgcagcaggatgcacatgtcagcgtgggagtctgatccctgaggaaatgacaaggcagttcatagcacagcacacagactctggagatgcctctactcccagtttgcagctcacctctcacttccagctccactgcctgccacctccacccaggccaaaatagaacggtcagtgcacgcag

SEQ ID NO: 43275 - DNA, 599 bp, Chicken  19866894280970_1
  misc_feature (1)..(92): n is any nucleotide
nnnnnnnnnnnnnnnnnnnnnnnnnnnnnnnnnnnnnnnnnnnnnnnnnnnnnnnnnnnnnnnnnnnnnnnnnnnnnnnnnnnnnnnnnnnnttttggtcacatccctagggaatctgagagagtatgtgtggaaagtgtccctgatggagaagagcagatcctgttgactgaaaaggcatcagcgttactggggacttggagtatttttcaccactggcaactacccagccctgtggtccctaactcaaccagtgttgactcttttgccccacattggtcctgtccctttaatcctcaraaagcctctaaacaaacatatctggaggccttaaggcaatcaagggaaaatgtacaaagttaaccatcctaatttcacctaccttctgaccttggttcctgtaggatcagaaagtttttcttttgtttccagctatgcctcctctaaccttgattcctgtggaaccaggaagttttctctcttttcttttccagatgctaatgaatgctgatcctattgctgtgcctcacaagtttccttctaactttgctcctttccgtgggatccctgcagcatcaycaatgtcactgttttgggca

SEQ ID NO: 43276 - DNA, 600 bp, Chicken  19866894280970_2
tcctgtccctttaatcctcaraaagcctctaaacaaacatatctggaggccttaaggcaatcaagggaaaatgtacaaagttaaccatcctaatttcacctaccttctgaccttggttcctgtaggatcagaaagtttttcttttgtttccagctatgcctcctctaaccttgattcctgtggaaccaggaagttttctctcttttcttttccagatgctaatgaatgctgatcctattgctgtgcctcacaagtttccttctaactttgctcctttccgtgggatccctgcagcatcaycaatgtcactgttttgggcaggcatcttctttggattaatatttgcaattgcttatgctgatcctatcacactcactgggtggccgtggtcccatgcccatatagtggragtatgggaccaaattctaattctgacagtcacttaacccacttaactgtggttatgcacagtaatgacatatattcaggaaatgaatggggttgcaatagtaccagtcaactcccccagttcctgggaggtgtaggacgaagaacaaagatagggtgtcagtgcaacaacaagtgactgatacacactgc

SEQ ID NO: 43277 - DNA, 600 bp, Chicken  19866894280970_3
accttggttcctgtaggatcagaaagtttttcttttgtttccagctatgcctcctctaaccttgattcctgtggaaccaggaagttttctctcttttcttttccagatgctaatgaatgctgatcctattgctgtgcctcacaagtttccttctaactttgctcctttccgtgggatccctgcagcatcaycaatgtcactgttttgggcaggcatcttctttggattaatatttgcaattgcttatgctgatcctatcacactcactgggtggccgtggtcccatgcccatatagtggragtatgggaccaaattctaattctgacagtcacttaacccacttaactgtggttatgcacagtaatgacatatattcaggaaatgaatggggttgcaatagtaccagtcaactcccccagttcctgggaggtgtaggacgaagaacaaagatagggtgtcagtgcaacaacaagtgactgatacacactgcaacamgcctgcagtcttccctatcagcactgggtatcaaccagcagttcttagctgaggtattacctcagtaggaaagaactaatataaaagacccccagttaattcta

SEQ ID NO: 43278 - DNA, 600 bp, Chicken  19866894280970_4
tcactgttttgggcaggcatcttctttggattaatatttgcaattgcttatgctgatcctatcacactcactgggtggccgtggtcccatgcccatatagtggragtatgggaccaaattctaattctgacagtcacttaacccacttaactgtggttatgcacagtaatgacatatattcaggaaatgaatggggttgcaatagtaccagtcaactcccccagttcctgggaggtgtaggacgaagaacaaagatagggtgtcagtgcaacaacaagtgactgatacacactgcaacamgcctgcagtcttccctatcagcactgggtatcaaccagcagttcttagctgaggtattacctcagtaggaaagaactaatataaaagacccccagttaattctagatgcatttgccgtaactcaaaataatgcatccctagttcttggttgcatccaagtacaaatatggattcaatctatggcagcagcaattccaagtggaggcgcagggagcgctttacccactgaagttcgaaagctgatttgggataatgccgtccccctgcagggggcagcctgctccaccatgagcctctcct

SEQ ID NO: 43279 - DNA, 599 bp, Chicken  19866894280971_1
  misc_feature (1)..(26): n is any nucleotide
nnnnnnnnnnnnnnnnnnnnnnnnnnaaaaaaaccccacacatttatccgagaggaaaaaataccttacctaggccaaagacatgggccaggaacacagttctcattcccactgaaaaagaggagggcagggaggggacgaggcagggccggccctgcagaacagctgaacaagccggcagggctgggggctctctgagaggtggccatcagagcccagctgcaatgctctgctgcgcaggtactgcattggtggacatcccgagcaactcagcagcagatagatggtctgctccactgrtcccggacatttttacattgacttgaaagcctcatcctatactgcaacttcttggtgccttggaaaacacaggcatccttccccactacttattaccttggaggcagttgccaaggatcaacactgcaccacaggtagcctttcctttgcagggcctgcacaccgtgacactccataagacctctccctccctatgttactgcacacagctcactgatcacctcatccccgagcacctcaggaattatgtgcaattcacacatgtggaagagccacccacacgtggtctcactgataca

SEQ ID NO: 43280 - DNA, 600 bp, Chicken  19866894280984_1
aaaacttaatgcgctattttttcatcggtctggtttcaaattgttcgggctgaagaaaagagagcccgaacaatgcaagggctggaggaagggtcgtgatgaacagtcccatctgggtacttttcagctctaggacatggaataccagtgctgcaatagctgctagtgcctgcttctgcatgaggcagttctcgagccccaggtaaccctgtctgagcgccagaactggctgtgctgttcgcagtgctggcgatccagcctggcatagcacttcaaaaactgatacagtgcagctctccsagaaacaacattgctgtgaggtgagtgaatttaaataagcattctctgttactgctgagaacatgcacgactaatgcctgagatttgctctgtgttgattttggtgataggcaatcagataaacctttgccaatgttttgctctcttagaaaaaaaaaaaaatcaataaaagtgtgccctagcaaatagcatgtttgacatgtggcctatctgttggggtgtttgaaaggctgacacacacttggcatccacaatgctgtgcctccatgcaagatgaagggctcagggaatggagaggct

SEQ ID NO: 43281 - DNA, 600 bp, Chicken  19866894280989_1
cctaaaggtgcagtgctgcaagaggggcaagctcaaatgatgcttttaagaaagcaagctacaaatgaaaaatactttacagatacttttgcaaagagcatcctgcttttaaaccttgcagtctgcattaatcattttaattcgagagtaacaagagaaggactaggaggttgaagaaaaagttttttttttttttttaaagaagttaatttctaaactggctatagagtcttgtttctatctaacagctcttgccctactactattgaagaaactggctgaaagctaaaccttagtaarctcacractggcagcacaacagcccctcaagcagatagactacccagcagcttagagaagaaagccacaactcatcctacctccacaggtactggtagccatctccaatgcattttatgctcaggtgctgtttttcttgaggtgatggtgctgtattaatacgtgctacatacgcttttgtagttctagtaatctacctcagtgcagagtgtcctgagttaggcatgaggctgtgttcaccgtttttttgggtcttttccttcatcctaactgtcataaactaataaaagttgtaattcc

SEQ ID NO: 43282 - DNA, 600 bp, Chicken  19866894280989_2
ggtgcagtgctgcaagaggggcaagctcaaatgatgcttttaagaaagcaagctacaaatgaaaaatactttacagatacttttgcaaagagcatcctgcttttaaaccttgcagtctgcattaatcattttaattcgagagtaacaagagaaggactaggaggttgaagaaaaagttttttttttttttttaaagaagttaatttctaaactggctatagagtcttgtttctatctaacagctcttgccctactactattgaagaaactggctgaaagctaaaccttagtaarctcacractggcagcacaacagcccctcaagcagatagactacccagcagcttagagaagaaagccacaactcatcctacctccacaggtactggtagccatctccaatgcattttatgctcaggtgctgtttttcttgaggtgatggtgctgtattaatacgtgctacatacgcttttgtagttctagtaatctacctcagtgcagagtgtcctgagttaggcatgaggctgtgttcaccgtttttttgggtcttttccttcatcctaactgtcataaactaataaaagttgtaattcctcataa

SEQ ID NO: 43283 - DNA, 600 bp, Chicken  19866894280990_1
tccatgaatttaaaatagtttgctttcaaaacgtaaaatcacactgaattcaagtgacagcatgcactggttcattacattacatgtcagaataaatcagtgatcccacagctcctttttgttagagatctcatctgcaatggattggcagattggcactgcttctgtgtgcctgccgtgtcaccttgcttcctactcatgtacaattactctctacatgagccactttggtcacttgcttgtggccctgcagttgtttccctgcagtaccaaacggaagctgctctgctttcaatgcaycagacaccaaaatgtccctgtcccttgtctacacctcccttctgatctcttccattctctctgccaagaagagaaggagagaacatgccrtgtggggtttgctccaggctaacaatgttgttatgagctgtgcatacaatgtctgcatttttcacctgcagtttgctgaacagaattgggtgtgtgagacaaaacaaacgactagaccattaaaatatctgcatgcttttaggtcaagcatgtatgaagatctacatgcctgaagtttctccgaagacctcacccttatgtaaaactacc

SEQ ID NO: 43284 - DNA, 600 bp, Chicken  19866894280990_2
aataaatcagtgatcccacagctcctttttgttagagatctcatctgcaatggattggcagattggcactgcttctgtgtgcctgccgtgtcaccttgcttcctactcatgtacaattactctctacatgagccactttggtcacttgcttgtggccctgcagttgtttccctgcagtaccaaacggaagctgctctgctttcaatgcaycagacaccaaaatgtccctgtcccttgtctacacctcccttctgatctcttccattctctctgccaagaagagaaggagagaacatgccrtgtggggtttgctccaggctaacaatgttgttatgagctgtgcatacaatgtctgcatttttcacctgcagtttgctgaacagaattgggtgtgtgagacaaaacaaacgactagaccattaaaatatctgcatgcttttaggtcaagcatgtatgaagatctacatgcctgaagtttctccgaagacctcacccttatgtaaaactaccactcctatgcgactgagggatgtcaatttcaccatggcctggaacaaagggctgtccatggccgtggggtgggctgagcggcagggctgg

SEQ ID NO: 43285 - DNA, 600 bp, Chicken  19866894280995_1
gtcacattaagtgtttatcaaagatgaatgcctgtggcagtagaaattagtgtttctgagaggaagggagccgaggttttgctctgggtaaatacttagcttcaagcctactacgacataaagcaagatggttggtgtgtgctagctgtttgcagaactgaggatgcttttgctgaaaaacagagccctcttctgttagctggcactaattccagagattatagctttgtgcatcagcagttcaatggaaacatatttacaaacactgagaattcatccatcatcaggcagtgatgcacrcacacactcatgcatggcggtaattctgttatttgtctgttacctcctccaagaatctaaccctttccctcagtattcagtgccagtttttttggtgttatggtttgttttgcaggaagctcaaaccattcctgttccttttatgcatttgaattgttaatgtggacatttcagctcattataactctgaaatgtttcctttgttaccagtaactgacaaacctgcacggctgctcagaaaacataagtgctagttctagggttgtattttgttcactgctgtgcacaacaatatgctct

SEQ ID NO: 43286 - DNA, 600 bp, Chicken  19866894281005_1
taatgaagacttgcaatttttagaagtaaactctggctattatgtatactactcttaaattaattgcccagcacttttatcttgtacttagcaaaaccttgtgaaaatctttgtctgagaggcccaataaagtgagacagtaaaagactaaacaattaaacaaatgaaacttactgaagttaagtgaacaggaaagtatgatgaagagaagtcagaagcaaaactgtataaagttttggctttgccttcacttgtcattcctaaaacatttctcagtgtcgttttatcagcgctggagtygttttgagaaaatgtccaaataaaaaaaatccagaagaacacacagaaagttagtgaagactgcagtgaaaggaagagtrtgtgacaacctgaaagactttaatgcctgaaggtttcattggaagcaattaagattgttgattttgaagctgctgtacatataaaaactacttatgagcttgtagttttctgcttttctgctaagaaagattaagacaggcattaaagtcactggagcaagaagatagtgacttccaaccttgatgaatttttgtagaacagattagtttggttttagat

SEQ ID NO: 43287 - DNA, 600 bp, Chicken  19866894281005_2
cttgtacttagcaaaaccttgtgaaaatctttgtctgagaggcccaataaagtgagacagtaaaagactaaacaattaaacaaatgaaacttactgaagttaagtgaacaggaaagtatgatgaagagaagtcagaagcaaaactgtataaagttttggctttgccttcacttgtcattcctaaaacatttctcagtgtcgttttatcagcgctggagtygttttgagaaaatgtccaaataaaaaaaatccagaagaacacacagaaagttagtgaagactgcagtgaaaggaagagtrtgtgacaacctgaaagactttaatgcctgaaggtttcattggaagcaattaagattgttgattttgaagctgctgtacatataaaaactacttatgagcttgtagttttctgcttttctgctaagaaagattaagacaggcattaaagtcactggagcaagaagatagtgacttccaaccttgatgaatttttgtagaacagattagtttggttttagatttctagttcatgcatgttggactacattttagctggcatatttcacagtcaaacaatgatcttggccttttaagagctca

SEQ ID NO: 43288 - DNA, 599 bp, Chicken  19866894281010_1
  misc_feature (1)..(83): n is any nucleotide
nnnnnnnnnnnnnnnnnnnnnnnnnnnnnnnnnnnnnnnnnnnnnnnnnnnnnnnnnnnnnnnnnnnnnnnnnnnnnnnnnnncggcagcctggaggtacggcaacaccagttttgggtcctgagattacagggcactgaaagccaacagggctcaggacagcatcagcattctaacactgcccagctctgcagagaagaaatacagcaagtggtataaatgccacacaagtaaaacggagatacttacatactttgtcactttgaaagacactacggtatttgtcagcaaatattttaraagcatcaaatatgaacgtcattaaaacgaagccttcaaaatagagaaagcatcattctttgtgcagagcgacaacagaatttaaaaccaagagagttaaagtccctctgaagccaactgcagcctcctcttccttttccaaccaaaagtagctctatgagtaattcttctaatacgtaacttgcattttactaaacatcatcagaaataccagggggtgatgaacataaagatcaggggaaaaacaaatgacataggaacatttgctaccacaagaagagtttaacatcccacccaaa

SEQ ID NO: 43289 - DNA, 600 bp, Chicken  19866894281015_1
atgcactgggagttagtaccagccagggtctatatgccagtgctgctttggagagtaagagagtttcatggtatagaatgttccagtcagtggccctcaatgtcagataacagttctaggcatgtttgatgaatgcatgttcaacattcacctctacacatcagagatgcagcatctgagagtacgtcagcatgatccaaagaacagactgtcagacatctccaatttcagttttaaagaatctcccatttctctggtaaatgggttacaggagagcacagaaccagagctatttgatgyatacaatctggtgtcctagcaaggtcacagcatggcaaagcataaatcaatgatctcctttcaaaggtttacagtgcactctgatttcaacagaattcctcttgatctacagcacatcacartctacaaacttggtactttcatgctggtctgactttggttctttaacttccagcagtgtaatgcccacaggaccggctttaatgcatttatatagcagaatgctcaagactccatgttgaaacccaatctctttatgttgtaactccaagaagagggagtctgttgagtctcctagag

SEQ ID NO: 43290 - DNA, 600 bp, Chicken  19866894281015_2
tgtttgatgaatgcatgttcaacattcacctctacacatcagagatgcagcatctgagagtacgtcagcatgatccaaagaacagactgtcagacatctccaatttcagttttaaagaatctcccatttctctggtaaatgggttacaggagagcacagaaccagagctatttgatgyatacaatctggtgtcctagcaaggtcacagcatggcaaagcataaatcaatgatctcctttcaaaggtttacagtgcactctgatttcaacagaattcctcttgatctacagcacatcacartctacaaacttggtactttcatgctggtctgactttggttctttaacttccagcagtgtaatgcccacaggaccggctttaatgcatttatatagcagaatgctcaagactccatgttgaaacccaatctctttatgttgtaactccaagaagagggagtctgttgagtctcctagaggtaccttacaaacattaccaatctaagaggaaggagacctgaactccgtccccacctactaccacataggcttgcagttgcaccaagtgtctgtctaatgctatcatgctgcatttagtgta

SEQ ID NO: 43291 - DNA, 589 bp, Chicken  19866894281015_3
atgctcaagactccatgttgaaacccaatctctttatgttgtaactccaagaagagggagtctgttgagtctcctagaggtaccttacaaacattaccaatctaagaggaaggagacctgaactccgtccccacctactaccacataggcttgcagttgcaccaagtgtctgtctaatgctatcatgctgcatttagtgtaggccatagtgaactggaattgctcctgctctgcatttcctttgtctagctgaacctttaaagttagtcacatggttgtccacgacatgataatccttcyccaggcagaactgaagctattttaattgctggacagtatgaaggagcacagcagttttgtaaggtagawgaccttgtggcaagtgctcagagatgctcatggtgacatttgtggaaaaatgcaaggtgtttcactgagcatagcccacctaagatggctacatcttcccattgctgccttccccatatgcatgcttgtgccaggaacatctatctggggccagtgtctctgccaaaaagaagttcccctgtccatgcagggcccaccattcataatgccctcagtgatg

SEQ ID NO: 43292 - DNA, 520 bp, Chicken  19866894281015_4
tctcctagaggtaccttacaaacattaccaatctaagaggaaggagacctgaactccgtccccacctactaccacataggcttgcagttgcaccaagtgtctgtctaatgctatcatgctgcatttagtgtaggccatagtgaactggaattgctcctgctctgcatttcctttgtctagctgaacctttaaagttagtcacatggttgtccacgacatgataatccttcyccaggcagaactgaagctattttaattgctggacagtatgaaggagcacagcagttttgtaaggtagawgaccttgtggcaagtgctcagagatgctcatggtgacatttgtggaaaaatgcaaggtgtttcactgagcatagcccacctaagatggctacatcttcccattgctgccttccccatatgcatgcttgtgccaggaacatctatctggggccagtgtctctgccaaaaagaagttcccctgtccatgcagggcccaccattcataatgccctcagtgatg

SEQ ID NO: 43293 - DNA, 600 bp, Chicken  19866894281017_1
tacttgatggttttaagaaaaactacgaaactataagattttttttactccaggtgatggtaggtaaacaaaggtgactgactgttcaggtgaaatagaaatttcagtttaagctaggggaaagaaggaggaaaggagacatgcagagttacagcatttgtcttcccaagaaaccattagatgtgacagaactctgccttcctggaagaggttaaacatctatcttccatctagaagtactgaacaaattccttattttgctttgcttgcatacacagcttttgctttgcatatttaacwgttcatattaagctcaacccatgagttctcttacattccgtattgtctccgcaccctacagggaggaagaagggagcagctgtgtggtgcttaattgcctatcagggttaaaatgtaacaattgcttatgaagaagttgtgcacatcattcaagggttaaaactgagtcaacagaagaactaaagccattatttccatcttttacttttttttttcctaactgtggtcacgttaagcactacaatacaagaaactaagggctgttataagaaattagctaagaaggtgtacctgttatat

SEQ ID NO: 43294 - DNA, 600 bp, Chicken  19866894281019_1
catgatgccttgtggattggtccattgccagcaatgcctcatttggagaaggggcatcttcagtttcttcttgtgatcttttggaaatttgcacggtgggaaaaatgatgctaactgtttgtgtacttggtgagtcaagctaatcctttggcaaaccaggtatggtagtgtttttgacagtgacatcagtagcagcaacgttatgaaggtgtgagttttcttttggtttttgtttttcacctggtccctgtcctgcagactagctggtcacacaccctgcaagcttctcttctgtaaccrtgagatctgcagagttcaaacccaacagttcagccccctcagtatttcacagggtacctatgtgtgttgctccttaccaaaatccttcaacattttttggaaggactcctcttgactgaaggcctcmggagcccaatcttcaagttgattccttgtggaagtccttcagcatccccggaaagacttcttacaaatgtcttgtcatcacttcagattcagttctgacaagaggccacaagggccccatttgtaaaaaccttgcacatcatattatatgcccacagttactgtagacatttc

SEQ ID NO: 43295 - DNA, 600 bp, Chicken  19866894281019_2
tggtgagtcaagctaatcctttggcaaaccaggtatggtagtgtttttgacagtgacatcagtagcagcaacgttatgaaggtgtgagttttcttttggtttttgtttttcacctggtccctgtcctgcagactagctggtcacacaccctgcaagcttctcttctgtaaccrtgagatctgcagagttcaaacccaacagttcagccccctcagtatttcacagggtacctatgtgtgttgctccttaccaaaatccttcaacattttttggaaggactcctcttgactgaaggcctcmggagcccaatcttcaagttgattccttgtggaagtccttcagcatccccggaaagacttcttacaaatgtcttgtcatcacttcagattcagttctgacaagaggccacaagggccccatttgtaaaaaccttgcacatcatattatatgcccacagttactgtagacatttctgggctgcaataaacttgcatgacagaaaccattctttctttttacagatgacatccccaaattgctaggttctattctccattgctttgccccttagctggtgttacacagctatgcaaactccta

SEQ ID NO: 43296 - DNA, 600 bp, Chicken  19866894281036_1
aagaatatatcagatacccatctactgtaacgcagcttatagactgaggcagagacagtcaaggcttgcagaagcaacaaagagagcatcttacactgtctctgagagaagtgcaggtgcagagggctccaagacatcatttacagcccaagtgctgtaataaaacagtatcaaccatacctgaaacactatggaagaatctgctctggtaatagcaatgggactgaggctactgtctattcccagcgtaacacagctcactattctcagccctggctgcatcacccttggacaatgcamaggaagggtacggtttgtattctccacattcctgcatgcacagctgttagcacaaagcagtaaatcccttccagacattcctgtacttggacatgtgaccgtgcaaagctgcagagcctggattcatttcagattgccacatgcagtcagaaaggacagaaagtgttcggcaagcatcagcatgccagccctgcttcagcaccagcagtagtgtctccaccatatctccatccgtatggccaggggaaaagtcactgacagcacacagcacaccagctgctgccacaactggtctctgag

SEQ ID NO: 43297 - DNA, 600 bp, Chicken  19866894281040_1
tggtgggtgtgaagtggaaatggttaatctgaaaggtgcttgcaaaatgtgttctgtaaggtctttgtgacattatttgctatcacaacagtatttagaagccctattgttttctgagtcttacaaattgacagtagaacctagctctaaattgacccaaattgtacaagtatttacataaagcaggaattcaagtagccttaaagggggggaaaaataatattaaagagaactaggataactgtactgggctatgtgaactatcaataaaatttccatgattcatgttttaaggggggmaaaaaagtagaatttcgccttagaccagagactgccaacgtactcaacatgcatcattaaatagtctgcattattgaatatttcttactgtattgcttaaaggctgtgttaaaggtggtttggctttcctttatctgtcttccacttttttgtctatctccagtaagacaaatggttgcttaattttgtgctggtttctatttaaagagtctgtaaagcactcaaatatagttgaacactatgtgaacttaaatctgtattaaatataatttagtttttcttccagggcctaatgctgta

SEQ ID NO: 43298 - DNA, 600 bp, Chicken  19866894281042_1
tcatgtcaaagcaacctagttttctcctatgacacggtgacaggcctgtgtattgaaaagaaaaatatcttgactttgttaaatcttttgacagtgtcttttatgacatttttctatgcaatccaagttcttcctgaaactgccataaggcagggccacaactgattgagatgctatgcataagaggaactgttaagctggaaggatgtctctatgaggtccactgggaactaatttgaagtctatggaccactttcagtaataaactgcatggagtagggaatgtacttgctatattcrtagatgattcaaagttgggagaggctgaaaaagcatgtggatgacagggctagaattcaaactgattattataaattggagaaatggtctgaagtgactgggatgtaatttaataagggctagaaatcaaaagttctccacttaggtaagagcaaccatctgcacaatgataggatgaggagtaacagttctgctgaaaaaggctacatgggctatagtggatcataaattgagcatgagtcagcaatgctaggctatttcaaagacgaaaaggaagcttcatcatggaaggtataaaca

SEQ ID NO: 43299 - DNA, 599 bp, Chicken  19866894281059_1
  misc_feature (1)..(177): n is any nucleotide
nnnnnnnnnnnnnnnnnnnnnnnnnnnnnnnnnnnnnnnnnnnnnnnnnnnnnnnnnnnnnnnnnnnnnnnnnnnnnnnnnnnnnnnnnnnnnnnnnnnnnnnnnnnnnnnnnnnnnnnnnnnnnnnnnnnnnnnnnnnnnnnnnnnnnnnnnnnnnnnnnnnnnnnnnnnnnnnnntgtgtgtgggaacagctttaacagcaaaaatggttgtaggttgtacttcctccgtgcttcccctgagtctgcaggcagaaaggtcgatatagagctgcttgtgctgatctcctcattcaccargtaggcatggagataagggggcgtgtggagaaaagagctccttggggaagagctcagctgcaagactaagtaaagtcttggcttttggtctcgtgcagcccctagagcttgcttacaagtggtaagtgcttactgaagcttttcactccgttgggcctgttggttggctaatggtagtattatttctgtgctctctgaagatggtgcagttgcctgtgggcatgcatccaacccattcaatcctggtacatgggtttatgttgctggggtttgtgtgtcttttgttttttaatcagggt

SEQ ID NO: 43300 - DNA, 555 bp, Chicken  19866894281059_2
agtaaagtcttggcttttggtctcgtgcagcccctagagcttgcttacaagtggtaagtgcttactgaagcttttcactccgttgggcctgttggttggctaatggtagtattatttctgtgctctctgaagatggtgcagttgcctgtgggcatgcatccaacccattcaatcctggtacatgggtttatgttgctggggtttgtgtgtcttttgttttttaatcagggtgaggatctatttaccaatatctctctaccacagtcagtaccattgttacagttaaaggaaatcttgcayaaagctgaacaacagcctttctctttaatgaagatatgcacaataggatcagcgacagctataggtttttaggagcttgttgctggaaatctcattaactggaaatttcagcccattgttttttcagcctgaccttgagtaggctgacagactctctgtgccccttctctcaaggatgtcgttttgagcagcattgcttcattttgaccatatagtcatgatacttccaaaatctctgatgctcttttctaagtc

SEQ ID NO: 43301 - DNA, 600 bp, Chicken  19866894281060_1
tcatttttccagtaagttctaaaatcttgagagcatataaatggaatgtaatattggtacttggtattaatagtctcacataatagacttcctttttattttttattttttctgttggattctattttttgtaatcattaaacaaatagagtatttttcttgagattttctgagtcctgcagagtgggcagtgttttgtttccataaaagagcttttcttgaatgtcatttgtaagtctgcagtgaacgtgtacgtggtatggcagagccatcttggaaagcatcagttctgacagtatrtgagttttgcaacgtattgcacttcaaaactgttatgcatttggtactcacgctcctcatctgaacaaataaatacagctgtgtaaagctaagaaacagctgtggcccagaaggtacgcagtttcagtaaagtaagaagtttcagagagagagctagcaagcagtagaaacggagagggaagaaggaagagctacctgatatttatcagaggcattggtttcttcgagataaaacaaaggggaaagtaaggaatgtgaaaaggtatacgaagggaagagggaaaatgtgcaagatgtgct

SEQ ID NO: 43302 - DNA, 600 bp, Chicken  19866894281061_1
gtgctttgcaggactgttgtttattttatcatcttcacccaatgcaagaggcgtgttccctgactttgggctttgggcttcagtgcaaccatgggacctgctggtccatgctaggtgtacacagcagctcatttactcacagaagttaaaaatgagctatgatgatggaaacagctatttctagcaccaggcagtgaatgatcccatcctgagcaaagctacacgagttagcctgccatgaatcgattcagctgctgattcccattttgagacccaagggtgggcagggtgccctaacaygtccctctctcaacatggcaggtgggacaccttccctgagttcccgcaggagcgcagctcggtcagcctggtgagcctctctggggtgctctacctgcttggagggtttgccacggtggagacggagtcgggggagctggtgccaacagagctgaacgacgtctggaggtgatgaccttccctgggactctccatgggagatgggggatgttattcagtggcagacaccgaggaaacagatagttttggtctttatgccttcagtctaagggagatgctgctaccccaacacaaggctgc

SEQ ID NO: 43303 - DNA, 600 bp, Chicken  19866894281067_1
tattgtacttcccctgcccggtctgacagcctaataatatgctttctttgcagattcattaatggtttgagccaagatgtcaacctcaccattgacagcaaacagttcatacctgttcagagaaactatggtgtttctgggtactcgctggtagagagggacacgtaagtttcccttgctgtgctgaaggtcctcactgaagcccttccttgagcaccacagggctttgtttttccatgcaaatagcaaaaacttgattgctatggtcttggcatttgattgtgtggcagatgtttgttyaaaaaaaaaaaaaaaagaataatcagctctgtgcagagcagttactccaggccacttgtgtgygtacagaagcaccacgcatttactttgcaaagcgtccaagccaaacgatagtgggtcagtttctctgtgtgtaatatgttgttgaatagattcaagttccaaactgtgtctggaatagctccctgcctgtagcagttgttgcttcgtaagataacataatcagggaaacattattgcttggaagcattattcctatgacatgagtataatgacattctaattcaggcaatgttctga

SEQ ID NO: 43304 - DNA, 600 bp, Chicken  19866894281067_2
ggtttgagccaagatgtcaacctcaccattgacagcaaacagttcatacctgttcagagaaactatggtgtttctgggtactcgctggtagagagggacacgtaagtttcccttgctgtgctgaaggtcctcactgaagcccttccttgagcaccacagggctttgtttttccatgcaaatagcaaaaacttgattgctatggtcttggcatttgattgtgtggcagatgtttgttaaaaaaaaaaaaaaaaagaataatcagctctgtgcagagcagttactccaggccacttgtgtgygtacagaagcaccacgcatttactttgcaaagcgtccaagccaaacgatagtgggtcagtttctctgtgtgtaatatgttgttgaatagattcaagttccaaactgtgtctggaatagctccctgcctgtagcagttgttgcttcgtaagataacataatcagggaaacattattgcttggaagcattattcctatgacatgagtataatgacattctaattcaggcaatgttctgagttctcttagagctaggtcaagagaatactaggaacccaaaatctttttcaagaagcccatat

SEQ ID NO: 43305 - DNA, 600 bp, Chicken  19866894281068_1
ttccctcgggccctgtcgctgtcacagagagcagagctcagcgctgcccctccgctccctgtgaggagctgcagctgccatgaggtctcccttcatttctgctctgggctgaaggagccaagggacctcagccgctcctcacacaacttgcccttcagataattccccatcttcatagctctcctttggtcactctctaatagttttacatcaatattctcatgttgtagcatccaaatctgcactcagtgctcaaggtgaggccgcagcacagcagagcaggacagccccttccaccarccagctggcagcactgggcctgatgcagcccagtaccatatggttggctcttctggctgccaaggcacactgctggctcatgttcagcttgccatcagctaggaccccttgacccctttctgcagggcttcagcctcgtggccccagtctgtacacagatacgggactgcagaatccatcaccttttcttgttaaacttcaagtggttggtaattccccagctgtctaatttgtcgtggtctttcctcaaaggagtcaacatctcccagtttagtatcatccacaaacttagtatgcatt

SEQ ID NO: 43306 - DNA, 600 bp, Chicken  19866894281077_1
ttttactttttgatccttcaaggcagcagcattgttttagctatattttgtttttatttttccattatctgtttttttaccaaacagtttataagagtgtgaaacagtaattttcagaaatccacagttaaagcatttgattgcaggaaacaatgttataaatagattttcaaagtaaacactcagttctgtggagtgcgtggaattactgtaagcacaacatagcacagtagagcacattttgtcacacacaatggtatcaaatagtattctgtgctgggatacacatacatagagagyggattgctgacagatgccagcagtggttagtggatatttgcatgtagatttggagcctgctatccttgtttaatcaaaagcaagaaaaagattatcactacaacaatataaagtattgcattawatatttttttcatcccagatatttcatcttgggtggggaaggattgcagatgytatgaaatactctttaaagtcatcggtgagtgtaaaggatattggtgaggtatctgtggtttcatccactgttactttcactgctcagaaatcagaaagaaattttttttcccccaatgaaca

SEQ ID NO: 43307 - DNA, 600 bp, Chicken  19866894281077_2
cagttaaagcatttgattgcaggaaacaatgttataaatagattttcaaagtaaacactcagttctgtggagtgcgtggaattactgtaagcacaacatagcacagtagagcacattttgtcacacacaatggtatcaaatagtattctgtgctgggatacacatacatagagagyggattgctgacagatgccagcagtggttagtggatatttgcatgtagatttggagcctgctatccttgtttaatcaaaagcaagaaaaagattatcactacaacaatataaagtattgcattawatatttttttcatcccagatatttcatcttgggtggggaaggattgcagatgytatgaaatactctttaaagtcatcggtgagtgtaaaggatattggtgaggtatctgtggtttcatccactgttactttcactgctcagaaatcagaaagaaattttttttcccccaatgaacagaattagtgtttctttgtatcagacattaattgtaccaaattaattgcaggcataaatttagctaactgcagctataatggctgagctctttgctatagaaaacttaataaataagcattggaa

SEQ ID NO: 43308 - DNA, 600 bp, Chicken  19866894281077_3
aacactcagttctgtggagtgcgtggaattactgtaagcacaacatagcacagtagagcacattttgtcacacacaatggtatcaaatagtattctgtgctgggatacacatacatagagagyggattgctgacagatgccagcagtggttagtggatatttgcatgtagatttggagcctgctatccttgtttaatcaaaagcaagaaaaagattatcactacaacaatataaagtattgcattawatatttttttcatcccagatatttcatcttgggtggggaaggattgcagatgytatgaaatactctttaaagtcatcggtgagtgtaaaggatattggtgaggtatctgtggtttcatccactgttactttcactgctcagaaatcagaaagaaattttttttcccccaatgaacagaattagtgtttctttgtatcagacattaattgtaccaaattaattgcaggcataaatttagctaactgcagctataatggctgagctctttgctatagaaaacttaataaataagcattggaaaagtctgagggagaagacaaaataggtatttagttggactacagaatacaaag

SEQ ID NO: 43309 - DNA, 600 bp, Chicken  19866894281078_1
atcactgttgatagtgacagttttgcaatgggtaggaaatgcagaacttgtttgaataaatgccaacaagcagcatgatctctctcaagtgagggcccagtatgagatggggcatactgaaatgcatcaagccttattttcttggttatttctaactttgtgaagacttctttcatctgactaacgtgttgtgagaacgttttagaagcatgatagtagagtaaaactggaatatattacagatcctgctgaaactcgtttactagggggaacttgaatgaccaagttacgaaggccttytgtgcgttttttagtgaagtttcttgcaacactgaaatgtctttctgtctctccttaggattggcagcctccatttgcctgtgaagtacaaagttttcgtttcactccacgaattcagcgcctgaatgaactggaggtgagcctttccactgttgatacagttttgtgtttacactgaaagctgtaggtctccttgcttgagatttacatcttgtcaggtttctgtgtggggagactttagaaacccgtagaccgcatcggtgtttatacttggcagtggcagacttcacagaaaataac

SEQ ID NO: 43310 - DNA, 600 bp, Chicken  19866894281085_1
atcgactgagatttgtttcacctgaatgactttatctgtctcccaaactgttcctgcatcagcctatacagcaaatccacctctagggttttcagcactggaagccatcccatataggtcatggctaacccagagttcataacagattgttgttgcctccagcaaacttcagagaatggatgagactgtatggaccctgcagcctattttccttcctgtaagagtgtaatattatcctcgtgcccatgctgtgaaaaattgtatagtgaatgccttttctgcatgataaagaaggaaaasctgcttttgaggacagttatggaaatatgtttcagatttataagctgatctgtgacatttatttcagtcttaaattggcattcgcctacaagtgaggtgaaagaagtttacttctataatagatgcatctctttagttaggcagtttttcttctgcagtatttctyagagagaagagaaaacatcctcctcacatgcagagaaaaacaaaataagatgaaacgagtctcttctatcagagtttttttaactgcttggaaagtgggaggtgaagaagggcattatttcttagacacaaaaa

SEQ ID NO: 43311 - DNA, 600 bp, Chicken  19866894281085_2
cttcagagaatggatgagactgtatggaccctgcagcctattttccttcctgtaagagtgtaatattatcctcgtgcccatgctgtgaaaaattgtatagtgaatgccttttctgcatgataaagaaggaaaasctgcttttgaggacagttatggaaatatgtttcagatttataagctgatctgtgacatttatttcagtcttaaattggcattcgcctacaagtgaggtgaaagaagtttacttctataatagatgcatctctttagttaggcagtttttcttctgcagtatttctyagagagaagagaaaacatcctcctcacatgcagagaaaaacaaaataagatgaaacgagtctcttctatcagagtttttttaactgcttggaaagtgggaggtgaagaagggcattatttcttagacacaaaaacaaactcagaaataaatataatagtaattggtctatattcctcaaggaaaaacacctcaaatttttagatcagataattgtgactgtgtatgagtgaaaaaagtacaattcccattcatgtaatagataaggattaattaagaattagaatggttagtagttcctg

SEQ ID NO: 43312 - DNA, 544 bp, Chicken  19866894281086_1
catatagggcagtgtgattttagggagggaattcttgggctgcatcagaaaaacaatggcttcaccacgctgctgctctgacagcacggcaactgatgaactccagaagtttctgctccagtgactgagacctcctacctggcttcttgtctcccacggcagggacaggcgcataaggaaaactgtaagagcagggcaaatttggagagacactccactgtccaccctcccacagtctgtggctcaagcacttcttgaaagagaagtggcatctatactcaacagccattttctctcccmtttttccaaataattttcatcttcctccaagctttcagcctcagaaattcccattgcattaacttcaccgtgccacgaagtcaattttttatcaaactgataagaaacaccttcagtctgataaaaacacctttggcttgccctgtgctcacctccttggcaacttcatgagccactcctgactttatgtgtggtgcaccttccccaagtctctcctgcacaccaaagcacattaaccctcaaa

SEQ ID NO: 43313 - DNA, 600 bp, Chicken  19866894281088_1
gcagggaggtgattgtccctccatacttggaaccggtgaagatgcaccttgacaaatgtgttcagttctggacactacaaggaagactctgaggacctcgagtgcatccagagaagtgcaataaagctggtgaaggatctgtaacacaagtcttatgaggagcaactgacagaaatgggattgtttagtctagaagagaggaggctcagggcagactttatcattcttcacaactctatgaaaggaggttgtggtgaaacagaagttggccaccacttttcccatgaaactagtgataargcaagaagtaaaggtctgaagttgtgccaggggaagttcaggttgggtgttrggaaaaagtttcttcccagaaagagtgctgaggtatgggaacaggctgctgagggatgtggtggaaggttttctgggaagagatatcatagaatcatggaacggtttgggttggaagaaacgtttaaaatcatctagttccaacctctgtgctacaggaagaacaccttccactagatcaggttcctcaaagtcccatccagcctggccttgaacacttgcaggaagggggcattaacaacctttcta

SEQ ID NO: 43314 - DNA, 600 bp, Chicken  19866894281088_2
caaatgtgttcagttctggacactacaaggaagactctgaggacctcgagtgcatccagagaagtgcaataaagctggtgaaggatctgtaacacaagtcttatgaggagcaactgacagaaatgggattgtttagtctagaagagaggaggctcagggcagactttatcattcttcacaactctatgaaaggaggttgtggtgaaacagaagttggccaccacttttcccatgaaactagtgataargcaagaagtaaaggtctgaagttgtgccaggggaagttcaggttgggtgttrggaaaaagtttcttcccagaaagagtgctgaggtatgggaacaggctgctgagggatgtggtggaaggttttctgggaagagatatcatagaatcatggaacggtttgggttggaagaaacgtttaaaatcatctagttccaacctctgtgctacaggaagaacaccttccactagatcaggttcctcaaagtcccatccagcctggccttgaacacttgcaggaagggggcattaacaacctttctaggcagcctgtttcagtgtttcatcaccctcacagaaaagaatttctttgtaa

SEQ ID NO: 43315 - DNA, 600 bp, Chicken  19866894281090_1
ggtggtggccagcagggtgagggaggtgattctcccctctccctttggtgatggagcccagggtcaggctgcccagggggttggtggagtctccttctctgcagatacacaaacccacgtggatgcttagtgtgcagcctgctgtagggagcctgctttagcagggtttgcactcgatgatctctagaggtcccctccaacccctctggttctgtgatgtgccatttggtgcagctgctggggtctcagccagctttcacgctcctgctgccttttcccacccctcccatttgtcctccyggccttcaaaccagcaaagggatggggcaggtttaaggcagcacctccctgagccctgggtccctctgcactcagggagggacacagcagctcccctttgccttyggcatccgctggagcccactggacaagcagctccgtgaatgcaaacgagcgatttgattaattagagctctctggccattttccagctggctgagggcactgtgcccctggaagcacaggatgacgtgtccccaagctgggcatctgagccagggctcacacccagaccctgccctgatgctgaggctccgaaaa

SEQ ID NO: 43316 - DNA, 600 bp, Chicken  19866894281090_2
tacacaaacccacgtggatgcttagtgtgcagcctgctgtagggagcctgctttagcagggtttgcactcgatgatctctagaggtcccctccaacccctctggttctgtgatgtgccatttggtgcagctgctggggtctcagccagctttcacgctcctgctgccttttcccacccctcccatttgtcctccyggccttcaaaccagcaaagggatggggcaggtttaaggcagcacctccctgagccctgggtccctctgcactcagggagggacacagcagctcccctttgccttyggcatccgctggagcccactggacaagcagctccgtgaatgcaaacgagcgatttgattaattagagctctctggccattttccagctggctgagggcactgtgcccctggaagcacaggatgacgtgtccccaagctgggcatctgagccagggctcacacccagaccctgccctgatgctgaggctccgaaaaacaggctaaagtaaaccctattttttccatgaaagggtctctaatgatagtttagcagtccagcctgtccttaaagcactttgcaggggcctgttgaagtgaaag

SEQ ID NO: 43317 - DNA, 600 bp, Chicken  19866894281092_1
gcaattaacattactattcaaaataatgggccagattctctttgctacagaatttctgcttggttcagcaggaaggagggtcaaaaaaacaattactgctcccaacttctttgatccagtcttgaaacacagacaagcctcaagtctgctttaacatgcagcagaaggcaaaaccccttaaaacacactctgacagtttgatgcttcaagaaagcttgaggacttcagcttctccctgtctccctgttggttttaacagaaatggtctgtaggatgctgtaaagctgtgaagtttttttwaaaaaacagtttatcatgaaggttaactgggtaaagtcgcaattcaatgactttcctagagaggaaattaaaccagaaacagggagtgatcgctccaaagaacttgcagtaygtcccaacttaacactaaacaagcctaagaagtgtttcttttgctcactcatggatgccatctgagcaaagctgtactatcagaagttacacaggaagcttggtgaggctcggcagacagcttggtgcttcattccccctcagcgatagccaggaaatccctgagtattcctgggagaaaagagccct

SEQ ID NO: 43318 - DNA, 600 bp, Chicken  19866894281092_2
gatccagtcttgaaacacagacaagcctcaagtctgctttaacatgcagcagaaggcaaaaccccttaaaacacactctgacagtttgatgcttcaagaaagcttgaggacttcagcttctccctgtctccctgttggttttaacagaaatggtctgtaggatgctgtaaagctgtgaagtttttttwaaaaaacagtttatcatgaaggttaactgggtaaagtcgcaattcaatgactttcctagagaggaaattaaaccagaaacagggagtgatcgctccaaagaacttgcagtaygtcccaacttaacactaaacaagcctaagaagtgtttcttttgctcactcatggatgccatctgagcaaagctgtactatcagaagttacacaggaagcttggtgaggctcggcagacagcttggtgcttcattccccctcagcgatagccaggaaatccctgagtattcctgggagaaaagagccctggagtggacatcagtgcgaaaagacaaattcagaagaacactgctgaactgcttctccacttccacagctaatttacacctgaaaggtctgaaataaccactattgaaatgc

SEQ ID NO: 43319 - DNA, 599 bp, Chicken  19866894281099_1
  misc_feature (1)..(44): n is any nucleotide
nnnnnnnnnnnnnnnnnnnnnnnnnnnnnnnnnnnnnnnnnnnncttttgaggtgggctctgtaggctgttttgaaggattcattaacccctttgtgcagggtggtagaagcccctgatactgaatgctaccacaaagctaatctagccaagaggttaatctaaaaagaaaaactgaaataaaaatgtatttgtgttccttggtttgcttggtgaatgctagattttaaatttgcgatctccagttactgccttgctttgaaatcctgtggtaggctttgagttgctttctaaattaaaytggagaaagactgaacctttaaatcaccaggggaatgtgacctctgctgtgcattgcgttgctgctccatatcctaatcccattgcagttgttacagtcccggcgtataataaacataagtctatggctctcttactaccttttccagataggggttataaaaaattctgggtagctctttcagctttatgggtataaagttaagttagctaatggactgcagccacaccagtgacattttaatagttctctccccataggcagaaaccagtcagttttttgtgattaaaaaaaaaatc

SEQ ID NO: 43320 - DNA, 600 bp, Chicken  19866894281101_1
tcttgattcatttaacggcctgggctagtctgtggtgtccatggtggagtgaggaagtgcatgcatatttaacccagctagaggatatcagaaatcatgagcacaggccagaaaagataggagagaacagaaagcttaaatataatgaaggatgttaacttttggaacagaaagaagaggaaagaaggaaaatatttttttttttcttggaggcttgctagtagatagaggaagttgttccagggaacatgttgtgagtatgaaaaaagtcaagaatgtaaaacttagaggtcagagccrttttaaccaaatctgaattgcctttcatgcttaattttcatttcatattgaaatactgtgttgtgatcacaaggatgttatttcatttttgtcttgtttcttttaaatctgagtagcatcccagagaaaattcagtgcctacttttgaatggaaattcatatatgagaatactgaaaggcttgggcacatacacagactgaaatacataagacagaagtagtaacagttctgaatgtgttgcaggaatactttgtggtcttgaaccatgtaaattcaagtgcagttgctaaatgcagatg

SEQ ID NO: 43321 - DNA, 600 bp, Chicken  19866894281111_1
aaatcccagcttttttctttaatagaatatgataagaggttctgtaatcaaaagataacttcaaaaagtacattatgagatcattagttcacatatctgcttagtctagatgagggctgatggactctgcttctgtctcttcaggctagctttattcatgaagatatagaaagtgcaatcagtgacagcaagagtggaaaacaaaagaagagacttgaaacactgaggtaaaaacctagtttcttggcagtatatggggtcatgagacactccccaagtctgtctgctgtttctttttcrttttttttggctagctgataatatacttcaaaaagcacatgtggagggtttgacttactcattatctcaagctctctcgaattatagcatcactctttcccaattctgctttaggaactgcaacagctgacataaatccaggttgctagagaatagcattaagtgggatttgggtaaaatagttcaaaatatgaattaaaaatatgaatgtttctgaattccaagtaagcaaggttttgggatctaaaaatgttaaataaaacagcaactgaagaccaaaaaaaatttcctgcctgttta

SEQ ID NO: 43322 - DNA, 542 bp, Chicken  19866894281111_2
caggttgctagagaatagcattaagtgggatttgggtaaaatagttcaaaatatgaattaaaaatatgaatgtttctgaattccaagtaagcaaggttttgggatctaaaaatgttaaataaaacagcaactgaagaccaaaaaaaatttcctgcctgtttaatgacttgaaaaactccttgtttccctggttgggaagacttctctcccagtaggaaaaagtggagtaaaagagtctattggtttcagattaatacagaaatgagcagtagctggtgcaggcatagaaacaaggacacraatgtgttaagtattgaataggatggtgggggggttttgtatgctgcatcctgatgatatcgctcaataatagttctgtggcccagtgagagaattctctgctgtacaaaaatctttaagtaacaatgtcactattatatggattaagtttattgctgccttagttgcctgttaaattcctggtgtgcaacttggggaagttttcctagaataatggacacctaaattgaaaaaaattaata

SEQ ID NO: 43323 - DNA, 600 bp, Chicken  19866894281115_1
agcatctatggagatctttcttcattcataaagtcaaataagtaaatctaatgaggcgtacctgcagtggcaccacctagctttttccaataagaacatgaccattattgtagcgtcttgtttctccatctgtctggtttcattcttaagttcagaacaggatatatccaggatataaccatgattcctcagtataagggaaaaaaataagcttaagaatccccagtttgaagcatttattcatttcaaacttaatcttcctcaaaagcctggtatttcatgaatagacaacattcaagrtaccatgcattcaggctttgcaatgatttgcatctcaaattcattttcatttataagattgtattgaaaccagttgggcagaaaaacattgttaggtttgtgatgcagccagaaaaacttgatttacatgagacaaatcaaagcctgaactattaattagatctctctcttactccccagtctccttttgcaattatcagcttttcctgagcaagctgaagtcataccttccggatgctcattttctgaagaaatgccttggcttggaaagtgataattgtgttccatcctatactcttc

SEQ ID NO: 43324 - DNA, 600 bp, Chicken  19866894281119_1
tgtttactgtctccctgttgagtctgggttgcttttaaagtgtccctgggatgaatgtcaaaaatggaatttacagtcaaaccttttcaacatgtaaagtgcaggagacatacattatttttctaagtagtatttcctctgtgcctctaccttgcttcttttcaaaagaatgcctataaattgtcccctatggacaggttgctgaatcatcagaaaatagttattttgaaagagtttggaaagtcctctaagaattcagatgtttcttctaatagcagtcatctttcaaagtccacttcyaccttccacttagaagtcaaacttgagttgatttataaggatcagaatcaagtagagaagatgacctctcacacgggctcaccattaggtttatttcttgtttagcttggggagaagtcytggcttggaagaaggttccattcagggttagtttgggagtattctgggaaatgaggcagtaacacttctgctctttgtccattaacttaccctgcacattcagcaatctgctctaacagcacacagcagctatgtgctcagcaaatccagcatatcactcacatccctgcagctccygaa

SEQ ID NO: 43325 - DNA, 600 bp, Chicken  19866894281119_2
ttctaagtagtatttcctctgtgcctctaccttgcttcttttcaaaagaatgcctataaattgtcccctatggacaggttgctgaatcatcagaaaatagttattttgaaagagtttggaaagtcctctaagaattcagatgtttcttctaatagcagtcatctttcaaagtccacttcyaccttccacttagaagtcaaacttgagttgatttataaggatcagaatcaagtagagaagatgacctctcacacgggctcaccattaggtttatttcttgtttagcttggggagaagtcytggcttggaagaaggttccattcagggttagtttgggagtattctgggaaatgaggcagtaacacttctgctctttgtccattaacttaccctgcacattcagcaatctgctctaacagcacacagcagctatgtgctcagcaaatccagcatatcactcacatccctgcagctccygaagaaatgtctccaaaaaatgtctccaaattgctgatttcacacctgtacaatatactttccaaacccgtttcccttcctaccctgctaccamatttgcaagcagcaggtaggatttaggag

SEQ ID NO: 43326 - DNA, 600 bp, Chicken  19866894281119_3
tcyaccttccacttagaagtcaaacttgagttgatttataaggatcagaatcaagtagagaagatgacctctcacacgggctcaccattaggtttatttcttgtttagcttggggagaagtcytggcttggaagaaggttccattcagggttagtttgggagtattctgggaaatgaggcagtaacacttctgctctttgtccattaacttaccctgcacattcagcaatctgctctaacagcacacagcagctatgtgctcagcaaatccagcatatcactcacatccctgcagctccygaagaaatgtctccaaaaaatgtctccaaattgctgatttcacacctgtacaatatactttccaaacccgtttcccttcctaccctgctaccamatttgcaagcagcaggtaggatttaggagtcatctaggagaaaagacaatcaacaaaatgctaaaaattgcaacagtgtagtgtgggactgcacaccaagtaactttggctgcagtgcaagaaaggttgtgggtgaaatacgaatttgtcagggctrctggtgttcaaattatgtgcttgtgcggtctaagagatttcttttgctt

SEQ ID NO: 43327 - DNA, 600 bp, Chicken  19866894281119_4
tatttcttgtttagcttggggagaagtcytggcttggaagaaggttccattcagggttagtttgggagtattctgggaaatgaggcagtaacacttctgctctttgtccattaacttaccctgcacattcagcaatctgctctaacagcacacagcagctatgtgctcagcaaatccagcatatcactcacatccctgcagctccygaagaaatgtctccaaaaaatgtctccaaattgctgatttcacacctgtacaatatactttccaaacccgtttcccttcctaccctgctaccamatttgcaagcagcaggtaggatttaggagtcatctaggagaaaagacaatcaacaaaatgctaaaaattgcaacagtgtagtgtgggactgcacaccaagtaactttggctgcagtgcaagaaaggttgtgggtgaaatacgaatttgtcagggctrctggtgttcaaattatgtgcttgtgcggtctaagagatttcttttgctttacagtctttcagcatacaacttctctaaaagaccagcagcacagaaaaaaagtgcttcagccctaacaaaatatcaatttgaaagtacaagaa

SEQ ID NO: 43328 - DNA, 506 bp, Chicken  19866894281119_5
gctatgtgctcagcaaatccagcatatcactcacatccctgcagctccygaagaaatgtctccaaaaaatgtctccaaattgctgatttcacacctgtacaatatactttccaaacccgtttcccttcctaccctgctaccamatttgcaagcagcaggtaggatttaggagtcatctaggagaaaagacaatcaacaaaatgctaaaaattgcaacagtgtagtgtgggactgcacaccaagtaactttggctgcagtgcaagaaaggttgtgggtgaaatacgaatttgtcagggctrctggtgttcaaattatgtgcttgtgcggtctaagagatttcttttgctttacagtctttcagcatacaacttctctaaaagaccagcagcacagaaaaaaagtgcttcagccctaacaaaatatcaatttgaaagtacaagaaaatgactatacttagaaaaaaagatggaaatacaatcaacattgtcaaatgggtgaatttgca

SEQ ID NO: 43329 - DNA, 599 bp, Chicken  19866894281120_1
  misc_feature (1)..(55): n is any nucleotide
nnnnnnnnnnnnnnnnnnnnnnnnnnnnnnnnnnnnnnnnnnnnnnnnnnnnnnncaaggtgttgcacctgggttgcagcaaccccaggtatgtgtacagactgagagaagaacttattgaaagtagtcctgagaagaacttgagtgttctggcgggtgaaaagctcaacatgagctagcagtgtgtgcttgcagactggtccactgcatcctgcactgtatcaaaagacaggtggccagcagggagaaggagctctactctgcccttgtgaggtcccatccggagtattgcacggaggyctggggcccccagtagaagaaggatattgagttgtggagtacctcccctgtgaagaaagactgagggagatgagcttttttagcttaaagaagagaagttttcaggrtgacatcactgcggccttccagtaagttttcaacaacaacaaaaaatagagtgttaaaaaagaaaaagaagaagaaaaaaagttaccctttactgagaattaatgtattgataaacatacctcaatacaacatggctaaatggcacattcagatcatgctactcatagcaattctaaacaccactggcgctc

SEQ ID NO: 43330 - DNA, 600 bp, Chicken  19866894281120_2
gaagaacttattgaaagtagtcctgagaagaacttgagtgttctggcgggtgaaaagctcaacatgagctagcagtgtgtgcttgcagactggtccactgcatcctgcactgtatcaaaagacaggtggccagcagggagaaggagctctactctgcccttgtgaggtcccatccggagtattgcacggaggyctggggcccccagtagaagaaggatattgagttgtggagtacctcccctgtgaagaaagactgagggagatgagcttttttagcttaaagaagagaagttttcaggrtgacatcactgcggccttccagtaagttttcaacaacaacaaaaaatagagtgttaaaaaagaaaaagaagaagaaaaaaagttaccctttactgagaattaatgtattgataaacatacctcaatacaacatggctaaatggcacattcagatcatgctactcatagcaattctaaacaccactggcgctctgggtgctgtatcattttagatttactttcctggaggaatagctgagccaactgctggcaaatcttgaacacagaatttgcagaagggggatggaaatgctcagttag

SEQ ID NO: 43331 - DNA, 600 bp, Chicken  19866894281121_1
cacacagtgatcacttgaaaatgggatgatttaagggctgtactgtgtctgctggctgttacaatcagctgatttctgttctcgctgggtagctgttctgctttactaaatgaagatcttgaaagccctggatcgtgctcagatgaacaggaatcagtgtgtgttaccacccctctgtggtgcctttggctcctccaagtgctgccctgacctggcttcactgcagaaacgtgcagccagtggaaagtgaggtgcagaaggtctgcagctgatgtttatttgaggagatttgtagctaayagagagtcctgttaatttaaatgcaattgtattaagccctgctctcatctactgagcagtgctcaaacccacgagccgtcctgcagggggcaggtatcggtttctgcatgaagtcccttctgtcactcgtgtgttcccaaaaagtctttgcacgtaactgtggtgcgaaggtccgtcagcaccgtgtggagcactgcaggctcagtgccacgtgtgctctttattgttcttgcaggaacagttggagcttccagacgttccttctgagccactcccagaggagcccccaggtatgctgcc

SEQ ID NO: 43332 - DNA, 600 bp, Chicken  19866894281121_2
taatttaaatgcaattgtattaagccctgctctcatctactgagcagtgctcaaacccacgagccgtcctgcagggggcaggtatcggtttctgcatgaagtcccttctgtcactcgtgtgttcccaaaaagtctttgcacgtaactgtggtgcgaaggtccgtcagcaccgtgtggagcactgcaggctcagtgccacgtgtgctctttattgttcttgcaggaacagttggagcttccagacgttccttctgagccactcccagaggagcccccaggtatgctgcctgctctgtgtgytctgcagcttcggctccacgtacatcttctcagctctgtgcgctgctttgagaccttctctttgttgtaaacgtcccagcaaatgtgaagggctgtaggctgtgtggtgaaagctggtacaggcttccctccgtggctctgacaaaccccgtattgctgaacctttaccttaagaggaccccgtgcctctgcatggcgtctgtgtgggagaagtctgggacagggaggacagggcttgtttggttccagcacttgtttactaaacacggatcagatgtcatctccgtgttgacagcagga

SEQ ID NO: 43333 - DNA, 600 bp, Chicken  19866894281123_1
ttcacagctaagatgcacaaaggctcaaaaggcagttaaaaaaattaatgggaacagtatctgaaggtgccatctctgacacagggaagtctttcaggttggaatgccactaagaaagttccctctgtttcctcgtccctgtttgggtgctatttgccaccaggctttcattctagcagctgttggacacagggaggtagatggacatttttagtctcagatacacctcttgctttttttaaacaacagaacttagtcaaaacagatctaaactggcttgtgctttgttatccgtgtacyactcaggaacccttcagcagagctcctgtagcaaaaggcctccggtggggaaaacgtacacaccacaggtcctttcaacacatctayacatcaattctggtgtaccaggatgcagatacaggcgtgctgtactcatgctgaaaacatgagaaaaatacttgcatcacgaaaggcaaaacagaacataagcctagagggaaataaaaatacacccttccccacctcaaaacagggaactccatcacagcagcaactacagtcacaaccccagaaagctgttggaagcactgagcggcttga

SEQ ID NO: 43334 - DNA, 600 bp, Chicken  19866894281123_2
agtctttcaggttggaatgccactaagaaagttccctctgtttcctcgtccctgtttgggtgctatttgccaccaggctttcattctagcagctgttggacacagggaggtagatggacatttttagtctcagatacacctcttgctttttttaaacaacagaacttagtcaaaacagatctaaactggcttgtgctttgttatccgtgtacyactcaggaacccttcagcagagctcctgtagcaaaaggcctccggtggggaaaacgtacacaccacaggtcctttcaacacatctayacatcaattctggtgtaccaggatgcagatacaggcgtgctgtactcatgctgaaaacatgagaaaaatacttgcatcacgaaaggcaaaacagaacataagcctagagggaaataaaaatacacccttccccacctcaaaacagggaactccatcacagcagcaactacagtcacaaccccagaaagctgttggaagcactgagcggcttgagacagacagctgaaaaaagaggaatcatatcatgttatgaaggggagatgaagtgtagctctgccctcagttgcatgacgtgaacct

SEQ ID NO: 43335 - DNA, 600 bp, Chicken  19866894281133_1
accataacacacactattctatgttctgtataataaaagtggagaaccaagtgacatctcatttggattattattgccaatgggaacggtgtacagtgtatagagatgcacataagtatatgcatgcatcaaaaataacagaaatggcacaatttcttttcctcttcacatccaggacacactgcatgaaagtcgaagattaagaacataagacacaactccttagcttccctacatgaaaagcaccctggctgtgtgagtcaatggaattgcaaagattttttgaaacagatgcctacrttaatgattggactttaatccttttcaaagtttcactttctcctacttttacgtgttacaccgtgttctctccaggtgtccctttctggttaactcggtattaataaacagattactgataacgagacgaggaccatcaccatggaaattgtagtaaaaggtcatttctgtctcatttcacacatatgcaataaaaatttaatcatgcgtgcatcaaaaatctacaagttgccagtaacacacatgcatagatgagaacacctctttgccttcagataaaggacagagagccacgttccc

SEQ ID NO: 43336 - DNA, 600 bp, Chicken  19866894281133_2
ggaaaacatgaagagttcttgaactcaggtcaccattcaatgtattctagctgaaagacacagacttgagatctatactgtggtcaatagtaatttacagcaccgtagtatgcgttagagggatttatgaagcaaagaattttctaaatagtgcttttagagcagtgaaccatctatgccaaatcatttttgctgactactcagaaatcaattaaatatttattacgatcatcacaatttacatttattaccagctagttctaatagaaacctaccttgtcacagaagccccagctgagygatgatgatattttgtctcctccaaaagtattacgcattccttcaaaggcaaatttttgaacagtgaagaccaatttgaacaatacaagtgatatctatcattacacgattaagtgctctgtcagctataccagtttgctttgcttcattgaaaaagaatcccaaaatagatttcttacattttggttaactgaggtacaaagcaataattgtcccatgttgagagttgcaattttactttttttaaactcccagttcttcaagtcaaaagtaacatccgtaaaactcagtcctgaaacc

SEQ ID NO: 43337 - DNA, 600 bp, Chicken  19866894281133_3
tctggagttgaatccgtggagggatgtgaagtacaagacaatgagcttcaacaggtccatcagcagcaaaaagagttctggggaaaatgtggggctgttgctgaaaagaacaggggatcctgtgacatgagacacagaaaagttcaagctactcaatacctccttcacctcaatcttccctggtacaactggccctcaggaatcccagctatacctgacagagggcagtaaataaatgtgtgccactcttctcagtggtatccagtggtaggacaagaggcatattgaaatacaggagamactggccaaacataagggaacacttgtttatgcgaggatggttgaacactggaacaggtcacccagagaggtcatggacacatgatcagagggcttcaaaacccaatgggatgtggctccttgctctgtgtgaccgtgccaaactccagaggtccaacccagcttcacctattctgtgatgcattgataaaattggccaaagaaagccaactatctcaattayaaaggacagaaacatctcwtattgaaattaatggttggatttttacaagtagtgcattaccagtgcaattcttctga

SEQ ID NO: 43338 - DNA, 600 bp, Chicken  19866894281133_4
ggcagtaaataaatgtgtgccactcttctcagtggtatccagtggtaggacaagaggcatattgaaatacaggagamactggccaaacataagggaacacttgtttatgcgaggatggttgaacactggaacaggtcacccagagaggtcatggacacatgatcagagggcttcaaaacccaatgggatgtggctccttgctctgtgtgaccgtgccaaactccagaggtccaacccagcttcacctattctgtgatgcattgataaaattggccaaagaaagccaactatctcaattayaaaggacagaaacatctcwtattgaaattaatggttggatttttacaagtagtgcattaccagtgcaattcttctgattattccaagcaaayggataacaccaacttatttctactttactgttacatgctgggattgtagattatctctaaattctgcaaagactgctgttatgtgttgacaagatttgatgatcgtttgtcattttcggaacggtaactacagatgggagggaaaatggcattacttccatagtgattggcagcctttttaaaatacattgaaaagtttgttcctatt

SEQ ID NO: 43339 - DNA, 600 bp, Chicken  19866894281133_5
ccactcttctcagtggtatccagtggtaggacaagaggcatattgaaatacaggagamactggccaaacataagggaacacttgtttatgcgaggatggttgaacactggaacaggtcacccagagaggtcatggacacatgatcagagggcttcaaaacccaatgggatgtggctccttgctctgtgtgaccgtgccaaactccagaggtccaacccagcttcacctattctgtgatgcattgataaaattggccaaagaaagccaactatctcaattayaaaggacagaaacatctcwtattgaaattaatggttggatttttacaagtagtgcattaccagtgcaattcttctgattattccaagcaaayggataacaccaacttatttctactttactgttacatgctgggattgtagattatctctaaattctgcaaagactgctgttatgtgttgacaagatttgatgatcgtttgtcattttcggaacggtaactacagatgggagggaaaatggcattacttccatagtgattggcagcctttttaaaatacattgaaaagtttgttcctattagttatttgtaaccaaaat

SEQ ID NO: 43340 - DNA, 600 bp, Chicken  19866894281133_6
gggaacacttgtttatgcgaggatggttgaacactggaacaggtcacccagagaggtcatggacacatgatcagagggcttcaaaacccaatgggatgtggctccttgctctgtgtgaccgtgccaaactccagaggtccaacccagcttcacctattctgtgatgcattgataaaattggccaaagaaagccaactatctcaattayaaaggacagaaacatctcwtattgaaattaatggttggatttttacaagtagtgcattaccagtgcaattcttctgattattccaagcaaayggataacaccaacttatttctactttactgttacatgctgggattgtagattatctctaaattctgcaaagactgctgttatgtgttgacaagatttgatgatcgtttgtcattttcggaacggtaactacagatgggagggaaaatggcattacttccatagtgattggcagcctttttaaaatacattgaaaagtttgttcctattagttatttgtaaccaaaatcgtttcaaaaacatattaggaaagaagaaaatgacatagattaagtttacaggagcacaaggacagactgggc

SEQ ID NO: 43341 - DNA, 600 bp, Chicken  19866894281134_1
tctactgatccatttctaccaaatttaacagagttgtcatcttaaagacgtgaaatctctctgagctctgaggaaaaatctgcccaatggtaaaataagaagccaagagctacttagtgactgccagccggcacccatgtcaccatgggccaggcagaagtgctgctggtggttacaaggggcagcaagaacccaaggaatggcaagaaggaataagggatagagagaaatagaaactgaacctataggggaaaccagatgaggggaagatcatagaaaatatcagcagagagaaacagrcaacccttccactgaaggaattagggatgaggggcagaaatttgcacgtggtgaagcttcattagttccactaatcacagaacaatttgtttataggaaagtattttggtttgtttgttgtttgccttacaaggatgaacaggtgccttaatatattccatgtgtggagtaacagaggaacagccaatactgagagcgctctgttcaggctcaatttataaatggaaaagtgattttgcattcaacaggaaggataaaaatggtaccctgtcgttcacagcaggagacagaatttaaata

SEQ ID NO: 43342 - DNA, 600 bp, Chicken  19866894281164_1
tcataattatgcatacatcaactgacataatgagagatcacttcggtagctccgtaactaccgagatagccaatggtcataaaagttaattaaaataaattcaaaggatgaaaccacctgaagagaccgcaccacaaatgggaacacagagccattacagtgcacagctccaccagagcagaatgagggtgcagggcccttcctgaggtacaaatgcatggcaaagattattgttaaaagtactattcctgagttcaaaagcctccgaaccttacggcaactaatgaagtattctgtgtrggtgcagtgaggcaggtgccacaacatgtgtagcttggcagcttgtgtctgtgggaacatcgcgctgaaagtgcccagctctgagcctgcagcatttcattaccgggcttttgcacgctgatggctgcgtgtccatctggatgtgtacgcgaagcttcacttctgcatgaatactgaggatgtgaagcaattacacatccattcaccttgctcacacaagggcagagagcatccagggaaatggagaatgcaaaacaaagtccagaattgttaaaaatgcccagaaataaatgtgcgtac

SEQ ID NO: 43343 - DNA, 599 bp, Chicken  19866894281177_1
  misc_feature (1)..(184): n is any nucleotide
nnnnnnnnnnnnnnnnnnnnnnnnnnnnnnnnnnnnnnnnnnnnnnnnnnnnnnnnnnnnnnnnnnnnnnnnnnnnnnnnnnnnnnnnnnnnnnnnnnnnnnnnnnnnnnnnnnnnnnnnnnnnnnnnnnnnnnnnnnnnnnnnnnnnnnnnnnnnnnnnnnnnnnnnnnnnnnnnnnnnnnnnatttattagtattcagaaactgtttccaattccttatttcagttttcaaaaaaatggagaccagatcacgggttgttagataagccctttagactgatcctttcgtggatacagtwtgagtttgcctatccaaaatccaaaactgaaagaaatttatttttcttgtaaataattttgttcctgttaatttacccttttttacttgcattctttgcatgtatgcatagaaatttcattaggcaactaactgaaaaaaatggcatgtccacctgaaatgaagacagtgttacaaaatggcacaaaagtgctttgataaggcatgttaccgctttatttttctttaagttgttaaaatgttcatttgtccattttacartttcattcatagacctatctagattattcatttctgttt

SEQ ID NO: 43344 - DNA, 600 bp, Chicken  19866894281177_2
tagataagccctttagactgatcctttcgtggatacagtwtgagtttgcctatccaaaatccaaaactgaaagaaatttatttttcttgtaaataattttgttcctgttaatttacccttttttacttgcattctttgcatgtatgcatagaaatttcattaggcaactaactgaaaaaaatggcatgtccacctgaaatgaagacagtgttacaaaatggcacaaaagtgctttgataaggcatgttaccgctttatttttctttaagttgttaaaatgttcatttgtccattttacartttcattcatagacctatctagattattcatttctgtttgtacattaagtgcactggatgccttgttgctgtattcacacaatactgtgacagattaatgcaggcttgatataacctggctaatgaactagtrctactgcttcaaaatacactataccatagatattactactctatttaggagaagtaatctgcagtaattttctacatttctttgtaacaaaatatttgaacatatccctgcctatgtattatacatttatttcaaaatcagccttgtgtagggatgaactgcagctg

SEQ ID NO: 43345 - DNA, 600 bp, Chicken  19866894281177_3
ctttgcatgtatgcatagaaatttcattaggcaactaactgaaaaaaatggcatgtccacctgaaatgaagacagtgttacaaaatggcacaaaagtgctttgataaggcatgttaccgctttatttttctttaagttgttaaaatgttcatttgtccattttacartttcattcatagacctatctagattattcatttctgtttgtacattaagtgcactggatgccttgttgctgtattcacacaatactgtgacagattaatgcaggcttgatataacctggctaatgaactagtrctactgcttcaaaatacactataccatagatattactactctatttaggagaagtaatctgcagtaattttctacatttctttgtaacaaaatatttgaacatatccctgcctatgtattatacatttatttcaaaatcagccttgtgtagggatgaactgcagctgtgtcccagagtaagtttactgcagagttgtattggtttgaagttttctccaccaccaataatgaacttttctctggamatctgctttcttaggatactcaccaaaaggctttaacaggcttgagtcttcgttt

SEQ ID NO: 43346 - DNA, 600 bp, Chicken  19866894281177_4
acaatactgtgacagattaatgcaggcttgatataacctggctaatgaactagtrctactgcttcaaaatacactataccatagatattactactctatttaggagaagtaatctgcagtaattttctacatttctttgtaacaaaatatttgaacatatccctgcctatgtattatacatttatttcaaaatcagccttgtgtagggatgaactgcagctgtgtcccagagtaagtttactgcagagttgtattggtttgaagttttctccaccaccaataatgaacttttctctggamatctgctttcttaggatactcaccaaaaggctttaacaggcttgagtcttcgtttatttgcttagtggggttacatggagcaattcatcttatattttcttaacaaagatgctagtttcaattagagcagtgcaaactcactaactcaaaagcttgtgagctctgatttcatagatgatagcaatttctttgtttctgtttcctatgcatgaaatggagatacccatctcctcaaatcacaaactattctaagtgtattacatgattattttgaagcaccaacatagataattaatattg

SEQ ID NO: 43347 - DNA, 599 bp, Chicken  19866894281186_1
  misc_feature (1)..(24): n is any nucleotide
nnnnnnnnnnnnnnnnnnnnnnnnaaaagaaacttgttttggaccgtttattaaatcatgaatcttctttgccatgtatgtgtgtaatctggtggggcaggttcacggaaggtatttctgtggttacaggtctatgtgcacccagcaaactgctagcaacgtgtggggtaaatcatgcaaaatgatggttttctgatttttttttagtttttttttttagtgtggggaacaagttatgtaaggcttatctctcagaagttgggctgtttaggaagcagtttaggaagacatgaaggaatygcatgagcatttggagggagaggaaactgagttgaggcacagaataacttgcagtagataagtgctctaaaagttcttaagaaaaggtactataggaactaggtactattaggaacatgtgaaagatgaaaaagttcaaaataattacattaattaacatcccccatgaatgcttggggagtgggtcacaaggaggaagaagtttgagacagtagtagaccagtcaacctcatactgacagcccaaaggaaaaaggacctgtctgttaataacctcatagaggataataaggtgattaa

SEQ ID NO: 43348 - DNA, 600 bp, Chicken  19866894281186_2
aggtactattaggaacatgtgaaagatgaaaaagttcaaaataattacattaattaacatcccccatgaatgcttggggagtgggtcacaaggaggaagaagtttgagacagtagtagaccagtcaacctcatactgacagcccaaaggaaaaaggacctgtctgttaataacctcatagaggataataaggtgattaaaaatagaccatgtggatttatagtgtatgaattgtgacattcctgtagcaggatagaaactgccaagcggataaaaagtggcagatgtgatatattgtgarctattgtgaaatggtgatattcctcaatagcacttggataaacttagcagttgtttccactatccaccactcaggaattcttagaatcatcagggatgtggtataagagcaagtcattgagcaaggcagcttccacttatgactcactctttgctggtctagggcagcttgcaattattcagacatgttctggcaaggaagtctggctcttcctcacttactctttgctgcttactctcagacagcatctcagactcaatatacagcaaacctacagttcttgattcctggtgaccacaa

SEQ ID NO: 43349 - DNA, 600 bp, Chicken  19866894281186_3
tcaatagcacttggataaacttagcagttgtttccactatccaccactcaggaattcttagaatcatcagggatgtggtataagagcaagtcattgagcaaggcagcttccacttatgactcactctttgctggtctagggcagcttgcaattattcagacatgttctggcaaggaagtctggctcttcctcacttactctttgctgcttactctcagacagcatctcagactcaatatacagcaaacctacagttcttgattcctggtgaccacaatgcaacccctatgtattacaacrcaygtagtatttagatattctgctatagcttagtatgaagtattacacccaacactaaaattgactgaaattatttaatgatggtggtttacactgaggttttgagatgatattttgctgctattttgccatgtggtaccaagaggtgctgggtgaaaatgtgatcctagtaatatcagtaataacaattctggtgaccttaataaagcaagaattgtgctgaagagaacagaaaaaagaaatgcagccagcttkaaacttggaaataacagtayataacraaagttatatttgaagacc

SEQ ID NO: 43350 - DNA, 600 bp, Chicken  19866894281186_4
atagcacttggataaacttagcagttgtttccactatccaccactcaggaattcttagaatcatcagggatgtggtataagagcaagtcattgagcaaggcagcttccacttatgactcactctttgctggtctagggcagcttgcaattattcagacatgttctggcaaggaagtctggctcttcctcacttactctttgctgcttactctcagacagcatctcagactcaatatacagcaaacctacagttcttgattcctggtgaccacaatgcaacccctatgtattacaacrcaygtagtatttagatattctgctatagcttagtatgaagtattacacccaacactaaaattgactgaaattatttaatgatggtggtttacactgaggttttgagatgatattttgctgctattttgccatgtggtaccaagaggtgctgggtgaaaatgtgatcctagtaatatcagtaataacaattctggtgaccttaataaagcaagaattgtgctgaagagaacagaaaaaagaaatgcagccagcttkaaacttggaaataacagtayataacraaagttatatttgaagaccagc

SEQ ID NO: 43351 - DNA, 600 bp, Chicken  19866894281186_5
tcttgattcctggtgaccacaatgcaacccctatgtattacaacrcaygtagtatttagatattctgctatagcttagtatgaagtattacacccaacactaaaattgactgaaattatttaatgatggtggtttacactgaggttttgagatgatattttgctgctattttgccatgtggtaccaagaggtgctgggtgaaaatgtgatcctagtaatatcagtaataacaattctggtgaccttaataaagcaagaattgtgctgaagagaacagaaaaaagaaatgcagccagcttkaaacttggaaataacagtayataacraaagttatatttgaagaccagcaaaatagatgctcggacatgagcactcatgtttgctaagcctggatgcagggaagtattgtgctgaggcaatagaggtttgctgctttttttccccagtctttggctggataagttaactgtgctttgtagtaggacatgtgaagagtgttggagaatgatcagcactctcagtttgtggatgatgaaatgtgtgtaggccacaggcagtatttaatccaacatcatacagcaggggcagacgtcatttttt

SEQ ID NO: 43352 - DNA, 600 bp, Chicken  19866894281186_6
aatgcaacccctatgtattacaacrcaygtagtatttagatattctgctatagcttagtatgaagtattacacccaacactaaaattgactgaaattatttaatgatggtggtttacactgaggttttgagatgatattttgctgctattttgccatgtggtaccaagaggtgctgggtgaaaatgtgatcctagtaatatcagtaataacaattctggtgaccttaataaagcaagaattgtgctgaagagaacagaaaaaagaaatgcagccagcttkaaacttggaaataacagtayataacraaagttatatttgaagaccagcaaaatagatgctcggacatgagcactcatgtttgctaagcctggatgcagggaagtattgtgctgaggcaatagaggtttgctgctttttttccccagtctttggctggataagttaactgtgctttgtagtaggacatgtgaagagtgttggagaatgatcagcactctcagtttgtggatgatgaaatgtgtgtaggccacaggcagtatttaatccaacatcatacagcaggggcagacgtcattttttatttctctgtatgtatataa

SEQ ID NO: 43353 - DNA, 600 bp, Chicken  19866894281186_7
acccctatgtattacaacrcaygtagtatttagatattctgctatagcttagtatgaagtattacacccaacactaaaattgactgaaattatttaatgatggtggtttacactgaggttttgagatgatattttgctgctattttgccatgtggtaccaagaggtgctgggtgaaaatgtgatcctagtaatatcagtaataacaattctggtgaccttaataaagcaagaattgtgctgaagagaacagaaaaaagaaatgcagccagcttkaaacttggaaataacagtayataacraaagttatatttgaagaccagcaaaatagatgctcggacatgagcactcatgtttgctaagcctggatgcagggaagtattgtgctgaggcaatagaggtttgctgctttttttccccagtctttggctggataagttaactgtgctttgtagtaggacatgtgaagagtgttggagaatgatcagcactctcagtttgtggatgatgaaatgtgtgtaggccacaggcagtatttaatccaacatcatacagcaggggcagacgtcattttttatttctctgtatgtatataaggaggg

SEQ ID NO: 43354 - DNA, 599 bp, Chicken  19866894281187_1
  misc_feature (1)..(203): n is any nucleotide
nnnnnnnnnnnnnnnnnnnnnnnnnnnnnnnnnnnnnnnnnnnnnnnnnnnnnnnnnnnnnnnnnnnnnnnnnnnnnnnnnnnnnnnnnnnnnnnnnnnnnnnnnnnnnnnnnnnnnnnnnnnnnnnnnnnnnnnnnnnnnnnnnnnnnnnnnnnnnnnnnnnnnnnnnnnnnnnnnnnnnnnnnnnnnnnnnnnnnnnnnnntgttcccattagttccttaatgtctatttcatattacttcttaaattactcttctagatttgatatcagaagaaacgagtatttaactgcataaaartgtaaaacagtacagtatgtaaaataatctgcatcttcagacactgttaccaaaataaattaaggataattaaaatccagtactttctcagatacagacaaatataggatttttaggttttgttgttgttgttgttgtttgtttgtttgcttgcttgctttttaagattcatgttctttgcactagatttttaaatgtgaagttcttctggttatttgagaaaaactgaaaacccgggacttaatgcagcttagatcttatctaaaatgccaaaaagtcattctcttccccttttttct

SEQ ID NO: 43355 - DNA, 600 bp, Chicken  19866894281187_2
gtacagtatgtaaaataatctgcatcttcagacactgttaccaaaataaattaaggataattaaaatccagtactttctcagatacagacaaatataggatttttaggttttgttgttgttgttgttgtttgtttgtttgcttgcttgctttttaagattcatgttctttgcactagatttttaaatgtgaagttcttctggttatttgagaaaaactgaaaacccgggacttaatgcagcttagatcttatctaaaatgccaaaaagtcattctcttccccttttttctttttcttttytttttttttctgtttcataaataagagtaatatatcacctgaaaatataaatgaacatctctccattttttctctatatcttttatttaaacttgtgttctagtggatgtaagtaccctaaaagtgttcagacagactcaacagctgtcagtaacatctatttatcaactgtttatgcttctcctattcctaggaaaagtgcctatccttagaactgctgtatgccattctcaccacttcatgcaggagtatttgtatcttctaggtagagaatgtattcacacacaacatattcctcta

SEQ ID NO: 43356 - DNA, 600 bp, Chicken  19866894281188_1
tcttgcagaaacctgagaaacctgagaagaatattaatgtagctaagaacttaagctgaaaagagacaaaaatctgtgcccagtttaaaaagaaaaaatgaaatgtgtctccagatcatagaattcagtcattgctcccatagattgttgaatgggacttcatcttgaatgccagtttagagtagttctagagagtataagaactacaggaccttacaaactcttctgctttcgaaaggataccttaatatcctccagtgattgcagaatagctctagaatatcaagaagcagaaccttyaaacccttatgcaaattgatacatctcctggttgcctttgggacaactggcacctagtcactgcttggagaaataaaatactttatttgaagacataaggaatggaaaaacatccctctaacttcttagtctctttgccagttgtgggcagtgacagcaaaattagggccttaatgcttattttagggagttttgcacaatttacagatgataactctctgaacttcctttgctaaatgtataatcaaagaggctgtgtgcagcagttttctgttgcagtaattctggtggttttccttt

SEQ ID NO: 43357 - DNA, 600 bp, Chicken  19866894281188_2
cataaggaatggaaaaacatccctctaacttcttagtctctttgccagttgtgggcagtgacagcaaaattagggccttaatgcttattttagggagttttgcacaatttacagatgataactctctgaacttcctttgctaaatgtataatcaaagaggctgtgtgcagcagttttctgttgcagtaattctggtggttttcctttgcagaactgattgcatttcctttctttacacaaatctccattcagtcactctcttatgctacttatatcagatatgcagcctttgatctctgrgtaaaaaatactgcttttgaaatgtctatgaaccagcactgttcttatgggcatcaatctgtactactgtattctctggtcatagtggtcctctaggctgttttcagcttctctatcttgaaagccttcctgcagaatatttctaatactgggatagtcctcacttcactctataagtgccacctttggccttttctaggaagaaaataagtgaagtaaattttactcttgtccaaagtaaacattatctgtgtgctgcataccttcagaaagcaagtcctctaaatccttgccctggga

SEQ ID NO: 43358 - DNA, 599 bp, Chicken  19866894281192_1
  misc_feature (1)..(4): n is any nucleotide
nnnnctttctgggaagaagttgatattttgtgcagcactttacatacagtatttttagacaggcccctaagatttcactgcaaattctgaatgttgaggttctggtagaggcggcagcagtcatcagcgttaacatcgaaggtaataacagtggtgctatagccttctttaagccaggcattgcaaaacaggacactttaccatgaaagtttattcaaatgtgctccaaaggggaactgattcttgtgcagtctgggctcagctctgtaacatcctaaagtaagcacaggagaacagtcycattattttagagtctgtggtctgtgcttaccgcatgccaatttttaaaggtgcacttattccctcttctgttctttttcccgtcctatggtgcttccctcccttaagcacaaaggatcctccacaatgacacgcaaccccagacacattcccagaccaatcctcgtactcgtaaccttctcacatcccacttagctctgcatgactctgccaccatccttcagcctgccccacctcctcagtgctaatatagaatcaataaagtcagaaagacygctaaaatcatctagtccaaccat

SEQ ID NO: 43359 - DNA, 600 bp, Chicken  19866894281192_2
taaagtaagcacaggagaacagtcycattattttagagtctgtggtctgtgcttaccgcatgccaatttttaaaggtgcacttattccctcttctgttctttttcccgtcctatggtgcttccctcccttaagcacaaaggatcctccacaatgacacgcaaccccagacacattcccagaccaatcctcgtactcgtaaccttctcacatcccacttagctctgcatgactctgccaccatccttcagcctgccccacctcctcagtgctaatatagaatcaataaagtcagaaagacygctaaaatcatctagtccaaccatcaacccatcaccaccacaccactaaaccatgtcactcaatggcatatcccacagggcacatccatttmggcagggggaaaaagtatatctgaagctagcacttcccttgccctgcccttctctctccaagcagatgcacactctggagcccacacttccaaactttctgcttctttgagcgatttccatactaggaaacagagtcattgaattttgcttagttaagagaagacagctcatgtcagaagatgtttgctagattgggtctcattttgt

SEQ ID NO: 43360 - DNA, 600 bp, Chicken  19866894281192_3
tctgttctttttcccgtcctatggtgcttccctcccttaagcacaaaggatcctccacaatgacacgcaaccccagacacattcccagaccaatcctcgtactcgtaaccttctcacatcccacttagctctgcatgactctgccaccatccttcagcctgccccacctcctcagtgctaatatagaatcaataaagtcagaaagacygctaaaatcatctagtccaaccatcaacccatcaccaccacaccactaaaccatgtcactcaatggcatatcccacagggcacatccatttmggcagggggaaaaagtatatctgaagctagcacttcccttgccctgcccttctctctccaagcagatgcacactctggagcccacacttccaaactttctgcttctttgagcgatttccatactaggaaacagagtcattgaattttgcttagttaagagaagacagctcatgtcagaagatgtttgctagattgggtctcattttgtaacatttcccctcaaaggatcattcaatgatgcatcttagaatcagattccagagagggaactaaaagaaacatcaataaaaagagaaactg

SEQ ID NO: 43361 - DNA, 600 bp, Chicken  19866894281192_4
cctgaatgcacagcaaacttacaaaggccactcatacacattttgtattaatctgaaaatactgtgtgcattgcctcagcttgcctgcctgctgacagagagccatagacactatggaaatattcctaatgatggcattttacctagctgtcactttcacatgctgttgcaagctctctggttgagcaaggaggtttccaaactgtttaaatgaagtttgaaacctgaatatgttcacacactgtgaacatcaaaactatgcattcagcagcatgccatctgtgtgcaaccattccttgyggtgatgargtttgatgtcagtgctgaagtcagcctcttggacctcatatccacagtgagacctcaagtggccaccaaatccccctcacaggatctgggtgtcaccagactcaggctcccacccctcctgctcccacctgaatgaaagcaaaacgtttaggacagagtagaattcaacatggacaaggtatgttgaatatgactcttccaaaggagcccattgtgaaggtctcatgaacgaactatggaaatgggaactaggcaaaagcctgctcatctctgaatctgccttagggttgg

SEQ ID NO: 43362 - DNA, 600 bp, Chicken  19866894281192_5
acagcaaacttacaaaggccactcatacacattttgtattaatctgaaaatactgtgtgcattgcctcagcttgcctgcctgctgacagagagccatagacactatggaaatattcctaatgatggcattttacctagctgtcactttcacatgctgttgcaagctctctggttgagcaaggaggtttccaaactgtttaaatgaagtttgaaacctgaatatgttcacacactgtgaacatcaaaactatgcattcagcagcatgccatctgtgtgcaaccattccttgyggtgatgargtttgatgtcagtgctgaagtcagcctcttggacctcatatccacagtgagacctcaagtggccaccaaatccccctcacaggatctgggtgtcaccagactcaggctcccacccctcctgctcccacctgaatgaaagcaaaacgtttaggacagagtagaattcaacatggacaaggtatgttgaatatgactcttccaaaggagcccattgtgaaggtctcatgaacgaactatggaaatgggaactaggcaaaagcctgctcatctctgaatctgccttagggttggtgctactcc

SEQ ID NO: 43363 - DNA, 600 bp, Chicken  19866894281199_1
tttagctctaaaatatgggccttaaatgtatttgaattatttaaaattgagaaatattcaaatttacatgacatactgatcataattttatttatcaatagaacaaggtcatctgctctaaaaagacataaatttctgctaacactaattatcttcatggtcaggtgactcatgtgaactctgcaactcaaatcactttaaaagaaactattatttatgtgtcaatgaatcacaaagaaaagaggtgcaaatttactgtctctttatgatcataagatacaaaaaaaacccaaccccccmaaaaaacccacccacccgggcttttagaatacagttaatcaccagtaatttgtaatcactattttaaaaygtaacaatgcattccttccattttctttcytctcactgtattcctaccaacaagaaaagagaaactccagtctactctgaaagtttcatcttttcatcgtacatatccactgtcaacttcatctaaatgaaaaagatgcttaatatatgaaatgagagtagaatgagtaaatacttgcagaaatgtccatgagctcaaggttcaaaagtatraacagctgaagtttaaac

SEQ ID NO: 43364 - DNA, 600 bp, Chicken  19866894281199_2
acatactgatcataattttatttatcaatagaacaaggtcatctgctctaaaaagacataaatttctgctaacactaattatcttcatggtcaggtgactcatgtgaactctgcaactcaaatcactttaaaagaaactattatttatgtgtcaatgaatcacaaagaaaagaggtgcaaatttactgtctctttatgatcataagatacaaaaaaaacccaaccccccmaaaaaacccacccacccgggcttttagaatacagttaatcaccagtaatttgtaatcactattttaaaaygtaacaatgcattccttccattttctttcytctcactgtattcctaccaacaagaaaagagaaactccagtctactctgaaagtttcatcttttcatcgtacatatccactgtcaacttcatctaaatgaaaaagatgcttaatatatgaaatgagagtagaatgagtaaatacttgcagaaatgtccatgagctcaaggttcaaaagtatraacagctgaagtttaaacttgcaatgtcatacttaaacaagagatttttcacgttataaaagctccttacattgaagctataaagcat

SEQ ID NO: 43365 - DNA, 600 bp, Chicken  19866894281199_3
gaacaaggtcatctgctctaaaaagacataaatttctgctaacactaattatcttcatggtcaggtgactcatgtgaactctgcaactcaaatcactttaaaagaaactattatttatgtgtcaatgaatcacaaagaaaagaggtgcaaatttactgtctctttatgatcataagatacaaaaaaaacccaaccccccmaaaaaacccacccacccgggcttttagaatacagttaatcaccagtaatttgtaatcactattttaaaaygtaacaatgcattccttccattttctttcytctcactgtattcctaccaacaagaaaagagaaactccagtctactctgaaagtttcatcttttcatcgtacatatccactgtcaacttcatctaaatgaaaaagatgcttaatatatgaaatgagagtagaatgagtaaatacttgcagaaatgtccatgagctcaaggttcaaaagtatraacagctgaagtttaaacttgcaatgtcatacttaaacaagagatttttcacgttataaaagctccttacattgaagctataaagcattccttttacatactaggacaatcatgatac

SEQ ID NO: 43366 - DNA, 500 bp, Chicken  19866894281199_4
aaaaaacccaaccccccmaaaaaacccacccacccgggcttttagaatacagttaatcaccagtaatttgtaatcactattttaaaaygtaacaatgcattccttccattttctttcytctcactgtattcctaccaacaagaaaagagaaactccagtctactctgaaagtttcatcttttcatcgtacatatccactgtcaacttcatctaaatgaaaaagatgcttaatatatgaaatgagagtagaatgagtaaatacttgcagaaatgtccatgagctcaaggttcaaaagtatraacagctgaagtttaaacttgcaatgtcatacttaaacaagagatttttcacgttataaaagctccttacattgaagctataaagcattccttttacatactaggacaatcatgatactgtgagaatatgtgaacaataaacacttagatcaataggtagcatttttgctaaattagaaaatgactcattcagaccaata

SEQ ID NO: 43367 - DNA, 600 bp, Chicken  19866894281204_1
agatagggtgtggtgtaacaaaaacaaacaatcctagaggaaaggatgcgtggaggtcaggaaggctgagttagagctataagacttcagacaaatttcatttgagttggaatagaaagatttgaatctgctagtacttaatgcatagtggttctgtagtcctttgcagactttcctcagaaagttgaagaggttcccagcagctgagagaactggcttttgtttatatgtgggtaaacaactgagggaacattgtgccatgatttggtggggtctgaggataattttaggagtggtggraagagcgtaagsaactgagagttaacagaagcaacatggaaggccaagcctttgggacatttaacactggactggatacaagatcagttaaaaaaaagtaatctggcatcagagaggggagggaccagttgatcttgtaggtctttttgtatctctgagattcagtctcactctgtaatgtgaacgatggcactattcttggttgagaatgaattcagtagcctggccagcagcacggttcagttagttttctgtgttctgataaagtcagaagcctggcagagcgttgcacgtttgcca

SEQ ID NO: 43368 - DNA, 600 bp, Chicken  19866894281204_2
gtgtaacaaaaacaaacaatcctagaggaaaggatgcgtggaggtcaggaaggctgagttagagctataagacttcagacaaatttcatttgagttggaatagaaagatttgaatctgctagtacttaatgcatagtggttctgtagtcctttgcagactttcctcagaaagttgaagaggttcccagcagctgagagaactggcttttgtttatatgtgggtaaacaactgagggaacattgtgccatgatttggtggggtctgaggataattttaggagtggtggraagagcgtaagsaactgagagttaacagaagcaacatggaaggccaagcctttgggacatttaacactggactggatacaagatcagttaaaaaaaagtaatctggcatcagagaggggagggaccagttgatcttgtaggtctttttgtatctctgagattcagtctcactctgtaatgtgaacgatggcactattcttggttgagaatgaattcagtagcctggccagcagcacggttcagttagttttctgtgttctgataaagtcagaagcctggcagagcgttgcacgtttgccatatttctttgac

SEQ ID NO: 43369 - DNA, 593 bp, Chicken  19866894281204_3
ggaaggccaagcctttgggacatttaacactggactggatacaagatcagttaaaaaaaagtaatctggcatcagagaggggagggaccagttgatcttgtaggtctttttgtatctctgagattcagtctcactctgtaatgtgaacgatggcactattcttggttgagaatgaattcagtagcctggccagcagcacggttcagttagttttctgtgttctgataaagtcagaagcctggcagagcgttgcacgtttgccatatttctttgacggtagcccaagttgtgttgggtacrtgaaatgaacactgtgctgtggctggaatatttctcacacagttacagggatttggcaatgtcagtgttgcctatcaggatcatcataatactaatttagtgtttaagattatgatgtaattagcaaatacttaattaattccctcgtcctctgtaatacaggccaatctgttagctgcttctcttcaagttggaggtgataattaccctcgtggactagagataaaatacgaaccaactcaagcattcatgcaagacggaatttgaacatcctttcacttcacagttgttgt

SEQ ID NO: 43370 - DNA, 600 bp, Chicken  19866894281212_1
ctgatatgtaaaatggcactttcaaaaacatttgttcttattccaaatgactgcatctaacactaacaggtaagtaataaggaccacttagtagcacatttgcttcaactcatagcacagttcctgaaaatcagtcatttgtaacaattggttagaagtcctgctccaaagctagaagcatgcagaagtatgcaatgacctgggggactgcctagggctttgttttataccatctgcaccttgactgccaggacgtctccaaccagtcagcagctgatgccatgggcacttgcaccacastagttggtggrggtcatgtgcagctccagaaaatctccacactctcaggttgtagatccctggtacttcacagccttacatgctgcttctcttggccacatcttctctggagaagaatatttgtcagttctgttcatttttaacacaagatagaaatgaaatcaaatttcaastagcaaagcaaaagattatgttcttggctataaagctggccacaagattgccaagaaaaaagcatacagctagagttatacataaactgaaattgtatttcattaaaaacagcattcttaactatca

SEQ ID NO: 43371 - DNA, 600 bp, Chicken  19866894281212_2
aatggcactttcaaaaacatttgttcttattccaaatgactgcatctaacactaacaggtaagtaataaggaccacttagtagcacatttgcttcaactcatagcacagttcctgaaaatcagtcatttgtaacaattggttagaagtcctgctccaaagctagaagcatgcagaagtatgcaatgacctgggggactgcctagggctttgttttataccatctgcaccttgactgccaggacgtctccaaccagtcagcagctgatgccatgggcacttgcaccacastagttggtggrggtcatgtgcagctccagaaaatctccacactctcaggttgtagatccctggtacttcacagccttacatgctgcttctcttggccacatcttctctggagaagaatatttgtcagttctgttcatttttaacacaagatagaaatgaaatcaaatttcaastagcaaagcaaaagattatgttcttggctataaagctggccacaagattgccaagaaaaaagcatacagctagagttatacataaactgaaattgtatttcattaaaaacagcattcttaactatcagagcatctcct

SEQ ID NO: 43372 - DNA, 600 bp, Chicken  19866894281212_3
agaagcatgcagaagtatgcaatgacctgggggactgcctagggctttgttttataccatctgcaccttgactgccaggacgtctccaaccagtcagcagctgatgccatgggcacttgcaccacastagttggtggrggtcatgtgcagctccagaaaatctccacactctcaggttgtagatccctggtacttcacagccttacatgctgcttctcttggccacatcttctctggagaagaatatttgtcagttctgttcatttttaacacaagatagaaatgaaatcaaatttcaastagcaaagcaaaagattatgttcttggctataaagctggccacaagattgccaagaaaaaagcatacagctagagttatacataaactgaaattgtatttcattaaaaacagcattcttaactatcagagcatctccttgcttaaaggcaacctcagctacagaggtgaagctaatgcctgmctttgcagcatcctttcctcctcagtccaccatagctcagctctgaagcttcatcacaagggaagggaccagttttcccctccatgcrgcagctctttccactaccttcctctgcttt

SEQ ID NO: 43373 - DNA, 498 bp, Chicken  19866894281212_4
atccctggtacttcacagccttacatgctgcttctcttggccacatcttctctggagaagaatatttgtcagttctgttcatttttaacacaagatagaaatgaaatcaaatttcaastagcaaagcaaaagattatgttcttggctataaagctggccacaagattgccaagaaaaaagcatacagctagagttatacataaactgaaattgtatttcattaaaaacagcattcttaactatcagagcatctccttgcttaaaggcaacctcagctacagaggtgaagctaatgcctgmctttgcagcatcctttcctcctcagtccaccatagctcagctctgaagcttcatcacaagggaagggaccagttttcccctccatgcrgcagctctttccactaccttcctctgcttttgtgttcaggatagcacctctcattcctctgttccctgccttagaaatcacttaccggttctttttatcaggtaagaatg

SEQ ID NO: 43374 - DNA, 410 bp, Chicken  19866894281212_5
cacaagatagaaatgaaatcaaatttcaastagcaaagcaaaagattatgttcttggctataaagctggccacaagattgccaagaaaaaagcatacagctagagttatacataaactgaaattgtatttcattaaaaacagcattcttaactatcagagcatctccttgcttaaaggcaacctcagctacagaggtgaagctaatgcctgmctttgcagcatcctttcctcctcagtccaccatagctcagctctgaagcttcatcacaagggaagggaccagttttcccctccatgcrgcagctctttccactaccttcctctgcttttgtgttcaggatagcacctctcattcctctgttccctgccttagaaatcacttaccggttctttttatcaggtaagaatg

SEQ ID NO: 43375 - DNA, 600 bp, Chicken  19866894281213_1
ggagttagcacagaaaagtccagtttaagcttaccccgtgacactatctgggtagcagcagtgctgctattccacctgctcatacagctctgtggccgagccaacatgaatctccatctttttcatcactttccatgtgttttccataggatattatcagatttttatgccagaattgcattataggaattgctatgaaaatctctagtgtgagtaaacctacctataattaagttaatcctgaagagattacttgttattcagctttctgcatttatctttgagcataagaaatacacrcagcagtagaaggttgctatgctgagttactgagactggataaagctttatgctggaatagtattgtgaaaactcagttgtggtcttacagtgtattctcaggaatatcctctgcacagatcttcagagtctcctggtagcgttgcttataatttgggggagaggaggagcraaaacaaagggcaaaaatatggattttataacttagaaagaaatctagcaagtcacaattattctggtagctatttgtatttctgttcagattaaactatgctatgtcagtaaaagcaggtctgtctg

SEQ ID NO: 43376 - DNA, 479 bp, Chicken  19866894281213_2
gaattgcattataggaattgctatgaaaatctctagtgtgagtaaacctacctataattaagttaatcctgaagagattacttgttattcagctttctgcatttatctttgagcataagaaatacacrcagcagtagaaggttgctatgctgagttactgagactggataaagctttatgctggaatagtattgtgaaaactcagttgtggtcttacagtgtattctcaggaatatcctctgcacagatcttcagagtctcctggtagcgttgcttataatttgggggagaggaggagcraaaacaaagggcaaaaatatggattttataacttagaaagaaatctagcaagtcacaattattctggtagctatttgtatttctgttcagattaaactatgctatgtcagtaaaagcaggtctgtctggttttggcaagggaagatttttctgagaagtcaagaagttattgcgccctc

SEQ ID NO: 43377 - DNA, 600 bp, Chicken  19866894281214_1
ggtaattcagtttaggtcttgtgtttattttgatacagtaactcaactttgcattttttcctgtgtaaatttttcatttttcaacatatttcaacacaagaaagtagaattggaggccttaccttttcctttgaaattgatatggcagcaaataacgtgatattccctagctcatatttcacagtcacttctatgagaaaagatgcctgacttaatgtcatttacatgtgtgtacgtgtgtgcagatatgcatctgtatatacataaatatgtttctgatggctgtctttctgaaccgtwattggaaacttttgttgtttcattttgtccaaccgttttcattcaagtatgttatttgttaatcagtgttttgtcacrtaaagttaaggtttgtttcctttaatacatgcttttctaggcagttcaattctcatatcagaaatgaaaaaatatttcactgttcttcttagctattaatttataatatgaacagtacaaagtgcctatgtgtatcttcttaatttacacccgagtggctaatatattttaaaacacaaactggcascaagttgaaaataacgtatggcatgtagctgatgg

SEQ ID NO: 43378 - DNA, 600 bp, Chicken  19866894281214_2
tttcaacatatttcaacacaagaaagtagaattggaggccttaccttttcctttgaaattgatatggcagcaaataacgtgatattccctagctcatatttcacagtcacttctatgagaaaagatgcctgacttaatgtcatttacatgtgtgtacgtgtgtgcagatatgcatctgtatatacataaatatgtttctgatggctgtctttctgaaccgtwattggaaacttttgttgtttcattttgtccaaccgttttcattcaagtatgttatttgttaatcagtgttttgtcacrtaaagttaaggtttgtttcctttaatacatgcttttctaggcagttcaattctcatatcagaaatgaaaaaatatttcactgttcttcttagctattaatttataatatgaacagtacaaagtgcctatgtgtatcttcttaatttacacccgagtggctaatatattttaaaacacaaactggcascaagttgaaaataacgtatggcatgtagctgatggaattagccacaatgccatgattaatgttaattttttaatctttaattctcaaatctattaaacaataaaaattcataa

SEQ ID NO: 43379 - DNA, 600 bp, Chicken  19866894281214_3
aaatatgtttctgatggctgtctttctgaaccgtwattggaaacttttgttgtttcattttgtccaaccgttttcattcaagtatgttatttgttaatcagtgttttgtcacrtaaagttaaggtttgtttcctttaatacatgcttttctaggcagttcaattctcatatcagaaatgaaaaaatatttcactgttcttcttagctattaatttataatatgaacagtacaaagtgcctatgtgtatcttcttaatttacacccgagtggctaatatattttaaaacacaaactggcascaagttgaaaataacgtatggcatgtagctgatggaattagccacaatgccatgattaatgttaattttttaatctttaattctcaaatctattaaacaataaaaattcataattgattattatgttttggggtaatggcagtaagctgaagtagtaggtgtaaactgaagagcagcaataaagcaacttgaaggtttacgttgctatcagaataatgtatcctgctgtgtaacaagatgaaatagaagcctcatttaatctggctgtccattttatggctcctactctgattcatcgtt

SEQ ID NO: 43380 - DNA, 600 bp, Chicken  19866894281215_1
caactatttacatattagtgagtgtgagtaggagaggaaacaggcggagtctggctgaaatgctgtgactggtgaaacaaggctgatatcctgttggaaatatgtcatagaccactcaaaaaggatgaagagacgggtgaagtgttctgtgagcagctggcagaaagtcatgcaattgctagagcttgttttgggggacttcaacttgcctgacatttgtgggaaaaacaatgaccacagaatgattgagttctcaattcttggtggaatcggggcaggtgagcaaaacttggacttccrgaggtgtactttggactgtttaggacattcgttcagagagtctcttgggatacagtagtgaagggcagaggggtccagaaggctgggcatacctcaagaatgaaacctgaaaggcacaggaacaagccatccctgtgctgtaagacgaactgttgggaaagaagaccagggtggcagaacaggtaactttcacagagacctatggggaaaaaaaaaggtagttcactgcctttggaagagggggcaggcagcttgggaacaagtacaaggatttagctaggacatgcaaagaaagaatta

SEQ ID NO: 43381 - DNA, 592 bp, Chicken  19866894281216_1
caagcagagagggatggatccattcactaagggcaaaactttgactgttatgtgagagcagaactgaaatagatttgtggggaatggattttacctcaaagcaactgaagtctatcagtgagtgttgatataaactttaattaaatgtaacaggagtctttcctcattggagccattactactatttcaaagaatatcccctctgtgccattggctctgtgataatacaggactcctgcaggtaactgttaagttttatttgggacattatcatagaatatccctagttggaagggacakataaggatcattgagtccaactcctgttggggacaggtgatgtggttgggaggtgaggcttggagcttctgctcttggaggtggcttgaaagcctctttttgtatggctacaactatgtagtgtaggaatgagggctggattcacatcgcattgcattctctataactgttcttcatagtgcacatatgatgtcaatgagttgtgttgttttaacagcagctttgcacagggcagaattaacataggctctcagttacactttagatcccatttctcatcacaccagaaagg

SEQ ID NO: 43382 - DNA, 600 bp, Chicken  19866894281219_1
aggtttttccccatgcatccgtagaaaacatggaataaatgacatagacgtggatggaatcatatcccccaagctgcctctgaaatcttaattaaacccacagggtcttgtttaaggatacaaaaacagcagaatatgaagtgctgaagaccagtaaataaattattggtgctccttgctacttcactgtgctggtagtgatctgaaaaaaaaaaaaccaaaaaaaaaaaccaacctccaaatctatcctttctgtttgaccattttattattagcagctactctgtgttttaaccatgrcttcttgttgaagaaaactgcactggggagaagagagtttttaaaagttggacttaggctcataaatagagggagcttctccactcagcctgaagtttgcttctcctatttttcatccatggtatctcatagtacatgctgagccagacacttggggaggtggcttggaacctaatacagctataggcaggctgcctggattcaatgctggctgcagggaccagagggcaactgtgcaagtatgaggacagaacatgctgacatctgtagtatggcatgcacagccaattaactggaaaa

SEQ ID NO: 43383 - DNA, 600 bp, Chicken  19866894281224_1
tgccctgtgagcaaaagcacgtgcttgttcaggaggccttggtgccttgtggggatttgcagtatcagctgtttactacagatgataaggatgtttaaagcaaatgcctgctctctctttttcatgtatgtggatatttacactggtctggaagagagggaaatcactaaaaataatagaatgcaaatagaggaatgtgagtttagggtgagtagttattttttttaacaaatcttaagttcctaaacacgaattgtttaaagttaccagacacatcactcaaacatgcagctgaagaamggrtgtaagcaaactctgatttctgatcctgagctgacgatacctctgcttgtgaatggtaaaatatatttggctcagaatttgtgaattaarataaaatggatttatttccttatcgtaagaaaacctgctaaaatatccaaagtatgattgcagagaatggcacacccctggtctacatacactgtttgctgtaaaaccctttttgtctttggtatttttgagcaaatctcccttttatgttttcagtggtcagatgctgcagagcatctataactgtatgctcagtgcagactctca

SEQ ID NO: 43384 - DNA, 600 bp, Chicken  19866894281224_2
cctgtgagcaaaagcacgtgcttgttcaggaggccttggtgccttgtggggatttgcagtatcagctgtttactacagatgataaggatgtttaaagcaaatgcctgctctctctttttcatgtatgtggatatttacactggtctggaagagagggaaatcactaaaaataatagaatgcaaatagaggaatgtgagtttagggtgagtagttattttttttaacaaatcttaagttcctaaacacgaattgtttaaagttaccagacacatcactcaaacatgcagctgaagaamggrtgtaagcaaactctgatttctgatcctgagctgacgatacctctgcttgtgaatggtaaaatatatttggctcagaatttgtgaattaarataaaatggatttatttccttatcgtaagaaaacctgctaaaatatccaaagtatgattgcagagaatggcacacccctggtctacatacactgtttgctgtaaaaccctttttgtctttggtatttttgagcaaatctcccttttatgttttcagtggtcagatgctgcagagcatctataactgtatgctcagtgcagactctcatrg

SEQ ID NO: 43385 - DNA, 600 bp, Chicken  19866894281224_3
tttaaagcaaatgcctgctctctctttttcatgtatgtggatatttacactggtctggaagagagggaaatcactaaaaataatagaatgcaaatagaggaatgtgagtttagggtgagtagttattttttttaacaaatcttaagttcctaaacacgaattgtttaaagttaccagacacatcactcaaacatgcagctgaagaamggrtgtaagcaaactctgatttctgatcctgagctgacgatacctctgcttgtgaatggtaaaatatatttggctcagaatttgtgaattaarataaaatggatttatttccttatcgtaagaaaacctgctaaaatatccaaagtatgattgcagagaatggcacacccctggtctacatacactgtttgctgtaaaaccctttttgtctttggtatttttgagcaaatctcccttttatgttttcagtggtcagatgctgcagagcatctataactgtatgctcagtgcagactctcatrgttatatatcaatgtctgattcttcaagtacttgtccttgatgcactgtgatgctgagtgcaaacttgccttttctccagtctgacttctg

SEQ ID NO: 43386 - DNA, 600 bp, Chicken  19866894281224_4
rtgtaagcaaactctgatttctgatcctgagctgacgatacctctgcttgtgaatggtaaaatatatttggctcagaatttgtgaattaarataaaatggatttatttccttatcgtaagaaaacctgctaaaatatccaaagtatgattgcagagaatggcacacccctggtctacatacactgtttgctgtaaaaccctttttgtctttggtatttttgagcaaatctcccttttatgttttcagtggtcagatgctgcagagcatctataactgtatgctcagtgcagactctcatrgttatatatcaatgtctgattcttcaagtacttgtccttgatgcactgtgatgctgagtgcaaacttgccttttctccagtctgacttctggcatgacatccagatgttttgcttatagcaggccttaaggttgatatcttgctgatgagctgcatctggggctcagtcaaggatgacaacagaggtcttaatcagcagcaataacagtaaaaaagaatggaaggacaactgctggagttgaaataacttccatagcttttgtgtgattcacgtggtgtctgctcagttacttatctcaa

SEQ ID NO: 43387 - DNA, 600 bp, Chicken  19866894281227_1
tgctttcagaatatcttttggaaaagctgtgcgtttttctcccagcatttagaactgaactactctcagaaattccaggtatttgggtaagtagtcagtactgaaatgctgggtattcttacagctttggaacggtaatgtactctatttaataagaggaaggacatagtgcattttccaagaaactgccagtaagagttcttcttaaaaatgagaacttatgagaacatttttcttttagcatcaacttcaaagaaacatatatatatatatatatattaataggagaaaaaaaaaaamaaaacatatctattaccagacaatgattgcttttactgcaagtctatcattacagtaccagttggtattcttacccaggaaaccacttcaccatctggtttcacactggaactaggacttgctggagctgagatttgttctcagtgttctactggaccaaggcctcagctgagaggtctggtagagtgttgaaaaggcagcactgaacaacgacctgtgggctcctgcaatgatgctaattatgaggaaggcaaaaactgcatgaaagaaaatgagcttcctggctatctctgacaaaat

SEQ ID NO: 43388 - DNA, 600 bp, Chicken  19866894281233_1
tttgctctttagcttcaaaatgaggctaattctttcctctaataattgagtctaatactgctgctttattagtgatcctaagattatgtgccagctgcaatcagctgccctttatttatatagcctggctgccaggatagcagccagcttctgtagcccatgatcatgtgaactgagaaaatttgcaagcatttgtaaaactacaatcacccctccattagcattgctttcttgacatgaattactgtttgcttttcctgaagtagctgtggtaacggttcctagatctgctgtttcccwtaactcttgtatcattgcctctcagctgcatatttatcttcctatgtggcatgatggttttgcagaatatttcctggccctcaacatttgctgcctcaaactgtgtctctgtttttcactggatctcttttagctttagcctgtgtacatgcttcatctcagcagtccttgctggaaaaaaaaaaastgtgcaccacaaatagcatctagacaagtccaaggacagaaattaaatgctctaagaatatcactcatgggtttaaccttatgctcatcckttttcacccttctgggatattg

SEQ ID NO: 43389 - DNA, 600 bp, Chicken  19866894281233_2
agcatttgtaaaactacaatcacccctccattagcattgctttcttgacatgaattactgtttgcttttcctgaagtagctgtggtaacggttcctagatctgctgtttcccwtaactcttgtatcattgcctctcagctgcatatttatcttcctatgtggcatgatggttttgcagaatatttcctggccctcaacatttgctgcctcaaactgtgtctctgtttttcactggatctcttttagctttagcctgtgtacatgcttcatctcagcagtccttgctggaaaaaaaaaaastgtgcaccacaaatagcatctagacaagtccaaggacagaaattaaatgctctaagaatatcactcatgggtttaaccttatgctcatcckttttcacccttctgggatattgtctactggtgaagaaagaggaataggggctaggaaaattccagctgacatcagaacatactttactgatgtagttactggtatggtagcaggtggtgtgcaatgcattgagcagattcatttttaggagttcagctgaggccatctgttgactctatagtgaacccaacttcataatttcgaggatg

SEQ ID NO: 43390 - DNA, 600 bp, Chicken  19866894281233_3
ttcctagatctgctgtttcccwtaactcttgtatcattgcctctcagctgcatatttatcttcctatgtggcatgatggttttgcagaatatttcctggccctcaacatttgctgcctcaaactgtgtctctgtttttcactggatctcttttagctttagcctgtgtacatgcttcatctcagcagtccttgctggaaaaaaaaaaastgtgcaccacaaatagcatctagacaagtccaaggacagaaattaaatgctctaagaatatcactcatgggtttaaccttatgctcatcckttttcacccttctgggatattgtctactggtgaagaaagaggaataggggctaggaaaattccagctgacatcagaacatactttactgatgtagttactggtatggtagcaggtggtgtgcaatgcattgagcagattcatttttaggagttcagctgaggccatctgttgactctatagtgaacccaacttcataatttcgaggatgggataagagaggttctggcatcaatgatccagtgtaaactcacagaggtaactcagatttgtttaaaagcagcagattcaacagattgatg

SEQ ID NO: 43391 - DNA, 600 bp, Chicken  19866894281238_1
aatgtatttactgctaaaggaggaaaccatgctaatgtactaattacatcatcctgaaagacttataattatctctgcaggatttcatgagtctgcatccatttgatttgtcctaattcagtcttgtcatcctcatctgcaatctcatacccagattgagcatggaaatctacacaagcgttcctaatatgcaaatggagatctgcagttccacttcaaagcagtagcttctgaagggggatttttaattattccattttgagttagtgactgtaaaagactttttttttttccttttgytggtgagttgagtattcctttcagttctgtaactgacatgtctcagtacacgtctcattctctcttccatgtgaacartgaaatgattgaccagctaatgatctatctgtttactgattgtaatccataacttcctcagggagtcgcatgtcctgtacttggactcttttgcaaatatatcttatgtaacattcctcattcttcatcacaggagactgtcaagaacttaaaaaacaatggcatgtatcagctgccctttattttgtagagatgaacagtgtctgctgtcaaaactaagat

SEQ ID NO: 43392 - DNA, 600 bp, Chicken  19866894281238_2
aggatttcatgagtctgcatccatttgatttgtcctaattcagtcttgtcatcctcatctgcaatctcatacccagattgagcatggaaatctacacaagcgttcctaatatgcaaatggagatctgcagttccacttcaaagcagtagcttctgaagggggatttttaattattccattttgagttagtgactgtaaaagactttttttttttccttttgytggtgagttgagtattcctttcagttctgtaactgacatgtctcagtacacgtctcattctctcttccatgtgaacartgaaatgattgaccagctaatgatctatctgtttactgattgtaatccataacttcctcagggagtcgcatgtcctgtacttggactcttttgcaaatatatcttatgtaacattcctcattcttcatcacaggagactgtcaagaacttaaaaaacaatggcatgtatcagctgccctttattttgtagagatgaacagtgtctgctgtcaaaactaagattccttggacaaggcaatatgttggaaaggttagtggagatgagaaactcrtgaagcaagtaatattatcatgagactt

SEQ ID NO: 43393 - DNA, 600 bp, Chicken  19866894281238_3
cgtctcattctctcttccatgtgaacartgaaatgattgaccagctaatgatctatctgtttactgattgtaatccataacttcctcagggagtcgcatgtcctgtacttggactcttttgcaaatatatcttatgtaacattcctcattcttcatcacaggagactgtcaagaacttaaaaaacaatggcatgtatcagctgccctttattttgtagagatgaacagtgtctgctgtcaaaactaagattccttggacaaggcaatatgttggaaaggttagtggagatgagaaactcrtgaagcaagtaatattatcatgagactttttattgcatggcaraagacagaaacaaagaggcacaatcatgatgcgaattgatagcwgattgaaatgtcaagttactctgttggatctgtccaaaactgtaagtggttggctgagttatggatgaaagctcatctattgtgaataactattttcaagtggaattctaagtattttcaaacccccattggaaagtgagatgcaattatgtaaggttagttaagtttaggataagtcatactgtttcactttctatggtgtattttcagttc

SEQ ID NO: 43394 - DNA, 600 bp, Chicken  19866894281238_4
gctaatgatctatctgtttactgattgtaatccataacttcctcagggagtcgcatgtcctgtacttggactcttttgcaaatatatcttatgtaacattcctcattcttcatcacaggagactgtcaagaacttaaaaaacaatggcatgtatcagctgccctttattttgtagagatgaacagtgtctgctgtcaaaactaagattccttggacaaggcaatatgttggaaaggttagtggagatgagaaactcrtgaagcaagtaatattatcatgagactttttattgcatggcaraagacagaaacaaagaggcacaatcatgatgcgaattgatagcwgattgaaatgtcaagttactctgttggatctgtccaaaactgtaagtggttggctgagttatggatgaaagctcatctattgtgaataactattttcaagtggaattctaagtattttcaaacccccattggaaagtgagatgcaattatgtaaggttagttaagtttaggataagtcatactgtttcactttctatggtgtattttcagttcgtactgagatgacttccactgatggaagtgtgcagcagtagcg

SEQ ID NO: 43395 - DNA, 600 bp, Chicken  19866894281238_5
agggagtcgcatgtcctgtacttggactcttttgcaaatatatcttatgtaacattcctcattcttcatcacaggagactgtcaagaacttaaaaaacaatggcatgtatcagctgccctttattttgtagagatgaacagtgtctgctgtcaaaactaagattccttggacaaggcaatatgttggaaaggttagtggagatgagaaactcrtgaagcaagtaatattatcatgagactttttattgcatggcaraagacagaaacaaagaggcacaatcatgatgcgaattgatagcwgattgaaatgtcaagttactctgttggatctgtccaaaactgtaagtggttggctgagttatggatgaaagctcatctattgtgaataactattttcaagtggaattctaagtattttcaaacccccattggaaagtgagatgcaattatgtaaggttagttaagtttaggataagtcatactgtttcactttctatggtgtattttcagttcgtactgagatgacttccactgatggaagtgtgcagcagtagcgctcccaagacaaaacactctcagataaccatgggtgcacttgga

SEQ ID NO: 43396 - DNA, 600 bp, Chicken  19866894281241_1
gatggggactccacacactccctgggcaatcactacctcccccatcactgagtcgtccccacaatgtcacccacctactgaatgaaccctcttaatctccctccaagcttcagatttacctccagtttttgggtgacttttttcttcagctcttctgatacgaaatcctcaaagacaaagctccagccaaatgcttctgcttcagttttgtatttcttttctctaacaaactccctggcacaaacacaacacgctcaggcacccatggcagagttctctgagagctgcaccagcagcccygtgccaccagctcacctgaagtccctgttggtaacagggaacttgtcaatggcaaagggcttcactgtcacctcccggatgggtccctcctcgtctctgctctgcgtggagctggagcccatctggaacttccctccaggcagctgcaccacgtgctcatcgcttccaaacgctgaaagtgaagcagtcagtataaacattaatgggtaaatctaaatgcacaacatagcatccctgatatgcaaaaagagccacttcatatgctggatacacactgcaatgtaacaaacgactgcaatt

SEQ ID NO: 43397 - DNA, 599 bp, Chicken  19866894281242_1
  misc_feature (1)..(185): n is any nucleotide
nnnnnnnnnnnnnnnnnnnnnnnnnnnnnnnnnnnnnnnnnnnnnnnnnnnnnnnnnnnnnnnnnnnnnnnnnnnnnnnnnnnnnnnnnnnnnnnnnnnnnnnnnnnnnnnnnnnnnnnnnnnnnnnnnnnnnnnnnnnnnnnnnnnnnnnnnnnnnnnnnnnnnnnnnnnnnnnnnnnnnnnnncttaattctctttctgtggctgaagttgtgatgcttatctgtcttgtgatgctgcatactcatatagtgaacaaatgcttgcatgttgttaaggaaaacctgcgtgttggtgccrtggtctgacaaacccagtacaacagcaaatcctttctgcaagcagactgtctcagtgatattgagatgccagctacactatgcctgtgctgggggaggtggatttgcttatgtggtttaatagatgcatcagtcatttgcaagtgaattaatattcagtgcatgcaagatgatctcagtgatgccattgcatggaaatggaataactaattctgcttcccatttatacctctatcagggcttataatcacagatgttcaaaatcaggtgctctgttgtacagcaggaaatattctagga

SEQ ID NO: 43398 - DNA, 578 bp, Chicken  19866894281242_2
aacccagtacaacagcaaatcctttctgcaagcagactgtctcagtgatattgagatgccagctacactatgcctgtgctgggggaggtggatttgcttatgtggtttaatagatgcatcagtcatttgcaagtgaattaatattcagtgcatgcaagatgatctcagtgatgccattgcatggaaatggaataactaattctgcttcccatttatacctctatcagggcttataatcacagatgttcaaaatcaggtgctctgttgtacagcaggaaatattctaggaaaatgattcayagcaattatttacaagcaaagagtatgcttcgagtctctgttggcagtttgaatctatggcttttacatttgtcatgtgatttacaaagatgtaaaacaactgaaaagagaagctggcaaatatgttttatacagcagcattcccttctttctttcttgttgtcttgtgtggagcgttttacggaaaaaaagctggaagtctttatcctagatcaaatccagtgtgcaaaagataattgtgatgctgttagcatcttcatttctggatgaagttttgt

SEQ ID NO: 43399 - DNA, 600 bp, Chicken  19866894281244_1
gtgtctactcctttaccagaaattttttcagggatgattccagtctccctaaatccatcaaatatggctattttaaatatttcaattagtcaaaattctggcatgccagtgcttagtcactttttaatttttatttatttatttatttattttaattttctcctctgatctccatattcaagatcagcccttcacactgatctgtgttggactaatgtgaattctgcctctggaacatgtatggcatgtaaaagacaacaacaagggatataacacaaagcataggagcactctgtaacycaccccctgatgattcaggtttcaattacatggcaaagttagacccttgaatgttcagacaagaaaaagatggtggatggttcagaggtaatgtacctgcagatcagatattgtaagataratgtctgcattttctatctccatttgaaaattgtgtccattttgctacacacagtccttatctaacttagcactttatctgataattcagctgagtcaaatcaaatatcaggatttctacttttttaattctggtttataatgtaacattaatgtgccatacgactttctctgtttacg

SEQ ID NO: 43400 - DNA, 600 bp, Chicken  19866894281244_2
ttttaatttttatttatttatttatttattttaattttctcctctgatctccatattcaagatcagcccttcacactgatctgtgttggactaatgtgaattctgcctctggaacatgtatggcatgtaaaagacaacaacaagggatataacacaaagcataggagcactctgtaacycaccccctgatgattcaggtttcaattacatggcaaagttagacccttgaatgttcagacaagaaaaagatggtggatggttcagaggtaatgtacctgcagatcagatattgtaagataratgtctgcattttctatctccatttgaaaattgtgtccattttgctacacacagtccttatctaacttagcactttatctgataattcagctgagtcaaatcaaatatcaggatttctacttttttaattctggtttataatgtaacattaatgtgccatacgactttctctgtttacgaaatctggaagaactccatcacttagtaataaaataatgatttagctgtcctgagaaacatatttttaccagaaaaaaaatgatctgatattttgttctttccaagaatgttttttaaaaa

SEQ ID NO: 43401 - DNA, 600 bp, Chicken  19866894281247_1
tggagcactctgatgctgagtcttctctttttttctcctcagaataagccatgtcagagacttcataacaaagtatcaaggatcagagggaggtgttcccttcatgctgactacttcgctgccctttcgagaactgcaagatgagacgctcacactacaggaagcaaagttgcaaaatgctgttgttgttcagagacttcggaaaacaaccgaaccttttagactgttagcaatgaaagctcctgatgacgactgtaaaactgctgctacacctaatggacggctcaagaatgagcaaamaaatgctatsaraagcacaagttcaaattagtttattactgactgaaagctacacacaggcagaactagacaaaatgtaatcagcaatatctggatgcactaccattcttacctagtgtgatcttagagagcaaatgtgtgctgtgctgtaatctgctgtaacaaaaatattttcaactaattttggtgatcagagcctggctgaataatgcagcagaggtaactgtacggcagggattgtccttatgatttccttggctttgctagcatgttcttcaatgagtatacttaggtagaatg

SEQ ID NO: 43402 - DNA, 600 bp, Chicken  19866894281247_2
tgatgctgagtcttctctttttttctcctcagaataagccatgtcagagacttcataacaaagtatcaaggatcagagggaggtgttcccttcatgctgactacttcgctgccctttcgagaactgcaagatgagacgctcacactacaggaagcaaagttgcaaaatgctgttgttgttcagagacttcggaaaacaaccgaaccttttagactgttagcaatgaaagctcctgatgacgactgtaaaactgctgctacacctaatggacggctcaagaatgagcaaamaaatgctatsaraagcacaagttcaaattagtttattactgactgaaagctacacacaggcagaactagacaaaatgtaatcagcaatatctggatgcactaccattcttacctagtgtgatcttagagagcaaatgtgtgctgtgctgtaatctgctgtaacaaaaatattttcaactaattttggtgatcagagcctggctgaataatgcagcagaggtaactgtacggcagggattgtccttatgatttccttggctttgctagcatgttcttcaatgagtatacttaggtagaatggtactctgag

SEQ ID NO: 43403 - DNA, 600 bp, Chicken  19866894281247_3
atgctgagtcttctctttttttctcctcagaataagccatgtcagagacttcataacaaagtatcaaggatcagagggaggtgttcccttcatgctgactacttcgctgccctttcgagaactgcaagatgagacgctcacactacaggaagcaaagttgcaaaatgctgttgttgttcagagacttcggaaaacaaccgaaccttttagactgttagcaatgaaagctcctgatgacgactgtaaaactgctgctacacctaatggacggctcaagaatgagcaaamaaatgctatsaraagcacaagttcaaattagtttattactgactgaaagctacacacaggcagaactagacaaaatgtaatcagcaatatctggatgcactaccattcttacctagtgtgatcttagagagcaaatgtgtgctgtgctgtaatctgctgtaacaaaaatattttcaactaattttggtgatcagagcctggctgaataatgcagcagaggtaactgtacggcagggattgtccttatgatttccttggctttgctagcatgttcttcaatgagtatacttaggtagaatggtactctgagac

SEQ ID NO: 43404 - DNA, 600 bp, Chicken  19866894281247_4
gtactctgagacttaattactactggtaacacattttaggggaaaaaaaatatttatttttgcactttagactaaagagaaactgaactggttgacttaatttatacttcaatataaattgctccagtttccctttgtgttttagtaacaggcaatagatgctgcagggaagttcacatttgaactcctcgaagtattttgaaaatcattgtaagtatcattagtatttaacttcatcacgagatctgcagtgtgaatgtcctattaagtcttcacatgatggtaggtgcatgtgtaagmagattgaaattagctagcatggtgcatactggatatgaagtgcctcaaagtaagctctgaaggaatcgttactcctagcggttgaagtgttttctgtctctcatgttctgctacagatgtcttacagacagggtgatgttagactgcctggctcactaggatagagatctgcttttagcctcgtcacagagaaacttcactttttctgcagtttgccaagaggctgtagtggcttaagaggacacagttgtttttgtactacatatctgtctctgtcctgaactggccgtctgatgagat

SEQ ID NO: 43405 - DNA, 599 bp, Chicken  19866894281251_1
  misc_feature (1)..(220): n is any nucleotide
nnnnnnnnnnnnnnnnnnnnnnnnnnnnnnnnnnnnnnnnnnnnnnnnnnnnnnnnnnnnnnnnnnnnnnnnnnnnnnnnnnnnnnnnnnnnnnnnnnnnnnnnnnnnnnnnnnnnnnnnnnnnnnnnnnnnnnnnnnnnnnnnnnnnnnnnnnnnnnnnnnnnnnnnnnnnnnnnnnnnnnnnnnnnnnnnnnnnnnnnnnnnnnnnnnnnnnnnnnnnccaggcttgtctttttggaaccagcctggcggtttcttgatatcacatcagctggtgtgaattgtgaaatttatttcttyccatcatttccatgcaatcctcgagtgtctgtctctgtatgcttctggattggctccccttttctctcattctgtttcctgaggtcctgacagcccttcccaatcaggggtccttcacagcttgtactgcacttcatccagtcatgtagaacattaatggaaaaacaaagactactggtcctgcagtgatccctgtgagacccctttattgattcctgtccccagctccactctaaatagaagtcacaacagttaaagcccagcagatcatccagttttccacctacattattatgcat

SEQ ID NO: 43406 - DNA, 600 bp, Chicken  19866894281252_1
tgctattactttgcttgtaggtattaagaaaaagtttgcagtgcaatgtttttcatggcaagtgtggagagcttctggtgggagtgggtcttactcatactgatacagcattgacagaagaaaaagggagggcagagtttggagtactgcaggagctgggactgttcaagaactgtagatgaaaatgtcattttaagaaaatttcctacatagagctactacaaatgggtgtagaaaaaaataattcttctgtttcaggttgaatgatgtcaaacacttcgatatctctgtttaggcacrtggtatcacacagcatttgaggctttttggcttgtgacatttttccaagtgaagtgggaacacgtgttcctgtaggaatttcagcacggctgtgtgtctcctctgggggtgatggggatgccatgttttgtcccgaaggcaatctggaatgaatgctgccctcatttgaatttctttctgaatcctttgagttgaagactgtggaaaaaagtcagctttctgtcaaaggaccttatgaaaaggaggaagatattgagtaacaaaatactgtgtagtaaaatcactgaaaaagtccatatc

SEQ ID NO: 43407 - DNA, 600 bp, Chicken  19866894281254_1
gaatgctctgtgataggaccaaagaaaagggaggaaagctgaaatgactgttattaacacgtgccaaggtttcctatctgtgtattttacacatcagcatttttgcacttggagcatttcacaggaaaaacaatcaaactaagtgactgttggaaatgggtgaggttaaaacttaatgagtttatctgctttcaaatatctccatttctttctatcaataaaacaagcattatattttcactctgagaccagagttaccactgcttaaaatgtcttcactcaagagcgctaagactcaasccatagcgctcagagttatggctcccatgaattcaaatgaaaacggaagcacatggataccatcagcagcatataatgtgattacagttaagggaccatctgttgttatgtacatttcaacacaaattagggttaagtaccttcaaagcaatggagacaccgaactcaaaggtaactccagagattctaccaagtttttgaggtagggttagatcacttttcaagagatatttgatgtatcattccaatagaaactcaccttgtcaacagcaaactaatattgttacagctgcagacaga

SEQ ID NO: 43408 - DNA, 600 bp, Chicken  19866894281257_1
agtgactgtgaagttagggtcctgtagttggagaatccagctttgtctctctatcagcaaggctgctccctcgctgcacaaaggcagctaacacagtgcatgaaggagttgaatgatccttgtggtcccttccaacctgggatattctgtggttctgtgaagcagcacacagtcatgcttcatgactggcaagcagaatattagcaaaaccaagtggccctccctgttttttgctcccaggtctctcttctctttcttagccattgtggtccctctttcacactttttgcagtgggattsgtgatgttgggcttcatccttaccaactagggagtgctgctttgagttcagacacttctctgttttctcagctgcgcttcagatgactcagatttatctcagggttctcttatttttttctttttatctggatctgtagtactggatatcccagtttgcttttggccttgcctaccaagaatgtcaaataaggataaaattaaaccgtgggtagacaaaacataatgatgcttctatggtaaaatatgatacatattaaaatcaactcattcattagtgctcacattgtgaacttattaa

SEQ ID NO: 43409 - DNA, 599 bp, Chicken  19866894281258_1
  misc_feature (1)..(198): n is any nucleotide
nnnnnnnnnnnnnnnnnnnnnnnnnnnnnnnnnnnnnnnnnnnnnnnnnnnnnnnnnnnnnnnnnnnnnnnnnnnnnnnnnnnnnnnnnnnnnnnnnnnnnnnnnnnnnnnnnnnnnnnnnnnnnnnnnnnnnnnnnnnnnnnnnnnnnnnnnnnnnnnnnnnnnnnnnnnnnnnnnnnnnnnnnnnnnnnnnnnnnngaggttgtgggtgccccatccctggagacattcaaaggccaggctggatgtggctctgggcagcctggtctggtggttggtgaccgtgcacatagcaggggsgttgaaactaggtaatctttgaggttcttttcaacccaggccattctatgattccattacatgaaatattttcgctccaaaggaaatgtgctactgtaccagagatgtagtttgcctaaatgctctatgaaaagaaaatgcaggaagttcattggctaggccacaatactcagcctgccaccatgtttttctgagttctttagcattcccacctggtaacctcatcatttatcctgaagggaaggagctgctgagcagctctccttgagaaaggctttatgcgagtatccacactgaag

SEQ ID NO: 43410 - DNA, 600 bp, Chicken  19866894281261_1
catatttgccacaactggaaagtttgtccacattgacttttgcaggtagaactatcagagaaatactcacttttgtaaacagctcaactctttaacagatcatagatttgcaattagtgtcagttttgtaacagtttaatagcactttcatattctaataaatataataaaaatcacatagtatatgaaataatgtataatgacaatctgttttagaagaatactttaaaattaatgagtttttatttcagtctacctttttttccatgattaataatctcatgctgtttttaatccttmtataaataataaatactgtcctaagatataaatttgaaagggttatattagatatagaataaacttcagctgcttttgcrtttgatttcatttgttaattgttgctttctgcaacaaygatgttagccaccctgtgttaggcctctgcgctcactgaccaatagcctgatcagggccaaatgactgcagacgtacaccaatatgatgagcagcaaaatggcatttattcactactaaacacagcttatatacatttttacctacaaaaccgtgctgtcatgtcccactctgattggttca

SEQ ID NO: 43411 - DNA, 600 bp, Chicken  19866894281261_2
agctcaactctttaacagatcatagatttgcaattagtgtcagttttgtaacagtttaatagcactttcatattctaataaatataataaaaatcacatagtatatgaaataatgtataatgacaatctgttttagaagaatactttaaaattaatgagtttttatttcagtctacctttttttccatgattaataatctcatgctgtttttaatccttmtataaataataaatactgtcctaagatataaatttgaaagggttatattagatatagaataaacttcagctgcttttgcrtttgatttcatttgttaattgttgctttctgcaacaaygatgttagccaccctgtgttaggcctctgcgctcactgaccaatagcctgatcagggccaaatgactgcagacgtacaccaatatgatgagcagcaaaatggcatttattcactactaaacacagcttatatacatttttacctacaaaaccgtgctgtcatgtcccactctgattggttcacatcagataacattgtgccttatttggccatttccacattcttttttcatccttcttcttctcctgttttctctgcatca

SEQ ID NO: 43412 - DNA, 600 bp, Chicken  19866894281261_3
gtcagttttgtaacagtttaatagcactttcatattctaataaatataataaaaatcacatagtatatgaaataatgtataatgacaatctgttttagaagaatactttaaaattaatgagtttttatttcagtctacctttttttccatgattaataatctcatgctgtttttaatccttmtataaataataaatactgtcctaagatataaatttgaaagggttatattagatatagaataaacttcagctgcttttgcrtttgatttcatttgttaattgttgctttctgcaacaaygatgttagccaccctgtgttaggcctctgcgctcactgaccaatagcctgatcagggccaaatgactgcagacgtacaccaatatgatgagcagcaaaatggcatttattcactactaaacacagcttatatacatttttacctacaaaaccgtgctgtcatgtcccactctgattggttcacatcagataacattgtgccttatttggccatttccacattcttttttcatccttcttcttctcctgttttctctgcatcaaggtcagcacgatagcactgtctctctatgcttaggga

SEQ ID NO: 43413 - DNA, 600 bp, Chicken  19866894281266_1
gcaactgttattaaaagttattcacgacaacataataattttaatgagaacaacatgtgcctttaattacacctgaatgactttgaggtggtccagtggatgaactggaggacatttacagaacatttgctcacaaagttaaaaggaaaagtaccgatggaagatgtttaattatttcttctggtaagcacacacaggaaggaagagcatgtttagatgctgactcttgaaaataagtccacctactgcttaaagggtctgagtgaattcagggtgtgaacttcagacttgctttgggascattcagccttatcgcagtgggatctgcatctacctacccagttgcacacttacctttataaatagagggctgsagcrcctctcctatgaagaatggttgagggaactgggcttgtttagcttggagaagagaaggctccggggggaccccattgtggccttccagtacttgaagggaggatataaacaggaaggggaatggttgtttacgagggtggatagtgatagggcaagggggaatggttttaaactgagacaggggaggtttaggttggatattaggagaagttttttccccag

SEQ ID NO: 43414 - DNA, 600 bp, Chicken  19866894281266_2
gaatgactttgaggtggtccagtggatgaactggaggacatttacagaacatttgctcacaaagttaaaaggaaaagtaccgatggaagatgtttaattatttcttctggtaagcacacacaggaaggaagagcatgtttagatgctgactcttgaaaataagtccacctactgcttaaagggtctgagtgaattcagggtgtgaacttcagacttgctttgggascattcagccttatcgcagtgggatctgcatctacctacccagttgcacacttacctttataaatagagggctgsagcrcctctcctatgaagaatggttgagggaactgggcttgtttagcttggagaagagaaggctccggggggaccccattgtggccttccagtacttgaagggaggatataaacaggaaggggaatggttgtttacgagggtggatagtgatagggcaagggggaatggttttaaactgagacaggggaggtttaggttggatattaggagaagttttttccccagagggtggtgatgcactgaacaggttgcccaaggaggctgtggatgccccatccctggaggcattcatggccaga

SEQ ID NO: 43415 - DNA, 600 bp, Chicken  19866894281266_3
gactttgaggtggtccagtggatgaactggaggacatttacagaacatttgctcacaaagttaaaaggaaaagtaccgatggaagatgtttaattatttcttctggtaagcacacacaggaaggaagagcatgtttagatgctgactcttgaaaataagtccacctactgcttaaagggtctgagtgaattcagggtgtgaacttcagacttgctttgggascattcagccttatcgcagtgggatctgcatctacctacccagttgcacacttacctttataaatagagggctgsagcrcctctcctatgaagaatggttgagggaactgggcttgtttagcttggagaagagaaggctccggggggaccccattgtggccttccagtacttgaagggaggatataaacaggaaggggaatggttgtttacgagggtggatagtgatagggcaagggggaatggttttaaactgagacaggggaggtttaggttggatattaggagaagttttttccccagagggtggtgatgcactgaacaggttgcccaaggaggctgtggatgccccatccctggaggcattcatggccagactgg

SEQ ID NO: 43416 - DNA, 599 bp, Chicken  19866894281267_1
  misc_feature (1)..(10): n is any nucleotide
nnnnnnnnnnctgagtaaactaagagggctgctctgaaagtaatacctcctgttttattaagtaagctcacaacctcagagacagacagtggtggtatggcagcagaggtttctgccaatttttgtgacattctgttactgggcaacagatggcagcagaggggctgtgtgacaaaatggcgtctgacatggaaatgcgtatgaagcaaagatgtggaaattaattcctccattcctccatgcagaaaaaattacacccactgaccttcattgatgcttgctgaacatttatggagaccragcagtggatgtcagcaccatgatggatggtgcatttcagcagtggcagtggcaacagtgacatgaaaaacaagccatgttctggactgccatgcagaagcgtggcatgcagtctcatgctatctgatggtgaatacacatagctaatggtggtgattatgctgaaaaacattgtcctgtagctaagaatttgctcaatcaggtagtagtattgaggtctttgtagctgttgtagtttacatgaaaataaataggagactttaatttactttcaatctatgtagtaaaaaatactgcaa

SEQ ID NO: 43417 - DNA, 600 bp, Chicken  19866894281272_1
tagcaactccagagcttttgcaaaaagaccaaagcccaggatacaggcaagtctcaccaaacttggggtacaatcatgggagcacagagttgagacctagcaggagtctgtttggtaggatttggtaagccactctagggaaacctaagagacatgctaaccaagggcaaaaccatcacacaaatctgtagcaggtgcaatttcactaaagaaggacctcatacacagtaggatatgggaaagctcatggtgtgcaatgagtggacatttgttttggctgaggacatccctggaatcctkctgttcctcatcctattggcactccaagaaatgcaggataaccaaagaccagttagctgctggagaatgagggtcttctgtctacacgccaacgctagcagttggagtgtgagcaggggtatgctagtcaaggagctggtatccatgtcttgctgtttctagcatggcacacctgataataggacaccttacaggatgacaaggcaatcccaactttactgggatggccaagacaggcagcagacaactgtctcaatattttgtacaatagtctacttctgcctcaccaccactgtcact

SEQ ID NO: 43418 - DNA, 600 bp, Chicken  19866894281281_1
gaaggaggtggtggctaccctttggcagcttttcttgtctcagtcttttgaggtgttctgtcacctgacacttccttctacatggcacttgacttcacagtgctgcaataggcaggggtagtgctggtcctctgtgctcaggatttatctgtctgttgtactgcaacactatgcgaagtttcccaagtagctctgtagaaacctccagtgtaaacacatttggcattagtaaaataaatgagacatgctatataaacctaaagtaatctaattcatctgggaaaagtacataatatgacrtgcgtattaccagagatcgtataatgttattgcaaccaaattcccacacttgtctttgttgtgattgttcttttccttttcccccacagtaatttgcatatcttcactcagtgatttgtacagtagatagattagaatcttttggggcaagaatctctcaggcattttaagagcatactcaggtattcgaggctatgtgcataatgaacagtgaaactagggtgcacagatttcatactagtcaggctatctgaatgctttctcagatcaacattcagtgaaaccaataatggttttaat

SEQ ID NO: 43419 - DNA, 600 bp, Chicken  19866894281281_2
tagatcgagaatacttgtagtcatgacttgcattttcgcttgtatgaagttaacctgggtgcttagtgtagtaccataaacctgcactctcaaaggctgttgtccccatgaataactgtgagggaacagaaaatcatttcctcttctggacgtatttagaattacctacaaatcatagtaataattaataatgctgtactgctatggtttcatgaagaggaaacattaaacttggggtactttgagaaagcattgtgttaaacagtcttatgactgcctaaaacgtgtttatgaatatamagacttttttcctagggtctttacackctgctgatatagaaagaacagtcatcattcatttttagctgctgctctcataaagtaagaaccaataaaacattttaggtcgaacacatacatgttatgtttagaacagccacccactatgtaccatatgctgtcacactctcttaacataatgagaaagactgagtttccccacttgtttttaaggcgcctctatttaatacctttcccacgctatttgatttgttttaaaatttgcaaatgagacaggctatttcttttcagaggcaaatt

SEQ ID NO: 43420 - DNA, 600 bp, Chicken  19866894281281_3
ttgcattttcgcttgtatgaagttaacctgggtgcttagtgtagtaccataaacctgcactctcaaaggctgttgtccccatgaataactgtgagggaacagaaaatcatttcctcttctggacgtatttagaattacctacaaatcatagtaataattaataatgctgtactgctatggtttcatgaagaggaaacattaaacttggggtactttgagaaagcattgtgttaaacagtcttatgactgcctaaaacgtgtttatgaatatamagacttttttcctagggtctttacackctgctgatatagaaagaacagtcatcattcatttttagctgctgctctcataaagtaagaaccaataaaacattttaggtcgaacacatacatgttatgtttagaacagccacccactatgtaccatatgctgtcacactctcttaacataatgagaaagactgagtttccccacttgtttttaaggcgcctctatttaatacctttcccacgctatttgatttgttttaaaatttgcaaatgagacaggctatttcttttcagaggcaaattgaactgcaggtagtcagccctccacag

SEQ ID NO: 43421 - DNA, 600 bp, Chicken  19866894281284_1
aattccaatcattctctccctatcactgtataattttctttgccatgcaaagctttcatgtctttatagataaaattcatctgatctgatctgaagtaagctatctttttctgaggaaagagaattagatttcttttcttgaatttcagtctggagtcttcaaagatcatattattttttatcaatagtgtataaaaatctgctagcttgaagagtgtaatatagttcgttacatggaatgtcagagttttaattgttctagagcctgacatgctaatatagaaaccaggccaagaccayaattctgctaccaaatattagtgggcaatacaataaaagtgtttttggaagactcctgaaaaaatggggaagagagacaggtttaggctttctaggggggcagggatttctgaatctgaggaggataaaatgactatcagtgaacttcagcagagatatagcaatgtcagtgacagttaggcaaattaaggcacagctttggtagtagtttcttttccaccctgtcacctggaaagatcgaactcagactgtagtgtttctgaatgaacttacaagtacaatcagaagttcaggtgagat

SEQ ID NO: 43422 - DNA, 600 bp, Chicken  19866894281284_2
ctgaatctgaggaggataaaatgactatcagtgaacttcagcagagatatagcaatgtcagtgacagttaggcaaattaaggcacagctttggtagtagtttcttttccaccctgtcacctggaaagatcgaactcagactgtagtgtttctgaatgaacttacaagtacaatcagaagttcaggtgagataataatgtgtataacatagcagccctctgtgatacattttcctttccctttcctcttttgtgtttcagtagaatgaggtagaggtaaggaggtgtggtagtaaaaaaammcttgttttaattttaatrcattgctctttcacaggtgttctagtgaagagagagagttcatgccttgcattcattcatacatatcagcatgtgtatgacatgacccttgcagctgggacagaccagcaggtttggatccttggcctacttcatcaagtgctgggctcttggcaggcacccccagacaccatctccactggatttgcacaccttggcatccttttcccatttcttgacctttcacttcaccagcctggtaatcccctttctacacccagcattttccctggtaaacaact

SEQ ID NO: 43423 - DNA, 600 bp, Chicken  19866894281284_3
tgaatctgaggaggataaaatgactatcagtgaacttcagcagagatatagcaatgtcagtgacagttaggcaaattaaggcacagctttggtagtagtttcttttccaccctgtcacctggaaagatcgaactcagactgtagtgtttctgaatgaacttacaagtacaatcagaagttcaggtgagataataatgtgtataacatagcagccctctgtgatacattttcctttccctttcctcttttgtgtttcagtagaatgaggtagaggtaaggaggtgtggtagtaaaaaaammcttgttttaattttaatrcattgctctttcacaggtgttctagtgaagagagagagttcatgccttgcattcattcatacatatcagcatgtgtatgacatgacccttgcagctgggacagaccagcaggtttggatccttggcctacttcatcaagtgctgggctcttggcaggcacccccagacaccatctccactggatttgcacaccttggcatccttttcccatttcttgacctttcacttcaccagcctggtaatcccctttctacacccagcattttccctggtaaacaactc

SEQ ID NO: 43424 - DNA, 600 bp, Chicken  19866894281284_4
aatgactatcagtgaacttcagcagagatatagcaatgtcagtgacagttaggcaaattaaggcacagctttggtagtagtttcttttccaccctgtcacctggaaagatcgaactcagactgtagtgtttctgaatgaacttacaagtacaatcagaagttcaggtgagataataatgtgtataacatagcagccctctgtgatacattttcctttccctttcctcttttgtgtttcagtagaatgaggtagaggtaaggaggtgtggtagtaaaaaaammcttgttttaattttaatrcattgctctttcacaggtgttctagtgaagagagagagttcatgccttgcattcattcatacatatcagcatgtgtatgacatgacccttgcagctgggacagaccagcaggtttggatccttggcctacttcatcaagtgctgggctcttggcaggcacccccagacaccatctccactggatttgcacaccttggcatccttttcccatttcttgacctttcacttcaccagcctggtaatcccctttctacacccagcattttccctggtaaacaactcaacccatgacttcttttt

SEQ ID NO: 43425 - DNA, 600 bp, Chicken  19866894281284_5
caggcacccccagacaccatctccactggatttgcacaccttggcatccttttcccatttcttgacctttcacttcaccagcctggtaatcccctttctacacccagcattttccctggtaaacaactcaacccatgacttctttttcccaactgcacacacttttgcaacaggtgtacccaaatgtgttatttctgatactgttatctaggcaatctcagctctctatggtaatactgatggttacacgaatgcttttggccttaaaagattgtactcaccccaaaggcccctagtaaycccccctcaactgtctgtggaatctgttarcttctcacctatctcccactataccacttgtgacattcagccatccctcacaatgctaacttttactggattcccatgctggtatttgttacrttcaacagtttctggtgtcctgtccagcagatttccacatcctgctgtcacttaccctggacctatggcatccttagcagcctgtgtatttacccacagccttaacagtatgtccactgtgactgacctggggtctttggattcagtttgtttcccactgcttgaagaggatgtgtt

SEQ ID NO: 43426 - DNA, 600 bp, Chicken  19866894281284_6
tttgcacaccttggcatccttttcccatttcttgacctttcacttcaccagcctggtaatcccctttctacacccagcattttccctggtaaacaactcaacccatgacttctttttcccaactgcacacacttttgcaacaggtgtacccaaatgtgttatttctgatactgttatctaggcaatctcagctctctatggtaatactgatggttacacgaatgcttttggccttaaaagattgtactcaccccaaaggcccctagtaaycccccctcaactgtctgtggaatctgttarcttctcacctatctcccactataccacttgtgacattcagccatccctcacaatgctaacttttactggattcccatgctggtatttgttacrttcaacagtttctggtgtcctgtccagcagatttccacatcctgctgtcacttaccctggacctatggcatccttagcagcctgtgtatttacccacagccttaacagtatgtccactgtgactgacctggggtctttggattcagtttgtttcccactgcttgaagaggatgtgttgtgatgatctgtgatggcaaggatgtgtcc

SEQ ID NO: 43427 - DNA, 558 bp, Chicken  19866894281284_7
caactcaacccatgacttctttttcccaactgcacacacttttgcaacaggtgtacccaaatgtgttatttctgatactgttatctaggcaatctcagctctctatggtaatactgatggttacacgaatgcttttggccttaaaagattgtactcaccccaaaggcccctagtaaycccccctcaactgtctgtggaatctgttarcttctcacctatctcccactataccacttgtgacattcagccatccctcacaatgctaacttttactggattcccatgctggtatttgttacrttcaacagtttctggtgtcctgtccagcagatttccacatcctgctgtcacttaccctggacctatggcatccttagcagcctgtgtatttacccacagccttaacagtatgtccactgtgactgacctggggtctttggattcagtttgtttcccactgcttgaagaggatgtgttgtgatgatctgtgatggcaaggatgtgtccttgcaaatggtttaaccattggaaaccattataatgatgtcctcagttaaa

SEQ ID NO: 43428 - DNA, 600 bp, Chicken  19866894281286_1
ctgtatctgaaaagggaccttttctcatagtcagaacgtggtttggatttttattgtgacatattgtaagattcacactcacccactaggatcttaagtttgattgaaacagtagggcaattgtctgtacctgacaactctgtgaaagtgaagacaataacacaacacatgtggtgttggctgagcctaacagcaagctctgcttctggtggcagttttcagcctttggaatttccaaagatacaaacagatgccatggggatggcagaaagcacctctcccctcctgggaataaatccrccaaatktgaagtcctmytaaaaactggacacttcagagttctttaagcaatagtgtttcaaacaaaayctttgtgttatccaatacagagaataaaacaagtctggattaaaatrttacaagtagcaaaccaggaatattagattctgtctcattccccagaaaatgctatcaggagtttaggtgactccccataatatcaatggagactttcctgtagttcaacacatcatcactaaccaaacacatttataaaagtgtatgcttccacgggcaaaggagtactgctggaggacagcc

SEQ ID NO: 43429 - DNA, 600 bp, Chicken  19866894281286_2
tgaaaagggaccttttctcatagtcagaacgtggtttggatttttattgtgacatattgtaagattcacactcacccactaggatcttaagtttgattgaaacagtagggcaattgtctgtacctgacaactctgtgaaagtgaagacaataacacaacacatgtggtgttggctgagcctaacagcaagctctgcttctggtggcagttttcagcctttggaatttccaaagatacaaacagatgccatggggatggcagaaagcacctctcccctcctgggaataaatccrccaaatktgaagtcctmytaaaaactggacacttcagagttctttaagcaatagtgtttcaaacaaaayctttgtgttatccaatacagagaataaaacaagtctggattaaaatrttacaagtagcaaaccaggaatattagattctgtctcattccccagaaaatgctatcaggagtttaggtgactccccataatatcaatggagactttcctgtagttcaacacatcatcactaaccaaacacatttataaaagtgtatgcttccacgggcaaaggagtactgctggaggacagccctgtttt

SEQ ID NO: 43430 - DNA, 600 bp, Chicken  19866894281286_3
ccttttctcatagtcagaacgtggtttggatttttattgtgacatattgtaagattcacactcacccactaggatcttaagtttgattgaaacagtagggcaattgtctgtacctgacaactctgtgaaagtgaagacaataacacaacacatgtggtgttggctgagcctaacagcaagctctgcttctggtggcagttttcagcctttggaatttccaaagatacaaacagatgccatggggatggcagaaagcacctctcccctcctgggaataaatccrccaaatktgaagtcctmytaaaaactggacacttcagagttctttaagcaatagtgtttcaaacaaaayctttgtgttatccaatacagagaataaaacaagtctggattaaaatrttacaagtagcaaaccaggaatattagattctgtctcattccccagaaaatgctatcaggagtttaggtgactccccataatatcaatggagactttcctgtagttcaacacatcatcactaaccaaacacatttataaaagtgtatgcttccacgggcaaaggagtactgctggaggacagccctgtttttgtgctggag

SEQ ID NO: 43431 - DNA, 600 bp, Chicken  19866894281286_4
cttttctcatagtcagaacgtggtttggatttttattgtgacatattgtaagattcacactcacccactaggatcttaagtttgattgaaacagtagggcaattgtctgtacctgacaactctgtgaaagtgaagacaataacacaacacatgtggtgttggctgagcctaacagcaagctctgcttctggtggcagttttcagcctttggaatttccaaagatacaaacagatgccatggggatggcagaaagcacctctcccctcctgggaataaatccrccaaatktgaagtcctmytaaaaactggacacttcagagttctttaagcaatagtgtttcaaacaaaayctttgtgttatccaatacagagaataaaacaagtctggattaaaatrttacaagtagcaaaccaggaatattagattctgtctcattccccagaaaatgctatcaggagtttaggtgactccccataatatcaatggagactttcctgtagttcaacacatcatcactaaccaaacacatttataaaagtgtatgcttccacgggcaaaggagtactgctggaggacagccctgtttttgtgctggagg

SEQ ID NO: 43432 - DNA, 600 bp, Chicken  19866894281286_5
gattcacactcacccactaggatcttaagtttgattgaaacagtagggcaattgtctgtacctgacaactctgtgaaagtgaagacaataacacaacacatgtggtgttggctgagcctaacagcaagctctgcttctggtggcagttttcagcctttggaatttccaaagatacaaacagatgccatggggatggcagaaagcacctctcccctcctgggaataaatccrccaaatktgaagtcctmytaaaaactggacacttcagagttctttaagcaatagtgtttcaaacaaaayctttgtgttatccaatacagagaataaaacaagtctggattaaaatrttacaagtagcaaaccaggaatattagattctgtctcattccccagaaaatgctatcaggagtttaggtgactccccataatatcaatggagactttcctgtagttcaacacatcatcactaaccaaacacatttataaaagtgtatgcttccacgggcaaaggagtactgctggaggacagccctgtttttgtgctggaggacagtgaaattcatctgagaggaatgtttagtcctttcaaaggattactat

SEQ ID NO: 43433 - DNA, 600 bp, Chicken  19866894281286_6
gcaattgtctgtacctgacaactctgtgaaagtgaagacaataacacaacacatgtggtgttggctgagcctaacagcaagctctgcttctggtggcagttttcagcctttggaatttccaaagatacaaacagatgccatggggatggcagaaagcacctctcccctcctgggaataaatccrccaaatktgaagtcctmytaaaaactggacacttcagagttctttaagcaatagtgtttcaaacaaaayctttgtgttatccaatacagagaataaaacaagtctggattaaaatrttacaagtagcaaaccaggaatattagattctgtctcattccccagaaaatgctatcaggagtttaggtgactccccataatatcaatggagactttcctgtagttcaacacatcatcactaaccaaacacatttataaaagtgtatgcttccacgggcaaaggagtactgctggaggacagccctgtttttgtgctggaggacagtgaaattcatctgagaggaatgtttagtcctttcaaaggattactatttagatttcccaaacaatctttctccacttagtaactgattgactgc

SEQ ID NO: 43434 - DNA, 548 bp, Chicken  19866894281296_1
tttaaaagacatttgaagtagcagactagcatgtagttttgacttctctaacctacatgccttatgtttgtgcctcaagataacattgaataacatatttaaactactcatgtgtgaaaaagcaaaattatatctcatgaactgatttcttcacacattcaaaaaatcgaattccccttttgttcagatactaaacagaaatcagaagggaaacgtttttctagaaatgatattgtttttcaaattggagatgatatgaatgcctttaatgaaaatgggtgatattcattttaaaacttrtatcattttacaaaggtatacttttataaatacagttttcattatgtaggcattacagtctggttcagttgataatgagtcagagaagtttactgagctgttataatttaatattttgagttgaaaatggttaytgtgaaatagtaattggtgataaccatatttgcttctttcttccatttcatcacccagaagaactagtagtgtccgagtgctgttgctttatttacatgcagtacaactgaagg

SEQ ID NO: 43435 - DNA, 414 bp, Chicken  19866894281296_2
tcatgaactgatttcttcacacattcaaaaaatcgaattccccttttgttcagatactaaacagaaatcagaagggaaacgtttttctagaaatgatattgtttttcaaattggagatgatatgaatgcctttaatgaaaatgggtgatattcattttaaaacttrtatcattttacaaaggtatacttttataaatacagttttcattatgtaggcattacagtctggttcagttgataatgagtcagagaagtttactgagctgttataatttaatattttgagttgaaaatggttaytgtgaaatagtaattggtgataaccatatttgcttctttcttccatttcatcacccagaagaactagtagtgtccgagtgctgttgctttatttacatgcagtacaactgaagg

SEQ ID NO: 43436 - DNA, 600 bp, Chicken  19866894281300_1
taatacctgagcagcattccagcatcccctcccaacagtgattgcatttcagctttgcagctgagagtcaaaggcacttcttggaaatgggaaatttaaactggcatctaagaggaattgccattactgttattatgaatagttagcaacttgagttacttggaacagcatcagatcgagccattaaggcctcttttaaacaaattttgaagcacaggggatacctgccgctctgtttttcccattgtgccagcaacatacttctggtttaaacaggcctgagagcagccagctgctggyctgacaccgggtatgctctcatgcaccgttcaggtcagtacaatgcccagacactctcacgggtctacaaccacagattaagtttccctgttcaatctgrccttgcccaatttatgtataaatcctggacctgacayttggtgacgttacagtaactagctyctacccatcctgctcctccygacaacctctggctgggaggtggcagcagcccgcagtggcccaaagctgcatggtgaccacctggcctgagaatgggtaagggctgtatatcyatcaatgagctccaacggcaacaaa

SEQ ID NO: 43437 - DNA, 600 bp, Chicken  19866894281300_2
ctggcatctaagaggaattgccattactgttattatgaatagttagcaacttgagttacttggaacagcatcagatcgagccattaaggcctcttttaaacaaattttgaagcacaggggatacctgccgctctgtttttcccattgtgccagcaacatacttctggtttaaacaggcctgagagcagccagctgctggyctgacaccgggtatgctctcatgcaccgttcaggtcagtacaatgcccagacactctcacgggtctacaaccacagattaagtttccctgttcaatctgrccttgcccaatttatgtataaatcctggacctgacayttggtgacgttacagtaactagctyctacccatcctgctcctccygacaacctctggctgggaggtggcagcagcccgcagtggcccaaagctgcatggtgaccacctggcctgagaatgggtaagggctgtatatcyatcaatgagctccaacggcaacaaattcagaatccctcccctctgtcaaggcactgatttctgaggcagtcatttttgagttgtagtaacttcttaatcttgaagatccctctttttaacccctc

SEQ ID NO: 43438 - DNA, 600 bp, Chicken  19866894281300_3
aatagttagcaacttgagttacttggaacagcatcagatcgagccattaaggcctcttttaaacaaattttgaagcacaggggatacctgccgctctgtttttcccattgtgccagcaacatacttctggtttaaacaggcctgagagcagccagctgctggyctgacaccgggtatgctctcatgcaccgttcaggtcagtacaatgcccagacactctcacgggtctacaaccacagattaagtttccctgttcaatctgrccttgcccaatttatgtataaatcctggacctgacayttggtgacgttacagtaactagctyctacccatcctgctcctccygacaacctctggctgggaggtggcagcagcccgcagtggcccaaagctgcatggtgaccacctggcctgagaatgggtaagggctgtatatcyatcaatgagctccaacggcaacaaattcagaatccctcccctctgtcaaggcactgatttctgaggcagtcatttttgagttgtagtaacttcttaatcttgaagatccctctttttaacccctctctcaaaggtccacctttatcctggccaaccttgatc

SEQ ID NO: 43439 - DNA, 600 bp, Chicken  19866894281300_4
gaacagcatcagatcgagccattaaggcctcttttaaacaaattttgaagcacaggggatacctgccgctctgtttttcccattgtgccagcaacatacttctggtttaaacaggcctgagagcagccagctgctggyctgacaccgggtatgctctcatgcaccgttcaggtcagtacaatgcccagacactctcacgggtctacaaccacagattaagtttccctgttcaatctgrccttgcccaatttatgtataaatcctggacctgacayttggtgacgttacagtaactagctyctacccatcctgctcctccygacaacctctggctgggaggtggcagcagcccgcagtggcccaaagctgcatggtgaccacctggcctgagaatgggtaagggctgtatatcyatcaatgagctccaacggcaacaaattcagaatccctcccctctgtcaaggcactgatttctgaggcagtcatttttgagttgtagtaacttcttaatcttgaagatccctctttttaacccctctctcaaaggtccacctttatcctggccaaccttgatcagacagaaaggcagaagaaaacact

SEQ ID NO: 43440 - DNA, 600 bp, Chicken  19866894281300_5
attaaggcctcttttaaacaaattttgaagcacaggggatacctgccgctctgtttttcccattgtgccagcaacatacttctggtttaaacaggcctgagagcagccagctgctggyctgacaccgggtatgctctcatgcaccgttcaggtcagtacaatgcccagacactctcacgggtctacaaccacagattaagtttccctgttcaatctgrccttgcccaatttatgtataaatcctggacctgacayttggtgacgttacagtaactagctyctacccatcctgctcctccygacaacctctggctgggaggtggcagcagcccgcagtggcccaaagctgcatggtgaccacctggcctgagaatgggtaagggctgtatatcyatcaatgagctccaacggcaacaaattcagaatccctcccctctgtcaaggcactgatttctgaggcagtcatttttgagttgtagtaacttcttaatcttgaagatccctctttttaacccctctctcaaaggtccacctttatcctggccaaccttgatcagacagaaaggcagaagaaaacactatcagtaatacccaacctga

SEQ ID NO: 43441 - DNA, 600 bp, Chicken  19866894281300_6
ggcctgagagcagccagctgctggyctgacaccgggtatgctctcatgcaccgttcaggtcagtacaatgcccagacactctcacgggtctacaaccacagattaagtttccctgttcaatctgrccttgcccaatttatgtataaatcctggacctgacayttggtgacgttacagtaactagctyctacccatcctgctcctccygacaacctctggctgggaggtggcagcagcccgcagtggcccaaagctgcatggtgaccacctggcctgagaatgggtaagggctgtatatcyatcaatgagctccaacggcaacaaattcagaatccctcccctctgtcaaggcactgatttctgaggcagtcatttttgagttgtagtaacttcttaatcttgaagatccctctttttaacccctctctcaaaggtccacctttatcctggccaaccttgatcagacagaaaggcagaagaaaacactatcagtaatacccaacctgaacgggatttgctagtcttgaagcacacagccaactacttataccctcagcatgaactctgctcttgctcaaaatgaaaagcttcttgcaacgc

SEQ ID NO: 43442 - DNA, 600 bp, Chicken  19866894281304_1
acacacaagcaatggccttgtgaattggcagaggaacagttaaagatcacatgaatttactctgttgtcccacctctaagtgaaactgggtgttccccattcattctagccctagggacaaacagtgagacactaagccaaccctctgtgactgtatttgcctaaaacgtttgtatttttcccagctcagtcaatttacataaaaacaggacctgccctggaagacaaaggttgtgttttattttctcaggaagagagcatgagaagatacttgctgcagaaggtgatgtgcagtaatgrgtatgaaccatcacttagcctcaggaagaaagtatgcagtcaaaggttctgcatttaaaagaagcaaaagagctacaggaatcaaagccactatttgttatcagaggacgcctgccagacccagaaatagttctgttgcctgatgctttctttccacaggctcacaaaccccagaggtgtctttgggagtgggtggagctgcagtgttttaataaagtatttcagaattttattaatgtggagggttgcaaatgcctgcagttctggtcatgtgagcatctgcattcagttgtccaggat

SEQ ID NO: 43443 - DNA, 600 bp, Chicken  19866894281305_1
gacaagcagttgttcgtgttgcacctaaacactgtaatgcagtaatgaagcaggagacaaggaaatacttggttctagcactcagctgagtaaaaaaccgtttttagctcagtgtcaagacctgcattcagcatttgtccgtccctatctgtaggtgccagactcgttaaacttttgtacaaattcactgccattttaaattgaacaatgaccttaaatcatcagctgccccggatgagctgtgcatagattcagacactctttgtaagcggtggctttgtgacagcacttcctccctcractttctttccgactgctcacctgacaagatccacttagctaagagagaggaaaataaggcaacgttttcacacaggcacattcatctgtcagttacaagtcctgccatgtggactgaagtcaggtttcacttttgctgctctaggtgagcttgcataatcagcctcactcagaggtgatgggaaaggtgaagcccctgcagtgctggcccaagtccaggcctcctccttgcccccatccagagtcatggctgatcctatgggtgctctgtccccagtaaatgtccactcagaacaccgg

SEQ ID NO: 43444 - DNA, 600 bp, Chicken  19866894281312_1
gatcaaagagggattaggtagctattcaatttactggaaaaacattacaccgtatcattgagactgagaaaatgaccaaggagctgaatatgttagaaaagatgtaatgaatctgaactgtgatagaaattcactgtgtatggagtcattaatgttaattttatgaatattaaaatcaccaaggggaacaaatttgctggcactaaagctgataatgctaaacagtccaaaagatttcatttctaaaaagtttatcaagtgaattttcatctttaaatgtggagatccttttcaacacaygatacagtatgcataaaaaacacatggatccttcaccttacacccatttgcctacaggctagaaataactttggtgggcactcagtatcctttgrcagttaagcagcttgatgcctgctggaaataaaagggcttccaatgcctgtaatgggatactcaaatgagtcagtgtcagtggaaacatccttttttggtattttaggatttttctccaatcccatatcagttgctggcatcatagctctccctactcttggacagggtacggacataataggatcattctaagaaacagcagtc

SEQ ID NO: 43445 - DNA, 600 bp, Chicken  19866894281312_2
gaaaagatgtaatgaatctgaactgtgatagaaattcactgtgtatggagtcattaatgttaattttatgaatattaaaatcaccaaggggaacaaatttgctggcactaaagctgataatgctaaacagtccaaaagatttcatttctaaaaagtttatcaagtgaattttcatctttaaatgtggagatccttttcaacacaygatacagtatgcataaaaaacacatggatccttcaccttacacccatttgcctacaggctagaaataactttggtgggcactcagtatcctttgrcagttaagcagcttgatgcctgctggaaataaaagggcttccaatgcctgtaatgggatactcaaatgagtcagtgtcagtggaaacatccttttttggtattttaggatttttctccaatcccatatcagttgctggcatcatagctctccctactcttggacagggtacggacataataggatcattctaagaaacagcagtccgtatctttacatagaaaatctgatatactgcatacagcacacaaattacaaaacaaaacaaacaacaaaaacaaacaacccaacaattttgatc

SEQ ID NO: 43446 - DNA, 600 bp, Chicken  19866894281313_1
atagaagctcttccatcaaacttctctccaaatgtatggtggtggctcctttttgtttggttggttgtcttttttttttttttttttaagggaatgttagaattttattcctgctaaattgcagtctttaagggctttccttgtaatgtaatattcagcaaatatctgtctttagtgagagttagtgatgaacagtaccttttaaaagaaaacaaaaaaaattcagtaattctgtaaagtccaaatatcaaattcttctttgataagaattgtctctgataattcttctctggcagggtrgaggcaggaactcttcattcctgmatayattagtgagatgtgggtgacttcttttttcctcgctaagcaaactgttcattcttttgagataaaaattgttacttgcctttgcttttttagagtattattgctgtgtgttccgtatattcttcctctctgtacataagtgtaatacactcctacattgctttctttggcgagatcctttattcattcttaggtaagttgtctgatgtgaacaacttgtgtccttgcctttcattatgagcttcgttgtatttttgatcactgaaccgtttg

SEQ ID NO: 43447 - DNA, 600 bp, Chicken  19866894281313_2
tctccaaatgtatggtggtggctcctttttgtttggttggttgtcttttttttttttttttttaagggaatgttagaattttattcctgctaaattgcagtctttaagggctttccttgtaatgtaatattcagcaaatatctgtctttagtgagagttagtgatgaacagtaccttttaaaagaaaacaaaaaaaattcagtaattctgtaaagtccaaatatcaaattcttctttgataagaattgtctctgataattcttctctggcagggtrgaggcaggaactcttcattcctgmatayattagtgagatgtgggtgacttcttttttcctcgctaagcaaactgttcattcttttgagataaaaattgttacttgcctttgcttttttagagtattattgctgtgtgttccgtatattcttcctctctgtacataagtgtaatacactcctacattgctttctttggcgagatcctttattcattcttaggtaagttgtctgatgtgaacaacttgtgtccttgcctttcattatgagcttcgttgtatttttgatcactgaaccgtttgatcatttgtacatttgtgttaccc

SEQ ID NO: 43448 - DNA, 600 bp, Chicken  19866894281313_3
caaatgtatggtggtggctcctttttgtttggttggttgtcttttttttttttttttttaagggaatgttagaattttattcctgctaaattgcagtctttaagggctttccttgtaatgtaatattcagcaaatatctgtctttagtgagagttagtgatgaacagtaccttttaaaagaaaacaaaaaaaattcagtaattctgtaaagtccaaatatcaaattcttctttgataagaattgtctctgataattcttctctggcagggtrgaggcaggaactcttcattcctgmatayattagtgagatgtgggtgacttcttttttcctcgctaagcaaactgttcattcttttgagataaaaattgttacttgcctttgcttttttagagtattattgctgtgtgttccgtatattcttcctctctgtacataagtgtaatacactcctacattgctttctttggcgagatcctttattcattcttaggtaagttgtctgatgtgaacaacttgtgtccttgcctttcattatgagcttcgttgtatttttgatcactgaaccgtttgatcatttgtacatttgtgttacccgtag

SEQ ID NO: 43449 - DNA, 527 bp, Chicken  19866894281315_1
aatcgctgtgaatgtttctcttgctctggtgccccagcagctgagtgcatactaacaaacctggcggtacagcagagaacaagaggcagcattggctgtggggcgggcagagcgctgctgggtgcagcgggcttgggcctgtttgcccagacaggtgcggcctccattcaaatccgtggggccaatgggagctgcgatgttcaaacgcagcggttggagcgcgtccctgtgaaacgccactgctggccagcctgtccctcctggctgcaactcgctcagctttcccagacctgacagggrgggctgcaattactgctaattagagctgtcctgccatggagcctggcaatgtgcacagagtctcgctctgcacccgccgggctgagcccctgggagcttccttctgcctcaccaccttcggtaagccatgagcctggcgtggctcggggtgccaggggacgtggtatggcactgggagctgcagtggcttgcggtgggaatggtgggagctgctctaaaggcattaa

SEQ ID NO: 43450 - DNA, 600 bp, Chicken  19866894281317_1
attgttgggtgaagggaaaggagctgttaaaacatacattggtttttgtgttggggtcatgttgtgcttgaatcatttgttgtttgatttcttttgttcatttattgaatttattcatttattgaatgatttcttcaattttgcatatatataaattattgcatagttgcaggagttcttatatgacagaggtctataaataagttggtcatgcagtagagaaacagtgtatgatatgtgtagtcatttgtaagttgttaaattgtcttctgtttatttctgtctggagttatttaatcwtgttggtttgcatttatatattaactgatagtatttacccctggttaattggcagagaatttgaatggtagaaccacactggtttgaattgagtgacagatcgtggactgggtatgactggaaggagaatggagattagatgtgataggtttttttggctctgtgtatcaattgctgttgtcaaaatagagattctagttttcatggcatactttgtccttcactgcactaaatcagcgtctggaaagagagttttcatactaacggtgccattactggaaaatgcatcatacagagtag

SEQ ID NO: 43451 - DNA, 600 bp, Chicken  19866894281319_1
ttgtaatttaacaaagaaaagaaatgcttggcaaggtttggagtgcttcctgtgatttgtttggagcttaatggctcacattgtcttccaagactagagctaagcattctaacacataaaagtcaatggcaagaaacaattcaattccactaatcaaggggaaaaaaatacttctacctacttagcattaggagtctcatcgacttcaataatgcacgatataattttgaatccaaaaaactcttacttgaaataggttgggataattttgtactactgattgaaagaagggcaaggtgrgttttgcatcaatgaagaaatctctccccagccctttatttgtactgacccttttactcacatttcctgtattgcaartatgagaaatgagctgccatcctctgtggcaagatcaaatggatgatgcaaatttatcttctgttatggcagacgccagcagaaagtaacttctgctacttggccaacagctccttctcgcttctgtaacttgcttctgctactgcttctctttatcgttcctttcacacgctccctgtacatccttgttcaggagatcattgtcactgcttctttaaataa

SEQ ID NO: 43452 - DNA, 600 bp, Chicken  19866894281319_2
cattgtcttccaagactagagctaagcattctaacacataaaagtcaatggcaagaaacaattcaattccactaatcaaggggaaaaaaatacttctacctacttagcattaggagtctcatcgacttcaataatgcacgatataattttgaatccaaaaaactcttacttgaaataggttgggataattttgtactactgattgaaagaagggcaaggtgrgttttgcatcaatgaagaaatctctccccagccctttatttgtactgacccttttactcacatttcctgtattgcaartatgagaaatgagctgccatcctctgtggcaagatcaaatggatgatgcaaatttatcttctgttatggcagacgccagcagaaagtaacttctgctacttggccaacagctccttctcgcttctgtaacttgcttctgctactgcttctctttatcgttcctttcacacgctccctgtacatccttgttcaggagatcattgtcactgcttctttaaataaactacatcaagacactaaaacaaaatcccccaaagtaaactgtgctctcttcaagtgttctgtagacctgcgttacct

SEQ ID NO: 43453 - DNA, 600 bp, Chicken  19866894281321_1
cactgccattgctcatattttccaaactgttatgcagcctttaaaaacaagcggctaataaatttaaaacatgcaaaaaaatacattatcctgtcttcaacactgttcagagtttcattgccattctaatccgaattaagactgaatcaccaaactgggatgaaaaaaaccagtacccgtgcttactggaaggtgctaaagaagagatgctatttagcttttaaaagcactcaatttgaatagttactcaatttaggttaagtaaaagctctgctgatccttggacttctaggtactctytgtaggtgaatctttacttagtagggaagccataaaggttggaacttggtgatccttgggggtcccttccaacccaagccattcgatgattctagaagatcccagctgaactactgtgggatgtctttcatgatctgtttcataaattttgagtgaaagaacagtagtataggactgatctaagcaaaagcatttgaaactgggctcctggatatccaggtggaagaaatgacacctcatcagttgtctgggatttgtaagtggttgttgttctctggagatccagccaatatattgacc

SEQ ID NO: 43454 - DNA, 600 bp, Chicken  19866894281324_1
tctcaaacccttttggagcttcgatgaatggggatttgccagactgagggatagccttaaaaatcccaggataaataactgaaagctctggcaccggtgacaggagttgagtcctctgcctcttgcactgagaaatcagctcatagtgccaggaatggcccacgcagggcctgactgcaaacccttgtgcagagctgggccagagcatttataacagttttacctgctacaaatgtgctgtttggtaacctgtatgggcagctgttttttatgctattgctataaagatacgctgtagcrttcatgcataattgggagcccttctattaataatacatgggaagcacatcttgctaatatcaccttcatctgagcgttccaactaaatattttgatagatgaaatgaatagagagtgtatttaaatactgtttgtactgcggctagggtacaaaagggacggcccgtctttaattagacaggtacatctgcttaattaatttagctgtaaagccctttttcctcttcattctttcatctatatgcggacgctatattagttccgctctgctggttccatagaaactgagaaaaagagctt

SEQ ID NO: 43455 - DNA, 600 bp, Chicken  19866894281324_2
attcatttaattactgtaaacgaaacagcccctgcatcactttgcatagtaaagcctgttaataccaaaaaggttcagtggatgggaggaggaattaggtttttataattggaatgcaacacttgaaaaccaatttggtaactgttcttgattttattagcatcttattctggcaaaacaaatgttaagcaatgagagaaacacggtgaagaggaggtggtaagaacacagcagggaacagacgttacttattgtacagtgtgcccagtcctgaagcagacatcttttatcagttatccraagacactttgcagagagggctgcgtggaggttgtgctgtactcaatatattatgctgttaatggtgtaattcagcaacaaaatgaatgcgttcagctgttccacaaactctcacatccgcctgctccagagagcggatccttcatgtgcttttgtggagggaygctcaagtgcccgtgggtacgaaacgcagtcctccagcactgtctctgcaggggcccctggagcccttgaaggatttaccctgccttttttggtttcacagctttcctcttaggccttaggtgcatacatcccagg

SEQ ID NO: 43456 - DNA, 600 bp, Chicken  19866894281324_3
ttattctggcaaaacaaatgttaagcaatgagagaaacacggtgaagaggaggtggtaagaacacagcagggaacagacgttacttattgtacagtgtgcccagtcctgaagcagacatcttttatcagttatccraagacactttgcagagagggctgcgtggaggttgtgctgtactcaatatattatgctgttaatggtgtaattcagcaacaaaatgaatgcgttcagctgttccacaaactctcacatccgcctgctccagagagcggatccttcatgtgcttttgtggagggaygctcaagtgcccgtgggtacgaaacgcagtcctccagcactgtctctgcaggggcccctggagcccttgaaggatttaccctgccttttttggtttcacagctttcctcttaggccttaggtgcatacatcccaggtgatgatgccagcacagaaatcgtaaacatamctggttttacatccattgctggggggctgtagaagctgtatgactgaacctaygcaggtgaggagggaagggctgtatggctgaggaccccaggtcctcccccaaggctttatcaccagtgctgtatgggag

SEQ ID NO: 43457 - DNA, 600 bp, Chicken  19866894281324_4
tgtgctgtactcaatatattatgctgttaatggtgtaattcagcaacaaaatgaatgcgttcagctgttccacaaactctcacatccgcctgctccagagagcggatccttcatgtgcttttgtggagggaygctcaagtgcccgtgggtacgaaacgcagtcctccagcactgtctctgcaggggcccctggagcccttgaaggatttaccctgccttttttggtttcacagctttcctcttaggccttaggtgcatacatcccaggtgatgatgccagcacagaaatcgtaaacatamctggttttacatccattgctggggggctgtagaagctgtatgactgaacctaygcaggtgaggagggaagggctgtatggctgaggaccccaggtcctcccccaaggctttatcaccagtgctgtatgggagtgaccatgtaacaacgctttgagactgggtgtaaagaactctaatgactttcctctacttccaccttgtacaagctctgtagattatgaccatagcattcttcttcctcttaggagcacacatcaacgtgactaacagtggggcagggctggatacctgttggtgagc

SEQ ID NO: 43458 - DNA, 600 bp, Chicken  19866894281324_5
aatgcgttcagctgttccacaaactctcacatccgcctgctccagagagcggatccttcatgtgcttttgtggagggaygctcaagtgcccgtgggtacgaaacgcagtcctccagcactgtctctgcaggggcccctggagcccttgaaggatttaccctgccttttttggtttcacagctttcctcttaggccttaggtgcatacatcccaggtgatgatgccagcacagaaatcgtaaacatamctggttttacatccattgctggggggctgtagaagctgtatgactgaacctaygcaggtgaggagggaagggctgtatggctgaggaccccaggtcctcccccaaggctttatcaccagtgctgtatgggagtgaccatgtaacaacgctttgagactgggtgtaaagaactctaatgactttcctctacttccaccttgtacaagctctgtagattatgaccatagcattcttcttcctcttaggagcacacatcaacgtgactaacagtggggcagggctggatacctgttggtgagctcccagattccactcagtctgcagccagcttcagtgagagctgtgctgctatg

SEQ ID NO: 43459 - DNA, 599 bp, Chicken  19866894281326_1
  misc_feature (1)..(173): n is any nucleotide
nnnnnnnnnnnnnnnnnnnnnnnnnnnnnnnnnnnnnnnnnnnnnnnnnnnnnnnnnnnnnnnnnnnnnnnnnnnnnnnnnnnnnnnnnnnnnnnnnnnnnnnnnnnnnnnnnnnnnnnnnnnnnnnnnnnnnnnnnnnnnnnnnnnnnnnnnnnnnnnnnnnnnnnnnnnnnttttgtcttgagatgaaactaaacttatcctctattccgagaagattttatattttaacttaaatttaaaagaaatgaaaataacatatccaagaggaagaaatatcagtgcaactgttgttcatcrttccttctcaagaatcaatattttttctgtaaagctctgtcatccagatcaagaatattcagaaagactgaaagcagtcctgaaataagacacgtggatgcactgatctcaggaacatctaggaagaactgcccaaatggtttatatttatgactatcatttgctcattgtcaatagagtttttttgaaggccttctgataaaagtctcaaaacttctcatttgtactttatgactgagactttcaagtggctggcattaattttgtgagtgcaacaagtttgcaataacttrttgtaa

SEQ ID NO: 43460 - DNA, 600 bp, Chicken  19866894281326_2
ttcatcrttccttctcaagaatcaatattttttctgtaaagctctgtcatccagatcaagaatattcagaaagactgaaagcagtcctgaaataagacacgtggatgcactgatctcaggaacatctaggaagaactgcccaaatggtttatatttatgactatcatttgctcattgtcaatagagtttttttgaaggccttctgataaaagtctcaaaacttctcatttgtactttatgactgagactttcaagtggctggcattaattttgtgagtgcaacaagtttgcaataacttrttgtaagtgcaataacctttgttaggctaatctgtgtggcatttaattcatggcatagttagtcctctctctgcctttcagggtgtgagatgggtgatgtagtccatctttctggtacaagagccagaaagaaagaaatgttctcttttacttctctttacttctaccaaaacaggatctgcaaaatctttacatcgacaggaactgtgtgtgtactgttgaacaaaactgctgtagtgcatatagtgcatagttcaagtaggtcaaatcaatgatattttaattgtgccattttatcat

SEQ ID NO: 43461 - DNA, 523 bp, Chicken  19866894281329_1
ctgatatctacaccctgacaaaaaaggaggaggtctctttcatatgactgtcatatctaagttaaaaaatattagaagtaaaataaataggctgtcaaatcacctccagctccatttttatcatactgcatctcctgagttagcaataggattgaatcagctcttagttaggaggatgaagagccctgaggtaggaaaaaatattgactgattgattgattgactgattggcgtttttgttacacaagaaaagcttttatgggtgtccatgtcagtttgaaaatatggaaatgtaaaacstccattttagtacactataaagagctacgtttcaccaggtgaatcctatctcaagagactcacacagagcaactttaaacatccacacagacagcagaggtcacctrtaggccacagcctccaggttgtgtctattaatgaaaaaatctctaaaatcacaaacattatttgaaaagcactttagttttcggagcaatcaagctgtagcttgtagccattttag

SEQ ID NO: 43462 - DNA, 416 bp, Chicken  19866894281329_2
agctccatttttatcatactgcatctcctgagttagcaataggattgaatcagctcttagttaggaggatgaagagccctgaggtaggaaaaaatattgactgattgattgattgactgattggcgtttttgttacacaagaaaagcttttatgggtgtccatgtcagtttgaaaatatggaaatgtaaaacstccattttagtacactataaagagctacgtttcaccaggtgaatcctatctcaagagactcacacagagcaactttaaacatccacacagacagcagaggtcacctrtaggccacagcctccaggttgtgtctattaatgaaaaaatctctaaaatcacaaacattatttgaaaagcactttagttttcggagcaatcaagctgtagcttgtagccattttag

SEQ ID NO: 43463 - DNA, 600 bp, Chicken  19866894281331_1
ggtttgatgacaggggtcatgcaagtgtcatttttcaaacttgtgtgaaaatccatttcaagccatcttctcctcttatatttcacctcatttctggagcactcatgcagtataattacatagctagagcacaaaatgtaaacaggacatcctctcagataggagatcccaacacgttgaaaagtatatgcctctgttcttattcagttctggaaactatcccatgacttccacaaaaagatactgtttctgttaatgtgtaacgtaaacttagccctcaacataaaacaaaaccaaacrtctgtccttagagtttgattgtttgttccatcctggtataattattcttgcatgacagcagcccctgcaggctacagtccttgcttactctactttgccctgaaagcatacccagaattaagagatgaattcactgcattagaattgccagtgaggattcatttagaaagatttagtgttgcagcacagtcacatttttaccactatctgggatttttcgtttgtttctggatttgatttctgtttgtttctgagctgcattttgccaatcaaactggacaaaaaatcattgtgttttcc

SEQ ID NO: 43464 - DNA, 600 bp, Chicken  19866894281334_1
gtcattgaatttattgatacttgcaattgtatacaatcccttccaagcaatggtacatgataatgagaacttatgagaagaacagcaaattcaaagcggttatggacagactgtaatttggtagcaaataacttctttgattactaattaatcaaatgagaaattaatcaaagtctcttttattgaatctgtccttacatggattacacgcatctcctaattatttgctctagagcaattatgcaacaattttttttgtgctaatattaatttaacctgagaagacttaaaaggagtttrttgttaatcttttattctctggttttcaggaacatttgttaattctgacttaatatcagtccctgattataagcaagttaagttttattcctatgatcagctcccaaatgtgaaatctaacaatatcccccaaaatgttgtatttctcagagtcctgttagtaattatgtttgttagactaactagaaaacaaacatgaaagagaaaagtaaacagccagagtccatgtgcttattggccgagtgaatatttatatttgatttaatgggttcataatatcmtagtttagttcttacagtg

SEQ ID NO: 43465 - DNA, 600 bp, Chicken  19866894281334_2
aagacttaaaaggagtttrttgttaatcttttattctctggttttcaggaacatttgttaattctgacttaatatcagtccctgattataagcaagttaagttttattcctatgatcagctcccaaatgtgaaatctaacaatatcccccaaaatgttgtatttctcagagtcctgttagtaattatgtttgttagactaactagaaaacaaacatgaaagagaaaagtaaacagccagagtccatgtgcttattggccgagtgaatatttatatttgatttaatgggttcataatatcmtagtttagttcttacagtgtacaagagaatgaagtactgaatagaattctagcattataacctacacatatgattttttttccctgcttgctagaagaaattaattcaaaaaatctttcctctctctaaagaaaggtgggtgagacgccacaggagataaggtaggaaggaagtctgtaaaggagaggaaaaataccaaactttagtcactgagaatgggagcagaggagatgggaggggaagcagtttaaagtgggtaaggctgcctgtgataatgagctacatgtctatcagagattg

SEQ ID NO: 43466 - DNA, 515 bp, Chicken  19866894281348_1
tgagggactcagttgcccacgtaagcatggctggggcggcctcagcgctctgccccgcagctccacgcaggcagccccgcgcccgccgccatgcgagccctgcacacatggtccccattaggcacagaaaagcagctctgctgcggctggcttgaaaccatccagcaccagtgctgtgagcaaggggaaaaacaaaaggaaaacaaaaaagaaagtgttggctcgctttccattgggatgtttagaaatgtttacagtggcattagctctcggtgctgccggggatgcgcagccaccagyrgtgctactggtagtgggaatgagctcttttcttcaccttgaagctgagcagccccagcctgggctgtgtgcaggaagctgccagctgcaaccacagcgggacggagcctcctgcaaggaggcagcaatggtctgagctgtgtcccatcccagctgaacggggctgcgggagcacatccataagcaagacacagacctaaagaccttcttcactt

SEQ ID NO: 43467 - DNA, 514 bp, Chicken  19866894281348_2
gagggactcagttgcccacgtaagcatggctggggcggcctcagcgctctgccccgcagctccacgcaggcagccccgcgcccgccgccatgcgagccctgcacacatggtccccattaggcacagaaaagcagctctgctgcggctggcttgaaaccatccagcaccagtgctgtgagcaaggggaaaaacaaaaggaaaacaaaaaagaaagtgttggctcgctttccattgggatgtttagaaatgtttacagtggcattagctctcggtgctgccggggatgcgcagccaccagyrgtgctactggtagtgggaatgagctcttttcttcaccttgaagctgagcagccccagcctgggctgtgtgcaggaagctgccagctgcaaccacagcgggacggagcctcctgcaaggaggcagcaatggtctgagctgtgtcccatcccagctgaacggggctgcgggagcacatccataagcaagacacagacctaaagaccttcttcactt

SEQ ID NO: 43468 - DNA, 599 bp, Chicken  19866894281350_1
  misc_feature (1)..(254): n is any nucleotide
nnnnnnnnnnnnnnnnnnnnnnnnnnnnnnnnnnnnnnnnnnnnnnnnnnnnnnnnnnnnnnnnnnnnnnnnnnnnnnnnnnnnnnnnnnnnnnnnnnnnnnnnnnnnnnnnnnnnnnnnnnnnnnnnnnnnnnnnnnnnnnnnnnnnnnnnnnnnnnnnnnnnnnnnnnnnnnnnnnnnnnnnnnnnnnnnnnnnnnnnnnnnnnnnnnnnnnnnnnnnnnnnnnnnnnnnnnnnnnnnnnnnnnnnnnnnnntccctcccaaggaactgttcatatgatcataaagttcctgcagaaktacggacaaaagcacacgcacaaaaaaatgaaacgaggtcattaatggtacacagtcatacaatatccagtattaaaaaaattgtcttattgaaggatttcaatgtcttactctaaaaagaaagtcaaattttattaagagtcaatggagagacaggttgaatatcatgctcattcttctatttcaatacacatcgaatttgtaatctgtcatgagggtcatataggtcctctaaggtattagaagagctgaatagctgaatgagctatgaaaacgaaatacctgagcaaaaccactaa

SEQ ID NO: 43469 - DNA, 582 bp, Chicken  19866894281350_2
tattgaaggatttcaatgtcttactctaaaaagaaagtcaaattttattaagagtcaatggagagacaggttgaatatcatgctcattcttctatttcaatacacatcgaatttgtaatctgtcatgagggtcatataggtcctctaaggtattagaagagctgaatagctgaatgagctatgaaaacgaaatacctgagcaaaaccactaattaaaaacactgaagtctgccgctatacactgaaggctttgtttcatacagttattacttaaaagttacctttagaattgaaatttgygagaagtctttttcttcaaaatatgcgtgagtaatgagctgcagctttgcctgaagtaacccatacagaggcttgaaagaaaaacaaatgcaaaagcaagtgaaaaaaaatcagttcagttgttttgaacatcagtcttctcccgttctaatcttgcaatatagtcactttactatacacagagttcacgggaggaaagtgatagacctgaattcttagttgctaacttacaacatctttcacctgtgctcattttaaattattctaactattttgattcca

SEQ ID NO: 43470 - DNA, 600 bp, Chicken  19866894281356_1
ttacaaataaaaagtcagaaattttgtagaccaagagaattctcagtattaaacactagtgcagttggggatttcctttgtgctttcactgttggcaatagttgagatgcttcctgtggaggagaaaatggagaagagagtcagcgcaacggcttcaacagttgggtctatattgcatctcactccttcttagaatgtgactgtgtaagtgtagagacagaaaaggtgcttaaaagtaacacattctgctttgcacttgcaataagcacagagtatgcagaaaatctgttactgcagttycattggctaccagtaaacttgttaagctattagcgacatattcatttgtaaagacagcacatcaacagtgtaagcttggctcagttgattcttctgaggcttcagtgaatttgggagccctccacaggagagaaagggtcatgaacagaccaaagygtgagtcacagccattactaactcctatatatctactactatttccagtttcctgctctagtcatataacaacaggaaaaaaaggctggaaaactgtaggaaaaactccctgttactatgttgctgatagaatttttccctatc

SEQ ID NO: 43471 - DNA, 600 bp, Chicken  19866894281356_2
aacagttgggtctatattgcatctcactccttcttagaatgtgactgtgtaagtgtagagacagaaaaggtgcttaaaagtaacacattctgctttgcacttgcaataagcacagagtatgcagaaaatctgttactgcagttycattggctaccagtaaacttgttaagctattagcgacatattcatttgtaaagacagcacatcaacagtgtaagcttggctcagttgattcttctgaggcttcagtgaatttgggagccctccacaggagagaaagggtcatgaacagaccaaagygtgagtcacagccattactaactcctatatatctactactatttccagtttcctgctctagtcatataacaacaggaaaaaaaggctggaaaactgtaggaaaaactccctgttactatgttgctgatagaatttttccctatctcagtgtctcagcatctgcttgtacatgggatcacagtcgctgcctcgcttaacacccacatcttcacctaatatacagtgaaaaaagcccragccaagggctgtgtctcacccatcactcgtgtgtccagctctttgtccatcagctcttcaggg

SEQ ID NO: 43472 - DNA, 600 bp, Chicken  19866894281356_3
tctgaggcttcagtgaatttgggagccctccacaggagagaaagggtcatgaacagaccaaagygtgagtcacagccattactaactcctatatatctactactatttccagtttcctgctctagtcatataacaacaggaaaaaaaggctggaaaactgtaggaaaaactccctgttactatgttgctgatagaatttttccctatctcagtgtctcagcatctgcttgtacatgggatcacagtcgctgcctcgcttaacacccacatcttcacctaatatacagtgaaaaaagcccragccaagggctgtgtctcacccatcactcgtgtgtccagctctttgtccatcagctcttcagggtctgtgaactcactcagagtgattttgggtgcattttcactttggctgacagaaccaatcatttcctgctccttgtcatgctgaacttgggcatagatattaatccaagggattttcctgcacagaaaggaaaataggtcatattttgccaagggacccttcgtatgtcactgattaatcagaccagttaaactgagaccagtctcaaaaacgcagcagtggcagtgatgcagaat

SEQ ID NO: 43473 - DNA, 600 bp, Chicken  19866894281361_1
ctgccgcttaaagaagatggttggacaagttataataaaacagcagtgcaaatagcaagctgtagtccagtgctgagatgaaatttagaccaggtgtttaaatttaatgcttaaatgtactatacaacaaagaagagtctcttcaacaaagaatggtgacactgagttcaggggacttcaaatggggggaagatgtggatgtctttttctaaactatgtagaacacagagtatgatttttattttaattttttctcataattttactatattgggattagaccaaaggaagagggggggraaaaatgtaggttttttctttttacttcaacttttataacaccgataaatgaagatttggcaattatcttaactgaaattgacaaagaaacatggaatatcaaatctgcttttttttttttttctatagaatcatagaacagctttggatggaagggaactttaaaaatcaccagcttccaacccccaccatagtcagggttgccatccactagatcaggctgcccagggcttcatccagcctgaccttggaaacttccagggatgtggcatttacaacttctctggtcagccagtccca

SEQ ID NO: 43474 - DNA, 600 bp, Chicken  19866894281361_2
ttaaatgtactatacaacaaagaagagtctcttcaacaaagaatggtgacactgagttcaggggacttcaaatggggggaagatgtggatgtctttttctaaactatgtagaacacagagtatgatttttattttaattttttctcataattttactatattgggattagaccaaaggaagagggggggraaaaatgtaggttttttctttttacttcaacttttataacaccgataaatgaagatttggcaattatcttaactgaaattgacaaagaaacatggaatatcaaatctgcrtttttttttttttctatagaatcatagaacagctttggatggaagggaactttaaaaatcaccagcttccaacccccaccatagtcagggttgccatccactagatcaggctgcccagggcttcatccagcctgaccttggaaacttccagggatgtggcatttacaacttctctggtcagccagtcccagtgcctcaccaccctctgaaaagaaaatttcctccttatatttaacataaacctcccctctttaagtttaaagccattcctcctstcctgtcactatcagatcatgtaaa

SEQ ID NO: 43475 - DNA, 600 bp, Chicken  19866894281361_3
taaatgtactatacaacaaagaagagtctcttcaacaaagaatggtgacactgagttcaggggacttcaaatggggggaagatgtggatgtctttttctaaactatgtagaacacagagtatgatttttattttaattttttctcataattttactatattgggattagaccaaaggaagagggggggraaaaatgtaggttttttctttttacttcaacttttataacaccgataaatgaagatttggcaattatcttaactgaaattgacaaagaaacatggaatatcaaatctgctrttttttttttttctatagaatcatagaacagctttggatggaagggaactttaaaaatcaccagcttccaacccccaccatagtcagggttgccatccactagatcaggctgcccagggcttcatccagcctgaccttggaaacttccagggatgtggcatttacaacttctctggtcagccagtcccagtgcctcaccaccctctgaaaagaaaatttcctccttatatttaacataaacctcccctctttaagtttaaagccattcctcctstcctgtcactatcagatcatgtaaaa

SEQ ID NO: 43476 - DNA, 505 bp, Chicken  19866894281361_4
agaaacatggaatatcaaatctgcttttttttttttttctatagaatcatagaacagctttggatggaagggaactttaaaaatcaccagcttccaacccccaccatagtcagggttgccatccactagatcaggctgcccagggcttcatccagcctgaccttggaaacttccagggatgtggcatttacaacttctctggtcagccagtcccagtgcctcaccaccctctgaaaagaaaatttcctccttatatttaacataaacctcccctctttaagtttaaagccattcctcctstcctgtcactatcagatcatgtaaaaggccagtctccctcctgtttgtaaactcaagtactggaaggcctcagtgaagtttctcctgagccttctcttctgcaagctaaacaagcccaattccctcaacctttctttgtaggagaggtgctccagccctctaatgatcttcgtggccctgctctggacccactccaacagttcca

SEQ ID NO: 43477 - DNA, 600 bp, Chicken  19866894281362_1
aagttatgtattcaagccgctgcaaggataagtcccctttttgtgattataagtggtcatttgtggtgtgaatggattctcccatatacactacaattttagaaactatctgaataaaaccttttgcaaaccgaagagaatgaaatgagctacacagagtataaaagaaatacagatagaaaaaaagtgtaggcatatttcttaccagacattgttactatgtcttctctgaaacaaacagaaatggaactctgtctaatgtacataaactaatccgaaagaaagatccacaaatacccrttcaggattttcatattagtctccccatcttcctttttctgagtccttctgcattgccattaaatggtactttccctgcaagatgctgatgaggaagtcttaaggaaaaaaaaaaactccttcccattgaccacatcaaagtataaattttaatgaggggatttgttttgaaacagagcactcctaaagggcctccttcgttctctctttttgctactggaaggtccatagctagcttaggtgtgccatcttcaggataactgcagaaatatctttatgcaagaagagcttctattgaga

SEQ ID NO: 43478 - DNA, 600 bp, Chicken  19866894281362_2
tatctgaataaaaccttttgcaaaccgaagagaatgaaatgagctacacagagtataaaagaaatacagatagaaaaaaagtgtaggcatatttcttaccagacattgttactatgtcttctctgaaacaaacagaaatggaactctgtctaatgtacataaactaatccgaaagaaagatccacaaatacccrttcaggattttcatattagtctccccatcttcctttttctgagtccttctgcattgccattaaatggtactttccctgcaagatgctgatgaggaagtcttaaggraaaaaaaaaactccttcccattgaccacatcaaagtataaattttaatgaggggatttgttttgaaacagagcactcctaaagggcctccttcgttctctctttttgctactggaaggtccatagctagcttaggtgtgccatcttcaggataactgcagaaatatctttatgcaagaagagcttctattgagaaacattagtaattatcagtgctctggaataatttgctaattgcttcccagaagtaattttctttcttattttgtagaatttagaacaaagcaaaaaattctgaatt

SEQ ID NO: 43479 - DNA, 600 bp, Chicken  19866894281365_1
gctcacctgcgttcaaaagactctttaataacaaatgcagagaaaggcatgtgtgtacaagcaagaaagtcagatggggaagcagtgattaccatttctgtgccgtgtgccctttgctctcctcctaccccacaaaattccctacccagagaggatttgctgctctgcatgtatattgctcttactgagttaatcccgtcccctaagggagatttcagtcacctgaacaagtgaggagtgaattcctcctttcactgcctctgctaggctccttgttcacacctgtgcaaggaaaagacraccatccagctccatgtgagcttttcagttcaccccrgctamacaratgcagcagacttgcattttcctcttcctttgtcctttcatattcacrgctgaggtcagaagaaggaagggaaatggatcagagggttggccatgtgagctttcagcaaaaccccttccatcagcaccgtagactgtgagaaaggcctggcaatgaggacaggatgttcattttcctctgcacacaggttggctccccccgtgtaagcagaggctatctatagcatatcattggccttttttttatgaagaaat

SEQ ID NO: 43480 - DNA, 600 bp, Chicken  19866894281365_2
cagagaaaggcatgtgtgtacaagcaagaaagtcagatggggaagcagtgattaccatttctgtgccgtgtgccctttgctctcctcctaccccacaaaattccctacccagagaggatttgctgctctgcatgtatattgctcttactgagttaatcccgtcccctaagggagatttcagtcacctgaacaagtgaggagtgaattcctcctttcactgcctctgctaggctccttgttcacacctgtgcaaggaaaagacraccatccagctccatgtgagcttttcagttcaccccrgctamacaratgcagcagacttgcattttcctcttcctttgtcctttcatattcacrgctgaggtcagaagaaggaagggaaatggatcagagggttggccatgtgagctttcagcaaaaccccttccatcagcaccgtagactgtgagaaaggcctggcaatgaggacaggatgttcattttcctctgcacacaggttggctccccccgtgtaagcagaggctatctatagcatatcattggccttttttttatgaagaaatatagaagctcccgcagcaggagtcctctggcttgaga

SEQ ID NO: 43481 - DNA, 600 bp, Chicken  19866894281365_3
aaaggcatgtgtgtacaagcaagaaagtcagatggggaagcagtgattaccatttctgtgccgtgtgccctttgctctcctcctaccccacaaaattccctacccagagaggatttgctgctctgcatgtatattgctcttactgagttaatcccgtcccctaagggagatttcagtcacctgaacaagtgaggagtgaattcctcctttcactgcctctgctaggctccttgttcacacctgtgcaaggaaaagacraccatccagctccatgtgagcttttcagttcaccccrgctamacaratgcagcagacttgcattttcctcttcctttgtcctttcatattcacrgctgaggtcagaagaaggaagggaaatggatcagagggttggccatgtgagctttcagcaaaaccccttccatcagcaccgtagactgtgagaaaggcctggcaatgaggacaggatgttcattttcctctgcacacaggttggctccccccgtgtaagcagaggctatctatagcatatcattggccttttttttatgaagaaatatagaagctcccgcagcaggagtcctctggcttgagactggg

SEQ ID NO: 43482 - DNA, 600 bp, Chicken  19866894281365_4
gcatgtgtgtacaagcaagaaagtcagatggggaagcagtgattaccatttctgtgccgtgtgccctttgctctcctcctaccccacaaaattccctacccagagaggatttgctgctctgcatgtatattgctcttactgagttaatcccgtcccctaagggagatttcagtcacctgaacaagtgaggagtgaattcctcctttcactgcctctgctaggctccttgttcacacctgtgcaaggaaaagacraccatccagctccatgtgagcttttcagttcaccccrgctamacaratgcagcagacttgcattttcctcttcctttgtcctttcatattcacrgctgaggtcagaagaaggaagggaaatggatcagagggttggccatgtgagctttcagcaaaaccccttccatcagcaccgtagactgtgagaaaggcctggcaatgaggacaggatgttcattttcctctgcacacaggttggctccccccgtgtaagcagaggctatctatagcatatcattggccttttttttatgaagaaatatagaagctcccgcagcaggagtcctctggcttgagactgggtgaa

SEQ ID NO: 43483 - DNA, 600 bp, Chicken  19866894281365_5
tttctgtgccgtgtgccctttgctctcctcctaccccacaaaattccctacccagagaggatttgctgctctgcatgtatattgctcttactgagttaatcccgtcccctaagggagatttcagtcacctgaacaagtgaggagtgaattcctcctttcactgcctctgctaggctccttgttcacacctgtgcaaggaaaagacraccatccagctccatgtgagcttttcagttcaccccrgctamacaratgcagcagacttgcattttcctcttcctttgtcctttcatattcacrgctgaggtcagaagaaggaagggaaatggatcagagggttggccatgtgagctttcagcaaaaccccttccatcagcaccgtagactgtgagaaaggcctggcaatgaggacaggatgttcattttcctctgcacacaggttggctccccccgtgtaagcagaggctatctatagcatatcattggccttttttttatgaagaaatatagaagctcccgcagcaggagtcctctggcttgagactgggtgaaggaatgaggctgtgacagactgtggagctggccccattgctcagagcc

SEQ ID NO: 43484 - DNA, 600 bp, Chicken  19866894281366_1
tttgcacctgtgttccccgtgggtccagaaggggtggacaaaaggtggagcaatgctgggcttatatgagggccagccactgaagagagggcatctcttggacctaggctgcctcttgaggaggagtgctgcatagccagagagccccttcaccagtagaatgatttcagcttttctttctgtgtgactattggcccacctgtgactactttgcctggtattgtcaagaacctgtcagaagcaatttcacttcttcataagcagaacccccccaaactgatagtcccaattttgcagctkgtactcttgactacaagcctataatgagccagtgccccaagagcagaattacatgtcagggcaytgtaccagcatgtgctgtttacacagtgagatasaaaataaagcctttgttagctgtgctcattaaagaacaacagtaattccaaagaggatggctatcagctgcactactgtagctgctttcttgcattatggataaaaaaaatgcaacaaccagctttggcacaaaacttttcaccttcccacacagataaaatcttctcatgttgggggatgggatgggaaggactgggttat

SEQ ID NO: 43485 - DNA, 600 bp, Chicken  19866894281366_2
tatgagggccagccactgaagagagggcatctcttggacctaggctgcctcttgaggaggagtgctgcatagccagagagccccttcaccagtagaatgatttcagcttttctttctgtgtgactattggcccacctgtgactactttgcctggtattgtcaagaacctgtcagaagcaatttcacttcttcataagcagaacccccccaaactgatagtcccaattttgcagctkgtactcttgactacaagcctataatgagccagtgccccaagagcagaattacatgtcagggcaytgtaccagcatgtgctgtttacacagtgagatasaaaataaagcctttgttagctgtgctcattaaagaacaacagtaattccaaagaggatggctatcagctgcactactgtagctgctttcttgcattatggataaaaaaaatgcaacaaccagctttggcacaaaacttttcaccttcccacacagataaaatcttctcatgttgggggatgggatgggaaggactgggttatcttcttctctctcacatagtctcactgtgagtgcttttcttccactccagtcaccaactacaga

SEQ ID NO: 43486 - DNA, 600 bp, Chicken  19866894281366_3
tggacctaggctgcctcttgaggaggagtgctgcatagccagagagccccttcaccagtagaatgatttcagcttttctttctgtgtgactattggcccacctgtgactactttgcctggtattgtcaagaacctgtcagaagcaatttcacttcttcataagcagaacccccccaaactgatagtcccaattttgcagctkgtactcttgactacaagcctataatgagccagtgccccaagagcagaattacatgtcagggcaytgtaccagcatgtgctgtttacacagtgagatasaaaataaagcctttgttagctgtgctcattaaagaacaacagtaattccaaagaggatggctatcagctgcactactgtagctgctttcttgcattatggataaaaaaaatgcaacaaccagctttggcacaaaacttttcaccttcccacacagataaaatcttctcatgttgggggatgggatgggaaggactgggttatcttcttctctctcacatagtctcactgtgagtgcttttcttccactccagtcaccaactacagattgtcagtccacagagcaagttaaattggctcta

SEQ ID NO: 43487 - DNA, 600 bp, Chicken  19866894281368_1
gagtccctaaatccccttttcccccaatcctgtctccgtgccccactaccaggtggctgcgttggcccggcgaggggcccagctctgcccccagctctgcccccagctcctcctcccgcagcttcgcctcgctgcccagcgtgcccgagtagagcaccgcgtccttcaggaagatgctcgccgcccggcagatgaaggaggtgaagaggtgcacgtggatgtagttgcgagtgcagtgcaggcgcctatggaggaagggcgtgacgtgagcccaaccccagctgcccaactgctcattcyatgggtgatgatggggggcttggaygtcagctccgaggtgtcagccccccgggaggcaaaaatggggctggttgtgttggtcatggggagccaatgagatggggtgcttgggggctttgggaacggcctggagtggtttcagttcccccagrggcaatggggaggtttccccccatggggacaggggctcagctcctccttacttgaagtaggagaggatgcagacagctacgatgagggaggccaaggagatggagtagccaatggtgtacatcaagtgcaggcggtcaaacacctcct

SEQ ID NO: 43488 - DNA, 600 bp, Chicken  19866894281368_2
aatcctgtctccgtgccccactaccaggtggctgcgttggcccggcgaggggcccagctctgcccccagctctgcccccagctcctcctcccgcagcttcgcctcgctgcccagcgtgcccgagtagagcaccgcgtccttcaggaagatgctcgccgcccggcagatgaaggaggtgaagaggtgcacgtggatgtagttgcgagtgcagtgcaggcgcctatggaggaagggcgtgacgtgagcccaaccccagctgcccaactgctcattcyatgggtgatgatggggggcttggaygtcagctccgaggtgtcagccccccgggaggcaaaaatggggctggttgtgttggtcatggggagccaatgagatggggtgcttgggggctttgggaacggcctggagtggtttcagttcccccagrggcaatggggaggtttccccccatggggacaggggctcagctcctccttacttgaagtaggagaggatgcagacagctacgatgagggaggccaaggagatggagtagccaatggtgtacatcaagtgcaggcggtcaaacacctcctggaagagaagggctctctgctccag

SEQ ID NO: 43489 - DNA, 576 bp, Chicken  19866894281368_3
agcaccgcgtccttcaggaagatgctcgccgcccggcagatgaaggaggtgaagaggtgcacgtggatgtagttgcgagtgcagtgcaggcgcctatggaggaagggcgtgacgtgagcccaaccccagctgcccaactgctcattcyatgggtgatgatggggggcttggaygtcagctccgaggtgtcagccccccgggaggcaaaaatggggctggttgtgttggtcatggggagccaatgagatggggtgcttgggggctttgggaacggcctggagtggtttcagttcccccagrggcaatggggaggtttccccccatggggacaggggctcagctcctccttacttgaagtaggagaggatgcagacagctacgatgagggaggccaaggagatggagtagccaatggtgtacatcaagtgcaggcggtcaaacacctcctggaagagaagggctctctgctccagacctcccacagcctgcagcccttctgcctctgggctgagagcacggggagaactgggagtgctggggggggcaaaagggggacctctgagcccttctcccatc

SEQ ID NO: 43490 - DNA, 600 bp, Chicken  19866894281369_1
ttgggctcatgtcacgcccttcctccataggcgcctgcactgcactcgcaactacatccacgtgcacctcttcacctccttcatctgccgggcggcgagcatcttcctgaaggacgcggtgctctactcgggcacgctgggcagcgaggcgaagctgcgggaggaggagctgggggcagagctgggggcagagctgggcccctcgccgggccaacgcagccacctggtagtggggcacggagacaggattgggggaaaaggggatttagggactcggaagtgtggggatgcagactgtgyaacttgggggcgatgccgctgggagggatgggayaaagggccaaccacggcacagctgcrttctcgccatgctgatgcccttcaatttgtgctggacaaacccagatgagacgtagctatgggggaggactgatgtgggccccctctgacccgcgtgcaggttggctgcaaggtggtggtgacgctcttcctctacttcttggccaccaaccactactggatcctggtggaaggcctctacctgcacagcctgatcttcatggccttcctctccaacaagaactacctgtgggtcctcat

SEQ ID NO: 43491 - DNA, 600 bp, Chicken  19866894281369_2
ctgcactgcactcgcaactacatccacgtgcacctcttcacctccttcatctgccgggcggcgagcatcttcctgaaggacgcggtgctctactcgggcacgctgggcagcgaggcgaagctgcgggaggaggagctgggggcagagctgggggcagagctgggcccctcgccgggccaacgcagccacctggtagtggggcacggagacaggattgggggaaaaggggatttagggactcggaagtgtggggatgcagactgtgyaacttgggggcgatgccgctgggagggatgggayaaagggccaaccacggcacagctgcrttctcgccatgctgatgcccttcaatttgtgctggacaaacccagatgagacgtagctatgggggaggactgatgtgggccccctctgacccgcgtgcaggttggctgcaaggtggtggtgacgctcttcctctacttcttggccaccaaccactactggatcctggtggaaggcctctacctgcacagcctgatcttcatggccttcctctccaacaagaactacctgtgggtcctcatcatcattggctggggtgagtttggaccccaaccc

SEQ ID NO: 43492 - DNA, 600 bp, Chicken  19866894281369_3
cgtgcacctcttcacctccttcatctgccgggcggcgagcatcttcctgaaggacgcggtgctctactcgggcacgctgggcagcgaggcgaagctgcgggaggaggagctgggggcagagctgggggcagagctgggcccctcgccgggccaacgcagccacctggtagtggggcacggagacaggattgggggaaaaggggatttagggactcggaagtgtggggatgcagactgtgyaacttgggggcgatgccgctgggagggatgggayaaagggccaaccacggcacagctgcrttctcgccatgctgatgcccttcaatttgtgctggacaaacccagatgagacgtagctatgggggaggactgatgtgggccccctctgacccgcgtgcaggttggctgcaaggtggtggtgacgctcttcctctacttcttggccaccaaccactactggatcctggtggaaggcctctacctgcacagcctgatcttcatggccttcctctccaacaagaactacctgtgggtcctcatcatcattggctggggtgagtttggaccccaacccaacactggtgctgctgagcccagcaa

SEQ ID NO: 43493 - DNA, 600 bp, Chicken  19866894281372_1
ttgaactgaatttatggtttttgcttgggagaaggagatgagcagcttttgcaggctgggcatcagccaaggcacttgtaatggacagtaacaagaattccaaaaactgagaaaaaagaaggttgaggtgggacttggaagttccacttcagtgcactggcagtaatctctcagttctgagtcagattacggccagttgtgctctcttgtcatgcatggacctttccatagggatatgtattgctgtgccagagccaagttcagttcccaagttcaatctgcaaatcgtggctgaggagragagttcagaagataccccggaaaagttcttggtgagcaactgatctccttggcaaatgaaacagaagtcccttatttacttctacactgaatggaaagcacaaagtcacttaacaggaggagcaccaaacggcactggctggtgttggctttcctagccatgcctgtatgaggctttgttccttatgcctcttctgcctactcttaatatactgcttcccagaggtctggatcccaaaagcctgctgggaaaccttcccctgctggaccaacttgtattttgtggcatgyagggacatg

SEQ ID NO: 43494 - DNA, 600 bp, Chicken  19866894281372_2
ctgaggagragagttcagaagataccccggaaaagttcttggtgagcaactgatctccttggcaaatgaaacagaagtcccttatttacttctacactgaatggaaagcacaaagtcacttaacaggaggagcaccaaacggcactggctggtgttggctttcctagccatgcctgtatgaggctttgttccttatgcctcttctgcctactcttaatatactgcttcccagaggtctggatcccaaaagcctgctgggaaaccttcccctgctggaccaacttgtattttgtggcatgyagggacatggtttggtgatgggactcagtagctcaaggtagtggttgggcttgatcttgaaagtcttttccaacctagatgattctatcactgtatccacccctttctgctccatcaacaaatacygcttgtaaggccaaatgtggtcagggctgctgtactttcattatgtaacactctgcatctgacacaggcattcacttgccagcatgtgcgctatcaagtcaggattcaagtgctttctccctctcccctcttgtaggaggacaaaagtaattagaacaagttattactcagcaa

SEQ ID NO: 43495 - DNA, 600 bp, Chicken  19866894281372_3
gaggagcaccaaacggcactggctggtgttggctttcctagccatgcctgtatgaggctttgttccttatgcctcttctgcctactcttaatatactgcttcccagaggtctggatcccaaaagcctgctgggaaaccttcccctgctggaccaacttgtattttgtggcatgyagggacatggtttggtgatgggactcagtagctcaaggtagtggttgggcttgatcttgaaagtcttttccaacctagatgattctatcactgtatccacccctttctgctccatcaacaaatacygcttgtaaggccaaatgtggtcagggctgctgtactttcattatgtaacactctgcatctgacacaggcattcacttgccagcatgtgcgctatcaagtcaggattcaagtgctttctccctctcccctcttgtaggaggacaaaagtaattagaacaagttattactcagcaaacttggctgcacagtgggctgagcttcagctaaagggccagtgtggtatattagtctcatttatcaacaccaccagcaagcatctcataaatagatttttaacatggtttatccaaggaacaaaac

SEQ ID NO: 43496 - DNA, 600 bp, Chicken  19866894281373_1
gcagcttggcacactgatagcaaagtgacaaatggggaaataggaagggcctggggacaaacctccacctgtctgtgctgctggtctagcagtgtgcacctcctcactgacacacaccctcctgctctgacccctgcccctatctgaaagataaaggttatctctgcttgccccagcttgtggtgccagggtgggtgagggagcaggaagccctggctgcccgccccaggaaagctccttgagccaccagcagcggctggacccctgtggagggtgtgctgcctgccatgggctcctgtygggaagagatcctggacagacagcacttgctggcatcctgtgacaacatggctctgtgttctatttgcctgtcctcatcctgagcactgtgcatttcaccagcaccatcctcctcaccagggaccatggtgctgaaggggagctgctttgtctacttggacaacccaagagcatccttgccatggcagttctggggcagacaagcacagggatatgagatcagtagtgtgctggggagggcctctctcctccctgctctayatggcctggtattcttcctwgtgtctggagatagggcct

SEQ ID NO: 43497 - DNA, 600 bp, Chicken  19866894281373_2
cccctgtggagggtgtgctgcctgccatgggctcctgtygggaagagatcctggacagacagcacttgctggcatcctgtgacaacatggctctgtgttctatttgcctgtcctcatcctgagcactgtgcatttcaccagcaccatcctcctcaccagggaccatggtgctgaaggggagctgctttgtctacttggacaacccaagagcatccttgccatggcagttctggggcagacaagcacagggatatgagatcagtagtgtgctggggagggcctctctcctccctgctctayatggcctggtattcttcctwgtgtctggagatagggcctatcccctctcctctacagctgccatcagacacagtacccaacctttaccttccctgaggaaatgcaaggcagtgcagtctgttccccagactgggtggaagctgcttcccatgtctacagacaactgtgrgcatcctttcgtgggaataatcagtccaagcaaaagggacttggggatccgcaagacttccactgggctggcattccataggcatgcaaggagaaaawgtaccaaagcacagagcccaaaggaccttcagg

SEQ ID NO: 43498 - DNA, 600 bp, Chicken  19866894281373_3
cctgccatgggctcctgtygggaagagatcctggacagacagcacttgctggcatcctgtgacaacatggctctgtgttctatttgcctgtcctcatcctgagcactgtgcatttcaccagcaccatcctcctcaccagggaccatggtgctgaaggggagctgctttgtctacttggacaacccaagagcatccttgccatggcagttctggggcagacaagcacagggatatgagatcagtagtgtgctggggagggcctctctcctccctgctctayatggcctggtattcttcctwgtgtctggagatagggcctatcccctctcctctacagctgccatcagacacagtacccaacctttaccttccctgaggaaatgcaaggcagtgcagtctgttccccagactgggtggaagctgcttcccatgtctacagacaactgtgrgcatcctttcgtgggaataatcagtccaagcaaaagggacttggggatccgcaagacttccactgggctggcattccataggcatgcaaggagaaaawgtaccaaagcacagagcccaaaggaccttcaggacacagcagcagcctggagc

SEQ ID NO: 43499 - DNA, 600 bp, Chicken  19866894281373_4
gctgaaggggagctgctttgtctacttggacaacccaagagcatccttgccatggcagttctggggcagacaagcacagggatatgagatcagtagtgtgctggggagggcctctctcctccctgctctayatggcctggtattcttcctwgtgtctggagatagggcctatcccctctcctctacagctgccatcagacacagtacccaacctttaccttccctgaggaaatgcaaggcagtgcagtctgttccccagactgggtggaagctgcttcccatgtctacagacaactgtgrgcatcctttcgtgggaataatcagtccaagcaaaagggacttggggatccgcaagacttccactgggctggcattccataggcatgcaaggagaaaawgtaccaaagcacagagcccaaaggaccttcaggacacagcagcagcctggagcatgacaggaatgtgctgcatcctgctgtttgataccgggggcctgcatggagcagggagtgctgcccttatctgttgctctcgctcagcctgaggctggccatgttgtttcatgatcccatgtctctgctgtaatctcaggcagaatgg

SEQ ID NO: 43500 - DNA, 600 bp, Chicken  19866894281373_5
tgctggggagggcctctctcctccctgctctayatggcctggtattcttcctwgtgtctggagatagggcctatcccctctcctctacagctgccatcagacacagtacccaacctttaccttccctgaggaaatgcaaggcagtgcagtctgttccccagactgggtggaagctgcttcccatgtctacagacaactgtgrgcatcctttcgtgggaataatcagtccaagcaaaagggacttggggatccgcaagacttccactgggctggcattccataggcatgcaaggagaaaawgtaccaaagcacagagcccaaaggaccttcaggacacagcagcagcctggagcatgacaggaatgtgctgcatcctgctgtttgataccgggggcctgcatggagcagggagtgctgcccttatctgttgctctcgctcagcctgaggctggccatgttgtttcatgatcccatgtctctgctgtaatctcaggcagaatggtgtttgcttggggctgtttctaatgcactgggtattgtcctctcaaacatattggacaaagtgatgacaaggacctggtaaaaaaaggttcttatatc

SEQ ID NO: 43501 - DNA, 599 bp, Chicken  19866894281376_1
  misc_feature (1)..(101): n is any nucleotide
nnnnnnnnnnnnnnnnnnnnnnnnnnnnnnnnnnnnnnnnnnnnnnnnnnnnnnnnnnnnnnnnnnnnnnnnnnnnnnnnnnnnnnnnnnnnnnnnnnnnncagaaggagataaagaagttaccacctttccaaagttggagtactaggctaatgatttcaagctcagttcttttttaggtcaacttcaccttggataagaaaaaaacccaacaggtatcttctattcttaagcaatccaccaggaaacctagaactgggtaagtcaccgaggagaaaacatccgtgtaataattaattktaccacccaatggttcataagtagagcaaaagatattggcacacactgaacactcatgcagatttgcaagcaatggtygtgaacrtttgctgtcacamrctatagacaatccaaagcatctctgccacaattccagcactgtgcargggaacaaggagctctctgtcttagggcactcttggagcactgaccctgtcattcaaatggatagaagggacacatttaaatgttttcagtcctgtgagttactctgtcaagattgactgttccagggacggagcccacatccatagcacaat

SEQ ID NO: 43502 - DNA, 599 bp, Chicken  19866894281376_2
  misc_feature (1)..(23): n is any nucleotide
nnnnnnnnnnnnnnnnnnnnnnncagaaggagataaagaagttaccacctttccaaagttggagtactaggctaatgatttcaagctcagttcttttttaggtcaacttcaccttggataagaaaaaaacccaacaggtatcttctattcttaagcaatccaccaggaaacctagaactgggtaagtcaccgaggagaaaacatccgtgtaataattaattktaccacccaatggttcataagtagagcaaaagatattggcacacactgaacactcatgcagatttgcaagcaatggtygtgaacrtttgctgtcacamrctatagacaatccaaagcatctctgccacaattccagcactgtgcargggaacaaggagctctctgtcttagggcactcttggagcactgaccctgtcattcaaatggatagaagggacacatttaaatgttttcagtcctgtgagttactctgtcaagattgactgttccagggacggagcccacatccatagcacaatttgaaggaaaaaaaaaaactaaaaacaatcaaagtctcacaaacatataacttctcatctggggagcagtaattatat

SEQ ID NO: 43503 - DNA, 599 bp, Chicken  19866894281376_3
  misc_feature (1)..(16): n is any nucleotide
nnnnnnnnnnnnnnnncagaaggagataaagaagttaccacctttccaaagttggagtactaggctaatgatttcaagctcagttcttttttaggtcaacttcaccttggataagaaaaaaacccaacaggtatcttctattcttaagcaatccaccaggaaacctagaactgggtaagtcaccgaggagaaaacatccgtgtaataattaattktaccacccaatggttcataagtagagcaaaagatattggcacacactgaacactcatgcagatttgcaagcaatggtygtgaacrtttgctgtcacamrctatagacaatccaaagcatctctgccacaattccagcactgtgcargggaacaaggagctctctgtcttagggcactcttggagcactgaccctgtcattcaaatggatagaagggacacatttaaatgttttcagtcctgtgagttactctgtcaagattgactgttccagggacggagcccacatccatagcacaatttgaaggaaaaaaaaaaactaaaaacaatcaaagtctcacaaacatataacttctcatctggggagcagtaattatatggggtca

SEQ ID NO: 43504 - DNA, 599 bp, Chicken  19866894281376_4
  misc_feature (1)..(3): n is any nucleotide
nnncagaaggagataaagaagttaccacctttccaaagttggagtactaggctaatgatttcaagctcagttcttttttaggtcaacttcaccttggataagaaaaaaacccaacaggtatcttctattcttaagcaatccaccaggaaacctagaactgggtaagtcaccgaggagaaaacatccgtgtaataattaattktaccacccaatggttcataagtagagcaaaagatattggcacacactgaacactcatgcagatttgcaagcaatggtygtgaacrtttgctgtcacamrctatagacaatccaaagcatctctgccacaattccagcactgtgcargggaacaaggagctctctgtcttagggcactcttggagcactgaccctgtcattcaaatggatagaagggacacatttaaatgttttcagtcctgtgagttactctgtcaagattgactgttccagggacggagcccacatccatagcacaatttgaaggaaaaaaaaaaactaaaaacaatcaaagtctcacaaacatataacttctcatctggggagcagtaattatatggggtcaggtgcctcaaaaa

SEQ ID NO: 43505 - DNA, 599 bp, Chicken  19866894281376_5
  misc_feature (1)..(2): n is any nucleotide
nncagaaggagataaagaagttaccacctttccaaagttggagtactaggctaatgatttcaagctcagttcttttttaggtcaacttcaccttggataagaaaaaaacccaacaggtatcttctattcttaagcaatccaccaggaaacctagaactgggtaagtcaccgaggagaaaacatccgtgtaataattaattktaccacccaatggttcataagtagagcaaaagatattggcacacactgaacactcatgcagatttgcaagcaatggtygtgaacrtttgctgtcacamrctatagacaatccaaagcatctctgccacaattccagcactgtgcargggaacaaggagctctctgtcttagggcactcttggagcactgaccctgtcattcaaatggatagaagggacacatttaaatgttttcagtcctgtgagttactctgtcaagattgactgttccagggacggagcccacatccatagcacaatttgaaggaaaaaaaaaaactaaaaacaatcaaagtctcacaaacatataacttctcatctggggagcagtaattatatggggtcaggtgcctcaaaaat

SEQ ID NO: 43506 - DNA, 600 bp, Chicken  19866894281376_6
aggctaatgatttcaagctcagttcttttttaggtcaacttcaccttggataagaaaaaaacccaacaggtatcttctattcttaagcaatccaccaggaaacctagaactgggtaagtcaccgaggagaaaacatccgtgtaataattaattktaccacccaatggttcataagtagagcaaaagatattggcacacactgaacactcatgcagatttgcaagcaatggtygtgaacrtttgctgtcacamrctatagacaatccaaagcatctctgccacaattccagcactgtgcargggaacaaggagctctctgtcttagggcactcttggagcactgaccctgtcattcaaatggatagaagggacacatttaaatgttttcagtcctgtgagttactctgtcaagattgactgttccagggacggagcccacatccatagcacaatttgaaggaaaaaaaaaaactaaaaacaatcaaagtctcacaaacatataacttctcatctggggagcagtaattatatggggtcaggtgcctcaaaaatgtaaacaaggagcagcacaaagctgggatacagctaagatagctgtcc

SEQ ID NO: 43507 - DNA, 600 bp, Chicken  19866894281392_1
caatcagaagacaccaaatcaagactatacacactcaagtgagtgtggtaggacagtccaaccaagattggcaatgtgctcaatggccttgaaacttatatggagactaatgttatgacattgcaagagaaaggttgtcttcttatctggtctgactctggaggctcagtccttcagcttagtcagtattgtgatgtagcagtcagagttaatgatttttccaggttccaggaaagccagagggttcaccccttccaatcccaaaagacaatgaacgtcactttacccatggacgactgwcttgatttttttttcttcagtgaggaattcacgttgccgctcagttgactgctgttgcttgtactgatgatgttacatctcaccatctataatgatgcaatccaggatactgtctacttcagccacatgttggttcaataggtcctgaaaaatttggaggtggtgttctttctgctcctgtttcaacatttgttggatacaccgagcacaagactttcaatgtttcaatgttgccaacattacttccaacacattgaagccaatactcagctccatgcacagttcctaggttgtaatcca

SEQ ID NO: 43508 - DNA, 600 bp, Chicken  19866894281393_1
ataccttcactcagaagctatcagcactgctgctgctcgttgacatggattacataaaaccttgctgtaagcactgatactgtgacaaatgtcatttcactttttcatttccctccttattccaggcccgatacccatcttgcttcctctttgttattctcagttttgcaggcttacgataagcatcccttgccagtcttgctattgcttttgacgtcccttctatccccactgactcttcattcagaggccagggctgccctctgtcttctctttgcctttgcaatggatgggtgagcrctctgctttcyggttctttctagttcctgatagttttctgttctcttcactggactgaagctgctgtccccaaagaggctaaatgagtttcctttacagcatcattggcagcctcaagtaaaccattagtttttcctttccccctcaggaagtagtccattctattcccagacgagaagcttttccccagttgtgcctgtccccttgtctctccatgccagacccctactttgcccaggtatgattgctcttgcctctctctgttactccttcagtgttctgctgatttagggacttcac

SEQ ID NO: 43509 - DNA, 600 bp, Chicken  19866894281393_2
cagaagctatcagcactgctgctgctcgttgacatggattacataaaaccttgctgtaagcactgatactgtgacaaatgtcatttcactttttcatttccctccttattccaggcccgatacccatcttgcttcctctttgttattctcagttttgcaggcttacgataagcatcccttgccagtcttgctattgcttttgacgtcccttctatccccactgactcttcattcagaggccagggctgccctctgtcttctctttgcctttgcaatggatgggtgagcrctctgctttcyggttctttctagttcctgatagttttctgttctcttcactggactgaagctgctgtccccaaagaggctaaatgagtttcctttacagcatcattggcagcctcaagtaaaccattagtttttcctttccccctcaggaagtagtccattctattcccagacgagaagcttttccccagttgtgcctgtccccttgtctctccatgccagacccctactttgcccaggtatgattgctcttgcctctctctgttactccttcagtgttctgctgatttagggacttcacatagtgggcaa

SEQ ID NO: 43510 - DNA, 600 bp, Chicken  19866894281403_1
aggaaccagaaatactgaaatactgcaagatgttatttttaaaatatttccacactgcaccaggaagttttggaaatcttgcaagaagtctaatcctgcagactatgaagtccaaacatgtttggacaagtttatccagtcttccaggtaattacagttgtatctgatgaggatcaaaatagatagacaacaatctattagcgtgaaaaataatttacatgtgcaattgcaagttgcaagttgcctctggagagcttaattccctgaagggaaataggtcttaacctatgctgcaactgragaccaaatgccaaggagctgtgggaggagctggagtctgagtggccacagggaacaacaggtagaaggctcagtggtgggaatgggtaactgcagaaaagggcacccattgctttctgaaccatggcagtgagagtgggatgtcaggcatgggatggatgaacagttgatggagtctttctaakagagttgagaagcagtcaggcaggaactagagaagccaacaacagcagtccagaggtagagaaggtgtggggcgtggagagcaaagcagtatatgcatgggacagatagtcagta

SEQ ID NO: 43511 - DNA, 600 bp, Chicken  19866894281403_2
gacaacaatctattagcgtgaaaaataatttacatgtgcaattgcaagttgcaagttgcctctggagagcttaattccctgaagggaaataggtcttaacctatgctgcaactgragaccaaatgccaaggagctgtgggaggagctggagtctgagtggccacagggaacaacaggtagaaggctcagtggtgggaatgggtaactgcagaaaagggcacccattgctttctgaaccatggcagtgagagtgggatgtcaggcatgggatggatgaacagttgatggagtctttctaakagagttgagaagcagtcaggcaggaactagagaagccaacaacagcagtccagaggtagagaaggtgtggggcgtggagagcaaagcagtatatgcatgggacagatagtcagtatatgttgtttataagaaagaaggtggggagcagaacacagaggggggctgagaaatataagctatggagaaaagaagattagaccaataatttttgatgctcatgctaatgaaatattttcaagaagtgtcattcagaggtgtgctttgaggtagacaatagtcagaggagtcagaggatgagcc

SEQ ID NO: 43512 - DNA, 600 bp, Chicken  19866894281408_1
tgtcacactagtacaaatctgtgaactgggcactggaacttctttcgaagtttgggtattcatggatacatagatttcttacaaaatttactgaagcagaattcaagtctaaattcaggtgcattatatatggccagattgcagtctctagaaatcagcagcgctgcagtggaattattattattaatagtattattagtagcattattatttttctagcgatccactatttttctttttgattcacttagggggaaaatgaaactgcagatacagtacgtcctttaaagtatttaaaamaatttgctgatataataaaagagcaaattctcacacttttttctccagaattcctctgtctattgctaactggcagggcaggttatcccaaacacagataagaccttcatgatccagaatttctccctttcctgatatacctacacggaaagcaattttctgwatgaattcagaaactggcaatggcaattactgtgtgtccagagcatgcttccagctgttgtcccttctctgacgatcgtggactcacagtatgggaaggcttatttcttaaatgacatcgctttttttttccggttt

SEQ ID NO: 43513 - DNA, 600 bp, Chicken  19866894281408_2
ctgcagtggaattattattattaatagtattattagtagcattattatttttctagcgatccactatttttctttttgattcacttagggggaaaatgaaactgcagatacagtacgtcctttaaagtatttaaaamaatttgctgatataataaaagagcaaattctcacacttttttctccagaattcctctgtctattgctaactggcagggcaggttatcccaaacacagataagaccttcatgatccagaatttctccctttcctgatatacctacacggaaagcaattttctgwatgaattcagaaactggcaatggcaattactgtgtgtccagagcatgcttccagctgttgtcccttctctgacgatcgtggactcacagtatgggaaggcttatttcttaaatgacatcgctttttttttccggtttaagttctattaagataggttattgactttaggtataattaatggcttccatagtcctacatatttacacgtgataaatcctggcactgggaaaccaacaaatttctattgtttattgacctcccttcttccccacccaggagtaagagaagtcacttgaacta

SEQ ID NO: 43514 - DNA, 600 bp, Chicken  19866894281408_3
tcttgtaggggaaccagcaccccatgggcatgcttctaagagcaggtaccactgcttgtgccctggcagaatgccagctcacagcatcgtagggggtgggggtcctgctcatttacagtgaggtgctgagcttttgtttgtgaatggtctctttcttaagctgaatagagtttctactggaaaaaatggtctctttatgcactgaaaatacctaatgctttcaataccccaaacaattccttatagactatacagaaacaaaatcccttctgtgcttgatgccctctgaacgtctcaagyttaaattctccctgaatatctgtcatgatttcaccaggcttgtaagagcagcactgcttcagcaagagtgcaggaggagaaaggaaaggaccracsccagtgcaggtttcagtgcacaaacccaaccccaccccagccacrctatgaacttactttcttcctcctgactctccccagtcacgtaactggcacgtgatgtgtggcacagatggtgcgcggtggcatgcatggagcgtgccagctgtctggcgtggagacacaggtgctgctgctcgccggcgctgctaactggaaggcaga

SEQ ID NO: 43515 - DNA, 600 bp, Chicken  19866894281408_4
gggtgggggtcctgctcatttacagtgaggtgctgagcttttgtttgtgaatggtctctttcttaagctgaatagagtttctactggaaaaaatggtctctttatgcactgaaaatacctaatgctttcaataccccaaacaattccttatagactatacagaaacaaaatcccttctgtgcttgatgccctctgaacgtctcaagyttaaattctccctgaatatctgtcatgatttcaccaggcttgtaagagcagcactgcttcagcaagagtgcaggaggagaaaggaaaggaccracsccagtgcaggtttcagtgcacaaacccaaccccaccccagccacrctatgaacttactttcttcctcctgactctccccagtcacgtaactggcacgtgatgtgtggcacagatggtgcgcggtggcatgcatggagcgtgccagctgtctggcgtggagacacaggtgctgctgctcgccggcgctgctaactggaaggcagacctccaggagccagcctcgaagaaaagacaagggacatcatccacagctctcggttttaagatcaagcgatgcacatgcatagtgtagaggat

SEQ ID NO: 43516 - DNA, 600 bp, Chicken  19866894281408_5
tgggggtcctgctcatttacagtgaggtgctgagcttttgtttgtgaatggtctctttcttaagctgaatagagtttctactggaaaaaatggtctctttatgcactgaaaatacctaatgctttcaataccccaaacaattccttatagactatacagaaacaaaatcccttctgtgcttgatgccctctgaacgtctcaagyttaaattctccctgaatatctgtcatgatttcaccaggcttgtaagagcagcactgcttcagcaagagtgcaggaggagaaaggaaaggaccracsccagtgcaggtttcagtgcacaaacccaaccccaccccagccacrctatgaacttactttcttcctcctgactctccccagtcacgtaactggcacgtgatgtgtggcacagatggtgcgcggtggcatgcatggagcgtgccagctgtctggcgtggagacacaggtgctgctgctcgccggcgctgctaactggaaggcagacctccaggagccagcctcgaagaaaagacaagggacatcatccacagctctcggttttaagatcaagcgatgcacatgcatagtgtagaggattga

SEQ ID NO: 43517 - DNA, 600 bp, Chicken  19866894281408_6
gaatggtctctttcttaagctgaatagagtttctactggaaaaaatggtctctttatgcactgaaaatacctaatgctttcaataccccaaacaattccttatagactatacagaaacaaaatcccttctgtgcttgatgccctctgaacgtctcaagyttaaattctccctgaatatctgtcatgatttcaccaggcttgtaagagcagcactgcttcagcaagagtgcaggaggagaaaggaaaggaccracsccagtgcaggtttcagtgcacaaacccaaccccaccccagccacrctatgaacttactttcttcctcctgactctccccagtcacgtaactggcacgtgatgtgtggcacagatggtgcgcggtggcatgcatggagcgtgccagctgtctggcgtggagacacaggtgctgctgctcgccggcgctgctaactggaaggcagacctccaggagccagcctcgaagaaaagacaagggacatcatccacagctctcggttttaagatcaagcgatgcacatgcatagtgtagaggattgaaaggtaaagttaactcctgaaaggtgttctgctttatacttaagc

SEQ ID NO: 43518 - DNA, 600 bp, Chicken  19866894281408_7
aactggaaggcagacctccaggagccagcctcgaagaaaagacaagggacatcatccacagctctcggttttaagatcaagcgatgcacatgcatagtgtagaggattgaaaggtaaagttaactcctgaaaggtgttctgctttatacttaagcttggtgtggtaaggaataataatttcagtgagtaaacaggcaacgagtgattatagacacttttatgcacacaaaacttgcattcatccataagacaaaatgatggtaaagcacaaggtattcatatcctcattgtagcatatayatatatgccaaagacaagtgacctcatgtaccctttaaaggagtcagatgtttaaattggcaaaagaaaaccccagattcacccccacccccccccacctttgagctagcatcatctctattgcactgtgattgtaaagttggtgatgtttattttcaaatccatacctctatagatcggaggtaagtcactgcaggcagtatatatctggcaagtgacaggaatgatgacatcaataacccagccactgcctgtgatgtaatgccagtgttgcaggttcccattttccttcagcacggg

SEQ ID NO: 43519 - DNA, 600 bp, Chicken  19866894281413_1
tcctgatctcaggagaataaatcctcataagttctgcagtcagtatagcatgacacatctcttcccttcttgacttgctcccattctgtcctttaagcaactgttgcagcaatgcatcctctcccatttaggatgctttttgccttttggtgtagtgttagatggaagctgttgatggagatgtgcagtgggatctgatgggcaactgagtgaaccctatttgaaccaactcagagtaaaccaaaatctggctggaaaaaagtgccctaaatactatgtgtcagagaaatcaccaagtgrggggctggaaatagccttcagagaccagcttcccttttcttcattaagaccagatccatgtacctcgactgtgcctgacaagtatttgtttaagtctgtctcactctctcagaagatttytatgcttttcttaatacatattttctggaaactggataccccctgcaccagctgaatcttttctggttctggatagggaaaaataattgcctccacgggcttgtgtgtataggaaactctgtctagtgcattcccagttgagatttgtttggttttttttggcactgttgattygcaatc

SEQ ID NO: 43520 - DNA, 593 bp, Chicken  19866894281413_2
ctcccatttaggatgctttttgccttttggtgtagtgttagatggaagctgttgatggagatgtgcagtgggatctgatgggcaactgagtgaaccctatttgaaccaactcagagtaaaccaaaatctggctggaaaaaagtgccctaaatactatgtgtcagagaaatcaccaagtgrggggctggaaatagccttcagagaccagcttcccttttcttcattaagaccagatccatgtacctcgactgtgcctgacaagtatttgtttaagtctgtctcactctctcagaagatttytatgcttttcttaatacatattttctggaaactggataccccctgcaccagctgaatcttttctggttctggatagggaaaaataattgcctccacgggcttgtgtgtataggaaactctgtctagtgcattcccagttgagatttgtttggttttttttggcactgttgattygcaatctgcttgtgaccttcaacagtccccagacccttcagtgcaacactggccagtcactcccattccacgtttgtttgcactgatttctcataccgaagaatgctcactacttccct

SEQ ID NO: 43521 - DNA, 419 bp, Chicken  19866894281413_3
aagtgrggggctggaaatagccttcagagaccagcttcccttttcttcattaagaccagatccatgtacctcgactgtgcctgacaagtatttgtttaagtctgtctcactctctcagaagatttytatgcttttcttaatacatattttctggaaactggataccccctgcaccagctgaatcttttctggttctggatagggaaaaataattgcctccacgggcttgtgtgtataggaaactctgtctagtgcattcccagttgagatttgtttggttttttttggcactgttgattygcaatctgcttgtgaccttcaacagtccccagacccttcagtgcaacactggccagtcactcccattccacgtttgtttgcactgatttctcataccgaagaatgctcactacttccct

SEQ ID NO: 43522 - DNA, 600 bp, Chicken  19866894281414_1
atagtgctaatggaatatgtcctattgttatactgaatttattttactggaacagaataagtctataaagaattttaataactattttgaagcatttaatggcacttgcagcctctcctattcttagaaaataacactttattgcaaggcacgtaggtgtctcaactaagtgttaaattaatgtcaatctaggtaccacaacctaagcttttaaacaatcagtaggaaaaaaaagctcaaaatactattttctgatcatttggcagatttaggttcactgtagtcaaacctcagtagaargctaaaaacattgattattctttagcaagtcaagcactttgcctgcattcaaatcaataataacaaagaacacattagagtaaattggtgaagtgacattgaaatgctatataggattccttttcagaaacaccatgaaacatctacaatccatatttcagcatgtaagtagatttttcatattctggcaataattaacatccaagcagcactttgaaaataataatgattccagtttcaagagctgtggaagttggaaatgcagatatgcagttttacagatatggaagtatttgtact

SEQ ID NO: 43523 - DNA, 599 bp, Chicken  19866894281427_1
  misc_feature (1)..(204): n is any nucleotide
nnnnnnnnnnnnnnnnnnnnnnnnnnnnnnnnnnnnnnnnnnnnnnnnnnnnnnnnnnnnnnnnnnnnnnnnnnnnnnnnnnnnnnnnnnnnnnnnnnnnnnnnnnnnnnnnnnnnnnnnnnnnnnnnnnnnnnnnnnnnnnnnnnnnnnnnnnnnnnnnnnnnnnnnnnnnnnnnnnnnnnnnnnnnnnnnnnnnnnnnnnnnccttcagttctaaaatccccgatcgtggcagttctctactgccaaaagccaaagtgatagacctcaggaaatctgcccatacaaattcttctctcytttgcctaaacatcagctgcaagctcctgtcactgctgagacaccgatgagccagtgagacagctcctctgctcctgcactgagggctgtatcagactgcattacctctttacatcgccgttgtttcatagagcctcctgcagaaattctttgcagatgaaccaaacatggcaggctccatagctgtgcactatccccacctagggagactgtctgatactggcgaaacagctccagcccggcctgtagctgagaaccctggcatcacttttccttttaagggaacagaattaatcatc

SEQ ID NO: 43524 - DNA, 599 bp, Chicken  19866894281435_1
  misc_feature (1)..(195): n is any nucleotide
nnnnnnnnnnnnnnnnnnnnnnnnnnnnnnnnnnnnnnnnnnnnnnnnnnnnnnnnnnnnnnnnnnnnnnnnnnnnnnnnnnnnnnnnnnnnnnnnnnnnnnnnnnnnnnnnnnnnnnnnnnnnnnnnnnnnnnnnnnnnnnnnnnnnnnnnnnnnnnnnnnnnnnnnnnnnnnnnnnnnnnnnnnnnnnnnnnnttgtcccggcacaaggtggctttgtccttgtttgctggccacagagggcacttgaagggcgggtagatcgaagccatttctctgatctctgccacgtctccagaraagctcaatcaggtcactttgactcattcctaaagcacgtagctatctcgggatcagccttgagcttctcataaacagaaacaacagctctgccagccctgggctgggtgagcaggacaaggggaggtggggagggcagggccggggggctgcaaggggctgacgggtgctgtgtgaccgcaggcaaagaggtgggtgagacggtgctgtactacggctgccgccgtgagcgggaggactacctgtaccgccaggagctggcccgtttcaagcaggagggcgtcctcacccagctcaac

SEQ ID NO: 43525 - DNA, 600 bp, Chicken  19866894281441_1
cctaaaaggggcagaggtgggaacagcaacttcctgaaagtgtggttcttgaagaatggcggctctgcaccgatcttgtgcctctgctcctgctctgaggtggatatcctgcagctttaggccagataaaatgcctcctcccttcagcacttgcacataaattgctattaatgttaccatgttatacaagtgcattgaggaggaaaataggccgactaatgcattgtcctgctccactgttttttaacctgaagggtgccacactgctccctggaccaggggtgggcacgagccacaggraaaaagcagcagcagtgggacaggctcagcaaggcctcatctgcctcagcctttcttccccaggctgttccaaagctcrgtgcagatgaagcatatactgrcagagttgccttatggccttcctgacctctcacatgacaaccaccgccttcagttggccgcacggtgcttggaggaaccgaggcctgcagagttgggctgcagctgactctgagctccccgctcggagctgagcatgtccacataggcagtgttctgagcacagatctttcatccatgggccacttgtcatgccatgga

SEQ ID NO: 43526 - DNA, 572 bp, Chicken  19866894281441_2
gcctctgctcctgctctgaggtggatatcctgcagctttaggccagataaaatgcctcctcccttcagcacttgcacataaattgctattaatgttaccatgttatacaagtgcattgaggaggaaaataggccgactaatgcattgtcctgctccactgttttttaacctgaagggtgccacactgctccctggaccaggggtgggcacgagccacaggaaaaaagcagcagcagtgggacaggctcagcaaggcctcatctgcctcagcctttcttccccaggctgttccaaagctcrgtgcagatgaagcatatactgrcagagttgccttatggccttcctgacctctcacatgacaaccaccgccttcagttggccgcacggtgcttggaggaaccgaggcctgcagagttgggctgcagctgactctgagctccccgctcggagctgagcatgtccacataggcagtgttctgagcacagatctttcatccatgggccacttgtcatgccatggatgaattaagagaggacatgagttcatgtggtaaaaggagttccgctgccag

SEQ ID NO: 43527 - DNA, 550 bp, Chicken  19866894281441_3
ggatatcctgcagctttaggccagataaaatgcctcctcccttcagcacttgcacataaattgctattaatgttaccatgttatacaagtgcattgaggaggaaaataggccgactaatgcattgtcctgctccactgttttttaacctgaagggtgccacactgctccctggaccaggggtgggcacgagccacaggaaaaaagcagcagcagtgggacaggctcagcaaggcctcatctgcctcagcctttcttccccaggctgttccaaagctcrgtgcagatgaagcatatactgrcagagttgccttatggccttcctgacctctcacatgacaaccaccgccttcagttggccgcacggtgcttggaggaaccgaggcctgcagagttgggctgcagctgactctgagctccccgctcggagctgagcatgtccacataggcagtgttctgagcacagatctttcatccatgggccacttgtcatgccatggatgaattaagagaggacatgagttcatgtggtaaaaggagttccgctgccag

SEQ ID NO: 43528 - DNA, 600 bp, Chicken  19866894281446_1
aaaaagcacatcttcagagacttattttagggcaatagtaaagacctaatagtattcaggatagcatatgtattccggtggtaggcagttttaatccctggacagcttttgcctcctcccatgctgttgccacacatctagtcctggctacagaactgtgtgctcctagatgtgcttgattagatgattctcaagtttttggcaaaatgacagattacttctaattttatttttaaacatgatagacttcttttgtggaagtccctcagagcacttcagccatcctgaaatggaaaatgktatcacttactgctatattttgtcaagacagtatgatcagtctaagatttagaaagaaaaatatgagtcaggtttaatgctagtgttccaccagggtgggatcccagttaaaagtctggggaaccctctgaggtcagtctttctatctttagtcttctatgttaccttgcaagcattgtccattcccttctgtgtgatcataaccatggtttgcaaattcaaacttctgttcgttcaattattaagctccagacatgcagcatagtcttgtcagtggtggctgcatgactgaatctataa

SEQ ID NO: 43529 - DNA, 600 bp, Chicken  19866894281447_1
acaaacgcgcctgcagacacacagcgctgtgcaccaacacgtgtctgcagctctcccacacactttctctttcctcagccctctcacacccaaggacagcccttccctttccgctacgagacagcagctccatgcaaggatgtgttttgcaaacaaacctgaagcagagcaaggagacacccccctccccaaggcagcaaccactgctgtcagagctcggcccactgctgccacgcagcaacaagtggggtttgcagcacagctcagcaattcaactgcaagctgcagtgtagcatcccygggttgctcagttccctcctctgcagttaaaatgatacacgaaccctttttacgtttgtgagctttatttggggaataaatgagacggtgaggaaatatgaatgattataataaatacagcacttgtcagaatggcacagccatgaaaaggaaaatatttttaggcccatggctgcagtgtgggcgggaggtctggcactgtgctgcaaaaataactttctgtccctgaaaaacatcttaaacgtgaaagagaaaaatgacagtgagtgtgtgtgtgtgatggcagaacagccagctcct

SEQ ID NO: 43530 - DNA, 600 bp, Chicken  19866894281464_1
ggcatacaaagtttgggtagaaatcagtaatgggattgacataagaaccatgagaatggttcgctacttactcagatattcacttatccccagtataaaagtattgatctcatgatcaataccatcctgtatatcagtctatggagatacaatttagtattacatgtaccagtaattctttatttgaatccaaaaagtaaaacacactgttaactcacattcaaagctttgcacccctaaaaattagtggtcttatttctctatccatctttgaaacacattttttctatgtcctcccarggaaattctttctgttcaaaagtagagccagagagttattccactgacaaaatatcacctgtcagaaagcccctactttttctagagttccatggtttaaaatatgacaataatgccacctactaatagtctaaggctgtatttacatgtctctaaattttactgattgttaggtttcataaacaaagctggtctcacggttgtctgcaagttcagcrtgtccttatccaatgtgaatgatttagtggaaacaaaaagttaaaatttgtgaaacaagttcaattttcaccattacacaat

SEQ ID NO: 43531 - DNA, 600 bp, Chicken  19866894281464_2
attcaaagctttgcacccctaaaaattagtggtcttatttctctatccatctttgaaacacattttttctatgtcctcccarggaaattctttctgttcaaaagtagagccagagagttattccactgacaaaatatcacctgtcagaaagcccctactttttctagagttccatggtttaaaatatgacaataatgccacctactaatagtctaaggctgtatttacatgtctctaaattttactgattgttaggtttcataaacaaagctggtctcacggttgtctgcaagttcagcrtgtccttatccaatgtgaatgatttagtggaaacaaaaagttaaaatttgtgaaacaagttcaattttcaccattacacaatgtggttagagaatagctaccaataaaaaatatatatttcaagcactgtttactatttatatctttataaatcatgtatagcatcctgctgtattcatatttttacagcataaattacacaggtgacaagttgtgacagtcatacaaaatcttattttatgacatttttccactttctgcctttggtattggaaagaaaaaaatcgggttaacgtcatt

SEQ ID NO: 43532 - DNA, 600 bp, Chicken  19866894281488_1
gtaaaaatatggctattaattagggaattaataatgtgtcagagcttgagcaacttccttacaaactctgaagaaaaagagccatctctctaggatttcttaggaaataaagattttcctttaataagtacttaagtcaaaagtttccagaaacatctgaaaaggtcattttgagagcagaaacatattctgcaaatgagaggttgttgtgcaagagtccaactcccattaaagtctaatgaaaatacaaaggatatttcagagaatccatttagtatggtggaataataactttagttktaaagatgacttgtgaatctacgtcacagagacaaagacaattagaattttattatttatacattaaacagacataatactaccaagatgtgggtacttgtaaggtaatycaagaaagttcaaatgtgcgtagctattgaaggcacagcaaccactaaataataactcaacagtcatgtgggatttcttcattttttcatattcccaaaggccccaaagataaggagcccatgggaaacagtcttgaatgagccatctaacctttatctgatttcactctccagtttaaataatacctcc

SEQ ID NO: 43533 - DNA, 600 bp, Chicken  19866894281488_2
agattttcctttaataagtacttaagtcaaaagtttccagaaacatctgaaaaggtcattttgagagcagaaacatattctgcaaatgagaggttgttgtgcaagagtccaactcccattaaagtctaatgaaaatacaaaggatatttcagagaatccatttagtatggtggaataataactttagttktaaagatgacttgtgaatctacgtcacagagacaaagacaattagaattttattatttatacattaaacagacataatactaccaagatgtgggtacttgtaaggtaatycaagaaagttcaaatgtgcgtagctattgaaggcacagcaaccactaaataataactcaacagtcatgtgggatttcttcattttttcatattcccaaaggccccaaagataaggagcccatgggaaacagtcttgaatgagccatctaacctttatctgatttcactctccagtttaaataatacctcccagagtattatggttgcttggaaagagcaatatggtgaatggcatctgtgaatcatttgctgcactattccctcaataaaaattctgttttctatgtctttgaagagaag

SEQ ID NO: 43534 - DNA, 599 bp, Chicken  19866894281489_1
  misc_feature (1)..(160): n is any nucleotide
nnnnnnnnnnnnnnnnnnnnnnnnnnnnnnnnnnnnnnnnnnnnnnnnnnnnnnnnnnnnnnnnnnnnnnnnnnnnnnnnnnnnnnnnnnnnnnnnnnnnnnnnnnnnnnnnnnnnnnnnnnnnnnnnnnnnnnnnnnnnnnnnnnnnnnnnnnnnnnnnctttaacaaacattatggacactccagtgctaagactctgcccaatgatatgtaaagaagaaactgtccacctgtagagagaaagcatatattgtatcagttctgtgaagaagtaaaaacaaaatagaatcatcccattyttactctttttcctctgcctttccccattccattcccattcttgttcccagataactagagacaattttctgaaactgaaagatgtataaaataatttgctctggtagtctggggaacgtaagagactgaagtaagcagaagacagtttatttgaacttaaaagagatcaattcatgaatgctttagtctgttagcaacgggagagtataggaatgaatttatttagtcctgtaatttcactatgtccactatacctcatcaggaggcagtatcatttataaacattttccatttgctg

SEQ ID NO: 43535 - DNA, 600 bp, Chicken  19866894281490_1
tcagttgtatacaggtgtcaacagactggaggaagaatgtgttgttacggggaaaaaaataacacacaaattttatatgtacttgtatataaccaatcccttaaccccagcctgaaggcagtctaccactgtgacgtaaacaagcatcttatggaactaggtcttccactcacagctgacatatttcgataactctagagcagcagtagctgttgttgattccccctcagaaagggctgttcccaatgctcgaagcctgggccataacattttagtctccttgcagacttgttttccacwtcaggagtggagccaagtcctacacagacatctggagacactacagaaaacaaagcgtgacaatctacgattaaatgtatgcaggttactttacagtgtaatatgagaaaacaggtttcaggcaaggaaaaggaaggcaagaggcacactctgctattaaattacatcagcactgcttttgattgtgctgagactcccatatcaacagaccaacttgctcactcacttatccgttcctgcttcacaccattcccccactcactcttccaaaacagtctccttcactcatttagcttttac

SEQ ID NO: 43536 - DNA, 600 bp, Chicken  19866894281492_1
tggcaaaaagagtatgacaggacttcacaatgtggagagctgcaatgacaaagacacaaaagcaggaggaccaggtggatatcacacccacacaacttctacagaagcactttagaggagaaacatacctttggtgtctctcatgttccagtacaccagagatcactgcttagaaatgtgggaatggagctgccctgacattcactctgggatgcaaaactgctcgttgagtatgaaatgcttctattctgaattgaaaatggcagcaaaatatttcatttgtagcactaccaggaattwccaagaagactcttgatcaaccaaaagcagattttcagaggtaatacctacattcccacctcaatatgagataaaccttgatatctgcacccagcgctgcccactgtctttttctttgcaaataaatatgtggtattttgcaaataccactactagaaaaggaagcataatttaatacaggaagcaaattgtatgttgccaaaagtctcagtggaaaaatattcttttaaacaagctggcagtgactataaatgagctccatcacctatgtgtttgtgcttgccaaaggtggtaatgtat

SEQ ID NO: 43537 - DNA, 599 bp, Chicken  19866894281496_1
  misc_feature (1)..(273): n is any nucleotide
nnnnnnnnnnnnnnnnnnnnnnnnnnnnnnnnnnnnnnnnnnnnnnnnnnnnnnnnnnnnnnnnnnnnnnnnnnnnnnnnnnnnnnnnnnnnnnnnnnnnnnnnnnnnnnnnnnnnnnnnnnnnnnnnnnnnnnnnnnnnnnnnnnnnnnnnnnnnnnnnnnnnnnnnnnnnnnnnnnnnnnnnnnnnnnnnnnnnnnnnnnnnnnnnnnnnnnnnnnnnnnnnnnnnnnnnnnnnnnnnnnnnnnnnnnnnnnnnnnnnnnnnnnnnnnnnnctgttgtttaatgtttacgttgttgayattgcatctgagtagtcaagttatgatgccgttgtagtcagcaggggagaaactgagactgacttatcataattggaagcactgtatagtatgcgtccaaaggtgtaattatgcctatgtgcttggcctgcctatagcttttaactgattacaaaagtaatctagctaaggtgtgtgggagctgaatttccctgtaagggactggctgtgtgaggtggagagcaccttgctttttttctcagtttttctggaatatgatgatggtgctaatcagcctcaggattagcattttgtaagtt

SEQ ID NO: 43538 - DNA, 600 bp, Chicken  19866894281496_2
agtcagcaggggagaaactgagactgacttatcataattggaagcactgtatagtatgcgtccaaaggtgtaattatgcctatgtgcttggcctgcctatagcttttaactgattacaaaagtaatctagctaaggtgtgtgggagctgaatttccctgtaagggactggctgtgtgaggtggagagcaccttgctttttttctcagtttttctggaatatgatgatggtgctaatcagcctcaggattagcattttgtaagtttaactatagtttctctttacataatctgtaggtagygggtgttgacattctgatgtgttatttccatgagtaatgaatgtatcacaattgtttcttttctggttttatttcactgagagtttaggatatgtttrttcatatttgaaagatgtcataaaatgctatgcttatggtaggagtttgtccatttggagtcctagtcttccgtttctgccttgtggtctactctttatgcttctgatraagataacttagactattagcagacaggctaattttgttggcactcacagctgccagcgtctgctggaagattttctccaggtgtacattact

SEQ ID NO: 43539 - DNA, 600 bp, Chicken  19866894281496_3
atagcttttaactgattacaaaagtaatctagctaaggtgtgtgggagctgaatttccctgtaagggactggctgtgtgaggtggagagcaccttgctttttttctcagtttttctggaatatgatgatggtgctaatcagcctcaggattagcattttgtaagtttaactatagtttctctttacataatctgtaggtagygggtgttgacattctgatgtgttatttccatgagtaatgaatgtatcacaattgtttcttttctggttttatttcactgagagtttaggatatgtttrttcatatttgaaagatgtcataaaatgctatgcttatggtaggagtttgtccatttggagtcctagtcttccgtttctgccttgtggtctactctttatgcttctgatraagataacttagactattagcagacaggctaattttgttggcactcacagctgccagcgtctgctggaagattttctccaggtgtacattactaaatgcaatcccttcatctttgttgtttaatttagcagagatgtcagttagctggtatgagctaaaaaggtgattctctcgtgttactaggaactggc

SEQ ID NO: 43540 - DNA, 600 bp, Chicken  19866894281496_4
tttttctggaatatgatgatggtgctaatcagcctcaggattagcattttgtaagtttaactatagtttctctttacataatctgtaggtagygggtgttgacattctgatgtgttatttccatgagtaatgaatgtatcacaattgtttcttttctggttttatttcactgagagtttaggatatgtttrttcatatttgaaagatgtcataaaatgctatgcttatggtaggagtttgtccatttggagtcctagtcttccgtttctgccttgtggtctactctttatgcttctgatraagataacttagactattagcagacaggctaattttgttggcactcacagctgccagcgtctgctggaagattttctccaggtgtacattactaaatgcaatcccttcatctttgttgtttaatttagcagagatgtcagttagctggtatgagctaaaaaggtgattctctcgtgttactaggaactggcctgaaataaagacaatgatttattttagagcaagcaatttcaacttttcaatgactcatgaaccaccacagttacgcagggagaaaaagcacacatgtatggtaagtga

SEQ ID NO: 43541 - DNA, 600 bp, Chicken  19866894281499_1
acaggcatggaagttaatgcacttttccctaagaggacctgtgttcaaacttagcatagaacgcaccgatgtagattatctggcagactcagtgctgtaagcacttagagtgtattgaaaatgtctgtggcagataggcagaacatactgtgtttttagaaacagatgtgatctgttcttccttgtgcattcagttgttgcaactcttttgcttaggtatgaatgggtatagtattgttgcccagtattaaaatcagaacaagatgagaaggaaattactgatagattagtgtgagtgaygtgctaaggcattttggtatcttgggtgcctaaaatagagcttctgaccagattcagaactagtcacctaactcagattaggtgacccctaatggcttggtatccttctgtgttcctgtagctggtttgcccaaacgttgaggtatatttgagtttgcgttgctggggttaacttgctgttcaggcaccttctgctgaataatcctaaattaaatccaagagttgtccttggcggtgacttctgttcttgtgctgcaggtgactatctaaaggtaaggtgcccttgagctctttcactgt

SEQ ID NO: 43542 - DNA, 599 bp, Chicken  19866894281500_1
  misc_feature (1)..(50): n is any nucleotide
nnnnnnnnnnnnnnnnnnnnnnnnnnnnnnnnnnnnnnnnnnnnnnnnnntgtcctttttactgacttctgtgaagactttgtttcttccgagtctgtaagtattgtaaaatggtccttgcaaatacacgcatgcctaagaaatgaatcctgagatcgacttatgtacaaccgttactgaaactcacctatcacttcttagagtttatcagatcttctctgcacattttcctccactactgacctgaatatttggaatagaccctacttgaaaaggcaacgtagctgtatttcttcctcscagaacactcagtgggtgacacagcctgagcattgcaatcctagcccattatgggtggtttcctasaaacgtgttggccatagggctcctaggaaattctatgaggtcccacttctcctccctgtagccgtgccatgtggtgagcagatccaagcaagcgttttagtttaccagctctgagtcttcatacgctctaaatatttagggcaagctgattggccgcccattgtctgcgagagatggaggaatggaggagactaatttggctgagattgtgcaagtgcaaaatgatgattacg

SEQ ID NO: 43543 - DNA, 600 bp, Chicken  19866894281500_2
ttctgtgaagactttgtttcttccgagtctgtaagtattgtaaaatggtccttgcaaatacacgcatgcctaagaaatgaatcctgagatcgacttatgtacaaccgttactgaaactcacctatcacttcttagagtttatcagatcttctctgcacattttcctccactactgacctgaatatttggaatagaccctacttgaaaaggcaacgtagctgtatttcttcctcscagaacactcagtgggtgacacagcctgagcattgcaatcctagcccattatgggtggtttcctasaaacgtgttggccatagggctcctaggaaattctatgaggtcccacttctcctccctgtagccgtgccatgtggtgagcagatccaagcaagcgttttagtttaccagctctgagtcttcatacgctctaaatatttagggcaagctgattggccgcccattgtctgcgagagatggaggaatggaggagactaatttggctgagattgtgcaagtgcaaaatgatgattacgggatttgtgaagcagtgctggcaattatgcaagtgccagaagggaggaagcacacttcccattgccc

SEQ ID NO: 43544 - DNA, 600 bp, Chicken  19866894281505_1
agattaatgcctcctttcatatagctgctgccccgcactacacacatggaacagcctcccacttgtagttcccaaacatgctcgccttctcttccaaatcagcacgcacaatcctccagctcacatctctgctgttttcgttgatgcaagcgaggctgttttgcaaagaaccattgagtatccaacaccaccacgtgcctaaactcccctggactttggtcacctctggttcccaggagtggaatctcacccacagacctgcatgtcttgggctggcatccagcctggtacctctgcctytccttgcgcctcactgcctctcactcactccaggagactgactttggctgcccaatcagcataaaacacttttttctttcctatctgcttttagttgggttgggtctctggctatttagccagctgactcaccttgccaggccggagctggtttgatgacgcatgggaatccccagaagtggagcaggaggaggacaggattaccaccttcagcagtatgggatcagctctttccaaaatcataccctgaagagaaaagaggcacagagcaacttatctatctcccccattctcctttat

SEQ ID NO: 43545 - DNA, 600 bp, Chicken  19866894281505_2
ttcctatctgcttttagttgggttgggtctctggctatttagccagctgactcaccttgccaggccggagctggtttgatgacgcatgggaatccccagaagtggagcaggaggaggacaggattaccaccttcagcagtatgggatcagctctttccaaaatcataccctgaagagaaaagaggcacagagcaacttatctatctcccccattctcctttatgtctgcgtttcacaatacaaaggtacgagaaaatactttgtcgaagacttcttgaaaacagaggcagtctttgcacmcgggtggatttttaatctgcatttaaacatatttcagarttagcaggcattagctattagccagtactattaaagatgcaaacagcttgataatgtagtgctccagatcaaaaagaggggtgggaactgtaaactttgcagtgtttgacttgaactcaagtgaaaacatctgacagcttttattggtgtttgcacttctcagtgacgggcatcaaggtaaaagcgacccgattgttgctttttatcgttttccagctgtggtacaaaaacaggaatctgttaattagttcagacacctat

SEQ ID NO: 43546 - DNA, 600 bp, Chicken  19866894281505_3
tagccagctgactcaccttgccaggccggagctggtttgatgacgcatgggaatccccagaagtggagcaggaggaggacaggattaccaccttcagcagtatgggatcagctctttccaaaatcataccctgaagagaaaagaggcacagagcaacttatctatctcccccattctcctttatgtctgcgtttcacaatacaaaggtacgagaaaatactttgtcgaagacttcttgaaaacagaggcagtctttgcacmcgggtggatttttaatctgcatttaaacatatttcagarttagcaggcattagctattagccagtactattaaagatgcaaacagcttgataatgtagtgctccagatcaaaaagaggggtgggaactgtaaactttgcagtgtttgacttgaactcaagtgaaaacatctgacagcttttattggtgtttgcacttctcagtgacgggcatcaaggtaaaagcgacccgattgttgctttttatcgttttccagctgtggtacaaaaacaggaatctgttaattagttcagacacctatggggtcaggttggcagcagcgaggtgctctgagccttct

SEQ ID NO: 43547 - DNA, 516 bp, Chicken  19866894281515_1
ggagcggcaatatctgcaggagggacggaggtgaaacccaacatcaaaggcaagaggctgtcagcacatttaactttacagaaacccatctcctaataaaaaaggaatgacctcgttactacggacactaacagttcccaggggaacaccgggagactgctgcctgcacttttaatattcactttacaaacaaatgggaaaccttgaaataatttcagtgttgttcttggcaagttgttacaacgttgtgtccttataaaacagcatttaagaatttatgtagtgtgagtttgcttttckcccgctgctttccctggctatccatctccctctggctgccccagccctgtgggaaaggtgaagtgcccaaaggtggcttcagcaggaggcctcgctgggtgcagacccatttctgcaggagatgctcccagaggcaggtgggccagggaaataaactcttacagctgatgccttaagctatccagtagcaactcactaactatcatgcagacttag

SEQ ID NO: 43548 - DNA, 600 bp, Chicken  19866894281518_1
cagggactagatgaaaaaggtccgttccaccccaaaccattctatgattctctatatatagccacaaaacaagggatgcacaaagcaagtgctcaacacctgctagcccatgcccagccagtctccaaccagcagctgcccccagccaactcctcacccttttatagtttttccatttgatgtcatatagtatggaatagccctttggtctccttaggtcagctattctgcttttgtctcctcccagctccttgtggacatcagcctcatttctggtaggacagtaacaacaaggtgaaraactgaagtgcccttggctcaacaacaactaaagcattgctgtgttatcaacttctcctagagccaaagactcataccatacattgtggagaaaaatcaactctgtctctgctgaaaccaggacaagaacttgctttgcaactacttgaaagtcaggtaatctgagcagatgctactgcatgtgaaaaatacactttggagaacgcatactaatttctaaagatcattagagaaagataaagaagacaatcaatgttgtcacttacaccagatatgctggtataagtgttgaggaggttt

SEQ ID NO: 43549 - DNA, 599 bp, Chicken  19866894281519_1
  misc_feature (1)..(248): n is any nucleotide
nnnnnnnnnnnnnnnnnnnnnnnnnnnnnnnnnnnnnnnnnnnnnnnnnnnnnnnnnnnnnnnnnnnnnnnnnnnnnnnnnnnnnnnnnnnnnnnnnnnnnnnnnnnnnnnnnnnnnnnnnnnnnnnnnnnnnnnnnnnnnnnnnnnnnnnnnnnnnnnnnnnnnnnnnnnnnnnnnnnnnnnnnnnnnnnnnnnnnnnnnnnnnnnnnnnnnnnnnnnnnnnnnnnnnnnnnnnnnnnnnnnnnnnntgttaatcttcttgcagctgcagcaaatgagagattccatttggctttcccraaaataattaatttgaaaagcttggggattagagaagaattagagctcattagaaatcccattccctgatctgcccatcccaaggaccccaaaaccagcaagcaggaaggcagcacctccccatggagactcatgaggacaaatacgtcccactacaggacggaccagaactgtaaagtacaacatccattccttgcactgcaaaatgccacaggatgcacagctggaggatcttgcatgagacagcctgtgttcacctcctgggcgaccattcctggtgaaggacacagggcatgggg

SEQ ID NO: 43550 - DNA, 600 bp, Chicken  19866894281519_2
tgaggacaaatacgtcccactacaggacggaccagaactgtaaagtacaacatccattccttgcactgcaaaatgccacaggatgcacagctggaggatcttgcatgagacagcctgtgttcacctcctgggcgaccattcctggtgaaggacacagggcatggggccacatcccctcctgcctcctggtgcaaaccctccccccagggtctggagtttagagatgagtttcaggacatgtctcacggccactcactagggcatgtgagaaaacagagacacagaatgactttctccacrgtgcaataaaacagatagataggttggcagtaaaccgcatcaattacagggaactcagtaattaattagaagccaggagtcttcccatccctcagtgcagctctgaaattaagagctggagtgaagaataacttccaggccagacagtcagtgctggggccacacgattgcctcccacgcagagacgcaccgaagagtgcaattgcctcctagaagatgtcaatcgatttgcttttcagttggcagcaaggacacaggtttgacctctgcctgcagagagaggggagagcatttaggtga

SEQ ID NO: 43551 - DNA, 600 bp, Chicken  19866894281520_1
tctatgtccaagatggaagaaatttacaccccaagatgcgtataaacacactaagctgaagaagaggtaacacctggtagggcagaggtgttgaagaatgataggaggattttactgtgtggtgaagaaaacagaaagatgacatttagtttttccatcccttattgctccttaaatacattctgttagtaataaaaacgggaattttagaagaggtctggaagtgagaggaactcagcattcatagtgaatgaatgaagtgaccagatggagttgcactcgatgatccttatgggtcaygatactcggtgattctatgactcatgtgctcaaatgctgctcaagacagacatttaaactgtaccagcatctttggaagttcgcacttgaaagcatatgttaaaccattattcaagagaagatttactttaaaaagtttcagaataataaccaattgttgttggttccatcagttactcattttcctcctagaagtgctgaacatgtgtcagtccaacagaatccttaawgcctaaktgttctgggacctggagcgttacagtgggaacacattcactgagaaaggacagcataccaatg

SEQ ID NO: 43552 - DNA, 600 bp, Chicken  19866894281520_2
gaactcagcattcatagtgaatgaatgaagtgaccagatggagttgcactcgatgatccttatgggtcaygatactcggtgattctatgactcatgtgctcaaatgctgctcaagacagacatttaaactgtaccagcatctttggaagttcgcacttgaaagcatatgttaaaccattattcaagagaagatttactttaaaaagtttcagaataataaccaattgttgttggttccatcagttactcattttcctcctagaagtgctgaacatgtgtcagtccaacagaatccttaawgcctaaktgttctgggacctggagcgttacagtgggaacacattcactgagaaaggacagcataccaatgtacttgatcaacagacaaccctgctctgacagatgttttgaacaaaatattccatttaccattttcaacatgggcaagtctgtgcatgagaggcagccacacaaggcactgaggaggtggatcagccatcaatgtgtctaaaaacatgtttagcgtgatctttttctgcaaaggaaaaagaaacacaacttaagaaaatcgtccatttcatttcaaaaattacattagtc

SEQ ID NO: 43553 - DNA, 600 bp, Chicken  19866894281520_3
gcattcatagtgaatgaatgaagtgaccagatggagttgcactcgatgatccttatgggtcaygatactcggtgattctatgactcatgtgctcaaatgctgctcaagacagacatttaaactgtaccagcatctttggaagttcgcacttgaaagcatatgttaaaccattattcaagagaagatttactttaaaaagtttcagaataataaccaattgttgttggttccatcagttactcattttcctcctagaagtgctgaacatgtgtcagtccaacagaatccttaawgcctaaktgttctgggacctggagcgttacagtgggaacacattcactgagaaaggacagcataccaatgtacttgatcaacagacaaccctgctctgacagatgttttgaacaaaatattccatttaccattttcaacatgggcaagtctgtgcatgagaggcagccacacaaggcactgaggaggtggatcagccatcaatgtgtctaaaaacatgtttagcgtgatctttttctgcaaaggaaaaagaaacacaacttaagaaaatcgtccatttcatttcaaaaattacattagtcttaacat

SEQ ID NO: 43554 - DNA, 476 bp, Chicken  19866894281529_1
aaaatgatccttgattttagtgcagggtagagtaataaatagctgtttagaagtttaaagagtgtgtacatttcacaggtcagtgggaatagacaaagccttgagaagcagccctctaagaccaaacatattttttaagcctgtaagcctttgaaaataaacattagtttcatcatcacattggagggctaaaaatcatttctctatcaaacctcaaagcactgacatccagtggggatatactgatgctctgcaggagagacagagacatacttgtgaggtgaaagagatttcttcaakctcagatggcaacagcagccccattttgccttcttcataaaagcactatcccagcagtgaggatagctttgtcatcttttcaggtgaaaaaagagaggaacgcaaaagttatcagcaaacacaaatcactgtacaacctggctgctagctctgcattgactgcatgtaatcagata

SEQ ID NO: 43555 - DNA, 600 bp, Chicken  19866894281536_1
taagatatctggctcatttcagctagaattatgcttctgctaaccaccattcacattacatggtaattttatcccaactttcccctgtgctagcttttcaagtggttcttaattaactctgttttatttatgaaagcatattttgctagactttccccaagagctttagtaaacagctgtattaaagttgtctttacttatcacatcttctgtaatgctctcaaaaatgctgggagaaaggaataatatttagagaagcagaggtgtttgagctgaaggttcctgctacttttagtctgkctctttagatatataagcataatcataagcatataatgaatgcttatatctgtgcatstgtcattctgcctccattttaataaatgcctactttttaataagttgccctattttggcttaattttgtagagaacagaagtcttaaaaatagttcttacaaatactgagatcatagggagcagaatacgcaagagaaaktgtatgaatattcacactgaaggaaagacacagttggctattcagctcatgagatgcaatgraattgaagtaacttgtccctccaaggcaagaaaattttcc

SEQ ID NO: 43556 - DNA, 600 bp, Chicken  19866894281536_2
catggtaattttatcccaactttcccctgtgctagcttttcaagtggttcttaattaactctgttttatttatgaaagcatattttgctagactttccccaagagctttagtaaacagctgtattaaagttgtctttacttatcacatcttctgtaatgctctcaaaaatgctgggagaaaggaataatatttagagaagcagaggtgtttgagctgaaggttcctgctacttttagtctgkctctttagatatataagcataatcataagcatataatgaatgcttatatctgtgcatstgtcattctgcctccattttaataaatgcctactttttaataagttgccctattttggcttaattttgtagagaacagaagtcttaaaaatagttcttacaaatactgagatcatagggagcagaatacgcaagagaaaktgtatgaatattcacactgaaggaaagacacagttggctattcagctcatgagatgcaatgraattgaagtaacttgtccctccaaggcaagaaaattttcctcagctccccaacaactggtaatgctgcgctttctacaaatactttagcagtagttgc

SEQ ID NO: 43557 - DNA, 600 bp, Chicken  19866894281536_3
tatcacatcttctgtaatgctctcaaaaatgctgggagaaaggaataatatttagagaagcagaggtgtttgagctgaaggttcctgctacttttagtctgkctctttagatatataagcataatcataagcatataatgaatgcttatatctgtgcatstgtcattctgcctccattttaataaatgcctactttttaataagttgccctattttggcttaattttgtagagaacagaagtcttaaaaatagttcttacaaatactgagatcatagggagcagaatacgcaagagaaaktgtatgaatattcacactgaaggaaagacacagttggctattcagctcatgagatgcaatgraattgaagtaacttgtccctccaaggcaagaaaattttcctcagctccccaacaactggtaatgctgcgctttctacaaatactttagcagtagttgctaagtttgcaaaaggaatgagtgttagttgtctttaaagtacacatttggatgcgcatcactgcaaagacagatttcatcgatactgaaaaatgaatactgtctgctgggtagcagaattgaactttgtactccccactt

SEQ ID NO: 43558 - DNA, 600 bp, Chicken  19866894281536_4
gaggtgtttgagctgaaggttcctgctacttttagtctgkctctttagatatataagcataatcataagcatataatgaatgcttatatctgtgcatstgtcattctgcctccattttaataaatgcctactttttaataagttgccctattttggcttaattttgtagagaacagaagtcttaaaaatagttcttacaaatactgagatcatagggagcagaatacgcaagagaaaktgtatgaatattcacactgaaggaaagacacagttggctattcagctcatgagatgcaatgraattgaagtaacttgtccctccaaggcaagaaaattttcctcagctccccaacaactggtaatgctgcgctttctacaaatactttagcagtagttgctaagtttgcaaaaggaatgagtgttagttgtctttaaagtacacatttggatgcgcatcactgcaaagacagatttcatcgatactgaaaaatgaatactgtctgctgggtagcagaattgaactttgtactccccactttagcacgttatgcctcagtttgctgtgattcaccaatcacatttaaaaaacctcagtgaaca

SEQ ID NO: 43559 - DNA, 600 bp, Chicken  19866894281540_1
gttattgtcctcatgaaggtcatatcacaatctagtggttataatttttgccacttatttttattgtattaacaacctgagattgagcctagaggtccttgtgtgtgttcagtgttgtgtgtaattcctggcaagagtcttcagtaataatcattggtgtatctgcttcctcatgacatgtttctaaatacttctaagagtaactcctttgaatgtgaaggtttcaggctgtctgctgaagctgtaggttaaaattctgggattgctactttctttttaacgttcatttaaaaaaaaaamaacaatctgtggagctttgcagacatgaacactcacttcacataggtgaggtagataagaagtgctttccacattttacagatggggaaatctgagcagttaactgacttgcatgaagtcatgcggcaagtcagtggcagagcaaagaatggaacctgagctatttccaagtcctgtgctctaaccactgcacagcatccctcccttaggtaattttcggacgtgatgtttgtatttggtgtattcagtgactttgagaagattatcgaatcaggtacaaattgacttgcagtggacaag

SEQ ID NO: 43560 - DNA, 599 bp, Chicken  19866894281541_1
  misc_feature (1)..(33): n is any nucleotide
nnnnnnnnnnnnnnnnnnnnnnnnnnnnnnnnnatcagcactctcctgcagtatgtttgattatttcttttgcatttgattctaagtaattccatataaagcacccaattcatttccagttcacccctgcaaaaagtctgagcagccctatgggctgttgtgaagggatgcaaaggccagacaaccttgtttatcaccagtttttctccattatgcatcatgtccagctacagacatttgtgggaagaataccagcctcagcaagcagctttgagaagactcttatcctactagaaaacmagaaaaagtagttcccattggcaaactgagataaaatgtctcttaactgcagctttgttccctctttgtccttctcactgtattttacaagtctcttgatggtggtcttgaatgagatggaacctcacaaacgctcagctgcaagatgatcgcgcatgctcttctccagtaatctatggaaaattggtgggattttcagtaagggaagccaagcaattgcaaaaggtatgtaaagaccctggagaagccattcacctcaaggcaatagagagaaaccatggagaaactctggaagatgc

SEQ ID NO: 43561 - DNA, 599 bp, Chicken  19866894281544_1
  misc_feature (1)..(115): n is any nucleotide
nnnnnnnnnnnnnnnnnnnnnnnnnnnnnnnnnnnnnnnnnnnnnnnnnnnnnnnnnnnnnnnnnnnnnnnnnnnnnnnnnnnnnnnnnnnnnnnnnnnnnnnnnnnnnnnnnnnaaaagcattttgtccttcactgtcatggaagaaatgtagaatcaccttgaattcatgaactagtttcttaccactcaaatagaagactggattattcactacacatacagaaatgtacttgtttatgaaatcctaacatgatatctgagacaatactacaatgtggaagcctttaccttgccctwattttaagaattttaagaaattcctcaggttgaaatgtcaaggaagtacaacastgatctragaagaaaagcattttaaaagaacgtctttatatttcagtatacaaaacagcagaagtgttgattcagaaaatgctctctatccacatcagttattctttaaaaacaaaatcaatgaagcctttgagtatcctagtatttccagtgctcaaacactcatcgttctcaatgtaaaaactttcctacattaacctttttttgctgaaggtttctcattatatagggttccagaggtgata

SEQ ID NO: 43562 - DNA, 599 bp, Chicken  19866894281544_2
  misc_feature (1)..(61): n is any nucleotide
nnnnnnnnnnnnnnnnnnnnnnnnnnnnnnnnnnnnnnnnnnnnnnnnnnnnnnnnnnnnnaaaagcattttgtccttcactgtcatggaagaaatgtagaatcaccttgaattcatgaactagtttcttaccactcaaatagaagactggattattcactacacatacagaaatgtacttgtttatgaaatcctaacatgatatctgagacaatactacaatgtggaagcctttaccttgccctwattttaagaattttaagaaattcctcaggttgaaatgtcaaggaagtacaacastgatctragaagaaaagcattttaaaagaacgtctttatatttcagtatacaaaacagcagaagtgttgattcagaaaatgctctctatccacatcagttattctttaaaaacaaaatcaatgaagcctttgagtatcctagtatttccagtgctcaaacactcatcgttctcaatgtaaaaactttcctacattaacctttttttgctgaaggtttctcattatatagggttccagaggtgataagaagtgcatagatatttcagttttggtatagactcctaccaagacacatatgt

SEQ ID NO: 43563 - DNA, 599 bp, Chicken  19866894281544_3
  misc_feature (1)..(54): n is any nucleotide
nnnnnnnnnnnnnnnnnnnnnnnnnnnnnnnnnnnnnnnnnnnnnnnnnnnnnnaaaagcattttgtccttcactgtcatggaagaaatgtagaatcaccttgaattcatgaactagtttcttaccactcaaatagaagactggattattcactacacatacagaaatgtacttgtttatgaaatcctaacatgatatctgagacaatactacaatgtggaagcctttaccttgccctwattttaagaattttaagaaattcctcaggttgaaatgtcaaggaagtacaacastgatctragaagaaaagcattttaaaagaacgtctttatatttcagtatacaaaacagcagaagtgttgattcagaaaatgctctctatccacatcagttattctttaaaaacaaaatcaatgaagcctttgagtatcctagtatttccagtgctcaaacactcatcgttctcaatgtaaaaactttcctacattaacctttttttgctgaaggtttctcattatatagggttccagaggtgataagaagtgcatagatatttcagttttggtatagactcctaccaagacacatatgtggggtgt

SEQ ID NO: 43564 - DNA, 595 bp, Chicken  19866894281547_1
ttaaccagataaatgaatattagacatttgaaagtgatcaaacagctatatgagatgccctagcagagagcagcagctgcactaagccaggcagtagaaatcctatttcgcccagcacagaagccacagtcttcaatcaaccctggaaataaaatatttgagcacgtctgacagtttgctgggaatatcaccttctgccatgctccgctggcagcctgcccggctcggtggctgctgtcatgggggacatgggcaggcaggttgggttgttgcgatgtgcgttgtaatgaatgagttggytcatctgacatcatgttgtgctgggattcgtgttggggcattggtcccagggacatgtgtgcacactactactcctagcagtagctggccgtgggataagccattgcatgtcttcgtccttgtggcgacagcaccagggcattcctgggtgccagcattctcagcatcatggcacctctgcactttgaatgaagtatcgtattattaactggataaaaatgttactgttttcattgcttccctttcaaagtgtaatgttcagtactttttagtacgtttattactttaaaaaagt

SEQ ID NO: 43565 - DNA, 600 bp, Chicken  19866894281549_1
gcttctctcgaagcagaactcatattggacaacagcgtagacaggcacagaactgtgagcatgtgttcagatattcagccatcttctcctgatgtggaagtaacgtcacaacataatgaaactgagaatgctgcactggtggctgagccagaaacagaaactgttgttacagaaatggttaccgaaacagaagctccagcacttaataaatgtcctactaagtatcctaaaacaaagaaggtatgtctcttaagagatggggagaagagaatgggctttaatagagtttttaaaagattrtaggcagctgcctctgtatcttaaactatgtatytttctaattttctttaaaaactacacagccactcaccgatactaattacaatttaaaaatattgcattacatccatttagatgttgagttctcatacagctttcagaacagttytggaacaaatgtgttctaaggacagtgctttcaaaatggactggattttgtgtgtgtataaatatacaaaacataagtaaaactgttaatttcaaggggaggaggagaacattagtcagctgtccttcttttattcatcatatgatttataa

SEQ ID NO: 43566 - DNA, 600 bp, Chicken  19866894281549_2
gcgtagacaggcacagaactgtgagcatgtgttcagatattcagccatcttctcctgatgtggaagtaacgtcacaacataatgaaactgagaatgctgcactggtggctgagccagaaacagaaactgttgttacagaaatggttaccgaaacagaagctccagcacttaataaatgtcctactaagtatcctaaaacaaagaaggtatgtctcttaagagatggggagaagagaatgggctttaatagagtttttaaaagattrtaggcagctgcctctgtatcttaaactatgtatytttctaattttctttaaaaactacacagccactcaccgatactaattacaatttaaaaatattgcattacatccatttagatgttgagttctcatacagctttcagaacagttytggaacaaatgtgttctaaggacagtgctttcaaaatggactggattttgtgtgtgtataaatatacaaaacataagtaaaactgttaatttcaaggggaggaggagaacattagtcagctgtccttcttttattcatcatatgatttataaggtatcttagtggcagtaaacagaatatctcaaa

SEQ ID NO: 43567 - DNA, 600 bp, Chicken  19866894281549_3
cagaaacagaaactgttgttacagaaatggttaccgaaacagaagctccagcacttaataaatgtcctactaagtatcctaaaacaaagaaggtatgtctcttaagagatggggagaagagaatgggctttaatagagtttttaaaagattrtaggcagctgcctctgtatcttaaactatgtatytttctaattttctttaaaaactacacagccactcaccgatactaattacaatttaaaaatattgcattacatccatttagatgttgagttctcatacagctttcagaacagttytggaacaaatgtgttctaaggacagtgctttcaaaatggactggattttgtgtgtgtataaatatacaaaacataagtaaaactgttaatttcaaggggaggaggagaacattagtcagctgtccttcttttattcatcatatgatttataaggtatcttagtggcagtaaacagaatatctcaaaggaaataatgagctttcagtatttctgagatgtctctactagcagtgctcattaaagcttaaaaccatccatcttacaactaagaaagcagtttttagcttccagtctgtgcac

SEQ ID NO: 43568 - DNA, 600 bp, Chicken  19866894281555_1
cctctgcttctgtgggaaatgaaggtgcccagtgctcggcaggatctgaccctgaggatgggctgcatcaccctcagggatccatcatccttgtcccattgccccatttagaatgcatgcagaagcactcctggtatctacggagcagctccacaagttggagtgatccattttgattatcctattaaaaggatgcagcctgctttccaaatgcacaggaatctaactaacttagttgctctaattagcccctgctgcaatttctgctatgctattaaaatactttatactcaaatgcartgaaatgcttgtaaatcaagggagattaaaaatccctttggctgyagagttgtgtttattagaaagactttaacatcctgaatttttaacaatgctgcacgctgcaaagggatccgaggttcatagggaggagcggcatcttttatgggatcatctcatggagtcgaggaacagaaggaaaaacaaagaagacatttccaggcacacagacctcctttgtggagggaccaaagcgggagtaaacacacgtgaaatcagctcatctgagggtgaaatgagctctgggtttcacttcccagt

SEQ ID NO: 43569 - DNA, 600 bp, Chicken  19866894281555_2
ctgaccctgaggatgggctgcatcaccctcagggatccatcatccttgtcccattgccccatttagaatgcatgcagaagcactcctggtatctacggagcagctccacaagttggagtgatccattttgattatcctattaaaaggatgcagcctgctttccaaatgcacaggaatctaactaacttagttgctctaattagcccctgctgcaatttctgctatgctattaaaatactttatactcaaatgcartgaaatgcttgtaaatcaagggagattaaaaatccctttggctgyagagttgtgtttattagaaagactttaacatcctgaatttttaacaatgctgcacgctgcaaagggatccgaggttcatagggaggagcggcatcttttatgggatcatctcatggagtcgaggaacagaaggaaaaacaaagaagacatttccaggcacacagacctcctttgtggagggaccaaagcgggagtaaacacacgtgaaatcagctcatctgagggtgaaatgagctctgggtttcacttcccagtttgggttgggtttgcacggacccagatctgcaagggaaygttaga

SEQ ID NO: 43570 - DNA, 596 bp, Chicken  19866894281555_3
ggctgyagagttgtgtttattagaaagactttaacatcctgaatttttaacaatgctgcacgctgcaaagggatccgaggttcatagggaggagcggcatcttttatgggatcatctcatggagtcgaggaacagaaggaaaaacaaagaagacatttccaggcacacagacctcctttgtggagggaccaaagcgggagtaaacacacgtgaaatcagctcatctgagggtgaaatgagctctgggtttcacttcccagtttgggttgggtttgcacggacccagatctgcaagggaaygttagaaggttgctgcctggtgtgtaatggcagtggtgctgcatctcaacttcaatgtggattctcttcaaaaggaaaatggtcctttaagtgtttatgtttgactgaggaagggatcaggtgagaacttaatcctagattttatgcacgtctttcctcgctgcttatgagggtttgtggtttggttactgaattccattttctcccctttccttctgggtgggttagatcctgctgcatacacaccctctcacttctgctttgctttctcctatgtaaaggagatggaaaacatg

SEQ ID NO: 43571 - DNA, 600 bp, Chicken  19866894281556_1
gtgatttgaaaaaaagaatataaatttttgctttaaaatatgattatccatggttcggtgcccagaggtggttcggttactttgcatcctttccaacagacgggcaaagtaaacagtagcatctaaaatgactcaactgtgaatagggaaactctaagctgattttccatgagctgcttttgcctccgtcctgtcttaatgtacagtgagacgccagttggattggactgcaattggaaatgtaagctgaaagcctgtcacgtagctttatagaaattagtattgttttacctgaaaaaycaacattttctgcatcaaaaaaaagttaatgtttttttttttttgtagttaataagacaactttagagggtagtgtgagaacaaattttactctttttaaaatagatccttacaataaatgaggatggatcacttggtctgaaaacccacaaatctcatgtttgtgagcattgcaatgctgcctttagaaccaactaccatttacagagacatgtcttcattcatacaggtactgcttgacttcaaatttgtcttttctactatataaagagttgtttacttatgttaaaaatgttttca

SEQ ID NO: 43572 - DNA, 600 bp, Chicken  19866894281557_1
tagaaaaactcttcctaataacaatcaaatatttcaacaccaagcacagagccagagctctgccctgacaagcagcctctcctgtaatgtaccttcttggcgaggtgagtgaggggctttgttccagccagatccgtgaaccagttgtttatggcactctgtgaacgtgctgtcaccagccagaagttgtccttctgattcacctggggtttccttcttcctgtgtctggcagcgtattgcaccgcagcttttctgcaataatactgctgaaatttgaactgatctggagcaagaaaggyaaaaaaaaaaaggataawctgtatttcgtagctcagtgatcttctcaacatgcttaaaattccatctgtgcttccaaccataagtctcattggttacaaacctctgaaacgcaaaaaagccgttaataatttcctttgttataaagagaagaacgcttcrtagaatcrttaaggctggaaaagatctctcagatccccgagcccaaccccagcccagcccaccatacccatcaccacatccctcagtgccrcatccccacagtaatggagcacttccagggacggtgaccccactgccct

SEQ ID NO: 43573 - DNA, 600 bp, Chicken  19866894281557_2
taacaatcaaatatttcaacaccaagcacagagccagagctctgccctgacaagcagcctctcctgtaatgtaccttcttggcgaggtgagtgaggggctttgttccagccagatccgtgaaccagttgtttatggcactctgtgaacgtgctgtcaccagccagaagttgtccttctgattcacctggggtttccttcttcctgtgtctggcagcgtattgcaccgcagcttttctgcaataatactgctgaaatttgaactgatctggagcaagaaaggaaaaaaaaaaaaggataawctgtatttcgtagctcagtgatcttctcaacatgcttaaaattccatctgtgcttccaaccataagtctcattggttacaaacctctgaaacgcaaaaaagccgttaataatttcctttgttataaagagaagaacgcttcrtagaatcrttaaggctggaaaagatctctcagatccccgagcccaaccccagcccagcccaccatacccatcaccacatccctcagtgccrcatccccacagtaatggagcacttccagggacggtgaccccactgccctccggggagctgtgccagt

SEQ ID NO: 43574 - DNA, 600 bp, Chicken  19866894281557_3
gtgaacgtgctgtcaccagccagaagttgtccttctgattcacctggggtttccttcttcctgtgtctggcagcgtattgcaccgcagcttttctgcaataatactgctgaaatttgaactgatctggagcaagaaaggaaaaaaaaaaaaggataawctgtatttcgtagctcagtgatcttctcaacatgcttaaaattccatctgtgcttccaaccataagtctcattggttacaaacctctgaaacgcaaaaaagccgttaataatttcctttgttataaagagaagaacgcttcrtagaatcrttaaggctggaaaagatctctcagatccccgagcccaaccccagcccagcccaccatacccatcaccacatccctcagtgccrcatccccacagtaatggagcacttccagggacggtgaccccactgccctccggggagctgtgccagtgcagcactgctcttctggagaaggaacttctcctaatatctgaccttgccagctgacagaggcagagaaacagcacccagatcagagtaaagcaggtaagagctacaaagcctttttcccccacttgttagctggcagtcac

SEQ ID NO: 43575 - DNA, 600 bp, Chicken  19866894281557_4
gctgtcaccagccagaagttgtccttctgattcacctggggtttccttcttcctgtgtctggcagcgtattgcaccgcagcttttctgcaataatactgctgaaatttgaactgatctggagcaagaaaggaaaaaaaaaaaaggataawctgtatttcgtagctcagtgatcttctcaacatgcttaaaattccatctgtgcttccaaccataagtctcattggttacaaacctctgaaacgcaaaaaagccgttaataatttcctttgttataaagagaagaacgcttcrtagaatcrttaaggctggaaaagatctctcagatccccgagcccaaccccagcccagcccaccatacccatcaccacatccctcagtgccrcatccccacagtaatggagcacttccagggacggtgaccccactgccctccggggagctgtgccagtgcagcactgctcttctggagaaggaacttctcctaatatctgaccttgccagctgacagaggcagagaaacagcacccagatcagagtaaagcaggtaagagctacaaagcctttttcccccacttgttagctggcagtcactgtaagaa

SEQ ID NO: 43576 - DNA, 600 bp, Chicken  19866894281557_5
ttctgcaataatactgctgaaatttgaactgatctggagcaagaaaggaaaaaaaaaaaaggataawctgtatttcgtagctcagtgatcttctcaacatgcttaaaattccatctgtgcttccaaccataagtctcattggttacaaacctctgaaacgcaaaaaagccgttaataatttcctttgttataaagagaagaacgcttcrtagaatcrttaaggctggaaaagatctctcagatccccgagcccaaccccagcccagcccaccatacccatcaccacatccctcagtgccrcatccccacagtaatggagcacttccagggacggtgaccccactgccctccggggagctgtgccagtgcagcactgctcttctggagaaggaacttctcctaatatctgaccttgccagctgacagaggcagagaaacagcacccagatcagagtaaagcaggtaagagctacaaagcctttttcccccacttgttagctggcagtcactgtaagaaacgctggatgccaacactgtcagcaccaagataggtgtgggacttcacgctgccacagctgctgtccctacgcaggaggccac

SEQ ID NO: 43577 - DNA, 600 bp, Chicken  19866894281558_1
gaagtggatcaaaatattgggtttcagtccatgcaagacctctttgaaaatgttcgtgatttactctgctggaatatggtagtactggtaattaaaagcagatgaactgtatgagaagaaaacagcacatgagtatattactaaccccgtacataatagcaagtgtatggccaaaggtgggtgtggtttcatttttttaagaagtaatttttctagcctgggcatttgttttgtactgttgatttgttttacagttttgcacagtgataaggctaatatttttttcaataggttggaacragaagtagatccaatttagcagagaaggtcagactaagtcttcaatatgaagaggcaaagagaaggtaatggggttagtcgctttgttaaattacggtcttgagtcgggcgctttcgacctctccgatgctaacattgtgctcgcagtgacatctagtggacggccctgcgggccaaagcaggctttcaggatccggcagtgcttttgagcagtagtttttacwtttaatgctaagttgcgtaagttaagaaatgaaatgaaaagttacgtgatcagttccaggattgtggaaatagagt

SEQ ID NO: 43578 - DNA, 600 bp, Chicken  19866894281558_2
tttgttttgtactgttgatttgttttacagttttgcacagtgataaggctaatatttttttcaataggttggaacragaagtagatccaatttagcagagaaggtcagactaagtcttcaatatgaagaggcaaagagaaggtaatggggttagtcgctttgttaaattacggtcttgagtcgggcgctttcgacctctccgatgctaacattgtgctcgcagtgacatctagtggacggccctgcgggccaaagcaggctttcaggatccggcagtgcttttgagcagtagtttttacwtttaatgctaagttgcgtaagttaagaaatgaaatgaaaagttacgtgatcagttccaggattgtggaaatagagtgaattggtgttccagtgaaaggctaccagcctacttacttccatttacatccttctttggggtcatcatttcagtttactatgcaactgatggttcttcaggtataatgcttcagagtttcgcttcagattttgtaagcttaattatctctttttttccctgggacttagaatcataaaatggcttaggttggaagggacattaaagatcatcaagctccaacc

SEQ ID NO: 43579 - DNA, 600 bp, Chicken  19866894281586_1
gtttattaattttcttacattcagaagtcattgccatttttggcttttggtaaagttacattggtctctgcccctactgtcacacaagtcagtttgttcagagaaggctttcgatcatttagggctcgttcaaccaagaagccaatagcttattattcatgacagaagaattttatttttactataacatatatatgtatctattcttgtgtacattgtgtacattatttatctctttgaagacaacatttgaaatctgtttggaagtggtcctgagaaacctgctctagatggccttgmttgagcctgggaatggacgacttccaatcttaatcattttgcaatttttttgaatagtattatgccagaaagtcaagggaatgctttggctcaaacactagctctatttgaagtcaccaacataattttgctatgttgtgagtctggtgttacagcaaacagaattgcacattatttctctgtgtcaattccctcaaggaacaagaggagaagaaaatggtttgagtaaggtaaggagtgggaggacaaaagaaacatgtcagatttgtgttgccactatctttgcttattagaataagg

SEQ ID NO: 43580 - DNA, 600 bp, Chicken  19866894281610_1
ctgttttatgttctagctctcatatatgaagcccagtgttgttttgcttttgatactgcaggcacaggtgtgaatgatatattcttaaacatactcttacatcctgtaaagtttatgatttatttagaagcagagcatgtttgtcttacatgcatacaggactttaatgtcatattatggactgtgtcatatactcagaaatagaaaacaaaattcatttgagtcaaagttttgcaaggaaattaacagagtggctttcagcaagtgtacttttggacaaacaactcaaatgtatctacraagactttcacctctccatactgttgtgggtaactgatttggacaaactttctctttgttgacaccctcattacaacagcagctgttgaagctttgccatttcaagcatatgatacatgtgtctccttgacattcttcagttcttttcactgcactccacctaactttggcatgtcctcaagaggcctcctctgttcccaacacttattctctcaaacttgtcttgtccatcaatgtgatggcaatgtatccctaccaacagagaaaatgctgttttgcagtaaagaggccagtgaaaaa

SEQ ID NO: 43581 - DNA, 600 bp, Chicken  19866894281612_1
tcttttctttagaatatgaattatcaaacaggagacaatttgtagtagactggggatttgaaagtagaattattcaagctctgatagatcctaaggttggatatctacttctgttgatactgctttatctagtattggatcacatgaaatttaacacctattatttgttgtgggattgtaatcataagcaaatcacaaaaacagtcatcctcaggttagcaattgatagcagccaaatagatcaacagactacttgaacatcactgctgttaaacgggtaaatcatttacctctcccacrcaaggttcagcaaggcaaagggaatgtatgttcattggaatttatagtgattggtagtttcactgtagagaactcttgctcatatttctaagtagcacaagtcctatgggactgttaaattgcttcatgaagtatggcaacgttcctgagaagctttgcagggaaatcagtgaaagtggaatcttcagaactgagacaatagatttgtgcgggaatggatgggaggtgcaggaatatgtcaggaagcaagcaagaatactgaagaattgagttgtatcatgacagtaatgtcaaccagcg

SEQ ID NO: 43582 - DNA, 524 bp, Chicken  19866894281619_1
cctggttatttcatattcaagaagtctgctctcactgggacccatacagcttctataaggatggataagtgggtactttccgtgagctggcagtgccttgtcctcaccttcaggcagaggagccgaggcagcccctcaccctcgttacactgtgtgtaagccaaggatccagcccaggaatcctgccttgctttggagcgggtccttggggtgttcctgggtagggagaggcgtggaggtgtcggggtatggatctgggagtctcctcggtggtaggaagcagatgagcttggaaccccyccccgcccctcagtgcctgcagctctgygttgccttcccrgggccaggtttgccagtaacctcttgctttctcctgtttctaatcagattgtaaatctcgtacctagcactgtaatggctaatgcaggtctgtggataaaacattccctgatcaagactccaaccaggggggagaaatacttttccggtgagacaacgtctgttcctcatcaaaatcagttgag

SEQ ID NO: 43583 - DNA, 496 bp, Chicken  19866894281619_2
ctctcactgggacccatacagcttctataaggatggataagtgggtactttccgtgagctggcagtgccttgtcctcaccttcaggcagaggagccgaggcagcccctcaccctcgttacactgtgtgtaagccaaggatccagcccaggaatcctgccttgctttggagcgggtccttggggtgttcctgggtagggagaggcgtggaggtgtcggggtatggatctgggagtctcctcggtggtaggaagcagatgagcttggaaccccyccccgcccctcagtgcctgcagctctgygttgccttcccrgggccaggtttgccagtaacctcttgctttctcctgtttctaatcagattgtaaatctcgtacctagcactgtaatggctaatgcaggtctgtggataaaacattccctgatcaagactccaaccaggggggagaaatacttttccggtgagacaacgtctgttcctcatcaaaatcagttgag

SEQ ID NO: 43584 - DNA, 484 bp, Chicken  19866894281619_3
cccatacagcttctataaggatggataagtgggtactttccgtgagctggcagtgccttgtcctcaccttcaggcagaggagccgaggcagcccctcaccctcgttacactgtgtgtaagccaaggatccagcccaggaatcctgccttgctttggagcgggtccttggggtgttcctgggtagggagaggcgtggaggtgtcggggtatggatctgggagtctcctcggtggtaggaagcagatgagcttggaaccccyccccgcccctcagtgcctgcagctctgygttgccttcccrgggccaggtttgccagtaacctcttgctttctcctgtttctaatcagattgtaaatctcgtacctagcactgtaatggctaatgcaggtctgtggataaaacattccctgatcaagactccaaccaggggggagaaatacttttccggtgagacaacgtctgttcctcatcaaaatcagttgag

SEQ ID NO: 43585 - DNA, 599 bp, Chicken  19866894281622_1
  misc_feature (1)..(199): n is any nucleotide
nnnnnnnnnnnnnnnnnnnnnnnnnnnnnnnnnnnnnnnnnnnnnnnnnnnnnnnnnnnnnnnnnnnnnnnnnnnnnnnnnnnnnnnnnnnnnnnnnnnnnnnnnnnnnnnnnnnnnnnnnnnnnnnnnnnnnnnnnnnnnnnnnnnnnnnnnnnnnnnnnnnnnnnnnnnnnnnnnnnnnnnnnnnnnnnnnnnnnnntgttctttgcagagcataacagagtatggctgaatgcccttctgccgaaggggactctgcaggtctctctttgctgtgtgtgattcattatcttgaatgayttgggtttgttttattttgtttctgattaattctgtgctttgaattcagtttcaaggccatatcttttctcctcttatacagttccttcagttccttacttggacagtcaaaatttgcaaagaaaatgctttaggtatgtaagctttgaggggtatgttcagatrtgatgtgacacaactaacattagactcytgaatgctctgcatctgtcctgttttcacccctttgttgcagatacattcaggtcccatttggtggcagattgccatgactgtggttattagcatggctattagga

SEQ ID NO: 43586 - DNA, 584 bp, Chicken  19866894281622_2
  misc_feature (1)..(34): n is any nucleotide
nnnnnnnnnnnnnnnnnnnnnnnnnnnnnnnnnntgttctttgcagagcataacagagtatggctgaatgcccttctgccgaaggggactctgcaggtctctctttgctgtgtgtgattcattatcttgaatgayttgggtttgttttattttgtttctgattaattctgtgctttgaattcagtttcaaggccatatcttttctcctcttatacagttccttcagttccttacttggacagtcaaaatttgcaaagaaaatgctttaggtatgtaagctttgaggggtatgttcagatrtgatgtgacacaactaacattagactcytgaatgctctgcatctgtcctgttttcacccctttgttgcagatacattcaggtcccatttggtggcagattgccatgactgtggttattagcatggctattaggaaagaaactccatctctataaatattaacagaagagaggccacttagctttttactcttgttattcagttctcttgctcaattttgtatttatacattgcaacaacactactcttgatgtatcttgttcatactgttattgcttctggtca

SEQ ID NO: 43587 - DNA, 556 bp, Chicken  19866894281622_3
  misc_feature (1)..(6): n is any nucleotide
nnnnnntgttctttgcagagcataacagagtatggctgaatgcccttctgccgaaggggactctgcaggtctctctttgctgtgtgtgattcattatcttgaatgayttgggtttgttttattttgtttctgattaattctgtgctttgaattcagtttcaaggccatatcttttctcctcttatacagttccttcagttccttacttggacagtcaaaatttgcaaagaaaatgctttaggtatgtaagctttgaggggtatgttcagatrtgatgtgacacaactaacattagactcytgaatgctctgcatctgtcctgttttcacccctttgttgcagatacattcaggtcccatttggtggcagattgccatgactgtggttattagcatggctattaggaaagaaactccatctctataaatattaacagaagagaggccacttagctttttactcttgttattcagttctcttgctcaattttgtatttatacattgcaacaacactactcttgatgtatcttgttcatactgttattgcttctggtca

SEQ ID NO: 43588 - DNA, 599 bp, Chicken  19866894281625_1
  misc_feature (1)..(45): n is any nucleotide
nnnnnnnnnnnnnnnnnnnnnnnnnnnnnnnnnnnnnnnnnnnnnatgtcccacagctccacttgtgttaattaaacctggcttcggagtctcaaaacttccttcttttatttagcaggcccacagcaagacatctattacagcctcagccccatctcaaccagagatccttgttcgcctctcctctgatcaaaatcattaagaaagaaatccagaagacagaaaaagaaacagaaataagggagaactcaatccaacattcaaggcatgcagtaagagattaggaaaaaaagagcaacmgaagacaagctgctccaattctaagtagagagaactgagggtaaattattttgttcgcttttaaaaagtaatattctctcaactccatctgctggtcagaagggtaayggtgaaaccaggccggtggcagccaaacttcacccactgcactcctaacccataccaaaatgccagactcactgtgacagccacgaggaagctgcccatccccatccctggaagacaccacgcagcacactgcaaaactgcagccaatttgatgggagagcccagcagggctsccctcactgaccgtgtgc

SEQ ID NO: 43589 - DNA, 600 bp, Chicken  19866894281625_2
tatttagcaggcccacagcaagacatctattacagcctcagccccatctcaaccagagatccttgttcgcctctcctctgatcaaaatcattaagaaagaaatccagaagacagaaaaagaaacagaaataagggagaactcaatccaacattcaaggcatgcagtaagagattaggaaaaaaagagcaacmgaagacaagctgctccaattctaagtagagagaactgagggtaaattattttgttcgcttttaaaaagtaatattctctcaactccatctgctggtcagaagggtaayggtgaaaccaggccggtggcagccaaacttcacccactgcactcctaacccataccaaaatgccagactcactgtgacagccacgaggaagctgcccatccccatccctggaagacaccacgcagcacactgcaaaactgcagccaatttgatgggagagcccagcagggctsccctcactgaccgtgtgccccagagcccgagcaccctgcaaacaggtggctgtaccaagagcaggcatggctcacttcctccatccagaragcctggatcgtctcactgcagccaagtacggctaac

SEQ ID NO: 43590 - DNA, 600 bp, Chicken  19866894281625_3
taggaaaaaaagagcaacmgaagacaagctgctccaattctaagtagagagaactgagggtaaattattttgttcgcttttaaaaagtaatattctctcaactccatctgctggtcagaagggtaayggtgaaaccaggccggtggcagccaaacttcacccactgcactcctaacccataccaaaatgccagactcactgtgacagccacgaggaagctgcccatccccatccctggaagacaccacgcagcacactgcaaaactgcagccaatttgatgggagagcccagcagggctsccctcactgaccgtgtgccccagagcccgagcaccctgcaaacaggtggctgtaccaagagcaggcatggctcacttcctccatccagaragcctggatcgtctcactgcagccaagtacggctaacccgctatcaaacaagttagttacacaatctccatttgttgttttctttggaaatgagccatctgctcaagccttcgagctgcacatcctgtaaagagtctgagcgctcctccagcagccctacagagcagtaactacggctgcccgctccaggatgcttccaaaagttagaac

SEQ ID NO: 43591 - DNA, 600 bp, Chicken  19866894281625_4
tattctctcaactccatctgctggtcagaagggtaayggtgaaaccaggccggtggcagccaaacttcacccactgcactcctaacccataccaaaatgccagactcactgtgacagccacgaggaagctgcccatccccatccctggaagacaccacgcagcacactgcaaaactgcagccaatttgatgggagagcccagcagggctsccctcactgaccgtgtgccccagagcccgagcaccctgcaaacaggtggctgtaccaagagcaggcatggctcacttcctccatccagaragcctggatcgtctcactgcagccaagtacggctaacccgctatcaaacaagttagttacacaatctccatttgttgttttctttggaaatgagccatctgctcaagccttcgagctgcacatcctgtaaagagtctgagcgctcctccagcagccctacagagcagtaactacggctgcccgctccaggatgcttccaaaagttagaaccatgcaatgaaaatgtaagttgggaattctggaacttcaggagctattctgtacattgatttttttttttttttgtcccttacctggtaa

SEQ ID NO: 43592 - DNA, 600 bp, Chicken  19866894281632_1
agtcaattgcaaaacacaactgtacaggctgaaaaaactggcaagtgctactgtaacttaaaatgttcatatgcattttatatgcttatatactgttacaggtcccaggacataaaattctcttagaatcagcatcgaactctaatagctatacaattgagaggtaagttaaacagatacaaaaagttggtccaaaaaaatttccagacttggtgtcacctgatcctccataggggcaatagttatttttactaaggtggtccaatgaacagctgaaaaggtcaaagtgtggattaacarttttttttatttcccatggagtcttctaaatccatgcttacaaatggaattctggcaaagctttccatacaaaacttgtatagcctcagtgattttcccccaactgaagcaacagaaaaaaaaagtctatctcaatggtatgtcagaatatgaatatgtaygcagccagccaacagaagggtcagagaattaccaaccccatgactgttaggcagattgagtaatgcaaatctcaggtgttacatagtttcagttaaaaaaaaaaaaaagaaaaagaaaattaagtgatatacgggttat

SEQ ID NO: 43593 - DNA, 600 bp, Chicken  19866894281632_2
aggtaagttaaacagatacaaaaagttggtccaaaaaaatttccagacttggtgtcacctgatcctccataggggcaatagttatttttactaaggtggtccaatgaacagctgaaaaggtcaaagtgtggattaacatttttttttatttcccatggagtcttctaaatccatgcttacaaatggaattctggcaaagctttccatacaaaacttgtatagcctcagtgattttcccccaactgaagcaacagaaaaaaaaagtctatctcaatggtatgtcagaatatgaatatgtaygcagccagccaacagaagggtcagagaattaccaaccccatgactgttaggcagattgagtaatgcaaatctcaggtgttacatagtttcagttaaaaaaaaaaaaaagaaaaagaaaattaagtgatatacgggttatagttctctgaaatcggctctttgattttcagttttcctggttcaaagctaaggcaacatcagagacttaactaatttatttgttctgcagggaagaactcggggagcatgctaaaaacattaactgctcgttttcttttcctttttcttttttttaatact

SEQ ID NO: 43594 - DNA, 513 bp, Chicken  19866894281632_3
agctgaaaaggtcaaagtgtggattaacatttttttttatttcccatggagtcttctaaatccatgcttacaaatggaattctggcaaagctttccatacaaaacttgtatagcctcagtgattttcccccaactgaagcaacagaaaaaaaaagtctatctcaatggtatgtcagaatatgaatatgtaygcagccagccaacagaagggtcagagaattaccaaccccatgactgttaggcagattgagtaatgcaaatctcaggtgttacatagtttcagttaaaaaaaaaaaaaayaaaaagaaaattaagtgatatacgggttatagttctctgaaatcggctctttgattttcagttttcctggttcaaagctaaggcaacatcagagacttaactaatttatttgttctgcagggaagaactcggggagcatgctaaaaacattaactgctcgttttcttttcctttttcttttttttaatactcttttcttacacaggaaagaaa

SEQ ID NO: 43595 - DNA, 600 bp, Chicken  19866894281634_1
ctcctcgcctgcggccctgccaggcctgctgcgggcctagcgccatgcagagcccagacaggggcctggggatggctctgtgaggaggggatggtctgccccacagtgaccgtctttctaaggaacaggccacagtcctgtgtgaaaaaagaaagcagctaactcagtctcctccttgccattagggtttccaccgtgttattacaactggactgtgctgtgatcaagcccaagcacccactctacattctgaggtcgagaatggcagagtctcttcttgtgcgtagctgtgtgagatgkctgtcctgasccccagagccaccatatcccactggatccacrtgcagacgtgttcacagggcacaaggcagggcttggaagcagtggtagaatcataggatcatagaatatcctgatttggaagagacccatgaggatcattgagtagatgacgtagtgcacatgcatgttgcagcagacattgagataagmaaaacccactgatctctgcccttcttgcaggcagctaaggagcagggctcccaatcycagctgtgcaaaataaggtttcctgaaagcattacagaaagtcacccagca

SEQ ID NO: 43596 - DNA, 600 bp, Chicken  19866894281634_2
gcggccctgccaggcctgctgcgggcctagcgccatgcagagcccagacaggggcctggggatggctctgtgaggaggggatggtctgccccacagtgaccgtctttctaaggaacaggccacagtcctgtgtgaaaaaagaaagcagctaactcagtctcctccttgccattagggtttccaccgtgttattacaactggactgtgctgtgatcaagcccaagcacccactctacattctgaggtcgagaatggcagagtctcttcttgtgcgtagctgtgtgagatgkctgtcctgasccccagagccaccatatcccactggatccacrtgcagacgtgttcacagggcacaaggcagggcttggaagcagtggtagaatcataggatcatagaatatcctgatttggaagagacccatgaggatcattgagtagatgacgtagtgcacatgcatgttgcagcagacattgagataagmaaaacccactgatctctgcccttcttgcaggcagctaaggagcagggctcccaatcycagctgtgcaaaataaggtttcctgaaagcattacagaaagtcacccagcaggcacccagg

SEQ ID NO: 43597 - DNA, 600 bp, Chicken  19866894281634_3
ccatgcagagcccagacaggggcctggggatggctctgtgaggaggggatggtctgccccacagtgaccgtctttctaaggaacaggccacagtcctgtgtgaaaaaagaaagcagctaactcagtctcctccttgccattagggtttccaccgtgttattacaactggactgtgctgtgatcaagcccaagcacccactctacattctgaggtcgagaatggcagagtctcttcttgtgcgtagctgtgtgagatgkctgtcctgasccccagagccaccatatcccactggatccacrtgcagacgtgttcacagggcacaaggcagggcttggaagcagtggtagaatcataggatcatagaatatcctgatttggaagagacccatgaggatcattgagtagatgacgtagtgcacatgcatgttgcagcagacattgagataagmaaaacccactgatctctgcccttcttgcaggcagctaaggagcagggctcccaatcycagctgtgcaaaataaggtttcctgaaagcattacagaaagtcacccagcaggcacccagggctgctctgggacctgtgcaaatggcataatc

SEQ ID NO: 43598 - DNA, 600 bp, Chicken  19866894281634_4
accgtgttattacaactggactgtgctgtgatcaagcccaagcacccactctacattctgaggtcgagaatggcagagtctcttcttgtgcgtagctgtgtgagatgkctgtcctgasccccagagccaccatatcccactggatccacrtgcagacgtgttcacagggcacaaggcagggcttggaagcagtggtagaatcataggatcatagaatatcctgatttggaagagacccatgaggatcattgagtagatgacgtagtgcacatgcatgttgcagcagacattgagataagmaaaacccactgatctctgcccttcttgcaggcagctaaggagcagggctcccaatcycagctgtgcaaaataaggtttcctgaaagcattacagaaagtcacccagcaggcacccagggctgctctgggacctgtgcaaatggcataatcacacgtgtctatctgtatgaatgtgtccctstgtgtgcacacagaggtgcaacactgtgaggtcagttacagtgaaggaaaggtcatggcagggactgtggagtacaatcggctgaaggtgaggttcaggtgtgccctgtgcatctctgg

SEQ ID NO: 43599 - DNA, 600 bp, Chicken  19866894281634_5
ctgaggtcgagaatggcagagtctcttcttgtgcgtagctgtgtgagatgkctgtcctgasccccagagccaccatatcccactggatccacrtgcagacgtgttcacagggcacaaggcagggcttggaagcagtggtagaatcataggatcatagaatatcctgatttggaagagacccatgaggatcattgagtagatgacgtagtgcacatgcatgttgcagcagacattgagataagmaaaacccactgatctctgcccttcttgcaggcagctaaggagcagggctcccaatcycagctgtgcaaaataaggtttcctgaaagcattacagaaagtcacccagcaggcacccagggctgctctgggacctgtgcaaatggcataatcacacgtgtctatctgtatgaatgtgtccctstgtgtgcacacagaggtgcaacactgtgaggtcagttacagtgaaggaaaggtcatggcagggactgtggagtacaatcggctgaaggtgaggttcaggtgtgccctgtgcatctctggcttcaccagaatgcatttacataggcatcacagtgaactccagggtcagtccctaag

SEQ ID NO: 43600 - DNA, 600 bp, Chicken  19866894281634_6
cttggaagcagtggtagaatcataggatcatagaatatcctgatttggaagagacccatgaggatcattgagtagatgacgtagtgcacatgcatgttgcagcagacattgagataagmaaaacccactgatctctgcccttcttgcaggcagctaaggagcagggctcccaatcycagctgtgcaaaataaggtttcctgaaagcattacagaaagtcacccagcaggcacccagggctgctctgggacctgtgcaaatggcataatcacacgtgtctatctgtatgaatgtgtccctstgtgtgcacacagaggtgcaacactgtgaggtcagttacagtgaaggaaaggtcatggcagggactgtggagtacaatcggctgaaggtgaggttcaggtgtgccctgtgcatctctggcttcaccagaatgcatttacataggcatcacagtgaactccagggtcagtccctaaggcagctcagtgaccacagcacagtgctggtgatgaagggcagaatgctgctgctactcataatcattccctcatggcattgggccatcaacaccctgcaaacatttctctccccactcccgtgg

SEQ ID NO: 43601 - DNA, 600 bp, Chicken  19866894281637_1
tcctctgatgttgctggtaatgtggttattagtgacagtccgggggcttcgtgggaatggctttgtgggataatgtatatttcataatgcaggatgccattgtaaccctgagtgctagaataacctgctggcagacaggtcggattccttttcaaacagtgatcttccaaggaaagaagtgacagcacacatgcgaccagactctcaggaagagctttctgaggggtgcactgcacagatggttttcttcaatagaacagatagagaagcacggaaccataggggtcagaaggggcctcyggagaccccycagtccaaccccccactaaagcaggttcccgagaaaaccaagtgaagaagayacactcatagacttratgtacagaaatctgagcatcacagggatggcacaragaacacttgccagcagaaagccagagtccttctcttgcattcagaggaaggggtttggattcagtaatgtctaagaactgatgtgctccactcctcacatcctgcagaaatcagattacacacttactgtctgcaggcactgttactgacctgcaggtggatcattagcactgactgcagcctatc

SEQ ID NO: 43602 - DNA, 600 bp, Chicken  19866894281637_2
ttgctggtaatgtggttattagtgacagtccgggggcttcgtgggaatggctttgtgggataatgtatatttcataatgcaggatgccattgtaaccctgagtgctagaataacctgctggcagacaggtcggattccttttcaaacagtgatcttccaaggaaagaagtgacagcacacatgcgaccagactctcaggaagagctttctgaggggtgcactgcacagatggttttcttcaatagaacagatagagaagcacggaaccataggggtcagaaggggcctcyggagaccccycagtccaaccccccactaaagcaggttcccgagaaaaccaagtgaagaagayacactcatagacttratgtacagaaatctgagcatcacagggatggcacaragaacacttgccagcagaaagccagagtccttctcttgcattcagaggaaggggtttggattcagtaatgtctaagaactgatgtgctccactcctcacatcctgcagaaatcagattacacacttactgtctgcaggcactgttactgacctgcaggtggatcattagcactgactgcagcctatctttagcttct

SEQ ID NO: 43603 - DNA, 600 bp, Chicken  19866894281637_3
ttgtgggataatgtatatttcataatgcaggatgccattgtaaccctgagtgctagaataacctgctggcagacaggtcggattccttttcaaacagtgatcttccaaggaaagaagtgacagcacacatgcgaccagactctcaggaagagctttctgaggggtgcactgcacagatggttttcttcaatagaacagatagagaagcacggaaccataggggtcagaaggggcctcyggagaccccycagtccaaccccccactaaagcaggttcccgagaaaaccaagtgaagaagayacactcatagacttratgtacagaaatctgagcatcacagggatggcacaragaacacttgccagcagaaagccagagtccttctcttgcattcagaggaaggggtttggattcagtaatgtctaagaactgatgtgctccactcctcacatcctgcagaaatcagattacacacttactgtctgcaggcactgttactgacctgcaggtggatcattagcactgactgcagcctatctttagcttcttaaggctaacaacaggtcgggtcgtgtgcttttctcagctttcctccatctc

SEQ ID NO: 43604 - DNA, 600 bp, Chicken  19866894281637_4
tatttcataatgcaggatgccattgtaaccctgagtgctagaataacctgctggcagacaggtcggattccttttcaaacagtgatcttccaaggaaagaagtgacagcacacatgcgaccagactctcaggaagagctttctgaggggtgcactgcacagatggttttcttcaatagaacagatagagaagcacggaaccataggggtcagaaggggcctcyggagaccccycagtccaaccccccactaaagcaggttcccgagaaaaccaagtgaagaagayacactcatagacttratgtacagaaatctgagcatcacagggatggcacaragaacacttgccagcagaaagccagagtccttctcttgcattcagaggaaggggtttggattcagtaatgtctaagaactgatgtgctccactcctcacatcctgcagaaatcagattacacacttactgtctgcaggcactgttactgacctgcaggtggatcattagcactgactgcagcctatctttagcttcttaaggctaacaacaggtcgggtcgtgtgcttttctcagctttcctccatctccagaccaattccatt

SEQ ID NO: 43605 - DNA, 600 bp, Chicken  19866894281637_5
gctagaataacctgctggcagacaggtcggattccttttcaaacagtgatcttccaaggaaagaagtgacagcacacatgcgaccagactctcaggaagagctttctgaggggtgcactgcacagatggttttcttcaatagaacagatagagaagcacggaaccataggggtcagaaggggcctcyggagaccccycagtccaaccccccactaaagcaggttcccgagaaaaccaagtgaagaagayacactcatagacttratgtacagaaatctgagcatcacagggatggcacaragaacacttgccagcagaaagccagagtccttctcttgcattcagaggaaggggtttggattcagtaatgtctaagaactgatgtgctccactcctcacatcctgcagaaatcagattacacacttactgtctgcaggcactgttactgacctgcaggtggatcattagcactgactgcagcctatctttagcttcttaaggctaacaacaggtcgggtcgtgtgcttttctcagctttcctccatctccagaccaattccattgctcctttcagccacaagtaattaccaggtctcgtt

SEQ ID NO: 43606 - DNA, 600 bp, Chicken  19866894281640_1
taataagaaaaaaaacacttaatttaaggaaaacaaacaagcacgaatctggtggtgaattgctgcctctcaaatgatatatcaatcctagattaaactacagaatgacactgtctcattatgacaacaagtaatcgtagcagctgttatcaaagagaattttatgcataggttttaaaagctcaaaaaatcaactgtgcatgtgtttctgctgttacaaactgtcatattatcctccaaacaagcctggaagaccccgaaacttctttgttttcttccctgccttgtccagtaacatastcatctctgaattggcaaccaaattgatttttattttttatccagtcattcatgaaactgccaatgaaatagttttaaatttctgaggcgagtcttaatgatgagatatgggagactttctgtcatgcaccttaacttggtaattactgagcattaacttggtaaagactgaggcacttggaaaaatcagagcaggaaaaaactattggtcctctaaagtgcagaaatgttacctgctattcaaagttatcagctcttgttctcatttgctgccccattctactttttatttcatagaac

SEQ ID NO: 43607 - DNA, 600 bp, Chicken  19866894281645_1
agagtgggactggggcagacacaactgggagcactcagatttaaggaagaaaaggatggaccagggcaccagaatcaccatgtcaggggatggactgtgggggaaaaaaaaaacaaaaaacaaaaaaaaaaacaacaaaaacaagcaaataggacctcagctcctcaggaaacacatgatgaaccctgtgttagtgactgtgtgggaagacaacccagaagatcatctgtggcctgcagacctcacataaaagcagaggtcgcctcattgatgggcaaagtagacaaatgcattgggaaygcactggataaatggagaagcaataaaataaaatcctcttcactcctgaattaaagagaggtgcacagttagaaaaacaaagtaagcaaacgttaaatagtctggaaaggaagacaggccttctggccatctcgagagcaggggctgcaaagggaagcagccagggacacaaagtggggttaggtgtgtttatgaacaatgatgaagcaatcagcagtgctggtgggggacagggcaataactaaggtgggtgagatgtggagtatacccaagcagccctccagcagagtgtttggagca

SEQ ID NO: 43608 - DNA, 600 bp, Chicken  19866894281645_2
aatcctcttcactcctgaattaaagagaggtgcacagttagaaaaacaaagtaagcaaacgttaaatagtctggaaaggaagacaggccttctggccatctcgagagcaggggctgcaaagggaagcagccagggacacaaagtggggttaggtgtgtttatgaacaatgatgaagcaatcagcagtgctggtgggggacagggcaataactaaggtgggtgagatgtggagtatacccaagcagccctccagcagagtgtttggagcaggcaggctgctttttgtgcaggtggctgagracagggttgggtcccatgccttgaagcagcattggtgggagtcctggagtggggcactgattgaccagggagaaatcagaggtaaaagaaatcaatctgcaagacttggtcatcacctatgaccaagtagaactgatatgatggtgagcactctcagtagatgtctgaatattttcagacattgcctgaaactcatccttttccatttttgattgagaaaaaagggaggctgattcactgtgaagacaaagaacaagmcacatgccataaaagagcattctaagagaaaatgaaaaataa

SEQ ID NO: 43609 - DNA, 600 bp, Chicken  19866894281645_3
ggtgagatgtggagtatacccaagcagccctccagcagagtgtttggagcaggcaggctgctttttgtgcaggtggctgagracagggttgggtcccatgccttgaagcagcattggtgggagtcctggagtggggcactgattgaccagggagaaatcagaggtaaaagaaatcaatctgcaagacttggtcatcacctatgaccaagtagaactgatatgatggtgagcactctcagtagatgtctgaatattttcagacattgcctgaaactcatccttttccatttttgattgagraaaaagggaggctgattcactgtgaagacaaagaacaagmcacatgccataaaagagcattctaagagaaaatgaaaaataaagagatgaaggcacttcccaaaggctctggggaatataaatagtcctgggtttcatgtsaaagggaagaaatgcttggtgttggttttatttttagagagtgggagaagttatgagacagcctgatatgagcaggctgcctgaaaatatctgtcggttttaatgtatatccctccttacgtctgaccatcctgctcctagtgtgaaaaacatgaaaat

SEQ ID NO: 43610 - DNA, 600 bp, Chicken  19866894281645_4
tgtttggagcaggcaggctgctttttgtgcaggtggctgagracagggttgggtcccatgccttgaagcagcattggtgggagtcctggagtggggcactgattgaccagggagaaatcagaggtaaaagaaatcaatctgcaagacttggtcatcacctatgaccaagtagaactgatatgatggtgagcactctcagtagatgtctgaatattttcagacattgcctgaaactcatccttttccatttttgattgagaaaaaagggaggctgattcactgtgaagacaaagaacaagmcacatgccataaaagagcattctaagagaaaatgaaaaataaagagatgaaggcacttcccaaaggctctggggaatataaatagtcctgggtttcatgtsaaagggaagaaatgcttggtgttggttttatttttagagagtgggagaagttatgagacagcctgatatgagcaggctgcctgaaaatatctgtcggttttaatgtatatccctccttacgtctgaccatcctgctcctagtgtgaaaaacatgaaaatggaaaatgtcactgtggtaggaggcatctgccctgacgca

SEQ ID NO: 43611 - DNA, 600 bp, Chicken  19866894281645_5
attgaccagggagaaatcagaggtaaaagaaatcaatctgcaagacttggtcatcacctatgaccaagtagaactgatatgatggtgagcactctcagtagatgtctgaatattttcagacattgcctgaaactcatccttttccatttttgattgagaaaaaagggaggctgattcactgtgaagacaaagaacaagmcacatgccataaaagagcattctaagagaaaatgaaaaataaagagatgaaggcacttcccaaaggctctggggaatataaatagtcctgggtttcatgtsaaagggaagaaatgcttggtgttggttttatttttagagagtgggagaagttatgagacagcctgatatgagcaggctgcctgaaaatatctgtcggttttaatgtatatccctccttacgtctgaccatcctgctcctagtgtgaaaaacatgaaaatggaaaatgtcactgtggtaggaggcatctgccctgacgcagatggctatgagttaagtacctcagtgtgaactgcttgccacagactctgacgttgggtggagggagaaaagcatcatgagtttgtaatttgtctcatggt

SEQ ID NO: 43612 - DNA, 600 bp, Chicken  19866894281649_1
tgcaacatgagcctctcttcattttgtttctcatagtggatagactttttgcaagtgctcttgttgctcaaggtcacagattcatcaatcagatgagagcccttcccactgatcttttacctgcccatgagagtttccatacatctggtgagctgctgtgttgcatggtgtatagttgtcctgagttcaggatgatattaaagagaatcagagcaggaattaatcacatattttgaacactgttaagctcagagtacggtatgtttaaattttcattcattacccagaaacaaaacactwatttgcactgtggaacaaactttaggtggccacctttgggccaaatacagtttttgatatgtacccaaaagtgagcatcctataaccctttcaaactggggctaagaggatttgctgtgagtagcttaatgactcccagcactgccatctccctgtcaccttccttctccatgtccagggaatagggattgtctgggagggctctgggagygctgctctgtccatgttgacagcacttgcagctgttttgaggacctgttgcctctgtgccctgacagaaggatgtaaagcctgtggcag

SEQ ID NO: 43613 - DNA, 600 bp, Chicken  19866894281649_2
agcaggaattaatcacatattttgaacactgttaagctcagagtacggtatgtttaaattttcattcattacccagaaacaaaacactwatttgcactgtggaacaaactttaggtggccacctttgggccaaatacagtttttgatatgtacccaaaagtgagcatcctataaccctttcaaactggggctaagaggatttgctgtgagtagcttaatgactcccagcactgccatctccctgtcaccttccttctccatgtccagggaatagggattgtctgggagggctctgggagygctgctctgtccatgttgacagcacttgcagctgttttgaggacctgttgcctctgtgccctgacagaaggatgtaaagcctgtggcagagagttgctttgtggcagcgttatggtactttttgctttgcttagatggccaaatttggttaagacttgtttgacttctaaatactttgggctaaaatacatattcttcatcctctgtgggtcatatgtgatgagtgaattagagagacatcaccacatcatgacagagaacaaacacagagctgtcttggcttgtgaaagctctggtgtc

SEQ ID NO: 43614 - DNA, 600 bp, Chicken  19866894281654_1
ggacattgtgcttgagacatcggtcacgtttgtctgtgtgcattaacatctctgtattgattacatcctgtttgtagggtgcagaattcagagattttctcttattgacacaattatttaaaaggatcaccatattagaaatctatcacaaatgtatggatttgacgaatgggctcagattaattagaactaaattttgctagagataccatttccctggcatcatttttagaatgtcttggccttctttttccctaggatagggatttttgagtctctctgcttttggcacagtgcacytcgatgtgcagtattgcatccctgcagcgcgtgtctccctgcacgcttcctagagcgtgtatccgctaagactcagaattattaaacatgtgaaattcccataggactccattatgtgtaattaacagataaactgtcatcagaatcaataaaacgtgctaaatgatccaaacttgtatataattaagtgtctgttttagagcaggagctgtaacttttttttttttctattcaatttgcacatttgttttgacaatagaagctggaacattttggttaacctgttacttactggtttgt

SEQ ID NO: 43615 - DNA, 600 bp, Chicken  19866894281654_2
ttgtcatcagcagggggaaaaacatgaggcaaattaaaatacttatccaacacatcacttaatgcaggagatggaaacagtgatggaagtggattcttccctctccaacttcccagccattgttctgcctagcgtgggagctttattccaaaaaatcccaccccaaaacaaactgaaaaaccccacaagataccaaggaagccctctactaaacagatttccaaggagatgctgtggtagtgccatggattcactgtcccagtcccaccctatgttgcactaacagtgtcacgtaccctsggacatgcaccccttcagatgtcccattgtcacgtggtactctatttgctctgtaaatcggcaggccatccaaattttggtaactgattgaggtgtttggtggcccatttcccctgcagctattcttccctccttacattccccctccttggaatacattgctttttctttggcatttatgattacataaaactggagagttagggcttctcatctgaaatcatctccgcatggtctagtaactgcatgttctcagggacatcttcccctttgtatttatgctgtttagggttttacagt

SEQ ID NO: 43616 - DNA, 600 bp, Chicken  19866894281668_1
agatgatttcaattcattatgagttctgcttcacttgttgtaaaggtcagagagtgtgtatgaaggacaagggagaagaggcaggggaaaaaaagaaattcttgctttcaaaactggtgtcttcagtgctatagaacaagactgactctgccagaaagatcctacgcaatgtgagcagctgtgtggggtttgcttgggatggagtaagttttcttcacagcagcccatgcagttctgtcctttagatttgtggccaaagcactgttgataacaccaaggttttagcgactgctgagcagygcttgcggagtgtcaaggctgtctctgttcctcattctgtccgagcagcaagtaggctgggggagggtgagaggctgggagggaacacagccgggatggctgaccccaagtgaccaaggagatattccgcatcatgctcagggagaagacrggaaggttttttttccccagaagtagtcactgcttagagactggctgggcatcggtctgctggtgggaggtggtgattgattgcctttgcatcagctgttttttttcttggtttggggtttttctttttcctttcacttattaaactga

SEQ ID NO: 43617 - DNA, 600 bp, Chicken  19866894281668_2
cagaaagatcctacgcaatgtgagcagctgtgtggggtttgcttgggatggagtaagttttcttcacagcagcccatgcagttctgtcctttagatttgtggccaaagcactgttgataacaccaaggttttagcgactgctgagcagygcttgcggagtgtcaaggctgtctctgttcctcattctgtccgagcagcaagtaggctgggggagggtgagaggctgggagggaacacagccgggatggctgaccccaagtgaccaaggagatattccgcatcatgctcagggagaagacrggaaggttttttttccccagaagtagtcactgcttagagactggctgggcatcggtctgctggtgggaggtggtgattgattgcctttgcatcagctgttttttttcttggtttggggtttttctttttcctttcacttattaaactgactttatctcagcccacaggtttttctcactttttctcttccagttctctcattctgttgcaggggaacaagaaagcaactgggtgggggctgaactgctggcaggggtcaacctaccacagcagctcaccaacatccagtttatcctggct

SEQ ID NO: 43618 - DNA, 599 bp, Chicken  19866894281672_1
  misc_feature (1)..(240): n is any nucleotide
nnnnnnnnnnnnnnnnnnnnnnnnnnnnnnnnnnnnnnnnnnnnnnnnnnnnnnnnnnnnnnnnnnnnnnnnnnnnnnnnnnnnnnnnnnnnnnnnnnnnnnnnnnnnnnnnnnnnnnnnnnnnnnnnnnnnnnnnnnnnnnnnnnnnnnnnnnnnnnnnnnnnnnnnnnnnnnnnnnnnnnnnnnnnnnnnnnnnnnnnnnnnnnnnnnnnnnnnnnnnnnnnnnnnnnnnnnnnnnnntctctgggagctaatctttgtcagaagaaaaaaatatggtctttttcaggtgaataagargatcacagcaggttgctgaaatgaagctagtaatgagctgtagaggtgcaaatttgacagtattttcttgcccttttgagtaggtttcatcttcttccgagataaggacaactatgacatacactaaaaatcctttctgctcagaccatgtctgacrcacctccctttcccagcaagtgttgaaagtcctccttggtacacagaccagcctgttggtgaggatgcttttgaccaacttgatctgatggctccatcccttcctagcagtcctcagtcctcagagtctcttggtagcaaaa

SEQ ID NO: 43619 - DNA, 599 bp, Chicken  19866894281672_2
  misc_feature (1)..(83): n is any nucleotide
nnnnnnnnnnnnnnnnnnnnnnnnnnnnnnnnnnnnnnnnnnnnnnnnnnnnnnnnnnnnnnnnnnnnnnnnnnnnnnnnnnntctctgggagctaatctttgtcagaagaaaaaaatatggtctttttcaggtgaataagargatcacagcaggttgctgaaatgaagctagtaatgagctgtagaggtgcaaatttgacagtattttcttgcccttttgagtaggtttcatcttcttccgagataaggacaactatgacatacactaaaaatcctttctgctcagaccatgtctgacrcacctccctttcccagcaagtgttgaaagtcctccttggtacacagaccagcctgttggtgaggatgcttttgaccaacttgatctgatggctccatcccttcctagcagtcctcagtcctcagagtctcttggtagcaaaattcaaatcyctgttgtggacaccagttaggtaaccagtagttgacctgcctggtctgtccactyctcctcatgcccttgcagctcaccagcaggatggagaagaaaagcagctggtccccatgtccttggccattgctccagagctctctaattccc

SEQ ID NO: 43620 - DNA, 600 bp, Chicken  19866894281672_3
caggttgctgaaatgaagctagtaatgagctgtagaggtgcaaatttgacagtattttcttgcccttttgagtaggtttcatcttcttccgagataaggacaactatgacatacactaaaaatcctttctgctcagaccatgtctgacrcacctccctttcccagcaagtgttgaaagtcctccttggtacacagaccagcctgttggtgaggatgcttttgaccaacttgatctgatggctccatcccttcctagcagtcctcagtcctcagagtctcttggtagcaaaattcaaatcyctgttgtggacaccagttaggtaaccagtagttgacctgcctggtctgtccactyctcctcatgcccttgcagctcaccagcaggatggagaagaaaagcagctggtccccatgtccttggccattgctccagagctctctaattcccctagagaagttccttggcttttatctcccaggccactgctgttttatcttcgtgtatcagctgatggccagaaaagggagttcaaagcaatgcacacaggcttgctgagaaattcccagagcctcagctggatctcgatgtcttgacagaag

SEQ ID NO: 43621 - DNA, 600 bp, Chicken  19866894281672_4
tttcttgcccttttgagtaggtttcatcttcttccgagataaggacaactatgacatacactaaaaatcctttctgctcagaccatgtctgacrcacctccctttcccagcaagtgttgaaagtcctccttggtacacagaccagcctgttggtgaggatgcttttgaccaacttgatctgatggctccatcccttcctagcagtcctcagtcctcagagtctcttggtagcaaaattcaaatcyctgttgtggacaccagttaggtaaccagtagttgacctgcctggtctgtccactyctcctcatgcccttgcagctcaccagcaggatggagaagaaaagcagctggtccccatgtccttggccattgctccagagctctctaattcccctagagaagttccttggcttttatctcccaggccactgctgttttatcttcgtgtatcagctgatggccagaaaagggagttcaaagcaatgcacacaggcttgctgagaaattcccagagcctcagctggatctcgatgtcttgacagaagttcccacagggacgggttaaattcagcctagttttttcttccaacctcactgaat

SEQ ID NO: 43622 - DNA, 600 bp, Chicken  19866894281675_1
tattctttcacagggtcttctgatggctgaaatgcacattgtctccataattgagatcaaattagcatcccagatcttatcactgttcagaaaatcttcccttttacttttgtagggtaagaaaaatgtggaaattaaagctaagttttttttttattattttattttctatgttccgagtggtatccagttaacacttaagcaacttggagacagaaggagttcaaagcacaactacgaggaaaaagtaaaagcagaattaggccaacaagttcagtgagataggaatatgaagtgcamtttggaaatattttcaaggaattataaggagagagacataatgaggtgaagtgtggaaatgtgttgaagacccagtgaaaggaagggattggaawgaagagaatcagattatggttgagtggaaagcaytcggagaatagtgaaactaaaactactgtttggccatgctaggaaataccagagtaagaactttactgaatttggatgtgaagataatcatgatgaaacaaggattgagctagacaggacagaagggagagggtagcagactgaagtaaaaggagacactgcactcagagg

SEQ ID NO: 43623 - DNA, 600 bp, Chicken  19866894281675_2
cttcccttttacttttgtagggtaagaaaaatgtggaaattaaagctaagttttttttttattattttattttctatgttccgagtggtatccagttaacacttaagcaacttggagacagaaggagttcaaagcacaactacgaggaaaaagtaaaagcagaattaggccaacaagttcagtgagataggaatatgaagtgcamtttggaaatattttcaaggaattataaggagagagacataatgaggtgaagtgtggaaatgtgttgaagacccagtgaaaggaagggattggaawgaagagaatcagattatggttgagtggaaagcaytcggagaatagtgaaactaaaactactgtttggccatgctaggaaataccagagtaagaactttactgaatttggatgtgaagataatcatgatgaaacaaggattgagctagacaggacagaagggagagggtagcagactgaagtaaaaggagacactgcactcagaggaaaaaatgaagctctgtttctgcacccaacatattttacttcaagagtccctatgttgaatctaatgtcattttattgtgaacaaaacttctggt

SEQ ID NO: 43624 - DNA, 600 bp, Chicken  19866894281675_3
ggaaattaaagctaagttttttttttattattttattttctatgttccgagtggtatccagttaacacttaagcaacttggagacagaaggagttcaaagcacaactacgaggaaaaagtaaaagcagaattaggccaacaagttcagtgagataggaatatgaagtgcamtttggaaatattttcaaggaattataaggagagagacataatgaggtgaagtgtggaaatgtgttgaagacccagtgaaaggaagggattggaawgaagagaatcagattatggttgagtggaaagcaytcggagaatagtgaaactaaaactactgtttggccatgctaggaaataccagagtaagaactttactgaatttggatgtgaagataatcatgatgaaacaaggattgagctagacaggacagaagggagagggtagcagactgaagtaaaaggagacactgcactcagaggaaaaaatgaagctctgtttctgcacccaacatattttacttcaagagtccctatgttgaatctaatgtcattttattgtgaacaaaacttctggttgtctatatcctgcccttgatatttgatatctgt

SEQ ID NO: 43625 - DNA, 585 bp, Chicken  19866894281692_1
gattctggaacccctcttcaaagagaagtcactctaagtttatcctattgattagcacctggctcactgtttcttaaactgcatttcttgacaccagaacaatgatactgagcaccaaagcaggagcaaccttcctcgtggggcacaacatgatggctccatctctcctgggcagctggattatgcttggtgcccaatcagcatgtttgaaaagggatgtcattcacatctgtgctaatggcagattctagcagaagaaatttgctgtagcccaaatgtctttttatgttgcatgggaakkttctccttgccagcttggggctacaaatgcaaattacatgatgcttcactgatggctcaaactcagtacggttgcgagccacagccgagacctgagtcagcttcctgagacctgccagaggacaaccaccactaaagtgcagcacatcacagaatcacagaatggcttgggttggaaaagacatcaaggatcatcaagctccaacycaactgccgcaggcagggcagccaaccaccacatttaacagtagagattgtgactgagtgtgggtgttttttcccccc

SEQ ID NO: 43626 - DNA, 584 bp, Chicken  19866894281692_2
attctggaacccctcttcaaagagaagtcactctaagtttatcctattgattagcacctggctcactgtttcttaaactgcatttcttgacaccagaacaatgatactgagcaccaaagcaggagcaaccttcctcgtggggcacaacatgatggctccatctctcctgggcagctggattatgcttggtgcccaatcagcatgtttgaaaagggatgtcattcacatctgtgctaatggcagattctagcagaagaaatttgctgtagcccaaatgtctttttatgttgcatgggaakkttctccttgccagcttggggctacaaatgcaaattacatgatgcttcactgatggctcaaactcagtacggttgcgagccacagccgagacctgagtcagcttcctgagacctgccagaggacaaccaccactaaagtgcagcacatcacagaatcacagaatggcttgggttggaaaagacatcaaggatcatcaagctccaacycaactgccgcaggcagggcagccaaccaccacatttaacagtagagattgtgactgagtgtgggtgttttttcccccc

SEQ ID NO: 43627 - DNA, 378 bp, Chicken  19866894281692_3
tgaaaagggatgtcattcacatctgtgctaatggcagattctagcagaagaaatttgctgtagcccaaatgtctttttatgttgcatgggaakkttctccttgccagcttggggctacaaatgcaaattacatgatgcttcactgatggctcaaactcagtacggttgcgagccacagccgagacctgagtcagcttcctgagacctgccagaggacaaccaccactaaagtgcagcacatcacagaatcacagaatggcttgggttggaaaagacatcaaggatcatcaagctccaacycaactgccgcaggcagggcagccaaccaccacatttaacagtagagattgtgactgagtgtgggtgttttttcccccc

SEQ ID NO: 43628 - DNA, 517 bp, Chicken  19866894281694_1
gaaagattttctcagcattctaaaatgctcattaagttagacatctgtcaacggtttacaggctggtccagcccggttccgtgactagtggggtggagggatttttttgcaaaatctgcgcctccggaaaagggaaacaggggatcccccacaagaaagaataattaaaaaaaaacagtggcaacgatctgagaagaagcaaactaatttactaaatatagtatcggaatgcatgataacacataatacaatataattcaatataatggttaataaaatcaaatataattgagagaaggrttgtccgagagctaaaggccttacactaatactgaagccttgcgtgcagtcaggsgcagcagcgagacaatccgaaacgagcacgacgagacgagaagaaagggcgaggacccaggtcaggtgacctacaggccttatatctgttcccctgagcaggaatgataacagcactcgaacagtcttctggggaacgtagttcttcttctcttccagacaa

SEQ ID NO: 43629 - DNA, 462 bp, Chicken  19866894281694_2
ttacaggctggtccagcccggttccgtgactagtggggtggagggatttttttgcaaaatctgcgcctccggaaaagggaaacaggggatcccccacaagaaagaataattaaaaaaaaacagtggcaacgatctgagaagaagcaaactaatttactaaatatagtatcggaatgcatgataacacataatacaatataattcaatataatggttaataaaatcaaatataattgagagaaggrttgtccgagagctaaaggccttacactaatactgaagccttgcgtgcagtcaggsgcagcagcgagacaatccgaaacgagcacgacgagacgagaagaaagggcgaggacccaggtcaggtgacctacaggccttatatctgttcccctgagcaggaatgataacagcactcgaacagtcttctggggaacgtagttcttcttctcttccagacaa

SEQ ID NO: 43630 - DNA, 600 bp, Chicken  19866894281704_1
ctttgttttacctattagaacagttattctacatattgaatgtattagatgtatcattaaacagggagttaaagtgtggagaatattttggatcaagatccttaaggttttgtttgaaaatttgcatattagaataaaagaaaggaggaaaaaatcaattatggcacactgaacttgactcaagaattctgaatttgacatgtttccttttataggtctgtgggtgttttttgaaatcccaaacctgtcttctttacagcctaattctattttaaatttctattcctccataagaagatrtctactacacagatacactaccaagatacgtgtgacaagattcttttccagttgctgttttgttttttaaagagctagcttttaacatgcaaggttttgttttgaattctgaccaactgatggaggacaggtatttcttctatgcagtctcaaaaaataggtagcatggaatttgtagccttgtgtgaccagattgttactactgtttaccggactgtttgctggactgtttactggcagaagatctgtcctgtgaccaaagtctgctatgggagactggggaatgataccatcgtatct

SEQ ID NO: 43631 - DNA, 600 bp, Chicken  19866894281706_1
aacagtgcaacgctgcagcagcgcaaacatctggtgctgcaaccgtgcatccagcagtgctgtatgtagcactgcaacacacagcatcacatcactgctgcaacactgcaacaccacaacgctcagtgcatgcagcgcagcgacgctgaacctgcggcactccgttctgcaaccatgcacccagcattgcagctctgtgcccagtactgcaacactgctctcgctttgcccactgcactgctctgacatcatctcacattgctctgacgtcatcacacactgccgggatgtcttcacacrgcactgctgtggtgtcattccacactgctgggtcaccacacaccgttctgacgtcatcctacatggctgtgatgcaaacccgcaccactctgatgtcattccgcaccgctccgatgtcactgcgcactgctgatgtcatcccacgccactacagtgtgacctcacatcgccgtgacgtcacctcacatcatcccacactgaggacgtcacccacaccggtccaatggcatcccacaccactctgatgtcatcccacatcattgtcatgccacctctgacgtcatcgcacatcacctcgcg

SEQ ID NO: 43632 - DNA, 600 bp, Chicken  19866894281707_1
gttttgtatgaatgataatgtgatatatgctctctatttttagtcagtcaatgcatataagaagcttctaggatttcagtctactcaagtaggaggccagaggattcttagacattatttatttctatacataaaagtactgtttatttcccccaccgtattcttattttctcttattctcaaggttctccatgccagaagagtaaatacacctgtgagtgaacaaatcttttcagtttaaaatgatatgatgacttgctgaaaaaaacatggtaaaacgctctctcagttgagtctaargcttctttttttgaaaataaaaatacgtattgatgaaagttattaaatcagaagatgggtgatcaaacaaccaggtgaacagtcttagtttgccagctgttttcccatatccaagccaagactgttaaaggtgacaaagaggggtgtcgataggcaacaaaaaaaagcctgtacaactcacaacaggaattatagtggtcctactaagtccagaaattatgcaaactgctttgagtgtcatttcttggcacgtctctattgatctgctatacatatgagtgccatagcatagttcagcca

SEQ ID NO: 43633 - DNA, 600 bp, Chicken  19866894281707_2
ctgtacaactcacaacaggaattatagtggtcctactaagtccagaaattatgcaaactgctttgagtgtcatttcttggcacgtctctattgatctgctatacatatgagtgccatagcatagttcagccaactaacttgtaaaatcgctcagtcttcagcttccactgatttcagagcttaggattacggagggggataaaatgaataaataaaaaggaagagactttattatcttttcaggagtctagatgtagagacagaaaaatacatactcaaatcctggcaccagatatctayctgatgacctgtttggagaatttgtaagactggatggccaagacaaatggagtggaaggcttyacccagtataatagggcagtatctgtaagcaattgtgatttcacaaacaatatgtattaactggtgcacaaatctccgtaagcactaaatgaaatattaaacattatattcyaaatgctttattgcaagagacatcttgtgacatcggaaacgagttttccttccactcaattatctctgttaactgctaatgtataccaaatcctcgccatgcgtttcataatactgatcctcatt

SEQ ID NO: 43634 - DNA, 600 bp, Chicken  19866894281707_3
tgagtgtcatttcttggcacgtctctattgatctgctatacatatgagtgccatagcatagttcagccaactaacttgtaaaatcgctcagtcttcagcttccactgatttcagagcttaggattacggagggggataaaatgaataaataaaaaggaagagactttattatcttttcaggagtctagatgtagagacagaaaaatacatactcaaatcctggcaccagatatctayctgatgacctgtttggagaatttgtaagactggatggccaagacaaatggagtggaaggcttyacccagtataatagggcagtatctgtaagcaattgtgatttcacaaacaatatgtattaactggtgcacaaatctccgtaagcactaaatgaaatattaaacattatattcyaaatgctttattgcaagagacatcttgtgacatcggaaacgagttttccttccactcaattatctctgttaactgctaatgtataccaaatcctcgccatgcgtttcataatactgatcctcattaactgagtaaacagaaatggaacctcattggcaaggcactcgagtgaccagcaagtacagatc

SEQ ID NO: 43635 - DNA, 600 bp, Chicken  19866894281707_4
agagcttaggattacggagggggataaaatgaataaataaaaaggaagagactttattatcttttcaggagtctagatgtagagacagaaaaatacatactcaaatcctggcaccagatatctayctgatgacctgtttggagaatttgtaagactggatggccaagacaaatggagtggaaggcttyacccagtataatagggcagtatctgtaagcaattgtgatttcacaaacaatatgtattaactggtgcacaaatctccgtaagcactaaatgaaatattaaacattatattcyaaatgctttattgcaagagacatcttgtgacatcggaaacgagttttccttccactcaattatctctgttaactgctaatgtataccaaatcctcgccatgcgtttcataatactgatcctcattaactgagtaaacagaaatggaacctcattggcaaggcactcgagtgaccagcaagtacagatcctgctggcatgggatcatctatcatcagcctctatgctgtggcatgaagttagcatgtaattaatgggcactcagcatgaccaggaccatggagaaagtctggagcaagaat

SEQ ID NO: 43636 - DNA, 600 bp, Chicken  19866894281709_1
actggaaaccatagtatagactgaaaaaacaaacaaacaaacaaacaaaaaaacaacgagtgttcatatttaattgcagatgtcttaatttaccctgggaaaaataaggtcacatgtatgctggaatacagattctgaatatatgtgtttagaaattaagagcaaacacaataaaaattaagacacttttaaaaatcgggagtatttttctattaaggtagtggacatttcaaataaatggtgaagacaatattccagaattcactgaatagagagaagaaaaatccaactatttaactscctctttsaaaaatgtttatgatctcattgttctttataatagattaaaagtaaagataaataacctatacacagttcagaatttctgactttagaggggaaaatgtactgatccaaacctgaggtctgtaagcaatgaaaattttcccagttaaatgtcccagtatcaagtaaagtgcttaaatagttcaccattcgaacagtgatatatctgtttttttaatttttttttcatcacatttgtaaaaaagaggttgtatttttatttttaaaagattttctggaaatgattatacaaac

SEQ ID NO: 43637 - DNA, 600 bp, Chicken  19866894281709_2
ccatagtatagactgaaaaaacaaacaaacaaacaaacaaaaaaacaacgagtgttcatatttaattgcagatgtcttaatttaccctgggaaaaataaggtcacatgtatgctggaatacagattctgaatatatgtgtttagaaattaagagcaaacacaataaaaattaagacacttttaaaaatcgggagtatttttctattaaggtagtggacatttcaaataaatggtgaagacaatattccagaattcactgaatagagagaagaaaaatccaactatttaactscctctttsaaaaatgtttatgatctcattgttctttataatagattaaaagtaaagataaataacctatacacagttcagaatttctgactttagaggggaaaatgtactgatccaaacctgaggtctgtaagcaatgaaaattttcccagttaaatgtcccagtatcaagtaaagtgcttaaatagttcaccattcgaacagtgatatatctgtttttttaatttttttttcatcacatttgtaaaaaagaggttgtatttttatttttaaaagattttctggaaatgattatacaaacaaatattg

SEQ ID NO: 43638 - DNA, 600 bp, Chicken  19866894281709_3
ttcacagtttgttatgatattgtactagcaaattcaagtttcttcccagaaaaaggagaccagaggtaggacaggaagcacattgcatttgtgagaaagcaggaaagaaaagaacctcagtctacaagctctaagataaataggttttatctcctgttgcacctttacaattgtctattttatgagcttatacgtatggtagtaaggtttggtgtttgcttttttcttcctctgcagagatatggattttggactggatgatcctgtgggtcttttccaaccttagcgattctatattaycctcttgtgttctctctacttcgattattctctgaatttctttctgtcttctgtatcaaagtgaaatgttaaggaaactctccttttaccaaaggagaaaattgcactcagcattgttcaacatgaggagttctgaataagattcatatctttcaagtactcatgtagagttttacttgaatctcttctgtgtatttatagmgaatgatgataattcttaggaaaaaatatattacatacactaatggaagctaacagtcagattagaagtgtgcaatatcatatcatagtcaagtgtaa

SEQ ID NO: 43639 - DNA, 600 bp, Chicken  19866894281709_4
taaggtttggtgtttgcttttttcttcctctgcagagatatggattttggactggatgatcctgtgggtcttttccaaccttagcgattctatattaycctcttgtgttctctctacttcgattattctctgaatttctttctgtcttctgtatcaaagtgaaatgttaaggaaactctccttttaccaaaggagaaaattgcactcagcattgttcaacatgaggagttctgaataagattcatatctttcaagtactcatgtagagttttacttgaatctcttctgtgtatttatagmgaatgatgataattcttaggaaaaaatatattacatacactaatggaagctaacagtcagattagaagtgtgcaatatcatatcatagtcaagtgtaagataaaagactaacagaaacaagtaaaaagaaaaacagtaactagaaaccaaacaaaagtaattgctataaaataatactctcttggagaaacaaataaacaaaaataaacatatagatatatattgcagtcttctcagtaaagtatttcttcccagaaaagtactgggaagaatgtctgggaaaaaaactatgtcaataaa

SEQ ID NO: 43640 - DNA, 600 bp, Chicken  19866894281712_1
tttcttcagcagtggtcctctgcagtcatataaaacccacagtgaaattcaaccttaaagaggtagaaacttcctctctgaggtccatttttatctctaaaaggacattaactatggcaagaaaataatttacttgcaagttatggtcatgtactatccaaagccagagctgatgcttccagatcttctggcagtaagctgcagacctgtgagagctgaagaaagtgtgatgtctccaccactagaagtgcttttacagtgctgtaaaacacaacctgtgagtttcacacacagcagcarattctcctgaagcaagtgggcaacatgatcctgtaattctttatggctgtgagaccccccactgactgaaacagatgttcccaggctctgaagtttctaagggaaaacatctggcactgattcctcttgcagaggacagcacacagcagaacacagcaaatgagtaagtagccacctttcttctcattgcatgggatgagctacaggaaagccattgccaggtttgagcaggagatgggttgtgactcattgtgtgctccctgtgtttccaggcccagggagtagcaagattcattctca

SEQ ID NO: 43641 - DNA, 600 bp, Chicken  19866894281713_1
actgcttcaaacacttcacacctatcaaatatatttttttccatccttgatttgattgtagagttgttttcgtatggcttttgtttttcagagttgtggcaatttttattttttttgttttgtttttcctctatcttgctgcttctattatgtttaatgtttactgggcaaatttttcaggtcagacatttccccagctggatcatccagtcactgaattctgtaaaagaaaatggttttcaaaatcaggtttctgagtattctctgcatttggggacaaatgtgcaattcttttcccayatctactttgcctttctggcaaaggttgcatattgcctgagtacctggctttgtaatgtatcatcatatttgtataaatgggcatatgtcttctgctaaagtgttttcaaagagatacagaggcatgtcaaggaacacaattttatgtgcaatacttattggcaaagttaaaagtttggttattggctctgtgagaataatygcaaaaatgatatagttgtttcttcctgcttgacttttagcaggaagattttaggacacgccatacaaaatttcaaaatagagaaataatgcatctga

SEQ ID NO: 43642 - DNA, 600 bp, Chicken  19866894281713_2
tcatccagtcactgaattctgtaaaagaaaatggttttcaaaatcaggtttctgagtattctctgcatttggggacaaatgtgcaattcttttcccayatctactttgcctttctggcaaaggttgcatattgcctgagtacctggctttgtaatgtatcatcatatttgtataaatgggcatatgtcttctgctaaagtgttttcaaagagatacagaggcatgtcaaggaacacaattttatgtgcaatacttattggcaaagttaaaagtttggttattggctctgtgagaataatygcaaaaatgatatagttgtttcttcctgcttgacttttagcaggaagattttaggacacgccatacaaaatttcaaaatagagaaataatgcatctgaaatggaatttgccattgagaargctgcttgtgtagatacgattgtgtagactaagttgttgcaatctgaaaggaaagmttcagtgtggtcaggcagttgaatattttgggggaaggaacagttaaaatagctgtaacatgaaggtcatattacttgcctaacatccgtgatatgaagataagaaagcattgtgagcatgata

SEQ ID NO: 43643 - DNA, 600 bp, Chicken  19866894281713_3
aggttgcatattgcctgagtacctggctttgtaatgtatcatcatatttgtataaatgggcatatgtcttctgctaaagtgttttcaaagagatacagaggcatgtcaaggaacacaattttatgtgcaatacttattggcaaagttaaaagtttggttattggctctgtgagaataatygcaaaaatgatatagttgtttcttcctgcttgacttttagcaggaagattttaggacacgccatacaaaatttcaaaatagagaaataatgcatctgaaatggaatttgccattgagaargctgcttgtgtagatacgattgtgtagactaagttgttgcaatctgaaaggaaagmttcagtgtggtcaggcagttgaatattttgggggaaggaacagttaaaatagctgtaacatgaaggtcatattacttgcctaacatccgtgatatgaagataagaaagcattgtgagcatgataacaaggatattatgatggtttacatgacatttatatggcaatggaatgagcaactctataagccctcaggaagacaagggctgctgaaacatgacgaatgtattaaacccacttcctaac

SEQ ID NO: 43644 - DNA, 600 bp, Chicken  19866894281713_4
tgggcatatgtcttctgctaaagtgttttcaaagagatacagaggcatgtcaaggaacacaattttatgtgcaatacttattggcaaagttaaaagtttggttattggctctgtgagaataatygcaaaaatgatatagttgtttcttcctgcttgacttttagcaggaagattttaggacacgccatacaaaatttcaaaatagagaaataatgcatctgaaatggaatttgccattgagaargctgcttgtgtagatacgattgtgtagactaagttgttgcaatctgaaaggaaagmttcagtgtggtcaggcagttgaatattttgggggaaggaacagttaaaatagctgtaacatgaaggtcatattacttgcctaacatccgtgatatgaagataagaaagcattgtgagcatgataacaaggatattatgatggtttacatgacatttatatggcaatggaatgagcaactctataagccctcaggaagacaagggctgctgaaacatgacgaatgtattaaacccacttcctaacacacttttttccgtattttttccctgtaataccacagaggatcctgtggcacaaca

SEQ ID NO: 43645 - DNA, 600 bp, Chicken  19866894281715_1
cactaatcactaaagcccacagtcagagtggagcataaaaggctcataacctttcagtctctggaaggacagtgcaatgtcagcctgtaggaccgcatcctctgccattaactcactgagtctcaaagtgaggcatatgcaacagcttccaacttccagtattttattgctccccgacacttagaaacaccttttatgggaaagaagtgcagagtcccagctggattttgtcccatgccaaggaacaaaggtgaattcatgggagccagaacttgtgatgtgctttgcaatgcaatttgytgtcacactctgctggctgatctagacacagggccacttcttaccctgatrcatgaactgtccaatacattgcaatagtaacatcagtatttttaggggctgaacagaggtattatgagaaagtgagtggttgtttatttgtttgtttgtttttaaagaggaagtgaagatgtgaatgcacagaattaatagactaatttttgaaaatgggacctctgagttgaaagtagcagatctcaaaagtcagtagcctcaaagggaagaaagcagcgcggttataactgcatggggaaaggcatc

SEQ ID NO: 43646 - DNA, 600 bp, Chicken  19866894281715_2
tttcagtctctggaaggacagtgcaatgtcagcctgtaggaccgcatcctctgccattaactcactgagtctcaaagtgaggcatatgcaacagcttccaacttccagtattttattgctccccgacacttagaaacaccttttatgggaaagaagtgcagagtcccagctggattttgtcccatgccaaggaacaaaggtgaattcatgggagccagaacttgtgatgtgctttgcaatgcaatttgytgtcacactctgctggctgatctagacacagggccacttcttaccctgatrcatgaactgtccaatacattgcaatagtaacatcagtatttttaggggctgaacagaggtattatgagaaagtgagtggttgtttatttgtttgtttgtttttaaagaggaagtgaagatgtgaatgcacagaattaatagactaatttttgaaaatgggacctctgagttgaaagtagcagatctcaaaagtcagtagcctcaaagggaagaaagcagcgcggttataactgcatggggaaaggcatctgtataaagtcctgtacctccataggagaatttgcaggggtctaaatggaa

SEQ ID NO: 43647 - DNA, 600 bp, Chicken  19866894281717_1
gaaataatctcccgaaggacaaactctttacgtcacctttctgtactaccgttgtttttatttaatacattatgaaaaggtatggagagctaaacccagagcgagatgccaccgcactgacaaagctaattccttccccaaattgctgttcctctcctaaagtaatccaacgctggctgaggtattaaatccacctgtaagtcacttggttggcaacgcagcagctttcagcaattcagcaagcaacttaaggattagaatctgtctggaatttaccttccaaaaagtttaaaagctagwtttaatcatttatcacagtcctcctcctttattgcagcacaacttcgctgacctcagaaagagcttcagatcaataaggacaagagaaggttgcaaagagttgcctaagaaatggcatttcattcagttctcatcacaagttccctaccacatactcactcatcctgtggttaggctaatcctcacctgtgctagttaccttctgaatgccactgccaaatctgttccctattataatcacactgagcacaagatagatactgtgaggctaaatttaagctggagcatgcagacggcaca

SEQ ID NO: 43648 - DNA, 600 bp, Chicken  19866894281720_1
aattatgccaagggataagcagaaactgtgtgtgagaataaaagtcaaagcactgacaatttagtacctctcgagcaagggaaagatcacgtgcagaaaggaagtagtagtttatccacctctcagtaaacagctagttgcgctaacaaaagccacttcaaactggaatagcaagccagcaaaactgagaatgcaactaaaagcttggaaataaagcatcacaaacagaagcactgaggcacaaattcattcttttctttctcaacagccccacaggagacaatttgcactgttaccacyactcctttttaattatcattaaataatgcaaaattcttaagtcatcaccctcccattaccttaatgaactcctccaatttggtgctgtctttgagtttagtatagcagttcagcagaagtgtagtgtggtcagcattggcgagagattgcaggtggagtgtctgcagataagcagtgagattgtggatgcgctgagcatctaggaatttccgaataacataagatggttccaatttccctatagtcctgggagaggacaagtcacattacaatagatcatacagccagggaatcaaaaac

SEQ ID NO: 43649 - DNA, 600 bp, Chicken  19866894281724_1
tgctgagcagttctgtgtgcagagcaacgcggtgtgagggcagcagtgaaacccaaagcactgctgggctgggagggctgtggctgctggacgaggacacatttccagctcagctccagcacagagccggtctgcgtttaagatcccatctccttggttgataggtttccatttaacggaggttattttgtttttctgtacaaagtgtgggctgagcacggtggttaccttcgggagtgcttctgctccatgggcatggcagccccgtggtgatggagctgcagatggagcagcaccgaygcagagcagtgcagcacccatccctgcgggcgcctgggcagcccgagcygctcyratagcagagccaggaagggtcagaggagcccatttaacygcgtgccccatcttcagttctcagggaaataggaaggaggagcggtgtggtggtgatggctgttgggcacagcacagccagcggtgtatttcctgtgctggtgaaatgctgaaaccttggagtgtgattggagaacgatgggaggtcygagcctggggtcggtccttccagcacagagctctggatgctcgatccacgcggcccat

SEQ ID NO: 43650 - DNA, 600 bp, Chicken  19866894281724_2
aacccaaagcactgctgggctgggagggctgtggctgctggacgaggacacatttccagctcagctccagcacagagccggtctgcgtttaagatcccatctccttggttgataggtttccatttaacggaggttattttgtttttctgtacaaagtgtgggctgagcacggtggttaccttcgggagtgcttctgctccatgggcatggcagccccgtggtgatggagctgcagatggagcagcaccgaygcagagcagtgcagcacccatccctgcgggcgcctgggcagcccgagcygctcyratagcagagccaggaagggtcagaggagcccatttaacygcgtgccccatcttcagttctcagggaaataggaaggaggagcggtgtggtggtgatggctgttgggcacagcacagccagcggtgtatttcctgtgctggtgaaatgctgaaaccttggagtgtgattggagaacgatgggaggtcygagcctggggtcggtccttccagcacagagctctggatgctcgatccacgcggcccattgcaaatgtaagatgcagcagtttattcaggagctcccggtggtgcctt

SEQ ID NO: 43651 - DNA, 600 bp, Chicken  19866894281724_3
aaagcactgctgggctgggagggctgtggctgctggacgaggacacatttccagctcagctccagcacagagccggtctgcgtttaagatcccatctccttggttgataggtttccatttaacggaggttattttgtttttctgtacaaagtgtgggctgagcacggtggttaccttcgggagtgcttctgctccatgggcatggcagccccgtggtgatggagctgcagatggagcagcaccgaygcagagcagtgcagcacccatccctgcgggcgcctgggcagcccgagcygctcyratagcagagccaggaagggtcagaggagcccatttaacygcgtgccccatcttcagttctcagggaaataggaaggaggagcggtgtggtggtgatggctgttgggcacagcacagccagcggtgtatttcctgtgctggtgaaatgctgaaaccttggagtgtgattggagaacgatgggaggtcygagcctggggtcggtccttccagcacagagctctggatgctcgatccacgcggcccattgcaaatgtaagatgcagcagtttattcaggagctcccggtggtgccttcagat

SEQ ID NO: 43652 - DNA, 600 bp, Chicken  19866894281724_4
aagcactgctgggctgggagggctgtggctgctggacgaggacacatttccagctcagctccagcacagagccggtctgcgtttaagatcccatctccttggttgataggtttccatttaacggaggttattttgtttttctgtacaaagtgtgggctgagcacggtggttaccttcgggagtgcttctgctccatgggcatggcagccccgtggtgatggagctgcagatggagcagcaccgaygcagagcagtgcagcacccatccctgcgggcgcctgggcagcccgagcygctcyratagcagagccaggaagggtcagaggagcccatttaacygcgtgccccatcttcagttctcagggaaataggaaggaggagcggtgtggtggtgatggctgttgggcacagcacagccagcggtgtatttcctgtgctggtgaaatgctgaaaccttggagtgtgattggagaacgatgggaggtcygagcctggggtcggtccttccagcacagagctctggatgctcgatccacgcggcccattgcaaatgtaagatgcagcagtttattcaggagctcccggtggtgccttcagatt

SEQ ID NO: 43653 - DNA, 600 bp, Chicken  19866894281724_5
ggacacatttccagctcagctccagcacagagccggtctgcgtttaagatcccatctccttggttgataggtttccatttaacggaggttattttgtttttctgtacaaagtgtgggctgagcacggtggttaccttcgggagtgcttctgctccatgggcatggcagccccgtggtgatggagctgcagatggagcagcaccgaygcagagcagtgcagcacccatccctgcgggcgcctgggcagcccgagcygctcyratagcagagccaggaagggtcagaggagcccatttaacygcgtgccccatcttcagttctcagggaaataggaaggaggagcggtgtggtggtgatggctgttgggcacagcacagccagcggtgtatttcctgtgctggtgaaatgctgaaaccttggagtgtgattggagaacgatgggaggtcygagcctggggtcggtccttccagcacagagctctggatgctcgatccacgcggcccattgcaaatgtaagatgcagcagtttattcaggagctcccggtggtgccttcagattgttgtcgcttttctgtttgtttgctaaagttgartgaca

SEQ ID NO: 43654 - DNA, 600 bp, Chicken  19866894281724_6
ctgctccatgggcatggcagccccgtggtgatggagctgcagatggagcagcaccgaygcagagcagtgcagcacccatccctgcgggcgcctgggcagcccgagcygctcyratagcagagccaggaagggtcagaggagcccatttaacygcgtgccccatcttcagttctcagggaaataggaaggaggagcggtgtggtggtgatggctgttgggcacagcacagccagcggtgtatttcctgtgctggtgaaatgctgaaaccttggagtgtgattggagaacgatgggaggtcygagcctggggtcggtccttccagcacagagctctggatgctcgatccacgcggcccattgcaaatgtaagatgcagcagtttattcaggagctcccggtggtgccttcagattgttgtcgcttttctgtttgtttgctaaagttgartgacaaaaacgggctcgatcagctgataaaacatcccctgcccccctaggctgcagctccgcagggcggtgtgggagagccccgtgctcagtgggtgcacggctggggagggaccggggtgctgcagctcttgggcacggcgctggtggtatg

SEQ ID NO: 43655 - DNA, 600 bp, Chicken  19866894281724_7
taacygcgtgccccatcttcagttctcagggaaataggaaggaggagcggtgtggtggtgatggctgttgggcacagcacagccagcggtgtatttcctgtgctggtgaaatgctgaaaccttggagtgtgattggagaacgatgggaggtcygagcctggggtcggtccttccagcacagagctctggatgctcgatccacgcggcccattgcaaatgtaagatgcagcagtttattcaggagctcccggtggtgccttcagattgttgtcgcttttctgtttgtttgctaaagttgartgacaaaaacgggctcgatcagctgataaaacatcccctgcccccctaggctgcagctccgcagggcggtgtgggagagccccgtgctcagtgggtgcacggctggggagggaccggggtgctgcagctcttgggcacggcgctggtggtatggatgggtgctgtgctggggctgtgctgggagaacggtgagtgtttagtggtggggaagctgctgccctcactgctcccagtgggacgctcctgagctgccctgcgttgtcctttccgtgccggcgctgctcactctgccctgtgtcc

SEQ ID NO: 43656 - DNA, 600 bp, Chicken  19866894281724_8
cggtgtggtggtgatggctgttgggcacagcacagccagcggtgtatttcctgtgctggtgaaatgctgaaaccttggagtgtgattggagaacgatgggaggtcygagcctggggtcggtccttccagcacagagctctggatgctcgatccacgcggcccattgcaaatgtaagatgcagcagtttattcaggagctcccggtggtgccttcagattgttgtcgcttttctgtttgtttgctaaagttgartgacaaaaacgggctcgatcagctgataaaacatcccctgccccccraggctgcagctccgcagggcggtgtgggagagccccgtgctcagtgggtgcacggctggggagggaccggggtgctgcagctcttgggcacggcgctggtggtatggatgggtgctgtgctggggctgtgctgggagaacggtgagtgtttagtggtggggaagctgctgccctcactgctcccagtgggacgctcctgagctgccctgcgttgtcctttccgtgccggcgctgctcactctgccctgtgtccgcttcctgcccacgctcacggcacagaggctgccatgccctgtgctg

SEQ ID NO: 43657 - DNA, 600 bp, Chicken  19866894281724_9
agaacggtgagtgtttagtggtggggaagctgctgccctcactgctcccagtgggacgctcctgagctgccctgcgttgtcctttccgtgccggcgctgctcactctgccctgtgtccgcttcctgcccacgctcacggcacagaggctgccatgccctgtgctgcatgtcagaccgccgcgtggttcccacattactgcgctccggagctgctccagcggcgtcccgctggcctgagctttcattgctccccatgtttggaattggcacggaagctcctgagcctggagggccgccccrtgctgcagcctcctcttctggcagcggttctgttgggaaggatttgcgattttgttctccgttgttaatctgcagcccataacagagcccggtttgatctccaatgagaagcactcgaggcaggagctcatctccccgcagagctctgccccagctctgcctgctcccgcagccctgcgtggcagcgccggccccaaggaggtcacggagggattaattcccctccacgagctttgtggtcagccctggcaccgctgcggtgccaaacagcgcaggtcggttccacagagcttccctgat

SEQ ID NO: 43658 - DNA, 411 bp, Chicken  19866894281725_1
cttttatatttagtaaatgcataaatatgatataacctttaaaaatttcattttattttattttgactgatagggctcaattttcaaatgaaactaaattcttctaaaatgtgtcacattattgcatttcctgagaaatcaatggagcttattagtacagtgtgaaaaatatttcctgtaatttgtgtgcccacaccaactaagcttgagcagtgatgcacacaaggaggaatagagccactgaatgaaatgagtacatctaatatgtacctctgtaactgtagtttttttaacaactaygtgatgaagatttgggatctgttgtgtgaaagctcagtttgaatgtctgggctcctttttttctgggttttttcttttttaacttctgagtctactaaattatattagcat

SEQ ID NO: 43659 - DNA, 599 bp, Chicken  19866894281737_1
  misc_feature (1)..(258): n is any nucleotide
nnnnnnnnnnnnnnnnnnnnnnnnnnnnnnnnnnnnnnnnnnnnnnnnnnnnnnnnnnnnnnnnnnnnnnnnnnnnnnnnnnnnnnnnnnnnnnnnnnnnnnnnnnnnnnnnnnnnnnnnnnnnnnnnnnnnnnnnnnnnnnnnnnnnnnnnnnnnnnnnnnnnnnnnnnnnnnnnnnnnnnnnnnnnnnnnnnnnnnnnnnnnnnnnnnnnnnnnnnnnnnnnnnnnnnnnnnnnnnnnnnnnnnnnnnnnnnnnnnttgaggaaaaggtggctttttattgtgctgctggtaagctgwatgctggagtgtatgcaagatagtctttcaaactgactttgtattggagccagtgcagaggttaatcaattactgctaaaatattaaattctccttttcagaaaatgaagggattcyttcccagaggatgtacaaggctgttmctgcagatgggcwgacatggtgcagggctgctgaggctgtctggctttgctctgcagccttctgtccccttgatgtcacagggtccctcctggctgtcttcattgagtccctcagcacagctcctcccatgggaggtgggctgggggtggtggttg

SEQ ID NO: 43660 - DNA, 599 bp, Chicken  19866894281737_2
  misc_feature (1)..(141): n is any nucleotide
nnnnnnnnnnnnnnnnnnnnnnnnnnnnnnnnnnnnnnnnnnnnnnnnnnnnnnnnnnnnnnnnnnnnnnnnnnnnnnnnnnnnnnnnnnnnnnnnnnnnnnnnnnnnnnnnnnnnnnnnnnnnnnnnnnnnnnnnnnnnnttgaggaaaaggtggctttttattgtgctgctggtaagctgwatgctggagtgtatgcaagatagtctttcaaactgactttgtattggagccagtgcagaggttaatcaattactgctaaaatattaaattctccttttcagaaaatgaagggattcyttcccagaggatgtacaaggctgttmctgcagatgggcwgacatggtgcagggctgctgaggctgtctggctttgctctgcagccttctgtccccttgatgtcacagggtccctcctggctgtcttcattgagtccctcagcacagctcctcccatgggaggtgggctgggggtggtggttgggctggggcacttgctgcaagcagcaggttgggcataagcaaggctcctgccccagctctgagctagttctgtgctgaaataatcagcaatgggattatttaatcactttgtcaggg

SEQ ID NO: 43661 - DNA, 599 bp, Chicken  19866894281737_3
  misc_feature (1)..(115): n is any nucleotide
nnnnnnnnnnnnnnnnnnnnnnnnnnnnnnnnnnnnnnnnnnnnnnnnnnnnnnnnnnnnnnnnnnnnnnnnnnnnnnnnnnnnnnnnnnnnnnnnnnnnnnnnnnnnnnnnnnnttgaggaaaaggtggctttttattgtgctgctggtaagctgwatgctggagtgtatgcaagatagtctttcaaactgactttgtattggagccagtgcagaggttaatcaattactgctaaaatattaaattctccttttcagaaaatgaagggattcyttcccagaggatgtacaaggctgttmctgcagatgggcwgacatggtgcagggctgctgaggctgtctggctttgctctgcagccttctgtccccttgatgtcacagggtccctcctggctgtcttcattgagtccctcagcacagctcctcccatgggaggtgggctgggggtggtggttgggctggggcacttgctgcaagcagcaggttgggcataagcaaggctcctgccccagctctgagctagttctgtgctgaaataatcagcaatgggattatttaatcactttgtcagggagcttttgccccgtttccattgttcc

SEQ ID NO: 43662 - DNA, 599 bp, Chicken  19866894281737_4
  misc_feature (1)..(102): n is any nucleotide
nnnnnnnnnnnnnnnnnnnnnnnnnnnnnnnnnnnnnnnnnnnnnnnnnnnnnnnnnnnnnnnnnnnnnnnnnnnnnnnnnnnnnnnnnnnnnnnnnnnnnnttgaggaaaaggtggctttttattgtgctgctggtaagctgwatgctggagtgtatgcaagatagtctttcaaactgactttgtattggagccagtgcagaggttaatcaattactgctaaaatattaaattctccttttcagaaaatgaagggattcyttcccagaggatgtacaaggctgttmctgcagatgggcwgacatggtgcagggctgctgaggctgtctggctttgctctgcagccttctgtccccttgatgtcacagggtccctcctggctgtcttcattgagtccctcagcacagctcctcccatgggaggtgggctgggggtggtggttgggctggggcacttgctgcaagcagcaggttgggcataagcaaggctcctgccccagctctgagctagttctgtgctgaaataatcagcaatgggattatttaatcactttgtcagggagcttttgccccgtttccattgttccggataagcggtga

SEQ ID NO: 43663 - DNA, 600 bp, Chicken  19866894281741_1
actccatctatgatagaaaaggatgctttacgggaggcagctatgagttcaaatttaaagctctgcagaagatgcatctctctggtgtatgtataaatgaacactgcagatgtaagcaactcctctacaacacttgagttatgtgagtgtggtagctcagacgcagcatagtatcgtggtggtgtaagttcacttcatctctggtgtatcttttgttaattattgcttcaatttcctttccattactgtcaaaaggcatgcactgcactgctctctcagtgaaataggtttctgcaagcyattgcccactgcgtgcagctgactgggttttcaggtacatcgctgtgctatgggatgtatgtattaatgggcactagaaccaacgtatttggctacttttcctcttctttctttccccctgcaaagtcgtcttcatcaccatgtacacttctccacccaaagtcttgtgtttccagaagtacacggtgaaatagaactctgctttgagagctttagatctgcactggtttcgcgttcctaatcatagcattgctcatcagcaggtgtcattgcaacctcaggctatgcttttattccctg

SEQ ID NO: 43664 - DNA, 600 bp, Chicken  19866894281743_1
ttcagggcatattcctgtcctcgtcaattaggtaccagcccttccacaagcgcaccacccctcaggccgcgctccacaaagcacacagtgcccacacagcgcactctcccacagagctctcagcagccaccccatccctccacgaaggcatcgctttcacctcacggtccccccggcactcagagctcggatttacatcactttttgcacaacacacaccgtggtgaccagaagcgacccggccatctccacccgtgtcctcacacagcacacagctgccccatcacctacctccctgcrcacaaacctctctcaccacctagaggcccaaagggaattaagcatttattataattttctttctagatggtttctctacagtattaacatatactaacacagttatcttatatacagtgcttaatcaagttataaaagtgacattcttttaaaaggtgcaaagttaatgttttgacatgtaaactactgaggcgagatctgcatttaaaatacgttttgttcactttcagagcgatcacaatgtgctgttgggtatcccgaggctcgccaggcagagacttttcagcagcaatgagaaaa

SEQ ID NO: 43665 - DNA, 600 bp, Chicken  19866894281743_2
ctctctcaccacctagaggcccaaagggaattaagcatttattataattttctttctagatggtttctctacagtattaacatatactaacacagttatcttatatacagtgcttaatcaagttataaaagtgacattcttttaaaaggtgcaaagttaatgttttgacatgtaaactactgaggcgagatctgcatttaaaatacgttttgttcactttcagagcgatcacaatgtgctgttgggtatcccgaggctcgccaggcagagacttttcagcagcaatgagaaaatattccrtaaatgttttcagtgaggaataataaattaaaagaacagagctggaacccattcgagatttccctaaaaacattacacaaaagagaggggagaatgggctaaagatgtaatgctatttcagaaaacgtgccaatttgtttttaaattacatgacattcctaaactgacgtttcaaataaacatggtggaattctgtttttgcataatgaaaagggtctttaaaatcctaattcaagaggagagggatgctaacctgtccgctccttcttaaaaacagagtatttctttaccaattaccct

SEQ ID NO: 43666 - DNA, 599 bp, Chicken  19866894281753_1
  misc_feature (1)..(16): n is any nucleotide
nnnnnnnnnnnnnnnnctttggaaaagaaaaaaacactaccaagtgtgagagacagatcagcttgaggaaatcatccagatttgctaaagaaattagtatgagtttgggtctgttttcctgtagcttaagtgcttttgatgttctactatccagtgttttactatctaaatccaagctagcatactactacctgtgtacctgctatgttattgtatccttgatattttagtaaaggactcttccacttgatattcaacagtccctcaacatgtggactcaagtagggaaagtgtaagatyggcattaagtggatttgggggcacagggagacggaataggtgtttgctccatctacgccatgcattaactcgcacaagcagtgaagaggaaacaactggcaggaaacagaaaggaaatcagaggactgggggctgtggatcacaggctcaatgtacaatgacaataatatgcagctgagaaaaaggtaaaagccatactgagatatttaagcagaagtagagtctgcaagattcgtaaagaaatgagcattttgctgagtgccagggaggcttcacctcaggcattgtgttctcctgca

SEQ ID NO: 43667 - DNA, 600 bp, Chicken  19866894281754_1
tgctcaaatgattttggtactctgaaatgagcactatcagttctagctactcattctgtgcttatggatgaaaaaacccaactcctgttgacttaaaaggcttaacatgttcctaaaccctcagctctaaatttgccctcctttacacttatgagaatcctaaatcattgctctgaaatcagatgggataaagctgaaaagggcacagaggccactttattttatagcccagcttgatacttccatgagtaattaacaccaatgtgagcgattaactccagtgccacacacaaagcacgkaagtgcctctgactggtacgtttatctgaaataatggagctcctgggatactaaaccagtgataaaagtgcatcatgaaacactgataggtaagggtccgcatgcttaatgagagcatgttatcaatggaagaggcttctgaaaagatttcaaaaggacagaatgaaatccccaaatgctgtgcaaaagtttcaagagagaaaataactccttacgtttacaatgaataaaagcaatgtaaacctgtggccctttgctcacataacactggcttcctaaaccacagctggcatcgccagg

SEQ ID NO: 43668 - DNA, 600 bp, Chicken  19866894281754_2
tgactggtacgtttatctgaaataatggagctcctgggatactaaaccagtgataaaagtgcatcatgaaacactgataggtaagggtccgcatgcttaatgagagcatgttatcaatggaagaggcttctgaaaagatttcaaaaggacagaatgaaatccccaaatgctgtgcaaaagtttcaagagagaaaataactccttacgtttacaatgaataaaagcaatgtaaacctgtggccctttgctcacataacactggcttcctaaaccacagctggcatcgccagggcaacaaawgagacctcacggatacctctttttccacacattcacaaactcttaaagagggcccgagggctctccagccgctcagcattgccgtttcgccacagcccgaggcgggagcagccaccgaggggaacacgtcccgccagggccgctcccggcgcctcagggcttcgcagacagaactaccgagaagcaggggccgctgagaaccggcagcacacgggcacgggcgcaaagagcccggggggaagcggggccccacggccgcaccccgccgcgttacagcaagcgaaggaggccgcggcactt

SEQ ID NO: 43669 - DNA, 600 bp, Chicken  19866894281759_1
gagctttaggttggatgtaagaaagaagtttttttatgatgtgagtggtgaagcactggcacgggttgcccagagaggtgatgggtgcccctcattcctggagacactcgtggtcaggctggatggggctttgagcactgatggagctgtggtgtccctgctgattgcagggagttggaccagacgaccttcaagtgtcccttcctactcaaacaagtcaatgattctttgattctatgaatttgtgaatatgaattctatgaacttcagaataatgctgtgcgtggatgttcctttcayactcccgatgatcttttyctcatctatcccacaagcaagaccaggcaaatctaaaaagatgctgtaatacaggtgcttctttacaactggtgcagagaagtcacatgagttcacccagcaggagcagacctggcccctttcatcgaaactccagtgctacagttaagattttgcccccagcatatgcaccaggatggcaatggaaatcccctaccacttcctcttcctccctctctctctgcatgcccctgcctttccctccatgctcacctttcctctgctcccctgtccacacacaaa

SEQ ID NO: 43670 - DNA, 600 bp, Chicken  19866894281759_2
aagaaagaagtttttttatgatgtgagtggtgaagcactggcacgggttgcccagagaggtgatgggtgcccctcattcctggagacactcgtggtcaggctggatggggctttgagcactgatggagctgtggtgtccctgctgattgcagggagttggaccagacgaccttcaagtgtcccttcctactcaaacaagtcaatgattctttgattctatgaatttgtgaatatgaattctatgaacttcagaataatgctgtgcgtggatgttcctttcayactcccgatgatcttttyctcatctatcccacaagcaagaccaggcaaatctaaaaagatgctgtaatacaggtgcttctttacaactggtgcagagaagtcacatgagttcacccagcaggagcagacctggcccctttcatcgaaactccagtgctacagttaagattttgcccccagcatatgcaccaggatggcaatggaaatcccctaccacttcctcttcctccctctctctctgcatgcccctgcctttccctccatgctcacctttcctctgctcccctgtccacacacaaacacccagccccaatcttc

SEQ ID NO: 43671 - DNA, 600 bp, Chicken  19866894281765_1
ttgtagaagtttccaagggaataaatagattttttcatttagaaactaattcctgtactttaggaagaaataaaatatataaatagcactaaaaatacctcaaatttttcattagatagaagcatttattggcattattgacatcaacaggtttaattacaagcttccttttctctcctgtggcttctgctcggaactgttcattgttctgtggcttacaagacaaggcatcataattatattcctagaggctttatttctaaaatatcaatgtttcatttacagcttatacgggatacrttcagaacttttacttttaaccagagattctagtagtgacaacagacagctgaacaagcagatagatttgggttccttagatcagttattgtcattctctaagagaagagactttggcattacctggtatgaagaaatccaaaatagtgtataagactgttattagtcttagtgaagtgcctgataacatttatgggccaacggatgtgattaaacacattttaatgccagaaagtaagtacagatgggaccaaaccagaacatcaaattcaaaccagtctgaggtttgaaaccagatct

SEQ ID NO: 43672 - DNA, 600 bp, Chicken  19866894281766_1
cttctacataattactccattattcataatcatctggctcaaactataattttgaggctgatttgacctgtgcctgttctaccatttgaaattagaagtgctttgaagcttctattagccaggagtgttttatgttggtgttactcatactgctgctgttatatatggagttttaatatgttaaatagtggtatcactcagcatcaggtagtaaagtactgcaatgataaggctaaacaaaatgctagttcatgtatcgtaggttgttcataagacccttatgtttgttcctaagactgraggagaagggggaaaaaaaaaaggtctttggggaccatcatgccatccacattgttacttaacacatacctgctctttggaacatactttctgttgcatcccttaattcccttgatgcaatttagaaaagaatggctaaagtaagcaatgaaagtaagtcttatcatcagactttgccaggtcagcagtgagagggacctccctctttctgcctccaatactgatttggtgtgtcaagcacaaaaaacaaacaaacaaacaaaaaaaaccccacaactaaaaacaacaaatcactgaaga

SEQ ID NO: 43673 - DNA, 600 bp, Chicken  19866894281776_1
tctccatataaaatcttcagttgtgagcttctttcacattaatgttggggaactcttgagctccaggtctactgcctgagtagtattttttcattgtcttgtttgtcagctgtattttgatgtagttgttttcattctacgtagttgtccactctatccgtgctccagaattgtcagattgatatgcatcttcacttgaaacttagtgttctctcatctactaaaacttttttatgaattctttaaagaaaatccagtaaaaggttgaattaagcagaacatgaaggttgaggatgcaaygtttttccaaatgttttatgttaaatcgtttaagctgcataaaacacctgtagagtttgtgasttccaaaagggttttaggtagaaaaatggagaatggtatttagcatgacagcttggtgtgtaaaagtaagtaataacatttgtggcactgtttgatggctgtagggcaatccttttgcccactatgaggggaaaaagcagacttttcttacatcctgggtgtagcgttgtgtatcctttccttgtctcttggttctggctgacaaggtgtttgcagggagatttgccacyataatca

SEQ ID NO: 43674 - DNA, 600 bp, Chicken  19866894281776_2
caggtctactgcctgagtagtattttttcattgtcttgtttgtcagctgtattttgatgtagttgttttcattctacgtagttgtccactctatccgtgctccagaattgtcagattgatatgcatcttcacttgaaacttagtgttctctcatctactaaaacttttttatgaattctttaaagaaaatccagtaaaaggttgaattaagcagaacatgaaggttgaggatgcaaygtttttccaaatgttttatgttaaatcgtttaagctgcataaaacacctgtagagtttgtgasttccaaaagggttttaggtagaaaaatggagaatggtatttagcatgacagcttggtgtgtaaaagtaagtaataacatttgtggcactgtttgatggctgtagggcaatccttttgcccactatgaggggaaaaagcagacttttcttacatcctgggtgtagcgttgtgtatcctttccttgtctcttggttctggctgacaaggtgtttgcagggagatttgccacyataatcactgtgtaactgttaatttttttctcttccctccctgaaatattagggtaagcaaagaaaargr

SEQ ID NO: 43675 - DNA, 600 bp, Chicken  19866894281776_3
atgcaaygtttttccaaatgttttatgttaaatcgtttaagctgcataaaacacctgtagagtttgtgasttccaaaagggttttaggtagaaaaatggagaatggtatttagcatgacagcttggtgtgtaaaagtaagtaataacatttgtggcactgtttgatggctgtagggcaatccttttgcccactatgaggggaaaaagcagacttttcttacatcctgggtgtagcgttgtgtatcctttccttgtctcttggttctggctgacaaggtgtttgcagggagatttgccacyataatcactgtgtaactgttaatttttttctcttccctccctgaaatattagggtaagcaaagaaaargrgggaaaaaggcaatttaacttctgtaggactaaactgcagaaaattatatgcttggtagaaaattggaaacatcttggagtgcgctgtaaaatcacaggcctacatggggaaatgcttgttgagctgccacccaaactgtttctatgtggagaaatttatttttgaaagtgaaggcgagctgcttgctcaagatgaaaatttactttttttatggcatcttttctctcct

SEQ ID NO: 43676 - DNA, 600 bp, Chicken  19866894281776_4
asttccaaaagggttttaggtagaaaaatggagaatggtatttagcatgacagcttggtgtgtaaaagtaagtaataacatttgtggcactgtttgatggctgtagggcaatccttttgcccactatgaggggaaaaagcagacttttcttacatcctgggtgtagcgttgtgtatcctttccttgtctcttggttctggctgacaaggtgtttgcagggagatttgccacyataatcactgtgtaactgttaatttttttctcttccctccctgaaatattagggtaagcaaagaaaargrgggaaaaaggcaatttaacttctgtaggactaaactgcagaaaattatatgcttggtagaaaattggaaacatcttggagtgcgctgtaaaatcacaggcctacatggggaaatgcttgttgagctgccacccaaactgtttctatgtggagaaatttatttttgaaagtgaaggcgagctgcttgctcaagatgaaaatttactttttttatggcatcttttctctccttccacttcatcctaccacctcctgccaatttctactacaygcacacacacaaaagcaaacatgtcccc

SEQ ID NO: 43677 - DNA, 600 bp, Chicken  19866894281776_5
ttccaaaagggttttaggtagaaaaatggagaatggtatttagcatgacagcttggtgtgtaaaagtaagtaataacatttgtggcactgtttgatggctgtagggcaatccttttgcccactatgaggggaaaaagcagacttttcttacatcctgggtgtagcgttgtgtatcctttccttgtctcttggttctggctgacaaggtgtttgcagggagatttgccacyataatcactgtgtaactgttaatttttttctcttccctccctgaaatattagggtaagcaaagaaaargrgggaaaaaggcaatttaacttctgtaggactaaactgcagaaaattatatgcttggtagaaaattggaaacatcttggagtgcgctgtaaaatcacaggcctacatggggaaatgcttgttgagctgccacccaaactgtttctatgtggagaaatttatttttgaaagtgaaggcgagctgcttgctcaagatgaaaatttactttttttatggcatcttttctctccttccacttcatcctaccacctcctgccaatttctactacaygcacacacacaaaagcaaacatgtccccca

SEQ ID NO: 43678 - DNA, 600 bp, Chicken  19866894281776_6
ctgaaatattagggtaagcaaagaaaargrgggaaaaaggcaatttaacttctgtaggactaaactgcagaaaattatatgcttggtagaaaattggaaacatcttggagtgcgctgtaaaatcacaggcctacatggggaaatgcttgttgagctgccacccaaactgtttctatgtggagaaatttatttttgaaagtgaaggcgagctgcttgctcaagatgaaaatttactttttttatggcatcttttctctccttccacttcatcctaccacctcctgccaatttctactacaygcacacacacaaaagcaaacatgtcccccaagcctaaaaaaacaaacccagtatttatgcttttactctccctcagtccatctggtctgctttcactgttgtgacccagtgttgtgctgcttttctcacttcatggtattgcatcccaagttgccacttcagagcagtacgtggtaccatttcagctgtgggcgggggggctgagagaaaagaagcaatgacatctgtcagctaaaggaaaagaacttgttggcagaaacattgctgaaaataaagttaagcagtagaaagaagaacaga

SEQ ID NO: 43679 - DNA, 600 bp, Chicken  19866894281777_1
ataagagagtgttccttagacttaactttgcagaattactttttccatgaggtgaaattttggttgaaaaatagttctattcataaaacaatatttaaaatggtataggcagaatttttggaaaacaaaacttagtgcaaattttctctattatatatatagatacgttcaatagcaaagataaatgcaccttttaatgcttttgctgacatttgtagtatgaaactgctgaagacttcacagtatgttataatgactaaatgccaagttatagtgaagactgactgtatctactttcakgcagagccttttcacttgaggttatctttattacttgtgtctattatgccttttcttacttacatctattacccattatactcttctaacctaaatacycattcaggaacraactcagaatyagccataacacactacatacacagccctctccttatgagaaagctgaaaatgaaacaggtcattgctgtccccaataagtggctcaaaaaaaaaaaaaatctaacttttgttgggaattgtgtggagtactaaagtgttccacagaaaaattccaagcatctcagttcagaagtatag

SEQ ID NO: 43680 - DNA, 600 bp, Chicken  19866894281777_2
atggtataggcagaatttttggaaaacaaaacttagtgcaaattttctctattatatatatagatacgttcaatagcaaagataaatgcaccttttaatgcttttgctgacatttgtagtatgaaactgctgaagacttcacagtatgttataatgactaaatgccaagttatagtgaagactgactgtatctactttcakgcagagccttttcacttgaggttatctttattacttgtgtctattatgccttttcttacttacatctattacccattatactcttctaacctaaatacycattcaggaacraactcagaatyagccataacacactacatacacagccctctccttatgagaaagctgaaaatgaaacaggtcattgctgtccccaataagtggctcaaaaaaaaaaaaaatctaacttttgttgggaattgtgtggagtactaaagtgttccacagaaaaattccaagcatctcagttcagaagtatagttacaaattgactcaggcaaagccttcaccactgtctgcccatagcatgctcctggagtagctggcagcccatggcttaggcagatacactctttcgct

SEQ ID NO: 43681 - DNA, 600 bp, Chicken  19866894281777_3
gaatttttggaaaacaaaacttagtgcaaattttctctattatatatatagatacgttcaatagcaaagataaatgcaccttttaatgcttttgctgacatttgtagtatgaaactgctgaagacttcacagtatgttataatgactaaatgccaagttatagtgaagactgactgtatctactttcakgcagagccttttcacttgaggttatctttattacttgtgtctattatgccttttcttacttacatctattacccattatactcttctaacctaaatacycattcaggaacraactcagaatyagccataacacactacatacacagccctctccttatgagaaagctgaaaatgaaacaggtcattgctgtccccaataagtggctcaaaaaaaaaaaaaatctaacttttgttgggaattgtgtggagtactaaagtgttccacagaaaaattccaagcatctcagttcagaagtatagttacaaattgactcaggcaaagccttcaccactgtctgcccatagcatgctcctggagtagctggcagcccatggcttaggcagatacactctttcgctgggtaaagaact

SEQ ID NO: 43682 - DNA, 600 bp, Chicken  19866894281777_4
aaacaaaacttagtgcaaattttctctattatatatatagatacgttcaatagcaaagataaatgcaccttttaatgcttttgctgacatttgtagtatgaaactgctgaagacttcacagtatgttataatgactaaatgccaagttatagtgaagactgactgtatctactttcakgcagagccttttcacttgaggttatctttattacttgtgtctattatgccttttcttacttacatctattacccattatactcttctaacctaaatacycattcaggaacraactcagaatyagccataacacactacatacacagccctctccttatgagaaagctgaaaatgaaacaggtcattgctgtccccaataagtggctcaaaaaaaaaaaaaatctaacttttgttgggaattgtgtggagtactaaagtgttccacagaaaaattccaagcatctcagttcagaagtatagttacaaattgactcaggcaaagccttcaccactgtctgcccatagcatgctcctggagtagctggcagcccatggcttaggcagatacactctttcgctgggtaaagaactggttggatggc

SEQ ID NO: 43683 - DNA, 600 bp, Chicken  19866894281777_5
agttacaaattgactcaggcaaagccttcaccactgtctgcccatagcatgctcctggagtagctggcagcccatggcttaggcagatacactctttcgctgggtaaagaactggttggatggccggactcagagagtggtggtgaacggagttaaatccagctggccaccagcggtgctcttcaggggtcagtgctggggcctgtcctgttccatatctttactgatgccctggacgagggcattgagtgcaccctcagtgagtttgcagatgacaccaagctggcaggaagtgtctargggaaggaaggctctacagagtgatctggacaggctagatagctggagtgagggccaatgggatgaagtccaacacaatcaagtgccaggccctttggccacaacaaccacaagcaatgctacaggcttggcagagtggctggaagactgtgtagaggaaattgtcctcagaataytggttgacactcagctgaatgtgagccagcagcatgcccaggtggccaagaaggccaatggcatcctggcttgtatcagaaatagtgttgccagcagaagaaaggaagtgattgtcctctgtac

SEQ ID NO: 43684 - DNA, 600 bp, Chicken  19866894281777_6
tgctcttcaggggtcagtgctggggcctgtcctgttccatatctttactgatgccctggacgagggcattgagtgcaccctcagtgagtttgcagatgacaccaagctggcaggaagtgtctargggaaggaaggctctacagagtgatctggacaggctagatagctggagtgagggccaatgggatgaagtccaacacaatcaagtgccaggccctttggccacaacaaccacaagcaatgctacaggcttggcagagtggctggaagactgtgtagaggaaattgtcctcagaataytggttgacactcagctgaatgtgagccagcagcatgcccaggtggccaagaaggccaatggcatcctggcttgtatcagaaatagtgttgccagcagaagaaaggaagtgattgtcctctgtactcagcactggygaggttgcaccttgagtactgtgtgcagttttgggcacctcactacaagaaatatattgagtccmtggggtgtattcagagaagggcaacacagctggtgaggtgtctggagcacaagtctcatgaggagtggctgagggagctggggggttgttcagtctggag

SEQ ID NO: 43685 - DNA, 510 bp, Chicken  19866894281777_7
ctctacagagtgatctggacaggctagatagctggagtgagggccaatgggatgaagtccaacacaatcaagtgccaggccctttggccacaacaaccacaagcaatgctacaggcttggcagagtggctggaagactgtgtagaggaaattgtcctcagaataytggttgacactcagctgaatgtgagccagcagcatgcccaggtggccaagaaggccaatggcatcctggcttgtatcagaaatagtgttgccagcagaagaaaggaagtgattgtcctctgtactcagcactggygaggttgcaccttgagtactgtgtgcagttttgggcacctcactacaagaaatatattgagtccmtggggtgtattcagagaagggcaacacagctggtgaggtgtctggagcacaagtctcatgaggagtggctgagggagctggggggttgttcagtctggagaagaggaggctcaagggtgccttatcagtttctacaactacctga

SEQ ID NO: 43686 - DNA, 445 bp, Chicken  19866894281777_8
aatcaagtgccaggccctttggccacaacaaccacaagcaatgctacaggcttggcagagtggctggaagactgtgtagaggaaattgtcctcagaataytggttgacactcagctgaatgtgagccagcagcatgcccaggtggccaagaaggccaatggcatcctggcttgtatcagaaatagtgttgccagcagaagaaaggaagtgattgtcctctgtactcagcactggygaggttgcaccttgagtactgtgtgcagttttgggcacctcactacaagaaatatattgagtccmtggggtgtattcagagaagggcaacacagctggtgaggtgtctggagcacaagtctcatgaggagtggctgagggagctggggggttgttcagtctggagaagaggaggctcaagggtgccttatcagtttctacaactacctga

SEQ ID NO: 43687 - DNA, 600 bp, Chicken  19866894281778_1
cagtgccaacagatctccagtcctgcaggaagactctgcagttcaggcacaatacaaaacaattattatagtaacaatatttagctattgttctcttcaaatgttccattcctctgggacttctgtaaggctcactccttttctaagcagtgtagcttattttatctgtgcaattttgcactgagtcatggcagtgcctttggccattttacaggagtaccccccttatctgcccagggcagaaaccaacggatagcctgcggtattgctttttctatttctgcttcaaggctgcacaascctacacgcttgaactygagctttgagaaggcaacgtgtgagatgccagcttgcactcctagggtgaggagagctccagcagctctgggaagcatcctgcttagaaaagttgaagtcgcaaaatcacagaagcacagaattgtaggggttagaaggaacctctggagatcaccaagtcctacacccccgctaaagcaggttcctacagtagttgccctttggctgatggcaccaaggggagaggtcatcttgcagttgccacgctgcccaaatagttgaaggtgatgaacacttcccagg

SEQ ID NO: 43688 - DNA, 600 bp, Chicken  19866894281778_2
cagtcctgcaggaagactctgcagttcaggcacaatacaaaacaattattatagtaacaatatttagctattgttctcttcaaatgttccattcctctgggacttctgtaaggctcactccttttctaagcagtgtagcttattttatctgtgcaattttgcactgagtcatggcagtgcctttggccattttacaggagtaccccccttatctgcccagggcagaaaccaacggatagcctgcggtattgctttttctatttctgcttcaaggctgcacaascctacacgcttgaactygagctttgagaaggcaacgtgtgagatgccagcttgcactcctagggtgaggagagctccagcagctctgggaagcatcctgcttagaaaagttgaagtcgcaaaatcacagaagcacagaattgtaggggttagaaggaacctctggagatcaccaagtcctacacccccgctaaagcaggttcctacagtagttgccctttggctgatggcaccaaggggagaggtcatcttgcagttgccacgctgcccaaatagttgaaggtgatgaacacttcccaggaactggggcaagctgcg

SEQ ID NO: 43689 - DNA, 600 bp, Chicken  19866894281784_1
cagacatggtaatcatttctttaagaggaaaggcaaggctcccatgctggcttacgaagcaagaacttaacttctgttttgttgacccagggaggaccccaagcacaaggcagagcacctctgtgcggcagtgctggccatgccttggggctgtcctctgctgctgcagctgctgaattgcatctctgatgagcttgatgcaattaacggcacccataggtgcaccagccaaggccacctgtcctacaggaggatctcagctccagggagcttcacgtgtttttggtacagcttttttgygaggcgctcagccccaggtgaaccaaatcaccacatccgtttgggagggaacaaggagctctcagctcgaaagccaacactcagtatttgggaggcagggagatctcagccctggaaacaagtgctgaaactcacacctgaacatctctcaactgatgcccagtcacaaaccaaagcaggaacccaaaagccagggcaaaggagcccccagatgtgacagcttcatgtgctcaaggcaccagcagatgtgctgtaaggccagggggagcaccacccatgcttatgggttcatcccaggag

SEQ ID NO: 43690 - DNA, 600 bp, Chicken  19866894281786_1
agtctgaaagctcattctgtgtgagtgttcacaaaacacgtgattgaaaaaagtgcatttcaggattctcaaagatgccgacaaagccgacagccccttctagaattctgccttctctcctttttactatgagaaggaaagggaaaatccctgccttgtctctcttctttggaaacaccctatggtgcagtgtagccgtgatccccctgccccaggcagcagctgtggcagcagaaggccccttccctgctggggggctccttacccccccacatcgccccacagcgccctgggcagctycccgggcaggctgagtgctgagcctggcaggcggcagagtccctgccccggcacacagcccctggggcacagcagggaccctgctctgcaccacagccctgggcacccggctgcacccccggctgcacagcctgcagccatcctgggacacgcagccctcagggctgtgctctgacactgcagcgcagaaaccctcatctggagcaggtcytttcccacagttaggaaacatggtgtgtcttgagcctgatctgctaggggttgtctcaaattcagtgatacctccaggaaaagcagctt

SEQ ID NO: 43691 - DNA, 600 bp, Chicken  19866894281786_2
ccaggcagcagctgtggcagcagaaggccccttccctgctggggggctccttacccccccacatcgccccacagcgccctgggcagctycccgggcaggctgagtgctgagcctggcaggcggcagagtccctgccccggcacacagcccctggggcacagcagggaccctgctctgcaccacagccctgggcacccggctgcacccccggctgcacagcctgcagccatcctgggacacgcagccctcagggctgtgctctgacactgcagcgcagaaaccctcatctggagcaggtcytttcccacagttaggaaacatggtgtgtcttgagcctgatctgctaggggttgtctcaaattcagtgatacctccaggaaaagcagcttcatggcctgcagcgagagacttaccttgtcaagagctgtgagcaatcctcctgcagcgagctctctgcctgctcacagcccatacatcctgtaatccctctcttctttctcttctctcctcatgacacctgcaattcattccctcagccctgctctgctgtgcagaagagctgctcctgggcacagctgcctctctacagaactgcccact

SEQ ID NO: 43692 - DNA, 600 bp, Chicken  19866894281787_1
agtgggctaagtgcaaacaattatatctgcagcacgacaagtattataactatttactgtagataaatacagttgcctcaaattgaagactaacttctaatgaaacggcctacactcattttgcaataaaatacagagaagccataagaactgttgcatatatttctccctgagacctctctaaatccagctactgctaggctgagcgtatctcactcctgtgtacgcatgcacattccaagcatttggataaacccgcaacactgctgtattttacagcacaaagctccttctccctcygagcagaagacttcggtcctacacagcacttcagtgctgagcacaacaggacaccaggcgggcacccacagccctcgctgagccttgagtaaatgcagactgatgtctcatcaagcactcctccggtgtttggtgtcagattgtccargactcttggaaatacatcttgtataagttcacaacaaygtgcttaataacataattgctgcttctgctgtactttccctgaaagcgtgcactctcagcctctgcactaagaggaactgcatcccagggcgtgtgcacctgcaatgctgactc

SEQ ID NO: 43693 - DNA, 600 bp, Chicken  19866894281787_2
aactgttgcatatatttctccctgagacctctctaaatccagctactgctaggctgagcgtatctcactcctgtgtacgcatgcacattccaagcatttggataaacccgcaacactgctgtattttacagcacaaagctccttctccctcygagcagaagacttcggtcctacacagcacttcagtgctgagcacaacaggacaccaggcgggcacccacagccctcgctgagccttgagtaaatgcagactgatgtctcatcaagcactcctccggtgtttggtgtcagattgtccargactcttggaaatacatcttgtataagttcacaacaaygtgcttaataacataattgctgcttctgctgtactttccctgaaagcgtgcactctcagcctctgcactaagaggaactgcatcccagggcgtgtgcacctgcaatgctgactccacrtacactggcaattattccaggagagtttgttctgttcagctgattgctttgcaagaaaaaagtggtttaacccccagtttccagctacagcccgaagagacaaagactgtcaagcatattctctgtgggcagctgcacttgctt

SEQ ID NO: 43694 - DNA, 600 bp, Chicken  19866894281787_3
ccagctactgctaggctgagcgtatctcactcctgtgtacgcatgcacattccaagcatttggataaacccgcaacactgctgtattttacagcacaaagctccttctccctcygagcagaagacttcggtcctacacagcacttcagtgctgagcacaacaggacaccaggcgggcacccacagccctcgctgagccttgagtaaatgcagactgatgtctcatcaagcactcctccggtgtttggtgtcagattgtccargactcttggaaatacatcttgtataagttcacaacaaygtgcttaataacataattgctgcttctgctgtactttccctgaaagcgtgcactctcagcctctgcactaagaggaactgcatcccagggcgtgtgcacctgcaatgctgactccacrtacactggcaattattccaggagagtttgttctgttcagctgattgctttgcaagaaaaaagtggtttaacccccagtttccagctacagcccgaagagacaaagactgtcaagcatattctctgtgggcagctgcacttgcttggaaggaaaaataaacaccaagaacttatggaaccgaa

SEQ ID NO: 43695 - DNA, 549 bp, Chicken  19866894281787_4
agaagacttcggtcctacacagcacttcagtgctgagcacaacaggacaccaggcgggcacccacagccctcgctgagccttgagtaaatgcagactgatgtctcatcaagcactcctccggtgtttggtgtcagattgtccargactcttggaaatacatcttgtataagttcacaacaaygtgcttaataacataattgctgcttctgctgtactttccctgaaagcgtgcactctcagcctctgcactaagaggaactgcatcccagggcgtgtgcacctgcaatgctgactccacrtacactggcaattattccaggagagtttgttctgttcagctgattgctttgcaagaaaaaagtggtttaacccccagtttccagctacagcccgaagagacaaagactgtcaagcatattctctgtgggcagctgcacttgcttggaaggaaaaataaacaccaagaacttatggaaccgaagtcgtgactcgactcctctaggtagcgctggctgactctgatcagacatcccagcagccataagaag

SEQ ID NO: 43696 - DNA, 581 bp, Chicken  19866894281790_1
tgccagtcctctgagaaaggtttacctgttttgattgacttcctaggtatgctggagggaaggaaggagagaagaaaacagtgaggcacctggagtgaagtaggctgtctgagttagagctgtgtggagtaggatgggtgacaggattctgtctcttgggtgtcgatttcgataagtggggcccttaacatccttctgaaaattgttcccagggctgtgcattctgcttacccaggcaggaacgctggctaagtggtgtgcaagttttactcctcagatcctggttccttgcagctacaygttcgtgttctcctcaactcagctgatttcttgattattttcccagatcagtaatttaacttccatgtgcatgctaattgcctggggagagatgcaaaaaaaaatcttttgaacaggaagaaaatcagcagcatctttattgtacgtgagcattaggaaaggcagtcttctctctgcttcttgttgggacagcctgggcaccattcaggtagtgcttctctctcagaaatggctgttttggtggtgtgacagaaaagggcttaccataaagaccattattg

SEQ ID NO: 43697 - DNA, 570 bp, Chicken  19866894281791_1
ttacaccgaaaggaaaagtaggcttaatatcatctccatatgtctgcaggtgcattgcctgcccgtggctattttttctcccccctctgaggtttttttgtgattcataatctgtcaaaaagcacgtggaaatgaatataccaaaaaacgttaacttggcgcgggcttaaagcagactgagctggttttaatatctacacagataaagagtgaactcaaggactaacacctggcaagctgcaagaaggccaaatgactgtgtctgatgtatactcaccctttcacctacctttggtaacrtagagatagaagaagtcgcagtagaagatggtctgtaccaccccggagaccacagcaatctggtcgtagaacttctcggtgtggtagcgccagacccagttggcgatatagagggcacgatagaggcccaggaagaaaaggtaatgcgttgtgatggtctctgcttcccccgtcttgctgatcatgaagagctgggggaggatagctacggactccaggtagatagagaaggtccagagtatctgtgaggtgcaaatgaaggtgttggtg

SEQ ID NO: 43698 - DNA, 600 bp, Chicken  19866894281799_1
tgaactgctttattaaatattctgcaaagataggtacaaatgcatgtagttgtaagcagtcattagcagcagagcatcttcacaatcagtgttgcaatccactgcaggaaaattcacatctgttttttggattttagaaagcattttgaagtttggggctcctgatgccaagaaaccaatatgtactgcaattatgatttaattctaatacataggcattcgcacctttgaatggttgcagaccattttgagagcctctctaagtgctttaggagctatttaaaactaaatagcctcctkgatttatgtagtgtagaattttaaaagtttaatttcagatattatgaatgtgtataaaagtaagcatagcagacaagtaagaaaaattactacgtatttatttcatgtttatagaagtaaagaaacataycccttttgtttaactgattttggtrggacactgcacacctttgagatgacaataatctcttgctttttttcatattcagattaattcagataattcaatgggtaaatgtaataaaactcttccagtggcatgctttttcaatggcagtgatacaaatagcctcaaaactt

SEQ ID NO: 43699 - DNA, 600 bp, Chicken  19866894281799_2
attttagaaagcattttgaagtttggggctcctgatgccaagaaaccaatatgtactgcaattatgatttaattctaatacataggcattcgcacctttgaatggttgcagaccattttgagagcctctctaagtgctttaggagctatttaaaactaaatagcctcctkgatttatgtagtgtagaattttaaaagtttaatttcagatattatgaatgtgtataaaagtaagcatagcagacaagtaagaaaaattactacgtatttatttcatgtttatagaagtaaagaaacataycccttttgtttaactgattttggtrggacactgcacacctttgagatgacaataatctcttgctttttttcatattcagattaattcagataattcaatgggtaaatgtaataaaactcttccagtggcatgctttttcaatggcagtgatacaaatagcctcaaaacttcttccctctaatactcttagwagaagcatgctcaggtgatgtgcttttcctattgtttgtatctgtattttttcaaggaagagagagaattagaatagataaagcctaatacataatttctcgaatcaaa

SEQ ID NO: 43700 - DNA, 600 bp, Chicken  19866894281799_3
gggctcctgatgccaagaaaccaatatgtactgcaattatgatttaattctaatacataggcattcgcacctttgaatggttgcagaccattttgagagcctctctaagtgctttaggagctatttaaaactaaatagcctcctkgatttatgtagtgtagaattttaaaagtttaatttcagatattatgaatgtgtataaaagtaagcatagcagacaagtaagaaaaattactacgtatttatttcatgtttatagaagtaaagaaacataycccttttgtttaactgattttggtrggacactgcacacctttgagatgacaataatctcttgctttttttcatattcagattaattcagataattcaatgggtaaatgtaataaaactcttccagtggcatgctttttcaatggcagtgatacaaatagcctcaaaacttcttccctctaatactcttagwagaagcatgctcaggtgatgtgcttttcctattgtttgtatctgtattttttcaaggaagagagagaattagaatagataaagcctaatacataatttctcgaatcaaactttacaattccttgaacagcaatt

SEQ ID NO: 43701 - DNA, 600 bp, Chicken  19866894281799_4
taaaagtttaatttcagatattatgaatgtgtataaaagtaagcatagcagacaagtaagaaaaattactacgtatttatttcatgtttatagaagtaaagaaacataycccttttgtttaactgattttggtrggacactgcacacctttgagatgacaataatctcttgctttttttcatattcagattaattcagataattcaatgggtaaatgtaataaaactcttccagtggcatgctttttcaatggcagtgatacaaatagcctcaaaacttcttccctctaatactcttagwagaagcatgctcaggtgatgtgcttttcctattgtttgtatctgtattttttcaaggaagagagagaattagaatagataaagcctaatacataatttctcgaatcaaactttacaattccttgaacagcaattcaattttcattttttcagttttgctaattctttccaatcagtgctgatttatcctataaatatacctgtgcattgttgtcactgattttcactctagaggcagaacattcacacacagtttgctggtgatgcaaaactgtggggagtggctgttacaccggaaggc

SEQ ID NO: 43702 - DNA, 504 bp, Chicken  19866894281812_1
ataccggtccagatcaataccattagacaaaattgggtaatttgtaccatatccaaggaaatactgtaccatttgcatgggcacaacccaatagcaattgaactactagccctccacctgtgagcaaaagcagcaccaacagagagcagaattttggaattccatgaaaacatccactgaaataagaggaaaagttatgacagcctttcagttgggaatttgagaacaagaagcggggtaccagatacagtaaataaagaaatcaagtcttccagaatggaacagaaaactgctttgctraagtctgctgcttcaattacctggttattataaaattgcttcattcaccactcagggcatctctacacacagttcttacagaaccaatctaccaggtagtaatatcagagcactggcaatgaagtttacttgggaaagccatttttccttgtgccaattgtagcattttaaatcttaaaataataaaatgcttatttaatgcct

SEQ ID NO: 43703 - DNA, 599 bp, Chicken  19866894281815_1
  misc_feature (1)..(171): n is any nucleotide
nnnnnnnnnnnnnnnnnnnnnnnnnnnnnnnnnnnnnnnnnnnnnnnnnnnnnnnnnnnnnnnnnnnnnnnnnnnnnnnnnnnnnnnnnnnnnnnnnnnnnnnnnnnnnnnnnnnnnnnnnnnnnnnnnnnnnnnnnnnnnnnnnnnnnnnnnnnnnnnnnnnnnnnnnnntagctaagatctatgcaatatttcagcactgcattaaattttacaagttctaaccattcatagtcacatgctgaaagaaaatctttcagtataaatgtctcagttgtcattacttcagtaagtaattgragttcagttacaatatattccaaagggttttccttttcccaaaactacagactgaattgttacagatggtaattttggcagatggttttatatgaaactgagtttaaaattaggccaaatctgacttgtacaattaaagcaatgaagatttggaaactaagaagtgtcagatttgcgaacaatcagtcttgcggccacagggaataaattttaaaaaatgataataataataataataaaaatcgttcacagttacagaatatattgtgtgtatgagaaatatcttcctaactgcatgt

SEQ ID NO: 43704 - DNA, 599 bp, Chicken  19866894281816_1
  misc_feature (1)..(84): n is any nucleotide
nnnnnnnnnnnnnnnnnnnnnnnnnnnnnnnnnnnnnnnnnnnnnnnnnnnnnnnnnnnnnnnnnnnnnnnnnnnnnnnnnnnnctgcatataagtagaactattcagttcttgtaggttttaaataagatgtgccaaaatgcaacttgctttatttcgtacgcctaaacaatgacaatttcagtcatgatggcagaagtgagtatcagtggtacacacctatcagttctcaattttccatcatacatgtttaatttttgcttatgagatacgaaagtgaggtttcttttgttctttttrgttttttttcttaaaggaaggtgaaaccgccaacwtcaatatcttgcagcaggaatgccctattcaaaaaccacgtttccatatgtcttaagtttcgctttctggcccttaccacagaaagtagtattttaaagcagtgacagaggtgstgtacgcaggctgtttgtttttcattttgatctcaggttaaatggcaagcagcagtgcggtctaccacaatttttattttccctttcttgggctccaggaaagtgctgcagtttgagtcacttgctaaatttaaatttaattatattgga

SEQ ID NO: 43705 - DNA, 599 bp, Chicken  19866894281816_2
  misc_feature (1)..(49): n is any nucleotide
nnnnnnnnnnnnnnnnnnnnnnnnnnnnnnnnnnnnnnnnnnnnnnnnnctgcatataagtagaactattcagttcttgtaggttttaaataagatgtgccaaaatgcaacttgctttatttcgtacgcctaaacaatgacaatttcagtcatgatggcagaagtgagtatcagtggtacacacctatcagttctcaattttccatcatacatgtttaatttttgcttatgagatacgaaagtgaggtttcttttgttctttttrgttttttttcttaaaggaaggtgaaaccgccaacwtcaatatcttgcagcaggaatgccctattcaaaaaccacgtttccatatgtcttaagtttcgctttctggcccttaccacagaaagtagtattttaaagcagtgacagaggtgstgtacgcaggctgtttgtttttcattttgatctcaggttaaatggcaagcagcagtgcggtctaccacaatttttattttccctttcttgggctccaggaaagtgctgcagtttgagtcacttgctaaatttaaatttaattatattggaatgaaaaatgacccttcttcccctaacatattctc

SEQ ID NO: 43706 - DNA, 600 bp, Chicken  19866894281816_3
ctttatttcgtacgcctaaacaatgacaatttcagtcatgatggcagaagtgagtatcagtggtacacacctatcagttctcaattttccatcatacatgtttaatttttgcttatgagatacgaaagtgaggtttcttttgttctttttrgttttttttcttaaaggaaggtgaaaccgccaacwtcaatatcttgcagcaggaatgccctattcaaaaaccacgtttccatatgtcttaagtttcgctttctggcccttaccacagaaagtagtattttaaagcagtgacagaggtgstgtacgcaggctgtttgtttttcattttgatctcaggttaaatggcaagcagcagtgcggtctaccacaatttttattttccctttcttgggctccaggaaagtgctgcagtttgagtcacttgctaaatttaaatttaattatattggaatgaaaaatgacccttcttcccctaacatattctcctgtgagttaataaaatgtttctggttctattttaggtttcttctggtgctgttgttttatttcatttacgcacaagtcaatgaaattccaaatagtgaggccctgaatcatctc

SEQ ID NO: 43707 - DNA, 600 bp, Chicken  19866894281816_4
aaaattttggtttttaggtgcatctgctttttattatttttggcaaccgtctagactgtgttggaatttatgtgtggaaagacctcacagtttatttttgtatgtatgtgtttatatatactaaattctgcatttcttaactgcagcaaatatgtagtagtgcagattaagttacatactgagtgctgtgaataaagtgcactagcaggaaaactggaattttattttctgacttgtgtattattaaaacgtcgtagcattttgattaaatactgaataattcatgtcacaaatgactayatgtaggaactatacccttgctgtaaggaagtctttcccagcttgatgtaccgttggaggaaggaatggtagaactcaagtcactgatgtctggctcagtaacaagtatgttggtttccaggtgtaaaaggatgctactatggagctgtgacaaagggtattcagataagagctgaaagcagggctcaaagggaagttaatctgaatatcaaaatagtcccagaccattacaaatagccaggtcctgttaggaaaagatttggaatttataaacagagtctaagaaaggtcagttatctt

SEQ ID NO: 43708 - DNA, 600 bp, Chicken  19866894281817_1
attggctggaatatataagggtaaaatactttcaatgtgaaaaaatcatttttaaattttgttatttacttgcatctctgcaaacgttattaaaatgtctagagtctttgatcagtaatttttttaaatagtcgcttaaagcctagcagtttaactgaagttgatccattccatagtaactttatatttctggctctgtgtattgttaagtgatgagctaactccttacagctcagtatcatatttggtgttggacaaggttttattttcttgagagaatatgtttgtgagcagtccagrgctatctgttcttcttggaaaactgccctgggaacttcagactgcatttgaattactgccaagaggacttcactgtaaatgcagcagtcttttcccatccttccctccttcagtgcagtgttggtgttcatgtgttggacacctccattttcctgggctgtttacagtctctgttgcactgagctataatctgctctattagttaatgtaatattaaaataaatcacacagttttgcagtctgattcattaacctctgaaatgcttttagaatagattgyttcattatcatattcactcc

SEQ ID NO: 43709 - DNA, 600 bp, Chicken  19866894281817_2
atgtttgtgagcagtccagrgctatctgttcttcttggaaaactgccctgggaacttcagactgcatttgaattactgccaagaggacttcactgtaaatgcagcagtcttttcccatccttccctccttcagtgcagtgttggtgttcatgtgttggacacctccattttcctgggctgtttacagtctctgttgcactgagctataatctgctctattagttaatgtaatattaaaataaatcacacagttttgcagtctgattcattaacctctgaaatgcttttagaatagattgyttcattatcatattcactcctctgtttatgatgaatatggatggatggaatttgtcttattagcaattgcctcaaatgtcactcatgccgaacatggtttgaattattagttattcattatgtagtacttgctaactgctgcaggagaaccagtagagggagcaaatgcttacattattatacaagatttaaacaaatttaatgttcttttgggaccagtgttcacttgaagttgactatttcaaggagatttgggaatcttgagtatctggaaagtttttgtgtatttatttttgtggg

SEQ ID NO: 43710 - DNA, 599 bp, Chicken  19866894281819_1
  misc_feature (1)..(18): n is any nucleotide
nnnnnnnnnnnnnnnnnngcgagctggggtttgaccttggtcctttactactctctgtcttgtgctgctgtggcacagcagaaatgctggattccttccctatcctttctgcattgccaccctgccgctctgctggtcaccgtgtgcccttgaccagctgtgagaggctggtgtggggtacccaggtttgctgtcagtgcctgcagagtgcaaagctgagggatgatgcagagcctggagcagagtgagtgcaggggaagcacagggttctctgtcccacaggctagttggcatgtgtcygcycatcttggcatccccatcagctagccattgctatctgactctggtgactacaatactgccttgttatrtcctggtgactgtctggggtgggcatatcccccatccttaagcctggtgtgcctattggctctgcctgtgcaactgtctcccctctctcagcatccatggtctccgctgctggatctcgagcaagtgccagagcaggggctgggggatggctctggggttctagcacatggctctgtctgtctccctcaycccagcacacggaggccttactgtacgggttccagtcc

SEQ ID NO: 43711 - DNA, 599 bp, Chicken  19866894281819_2
  misc_feature (1)..(15): n is any nucleotide
nnnnnnnnnnnnnnngcgagctggggtttgaccttggtcctttactactctctgtcttgtgctgctgtggcacagcagaaatgctggattccttccctatcctttctgcattgccaccctgccgctctgctggtcaccgtgtgcccttgaccagctgtgagaggctggtgtggggtacccaggtttgctgtcagtgcctgcagagtgcaaagctgagggatgatgcagagcctggagcagagtgagtgcaggggaagcacagggttctctgtcccacaggctagttggcatgtgtcygcycatcttggcatccccatcagctagccattgctatctgactctggtgactacaatactgccttgttatrtcctggtgactgtctggggtgggcatatcccccatccttaagcctggtgtgcctattggctctgcctgtgcaactgtctcccctctctcagcatccatggtctccgctgctggatctcgagcaagtgccagagcaggggctgggggatggctctggggttctagcacatggctctgtctgtctccctcaycccagcacacggaggccttactgtacgggttccagtccatc

SEQ ID NO: 43712 - DNA, 600 bp, Chicken  19866894281819_3
ggcacagcagaaatgctggattccttccctatcctttctgcattgccaccctgccgctctgctggtcaccgtgtgcccttgaccagctgtgagaggctggtgtggggtacccaggtttgctgtcagtgcctgcagagtgcaaagctgagggatgatgcagagcctggagcagagtgagtgcaggggaagcacagggttctctgtcccacaggctagttggcatgtgtcygcycatcttggcatccccatcagctagccattgctatctgactctggtgactacaatactgccttgttatrtcctggtgactgtctggggtgggcatatcccccatccttaagcctggtgtgcctattggctctgcctgtgcaactgtctcccctctctcagcatccatggtctccgctgctggatctcgagcaagtgccagagcaggggctgggggatggctctggggttctagcacatggctctgtctgtctccctcaycccagcacacggaggccttactgtacgggttccagtccatcgccgagaccattgacgtgaactactctgatgtggtgccagggctgatcggcctcatcccccggatcagc

SEQ ID NO: 43713 - DNA, 600 bp, Chicken  19866894281819_4
acagggttctctgtcccacaggctagttggcatgtgtcygcycatcttggcatccccatcagctagccattgctatctgactctggtgactacaatactgccttgttatrtcctggtgactgtctggggtgggcatatcccccatccttaagcctggtgtgcctattggctctgcctgtgcaactgtctcccctctctcagcatccatggtctccgctgctggatctcgagcaagtgccagagcaggggctgggggatggctctggggttctagcacatggctctgtctgtctccctcaycccagcacacggaggccttactgtacgggttccagtccatcgccgagaccattgacgtgaactactctgatgtggtgccagggctgatcggcctcatcccccggatcagcatcagcaacgtgcagctggccgacacggtcatgttcacaataggtgaggcccttactcatgcacaggctkgggtggggggaatccatccaaggttggtcccgcacagctccctgcatcccctatatgcccatccttctttccacaacagtggaaagcaaactgagcagcccaccatacaaagaccgaggg

SEQ ID NO: 43714 - DNA, 438 bp, Chicken  19866894281819_5
caactgtctcccctctctcagcatccatggtctccgctgctggatctcgagcaagtgccagagcaggggctgggggatggctctggggttctagcacatggctctgtctgtctccctcaycccagcacacggaggccttactgtacgggttccagtccatcgccgagaccattgacgtgaactactctgatgtggtgccagggctgatcggcctcatcccccggatcagcatcagcaacgtgcagctggccgacacggtcatgttcacaataggtgaggcccttactcatgcacaggctkgggtggggggaatccatccaaggttggtcccgcacagctccctgcatcccctatatgcccatccttctttccacaacagtggaaagcaaactgagcagcccaccatacaaagaccgagggtctggctgctgcggcgcg

SEQ ID NO: 43715 - DNA, 600 bp, Chicken  19866894281833_1
tgcaatgcattattgccaggtgtggaaagatttaaaaatagcacttctgctaacatagcagaaacatcattacctgtgagctgggcttacttgagaataaaacgtacaaccacagtgaaataaaataaaagccacagtgtgatgggcatggtttcaaacacagcactttcccaatgcttctttcttaggcctcgtctggcagtttgtgacagcacacttactgttggggaatccattattttgtatttagcatttatttactcagtgccccttgtgaactgcagatgttatgggcagcaratgtggaaccgtagcccgttttccagaaggcaaacacyaacgcggaaatatggcattggcttgtagtaatgccttttcaggtttacagctgaaatcctatttttttttccttaaagttatataattaaatacatttgttgctgataggaatataactccaaaatcttaatgagtatacttgtcattagctaatgctgtgacatcagcatcacgatttaaaggccccacacataatttgttattttcagagtcctatcacaatctatcccaccaacatgcttttgaagttcagtccttttt

SEQ ID NO: 43716 - DNA, 600 bp, Chicken  19866894281833_2
tagcacttctgctaacatagcagaaacatcattacctgtgagctgggcttacttgagaataaaacgtacaaccacagtgaaataaaataaaagccacagtgtgatgggcatggtttcaaacacagcactttcccaatgcttctttcttaggcctcgtctggcagtttgtgacagcacacttactgttggggaatccattattttgtatttagcatttatttactcagtgccccttgtgaactgcagatgttatgggcagcaratgtggaaccgtagcccgttttccagaaggcaaacacyaacgcggaaatatggcattggcttgtagtaatgccttttcaggtttacagctgaaatcctatttttttttccttaaagttatataattaaatacatttgttgctgataggaatataactccaaaatcttaatgagtatacttgtcattagctaatgctgtgacatcagcatcacgatttaaaggccccacacataatttgttattttcagagtcctatcacaatctatcccaccaacatgcttttgaagttcagtccttttttccccctctttaagctgaagatgattttgtttgatctt

SEQ ID NO: 43717 - DNA, 600 bp, Chicken  19866894281834_1
ctgtgtaataatctgattcaaagagagtgagaaagatggtggctgactttttgttaacacgggccctgctgagtagcttttatcctggctgactctgaggtgatttaattgcagaatataccctgctggaggaagaagttctttgaaacattcttctcaaatgttcttcacggtgtcttggatgtttcctccgactggcgtctcaatgaccgtcatttctcaccgctgctccacagctcaccccatgttagccagcttactctgtgcaacatgctgcagggcgcagtggagctcgctgcrgagcacaaccaaaaagtgcttgagaacctggccagctcactgaggatcctgaagttccagcacctcctctcctctgaccagtccatcaggcgttcactggttttactccttcaccggctgattcaccatggctctgttagccacgtgtccatgtgtgcttggcctgtacctgacacggttcttcttgttctcattttgagcatgagtgctgggttttggcggtcaggaaatgctcttacatatcacagcagcccatgtggcctttgcagagaggagggagatactcaaagccagaagtca

SEQ ID NO: 43718 - DNA, 600 bp, Chicken  19866894281842_1
taaaaggggacaatcctgtggctcgtgagcagttttatctttccctctaaatggaaaacagtgcaagtcttctgggagatgtagttattttcttctgagaactgagtacctggaaatactgacaatccacagaacgggagcattaactctttaactgccagtgcactacatgatgttatgatgtggaataccaacaacaaaaatcataaaatcatgacagataccatcaccatgaaaaaagcagaaattctctcaatttaagcttctcatctctcaacctttaaacataataacacttayaatatttctaaagccagaacaagtatttcagtccagttttgcagatgagcagacaaaaaataaaaaaatatctcagaggcctgtaaaggggggcagccccaggtgtaggtctgagcattctgtaatatgcacattgaagagtttaggggcataccagcagctgagaaacttccagctacttctgcagtacgtgtaagcaaggtaatgttctccacagcacatcaaatgatactgaaaggtattacagatcatgcaaccacatggaatatcttcagggaactgagatcccactgtgccact

SEQ ID NO: 43719 - DNA, 600 bp, Chicken  19866894281847_1
acttaccggcagtgaatgtattcttctgagaggcagtcggaggctacaatgagaaagaacacatttatttccaacattcccttttgaaagacagtaatgagagtaacattcccttttttccccacagagccataaagctggaggcaaatccatagcagtgcctggaagttaggcagaatacttacttcagtctgctcgatgcaagaattgccttctcaaatctgaaagagaaaagccccacagttaacaaaggatagcacgctcaaaaagaccaaccttgtatttaagtcccaaagctaracagaagccagatgcttcctggtaacactttgtccttctcaaaaggtatttacggccagctcatcccatcctggtttacaaagcacttgctggaatcccactctccctcctttcctcaaaggacttccagcattgattmracacgaagccaatgcaaagagaaaagctggagaaatggaggaccaaaggcatctgtcccccatccccagggataaaagattaggaaatgtgtttatttaaatctaatcaagagagacaaattcaatgctaaaagcaattgcatggaatcagttaagacat

SEQ ID NO: 43720 - DNA, 523 bp, Chicken  19866894281847_2
ggaggcaaatccatagcagtgcctggaagttaggcagaatacttacttcagtctgctcgatgcaagaattgccttctcaaatctgaaagagaaaagccccacagttaacaaaggatagcacgctcaaaaagaccaaccttgtatttaagtcccaaagctaracagaagccagatgcttcctggtaacactttgtccttctcaaaaggtatttacggccagctcatcccatcctggtttacaaagcacttgctggaatcccactctccctcctttcctcaaaggacttccagcattgattmracacgaagccaatgcaaagagaaaagctggagaaatggaggaccaaaggcatctgtcccccatccccagggataaaagattaggaaatgtgtttatttaaatctaatcaagagagacaaattcaatgctaaaagcaattgcatggaatcagttaagacatacccaagcaaaagcttacagttaagtactgagagcaaactgcagcttacacacactgcaggg

SEQ ID NO: 43721 - DNA, 522 bp, Chicken  19866894281847_3
gaggcaaatccatagcagtgcctggaagttaggcagaatacttacttcagtctgctcgatgcaagaattgccttctcaaatctgaaagagaaaagccccacagttaacaaaggatagcacgctcaaaaagaccaaccttgtatttaagtcccaaagctaracagaagccagatgcttcctggtaacactttgtccttctcaaaaggtatttacggccagctcatcccatcctggtttacaaagcacttgctggaatcccactctccctcctttcctcaaaggacttccagcattgattmracacgaagccaatgcaaagagaaaagctggagaaatggaggaccaaaggcatctgtcccccatccccagggataaaagattaggaaatgtgtttatttaaatctaatcaagagagacaaattcaatgctaaaagcaattgcatggaatcagttaagacatacccaagcaaaagcttacagttaagtactgagagcaaactgcagcttacacacactgcaggg

SEQ ID NO: 43722 - DNA, 600 bp, Chicken  19866894281848_1
gcaaactttagaaggcaattgattgaaatctcctttctgaggcacctggagacacacctctgtgaacagctcgcagaggagacaagtgctccctcctgggctgccctagacactactggtgcctaggtggggcagagggtgtggtcagggctgtgtcctcatcacactgctgccttaatcatttattttcctttctattcccttcccatactccctgtggaatattcactgtgtgtgaaaggataaaatccaggcaatgtgtatggaagaaagtccaatatttttagtaatctgtctttrttatgaaaccacaaatggaaataaatggagtgtaattcatgtaggtaaggaaagttagttcatcagtgttatcacgatggatcatttactagggaagacaaattgatcactcttacaccctcacattaccaattttagaaatactttattatatttctcaattgctgtttactcttacaaagatcatgtatcttgtgatgatttaggttgtgcagtcactaagtgtaaatggtatcaccaactctgccaagtaaagagaatgaagttcctaacagacctgatgttgcatactgtgatcta

SEQ ID NO: 43723 - DNA, 600 bp, Chicken  19866894281853_1
actgaaatttggcacatgggaggaaacattattgtggaggtaatctgcaaacaaacaaataatattccaaatctaatatatttttgtataagcaatactcagattgtagccattagtaactctttcttcgccaatgcatgcatttccacagaagattcaatttatactcataataaaactacaattacattgaagcttactgagaaagcagaacatacaataattggaaatacggacaagcttaaaaatgaacgatatacagtgtcttttcattcagcttacttaggcatttctgcaaayaaaatataaaaatagttgataggaatagagaaaatgatggctcatatacttcagttttctgcatccagcagacctagatgctttgcaaggggacatgagaacctcaaactagttakatacaatattattttctctccattctcttatcccagcatgattttcctcctaaaatgctacatagtttattattagcttaaatcctaaatcatgttttatccttcctcctattgtgttttgttaggtagaactggaaatcagtaataccatgaatcaccttgctaatcacataaatgccccatc

SEQ ID NO: 43724 - DNA, 600 bp, Chicken  19866894281853_2
taactctttcttcgccaatgcatgcatttccacagaagattcaatttatactcataataaaactacaattacattgaagcttactgagaaagcagaacatacaataattggaaatacggacaagcttaaaaatgaacgatatacagtgtcttttcattcagcttacttaggcatttctgcaaayaaaatataaaaatagttgataggaatagagaaaatgatggctcatatacttcagttttctgcatccagcagacctagatgctttgcaaggggacatgagaacctcaaactagttakatacaatattattttctctccattctcttatcccagcatgattttcctcctaaaatgctacatagtttattattagcttaaatcctaaatcatgttttatccttcctcctattgtgttttgttaggtagaactggaaatcagtaataccatgaatcaccttgctaatcacataaatgccccatcactccattatttttaataatatgtgttttgtgctttagctttttttttttttcaaagaaaatgtgtttgtcagcaagaagtgagctctgtttcagctttataatccccccttcttt

SEQ ID NO: 43725 - DNA, 600 bp, Chicken  19866894281855_1
aaggcatgtctgaggctttcatttagttgtttatggagctgcttacacgttctctgacagggctcctgctgcaagaacatcctttttgccattagattacacttaaatgcatgtttctgttttgaaagtcaagagtcatagtcaagcaggaatagatcataaactagcaaatctgcaaggcatctaccccaaacaagattctctctataggcactaagcaacaaaagtaatacaataaaaaaagacaaccccacatccaaaccaccagacatccataaaaaaaatgaaatataaaactgkctgcatgcttgctctctctttttcctcccccttatttgttttcattttctcatactgtcttttgagtctcgtgatagaactgtagctctctgccttcaaaaaaaaamcaacaaaacccgagccaacagtgccagaaaaccctcgaggaggtgacaatggaaaataacacatctgtgattaaaataaataagagagaaatggagaagaaataatcgttggagaggttatagggaagaattcgtgatttcaattagcttcaacgtttctgttccttcccgtctttcaagaaccagtttttct

SEQ ID NO: 43726 - DNA, 600 bp, Chicken  19866894281855_2
tgcatgtttctgttttgaaagtcaagagtcatagtcaagcaggaatagatcataaactagcaaatctgcaaggcatctaccccaaacaagattctctctataggcactaagcaacaaaagtaatacaataaaaaaagacaaccccacatccaaaccaccagacatccataaaaaaaatgaaatataaaactgkctgcatgcttgctctctctttttcctcccccttatttgttttcattttctcatactgtcttttgagtctcgtgatagaactgtagctctctgccttcaaaaaaaaamcaacaaaacccgagccaacagtgccagaaaaccctcgaggaggtgacaatggaaaataacacatctgtgattaaaataaataagagagaaatggagaagaaataatcgttggagaggttatagggaagaattcgtgatttcaattagcttcaacgtttctgttccttcccgtctttcaagaaccagtttttctgcagcagcagatggacagagaccatagcctgcagcaccgtcctgtgacarccctattctccctcccagacactgctgttagtaaatagatttacacattctccaatc

SEQ ID NO: 43727 - DNA, 600 bp, Chicken  19866894281855_3
catactgtcttttgagtctcgtgatagaactgtagctctctgccttcaaaaaaaaamcaacaaaacccgagccaacagtgccagaaaaccctcgaggaggtgacaatggaaaataacacatctgtgattaaaataaataagagagaaatggagaagaaataatcgttggagaggttatagggaagaattcgtgatttcaattagcttcaacgtttctgttccttcccgtctttcaagaaccagtttttctgcagcagcagatggacagagaccatagcctgcagcaccgtcctgtgacarccctattctccctcccagacactgctgttagtaaatagatttacacattctccaatctccacacatctttctgccgaataattaaaagcaggatgattagtttattgagtggaaggaggaacttttttattgaggtccatccacgattttatcagggccagcacttttacggttgtcatgagggtgcaggcatccaatttttcttatctgcctgattaatacaaacgctgtttcaggacgcattaattaacagatacaaatctacgttctcatggaaggatcaatacagagaagaaaaga

SEQ ID NO: 43728 - DNA, 600 bp, Chicken  19866894281859_1
actgactacagggaatggacctgtaacgacacacagaacatactgaaatttaatacgcatcaaaaggaagcatttatcagactagacaggaacatcagaaatataatttaatattttaactggggtacattacttcgtaggaggaggaggagagggccagaagccacagcactgcaaacatgacacagagatacaattccatcctgaacaaaaccattatacacagaggttcagtttcatgttttacttaagccaatttaggggtatagcaaggccaaacagggtggcatatcctgaccrcctcccttatatctgcaccagcagttctgtggccagagaacacttatccagctgaaaacaacatcttgatttactcttttttcagacacggttaggttcagctgagtgaatgcactggtgcagactgccacatggctgcatggtcaggaatccagcacagcagtgctggcaggaacatgcactgggggaaaagattgccctttttggcagtagtttggtatttcatcggctaaagatgactgaaactatactttgggcaagatacagagatagtaaatgatcgtcacgtcagcaaaacat

SEQ ID NO: 43729 - DNA, 599 bp, Chicken  19866894281861_1
  misc_feature (1)..(227): n is any nucleotide
nnnnnnnnnnnnnnnnnnnnnnnnnnnnnnnnnnnnnnnnnnnnnnnnnnnnnnnnnnnnnnnnnnnnnnnnnnnnnnnnnnnnnnnnnnnnnnnnnnnnnnnnnnnnnnnnnnnnnnnnnnnnnnnnnnnnnnnnnnnnnnnnnnnnnnnnnnnnnnnnnnnnnnnnnnnnnnnnnnnnnnnnnnnnnnnnnnnnnnnnnnnnnnnnnnnnnnnnnnnnnnnnnnnactgcccatgcaaaaaaaaaaaaagaaaaaaaaaaagaaaaaaaggtaggaaaatgaaaatgtgcaagtgatrtgacagagtttgccagacactcaagcacacctgagaaaatgtgctgyaastctgttccccctgagctcagcyccaggaatggttacacctggtttgtcacttgcagcagccccatggggaaggctgtgtgtggctgtgtagttcttgacctgattgcatcgtggtgcgacgcccgcagccaccaggagttgggtgctgatgacttttgcaaacccagcaacacccacttggttttcctcagtaaatatccaggacgtctgcttctcttgcttcaaaatgctctgactctaaatgattgc

SEQ ID NO: 43730 - DNA, 599 bp, Chicken  19866894281861_2
  misc_feature (1)..(180): n is any nucleotide
nnnnnnnnnnnnnnnnnnnnnnnnnnnnnnnnnnnnnnnnnnnnnnnnnnnnnnnnnnnnnnnnnnnnnnnnnnnnnnnnnnnnnnnnnnnnnnnnnnnnnnnnnnnnnnnnnnnnnnnnnnnnnnnnnnnnnnnnnnnnnnnnnnnnnnnnnnnnnnnnnnnnnnnnnnnnnnnnnnnnactgcccatgcaaaaaaaaaaaaagaaaaaaaaaaagaaaaaaaggtaggaaaatgaaaatgtgcaagtgatrtgacagagtttgccagacactcaagcacacctgagaaaatgtgctgyaastctgttccccctgagctcagcyccaggaatggttacacctggtttgtcacttgcagcagccccatggggaaggctgtgtgtggctgtgtagttcttgacctgattgcatcgtggtgcgacgcccgcagccaccaggagttgggtgctgatgacttttgcaaacccagcaacacccacttggttttcctcagtaaatatccaggacgtctgcttctcttgcttcaaaatgctctgactctaaatgattgcatcggccgcaccctagccaggaggaaactcagccttttgttgcactc

SEQ ID NO: 43731 - DNA, 599 bp, Chicken  19866894281861_3
  misc_feature (1)..(177): n is any nucleotide
nnnnnnnnnnnnnnnnnnnnnnnnnnnnnnnnnnnnnnnnnnnnnnnnnnnnnnnnnnnnnnnnnnnnnnnnnnnnnnnnnnnnnnnnnnnnnnnnnnnnnnnnnnnnnnnnnnnnnnnnnnnnnnnnnnnnnnnnnnnnnnnnnnnnnnnnnnnnnnnnnnnnnnnnnnnnnnnnnactgcccatgcaaaaaaaaaaaaagaaaaaaaaaaagaaaaaaaggtaggaaaatgaaaatgtgcaagtgatrtgacagagtttgccagacactcaagcacacctgagaaaatgtgctgyaastctgttccccctgagctcagcyccaggaatggttacacctggtttgtcacttgcagcagccccatggggaaggctgtgtgtggctgtgtagttcttgacctgattgcatcgtggtgcgacgcccgcagccaccaggagttgggtgctgatgacttttgcaaacccagcaacacccacttggttttcctcagtaaatatccaggacgtctgcttctcttgcttcaaaatgctctgactctaaatgattgcatcggccgcaccctagccaggaggaaactcagccttttgttgcactcagc

SEQ ID NO: 43732 - DNA, 599 bp, Chicken  19866894281861_4
  misc_feature (1)..(155): n is any nucleotide
nnnnnnnnnnnnnnnnnnnnnnnnnnnnnnnnnnnnnnnnnnnnnnnnnnnnnnnnnnnnnnnnnnnnnnnnnnnnnnnnnnnnnnnnnnnnnnnnnnnnnnnnnnnnnnnnnnnnnnnnnnnnnnnnnnnnnnnnnnnnnnnnnnnnnnnnnnnactgcccatgcaaaaaaaaaaaaagaaaaaaaaaaagaaaaaaaggtaggaaaatgaaaatgtgcaagtgatrtgacagagtttgccagacactcaagcacacctgagaaaatgtgctgyaastctgttccccctgagctcagcyccaggaatggttacacctggtttgtcacttgcagcagccccatggggaaggctgtgtgtggctgtgtagttcttgacctgattgcatcgtggtgcgacgcccgcagccaccaggagttgggtgctgatgacttttgcaaacccagcaacacccacttggttttcctcagtaaatatccaggacgtctgcttctcttgcttcaaaatgctctgactctaaatgattgcatcggccgcaccctagccaggaggaaactcagccttttgttgcactcagctttcgcatccacttttatctca

SEQ ID NO: 43733 - DNA, 600 bp, Chicken  19866894281861_5
ctgtggcaggcatcagggagaggagcagtgcctgcaatgctccttgctaagctagcgaacccctcttctagatcagaataaagatatccatgtgacctgatctaaatcagacttgaaatcacctgcttaatcagtgctctgtcgacagctctttacttgtctctaatgcatgtactgtggtcttgccaagcagtagttgatctggggaccttgagtaaaggggaaatcactggagcagaaagctgaagtacacacagtcaaggtgtttgtgttttcctctatatgtccatgagtcatagkatagaggtagtcacaagatgctctaggcaactccttttattagaaattgcgctccaaatacccatttccaggaagcaaccttgcacaaagggtgagcttcaatarcattaggaaataaaaccaattcttccattgttcttccaatataaagaccagtgcaaaaccagacattacatttttcatcccagattaaacagtgtatgcatgctctgagggggggaaaagaatcacaaagaaaaaacgcaaaaaaaaaagccttgcaaaagaatgcatggcaaagttgagttccaacagctgctc

SEQ ID NO: 43734 - DNA, 600 bp, Chicken  19866894281861_6
atcagacttgaaatcacctgcttaatcagtgctctgtcgacagctctttacttgtctctaatgcatgtactgtggtcttgccaagcagtagttgatctggggaccttgagtaaaggggaaatcactggagcagaaagctgaagtacacacagtcaaggtgtttgtgttttcctctatatgtccatgagtcatagkatagaggtagtcacaagatgctctaggcaactccttttattagaaattgcgctccaaatacccatttccaggaagcaaccttgcacaaagggtgagcttcaatarcattaggaaataaaaccaattcttccattgttcttccaatataaagaccagtgcaaaaccagacattacatttttcatcccagattaaacagtgtatgcatgctctgagggggggaaaagaatcacaaagaaaaaacgcaaaaaaaaaagccttgcaaaagaatgcatggcaaagttgagttccaacagctgctctggcattagccttctagtccacaggtgagtaccttcagaaccagcacagtgtatccaaatgttcttcatggccttgtagggggggatttaagtcttttgtatgct

SEQ ID NO: 43735 - DNA, 600 bp, Chicken  19866894281862_1
gacaggagccagtatctccagtgggagaagctactgagtttctaaggacagatgcaaggcattgacatgaagagcaaaaggtcaaatgggctatggatttttagatcacagacagaatcaaataataggacacaattaagacatccggggaaaagaacatacaggcaatacagcattggtgatgctttcacagaatatatttggggtgaagctcagagaaataaacctaacctcagtgtacttacagcaataactgcaaatgatgtcattggagggctgccataatagactctaaagacrtgtcagcattcaaatctaacaagcacggaaaagcctaaccagcaataatgctaccaagagcaaagtgacctggtctcaccctgctgcttgtcaggacagacttggtgtctgctaggggctcactgtggggagaactgcaaatcccaggagatgtgaaaatgcatctgtaaggcacatcccacgtcatgttgtgccctgggaacaagcttctgagtgccaggaagcccctgagccgccaacaggctaagagacctggtgagtcccaagaaacttacagaaaaactgtcaggaaactatgag

SEQ ID NO: 43736 - DNA, 600 bp, Chicken  19866894281862_2
aattaaagggtgatctatgtttcatagcatctgctttatcatgatttgattaaacagattcagatagtagcaagcagattctctgtcagagttggagataaacaacacaaaacctctctgaccctggcatagctgcagtgttcacatgggtgactggaaattgtcctattaaaggtttctcatgtctggtttccatcttcaggttcacatccaccactgagtgccaacaggcaaccagagacagaaatgtgtatttaacaacttaaaacccatgataactatattaggctaaatcctgtrttcactactctttactactcttctccawacatgcatatttaggtaacagacttgcttacaaatctttaaataattgaatacctttaacattcaggcaactgtaattcaattttaaagccraagatacatttccagtccttcaaagaaagttgtcagcttgttctgcctgtaccctgcattacagaaagccataagaactcttccaactaaatcagtgtttcctgcataaatgaaatgctgcacgttcttgcctgtyactctcttactggggctgctctgatgtagccaaattttcttcta

SEQ ID NO: 43737 - DNA, 600 bp, Chicken  19866894281862_3
atctgctttatcatgatttgattaaacagattcagatagtagcaagcagattctctgtcagagttggagataaacaacacaaaacctctctgaccctggcatagctgcagtgttcacatgggtgactggaaattgtcctattaaaggtttctcatgtctggtttccatcttcaggttcacatccaccactgagtgccaacaggcaaccagagacagaaatgtgtatttaacaacttaaaacccatgataactatattaggctaaatcctgtrttcactactctttactactcttctccawacatgcatatttaggtaacagacttgcttacaaatctttaaataattgaatacctttaacattcaggcaactgtaattcaattttaaagccraagatacatttccagtccttcaaagaaagttgtcagcttgttctgcctgtaccctgcattacagaaagccataagaactcttccaactaaatcagtgtttcctgcataaatgaaatgctgcacgttcttgcctgtyactctcttactggggctgctctgatgtagccaaattttcttctaagtcagtgaagaaaagcccactacaacc

SEQ ID NO: 43738 - DNA, 600 bp, Chicken  19866894281862_4
accctggcatagctgcagtgttcacatgggtgactggaaattgtcctattaaaggtttctcatgtctggtttccatcttcaggttcacatccaccactgagtgccaacaggcaaccagagacagaaatgtgtatttaacaacttaaaacccatgataactatattaggctaaatcctgtrttcactactctttactactcttctccawacatgcatatttaggtaacagacttgcttacaaatctttaaataattgaatacctttaacattcaggcaactgtaattcaattttaaagccraagatacatttccagtccttcaaagaaagttgtcagcttgttctgcctgtaccctgcattacagaaagccataagaactcttccaactaaatcagtgtttcctgcataaatgaaatgctgcacgttcttgcctgtyactctcttactggggctgctctgatgtagccaaattttcttctaagtcagtgaagaaaagcccactacaaccacaacaactacaaccagaacaacgcagctgcagctcactcaactcagcttgggttatttgtattaaattccatcttagcatgccaaggtaca

SEQ ID NO: 43739 - DNA, 600 bp, Chicken  19866894281862_5
aacaacttaaaacccatgataactatattaggctaaatcctgtrttcactactctttactactcttctccawacatgcatatttaggtaacagacttgcttacaaatctttaaataattgaatacctttaacattcaggcaactgtaattcaattttaaagccraagatacatttccagtccttcaaagaaagttgtcagcttgttctgcctgtaccctgcattacagaaagccataagaactcttccaactaaatcagtgtttcctgcataaatgaaatgctgcacgttcttgcctgtyactctcttactggggctgctctgatgtagccaaattttcttctaagtcagtgaagaaaagcccactacaaccacaacaactacaaccagaacaacgcagctgcagctcactcaactcagcttgggttatttgtattaaattccatcttagcatgccaaggtacaactcaatgctcaggaagcaatacatttcatggggactgcacaaaggatctactcttagggtaatgttgaacaagggcttcatccatgaaattgtaatttctgcttgcaaaaaaattctcctgagcaccacagtata

SEQ ID NO: 43740 - DNA, 600 bp, Chicken  19866894281862_6
tcatggggactgcacaaaggatctactcttagggtaatgttgaacaagggcttcatccatgaaattgtaatttctgcttgcaaaaaaattctcctgagcaccacagtataaatgctgaccaataaccactagatacagacatatggtaaccatgcatgataataattctttcctaatatgatgaagtaccaagttcaaagactaattaaaacagcctgaagaactgctcctaaacacatatgcttatatataaatgtgtcataaattatttcaggtaatacatgcataaattcaaatggmagaatgactataagtagtgatgttgcactcactgggactgtgtttagaaaaacaggacagcaaagtcatatatttaaattaattttacgtagatgtgggagaatagcraagagtacatcattgcagactgcagatgatagcaacagaatacactgagtgttacttaacttaagtaactaagttacttaactaagtaacttaacactgtgtcaatgccgaagtagtataaagaagataaygtactaaatttatattcgaaaacagtgttgccagaagaagctctggtgaggacgcacctcc

SEQ ID NO: 43741 - DNA, 600 bp, Chicken  19866894281862_7
taaatgctgaccaataaccactagatacagacatatggtaaccatgcatgataataattctttcctaatatgatgaagtaccaagttcaaagactaattaaaacagcctgaagaactgctcctaaacacatatgcttatatataaatgtgtcataaattatttcaggtaatacatgcataaattcaaatggmagaatgactataagtagtgatgttgcactcactgggactgtgtttagaaaaacaggacagcaaagtcatatatttaaattaattttacgtagatgtgggagaatagcraagagtacatcattgcagactgcagatgatagcaacagaatacactgagtgttacttaacttaagtaactaagttacttaactaagtaacttaacactgtgtcaatgccgaagtagtataaagaagataaygtactaaatttatattcgaaaacagtgttgccagaagaagctctggtgaggacgcacctccagttctatgttcagttttgggcccctcactactagaaagacattgaggccctggaacgtgtccagagaagggcaacaaagtggtgaggagtctggagcacaaatctta

SEQ ID NO: 43742 - DNA, 600 bp, Chicken  19866894281862_8
atgcttatatataaatgtgtcataaattatttcaggtaatacatgcataaattcaaatggmagaatgactataagtagtgatgttgcactcactgggactgtgtttagaaaaacaggacagcaaagtcatatatttaaattaattttacgtagatgtgggagaatagcraagagtacatcattgcagactgcagatgatagcaacagaatacactgagtgttacttaacttaagtaactaagttacttaactaagtaacttaacactgtgtcaatgccgaagtagtataaagaagataaygtactaaatttatattcgaaaacagtgttgccagaagaagctctggtgaggacgcacctccagttctatgttcagttttgggcccctcactactagaaagacattgaggccctggaacgtgtccagagaagggcaacaaagtggtgaggagtctggagcacaaatcttacgaggagcagctgaaagaactgggattgttcatctgggagaagaagaggcttaggggagaccttattgctctctacaactacctgaaaggaggttgtgatgagccttttcttccaaataacagtgatatga

SEQ ID NO: 43743 - DNA, 599 bp, Chicken  19866894281868_1
  misc_feature (1)..(78): n is any nucleotide
nnnnnnnnnnnnnnnnnnnnnnnnnnnnnnnnnnnnnnnnnnnnnnnnnnnnnnnnnnnnnnnnnnnnnnnnnnnnnnatattccagtacattttgttgccatgcaacaaatggcagcagaggggcagtctgacaaaatggcgtctgacatggaagtgcatatgaagcaaagctgtgacacttaattcctccatgtggaaaaaatggcacccactgacgttcactgatgcttgcttaatgttggtagaaatagaattaaagaaagaacattgtaaagcaactgaaatttaagaaaagtgyacacagatcaggtgcatttacaattactggtctttaaaaaggacttacacataatttaaaaaatgttttaaattcagttgtattcctacctgcaaggacttgatttaacattttggattaagctgtgactgccataacctcttaattttgtggctactgtaagtgccagttgcaattgcagcctcwgttctgggaaattcaggaattctttttgtacgggatcaggagcccagaggcatgaagaggtagggaaggaagcagaatcatgctgccactccatttcaatctaagataaataa

SEQ ID NO: 43744 - DNA, 600 bp, Chicken  19866894281868_2
tcctccatgtggaaaaaatggcacccactgacgttcactgatgcttgcttaatgttggtagaaatagaattaaagaaagaacattgtaaagcaactgaaatttaagaaaagtgyacacagatcaggtgcatttacaattactggtctttaaaaaggacttacacataatttaaaaaatgttttaaattcagttgtattcctacctgcaaggacttgatttaacattttggattaagctgtgactgccataacctcttaattttgtggctactgtaagtgccagttgcaattgcagcctcwgttctgggaaattcaggaattctttttgtacgggatcaggagcccagaggcatgaagaggtagggaaggaagcagaatcatgctgccactccatttcaatctaagataaataaaatctttgtcctataccctgtgttgaccatatgaccttgtatgacgttgtaatgacacgctgtccagaggctcatagaaaacctagctgcattttgtagaatccagaatggctgacactggcagggacatttaggcatcatctggtccagccccctgctcaagcagagccagctacagcaggttgct

SEQ ID NO: 43745 - DNA, 600 bp, Chicken  19866894281884_1
ccaataagcttctaattacacaggataattaatggaatacaaaggcaaatttgcccattaattctaatgtatgagaccacagaatacatctgtaccaactgctaaactgacttcatttcagttttattcccactgttgagtattacttggcttatagtttgggatttaataggacttgtatcttgaacattagagctgaaagttttcgtctcacgtggacttcctgaaattaaattaacaattttaaatagaaggatgaggcaggagggcaagaaagagtccaagcacaatgctagagckgtcctattttgaaggattctgaggaagaggtgtcaaagttgagactgcagacaaatacagcacgcgtgaccagtrcatctgttgcatcatcatgtcactcagccaacatgttcctcaaaataagtgggcagatattttgycccaaagagagtttcttctactgagtgctttatycatgtaggtttgcttaaagccagcccatctgtccatgcacaagacccatatggcagcctgtacagtccttgcacagcaaggaggaacagttattttctggcagagaaagctgcagggtgcaatcaa

SEQ ID NO: 43746 - DNA, 600 bp, Chicken  19866894281884_2
accacagaatacatctgtaccaactgctaaactgacttcatttcagttttattcccactgttgagtattacttggcttatagtttgggatttaataggacttgtatcttgaacattagagctgaaagttttcgtctcacgtggacttcctgaaattaaattaacaattttaaatagaaggatgaggcaggagggcaagaaagagtccaagcacaatgctagagckgtcctattttgaaggattctgaggaagaggtgtcaaagttgagactgcagacaaatacagcacgcgtgaccagtrcatctgttgcatcatcatgtcactcagccaacatgttcctcaaaataagtgggcagatattttgycccaaagagagtttcttctactgagtgctttatycatgtaggtttgcttaaagccagcccatctgtccatgcacaagacccatatggcagcctgtacagtccttgcacagcaaggaggaacagttattttctggcagagaaagctgcagggtgcaatcaatcacctaatcgatatgtgcatgacactacatctcagggatcccctgtgatctccaaagcttgctatttacagcag

SEQ ID NO: 43747 - DNA, 600 bp, Chicken  19866894281884_3
tattacttggcttatagtttgggatttaataggacttgtatcttgaacattagagctgaaagttttcgtctcacgtggacttcctgaaattaaattaacaattttaaatagaaggatgaggcaggagggcaagaaagagtccaagcacaatgctagagckgtcctattttgaaggattctgaggaagaggtgtcaaagttgagactgcagacaaatacagcacgcgtgaccagtrcatctgttgcatcatcatgtcactcagccaacatgttcctcaaaataagtgggcagatattttgycccaaagagagtttcttctactgagtgctttatycatgtaggtttgcttaaagccagcccatctgtccatgcacaagacccatatggcagcctgtacagtccttgcacagcaaggaggaacagttattttctggcagagaaagctgcagggtgcaatcaatcacctaatcgatatgtgcatgacactacatctcagggatcccctgtgatctccaaagcttgctatttacagcagccactgatgtgtcagacttgcaacatatggacaaactttctatttcatctacgcttcacagagat

SEQ ID NO: 43748 - DNA, 600 bp, Chicken  19866894281884_4
cttgtatcttgaacattagagctgaaagttttcgtctcacgtggacttcctgaaattaaattaacaattttaaatagaaggatgaggcaggagggcaagaaagagtccaagcacaatgctagagckgtcctattttgaaggattctgaggaagaggtgtcaaagttgagactgcagacaaatacagcacgcgtgaccagtrcatctgttgcatcatcatgtcactcagccaacatgttcctcaaaataagtgggcagatattttgycccaaagagagtttcttctactgagtgctttatycatgtaggtttgcttaaagccagcccatctgtccatgcacaagacccatatggcagcctgtacagtccttgcacagcaaggaggaacagttattttctggcagagaaagctgcagggtgcaatcaatcacctaatcgatatgtgcatgacactacatctcagggatcccctgtgatctccaaagcttgctatttacagcagccactgatgtgtcagacttgcaacatatggacaaactttctatttcatctacgcttcacagagataccctacctgactctacttctgcttgcaccatat

SEQ ID NO: 43749 - DNA, 600 bp, Chicken  19866894281892_1
tgtgcattacacaaacaaatttatgaagaattcacactgttaatgcatgaaaatactgctactgcgccaaaactcttctggtgttggacactgatggaagacgacagtatcctgagtattagacatgctgccttggcctccctaatggtcctttatttctgcaagtactccctaaagtcattaagcaaagggatcaaatacagagctacttgtacactggcagaaattgggagttcaagtgggaacagaatcgctcaagagatgaagatgtcagagttcacagactaaggcaatgacaarctaggctgtgatggaaaattctgttttgaatggcagtaaatatcctttgggttactcctgcgtgaaaacccttcacttatgtgctttcttattcataatacatggagttaaactgtttatttttatctgagaaaacaatactttcaatttttttttcaaaatacagttagatgaccgtcactatgcagaccacacaccaaattaaacactggatgaaggtcctactacgcatttgtcttagtgaggcttttaaacaaccactgataaatcatgtattgataaatgaaaaaaaaataagtc

SEQ ID NO: 43750 - DNA, 599 bp, Chicken  19866894281893_1
  misc_feature (1)..(65): n is any nucleotide
nnnnnnnnnnnnnnnnnnnnnnnnnnnnnnnnnnnnnnnnnnnnnnnnnnnnnnnnnnnnnnnnnacagatgggtgggttgtttttttttttttttttggcatccagagctcaaaatagatcttcagatttgaatgtcctgctctttaaatgatgggtacgtaaggcccatcatgtcccgtgttgttgtatggaactacatcccttccggatccagatggaaaactgatcaccccatgaagtgctgtgggctatagaagtatgatatttttctgagcaacatctctgcttgtaagagaaygcccacaatacatggctggtrttgaagtgcagccccccagcattctggtaagctgcagtgcccttcagttgagtactttgtcatatcttccttaagcttgtccttcgtagcgttggtttctactgtattgtctgatatcacttgccagagaacttcccctcagtattttaacctttaggaatttatattacgactgtttaattactctgctttatatgcagcctatgtctaaatcagttacacttgtcacatggtaaattgctgaggtagccatgctgccttttaatgctttggaatgt

SEQ ID NO: 43751 - DNA, 599 bp, Chicken  19866894281893_2
  misc_feature (1)..(44): n is any nucleotide
nnnnnnnnnnnnnnnnnnnnnnnnnnnnnnnnnnnnnnnnnnnnacagatgggtgggttgtttttttttttttttttggcatccagagctcaaaatagatcttcagatttgaatgtcctgctctttaaatgatgggtacgtaaggcccatcatgtcccgtgttgttgtatggaactacatcccttccggatccagatggaaaactgatcaccccatgaagtgctgtgggctatagaagtatgatatttttctgagcaacatctctgcttgtaagagaaygcccacaatacatggctggtrttgaagtgcagccccccagcattctggtaagctgcagtgcccttcagttgagtactttgtcatatcttccttaagcttgtccttcgtagcgttggtttctactgtattgtctgatatcacttgccagagaacttcccctcagtattttaacctttaggaatttatattacgactgtttaattactctgctttatatgcagcctatgtctaaatcagttacacttgtcacatggtaaattgctgaggtagccatgctgccttttaatgctttggaatgttttttagtttgcagctcttcc

SEQ ID NO: 43752 - DNA, 600 bp, Chicken  19866894281893_3
gagaacttcccctcagtattttaacctttaggaatttatattacgactgtttaattactctgctttatatgcagcctatgtctaaatcagttacacttgtcacatggtaaattgctgaggtagccatgctgccttttaatgctttggaatgttttttagtttgcagctcttccaaacaggcaccagattcccctgctgaagattgcagaatactgaacatatttggctcttggccactgcagctccactaagtctaattatgagcatattgcttataaaaactgttctgtatttaacatraatggaagatgcacagtttctgcagaaatgcttttgttttaccacttaatcactgagagcttctaaatctgtgcaggtgcgcctttactgatagcttcaggtatttctgtgctcctgcatcttgaccagcttcataataccacttctgcttatagagtgatggattgcttttggaggacaaagctgcagaaacttgcctaggaattgttgtcaagattttgcttttagatttttgaccttgattaaacattgtcttaaatgtcctaacttgccagaagactacatcagttttactgtgtg

SEQ ID NO: 43753 - DNA, 599 bp, Chicken  19866894281897_1
  misc_feature (1)..(120): n is any nucleotide
nnnnnnnnnnnnnnnnnnnnnnnnnnnnnnnnnnnnnnnnnnnnnnnnnnnnnnnnnnnnnnnnnnnnnnnnnnnnnnnnnnnnnnnnnnnnnnnnnnnnnnnnnnnnnnnnnnnnnnnntggctatgggggtttgtaacgcaactcaaagcaaacactgagaatataaaatcacatttgttcaaacaggattagagagttgattctagcagtgcttccaaggatttcaaagagaaaatagctttttttttttcttttttcttttttttttcagttaggaagatggaaaatatgtgctgyctggtcaatgctgttgctttgtaaggtcccagaggtgccgcgcagcccatgctcaggctgtgcagcagctcagaggtgccattcatttttcacaatctctcctctctctgcagctctctccagttctgtctttgctcagcaattgcttttgctgtgttttgttaacgtggactggaagccaacaaagaactaaagcctatttctggcatggaatcccagaatcagagaatatcccaagttggaagggacctctaagaatcgttgagtccaactgatggatgacatacgacactgatgga

SEQ ID NO: 43754 - DNA, 526 bp, Chicken  19866894281897_2
gtgccgcgcagcccatgctcaggctgtgcagcagctcagaggtgccattcatttttcacaatctctcctctctctgcagctctctccagttctgtctttgctcagcaattgcttttgctgtgttttgttaacgtggactggaagccaacaaagaactaaagcctatttctggcatggaatcccagaatcagagaatatcccaagttggaagggacctctaagaatcgttgagtccaactgatggatgacatacgacactgatggaaaacgtaattactccatgcttcttcatgtatgctyyttgcaggatgagtataagatggagataagaaagtgggaggtttggtgttacagcaccacagacttcactagggcrataacattgcctttcacagatgcacctctgaaccctccctgcatacctccatccctccctgtgcctcctgcaaaggtcacagacactttttgccaacatttgccagcaaacatccagcccagtgctggaaacatcccaaagcacagagca

SEQ ID NO: 43755 - DNA, 525 bp, Chicken  19866894281897_3
tgccgcgcagcccatgctcaggctgtgcagcagctcagaggtgccattcatttttcacaatctctcctctctctgcagctctctccagttctgtctttgctcagcaattgcttttgctgtgttttgttaacgtggactggaagccaacaaagaactaaagcctatttctggcatggaatcccagaatcagagaatatcccaagttggaagggacctctaagaatcgttgagtccaactgatggatgacatacgacactgatggaaaacgtaattactccatgcttcttcatgtatgctyyttgcaggatgagtataagatggagataagaaagtgggaggtttggtgttacagcaccacagacttcactagggcrataacattgcctttcacagatgcacctctgaaccctccctgcatacctccatccctccctgtgcctcctgcaaaggtcacagacactttttgccaacatttgccagcaaacatccagcccagtgctggaaacatcccaaagcacagagca

SEQ ID NO: 43756 - DNA, 450 bp, Chicken  19866894281897_4
cagctctctccagttctgtctttgctcagcaattgcttttgctgtgttttgttaacgtggactggaagccaacaaagaactaaagcctatttctggcatggaatcccagaatcagagaatatcccaagttggaagggacctctaagaatcgttgagtccaactgatggatgacatacgacactgatggaaaacgtaattactccatgcttcttcatgtatgctyyttgcaggatgagtataagatggagataagaaagtgggaggtttggtgttacagcaccacagacttcactagggcrataacattgcctttcacagatgcacctctgaaccctccctgcatacctccatccctccctgtgcctcctgcaaaggtcacagacactttttgccaacatttgccagcaaacatccagcccagtgctggaaacatcccaaagcacagagca

SEQ ID NO: 43757 - DNA, 599 bp, Chicken  19866894281898_1
  misc_feature (1)..(189): n is any nucleotide
nnnnnnnnnnnnnnnnnnnnnnnnnnnnnnnnnnnnnnnnnnnnnnnnnnnnnnnnnnnnnnnnnnnnnnnnnnnnnnnnnnnnnnnnnnnnnnnnnnnnnnnnnnnnnnnnnnnnnnnnnnnnnnnnnnnnnnnnnnnnnnnnnnnnnnnnnnnnnnnnnnnnnnnnnnnnnnnnnnnnnnnnnnnnnttatttgggtatgaaaatttaatgtaggtcacctactgcccttcctacttctctctatcatttttgcagcatagctctaggagaaagtatacagaatggggtcctttgtgkcatagygacagtgtcattgaagtgggaatgactggagaagtgacagtcttcttgtaaattcgcatctccaatacaattgttgaaagagaaatacgagctgcttatggaaatatctgtgtttgtcttactgcagtattgccatcaattttcttgagagtagaaacagattttgctatttgggcacgttgtggtttataatacatcagtgccattgaaaagaagaaaaaaaatatggtgtatctggtagggcagtgacaatgttatatcctaagtctccttagttttaggtgagctaaaga

SEQ ID NO: 43758 - DNA, 599 bp, Chicken  19866894281898_2
  misc_feature (1)..(183): n is any nucleotide
nnnnnnnnnnnnnnnnnnnnnnnnnnnnnnnnnnnnnnnnnnnnnnnnnnnnnnnnnnnnnnnnnnnnnnnnnnnnnnnnnnnnnnnnnnnnnnnnnnnnnnnnnnnnnnnnnnnnnnnnnnnnnnnnnnnnnnnnnnnnnnnnnnnnnnnnnnnnnnnnnnnnnnnnnnnnnnnnnnnnnnnttatttgggtatgaaaatttaatgtaggtcacctactgcccttcctacttctctctatcatttttgcagcatagctctaggagaaagtatacagaatggggtcctttgtgkcatagygacagtgtcattgaagtgggaatgactggagaagtgacagtcttcttgtaaattcgcatctccaatacaattgttgaaagagaaatacgagctgcttatggaaatatctgtgtttgtcttactgcagtattgccatcaattttcttgagagtagaaacagattttgctatttgggcacgttgtggtttataatacatcagtgccattgaaaagaagaaaaaaaatatggtgtatctggtagggcagtgacaatgttatatcctaagtctccttagttttaggtgagctaaagaagatat

SEQ ID NO: 43759 - DNA, 600 bp, Chicken  19866894281898_3
agaaacagattttgctatttgggcacgttgtggtttataatacatcagtgccattgaaaagaagaaaaaaaatatggtgtatctggtagggcagtgacaatgttatatcctaagtctccttagttttaggtgagctaaagaagatatctttattatttcatattttaaaatcattatttgcagtttcaggtgatttgagataattattttgtaaaactgaaggagacttctaggatttttttgttcctgtcattggttattttaaaggtgtgaatttacttctgttgtgtgacatttacrtgtcaaaagtgaactgtaaatgtattccttatcgttttttgtttggtcattactgtggtaattgtaaagttacgcagtgtgttcgggtctactaagagagaagttactgaaaacaaaaggattctgttttatcttcagtgaatgttttatcatttccatttcttgttttcttctacaaattatttgtgggttcaaagtggctaagtttggcttcagttttgaaaataaccttataaaaagaaattgttaacaaatgcagaactatcttggtactctgacgtgcgcaagagtgcactgcat

SEQ ID NO: 43760 - DNA, 599 bp, Chicken  19866894281901_1
  misc_feature (1)..(86): n is any nucleotide
nnnnnnnnnnnnnnnnnnnnnnnnnnnnnnnnnnnnnnnnnnnnnnnnnnnnnnnnnnnnnnnnnnnnnnnnnnnnnnnnnnnnnncgcttaaaaaatggtgtgtttctgaatcttccactcctttcagatgaagaaaacagcatttggcctccataaaagccatggccaagatatctgaaaaaagaggctccaaaaatgagtatgtgagcttgaaggtcattagtagcacaggaatttgcctaaggaccctccttccagattgaccatcttaataatcagactccctgtgcttcatcayagtccttaatttttcctttcttactttttcttcattcatctgtatcatcctgacaccaatgaggtgtcaaaaacatgctgctgaaacacgtgatgctctgtaaagtggtgctgggccctcaccagcaggcaggggggggcggctgctgagattgcaagcaaggataaaatgaaaaaagtgctcatcaagtgtcttgcctttaggctccaggaggaatcatcagtgaaaaaaaataacaaaagagacttggatgtgttctggagaatgaattatgaaggtggacaagtgagcatcctgtc

SEQ ID NO: 43761 - DNA, 600 bp, Chicken  19866894281901_2
tcttactttttcttcattcatctgtatcatcctgacaccaatgaggtgtcaaaaacatgctgctgaaacacgtgatgctctgtaaagtggtgctgggccctcaccagcaggcaggggggggcggctgctgagattgcaagcaaggataaaatgaaaaaagtgctcatcaagtgtcttgcctttaggctccaggaggaatcatcagtgaaaaaaaataacaaaagagacttggatgtgttctggagaatgaattatgaaggtggacaagtgagcatcctgtcagtctctcagtaatataascctgacttctccaggaatcaatgccctgggcccagagaccgagaggcaaaggtgctgagagcctttgaggcattggagtttcttaagggcatggtaaggtatgactgaaaatatttcaggtatgataacattttgagtgggagatgtctctgctgtgtcaagtacttgattaccagagcgcagtgactactgacactatgtatctgacactctaaatttttttgctctatgctgggctaagtggaatacctcctcttcattctttcaactctttttcttcttcctccctccctccccttc

SEQ ID NO: 43762 - DNA, 600 bp, Chicken  19866894281920_1
acatgaatcacaacaccctcgcccttgttcctcagggcagacacaggatgggctccggcccagcgcttgcggcctcctgccactcagcccccccattcccgatccttcctttcctctgatgttatcccactgatacaaacacaaggcccagactcagaaggcagaaatttatttggctttaaccttgggcaagtttaggcctgtctggacatgtccagagctgtgaagagcaggggttccctcgctgactgctctgagccactccagcgagctcatgcttctgaaacctcagtatttacrcaggctctggggctgcggtctgcttcttgtccagctcctgatgcttatctccactttgctgtagaaaaagctttaaatcaaaagcttcaggagagcgcttctgctgctgccatgcgactcgtagtgtccgaaagctgtgtgggaacagtgaggaagacctgagtggtaccaactgcatctcttyagtgatgagtagaaaaggacgtttgtccagagcagcagtgcccttaaataatattgttaaacatccacatggaaaagaaatcctatttccgaataatacactggaaaaagaagaaa

SEQ ID NO: 43763 - DNA, 600 bp, Chicken  19866894281920_2
ttgggcaagtttaggcctgtctggacatgtccagagctgtgaagagcaggggttccctcgctgactgctctgagccactccagcgagctcatgcttctgaaacctcagtatttacrcaggctctggggctgcggtctgcttcttgtccagctcctgatgcttatctccactttgctgtagaaaaagctttaaatcaaaagcttcaggagagcgcttctgctgctgccatgcgactcgtagtgtccgaaagctgtgtgggaacagtgaggaagacctgagtggtaccaactgcatctcttyagtgatgagtagaaaaggacgtttgtccagagcagcagtgcccttaaataatattgttaaacatccacatggaaaagaaatcctatttccgaataatacactggaaaaagaagaaaaaaaaaaccccacaatatttcaattaaattaaatcacaatgaaaagcagaagacttttagataggctgtctggtagagctgctaatctgcctcatgttcagtgatctgcttcaccctgcataatcgtaatctattctgcgtatgctgttccagcctgactacatcccaaaatattttgctgagt

SEQ ID NO: 43764 - DNA, 600 bp, Chicken  19866894281920_3
ggggctgcggtctgcttcttgtccagctcctgatgcttatctccactttgctgtagaaaaagctttaaatcaaaagcttcaggagagcgcttctgctgctgccatgcgactcgtagtgtccgaaagctgtgtgggaacagtgaggaagacctgagtggtaccaactgcatctcttyagtgatgagtagaaaaggacgtttgtccagagcagcagtgcccttaaataatattgttaaacatccacatggaaaagaaatcctatttccgaataatacactggaaaaagaagaaaaaaaaaaycccacaatatttcaattaaattaaatcacaatgaaaagcagaagacttttagataggctgtctggtagagctgctaatctgcctcatgttcagtgatctgcttcaccctgcataatcgtaatctattctgcgtatgctgttccagcctgactacatcccaaaatattttgctgagttaatcaagtgcagcctgaaattcaaagaataggagaacagttaagatgtacatgcgagagagaaatgtattgctttcaggtacaacttggaaatagataaaaaagcctcagatctctcagagca

SEQ ID NO: 43765 - DNA, 600 bp, Chicken  19866894281923_1
cttgtttggacagtcttagttaaaatttcttgcccagtacacgatttaaataagagattattgtttatgtggggaaaaaggaatgcatttaaggtcctgaagaagggcatgggctcaaataacttggagaaaaaaaaaaagttagtgccctgtcttagtcccttcagcacgtgctgcagttttcaactgtatttgaaacaacagttcttcagtgtgagtgagttaagtgaaaccaagtaatattaaattgtgttcagtgccagtatgcgcttggctttgagccataatttctgtaataaygggattattacttgaattaaagctgaagcttcttttttctttatagataattagtttattaaacgtatttacaccgcagaagtcactagaagaatttcaggatgtgtaagtattagatttttgttttaattttcctgacaaatattcatctaagctgtagcagcttagctccggtatctcacagtctttatgctgaaagtagagggtaattaaagtctgagtttaagctaaagctcgtctttcttaacccttctgaaataaattgagaaataaagttgtttcgctacaaacaaaatggaa

SEQ ID NO: 43766 - DNA, 585 bp, Chicken  19866894281929_1
tggagccctagcttagcaggacatgtgcacttacaaaaatgtgcaaatgcaaacagacagaattgctgtgctcgtgactggtctccgcttggaaatgtaagcaatgagaagaggtcaatgcagtaactgcctgagacctcgaggatgtaactaattagcactggaacaaggagcgtgagcccgccgctggcagagccacctgatgccctaaaaggccttttgatagcactatattgtgcgtgatgctggctgatgaaacgtaaagcggagccagagtgtctggggaggccctgcctcgcytcctggggaggccgtggccaacgcggctctgccagcagctctgcccagggcacgcgtcccgttgtgccgggctgtgcttggcctscgcagctcacttgaggaatcattgactctggagccggcagtgggagctcagccctttgggctctctctgggtagatgtgagagttgagagtttgatgtcgtttcaaagcgaaattctcccggttggctgtacttctgtcagcttttgaaagtgaactgctggacttactgcttctatacagaccataatagatcagtggg

SEQ ID NO: 43767 - DNA, 500 bp, Chicken  19866894281929_2
cgcttggaaatgtaagcaatgagaagaggtcaatgcagtaactgcctgagacctcgaggatgtaactaattagcactggaacaaggagcgtgagcccgccgctggcagagccacctgatgccctaaaaggccttttgatagcactatattgtgcgtgatgctggctgatgaaacgtaaagcggagccagagtgtctggggaggccctgcctcgcytcctggggaggccgtggccaacgcggctctgccagcagctctgcccagggcacgcgtcccgttgtgccgggctgtgcttggcctscgcagctcacttgaggaatcattgactctggagccggcagtgggagctcagccctttgggctctctctgggtagatgtgagagttgagagtttgatgtcgtttcaaagcgaaattctcccggttggctgtacttctgtcagcttttgaaagtgaactgctggacttactgcttctatacagaccataatagatcagtggg

SEQ ID NO: 43768 - DNA, 600 bp, Chicken  19866894281934_1
aagcttgttccaaaaccatgcatattgttcagctcaaaataatcagcctgttgttgtctcatcagttgttctcccttcccctcatctgtgcctcaaatattccagtcagagggagagccgtgcctctgcttttctcgaggtacccaacacccttgcctccaggctcagtgccatgtgccaggacactctgctagactgtgacaggcctagttaccacaaagtgttggccctgagtatataaatctgtctggctgcataaactcagttgtgctttaatacccagaaaagttctcctcttcyaagaatatgaaagataaatcgacattaatgtgctggagctatctgcaagtactaaatcatagtgcttaaatgtttatgtatagaaattctgcatttctccagtacacagctatgatttagctgcccctgggggaaacaggtagtagttcttttacataagtgctttcagctggggcacaaaaataatggatcatctggggctatctgcttggcaagtctgtcagctttactgcacaaactgcagacatttctcaccaccactactgatctgtttagcagcaaagccttgcacatcacttg

SEQ ID NO: 43769 - DNA, 600 bp, Chicken  19866894281935_1
gttgtgctcagcattcggcttcctgagatgcaaacggttccaaaaataatcctcatttaaccctgaaaagagggaatcggtgctaaaaggaataacttccaagtgggtaatttcacgttgggggaaaaaaaaccagtttgaattgtggtataacgctccaatccggtgctcagagtctgctaataagcataaatgttggtgatgctgtcaccaaagctgtgcctctgcaggtgtgtttcccaggggctctgccgttgctctgcatggggtttctgagcacatcccactgctgacagcccyggttctttactggcacaccgggcctgaagttggcaattggcaccatgggctgggctgttgggcaggctgttcagcccggctggagcagtgcgarcgctgtgccaaaaccctgctggaggaaaggggacttcatgtctgtgtaattatcccgtgtggggagcgccgttcccgttacggaataaatcagcagcaggcatggccaaaaccagcactgggccatgctgagctctcacagctctttgggaacgacatctgtcctaaaacaactccccagatcttcctgaattggggtttttggag

SEQ ID NO: 43770 - DNA, 600 bp, Chicken  19866894281935_2
acttccaagtgggtaatttcacgttgggggaaaaaaaaccagtttgaattgtggtataacgctccaatccggtgctcagagtctgctaataagcataaatgttggtgatgctgtcaccaaagctgtgcctctgcaggtgtgtttcccaggggctctgccgttgctctgcatggggtttctgagcacatcccactgctgacagcccyggttctttactggcacaccgggcctgaagttggcaattggcaccatgggctgggctgttgggcaggctgttcagcccggctggagcagtgcgarcgctgtgccaaaaccctgctggaggaaaggggacttcatgtctgtgtaattatcccgtgtggggagcgccgttcccgttacggaataaatcagcagcaggcatggccaaaaccagcactgggccatgctgagctctcacagctctttgggaacgacatctgtcctaaaacaactccccagatcttcctgaattggggtttttggaggggatggctctggctcagttttccaggcaggtttgcagtctgacagcagcgctggtggccgaggcagctggtggagtccccagggactgctggg

SEQ ID NO: 43771 - DNA, 599 bp, Chicken  19866894281936_1
  misc_feature (1)..(112): n is any nucleotide
nnnnnnnnnnnnnnnnnnnnnnnnnnnnnnnnnnnnnnnnnnnnnnnnnnnnnnnnnnnnnnnnnnnnnnnnnnnnnnnnnnnnnnnnnnnnnnnnnnnnnnnnnnnnnnnnttggaacctttctctttagatggtctgcttttctttctaaaaatactgaaatccagctgtttttctgagactggagtgagtttttgcctcttttttcctttcgcctttgaatgctctggtgttctagatggaaagctgcctaagatgtcattgtagcaattcaccccaatttacctgttgtaatgcaygaagtgtgggagaygggaatgctttggggctgtgggggaggacacagtgagagaaggcatttgggaaggatgattgcatgctggcacaggtgggcatacagtggggagagggaggtttgctaaagagccgtgtgcaggagagattgggttttctagttgagcaagtaggtcaatgtgtggaggtgggggtggaagcagattactactggggtgtgggctgctgcagggatccaattcccagctgtgggaaggggacaggtcacagagaggcrggtgtagcgctgtgcttggggacctaa

SEQ ID NO: 43772 - DNA, 599 bp, Chicken  19866894281936_2
  misc_feature (1)..(98): n is any nucleotide
nnnnnnnnnnnnnnnnnnnnnnnnnnnnnnnnnnnnnnnnnnnnnnnnnnnnnnnnnnnnnnnnnnnnnnnnnnnnnnnnnnnnnnnnnnnnnnnnnnttggaacctttctctttagatggtctgcttttctttctaaaaatactgaaatccagctgtttttctgagactggagtgagtttttgcctcttttttcctttcgcctttgaatgctctggtgttctagatggaaagctgcctaagatgtcattgtagcaattcaccccaatttacctgttgtaatgcaygaagtgtgggagaygggaatgctttggggctgtgggggaggacacagtgagagaaggcatttgggaaggatgattgcatgctggcacaggtgggcatacagtggggagagggaggtttgctaaagagccgtgtgcaggagagattgggttttctagttgagcaagtaggtcaatgtgtggaggtgggggtggaagcagattactactggggtgtgggctgctgcagggatccaattcccagctgtgggaaggggacaggtcacagagaggcrggtgtagcgctgtgcttggggacctaacacccatgccagcc

SEQ ID NO: 43773 - DNA, 600 bp, Chicken  19866894281936_3
tcaccccaatttacctgttgtaatgcaygaagtgtgggagaygggaatgctttggggctgtgggggaggacacagtgagagaaggcatttgggaaggatgattgcatgctggcacaggtgggcatacagtggggagagggaggtttgctaaagagccgtgtgcaggagagattgggttttctagttgagcaagtaggtcaatgtgtggaggtgggggtggaagcagattactactggggtgtgggctgctgcagggatccaattcccagctgtgggaaggggacaggtcacagagaggcrggtgtagcgctgtgcttggggacctaacacccatgccagcctgtcctttgctgagctgtgacatttggacacaattccattgccagtgtttgaaccatgctgaatatgtggtgggcatctacatctccctgctgcgtgcagctctgggaggtgttggcagcagggaaggtttcctttgctctggcccagatgctgaggatgtcgtaggacaaagcacccttcagataacatgggtaaagctttgcgaggtccgtgattgctaatgagctgggctcgacttcacctgatcctccagaaact

SEQ ID NO: 43774 - DNA, 600 bp, Chicken  19866894281937_1
ctcctgctctcccttaatgagctgtgctctgtggggctgagcggggaacacacaggcacggacctcttggctgaaagagcgtaattgctgggataggaatgaaatagcctttagagtgtttgctgttaattaattattgtttgtggctgcttggaagtggaagggttgccatgttacaaacttaacagtgctaaataacccctgcttatagctgggggggatctacgtgctgatgggtactggtgctgtgtcatgctgatctcttgagataaacccctccactctgctctgttttgcacmtttttggcggtgttttgcactttctagctggttagaaatggctggtgtctccctcacccgtcaaacagcgcacaccaggaactatcaaagagctaattaacctgccagactacttaacagcatcacaaaaagacttcttgttactcaatgcaggacgtacctgccagctggcttcctcacttcttaatttagaaaaggtggaaagctgctggggacgaggggaggaacccgtgcatccaactggcaggcagaccccgacaaccaagcggccatgatttacagcagggtaattttccagct

SEQ ID NO: 43775 - DNA, 600 bp, Chicken  19866894281946_1
ccacgtagtgcaagcatgcacaactgcctgaacccagcctcttcggtcagagcaggagatctctgtggcttcggctgataaaacctcacaaacacttttggcagtttcaagctctataaccctggaatgtaacacaagggttagacaacatctgaggggcacggtgttcaagccctcatctgaaggcagcttcaatcactttcagttatggcagcatatgtgtgagaagcagtcatggatgcctgcatctttccacacagctacagaggcacacgagacatcaacaagaagcaacacagygaagtttaattctacaagctatcaaattcagatcataccacattttccagaggttactgagggagacacttaccaagacagtgtttccagcattgcctaagccaaaaccaatggtagcatttgaagagtgtagatgatacccactcttttctagatcagaaatttgatattaggaatatagcaccagaaacacaaagctgtctcaaagagagagcaggtaaggacttgttagacgtatcaaatgtgaataataggctttgacgaaaggaaaggacacccgagcccgtaaggagcaatagt

SEQ ID NO: 43776 - DNA, 600 bp, Chicken  19866894281957_1
ttaagccatattcattactcacaaagcaaaatttggtcattttgtaaatatcagatagaatatgaattttatttagaatcagtagagcagtgcaggactgtatgctgtaaaaacacacaagatgatatagtaccaaaatgtagcagatgtgccagaacttagttactttctacccaagttgtactgaggtaagctgatctcacaattcataaaaggagggtcaaacacacttgcaagattacctagtattacacatgagtttggaagttaaagctaacattgtttgccacgatgctatgyaatattgacagcaaagataaatctgaagcacttgcataacgtccataatttctatttatcccacacaatgagatttaaatagaaagtgtaatttttgtggtcaaatcatatagcatcataactcatattaaaatcttgatcctagaaatatgttcattatatcaatccaacagaaaaccatttagtctcttcagatcaaagttcagatttaaaaaaaaaaacaaaacacccacaacttattaccacctaaatcagtttagaccttaaaaaaacagtactgaccttaggcagtctttgtgt

SEQ ID NO: 43777 - DNA, 599 bp, Chicken  19866894281962_1
  misc_feature (1)..(127): n is any nucleotide
nnnnnnnnnnnnnnnnnnnnnnnnnnnnnnnnnnnnnnnnnnnnnnnnnnnnnnnnnnnnnnnnnnnnnnnnnnnnnnnnnnnnnnnnnnnnnnnnnnnnnnnnnnnnnnnnnnnnnnnnnnnnnnngcgggcctttgcaaccagccaagttcagcattccctgctcctcctgcagccccagctgcccgtgaacattacgagtgagaattcataaacattttatactttgcactgaattaacatttgacagaaatgttagaaatggacaaaccgagtgccgacaaacatccattccctcytttttgcccactctgtttggaccacaggatgaggtccagctacgtgctgcagcagaacctctgctgggaacactcattgcgtttggagcccctatgtttggcgtagcaatcttctccatcaaaacccctctatttccccagctttacagcaaagctgccccagggcacagctgtgctgccaccacctctaagcccaaacaggatctctgataacatccctctgccaaacctttgcagctttacatcccttctgcaatgaactgctcgcttggggagctgcagctcctaaccaaaagcaa

SEQ ID NO: 43778 - DNA, 599 bp, Chicken  19866894281963_1
  misc_feature (1)..(143): n is any nucleotide
nnnnnnnnnnnnnnnnnnnnnnnnnnnnnnnnnnnnnnnnnnnnnnnnnnnnnnnnnnnnnnnnnnnnnnnnnnnnnnnnnnnnnnnnnnnnnnnnnnnnnnnnnnnnnnnnnnnnnnnnnnnnnnnnnnnnnnnnnnnnnnncagaattaccacctacggagaaggtcagagagcatgagaacgtagtgctgatcagatggagctttggcttacacagatctgagcaatttccgccgagctgcaagagtagagtaaacagattttaacttcagattgtcacagcctggtactgcctgaygtgtaagagggaacagcttcactgctggcaattccagcaacctcgtaacttctgttggagctgaaatgtacacagacatccacccatgctgaaacagctcagatcacggcagcccactttgttctgtgcagatcgcttacttctcgtttgttacctctgcagttamaacaggaagaatgttccatgctcttttcatgtgcgtctgtacagcggatggcmgtgaggagctggaaggggtgagggtaagaagggtggatgcggagagaaggatgtgcagttcagatgagtttgagatgtga

SEQ ID NO: 43779 - DNA, 600 bp, Chicken  19866894281963_2
gtcagagagcatgagaacgtagtgctgatcagatggagctttggcttacacagatctgagcaatttccgccgagctgcaagagtagagtaaacagattttaacttcagattgtcacagcctggtactgcctgaygtgtaagagggaacagcttcactgctggcaattccagcaacctcgtaacttctgttggagctgaaatgtacacagacatccacccatgctgaaacagctcagatcacggcagcccactttgttctgtgcagatcgcttacttctcgtttgttacctctgcagttamaacaggaagaatgttccatgctcttttcatgtgcgtctgtacagcggatggcmgtgaggagctggaaggggtgagggtaagaagggtggatgcggagagaaggatgtgcagttcagatgagtttgagatgtgaactttcacagggcaaaaaaaataaaataaaaaaaaatcagagtttcacagagagtaaagatcaagacagagcttgatctgaatgggaagctggtaaaagataatagtactttatattcttgtcctagaagatggatgaaaacatttctgcactcaaacagttgtggc

SEQ ID NO: 43780 - DNA, 600 bp, Chicken  19866894281963_3
atctgagcaatttccgccgagctgcaagagtagagtaaacagattttaacttcagattgtcacagcctggtactgcctgaygtgtaagagggaacagcttcactgctggcaattccagcaacctcgtaacttctgttggagctgaaatgtacacagacatccacccatgctgaaacagctcagatcacggcagcccactttgttctgtgcagatcgcttacttctcgtttgttacctctgcagttamaacaggaagaatgttccatgctcttttcatgtgcgtctgtacagcggatggcmgtgaggagctggaaggggtgagggtaagaagggtggatgcggagagaaggatgtgcagttcagatgagtttgagatgtgaactttcacagggcaaaaaaaataaaataaaaaaaaatcagagtttcacagagagtaaagatcaagacagagcttgatctgaatgggaagctggtaaaagataatagtactttatattcttgtcctagaagatggatgaaaacatttctgcactcaaacagttgtggctgctatcactgaatacttcagctgtattaaaatagttgagaccagaaaatctc

SEQ ID NO: 43781 - DNA, 552 bp, Chicken  19866894281967_1
tttctgtggtctgctaatgcagcacacagcacgtgactcgcagtctttttatgccgatagtatgaagtgctttacagcactccctgttgtgctcagtttgtgccacgtttcacttgttcagtgcttctggcatcttcccctgccgttagttacggaggaaacaccgtcacagttgtgggcagtttataaggacattgcaaatgacgtgcaaaacacatcaggtttttgcacagtgcaaatctatcagatataccctttaaccacaagtctttatacttctagcgtaaccactgtatcaayttacttcacataaactcttctaagcaaaccaaatggatagttaaactatggtggctctacagagaggtcctatttatgcagttgaaactttttttgatcttatcaacttatctttgcgaagaaagcatcaaagacctacttaccctggtagggctgtgcagcatctcactcagcattgaagcttgatcccatctgttctctctccaaaatgagatttttgtcttcaaacctgtccatctctctgctctttct

SEQ ID NO: 43782 - DNA, 600 bp, Chicken  19866894281979_1
gtactaggtaagactgagaccttccatttgtcctacagctctgtgacatttttctcctgaaaacattcaaaaaaaatcaataacatatcaagaacacagttatgcctagcagtttaatttcagaaagtgtgcaaatcaatagccttagagactcttgcagttcttcagatttctaagtacagtaacaaatgctggggcatgtatatgtaagagtttgtgtacgtctcagtgggagagaagctgagatttacattaattactgagacgattctcaacatcatatttcagtctctaccttarcattttacttgtgaaaaagttttaaaacaagttggttttcagtctttaactaagagttatttaagtagttatgaaggaaacttcttttttttctgttcagactgaaataacatttccagtaaaattctgattcagaagtttttaactcagtcagacaattaccacatttttctttaagacttacattcaggattgaattattcctaattggtggtggatatatttgatagattttaagttaaataaaactttgttgttattttttctttaaataaagagtagagctagctgtaaaatttc

SEQ ID NO: 43783 - DNA, 535 bp, Chicken  19866894281979_2
agactgaaataacatttccagtaaaattctgattcagaagtttttaactcagtcagacaattaccacatttttctttaagacttacattcaggattgaattattcctaattggtggtggatatatttgatagattttaagttaaataaaactttgttgttattttttctttaaataaagagtagagctagctgtaaaatttcaaaatcaattaacttcaatggaaaatatgatattttcagcttttaactgacaaatgcaacatttacataaacagtcttcagttttttattaaaaaatrtacaattcactacaaatgtaaaacacaaaactccttgtacatgaaacacaaattcagcaaatatttagctggtcacarcagcactgttgtttgctgtgctataaaatgtgtgcataatgataaacagactacaaaaatgtaaaaaaaaaaggcaattcggcattaattggctgacaagggaaaatttgatcccgtagatgaatacaaaatctgtaaagtgaaaaactcaataatt

SEQ ID NO: 43784 - DNA, 457 bp, Chicken  19866894281979_3
agacttacattcaggattgaattattcctaattggtggtggatatatttgatagattttaagttaaataaaactttgttgttattttttctttaaataaagagtagagctagctgtaaaatttcaaaatcaattaacttcaatggaaaatatgatattttcagcttttaactgacaaatgcaacatttacataaacagtcttcagttttttattaaaaaatrtacaattcactacaaatgtaaaacacaaaactccttgtacatgaaacacaaattcagcaaatatttagctggtcacarcagcactgttgtttgctgtgctataaaatgtgtgcataatgataaacagactacaaaaatgtaaaaaaaaaaggcaattcggcattaattggctgacaagggaaaatttgatcccgtagatgaatacaaaatctgtaaagtgaaaaactcaataatt

SEQ ID NO: 43785 - DNA, 600 bp, Chicken  19866894281982_1
gcacacactggctaactgaggacccaggctatgaaggtcagggtgttcgcagattcatttcttgccctctgggaatagtccatgctgagcagaaggacagcaggtggacagtggtcagaacaagaggttaaaaaccaaacattcttgaccatggtgctgcccagaagtcatataggccctgtctgaatacaaatatgttggctttgcagccactcctctttacgggagatgttcatggaggaagggggaaaagtgctttccatggaacagtgtggagggagacaggggagaccctcatcrctgttgagagtggtctagaacagcagaacacacaatgcccctactacagaaaataaataaaaatcactgcagaatcttctctggagagccatcagtagcagtgaagacaaacagacacgcgtgcatgcatgcatgcaaaggtccctcttttgtcacaaatgcgagagttcaaaagaactcctgtgttgggatcagggctttttctgtgctataccatccccttcctggcaaggagcatgccctagcagaactgctggcaaacaaacttcaattctcaagagccaaccccagggcagcaca

SEQ ID NO: 43786 - DNA, 600 bp, Chicken  19866894281989_1
gccctgtaaaagcattaacatcacccatagcattatggtttatgaattactgggaatgtttgtcaggctctgagagtctgcaccgtaacactaaaggtgacaaatctgtctattggtatatttctagcttcatctctaacttccatggttatgtcagctgatcacccaagcctaaccttcagcctcagcctcatccgaagcgagcctacgtacaaccagccagtacagcagtggagctttgtttcagattttgcggtaaaacctcagcctttgctgttttctcttaactcaacttgtaarttaggatgttggtgttaacacccttctctctttctctctccctctctctccacaaaggttcgagactattctgggacctatatggtaaagctgatagcttgtaccactgctccacatcaggagtacagcctaccagtgatctgcaatcctagagagccgatcacatttgatctggatatccgattccagcaggtagcaccccaatgatattttcttcatgtttccttttcattttaattctcaaattgcctttggtaatcttgtaattatggtmctagaaatttaatttacttgcttaca

SEQ ID NO: 43787 - DNA, 581 bp, Chicken  19866894281989_2
tgttttctcttaactcaacttgtaarttaggatgttggtgttaacacccttctctctttctctctccctctctctccacaaaggttcgagactattctgggacctatatggtaaagctgatagcttgtaccactgctccacatcaggagtacagcctaccagtgatctgcaatcctagagagccgatcacatttgatctggatatccgattccagcaggtagcaccccaatgatattttcttcatgtttccttttcattttaattctcaaattgcctttggtaatcttgtaattatggtmctagaaatttaatttacttgcttacaacaaaccagttccaaaattggagtgacagaacatgctctcttctgctatttagttttacccaacatggaaaggttaatgtaggagcacaagtcttcttttttttttttttttttccttgatgcatgggcaatctttgttcatttttctaggatagtcagaaggatgttcattcacattgatttgtgtgatgtctctggtattggaagtgggaccttcagaggagggttgatccagtcctaagataggacttcctc

SEQ ID NO: 43788 - DNA, 599 bp, Chicken  19866894281991_1
  misc_feature (1)..(16): n is any nucleotide
nnnnnnnnnnnnnnnnacctataaaatgctcaacctgcagctgtaagctaactgcccatacaaaaactatcctgctgcaacagatgtgggtgtggggcttagtacagagaagacaagttaagtagataaagtgttgttgcacggtaaaccaagtatctacctgaccacccccatacagtttgagggcttagaatagaaaagttaaaaataggtaaaggcctttgcatgttagaaacattcatctttccatttaaaagctactggtgaccatggaaattatgcctttctgcatgtaagacwaccgtaggtagtgaagaaacacagagcaccatcctctgtcattgcagtgctgttcaaacaggccatgtggctggatgagtgtttagaaatgggagcaaaaagcatttttccttcaacactcttctgctgtgacagaggaggttgcactgatgtcagctgcaggcagaaggctgccacaggcaggatggagatggatcccaagcaacaggtaactacaattttatatactgcagtgtcactgggcacactagtgatgtacaacagacccaaactgttcctgggaaggaaaatactcattc

SEQ ID NO: 43789 - DNA, 600 bp, Chicken  19866894281992_1
accactgaatgtgatagaatgctgaggctccccagtgaactttaaatgttgctggtacatgtaatgaaagtagttctgccaatgtgtgacacttaaagcaaggtaaagaagtgctgagatggagattctgtgttttgagaagctgtctcacagcagtcctgtatttctgcctctccttttgtttttctgagacattactgggctttgatcccatatttctgattgttttaaactgtgagacctcctgtagcgaactccttccactcttgtcagcagttttctgtgtaggcatccttactytgggacttgctttgtgccagtttgaacatgggtattgcttcttcacaggtcctgggacccaactcaactgcaaacagcatcatggctgcctatcagcagaagaggatggtggttcctgctgtacaaggtgagttcaggttcctggttaggtgtgactgtgtagcatcattgtggccagcagcattgcagtgtttttcatctgtaggagtttattgctttatgttatggtgtcatcttccttttagcaagtgagcagcctacttaataaggttttgtttgctcggaagttctgtgttaaaa

SEQ ID NO: 43790 - DNA, 600 bp, Chicken  19866894281998_1
gaaattctaagcagtatctttctcatgatatggggacggtgctgtgttggagcacgtaatacttagccacctaatggaacctaatttccgaagtcccatatcccatatgtaatgccatgatatctgcttacacagatgcagaactctcattcctctgcaaaagcatcaaagctttccttcttctccagcttccaacaaaagctgtaagttcatgttggcacacaactggtgcacatcccatatattctcctcagagggatctaatgtacctctcaggagtatttgtcagtttaggccttstgcctcactaatgcactttcacaaactcttccaagtcagcctgcacccagaggggacactgaggtgagattttcatacaggsctttaacagaacrggttttccaggtcccaattcctggcagatctgagagtgtggtgatgtatatgaaagctaaatggtgatgaccctggcagtgctggctgggataggaacatgtggagcattctgttcttgaagaagatgactttctctgccctcaatgtaagtatcggtgtcagttctgtcctgcccagacttttaattcactctatttgcacaag

SEQ ID NO: 43791 - DNA, 600 bp, Chicken  19866894281998_2
aatttccgaagtcccatatcccatatgtaatgccatgatatctgcttacacagatgcagaactctcattcctctgcaaaagcatcaaagctttccttcttctccagcttccaacaaaagctgtaagttcatgttggcacacaactggtgcacatcccatatattctcctcagagggatctaatgtacctctcaggagtatttgtcagtttaggccttstgcctcactaatgcactttcacaaactcttccaagtcagcctgcacccagaggggacactgaggtgagattttcatacaggsctttaacagaacrggttttccaggtcccaattcctggcagatctgagagtgtggtgatgtatatgaaagctaaatggtgatgaccctggcagtgctggctgggataggaacatgtggagcattctgttcttgaagaagatgactttctctgccctcaatgtaagtatcggtgtcagttctgtcctgcccagacttttaattcactctatttgcacaaggagcatattttagaaggatccaaatagtgaatgtaaccacaacactataaatcagcacagcataggaaagaacaaatctttt

SEQ ID NO: 43792 - DNA, 600 bp, Chicken  19866894281998_3
ccatatcccatatgtaatgccatgatatctgcttacacagatgcagaactctcattcctctgcaaaagcatcaaagctttccttcttctccagcttccaacaaaagctgtaagttcatgttggcacacaactggtgcacatcccatatattctcctcagagggatctaatgtacctctcaggagtatttgtcagtttaggccttstgcctcactaatgcactttcacaaactcttccaagtcagcctgcacccagaggggacactgaggtgagattttcatacaggsctttaacagaacrggttttccaggtcccaattcctggcagatctgagagtgtggtgatgtatatgaaagctaaatggtgatgaccctggcagtgctggctgggataggaacatgtggagcattctgttcttgaagaagatgactttctctgccctcaatgtaagtatcggtgtcagttctgtcctgcccagacttttaattcactctatttgcacaaggagcatattttagaaggatccaaatagtgaatgtaaccacaacactataaatcagcacagcataggaaagaacaaatcttttgctaattagaagt

SEQ ID NO: 43793 - DNA, 600 bp, Chicken  19866894281998_4
tcaatgtaagtatcggtgtcagttctgtcctgcccagacttttaattcactctatttgcacaaggagcatattttagaaggatccaaatagtgaatgtaaccacaacactataaatcagcacagcataggaaagaacaaatcttttgctaattagaagtatattctgtaggcacagtgtaaggtagatggggaggaaatatggaaatatatttccagaacctaaactacactgacttgcagcaagaagctgcttaaaattcagccttgacatgactttccctagagtttcataccaaaaryctttcttgatgagtgaggatggctcattttattttcaaaacacatctgatggagactgatgtgctttcagagagatcctcattatttaataagccagtggccaagtttggacccagtcaccttttttgcttcatggtttcattgtcacagctgtaagcagagcagctcaacagccaagctagaggccatgctttcaaactgtcaacattcacagtgaacgactgtgaactctgctgcaagtgaggtgcaatgcatcctgccccaaagcagctacttgcatttatgaaatacagagagct

SEQ ID NO: 43794 - DNA, 600 bp, Chicken  19866894281998_5
caatgtaagtatcggtgtcagttctgtcctgcccagacttttaattcactctatttgcacaaggagcatattttagaaggatccaaatagtgaatgtaaccacaacactataaatcagcacagcataggaaagaacaaatcttttgctaattagaagtatattctgtaggcacagtgtaaggtagatggggaggaaatatggaaatatatttccagaacctaaactacactgacttgcagcaagaagctgcttaaaattcagccttgacatgactttccctagagtttcataccaaaaryctttcttgatgagtgaggatggctcattttattttcaaaacacatctgatggagactgatgtgctttcagagagatcctcattatttaataagccagtggccaagtttggacccagtcaccttttttgcttcatggtttcattgtcacagctgtaagcagagcagctcaacagccaagctagaggccatgctttcaaactgtcaacattcacagtgaacgactgtgaactctgctgcaagtgaggtgcaatgcatcctgccccaaagcagctacttgcatttatgaaatacagagagctc

SEQ ID NO: 43795 - DNA, 600 bp, Chicken  19866894282001_1
gctgtttctcagaaggaaagtgttcatcatgaattaagcaacttgtgctgactacagtgataggagggagagtagctttcctgatattaccttgttaaaaacactcttagccgtgaaccttgacgtgagtctctctatgtcgcctctttcagtttgctgctcagtacctgagagtgtcctggttgggattccctaggaaaacacctaagggattcccaactgcagaccagcagcaaaagcactgccatggtcagaggagaatatttcttgcagcagttccatgtgctcttggaacaccckttgtttcccagctactacaaacttgaaactggactatgttttttcctcttttgttacattttttgttgtccccttcccccaggcagacctggaaactagtagtggtgggaaacaaaatcagaccaccycttaaaggtatgggagggtgatgagtatttggatgtgatcagataaacttcaatgtctaaacagaggagacttgggttactttttgtggtcaagatagtgttgaagctattctttctgcttgatcattgtattccaaacaaagccatgactgcagtgttagggttggcaaag

SEQ ID NO: 43796 - DNA, 600 bp, Chicken  19866894282001_2
gtctctctatgtcgcctctttcagtttgctgctcagtacctgagagtgtcctggttgggattccctaggaaaacacctaagggattcccaactgcagaccagcagcaaaagcactgccatggtcagaggagaatatttcttgcagcagttccatgtgctcttggaacaccckttgtttcccagctactacaaacttgaaactggactatgttttttcctcttttgttacattttttgttgtccccttcccccaggcagacctggaaactagtagtggtgggaaacaaaatcagaccaccycttaaaggtatgggagggtgatgagtatttggatgtgatcagataaacttcaatgtctaaacagaggagacttgggttactttttgtggtcaagatagtgttgaagctattctttctgcttgatcattgtattccaaacaaagccatgactgcagtgttagggttggcaaaggagatygcaggagcagcctgtgtgcaatagcatgaattctagtgaagatctgtttaacctctttgctttgttttacttctcacttctgtctgcctgtctcatgaatctgtgtgctcttactgtacgtt

SEQ ID NO: 43797 - DNA, 600 bp, Chicken  19866894282001_3
cccagctactacaaacttgaaactggactatgttttttcctcttttgttacattttttgttgtccccttcccccaggcagacctggaaactagtagtggtgggaaacaaaatcagaccaccycttaaaggtatgggagggtgatgagtatttggatgtgatcagataaacttcaatgtctaaacagaggagacttgggttactttttgtggtcaagatagtgttgaagctattctttctgcttgatcattgtattccaaacaaagccatgactgcagtgttagggttggcaaaggagatygcaggagcagcctgtgtgcaatagcatgaattctagtgaagatctgtttaacctctttgctttgttttacttctcacttctgtctgcctgtctcatgaatctgtgtgctcttactgtacgtttgcatgaggctcaagctctggagctttctgcctgaggtcgctttagaaattagtttacatttgacagaagacacacttctaaagtaatgcatgcatataacaaggtaaaataataacaaaatgaatagaaacttcagaaatacgctgtggaaatctacccacaattaattctacataa

SEQ ID NO: 43798 - DNA, 600 bp, Chicken  19866894282004_1
cgattgcccaaagccttattatttttagcaattgtcacaaccaactaacgggatgctttgtaaacttgagcttcagtcagttgacaaaaactaggtctaaaaacagactctagtcctatctggggcctcaccaccaacagctgtagttttacaagctggttttcttgggttttaagcattttgctctcttccttgtcgtgagagaggcatgaagttgactgcagggaagggagtaatgaaacccaccaagttcacaacgtttgcttgatctcactcatctcccccagcctgagccacacygggtccttctgcagagctaattattgcccttctgtacagaggattcatcgttgttcccccaagcaagttgttccttcacttttattacagtaaactgttttcagaagaaatgttgcatcaggaaattaactatgctacagatgctaaaaaatgtgccctgaattgtttatagctctcagcaggatcatttttctcctcgattccttctcagtccctcatcacccttaaaagagatttaggaggaacatagcaaagaccctccagctttgtcctgaggtctgtacttcagccaaatcctca

SEQ ID NO: 43799 - DNA, 600 bp, Chicken  19866894282005_1
cagaatgaaagcattccttgtgtgcatgtgtccccttatggcacactcatccagctctggccaaggacccctatcacatcatgggtcacgggggactggtgtattggagggttatctccaccactgatgctggtgtgtgaccaacagtgcccacagctcttagacactatccctggctacttctgcctcatcctctggacaccttctagctcagattgaagcttcttgaccccctctccaaagataaattgtccacaacttagtacatgcagtgctaaaataacagcagttactgagtaytctggcaatatggataaattaattcagcatgaaaagcagtatattaatatgatttacattattcatacgaacggtcttatgttcattaaatttctttttaaagtggcatggttacctctctaggactttccaatgtttgtagtgagaaaaggaacaggtgatgtagaaataattgatcgctgtgcttgtcatggttctttgcaaagacttcacaattactttgaaaataccagaaaaactagtacttgttgcaatttttgatgagtcagtatttcaacaagaagaagatgccattcctct

SEQ ID NO: 43800 - DNA, 599 bp, Chicken  19866894282008_1
  misc_feature (1)..(124): n is any nucleotide
nnnnnnnnnnnnnnnnnnnnnnnnnnnnnnnnnnnnnnnnnnnnnnnnnnnnnnnnnnnnnnnnnnnnnnnnnnnnnnnnnnnnnnnnnnnnnnnnnnnnnnnnnnnnnnnnnnnnnnnnnnnncacgcatcaacctttggatctcttcttttgaccaaggaccataattaattgctaaaattcaaaaatatttatggttaggacataatttatcatacattattaggaaaaaatgcttcactttgccatgtgtttatttaaaggatccatttcttatacctgcttcccagaaactcctytgcataccagatgtgagaggaaaatycagtctaatgagagttcagcctaaagaacagcaccagttcctacctcctatatttcaagaccctgctgtcaaattcctcacatcctccccaggacagcatttagacatcagaaatgtcaattccatttaagaagattgcatctgtcccacttcctcttcctcccaccccaccttttttgtttgtttttcttctccctcagatttgaggctgttctcttttgcctgaaagctttttcaattagaatacacagaatgaattattattcttaaaaa

SEQ ID NO: 43801 - DNA, 599 bp, Chicken  19866894282008_2
  misc_feature (1)..(98): n is any nucleotide
nnnnnnnnnnnnnnnnnnnnnnnnnnnnnnnnnnnnnnnnnnnnnnnnnnnnnnnnnnnnnnnnnnnnnnnnnnnnnnnnnnnnnnnnnnnnnnnnnncacgcatcaacctttggatctcttcttttgaccaaggaccataattaattgctaaaattcaaaaatatttatggttaggacataatttatcatacattattaggaaaaaatgcttcactttgccatgtgtttatttaaaggatccatttcttatacctgcttcccagaaactcctytgcataccagatgtgagaggaaaatycagtctaatgagagttcagcctaaagaacagcaccagttcctacctcctatatttcaagaccctgctgtcaaattcctcacatcctccccaggacagcatttagacatcagaaatgtcaattccatttaagaagattgcatctgtcccacttcctcttcctcccaccccaccttttttgtttgtttttcttctccctcagatttgaggctgttctcttttgcctgaaagctttttcaattagaatacacagaatgaattattattcttaaaaattacatacgtgatttgatttcagagt

SEQ ID NO: 43802 - DNA, 600 bp, Chicken  19866894282021_1
actccatgtcacagctagtctctgcaaagaaatacttggaagttgcttttctgtgtggtcatttgtatatatatatgtttgccatgtacagatatttttatttcagttatgcaatcaaaggggcgtcagatttgctttcaccagacattgaattgctggagagtccctcattacctccaattttgaagtcttcattcagaagtttacaggttatactggaactcctgagagaaatcccacgttattttcatttggtttgttttgacatgcctacaggaaaaagaatatgtgtctcacctkttcctccatcacacggttccattttaggtcatgttctggagggtgcaaatctacatatttgaacagagttttagatgacttaaatctcttgaacatttttcacatgcacttcaggcagccgctgtctgtcatggagccttgacaaagccttatctctgagtaccgtattcaaagacatttgtagggagaactgtatttgaaaaaaaaactcatcagtgagctgttgtgagttaatcccagcagtaagccaatcccctctcagtagctcactgggatgagggggagaactggaaggataaa

SEQ ID NO: 43803 - DNA, 600 bp, Chicken  19866894282021_2
agggggagaactggaaggataaaagtgagaaaactcatgcactgagataaggtcaacttaatagatagaagaaaatacaaaacaaagcaaaaagaagtgatgcaaaagcagtcactcaccaccagatggccagtacccatccagtcaccaagcaagggcaacctctggcaaaccacccctccagctttactgttgagcatgacattatgttgtatggaatacccctttggtcagcttgggtcaactgtcctggctgtgctttctctcaacctccattctcagtctacatgtcaaaggatrgggaaggtggtaacagagtgtgaaacaggttttgatgctgttctactagagcaaatgctggaggcttctcccctgtggggctctgaatcagatagttggaaagaatttcataccctgggaaaaggaaaaggagatggcctaattcagggaagccctgcaaaaccctttcccaacatgggaagttacaagacttgtttcagcaatgtagtgctccatcatccgatcagccagccttgagagaaagagggagctgcagagaaaaagagaaaagggagagatcctggcagcatgaagccacag

SEQ ID NO: 43804 - DNA, 599 bp, Chicken  19866894282022_1
  misc_feature (1)..(231): n is any nucleotide
nnnnnnnnnnnnnnnnnnnnnnnnnnnnnnnnnnnnnnnnnnnnnnnnnnnnnnnnnnnnnnnnnnnnnnnnnnnnnnnnnnnnnnnnnnnnnnnnnnnnnnnnnnnnnnnnnnnnnnnnnnnnnnnnnnnnnnnnnnnnnnnnnnnnnnnnnnnnnnnnnnnnnnnnnnnnnnnnnnnnnnnnnnnnnnnnnnnnnnnnnnnnnnnnnnnnnnnnnnnnnnnnnnnnnnncccaacaccccacaggagagcagggcgctccctttgtcacaaccccacggcctgcacagagctgtggarycataggatggcttaagagagaagggaycacaaaagaccacccggttccagccctactgctttggtgttccaaccctggtggctctgcagagctacacggtcttccctcctccaactctttgggagtgtaaggctgtcctgtgctctcaygcagcaccagtgggaaagtcccagtcctcttccattgcctctgcgggcccttcccagcaatgagggcactgtgtggggtgttgggttggggctgctgctccgtgaggtaaggatggagctggagcccaggcggtaggaattgtaaattt

SEQ ID NO: 43805 - DNA, 599 bp, Chicken  19866894282022_2
  misc_feature (1)..(230): n is any nucleotide
nnnnnnnnnnnnnnnnnnnnnnnnnnnnnnnnnnnnnnnnnnnnnnnnnnnnnnnnnnnnnnnnnnnnnnnnnnnnnnnnnnnnnnnnnnnnnnnnnnnnnnnnnnnnnnnnnnnnnnnnnnnnnnnnnnnnnnnnnnnnnnnnnnnnnnnnnnnnnnnnnnnnnnnnnnnnnnnnnnnnnnnnnnnnnnnnnnnnnnnnnnnnnnnnnnnnnnnnnnnnnnnnnnnnnncccaacaccccacaggagagcagggcgctccctttgtcacaaccccacggcctgcacagagctgtggarycataggatggcttaagagagaagggaycacaaaagaccacccggttccagccctactgctttggtgttccaaccctggtggctctgcagagctacacggtcttccctcctccaactctttgggagtgtaaggctgtcctgtgctctcaygcagcaccagtgggaaagtcccagtcctcttccattgcctctgcgggcccttcccagcaatgagggcactgtgtggggtgttgggttggggctgctgctccgtgaggtaaggatggagctggagcccaggcggtaggaattgtaaatttg

SEQ ID NO: 43806 - DNA, 599 bp, Chicken  19866894282022_3
  misc_feature (1)..(203): n is any nucleotide
nnnnnnnnnnnnnnnnnnnnnnnnnnnnnnnnnnnnnnnnnnnnnnnnnnnnnnnnnnnnnnnnnnnnnnnnnnnnnnnnnnnnnnnnnnnnnnnnnnnnnnnnnnnnnnnnnnnnnnnnnnnnnnnnnnnnnnnnnnnnnnnnnnnnnnnnnnnnnnnnnnnnnnnnnnnnnnnnnnnnnnnnnnnnnnnnnnnnnnnnnnncccaacaccccacaggagagcagggcgctccctttgtcacaaccccacggcctgcacagagctgtggarycataggatggcttaagagagaagggaycacaaaagaccacccggttccagccctactgctttggtgttccaaccctggtggctctgcagagctacacggtcttccctcctccaactctttgggagtgtaaggctgtcctgtgctctcaygcagcaccagtgggaaagtcccagtcctcttccattgcctctgcgggcccttcccagcaatgagggcactgtgtggggtgttgggttggggctgctgctccgtgaggtaaggatggagctggagcccaggcggtaggaattgtaaatttggtttggcagttcatttctgttccttcg

SEQ ID NO: 43807 - DNA, 599 bp, Chicken  19866894282022_4
  misc_feature (1)..(81): n is any nucleotide
nnnnnnnnnnnnnnnnnnnnnnnnnnnnnnnnnnnnnnnnnnnnnnnnnnnnnnnnnnnnnnnnnnnnnnnnnnnnnnnnncccaacaccccacaggagagcagggcgctccctttgtcacaaccccacggcctgcacagagctgtggarycataggatggcttaagagagaagggaycacaaaagaccacccggttccagccctactgctttggtgttccaaccctggtggctctgcagagctacacggtcttccctcctccaactctttgggagtgtaaggctgtcctgtgctctcaygcagcaccagtgggaaagtcccagtcctcttccattgcctctgcgggcccttcccagcaatgagggcactgtgtggggtgttgggttggggctgctgctccgtgaggtaaggatggagctggagcccaggcggtaggaattgtaaatttggtttggcagttcatttctgttccttcggctcatgaatggcctcttctgtgaaggctgcaaatctgagcctggctgctgtttgatgagattcctctattccaaggagaaaatgatcctatttcctttgctttcaccatattcccacatcc

SEQ ID NO: 43808 - DNA, 599 bp, Chicken  19866894282024_1
  misc_feature (1)..(45): n is any nucleotide
nnnnnnnnnnnnnnnnnnnnnnnnnnnnnnnnnnnnnnnnnnnnnaaatactgagattgcacaaaaattattattttcagtacaaaaattacaaccagacacagctactctccactgaatgttcagagaagttataaaagcaaaagttctgaggtaatttgcttttatgtcttgaaatacagtatttacattcctaaatctggagtgtagctaaatttgaaagtgttttctcgagcatttatgatggtgatgcaaaatctttatattctcaataaagacaggggttctcagaacaataarcaagcttagccaacccatgctgaagctataatggtacactgctgtgaccagcagcactgtagggtggcaacctctcctggcagccacattctcagctgtccgtgtcccccacagaccagaagcggtaagctcargtcttgaggagttttccctgactcctcaccatattgggctttcttcyctacctcactttgctctccctgacagaagtttcttgtgtttttgtccctgtcaaagggaaactctgttcttgctgtgcttgttgaagagccttgaactggcaccaactttacgcagaa

SEQ ID NO: 43809 - DNA, 600 bp, Chicken  19866894282024_2
taaaagcaaaagttctgaggtaatttgcttttatgtcttgaaatacagtatttacattcctaaatctggagtgtagctaaatttgaaagtgttttctcgagcatttatgatggtgatgcaaaatctttatattctcaataaagacaggggttctcagaacaataarcaagcttagccaacccatgctgaagctataatggtacactgctgtgaccagcagcactgtagggtggcaacctctcctggcagccacattctcagctgtccgtgtcccccacagaccagaagcggtaagctcargtcttgaggagttttccctgactcctcaccatattgggctttcttcyctacctcactttgctctccctgacagaagtttcttgtgtttttgtccctgtcaaagggaaactctgttcttgctgtgcttgttgaagagccttgaactggcaccaactttacgcagaaatatctatgcaaarattgctagttttgaggtttgttcagttcctgttcagtcactgtgcaatgaacttcaatatattttagttcaccttaggtgggagaagagtattcagcaaaggtggtggctaaatgcaaatt

SEQ ID NO: 43810 - DNA, 600 bp, Chicken  19866894282024_3
gtatttacattcctaaatctggagtgtagctaaatttgaaagtgttttctcgagcatttatgatggtgatgcaaaatctttatattctcaataaagacaggggttctcagaacaataarcaagcttagccaacccatgctgaagctataatggtacactgctgtgaccagcagcactgtagggtggcaacctctcctggcagccacattctcagctgtccgtgtcccccacagaccagaagcggtaagctcargtcttgaggagttttccctgactcctcaccatattgggctttcttcyctacctcactttgctctccctgacagaagtttcttgtgtttttgtccctgtcaaagggaaactctgttcttgctgtgcttgttgaagagccttgaactggcaccaactttacgcagaaatatctatgcaaarattgctagttttgaggtttgttcagttcctgttcagtcactgtgcaatgaacttcaatatattttagttcaccttaggtgggagaagagtattcagcaaaggtggtggctaaatgcaaatttttctcaattccctccaaagcacacacggaataactgcagacataca

SEQ ID NO: 43811 - DNA, 600 bp, Chicken  19866894282024_4
cccatgctgaagctataatggtacactgctgtgaccagcagcactgtagggtggcaacctctcctggcagccacattctcagctgtccgtgtcccccacagaccagaagcggtaagctcargtcttgaggagttttccctgactcctcaccatattgggctttcttcyctacctcactttgctctccctgacagaagtttcttgtgtttttgtccctgtcaaagggaaactctgttcttgctgtgcttgttgaagagccttgaactggcaccaactttacgcagaaatatctatgcaaarattgctagttttgaggtttgttcagttcctgttcagtcactgtgcaatgaacttcaatatattttagttcaccttaggtgggagaagagtattcagcaaaggtggtggctaaatgcaaatttttctcaattccctccaaagcacacacggaataactgcagacatacataatgctacatttgttaaaggtaggaaaatagaagtataggtacaaccatgtctaacactttggtcaagctctgttcattctatacacagttatttttctatgcatgaatcaaaacagagtttttttccttg

SEQ ID NO: 43812 - DNA, 599 bp, Chicken  19866894282026_1
  misc_feature (1)..(102): n is any nucleotide
nnnnnnnnnnnnnnnnnnnnnnnnnnnnnnnnnnnnnnnnnnnnnnnnnnnnnnnnnnnnnnnnnnnnnnnnnnnnnnnnnnnnnnnnnnnnnnnnnnnnnntttttttccatctagctctaattagcagtgtaagatagtttctttatggtaattagcatgcagttgactctggtgttgctgtagagagtggcaaggagtgtaactatgccacattgcagtgaggtatgctgacaattatataaacttgtgttagctcttggatgattcaccctggaggcattcaaggccagtctggayggggctctgagcaacctgacctagagggaggtgtccctgcctacagcaggggggttggaaatagttggccttatgggtcccttccaacccaaaccattctatgattctaagattgcaggtaggtgttagtcacttgtctggcaaaaagcacagacacagcaagctgccacttctggctttaccactgtgccatgttgtgccttcccttcttttccagagcccatacaggtgcctgttcatccaaattagtagcatctgcaccccttcccttacattaggctcctctactgctttgccct

SEQ ID NO: 43813 - DNA, 600 bp, Chicken  19866894282026_2
atagttggccttatgggtcccttccaacccaaaccattctatgattctaagattgcaggtaggtgttagtcacttgtctggcaaaaagcacagacacagcaagctgccacttctggctttaccactgtgccatgttgtgccttcccttcttttccagagcccatacaggtgcctgttcatccaaattagtagcatctgcaccccttcccttacattaggctcctctactgctttgccctattcatacacgacatgccacagggcaagtaagagtgttaaggcaacagtttaaaaataagytagacagcagtggggaatgccattaactgggcattgttaccatctgtacctacatgtgcgttctgtctgtaagacagaaaacatgcctacacaacacagggtggactgacagactggagcataacccaaacataaaccagcctggggctctgtgcagatgttacagacaaatgctggtgtggaaaaccctttctaccctctctgttcttcctgcttttgttatctgtaatagaaagataaaagcctgttgaggtttgccattctatttcatgtcctttattttgctgcatagacatttcc

SEQ ID NO: 43814 - DNA, 599 bp, Chicken  19866894282027_1
  misc_feature (1)..(78): n is any nucleotide
nnnnnnnnnnnnnnnnnnnnnnnnnnnnnnnnnnnnnnnnnnnnnnnnnnnnnnnnnnnnnnnnnnnnnnnnnnnnnnattggttttttttcttcttttgccctcctcgaagtcatcacattttcaatataggaagctctttccttctaataaaagtcaaaccacactaattacagttacacaaacattaaccatatgctgttgctttacctgctgcaagtctctactgccagtactggattttaaagacaaccatggcatctagctgaaaatctgaacacacacagtctgcatgaacamcagctaaacaaatcacagctacagtattcagccaaacgttggtcatgcccattgcactgagaccttgctaggctgaaaaaagataacatcagaataaccttgggcctctaagaaaaccaatcaccagttgttagaaagcaggattagtcagcagagtgctttgattttttgatatattatctcaagagtcctcactatccctattgtcatgttttcagttgctcatactgcaatgacaaygctcatctgcaccctaccaygaactcacaaatcactggtcttgttatggaacatcacaa

SEQ ID NO: 43815 - DNA, 600 bp, Chicken  19866894282027_2
ttttaaagacaaccatggcatctagctgaaaatctgaacacacacagtctgcatgaacamcagctaaacaaatcacagctacagtattcagccaaacgttggtcatgcccattgcactgagaccttgctaggctgaaaaaagataacatcagaataaccttgggcctctaagaaaaccaatcaccagttgttagaaagcaggattagtcagcagagtgctttgattttttgatatattatctcaagagtcctcactatccctattgtcatgttttcagttgctcatactgcaatgacaaygctcatctgcaccctaccaygaactcacaaatcactggtcttgttatggaacatcacaagggcatactgcaagccactgctggacattatccaccatgcacctgccagacaaagttaatttcaactccctccccatcccagcatgaagcaagaacaaatcaaagggggaaaaaaaaaaaacagaacataattatttccataatcaccttcagttatctcattctttctcatgaatgcaaacacaactgttcttaaacatcaatggggagtacatgacaatgacttagggtggcggggtgg

SEQ ID NO: 43816 - DNA, 600 bp, Chicken  19866894282027_3
tctagctgaaaatctgaacacacacagtctgcatgaacamcagctaaacaaatcacagctacagtattcagccaaacgttggtcatgcccattgcactgagaccttgctaggctgaaaaaagataacatcagaataaccttgggcctctaagaaaaccaatcaccagttgttagaaagcaggattagtcagcagagtgctttgattttttgatatattatctcaagagtcctcactatccctattgtcatgttttcagttgctcatactgcaatgacaaygctcatctgcaccctaccaygaactcacaaatcactggtcttgttatggaacatcacaagggcatactgcaagccactgctggacattatccaccatgcacctgccagacaaagttaatttcaactccctccccatcccagcatgaagcaagaacaaatcaaagggggaaaaaaaaaaaacagaacataattatttccataatcaccttcagttatctcattctttctcatgaatgcaaacacaactgttcttaaacatcaatggggagtacatgacaatgacttagggtggcggggtggagaaagcactctccaacagc

SEQ ID NO: 43817 - DNA, 515 bp, Chicken  19866894282027_4
aagaaaaccaatcaccagttgttagaaagcaggattagtcagcagagtgctttgattttttgatatattatctcaagagtcctcactatccctattgtcatgttttcagttgctcatactgcaatgacaaygctcatctgcaccctaccaygaactcacaaatcactggtcttgttatggaacatcacaagggcatactgcaagccactgctggacattatccaccatgcacctgccagacaaagttaatttcaactccctccccatcccagcatgaagcaagaacaaatcaaagggggyaaaaaaaaaaacagaacataattatttccataatcaccttcagttatctcattctttctcatgaatgcaaacacaactgttcttaaacatcaatggggagtacatgacaatgacttagggtggcggggtggagaaagcactctccaacagcttttaaagcatcccttttgtcacttagttttgggtgatctatgcacacatagcttacttaaaaa

SEQ ID NO: 43818 - DNA, 514 bp, Chicken  19866894282027_5
agaaaaccaatcaccagttgttagaaagcaggattagtcagcagagtgctttgattttttgatatattatctcaagagtcctcactatccctattgtcatgttttcagttgctcatactgcaatgacaaygctcatctgcaccctaccaygaactcacaaatcactggtcttgttatggaacatcacaagggcatactgcaagccactgctggacattatccaccatgcacctgccagacaaagttaatttcaactccctccccatcccagcatgaagcaagaacaaatcaaagggggayaaaaaaaaaacagaacataattatttccataatcaccttcagttatctcattctttctcatgaatgcaaacacaactgttcttaaacatcaatggggagtacatgacaatgacttagggtggcggggtggagaaagcactctccaacagcttttaaagcatcccttttgtcacttagttttgggtgatctatgcacacatagcttacttaaaaa

SEQ ID NO: 43819 - DNA, 599 bp, Chicken  19866894282029_1
  misc_feature (1)..(198): n is any nucleotide
nnnnnnnnnnnnnnnnnnnnnnnnnnnnnnnnnnnnnnnnnnnnnnnnnnnnnnnnnnnnnnnnnnnnnnnnnnnnnnnnnnnnnnnnnnnnnnnnnnnnnnnnnnnnnnnnnnnnnnnnnnnnnnnnnnnnnnnnnnnnnnnnnnnnnnnnnnnnnnnnnnnnnnnnnnnnnnnnnnnnnnnnnnnnnnnnnnnnnnctttatttccctaaagcaacaaattaagctatacttcccattaattccggccaactgtatatagattatagaggggagttatagaggtgagaagtgacctgrattgaaacgatggtgctcagatgaatgtctaggccatctgccatggcaaacaggaaaaggtgttgtatgtcatgtgaaaggagggaaacataaaaggatgctttatgtcaagccactgagaagtattttataaacagtttggaaaaactgtaagtgatacaaatctgttggtctcagtctacacatagytctggtgagggttctataaacatattatragctatttggggaaagaaaaggttaatggctttgctaattcatatcatgcaaggctcaccctccttctttctttgtaataa

SEQ ID NO: 43820 - DNA, 599 bp, Chicken  19866894282029_2
  misc_feature (1)..(9): n is any nucleotide
nnnnnnnnnctttatttccctaaagcaacaaattaagctatacttcccattaattccggccaactgtatatagattatagaggggagttatagaggtgagaagtgacctgrattgaaacgatggtgctcagatgaatgtctaggccatctgccatggcaaacaggaaaaggtgttgtatgtcatgtgaaaggagggaaacataaaaggatgctttatgtcaagccactgagaagtattttataaacagtttggaaaaactgtaagtgatacaaatctgttggtctcagtctacacatagytctggtgagggttctataaacatattatragctatttggggaaagaaaaggttaatggctttgctaattcatatcatgcaaggctcaccctccttctttctttgtaataaatcggtaggaacccaggaatatcatcttctttctctccagtaagctcctgatgtcaaggggtcagcggtgatgttacagggtcaataggactcactttacatccagacaaatggtagtcatgtgctgccctaggagtctttgaccttttggacattagtggttgtactgcttttatgttagcctaaaga

SEQ ID NO: 43821 - DNA, 600 bp, Chicken  19866894282029_3
aaattaagctatacttcccattaattccggccaactgtatatagattatagaggggagttatagaggtgagaagtgacctgrattgaaacgatggtgctcagatgaatgtctaggccatctgccatggcaaacaggaaaaggtgttgtatgtcatgtgaaaggagggaaacataaaaggatgctttatgtcaagccactgagaagtattttataaacagtttggaaaaactgtaagtgatacaaatctgttggtctcagtctacacatagytctggtgagggttctataaacatattatragctatttggggaaagaaaaggttaatggctttgctaattcatatcatgcaaggctcaccctccttctttctttgtaataaatcggtaggaacccaggaatatcatcttctttctctccagtaagctcctgatgtcaaggggtcagcggtgatgttacagggtcaataggactcactttacatccagacaaatggtagtcatgtgctgccctaggagtctttgaccttttggacattagtggttgtactgcttttatgttagcctaaagaattgaaaggtgacagcatatgttaggctgg

SEQ ID NO: 43822 - DNA, 600 bp, Chicken  19866894282029_4
aagctcctgatgtcaaggggtcagcggtgatgttacagggtcaataggactcactttacatccagacaaatggtagtcatgtgctgccctaggagtctttgaccttttggacattagtggttgtactgcttttatgttagcctaaagaattgaaaggtgacagcatatgttaggctggaggacagttatgactttgttaagtattgtaaagcagatacagagtatctgtaaaacagtctcggagacttaagtatacaagttcaaacaaactcaaacagatgtaaatagcttcttcagtgwcgtttggtttcttgtagtttatctgtgatccttggctttgtatttatatacttttggatagagaaaatcacatccatctattgcttctcaaggcagcccatccaaacatactttctaagggtctaaatgagactgggctcgctgtcttccttccagccaccctgcacaggtttcctagtcaagtgtcctgctggggctcctttgacactgataaagtccatagttgggatgcacagggtacatttctgcccacaccaacaaagcaagtgttgtggagaccagtaaaatcatttgcatgga

SEQ ID NO: 43823 - DNA, 600 bp, Chicken  19866894282030_1
ctccagccctctgatcatctttgtggccctcctctggaccctctccaacagctctctgtctttcttgtgctgggggctccagacctggacgcagtactctagatggggcctcacaagagtagagtagagagagacaatcacctccctgtccctgctggtcacccctctactgatggagcccaggataccctttgctttccaggctgcaagggcactggctcacgttcagtttttcatccaccaggacccccaggtccgtctccacagggatactctcagggtggtcttctcccagtctgyatacatatgtggggttactccgatccaagtgcaaaacattgcactttgctatgttgaacctcattagtttgtcaaggtccctttggatggtgtcacttccttcwaacgtgtcaactgcaccactcagcttggcatcatcagcaaacttgctgaaggtgcactcaagcctgtaattgatgtcattgaaggtgttgaagagaaccttcatgctaggatttcaagtgcagtaaccaaatatagatattttgttataagcattaagagaaggggtaaaaattgaggattaaatcgacttattcc

SEQ ID NO: 43824 - DNA, 600 bp, Chicken  19866894282030_2
ggggcctcacaagagtagagtagagagagacaatcacctccctgtccctgctggtcacccctctactgatggagcccaggataccctttgctttccaggctgcaagggcactggctcacgttcagtttttcatccaccaggacccccaggtccgtctccacagggatactctcagggtggtcttctcccagtctgyatacatatgtggggttactccgatccaagtgcaaaacattgcactttgctatgttgaacctcattagtttgtcaaggtccctttggatggtgtcacttccttcwaacgtgtcaactgcaccactcagcttggcatcatcagcaaacttgctgaaggtgcactcaagcctgtaattgatgtcattgaaggtgttgaagagaaccttcatgctaggatttcaagtgcagtaaccaaatatagatattttgttataagcattaagagaaggggtaaaaattgaggattaaatcgacttattcctccttcgttgttttttttttttaagaaaggagttggggcctggtttgtaataggcactgtttgtcttgtttttcatgtttttcagctttatgtgaaacacagag

SEQ ID NO: 43825 - DNA, 600 bp, Chicken  19866894282037_1
tgtcaagttcatcgcagggaaaactattaacaagaggttgtggggagtacatggcaggtacttttacatttttcaccctgcttcttgtcttccttcttgaaatctgctctttggtccttgtggcatgtcagcaacaccgccttacagtcctgtacacttcccttccctgccagcatccatgtgtaactaattcatgctgcttctgaatcagcttcctaagaggcctggctggttatttcacagtcaccaaggaaacttgacattcaaaaaacatacttgaagaagctggaaaatatcctytctgtccctagcagwatagaacccaaagtgatttgggtggtcaaaaactgcaaaaagcatttattacccttycatgggcttgctgtctgctgtgtagaaattattagcaatatttggacttccatgagctatagatcaaacatatattgtacatatatacaaaaataataatgtgttaatggtacatgtaaatctagtgcacttctttgtgactaatagtatatttatggtcatgttcaaaccttagaatgcttcatttttttrattcatatcaaggcaaaaatgagatctatgtaaaaa

SEQ ID NO: 43826 - DNA, 600 bp, Chicken  19866894282037_2
agggaaaactattaacaagaggttgtggggagtacatggcaggtacttttacatttttcaccctgcttcttgtcttccttcttgaaatctgctctttggtccttgtggcatgtcagcaacaccgccttacagtcctgtacacttcccttccctgccagcatccatgtgtaactaattcatgctgcttctgaatcagcttcctaagaggcctggctggttatttcacagtcaccaaggaaacttgacattcaaaaaacatacttgaagaagctggaaaatatcctytctgtccctagcagwatagaacccaaagtgatttgggtggtcaaaaactgcaaaaagcatttattacccttycatgggcttgctgtctgctgtgtagaaattattagcaatatttggacttccatgagctatagatcaaacatatattgtacatatatacaaaaataataatgtgttaatggtacatgtaaatctagtgcacttctttgtgactaatagtatatttatggtcatgttcaaaccttagaatgcttcatttttttrattcatatcaaggcaaaaatgagatctatgtaaaaaaatgctgtaatatgg

SEQ ID NO: 43827 - DNA, 600 bp, Chicken  19866894282037_3
tcaccctgcttcttgtcttccttcttgaaatctgctctttggtccttgtggcatgtcagcaacaccgccttacagtcctgtacacttcccttccctgccagcatccatgtgtaactaattcatgctgcttctgaatcagcttcctaagaggcctggctggttatttcacagtcaccaaggaaacttgacattcaaaaaacatacttgaagaagctggaaaatatcctytctgtccctagcagwatagaacccaaagtgatttgggtggtcaaaaactgcaaaaagcatttattacccttycatgggcttgctgtctgctgtgtagaaattattagcaatatttggacttccatgagctatagatcaaacatatattgtacatatatacaaaaataataatgtgttaatggtacatgtaaatctagtgcacttctttgtgactaatagtatatttatggtcatgttcaaaccttagaatgcttcatttttttrattcatatcaaggcaaaaatgagatctatgtaaaaaaatgctgtaatatggaaagaagtgcctgattcacatytttggaaatggggatgccagtacagaagtaaagct

SEQ ID NO: 43828 - DNA, 559 bp, Chicken  19866894282037_4
caaaaaacatacttgaagaagctggaaaatatcctytctgtccctagcagwatagaacccaaagtgatttgggtggtcaaaaactgcaaaaagcatttattacccttycatgggcttgctgtctgctgtgtagaaattattagcaatatttggacttccatgagctatagatcaaacatatattgtacatatatacaaaaataataatgtgttaatggtacatgtaaatctagtgcacttctttgtgactaatagtatatttatggtcatgttcaaaccttagaatgcttcatttttttrattcatatcaaggcaaaaatgagatctatgtaaaaaaatgctgtaatatggaaagaagtgcctgattcacatytttggaaatggggatgccagtacagaagtaaagcttgactttcacagtattttatttgcagctttggggaaggtgcatagaaggtctcttcacctctttgtgcccatagcctttggcttatctgtttagcacaagtttttcccagcagaggctatgtgctcccactgtattgtaagatacatgata

SEQ ID NO: 43829 - DNA, 486 bp, Chicken  19866894282037_5
tggtcaaaaactgcaaaaagcatttattacccttycatgggcttgctgtctgctgtgtagaaattattagcaatatttggacttccatgagctatagatcaaacatatattgtacatatatacaaaaataataatgtgttaatggtacatgtaaatctagtgcacttctttgtgactaatagtatatttatggtcatgttcaaaccttagaatgcttcatttttttrattcatatcaaggcaaaaatgagatctatgtaaaaaaatgctgtaatatggaaagaagtgcctgattcacatytttggaaatggggatgccagtacagaagtaaagcttgactttcacagtattttatttgcagctttggggaaggtgcatagaaggtctcttcacctctttgtgcccatagcctttggcttatctgtttagcacaagtttttcccagcagaggctatgtgctcccactgtattgtaagatacatgata

SEQ ID NO: 43830 - DNA, 599 bp, Chicken  19866894282042_1
  misc_feature (1)..(250): n is any nucleotide
nnnnnnnnnnnnnnnnnnnnnnnnnnnnnnnnnnnnnnnnnnnnnnnnnnnnnnnnnnnnnnnnnnnnnnnnnnnnnnnnnnnnnnnnnnnnnnnnnnnnnnnnnnnnnnnnnnnnnnnnnnnnnnnnnnnnnnnnnnnnnnnnnnnnnnnnnnnnnnnnnnnnnnnnnnnnnnnnnnnnnnnnnnnnnnnnnnnnnnnnnnnnnnnnnnnnnnnnnnnnnnnnnnnnnnnnnnnnnnnnnnnnnnnnnntataatattctatctgaactttaaagaagcattcacacaataaactgtaygatatgctattgtgcacatttcattgcatctggtctacttattcaattaaaatctgatgttatcaaaattgaatattgtcgattatttactatttgctaagagagccatttcttttaagtttgtctgagagagctaaattttcctctagaaatgcatgtgtactgaaaccatttgaaattgacaaagtagtaagcccttgctaaccacttatatgattactgagctcaawaacattccctatagcaaataaataaaaagtattgggaacagaaaaaaaatctgaaaaatatataatkta

SEQ ID NO: 43831 - DNA, 599 bp, Chicken  19866894282042_2
  misc_feature (1)..(20): n is any nucleotide
nnnnnnnnnnnnnnnnnnnntataatattctatctgaactttaaagaagcattcacacaataaactgtaygatatgctattgtgcacatttcattgcatctggtctacttattcaattaaaatctgatgttatcaaaattgaatattgtcgattatttactatttgctaagagagccatttcttttaagtttgtctgagagagctaaattttcctctagaaatgcatgtgtactgaaaccatttgaaattgacaaagtagtaagcccttgctaaccacttatatgattactgagctcaawaacattccctatagcaaataaataaaaagtattgggaacagaaaaaaaatctgaaaaatatataatktatgtccaggcttacagatttactgaagctgattactttgtcatgggtgaattcatttttattatgggtgaactgctgtatgaaaaacagtaacgtctgacaagtgtactagagaaactgatactcagtagaaaactgacttcaaaactcaagcaagattttaaacaaaacttactttttccatgtgttcatatattttataacaagctagataaatgtctgttgtcacttg

SEQ ID NO: 43832 - DNA, 600 bp, Chicken  19866894282042_3
taygatatgctattgtgcacatttcattgcatctggtctacttattcaattaaaatctgatgttatcaaaattgaatattgtcgattatttactatttgctaagagagccatttcttttaagtttgtctgagagagctaaattttcctctagaaatgcatgtgtactgaaaccatttgaaattgacaaagtagtaagcccttgctaaccacttatatgattactgagctcaawaacattccctatagcaaataaataaaaagtattgggaacagaaaaaaaatctgaaaaatatataatktatgtccaggcttacagatttactgaagctgattactttgtcatgggtgaattcatttttattatgggtgaactgctgtatgaaaaacagtaacgtctgacaagtgtactagagaaactgatactcagtagaaaactgacttcaaaactcaagcaagattttaaacaaaacttactttttccatgtgttcatatattttataacaagctagataaatgtctgttgtcacttgttcaagtgactgatggctgagtacrgaaataatttgcttcccaaatgcagtactaaagcagtttccaa

SEQ ID NO: 43833 - DNA, 600 bp, Chicken  19866894282042_4
aaaagtattgggaacagaaaaaaaatctgaaaaatatataatktatgtccaggcttacagatttactgaagctgattactttgtcatgggtgaattcatttttattatgggtgaactgctgtatgaaaaacagtaacgtctgacaagtgtactagagaaactgatactcagtagaaaactgacttcaaaactcaagcaagattttaaacaaaacttactttttccatgtgttcatatattttataacaagctagataaatgtctgttgtcacttgttcaagtgactgatggctgagtacrgaaataatttgcttcccaaatgcagtactaaagcagtttccaaaataaagatgcaattgaatatgctctccaaataaaaagatgttaacaaataaattctagacaaaaaggtgagcaggaaaatctagtcccatcatgtaacactgtcagaacacgggctgtagccactggggatttatgaatggccggatttggctgcttgcaagcagtccagtttcactagaactgaggatatgtcagttcctatatgacaggaaaacaaatggtgaaagtactggctgcaagtctttaaatttttcg

SEQ ID NO: 43834 - DNA, 600 bp, Chicken  19866894282045_1
tctttttaacttcttttacacatctttacttatctttttgtgaaaatattctgtctgcaaacatctctaatcttctgcagccattaatggatggaacagcaatagaataagctgcactataaactgtcctagtgcaattgtgtcagactctgtgtatcaattgctatcatagactccaatttccactttttcttagcagtccagcacccaatggaaagctctgtggacagaaaccacataggcagtatgtggcaggcaaaccactgtgatatcaaagcactactattaagtgttcaagtrtcatgacagtcttatccacagtggaataaaaggtaagtgccatctaaagacatctactattttgttattcctgtggtaagacactgtctgactgaactcaaaattgccattcgcagttcaayaccttgagtgaaataagctagcacttaggatgtccatgcttcacctgcgtttggggctagaataaattttatacagacaacatacaactcaatggaacaatctctgtgcttttgcagaagatttcaactggctttaaggccaaataaaagatctttttatccatagttctgtaaacaa

SEQ ID NO: 43835 - DNA, 593 bp, Chicken  19866894282045_2
actgtcctagtgcaattgtgtcagactctgtgtatcaattgctatcatagactccaatttccactttttcttagcagtccagcacccaatggaaagctctgtggacagaaaccacataggcagtatgtggcaggcaaaccactgtgatatcaaagcactactattaagtgttcaagtrtcatgacagtcttatccacagtggaataaaaggtaagtgccatctaaagacatctactattttgttattcctgtggtaagacactgtctgactgaactcaaaattgccattcgcagttcaayaccttgagtgaaataagctagcacttaggatgtccatgcttcacctgcgtttggggctagaataaattttatacagacaacatacaactcaatggaacaatctctgtgcttttgcagaagatttcaactggctttaaggccaaataaaagatctttttatccatagttctgtaaacaacctcttaaaacacttattactggatgtttgcaacaattccagcaagtatatgagtattataatcaagatgttaagcatagaacaagcatattttttaggtatccatgcaatataa

SEQ ID NO: 43836 - DNA, 600 bp, Chicken  19866894282047_1
ctcccttaatgaaaaccgaataatagggttttttttgttgtttttttttttaaagtttttctggttgtccggagaaaagtcatgacaacttgaaataatcattgattgatgtgactaaacaaaatcatctgagtacttctatggataataagagagattaactatggcgttctaagtgagaatcagatctaaaagaaaataggtgattggcctgacaaccacctccctaaatcaccccaaagggatagccttgaaaaataatagatctggtaatgtagaaaaaaaataaattctattcakaggaggctgagatacatcagggtgaagccttcagcaggaagccttttaatttgccaggagctcttacccacaaggacaaacagctgaggaagcccagcgaaaccaggagctgggaggctttggcaggctgaaaccagcccaaggcagggagctgatcatgaggacacagcagcagctcagtggagagattttaaggcgctcttggagccttcctttaaaacagacaaaacagggattttatttttctttgtcattttcacattcttctcttcccttagaacagaggcagagttaatccct

SEQ ID NO: 43837 - DNA, 600 bp, Chicken  19866894282051_1
ggacaggcctggggcttcatgcttacaggagatgatctcctgaaccactgtgctgtttgtaagcagttttataccagaaataatgatttagttgtgtttgttttttaactttgactctcgtgtgctctgtgatcctcgcttgtttcggcgtgatgctcattttgctttacccctcaccccaatgctgttctcctgagcctgaacagccccagcacagcgcccccaaaccatctgtgttcaaaaggaaggctgcagctcagcctcggccgggtctcactgtgaatgctgtatgaattcagygtrtgcacggaatacccatcggctcaaagcccgttggagagcagctgctgctcagtgccttcatcaaccccacctgtgtgtcctgcagctctgtgccgcccctccgctccttccttatggctccttatggggacgaagcaaacatcgctgttatttcgtaacacttttgtatcccgttgctgcggccccggcaccgtttgccatgcaggttttctacgataatcattatgggagagttctgtaattttgtgtgcaactttttacaaaaaataaatcctaaaggtgctatagtaaaaaaaa

SEQ ID NO: 43838 - DNA, 600 bp, Chicken  19866894282051_2
caggcctggggcttcatgcttacaggagatgatctcctgaaccactgtgctgtttgtaagcagttttataccagaaataatgatttagttgtgtttgttttttaactttgactctcgtgtgctctgtgatcctcgcttgtttcggcgtgatgctcattttgctttacccctcaccccaatgctgttctcctgagcctgaacagccccagcacagcgcccccaaaccatctgtgttcaaaaggaaggctgcagctcagcctcggccgggtctcactgtgaatgctgtatgaattcagygtrtgcacggaatacccatcggctcaaagcccgttggagagcagctgctgctcagtgccttcatcaaccccacctgtgtgtcctgcagctctgtgccgcccctccgctccttccttatggctccttatggggacgaagcaaacatcgctgttatttcgtaacacttttgtatcccgttgctgcggccccggcaccgtttgccatgcaggttttctacgataatcattatgggagagttctgtaattttgtgtgcaactttttacaaaaaataaatcctaaaggtgctatagtaaaaaaaaaat

SEQ ID NO: 43839 - DNA, 600 bp, Chicken  19866894282056_1
aaatgttcttcaaaatgtaaaatattcaagaaaaaagtgtttttacaaaacgtatgttttaaatattgcccagctctgtgattatttttgtagggtctgaaacagaagttaaatacataggcaaaatcttggatggcttttccttggcatcaaagccatcagctccaaacaaggtaagcagataatgacgtttttgcagtaagaataacattcaaagcaaagttgatgtgtgaaatgtatggattttactgtggcgtaatacttttttatgttcttcaaaatgaaagttctaataagcawtaaagattgctgactaagcraaaaagtcaaactactggatgaatttaaactgtgcccatgttcagrctttgaacaaatacattcactgttactttgcgtgaagttggaagaataatttgatttaacttcgcaataaaaaatgcacatctgcttttacatctttcagatgtaacatccagttttctgtaaaaatcgggccccatgctttgtctccttcactgtttttgtgacaagytagtttgtcagcctgattctttgcttagcatcttctatgccatgagtgtttccgtaaattagagt

SEQ ID NO: 43840 - DNA, 600 bp, Chicken  19866894282056_2
aatattcaagaaaaaagtgtttttacaaaacgtatgttttaaatattgcccagctctgtgattatttttgtagggtctgaaacagaagttaaatacataggcaaaatcttggatggcttttccttggcatcaaagccatcagctccaaacaaggtaagcagataatgacgtttttgcagtaagaataacattcaaagcaaagttgatgtgtgaaatgtatggattttactgtggcgtaatacttttttatgttcttcaaaatgaaagttctaataagcawtaaagattgctgactaagcraaaaagtcaaactactggatgaatttaaactgtgcccatgttcagrctttgaacaaatacattcactgttactttgcgtgaagttggaagaataatttgatttaacttcgcaataaaaaatgcacatctgcttttacatctttcagatgtaacatccagttttctgtaaaaatcgggccccatgctttgtctccttcactgtttttgtgacaagytagtttgtcagcctgattctttgcttagcatcttctatgccatgagtgtttccgtaaattagagtggtcatcagagctgtgcgcc

SEQ ID NO: 43841 - DNA, 600 bp, Chicken  19866894282056_3
tgcccagctctgtgattatttttgtagggtctgaaacagaagttaaatacataggcaaaatcttggatggcttttccttggcatcaaagccatcagctccaaacaaggtaagcagataatgacgtttttgcagtaagaataacattcaaagcaaagttgatgtgtgaaatgtatggattttactgtggcgtaatacttttttatgttcttcaaaatgaaagttctaataagcawtaaagattgctgactaagcraaaaagtcaaactactggatgaatttaaactgtgcccatgttcagrctttgaacaaatacattcactgttactttgcgtgaagttggaagaataatttgatttaacttcgcaataaaaaatgcacatctgcttttacatctttcagatgtaacatccagttttctgtaaaaatcgggccccatgctttgtctccttcactgtttttgtgacaagytagtttgtcagcctgattctttgcttagcatcttctatgccatgagtgtttccgtaaattagagtggtcatcagagctgtgcgccgtggtccttctgctaatgcagaaaggagaaacatttgcatgatata

SEQ ID NO: 43842 - DNA, 551 bp, Chicken  19866894282056_4
tgtatggattttactgtggcgtaatacttttttatgttcttcaaaatgaaagttctaataagcawtaaagattgctgactaagcraaaaagtcaaactactggatgaatttaaactgtgcccatgttcagrctttgaacaaatacattcactgttactttgcgtgaagttggaagaataatttgatttaacttcgcaataaaaaatgcacatctgcttttacatctttcagatgtaacatccagttttctgtaaaaatcgggccccatgctttgtctccttcactgtttttgtgacaagytagtttgtcagcctgattctttgcttagcatcttctatgccatgagtgtttccgtaaattagagtggtcatcagagctgtgcgccgtggtccttctgctaatgcagaaaggagaaacatttgcatgatatataaaactgcgttctgtaagaggcagtggtgtaatctttgaatttgtagcttgcatgaagaacggagaaaaagggctgatgaaagacatgaaaatacattaagcagagaagtactcaacag

SEQ ID NO: 43843 - DNA, 600 bp, Chicken  19866894282059_1
tgagctccttaaaaatatcccataccataggaaaagctgcaagataacttctcagagaatctactgcagaaggaagcaaatggccaagccaaattatttctacccactagacttgccaagtaaaagaaggtgaaattagcagatagagttatttatgattaaaacagacacaggtagcattcaggtcatatgcttcaagaatgaaaaatctgaggtcatttgacttccttaacttttccaagcaccacatgggagtgacattcattgtatggagtctgaatgaatgaacgtgagaatgarcagctcagtaggcagtatgctaaaacaacagcagtcatctctctcttcctatatgcaattttcaagaattatattcaggttataccatgcactaacagcagcagcattcarttgaaaagrgatgtgtcattttaatttacccatgtttccacactgaaattcaagamaacaaacctcagctagcttttaagtagygtgagtaacaccragatccactgcccatgtcagtaccaatttatagcagccttcagtgtaggaaaatgtggaaggagacaatactgaaaaaaagactggagttaa

SEQ ID NO: 43844 - DNA, 600 bp, Chicken  19866894282059_2
cttgccaagtaaaagaaggtgaaattagcagatagagttatttatgattaaaacagacacaggtagcattcaggtcatatgcttcaagaatgaaaaatctgaggtcatttgacttccttaacttttccaagcaccacatgggagtgacattcattgtatggagtctgaatgaatgaacgtgagaatgarcagctcagtaggcagtatgctaaaacaacagcagtcatctctctcttcctatatgcaattttcaagaattatattcaggttataccatgcactaacagcagcagcattcarttgaaaagrgatgtgtcattttaatttacccatgtttccacactgaaattcaagamaacaaacctcagctagcttttaagtagygtgagtaacaccragatccactgcccatgtcagtaccaatttatagcagccttcagtgtaggaaaatgtggaaggagacaatactgaaaaaaagactggagttaacagctatggctacagctctgcyagttataagaacatgaatgatgtctctgctaatgcatcacaagtctgaactacttcattccctgttcttactgtcttgagccttctgta

SEQ ID NO: 43845 - DNA, 600 bp, Chicken  19866894282059_3
taaaagaaggtgaaattagcagatagagttatttatgattaaaacagacacaggtagcattcaggtcatatgcttcaagaatgaaaaatctgaggtcatttgacttccttaacttttccaagcaccacatgggagtgacattcattgtatggagtctgaatgaatgaacgtgagaatgarcagctcagtaggcagtatgctaaaacaacagcagtcatctctctcttcctatatgcaattttcaagaattatattcaggttataccatgcactaacagcagcagcattcarttgaaaagrgatgtgtcattttaatttacccatgtttccacactgaaattcaagamaacaaacctcagctagcttttaagtagygtgagtaacaccragatccactgcccatgtcagtaccaatttatagcagccttcagtgtaggaaaatgtggaaggagacaatactgaaaaaaagactggagttaacagctatggctacagctctgcyagttataagaacatgaatgatgtctctgctaatgcatcacaagtctgaactacttcattccctgttcttactgtcttgagccttctgtagaatgaata

SEQ ID NO: 43846 - DNA, 600 bp, Chicken  19866894282059_4
acacaggtagcattcaggtcatatgcttcaagaatgaaaaatctgaggtcatttgacttccttaacttttccaagcaccacatgggagtgacattcattgtatggagtctgaatgaatgaacgtgagaatgarcagctcagtaggcagtatgctaaaacaacagcagtcatctctctcttcctatatgcaattttcaagaattatattcaggttataccatgcactaacagcagcagcattcarttgaaaagrgatgtgtcattttaatttacccatgtttccacactgaaattcaagamaacaaacctcagctagcttttaagtagygtgagtaacaccragatccactgcccatgtcagtaccaatttatagcagccttcagtgtaggaaaatgtggaaggagacaatactgaaaaaaagactggagttaacagctatggctacagctctgcyagttataagaacatgaatgatgtctctgctaatgcatcacaagtctgaactacttcattccctgttcttactgtcttgagccttctgtagaatgaatactattacattgtactgcagtttcagggacaaaaaataaccacaggtc

SEQ ID NO: 43847 - DNA, 600 bp, Chicken  19866894282059_5
caagaatgaaaaatctgaggtcatttgacttccttaacttttccaagcaccacatgggagtgacattcattgtatggagtctgaatgaatgaacgtgagaatgarcagctcagtaggcagtatgctaaaacaacagcagtcatctctctcttcctatatgcaattttcaagaattatattcaggttataccatgcactaacagcagcagcattcarttgaaaagrgatgtgtcattttaatttacccatgtttccacactgaaattcaagamaacaaacctcagctagcttttaagtagygtgagtaacaccragatccactgcccatgtcagtaccaatttatagcagccttcagtgtaggaaaatgtggaaggagacaatactgaaaaaaagactggagttaacagctatggctacagctctgcyagttataagaacatgaatgatgtctctgctaatgcatcacaagtctgaactacttcattccctgttcttactgtcttgagccttctgtagaatgaatactattacattgtactgcagtttcagggacaaaaaataaccacaggtcttctttacaaaagtattttcacttygga

SEQ ID NO: 43848 - DNA, 600 bp, Chicken  19866894282059_6
tctgaggtcatttgacttccttaacttttccaagcaccacatgggagtgacattcattgtatggagtctgaatgaatgaacgtgagaatgarcagctcagtaggcagtatgctaaaacaacagcagtcatctctctcttcctatatgcaattttcaagaattatattcaggttataccatgcactaacagcagcagcattcarttgaaaagrgatgtgtcattttaatttacccatgtttccacactgaaattcaagamaacaaacctcagctagcttttaagtagygtgagtaacaccragatccactgcccatgtcagtaccaatttatagcagccttcagtgtaggaaaatgtggaaggagacaatactgaaaaaaagactggagttaacagctatggctacagctctgcyagttataagaacatgaatgatgtctctgctaatgcatcacaagtctgaactacttcattccctgttcttactgtcttgagccttctgtagaatgaatactattacattgtactgcagtttcagggacaaaaaataaccacaggtcttctttacaaaagtattttcacttyggatcggaacccagca

SEQ ID NO: 43849 - DNA, 600 bp, Chicken  19866894282059_7
aaacaacagcagtcatctctctcttcctatatgcaattttcaagaattatattcaggttataccatgcactaacagcagcagcattcarttgaaaagrgatgtgtcattttaatttacccatgtttccacactgaaattcaagamaacaaacctcagctagcttttaagtagygtgagtaacaccragatccactgcccatgtcagtaccaatttatagcagccttcagtgtaggaaaatgtggaaggagacaatactgaaaaaaagactggagttaacagctatggctacagctctgcyagttataagaacatgaatgatgtctctgctaatgcatcacaagtctgaactacttcattccctgttcttactgtcttgagccttctgtagaatgaatactattacattgtactgcagtttcagggacaaaaaataaccacaggtcttctttacaaaagtattttcacttyggatcggaacccagcatgaatcttggttgctgcagatggaaagttggccagttacagtttgtttctgatttgatatttcagcctgctggctctaggtaaagctattttaagagacaaatcttcctttcag

SEQ ID NO: 43850 - DNA, 600 bp, Chicken  19866894282059_8
agygtgagtaacaccragatccactgcccatgtcagtaccaatttatagcagccttcagtgtaggaaaatgtggaaggagacaatactgaaaaaaagactggagttaacagctatggctacagctctgcyagttataagaacatgaatgatgtctctgctaatgcatcacaagtctgaactacttcattccctgttcttactgtcttgagccttctgtagaatgaatactattacattgtactgcagtttcagggacaaaaaataaccacaggtcttctttacaaaagtattttcacttyggatcggaacccagcatgaatcttggttgctgcagatggaaagttggccagttacagtttgtttctgatttgatatttcagcctgctggctctaggtaaagctattttaagagacaaatcttcctttcagaatgaagctttacctggctgctgcttgcaaaccagctgctctgtgtatttgtacagaaagagaaacagtttgagcagttcttcttgctgccatttttacagaacgttggtatctcacactcacatcaagcaagcctgtattaaatgagagaaagaatgcaaagaaaaggt

SEQ ID NO: 43851 - DNA, 599 bp, Chicken  19866894282063_1
  misc_feature (1)..(72): n is any nucleotide
nnnnnnnnnnnnnnnnnnnnnnnnnnnnnnnnnnnnnnnnnnnnnnnnnnnnnnnnnnnnnnnnnnnnnnnnacaggttgctgccattgctggtagtacgtcatttgggctaattccactgaatctgtaccagaatgatatgagtgaattacacgctgcaatttcgataacctgggtctattttgcttagtttttgctgagttgttgcatgttcagttttatgggttttgacatagtcacagttaaccgttggggatggctggtgcatgatccttccttatagtgtgtgatgtttacaasagatttcctaagatgtgcactttggacagttaaggattgcacggcagccttacgtagccccagatcactgccattgaattgattatgaacaggagtgcacttggaacrtcacccattaatcggattgctggcaagtattctttcagaggtgtgatgtgtaacatctcactwaaatcaaggtactacattggtcacaratgcctcaggtggctgggcttctagctgttggtgctcctacaggctgaacatttmgtattttcatttaaggagttcaagatgtagaattaatggactgggta

SEQ ID NO: 43852 - DNA, 589 bp, Chicken  19866894282063_10
ttcactgaacataatacaaagagacctattttgatgtagttgcatttagtttgggaagttaatgttgtgagctttctgtacagaggatatatttcaggggcaaagmataagtgaagataytatgtaacatgtgaattacagagagcacagtagaaatttcttgtactgctccttggaataaatacagatagggttgagtacctttttctataaggggaattatgctgtactgtcttgggtaaagcagcaatytactcgtaggcaaaagccctccctgttacagaggttgtcagacacctytcattaggagaccgtgttttacagtgcctacaagagtgtcagctggaaccacttgggctgaaatttttatgagttgagtgtctagctcagggtgactttttttctttgatcatttctgttatctctgtattgtggaatagggatttctgtctccatgttctccaagcctgttacttgaccaattgggctctttcaagtcttcagttgttagatctttgaagatttctttgttattatcttcctatctcttcttgtgcttgttaaattccaggcgcatcagtcccataaa

SEQ ID NO: 43853 - DNA, 600 bp, Chicken  19866894282063_2
gctaattccactgaatctgtaccagaatgatatgagtgaattacacgctgcaatttcgataacctgggtctattttgcttagtttttgctgagttgttgcatgttcagttttatgggttttgacatagtcacagttaaccgttggggatggctggtgcatgatccttccttatagtgtgtgatgtttacaasagatttcctaagatgtgcactttggacagttaaggattgcacggcagccttacgtagccccagatcactgccattgaattgattatgaacaggagtgcacttggaacrtcacccattaatcggattgctggcaagtattctttcagaggtgtgatgtgtaacatctcactwaaatcaaggtactacattggtcacaratgcctcaggtggctgggcttctagctgttggtgctcctacaggctgaacatttmgtattttcatttaaggagttcaagatgtagaattaatggactgggtacttagatgtacacaacagccagtagatgaaaactaggagtgttcacaaggtggcattttgtaatgcaggtggtggctgagttcttacctgaggacagaactttcttaaa

SEQ ID NO: 43854 - DNA, 600 bp, Chicken  19866894282063_3
ctgggtctattttgcttagtttttgctgagttgttgcatgttcagttttatgggttttgacatagtcacagttaaccgttggggatggctggtgcatgatccttccttatagtgtgtgatgtttacaasagatttcctaagatgtgcactttggacagttaaggattgcacggcagccttacgtagccccagatcactgccattgaattgattatgaacaggagtgcacttggaacrtcacccattaatcggattgctggcaagtattctttcagaggtgtgatgtgtaacatctcactwaaatcaaggtactacattggtcacaratgcctcaggtggctgggcttctagctgttggtgctcctacaggctgaacatttmgtattttcatttaaggagttcaagatgtagaattaatggactgggtacttagatgtacacaacagccagtagatgaaaactaggagtgttcacaaggtggcattttgtaatgcaggtggtggctgagttcttacctgaggacagaactttcttaaatttatttctggtacactgtgattttatgttggctctctaatagagagggcctgttaggagaat

SEQ ID NO: 43855 - DNA, 600 bp, Chicken  19866894282063_4
tgagttgttgcatgttcagttttatgggttttgacatagtcacagttaaccgttggggatggctggtgcatgatccttccttatagtgtgtgatgtttacaasagatttcctaagatgtgcactttggacagttaaggattgcacggcagccttacgtagccccagatcactgccattgaattgattatgaacaggagtgcacttggaacrtcacccattaatcggattgctggcaagtattctttcagaggtgtgatgtgtaacatctcactwaaatcaaggtactacattggtcacaratgcctcaggtggctgggcttctagctgttggtgctcctacaggctgaacatttmgtattttcatttaaggagttcaagatgtagaattaatggactgggtacttagatgtacacaacagccagtagatgaaaactaggagtgttcacaaggtggcattttgtaatgcaggtggtggctgagttcttacctgaggacagaactttcttaaatttatttctggtacactgtgattttatgttggctctctaatagagagggcctgttaggagaatgtcaacatgacccagagcctctgatt

SEQ ID NO: 43856 - DNA, 600 bp, Chicken  19866894282063_5
gggatggctggtgcatgatccttccttatagtgtgtgatgtttacaasagatttcctaagatgtgcactttggacagttaaggattgcacggcagccttacgtagccccagatcactgccattgaattgattatgaacaggagtgcacttggaacrtcacccattaatcggattgctggcaagtattctttcagaggtgtgatgtgtaacatctcactwaaatcaaggtactacattggtcacaratgcctcaggtggctgggcttctagctgttggtgctcctacaggctgaacatttmgtattttcatttaaggagttcaagatgtagaattaatggactgggtacttagatgtacacaacagccagtagatgaaaactaggagtgttcacaaggtggcattttgtaatgcaggtggtggctgagttcttacctgaggacagaactttcttaaatttatttctggtacactgtgattttatgttggctctctaatagagagggcctgttaggagaatgtcaacatgacccagagcctctgattccttagtgctcagtgagaagacaaagaaagaagaaaaagaacttactaggtacag

SEQ ID NO: 43857 - DNA, 600 bp, Chicken  19866894282063_6
ccttagtgctcagtgagaagacaaagaaagaagaaaaagaacttactaggtacagtagatgacataattgcgtcagatattttaccatcattgggttcattatactgatttttcaaatgagttttttttctacaccaaacttctgccagcagagagagagccttgcctcttctttctcttatttctcctcctcccaaaacctgattgttaacctatctggaagacaaagctaagtaattttaatttcagaagatttcactgttcgactactttgaaatgagtatttctaaagataaacarttgtatcctaggagcaggcagaccagaagctaatactgctatggcaacttcactgaacataatacaaagagacctattttgatgtagttgcatttagtttgggaagttaatgttgtgagctttctgtacagaggatatatttcaggggcaaagmataagtgaagataytatgtaacatgtgaattacagagagcacagtagaaatttcttgtactgctccttggaataaatacagatagggttgagtacctttttctataaggggaattatgctgtactgtcttgggtaaagcagcaaty

SEQ ID NO: 43858 - DNA, 600 bp, Chicken  19866894282063_7
agagagccttgcctcttctttctcttatttctcctcctcccaaaacctgattgttaacctatctggaagacaaagctaagtaattttaatttcagaagatttcactgttcgactactttgaaatgagtatttctaaagataaacarttgtatcctaggagcaggcagaccagaagctaatactgctatggcaacttcactgaacataatacaaagagacctattttgatgtagttgcatttagtttgggaagttaatgttgtgagctttctgtacagaggatatatttcaggggcaaagmataagtgaagataytatgtaacatgtgaattacagagagcacagtagaaatttcttgtactgctccttggaataaatacagatagggttgagtacctttttctataaggggaattatgctgtactgtcttgggtaaagcagcaatytactcgtaggcaaaagccctccctgttacagaggttgtcagacacctytcattaggagaccgtgttttacagtgcctacaagagtgtcagctggaaccacttgggctgaaatttttatgagttgagtgtctagctcagggtgactttttttctt

SEQ ID NO: 43859 - DNA, 600 bp, Chicken  19866894282063_8
cttctttctcttatttctcctcctcccaaaacctgattgttaacctatctggaagacaaagctaagtaattttaatttcagaagatttcactgttcgactactttgaaatgagtatttctaaagataaacarttgtatcctaggagcaggcagaccagaagctaatactgctatggcaacttcactgaacataatacaaagagacctattttgatgtagttgcatttagtttgggaagttaatgttgtgagctttctgtacagaggatatatttcaggggcaaagmataagtgaagataytatgtaacatgtgaattacagagagcacagtagaaatttcttgtactgctccttggaataaatacagatagggttgagtacctttttctataaggggaattatgctgtactgtcttgggtaaagcagcaatytactcgtaggcaaaagccctccctgttacagaggttgtcagacacctytcattaggagaccgtgttttacagtgcctacaagagtgtcagctggaaccacttgggctgaaatttttatgagttgagtgtctagctcagggtgactttttttctttgatcatttctgtt

SEQ ID NO: 43860 - DNA, 600 bp, Chicken  19866894282063_9
ttgtatcctaggagcaggcagaccagaagctaatactgctatggcaacttcactgaacataatacaaagagacctattttgatgtagttgcatttagtttgggaagttaatgttgtgagctttctgtacagaggatatatttcaggggcaaagmataagtgaagataytatgtaacatgtgaattacagagagcacagtagaaatttcttgtactgctccttggaataaatacagatagggttgagtacctttttctataaggggaattatgctgtactgtcttgggtaaagcagcaatytactcgtaggcaaaagccctccctgttacagaggttgtcagacacctytcattaggagaccgtgttttacagtgcctacaagagtgtcagctggaaccacttgggctgaaatttttatgagttgagtgtctagctcagggtgactttttttctttgatcatttctgttatctctgtattgtggaatagggatttctgtctccatgttctccaagcctgttacttgaccaattgggctctttcaagtcttcagttgttagatctttgaagatttctttgttattatcttcctatctcttct

SEQ ID NO: 43861 - DNA, 600 bp, Chicken  19866894282068_1
ttaaggacttcttttcccaaaggagttaaaccagaagccattaagttttaccattaaaattttagatgtagaatttattctcttaaatttgctattaagtaattcttttaatatttaaatgtctttaaattatcaggattatgacatgaattttaatattttcagagaatggataagaaaaaaaaaataaaggctatccacatactgtgattctttaatgcatcctgtgggacacagctatgagacaggccagagtttaacttggagtccttaacactgtgctgactgccctcccactgwggattctcttgcctgtttttttkgtttgtttgyttttgtttggttggtttttttgttgttgttgttgtttgtttgtttttgagttgatagatgttctgtgagatcaagtccatgaaggctgttgtgtgagcagggctttggttgatgatgggggttttgccaaagcatgtggcctgacaatggctcaggtggaaaacagcaacactgcaggagtcaaaagttaatagtactaaaagttaatatgattgtatagcccataaggcttaattctgacatgctatactcaactagcatgaggaa

SEQ ID NO: 43862 - DNA, 600 bp, Chicken  19866894282068_2
agttaaaccagaagccattaagttttaccattaaaattttagatgtagaatttattctcttaaatttgctattaagtaattcttttaatatttaaatgtctttaaattatcaggattatgacatgaattttaatattttcagagaatggataagaaaaaaaaaataaaggctatccacatactgtgattctttaatgcatcctgtgggacacagctatgagacaggccagagtttaacttggagtccttaacactgtgctgactgccctcccactgwggattctcttgcctgtttttttkgtttgtttgyttttgtttggttggtttttttgttgttgttgttgtttgtttgtttttgagttgatagatgttctgtgagatcaagtccatgaaggctgttgtgtgagcagggctttggttgatgatgggggttttgccaaagcatgtggcctgacaatggctcaggtggaaaacagcaacactgcaggagtcaaaagttaatagtactaaaagttaatatgattgtatagcccataaggcttaattctgacatgctatactcaactagcatgaggaaggatggaatcgatagcatattag

SEQ ID NO: 43863 - DNA, 600 bp, Chicken  19866894282068_3
gaagccattaagttttaccattaaaattttagatgtagaatttattctcttaaatttgctattaagtaattcttttaatatttaaatgtctttaaattatcaggattatgacatgaattttaatattttcagagaatggataagaaaaaaaaaataaaggctatccacatactgtgattctttaatgcatcctgtgggacacagctatgagacaggccagagtttaacttggagtccttaacactgtgctgactgccctcccactgwggattctcttgcctgtttttttkgtttgtttgyttttgtttggttggtttttttgttgttgttgttgtttgtttgtttttgagttgatagatgttctgtgagatcaagtccatgaaggctgttgtgtgagcagggctttggttgatgatgggggttttgccaaagcatgtggcctgacaatggctcaggtggaaaacagcaacactgcaggagtcaaaagttaatagtactaaaagttaatatgattgtatagcccataaggcttaattctgacatgctatactcaactagcatgaggaaggatggaatcgatagcatattagcatctagggg

SEQ ID NO: 43864 - DNA, 599 bp, Chicken  19866894282078_1
  misc_feature (1)..(127): n is any nucleotide
nnnnnnnnnnnnnnnnnnnnnnnnnnnnnnnnnnnnnnnnnnnnnnnnnnnnnnnnnnnnnnnnnnnnnnnnnnnnnnnnnnnnnnnnnnnnnnnnnnnnnnnnnnnnnnnnnnnnnnnnnnnnnnnagttagaagcaaaaagagaaaaattgatgcgtcagaccgaagaagtaatggtgagtaggttatgcagggtgttatataattcagccctggttcacatggacgcagggtcaagtttcaaaagaaattatttcaaccgtgacaactaaaagtagtttggtttcaaattcaatctragcttttcttgccttttcccaacccccttccttcaaaattgtaaacttctactaaaaaygtgtgcagtaatagtttttaatagaatttcatcaggtagatggatattcacataactgtgcagagcatttgtgcacttatacataagatcagctaaaaaagctttttatgatgtttaagtatagtctctgcagacagttttatgtcttaaataaaatgctattttggtgtttgaaaaccagatgctgcaataactagtgaaatacgaaaggagtacaaacaataagcaatataaatagaa

SEQ ID NO: 43865 - DNA, 599 bp, Chicken  19866894282078_2
  misc_feature (1)..(68): n is any nucleotide
nnnnnnnnnnnnnnnnnnnnnnnnnnnnnnnnnnnnnnnnnnnnnnnnnnnnnnnnnnnnnnnnnnnnagttagaagcaaaaagagaaaaattgatgcgtcagaccgaagaagtaatggtgagtaggttatgcagggtgttatataattcagccctggttcacatggacgcagggtcaagtttcaaaagaaattatttcaaccgtgacaactaaaagtagtttggtttcaaattcaatctragcttttcttgccttttcccaacccccttccttcaaaattgtaaacttctactaaaaaygtgtgcagtaatagtttttaatagaatttcatcaggtagatggatattcacataactgtgcagagcatttgtgcacttatacataagatcagctaaaaaagctttttatgatgtttaagtatagtctctgcagacagttttatgtcttaaataaaatgctattttggtgtttgaaaaccagatgctgcaataactagtgaaatacgaaaggagtacaaacaataagcaatataaatagaaagtatgtacttagttaaaaggaaactttcttaaaacagaaaaaaaaatcctgtttatca

SEQ ID NO: 43866 - DNA, 600 bp, Chicken  19866894282078_3
aatttcatcaggtagatggatattcacataactgtgcagagcatttgtgcacttatacataagatcagctaaaaaagctttttatgatgtttaagtatagtctctgcagacagttttatgtcttaaataaaatgctattttggtgtttgaaaaccagatgctgcaataactagtgaaatacgaaaggagtacaaacaataagcaatataaatagaaagtatgtacttagttaaaaggaaactttcttaaaacagaaaaaaaaatcctgtttatcattattattatcttttaacgttggtrtggctttgtgccaatttttatatgaaaattggtcaagttawacaaaaaagagagccggggtgatctgttttatacccaatacacctttaaagaaggtgcccttcttattagaaatattcaaaatatggtttcactcaaataaaaaaggcttaaaaaccaaaatattttgcctatttattaaacttcattctttgtgtcctatgaagacatacattcctctagagttctggtaagttgactgtttggcatttgaacagaagcagatgaagcacccaaaatagcatctagtctctttccttt

SEQ ID NO: 43867 - DNA, 600 bp, Chicken  19866894282078_4
catttgtgcacttatacataagatcagctaaaaaagctttttatgatgtttaagtatagtctctgcagacagttttatgtcttaaataaaatgctattttggtgtttgaaaaccagatgctgcaataactagtgaaatacgaaaggagtacaaacaataagcaatataaatagaaagtatgtacttagttaaaaggaaactttcttaaaacagaaaaaaaaatcctgtttatcattattattatcttttaacgttggtrtggctttgtgccaatttttatatgaaaattggtcaagttawacaaaaaagagagccggggtgatctgttttatacccaatacacctttaaagaaggtgcccttcttattagaaatattcaaaatatggtttcactcaaataaaaaaggcttaaaaaccaaaatattttgcctatttattaaacttcattctttgtgtcctatgaagacatacattcctctagagttctggtaagttgactgtttggcatttgaacagaagcagatgaagcacccaaaatagcatctagtctctttcctttgaaaaacagcaacaaccaaaaccactttttcccccccctct

SEQ ID NO: 43868 - DNA, 600 bp, Chicken  19866894282080_1
ttggaggagatgtaaatgtgttgggcagaggatggagctacagggccttgctgcttatatgagcatttcctactgtaaattgctcgaggacaccattttatctgattgtaagtttgactgatggtagggtacctaaagtccttgcttggacattctttgtcacttgttttaagctcacagaacgcgataataggtacctgctttttttctcccatcaaaagcagaggtgttctttcctgctgtaacagtttaactgagctgtttgtgattgatcctcctggctgcacttagctaccgtgyagttgccattctttctacagagctttataggtgtctatcagtggatttgaaaaagcaattcccattggcatccttctgttcccactgacatttataggaattttactgctgacttaccgtgctgacctttcatcctaaggtatgmtctgcaaaatgcccttttacctctctggttaggctgtaaaaagtaggccaatacaattaaagaagtcaaagctttatacggtgactgaagcctctgccagaaggtgaaaagaaatctccagagctttgaagtgaaagcagccaaacaggtaagga

SEQ ID NO: 43869 - DNA, 600 bp, Chicken  19866894282080_2
ttggacattctttgtcacttgttttaagctcacagaacgcgataataggtacctgctttttttctcccatcaaaagcagaggtgttctttcctgctgtaacagtttaactgagctgtttgtgattgatcctcctggctgcacttagctaccgtgyagttgccattctttctacagagctttataggtgtctatcagtggatttgaaaaagcaattcccattggcatccttctgttcccactgacatttataggaattttactgctgacttaccgtgctgacctttcatcctaaggtatgmtctgcaaaatgcccttttacctctctggttaggctgtaaaaagtaggccaatacaattaaagaagtcaaagctttatacggtgactgaagcctctgccagaaggtgaaaagaaatctccagagctttgaagtgaaagcagccaaacaggtaaggaaatagaccacaggagatgaagctgcaaagtgtcgctttttgctgtagtactgcacaggtgggcaaagagtggactttttactgttgtatatcctgcgccctattatactgcctacaagatctctagtcctgtgggatgtacactt

SEQ ID NO: 43870 - DNA, 600 bp, Chicken  19866894282081_1
tgacagcaggggaatgagcctcctctcctgtgatatcttgattataatggcaactttgaccaagacacactgagatactctcacaggcatttagtgtctgaaggaaactctgattgcagagacctaaaccgttcatacctccttctgttcaaagcagtcccaggatcaacagagacgatggtggagacaacacgcaaagaggagggaggaaaactttgagcagaaatctagtaatcatgattatcatgataatttcatccagtaattagtaaacggaaagttaattattgctacttcctycttcctttcaccatgtctcacccagctgttcacaaattgataaccatagaaacaagcgtgagccaagcctgggtagttggtattcatgcagaatcaaagaaacacatttgcattctttgccagaagaatcaatttaccttgattgatgattgaacttcaataagttctttaatattttggtcattaactgtgatgccataacagtgtcaccagagtgctattgtatttcacaccatggctcttattagcagcgctgcgtaatatgcctgaacttctaattgagcccttttaaatattgat

SEQ ID NO: 43871 - DNA, 600 bp, Chicken  19866894282081_2
acaaattgataaccatagaaacaagcgtgagccaagcctgggtagttggtattcatgcagaatcaaagaaacacatttgcattctttgccagaagaatcaatttaccttgattgatgattgaacttcaataagttctttaatattttggtcattaactgtgatgccataacagtgtcaccagagtgctattgtatttcacaccatggctcttattagcagcgctgcgtaatatgcctgaacttctaattgagcccttttaaatattgataatcaacatatttcagaatataatcatttcwaacaaagctcagcctacccagaacrgcttatgaatgtggtgacccatcactggagaggtggagtgctccaggtacacggctcaggttcaaagtagcacagagtgcccctttttctcactgctgctttcatcacaggttcactttttctttcccaatattgttgaaacaccgcttccractacaaaccctgctcctgcctcaaaacgacctgccgtaattgcattttccctgttagtaacatttcaaaatgagatcagcagtaatacttctctttacgcatcaggctaaatgcaggcagat

SEQ ID NO: 43872 - DNA, 600 bp, Chicken  19866894282081_3
cgtgagccaagcctgggtagttggtattcatgcagaatcaaagaaacacatttgcattctttgccagaagaatcaatttaccttgattgatgattgaacttcaataagttctttaatattttggtcattaactgtgatgccataacagtgtcaccagagtgctattgtatttcacaccatggctcttattagcagcgctgcgtaatatgcctgaacttctaattgagcccttttaaatattgataatcaacatatttcagaatataatcatttcwaacaaagctcagcctacccagaacrgcttatgaatgtggtgacccatcactggagaggtggagtgctccaggtacacggctcaggttcaaagtagcacagagtgcccctttttctcactgctgctttcatcacaggttcactttttctttcccaatattgttgaaacaccgcttccractacaaaccctgctcctgcctcaaaacgacctgccgtaattgcattttccctgttagtaacatttcaaaatgagatcagcagtaatacttctctttacgcatcaggctaaatgcaggcagatctgaaacaaccttcctgatgataga

SEQ ID NO: 43873 - DNA, 600 bp, Chicken  19866894282081_4
accagagtgctattgtatttcacaccatggctcttattagcagcgctgcgtaatatgcctgaacttctaattgagcccttttaaatattgataatcaacatatttcagaatataatcatttcwaacaaagctcagcctacccagaacrgcttatgaatgtggtgacccatcactggagaggtggagtgctccaggtacacggctcaggttcaaagtagcacagagtgcccctttttctcactgctgctttcatcacaggttcactttttctttcccaatattgttgaaacaccgcttccractacaaaccctgctcctgcctcaaaacgacctgccgtaattgcattttccctgttagtaacatttcaaaatgagatcagcagtaatacttctctttacgcatcaggctaaatgcaggcagatctgaaacaaccttcctgatgatagatatatatatggcgaaagtcaaagagctagaggcacttaaagtgctataaaaggaagtaaaataaaaaaaratgacattgttggtattttgcagtggaaaaataattgaagaaaatcaagaaatagtacttaatgcaagcaataaaacgaagc

SEQ ID NO: 43874 - DNA, 600 bp, Chicken  19866894282081_5
cacagagtgcccctttttctcactgctgctttcatcacaggttcactttttctttcccaatattgttgaaacaccgcttccractacaaaccctgctcctgcctcaaaacgacctgccgtaattgcattttccctgttagtaacatttcaaaatgagatcagcagtaatacttctctttacgcatcaggctaaatgcaggcagatctgaaacaaccttcctgatgatagatatatatatggcgaaagtcaaagagctagaggcacttaaagtgctataaaaggaagtaaaataaaaaaaratgacattgttggtattttgcagtggaaaaataattgaagaaaatcaagaaatagtacttaatgcaagcaataaaacgaagcttcggggcactgagtaggtggtcctgagttacaacagcagcctcagcactgaactcctgtcctttcttttattttgctaagcagtgaagcactgactatttactgtcaggagaaagcatcgagctgttcctgctacagatatcaatgacagcgatgcgaagtctgtccccggcaccacctcctgtgtgcacggagcggcacaccccaagcctgccaca

SEQ ID NO: 43875 - DNA, 600 bp, Chicken  19866894282082_1
gaaaacatcaacaactttaagatagggtatagaaacagctgaaaacggtttatgaaaaaaagctgcagagatgatttccaacatctgagggagaactcccacataaaaggcagatgagctgaaaacacattccaactctgttttatccttaactcttagttctcaaccaacaccagtgacagaaccagcatgacctgactcagggttttccactatttttgttcttaaatagccaacacgacaaatgcttcagtcttcattgccacaatattcttctgaggaagactgctgcattacttsgatactggtaggtccatctgaggactcatcagaaacagtaggagacaaggccagcgacaggactagtgaaaaatctataagtctgaggtctatgtgaagaaaggctgaaacacgagatcttggatacaaaatcaccctgagcattgttcttcactgaaaatatggtccagaactttgtcatctgtagacagatcatagcaccatcagatattctccactcctgggtctcagactgataatccccttccaaaatacgtcagacgtggtgtcatcatagcgctgtctgaaaagaatgaaaca

SEQ ID NO: 43876 - DNA, 600 bp, Chicken  19866894282082_2
tcttgcaagaaatataaactttttcagctgtgaaaattaagttatattgtacacagaggaagaaatagtattcacaaaggattaattgaatcagcctttcatcttcactgactgtagggatgctgaaagcattaggtcagaagcctgagcattgcttcctccaaactcaattcttcaaaataccggatggttcagagaaaggggagaaaaaagttgatcatgaaatgtaacactccttgcctcaggaggcagctacacacttaagctcagttttagtatgaatagtttaatacttgcacrcagaaatctgaccctttcttacacaagagcagtgtggaagaatagcctttatgaattacagtgaaaagcctccaggtgtaagtgctttcttcagttgtcaaggaaccacaaggtgaatgtgagatccgtgaggggcacgaagaatagagagataagaagcagcagcagattgtcaaggctgtactctaaagcagcctctttatccatatggaaaaatgagaatctttaatatgaaaaaagaatatgtggctaccattatagcagagctttaataataataaaaaaagtgacatttttcct

SEQ ID NO: 43877 - DNA, 600 bp, Chicken  19866894282085_1
aaatatcaagtatgaattctcttggccagctctgttttttgctaattttcttttcctataatcacattttcccccttgatcattgccaagcacagcacttacaactgtagccagtcaaaaaaagttggtttctttctttttcggtgtggccagatctgataaatgataccagtctttcattactgagaatttgatgtcaattgaattaatcagtaattaccttttcccttatacttttatgtttcaaagaagcctctgtttaggtggttctcttatgctcctgagccaacccatgctccmcaatgaccaaggtggggcaatttcctcttctaaggagacgttaacactaaataatacaatgcttttcaaaayaaacagacacagtatatataactagaaaatcccagtcaaaaacaacacgaggagccccagaggtattccagcaactccatgtatgcttgagaggtagctatgagcagacagaagaccaattcctacagaaatctgtgagatttctaccactacctcaacaaaaggttaccagaatttccaaacttataaatamtrggggaaaatatgcaatataaaatatactttttt

SEQ ID NO: 43878 - DNA, 600 bp, Chicken  19866894282085_2
cccttgatcattgccaagcacagcacttacaactgtagccagtcaaaaaaagttggtttctttctttttcggtgtggccagatctgataaatgataccagtctttcattactgagaatttgatgtcaattgaattaatcagtaattaccttttcccttatacttttatgtttcaaagaagcctctgtttaggtggttctcttatgctcctgagccaacccatgctccmcaatgaccaaggtggggcaatttcctcttctaaggagacgttaacactaaataatacaatgcttttcaaaayaaacagacacagtatatataactagaaaatcccagtcaaaaacaacacgaggagccccagaggtattccagcaactccatgtatgcttgagaggtagctatgagcagacagaagaccaattcctacagaaatctgtgagatttctaccactacctcaacaaaaggttaccagaatttccaaacttataaatamtrggggaaaatatgcaatataaaatatacttttttggtctccagttatctaacgcatggtatctgcgtttgctccaatctcacatgatagtgatactgaaaactcag

SEQ ID NO: 43879 - DNA, 600 bp, Chicken  19866894282085_3
ggttctcttatgctcctgagccaacccatgctccmcaatgaccaaggtggggcaatttcctcttctaaggagacgttaacactaaataatacaatgcttttcaaaayaaacagacacagtatatataactagaaaatcccagtcaaaaacaacacgaggagccccagaggtattccagcaactccatgtatgcttgagaggtagctatgagcagacagaagaccaattcctacagaaatctgtgagatttctaccactacctcaacaaaaggttaccagaatttccaaacttataaatamtrggggaaaatatgcaatataaaatatacttttttggtctccagttatctaacgcatggtatctgcgtttgctccaatctcacatgatagtgatactgaaaactcagaaagacctacagaaacagttgagcaggaaagatgagtcaattcagctcccatctaaaacaatcaggctctccaccaccagtagcagagaggggggaaaataaaatctacattgtgcagcatgtccagacatcagctcatgggcttcaagccaactggaagcagcttyggtgcaatcttgagcccaagctgata

SEQ ID NO: 43880 - DNA, 600 bp, Chicken  19866894282085_4
ttctcttatgctcctgagccaacccatgctccmcaatgaccaaggtggggcaatttcctcttctaaggagacgttaacactaaataatacaatgcttttcaaaayaaacagacacagtatatataactagaaaatcccagtcaaaaacaacacgaggagccccagaggtattccagcaactccatgtatgcttgagaggtagctatgagcagacagaagaccaattcctacagaaatctgtgagatttctaccactacctcaacaaaaggttaccagaatttccaaacttataaatamtrggggaaaatatgcaatataaaatatacttttttggtctccagttatctaacgcatggtatctgcgtttgctccaatctcacatgatagtgatactgaaaactcagaaagacctacagaaacagttgagcaggaaagatgagtcaattcagctcccatctaaaacaatcaggctctccaccaccagtagcagagaggggggaaaataaaatctacattgtgcagcatgtccagacatcagctcatgggcttcaagccaactggaagcagcttyggtgcaatcttgagcccaagctgatatt

SEQ ID NO: 43881 - DNA, 600 bp, Chicken  19866894282085_5
accagaatttccaaacttataaatamtrggggaaaatatgcaatataaaatatacttttttggtctccagttatctaacgcatggtatctgcgtttgctccaatctcacatgatagtgatactgaaaactcagaaagacctacagaaacagttgagcaggaaagatgagtcaattcagctcccatctaaaacaatcaggctctccaccaccagtagcagagaggggggaaaataaaatctacattgtgcagcatgtccagacatcagctcatgggcttcaagccaactggaagcagcttyggtgcaatcttgagcccaagctgatatttcactctgcctctgagcagagtttgagmcctgctcatgtctggggctcagcaccaaacaaaccacatcctcactgctgcaaatcagctcaaattatgagctactcattggtatttgcctattgcatgccattatgcgacaaatggacgyrtgaggatgggttatgatgggagctctcactctgtctcaaggcaaaagaaattaaaacataacttcagtaactaatttgttattaagtgctgcttaccttgcaaataatacctcatttaggga

SEQ ID NO: 43882 - DNA, 600 bp, Chicken  19866894282085_6
tttttggtctccagttatctaacgcatggtatctgcgtttgctccaatctcacatgatagtgatactgaaaactcagaaagacctacagaaacagttgagcaggaaagatgagtcaattcagctcccatctaaaacaatcaggctctccaccaccagtagcagagaggggggaaaataaaatctacattgtgcagcatgtccagacatcagctcatgggcttcaagccaactggaagcagcttyggtgcaatcttgagcccaagctgatatttcactctgcctctgagcagagtttgagmcctgctcatgtctggggctcagcaccaaacaaaccacatcctcactgctgcaaatcagctcaaattatgagctactcattggtatttgcctattgcatgccattatgcgacaaatggacgyrtgaggatgggttatgatgggagctctcactctgtctcaaggcaaaagaaattaaaacataacttcagtaactaatttgttattaagtgctgcttaccttgcaaataatacctcatttagggaaatgtaatttgatggaataagccctctacttaaatcagcaataaaagcaaatggga

SEQ ID NO: 43883 - DNA, 600 bp, Chicken  19866894282085_7
gctcccatctaaaacaatcaggctctccaccaccagtagcagagaggggggaaaataaaatctacattgtgcagcatgtccagacatcagctcatgggcttcaagccaactggaagcagcttyggtgcaatcttgagcccaagctgatatttcactctgcctctgagcagagtttgagmcctgctcatgtctggggctcagcaccaaacaaaccacatcctcactgctgcaaatcagctcaaattatgagctactcattggtatttgcctattgcatgccattatgcgacaaatggacgyrtgaggatgggttatgatgggagctctcactctgtctcaaggcaaaagaaattaaaacataacttcagtaactaatttgttattaagtgctgcttaccttgcaaataatacctcatttagggaaatgtaatttgatggaataagccctctacttaaatcagcaataaaagcaaatgggatatttttttttcccctcttaaaaagggaggagaaaaaaaacaaccaaaacaaaacccaatgcaagggcagtcgtatttcataaatcaacaggctttaggaaatctcaaaatataaatgggg

SEQ ID NO: 43884 - DNA, 600 bp, Chicken  19866894282085_8
ctcccatctaaaacaatcaggctctccaccaccagtagcagagaggggggaaaataaaatctacattgtgcagcatgtccagacatcagctcatgggcttcaagccaactggaagcagcttyggtgcaatcttgagcccaagctgatatttcactctgcctctgagcagagtttgagmcctgctcatgtctggggctcagcaccaaacaaaccacatcctcactgctgcaaatcagctcaaattatgagctactcattggtatttgcctattgcatgccattatgcgacaaatggacgyrtgaggatgggttatgatgggagctctcactctgtctcaaggcaaaagaaattaaaacataacttcagtaactaatttgttattaagtgctgcttaccttgcaaataatacctcatttagggaaatgtaatttgatggaataagccctctacttaaatcagcaataaaagcaaatgggatatttttttttcccctcttaaaaagggaggagaaaaaaaacaaccaaaacaaaacccaatgcaagggcagtcgtatttcataaatcaacaggctttaggaaatctcaaaatataaatgggga

SEQ ID NO: 43885 - DNA, 599 bp, Chicken  19866894282105_1
  misc_feature (1)..(120): n is any nucleotide
nnnnnnnnnnnnnnnnnnnnnnnnnnnnnnnnnnnnnnnnnnnnnnnnnnnnnnnnnnnnnnnnnnnnnnnnnnnnnnnnnnnnnnnnnnnnnnnnnnnnnnnnnnnnnnnnnnnnnnnncccaatgactttgctttagatgtgtgcttgagggggggacagatgaccacagagctcttttccaccttactgatgactctgtgtttattctgtcccgcacagattcataataagagagggctgagcactctcacatccctgagcgggacacagccctcctgtctgtgccttgcagccttygctttgtcagcgctgctattacgttctgtacttaaatgctggcagctaattttattctttcacatgaggcagttcataagtgggctcgttgcaaatcaagtgccagttaaggagctatggaaatgatgaacttcttaataatgaggtgaaggaagcacactttggaagcttgtgtagtcatctagtgaataaaaaaattaaatcaacttttcagttcagaaaccggatggcagtgatgttccctgcagaacaatggtgatgttccctggctgtcctggatcttgatgtattgacaccct

SEQ ID NO: 43886 - DNA, 599 bp, Chicken  19866894282109_1
  misc_feature (1)..(109): n is any nucleotide
nnnnnnnnnnnnnnnnnnnnnnnnnnnnnnnnnnnnnnnnnnnnnnnnnnnnnnnnnnnnnnnnnnnnnnnnnnnnnnnnnnnnnnnnnnnnnnnnnnnnnnnnnnnnnaaaaaaaatctttagttattcttttaaattcaagtggagatctcaagtttacaactaagtgaaaatgaaaatccagcttttatgtctggaaagttattctgcattaagttaccaaatcaattatcagtgcgaactgaacagcatctaacatttgattaaattaatgttaaaacttcaagagattcaatatmatctattgataaaaactgagaggragaagaagagccacagtcttctctctccagcataagagtgaggtayggaatgaaaccttgcctcaggaactgcactgtctcagcatcagtggggccaagaattaattcctggacttactgcaaatatcacagaatcacagaatggcctgggttgaaaaggaccacaatgatcatctggtttcaacccccctgctacgtgcagrgttgccagcagaccaggctgcccagagccacatccagcctggccttgaatgcctccagggatggagsatcca

SEQ ID NO: 43887 - DNA, 504 bp, Chicken  19866894282109_10
ggaggtcagcactctcatagctgagtggtgataaaaaaggcaaaagcctgcttcagtgcaaaatcatccggttaatttaaagtgccactgacattttggtatctgcttgtggccagaagcactaaggaaattagtaaattaaccaaaaaattgcagcaagccagtgcacgggtacrgtgttgctctgatcactaaaccgtgctttatcacatctctaaccatgatcaaaaggaaaccacctcttcaatctaaaaataaaacataaaataagataatttccaagttggctaagctagcctygatgctgtttaagctgggatcaagaaaaggatgaggaggaagagtaaggaatgtacagtcctattcctggatgacatgaggtcagtattatttcaagccaaaaccagaaaatcaatttcatgtgtatcaaaccttaaaggtgcattattcacttgaaagcccgtatgtgattttagagctcaaaatcatgaactttgccagcag

SEQ ID NO: 43888 - DNA, 599 bp, Chicken  19866894282109_2
  misc_feature (1)..(85): n is any nucleotide
nnnnnnnnnnnnnnnnnnnnnnnnnnnnnnnnnnnnnnnnnnnnnnnnnnnnnnnnnnnnnnnnnnnnnnnnnnnnnnnnnnnnnaaaaaaaatctttagttattcttttaaattcaagtggagatctcaagtttacaactaagtgaaaatgaaaatccagcttttatgtctggaaagttattctgcattaagttaccaaatcaattatcagtgcgaactgaacagcatctaacatttgattaaattaatgttaaaacttcaagagattcaatatmatctattgataaaaactgagaggragaagaagagccacagtcttctctctccagcataagagtgaggtayggaatgaaaccttgcctcaggaactgcactgtctcagcatcagtggggccaagaattaattcctggacttactgcaaatatcacagaatcacagaatggcctgggttgaaaaggaccacaatgatcatctggtttcaacccccctgctacgtgcagrgttgccagcagaccaggctgcccagagccacatccagcctggccttgaatgcctccagggatggagsatccacarcctccttgggcaacctgttcc

SEQ ID NO: 43889 - DNA, 599 bp, Chicken  19866894282109_3
  misc_feature (1)..(39): n is any nucleotide
nnnnnnnnnnnnnnnnnnnnnnnnnnnnnnnnnnnnnnnaaaaaaaatctttagttattcttttaaattcaagtggagatctcaagtttacaactaagtgaaaatgaaaatccagcttttatgtctggaaagttattctgcattaagttaccaaatcaattatcagtgcgaactgaacagcatctaacatttgattaaattaatgttaaaacttcaagagattcaatatmatctattgataaaaactgagaggragaagaagagccacagtcttctctctccagcataagagtgaggtayggaatgaaaccttgcctcaggaactgcactgtctcagcatcagtggggccaagaattaattcctggacttactgcaaatatcacagaatcacagaatggcctgggttgaaaaggaccacaatgatcatctggtttcaacccccctgctacgtgcagrgttgccagcagaccaggctgcccagagccacatccagcctggccttgaatgcctccagggatggagsatccacarcctccttgggcaacctgttccagtgcgtcaccaccctctgtgtgaaaaacttcttcctaatacccaa

SEQ ID NO: 43890 - DNA, 600 bp, Chicken  19866894282109_4
aattatcagtgcgaactgaacagcatctaacatttgattaaattaatgttaaaacttcaagagattcaatatmatctattgataaaaactgagaggragaagaagagccacagtcttctctctccagcataagagtgaggtayggaatgaaaccttgcctcaggaactgcactgtctcagcatcagtggggccaagaattaattcctggacttactgcaaatatcacagaatcacagaatggcctgggttgaaaaggaccacaatgatcatctggtttcaacccccctgctacgtgcagrgttgccagcagaccaggctgcccagagccacatccagcctggccttgaatgcctccagggatggagsatccacarcctccttgggcaacctgttccagtgcgtcaccaccctctgtgtgaaaaacttcttcctaatacccaacctaaacctcccttgtctcagtttaagaccattcccccttgtcctatcactatccaccctcgtaaatagccattccccctcctgtttatatgctcccttcaaatactggaaggccacaacgaggttctccccagagccttctcttttccaagctaaac

SEQ ID NO: 43891 - DNA, 600 bp, Chicken  19866894282109_5
aatatmatctattgataaaaactgagaggragaagaagagccacagtcttctctctccagcataagagtgaggtayggaatgaaaccttgcctcaggaactgcactgtctcagcatcagtggggccaagaattaattcctggacttactgcaaatatcacagaatcacagaatggcctgggttgaaaaggaccacaatgatcatctggtttcaacccccctgctacgtgcagrgttgccagcagaccaggctgcccagagccacatccagcctggccttgaatgcctccagggatggagsatccacarcctccttgggcaacctgttccagtgcgtcaccaccctctgtgtgaaaaacttcttcctaatacccaacctaaacctcccttgtctcagtttaagaccattcccccttgtcctatcactatccaccctcgtaaatagccattccccctcctgtttatatgctcccttcaaatactggaaggccacaacgaggttctccccagagccttctcttttccaagctaaacaagcccagtatattatgtaaaaacctttatttgcaagaagagtacaggagcaaagagtacraaaaga

SEQ ID NO: 43892 - DNA, 600 bp, Chicken  19866894282109_6
ctattgataaaaactgagaggragaagaagagccacagtcttctctctccagcataagagtgaggtayggaatgaaaccttgcctcaggaactgcactgtctcagcatcagtggggccaagaattaattcctggacttactgcaaatatcacagaatcacagaatggcctgggttgaaaaggaccacaatgatcatctggtttcaacccccctgctacgtgcagrgttgccagcagaccaggctgcccagagccacatccagcctggccttgaatgcctccagggatggagsatccacarcctccttgggcaacctgttccagtgcgtcaccaccctctgtgtgaaaaacttcttcctaatacccaacctaaacctcccttgtctcagtttaagaccattcccccttgtcctatcactatccaccctcgtaaatagccattccccctcctgtttatatgctcccttcaaatactggaaggccacaacgaggttctccccagagccttctcttttccaagctaaacaagcccagtatattatgtaaaaacctttatttgcaagaagagtacaggagcaaagagtacraaaagaaatcttca

SEQ ID NO: 43893 - DNA, 600 bp, Chicken  19866894282109_7
tggagsatccacarcctccttgggcaacctgttccagtgcgtcaccaccctctgtgtgaaaaacttcttcctaatacccaacctaaacctcccttgtctcagtttaagaccattcccccttgtcctatcactatccaccctcgtaaatagccattccccctcctgtttatatgctcccttcaaatactggaaggccacaacgaggttctccccagagccttctcttttccaagctaaacaagcccagtatattatgtaaaaacctttatttgcaagaagagtacaggagcaaagagtacraaaagaaatcttcatttacagtcttctcaactactttctcctggagagatccatctgttcggtttctcagtgagttatctgagaaagcattggttacaaaaagcagtgggagttcccagaacaaacaaacagagaccattcacacaactgaatgcagtgaatctttaccacacttataccataaatagtgatatttcctcttgtctgcggtttgatatccatcacagaaaggcatgaatcagagtaggtccacccagtaggtttgaaagccagaacttgatcaaaattctcagaaaactt

SEQ ID NO: 43894 - DNA, 600 bp, Chicken  19866894282109_8
atagtgatatttcctcttgtctgcggtttgatatccatcacagaaaggcatgaatcagagtaggtccacccagtaggtttgaaagccagaacttgatcaaaattctcagaaaacttattcaaatgatcttgcaacccctgttaaaaaaaatagggcatatgctgaatgccattaaattgctcattagttgaaagaccggagatttcatgatagagacatcaaatcaaattttgttctcatgcttttataagagcttttttcctttaaataccacctgccttcaaatcaataatgatgaayatttacatctgcagagcacctcgtacgcgaggatcttaactgtttcatctgaataagcacatattaatagctatgcattacaaatcagaacacataaggcatcatcacattttttgatcttgcccccaagcaattcgtttccttctctcagccggaggtcagcactctcatagctgagtggtgataaaaaaggcaaaagcctgcttcagtgcaaaatcatccggttaatttaaagtgccactgacattttggtatctgcttgtggccagaagcactaaggaaattagtaaattaaccaaa

SEQ ID NO: 43895 - DNA, 600 bp, Chicken  19866894282109_9
aggatcttaactgtttcatctgaataagcacatattaatagctatgcattacaaatcagaacacataaggcatcatcacattttttgatcttgcccccaagcaattcgtttccttctctcagccggaggtcagcactctcatagctgagtggtgataaaaaaggcaaaagcctgcttcagtgcaaaatcatccggttaatttaaagtgccactgacattttggtatctgcttgtggccagaagcactaaggaaattagtaaattaaccaaaaaattgcagcaagccagtgcacgggtacrgtgttgctctgatcactaaaccgtgctttatcacatctctaaccatgatcaaaaggaaaccacctcttcaatctaaaaataaaacataaaataagataatttccaagttggctaagctagcctygatgctgtttaagctgggatcaagaaaaggatgaggaggaagagtaaggaatgtacagtcctattcctggatgacatgaggtcagtattatttcaagccaaaaccagaaaatcaatttcatgtgtatcaaaccttaaaggtgcattattcacttgaaagcccgtatgtgattttag

SEQ ID NO: 43896 - DNA, 600 bp, Chicken  19866894282110_1
gttatgttgttgtatgtgcatctgaaaaatgcttagatattccagttagatatgtgacataagaacttgtgtaaaaatagaatatgacgagaccagtagaaatattaaaataaatattaaaaatgtatctggaaatattaaaaaccttctttcagattccatcaggagagaagacttatctgaatgaaactaaaccattgattttagaaataaatttaagcccttgtttgcatgagccataggtgaaccatggtctacagtatgacccataatttaaaacactgtcaacagtcatattargagagctcatacacaatatggtattcattctagatacatgcctataaaggactcatactagcttagggtattggaaatccatcagaaacattctatttgttaatagagaaacacttcactttttgcttaagtggcagaaattttaaaccattatttaaaaagtttgaataaattgcaattacagatgctacctccctaacatagtttaaatatataaatagtcatgttcaaaccttgtatacacattttctcaatgttcatgccagagcatctctaactctttctatatgttttaatata

SEQ ID NO: 43897 - DNA, 600 bp, Chicken  19866894282114_1
aaactcttgttgccagtatgctttctggtattttaagttatgtctaagggtgctcagagtaggtgtcttcattctgcagatccatgtgtgttgagtacttaatattcccaccttttaaatttatacctccaaatgtagttttctgaagcaatggagtctttgtaacatgccaaagcatgcacaaagtgataatgaacatataatcactctaggaagcttagaaatcactttcattgcaagaagctacttaaacacattttaaatcctatataaattaccctgaattaatgagactttcamtgaaatagaactgacatccttgctaatgctaaatgaaatcatgatcgttaatctaatagaataagtaagaaatctgcccattgtagtttaaaaatatgggacatgcaagtctcttgacaatacattcaaaaccagataagctgtattaaaaaatctsagttgcatgtccctgataggaggatactcagcatagcaatagtgtgtccaggcacaggcactctgaaactatgtacgtagcacgccagatgccaggtcagtcagctgaagtgggagagtgagatactcctggatagagctaga

SEQ ID NO: 43898 - DNA, 545 bp, Chicken  19866894282114_2
ctttgtaacatgccaaagcatgcacaaagtgataatgaacatataatcactctaggaagcttagaaatcactttcattgcaagaagctacttaaacacattttaaatcctatataaattaccctgaattaatgagactttcamtgaaatagaactgacatccttgctaatgctaaatgaaatcatgatcgttaatctaatagaataagtaagaaatctgcccattgtagtttaaaaatatgggacatgcaagtctcttgacaatacattcaaaaccagataagctgtattaaaaaatctsagttgcatgtccctgataggaggatactcagcatagcaatagtgtgtccaggcacaggcactctgaaactatgtacgtagcacgccagatgccaggtcagtcagctgaagtgggagagtgagatactcctggatagagctagaatttacatcagaatatcacagtgagagaatgagatcattccagtgacttcagtagttcaagtgaacctactggttgtgttacatcagaaagccaccagactt

SEQ ID NO: 43899 - DNA, 600 bp, Chicken  19866894282115_1
cttgatttaatgttctcagaaagagattcaggtcctaatcctgagtttaccattgatttcttttgttcattcagatccagtgctgaacactttgcacagacttaagtatttgcgtcgctggtcttcaggtgctacagaaaaatgtgattttaattttggggcagaatctccctttagcagctacaacaatccatgggcttcttttctttccttcctaatttaattttgagtttaaaagctgctgtttagagctttgaaataataattccagatttcctgaaaagcatcagcatccaggcygggagaaacctgcagaagctttgctgatgttgtgcacagggcagcttcatcacagatgctgtttctatttcctgaagcttagcttctaaatcaagcgtgaaagcagttattcagtcacctccacatgaatgcatagtagtaaagtcctggattggttctgtctccgcgttgtgcaactggttcttagttaatgcacttttgccataattgctttttaatagagcggatcagatgattaatttaaactgtatttataataacaaaagaatcccatgaattctatgttaatccatagattgt

SEQ ID NO: 43900 - DNA, 600 bp, Chicken  19866894282115_2
tctttagggcctcggatttcgtcagtggttcacgcatggattgttacagtgcaaaaacaaacttctcagcatagaactttctatgtgaatgaggtggtgagagctaggcaaggcaattcatggtcagtgtcatggaaggagtgtggctgggaggaggtggagctgaaactcaggctcatgttctgtttgtgggctatgaagagcaagagagtctggtgaaagctcgctcctgagcttgaagcagagcagagtgtgcttggatagagttttcatggtgtgttttctcaaggaatatttcayctgagctctgctttaagtgcttcccctgattttgcaagcagaaatgagaataaagaaacaaactctttaaaatcaagcatattaggccagatttcactgctaggagaattggcatctgctaatgcgtttatattctgaagttaaaatcttggcccttagcctatgagcagcagtttatgaccgttctggatacagttcagagcaatgctaagtggttccatttgaaagacatttttcaattacagaaaaaacaattttggggaaaagggtctgttttaaaagtgcctgttgaaattccat

SEQ ID NO: 43901 - DNA, 599 bp, Chicken  19866894282118_1
  misc_feature (1)..(124): n is any nucleotide
nnnnnnnnnnnnnnnnnnnnnnnnnnnnnnnnnnnnnnnnnnnnnnnnnnnnnnnnnnnnnnnnnnnnnnnnnnnnnnnnnnnnnnnnnnnnnnnnnnnnnnnnnnnnnnnnnnnnnnnnnnnntctgctgtgtagctgtgtttgaggtgcacctccattaatcaaaacttttcctggtcacggagaggtaactgcagtgcaggggctgagctggggaatgccagacgtttgctgggccacaacgggatctggattaataaagggcagtggagaaatggtgatgtttaatgtatttcctrtattgattaatggcagctgattcacggctccgcggttccccgaagagcacgagttctgctggaagtttctgccctgtgaccaagaggtttaaaaatgagttacagtgtcagcagcatcaggcagagattagagagacggactcattcagcaggcctgcaaggctcctgttcaggctgcgtcactctggagtcactacactaaatctagcaggaacaggaaggtgtgagttgtgctggaccatatgggtggtgcagagaggtgcatacagatgtagagaccaggagctgatggttgtgtg

SEQ ID NO: 43902 - DNA, 599 bp, Chicken  19866894282119_1
  misc_feature (1)..(47): n is any nucleotide
nnnnnnnnnnnnnnnnnnnnnnnnnnnnnnnnnnnnnnnnnnnnnnntgtcctgtcacaggggcatggcacagaaaaggagtgaaggctctgcatgccccagcagccctgtacatgctgagggctcatttcacagcctcagatgcctcttgcttgaatgctcagggtgtaccaccatagcagaactgctttggacaagtagctccttgtctagaatgtttagcttggcaggttgagaatttactaagcttaaaagaacacttggctcttaaaaaaaaataagaaagaaagaaagaaaaaytatgtgaaaattatctatggataatttgctgctagtactcaaagatttttgttacactattacctgtccattgggctgacgtattttggagatatctgtcacaactagaaggaattaacagtattaattttcattgaaatttgtactgcaaattagaatgaaggaggttggaggaagaaaagggacaacatgataagaacattctccttctctgtgcatttgtgcaaaacgttcctctggacagagtttaaaatctcagtaaaaacacttgtactttcctgaaacaccttttaaatggg

SEQ ID NO: 43903 - DNA, 600 bp, Chicken  19866894282130_1
ccatctgttaactacgttttgttttcccttaggcaatgcagaacttttagtatatgcaagtgaaagttactggttacaaaagttctccaagcacaaatagtatccaggaggagaaataaatttggaaactgggggtgcaagccacagatgtttggctctcctatctccaggagactttgtgtgattctgatgaaatctgcctcaagctcaggggaggaaaaacttactctccttttggttgcttagaagtggagcagtgatctgaaattcgggcatatagccaagaggttattttagttrcaaatataaagaaactcacatctaactccccgtcactcagtgtgatgacctcatgcacacactgtgctcaaggtagcactgctaagccaagcacccagaagatggtttgcccttcttcrgtgccgtgtccagcactgcccacacaactgctgaaaaccagccctacaaaaccaagaaacctgctacaaaagtgcacacacactcaaacagacacctcatagcacagcctgcagctgagggcgtcaaaccactgaccacaacaatttaagtgctatgctattacatccatcttgttcagga

SEQ ID NO: 43904 - DNA, 600 bp, Chicken  19866894282130_2
atttggaaactgggggtgcaagccacagatgtttggctctcctatctccaggagactttgtgtgattctgatgaaatctgcctcaagctcaggggaggaaaaacttactctccttttggttgcttagaagtggagcagtgatctgaaattcgggcatatagccaagaggttattttagttrcaaatataaagaaactcacatctaactccccgtcactcagtgtgatgacctcatgcacacactgtgctcaaggtagcactgctaagccaagcacccagaagatggtttgcccttcttcrgtgccgtgtccagcactgcccacacaactgctgaaaaccagccctacaaaaccaagaaacctgctacaaaagtgcacacacactcaaacagacacctcatagcacagcctgcagctgagggcgtcaaaccactgaccacaacaatttaagtgctatgctattacatccatcttgttcaggaaaacatcctgatgatagcaggtgaatgggaaagctgtatttcacaatcagattttaacaaggcgttttgccttggggatggtaggctgtgcagaagaaacaggttattgtacaaaggct

SEQ ID NO: 43905 - DNA, 600 bp, Chicken  19866894282135_1
atctccttaacatctctgctcacagctctgcaggtacatttcaggtgcctgacagattttgcaggcctggaggtcacttagcatatgctccaacctgaggtcatcccaaatgatgttcctacgtgtgactaagggggaagtttacacagaggttttattgtagggctacccaccccacttgatcagaaagtaaaggcatgcacaagctgcactgcatccccacatctccatggagtgcaacaccattaagccactagaatatttggggctgtatgatggggctgatgcagctccatgccrttccctccagccctgtcgctgtcacagagagcagagctcagcactgcccctcagctccctgtgaggagctgcagccatcrtgaggtctcccctcagcttcctctgctctgggctgagcaaacccagggaccccatccactcctcatatgtcttgcactctagacctgcaccatctctgyagtcctccttgggaggttctccaatagttttaagtccttcttatattgtggtgcccacacttgcgcccagtgctcgaggtgaggccacacagcagaggggacaacccctccctttgcctgc

SEQ ID NO: 43906 - DNA, 600 bp, Chicken  19866894282135_2
gcatatgctccaacctgaggtcatcccaaatgatgttcctacgtgtgactaagggggaagtttacacagaggttttattgtagggctacccaccccacttgatcagaaagtaaaggcatgcacaagctgcactgcatccccacatctccatggagtgcaacaccattaagccactagaatatttggggctgtatgatggggctgatgcagctccatgccrttccctccagccctgtcgctgtcacagagagcagagctcagcactgcccctcagctccctgtgaggagctgcagccatcrtgaggtctcccctcagcttcctctgctctgggctgagcaaacccagggaccccatccactcctcatatgtcttgcactctagacctgcaccatctctgyagtcctccttgggaggttctccaatagttttaagtccttcttatattgtggtgcccacacttgcgcccagtgctcgaggtgaggccacacagcagaggggacaacccctccctttgcctgctggcagcgctgaacctgaggtactccagagtgtggttgggccttctggctccagagcacactggtggctcagattcaact

SEQ ID NO: 43907 - DNA, 536 bp, Chicken  19866894282135_3
tgatcagaaagtaaaggcatgcacaagctgcactgcatccccacatctccatggagtgcaacaccattaagccactagaatatttggggctgtatgatggggctgatgcagctccatgccrttccctccagccctgtcgctgtcacagagagcagagctcagcactgcccctcagctccctgtgaggagctgcagccatcrtgaggtctcccctcagcttcctctgctctgggctgagcaaacccagggaccccatccactcctcatatgtcttgcactctagacctgcaccatctctgyagtcctccttgggaggttctccaatagttttaagtccttcttatattgtggtgcccacacttgcgcccagtgctcgaggtgaggccacacagcagaggggacaacccctccctttgcctgctggcagcgctgaacctgaggtactccagagtgtggttgggccttctggctccagagcacactggtggctcagattcaacttgccgacagccagagcccccagaccactctccatg

SEQ ID NO: 43908 - DNA, 599 bp, Chicken  19866894282137_1
  misc_feature (1)..(159): n is any nucleotide
nnnnnnnnnnnnnnnnnnnnnnnnnnnnnnnnnnnnnnnnnnnnnnnnnnnnnnnnnnnnnnnnnnnnnnnnnnnnnnnnnnnnnnnnnnnnnnnnnnnnnnnnnnnnnnnnnnnnnnnnnnnnnnnnnnnnnnnnnnnnnnnnnnnnnnnnnnnnnnngctttgctaggtctgggcatgaaacctggcatggcagagcagactgagctcaggccatatgaaatggaaccggcatactttacatccacaccactaaaaataagccgccaacgccgactcttcatctggaaggaggggacmcatcagctttgctgtgttttggctgaaatgcagcactgactcctgaccatatttgtccatcagatcctctcacaaggcttctgcatgagagtagagctctcaagaaactattctggccaaatgccagctctgcctttattatttctccctgctatctcaatacttcatttcatcacctcaattgctgtgttgagttactctgggctgttaaaacgccgtcatgctgcaggggcaaccgtgtgaaggaaatgatgtctccacagaaggtgctccacgcagctgaaatcaggccacctatt

SEQ ID NO: 43909 - DNA, 600 bp, Chicken  19866894282137_2
atcaggccacctatttaggtgtcgagcttaaatttctctctgtaagcacggaaacctgaaacattttgcccaaacgtgttgaaagctatgaagacattaagattatccgtgggataaatattcattcgcgggaagggatttttttaacgcatgaatatttcaggcagcacgtagcaaaaaggctgtgcagccaattgcacaagaaggtgatggtattccaagtgttgtttcagtagtttttattattaccaataccagaaacgtattcccatcacatttttatgacttagtggcagttcrtgcttgaactaaaatcttgctagataatcctcgaactgtgaagtaactacaagtaatgaaagatgcccrttccytgartgttagtcttcaaatgctttcctaccagctcctgtaacaccttcaccttgctgataagttttaaccaaaattactgtattacacttgtcctgaaaaccagaaaagcatccttattttactcataattcccctgtctactccttcccacagaagaggcgactgttttgccagcagcttattaatatattacagctttacatcttcgtctttccttttttcaga

SEQ ID NO: 43910 - DNA, 600 bp, Chicken  19866894282137_3
ccaaacgtgttgaaagctatgaagacattaagattatccgtgggataaatattcattcgcgggaagggatttttttaacgcatgaatatttcaggcagcacgtagcaaaaaggctgtgcagccaattgcacaagaaggtgatggtattccaagtgttgtttcagtagtttttattattaccaataccagaaacgtattcccatcacatttttatgacttagtggcagttcrtgcttgaactaaaatcttgctagataatcctcgaactgtgaagtaactacaagtaatgaaagatgcccrttccytgartgttagtcttcaaatgctttcctaccagctcctgtaacaccttcaccttgctgataagttttaaccaaaattactgtattacacttgtcctgaaaaccagaaaagcatccttattttactcataattcccctgtctactccttcccacagaagaggcgactgttttgccagcagcttattaatatattacagctttacatcttcgtctttccttttttcagaatttccatttttgggggtattttcggtccagaccggtgaagcacgcctgagcctcagtgtggagctctg

SEQ ID NO: 43911 - DNA, 600 bp, Chicken  19866894282137_4
cgtgttgaaagctatgaagacattaagattatccgtgggataaatattcattcgcgggaagggatttttttaacgcatgaatatttcaggcagcacgtagcaaaaaggctgtgcagccaattgcacaagaaggtgatggtattccaagtgttgtttcagtagtttttattattaccaataccagaaacgtattcccatcacatttttatgacttagtggcagttcrtgcttgaactaaaatcttgctagataatcctcgaactgtgaagtaactacaagtaatgaaagatgcccrttccytgartgttagtcttcaaatgctttcctaccagctcctgtaacaccttcaccttgctgataagttttaaccaaaattactgtattacacttgtcctgaaaaccagaaaagcatccttattttactcataattcccctgtctactccttcccacagaagaggcgactgttttgccagcagcttattaatatattacagctttacatcttcgtctttccttttttcagaatttccatttttgggggtattttcggtccagaccggtgaagcacgcctgagcctcagtgtggagctctggtacc

SEQ ID NO: 43912 - DNA, 600 bp, Chicken  19866894282137_5
ttgaaagctatgaagacattaagattatccgtgggataaatattcattcgcgggaagggatttttttaacgcatgaatatttcaggcagcacgtagcaaaaaggctgtgcagccaattgcacaagaaggtgatggtattccaagtgttgtttcagtagtttttattattaccaataccagaaacgtattcccatcacatttttatgacttagtggcagttcrtgcttgaactaaaatcttgctagataatcctcgaactgtgaagtaactacaagtaatgaaagatgcccrttccytgartgttagtcttcaaatgctttcctaccagctcctgtaacaccttcaccttgctgataagttttaaccaaaattactgtattacacttgtcctgaaaaccagaaaagcatccttattttactcataattcccctgtctactccttcccacagaagaggcgactgttttgccagcagcttattaatatattacagctttacatcttcgtctttccttttttcagaatttccatttttgggggtattttcggtccagaccggtgaagcacgcctgagcctcagtgtggagctctggtaccatct

SEQ ID NO: 43913 - DNA, 600 bp, Chicken  19866894282137_6
cacttgtcctgaaaaccagaaaagcatccttattttactcataattcccctgtctactccttcccacagaagaggcgactgttttgccagcagcttattaatatattacagctttacatcttcgtctttccttttttcagaatttccatttttgggggtattttcggtccagaccggtgaagcacgcctgagcctcagtgtggagctctggtaccatctagcgttactaggaaatcctgaacatctgctggatgtgggctttcctcgctgatcgcctgatgggtttgcggtaggaaaagmctgttgcgatcggtctggtgattagggacaacaaaatgcagtaaaacccttttctctgtgagcagctgccatctgggtgatggccacagtggctgggcctggctgcaatggaagcgtttagggtcacattgctgggattgcatgcagatggtcacctgtgatgcctcagaactgtttgccatttttgctcagagttgcagttctgctcatgacttccagatgtgctgcttatctgygctgcagtaagagcaatatctttgaatatttgctatttygctattaaggagcttgctcgaagtt

SEQ ID NO: 43914 - DNA, 600 bp, Chicken  19866894282137_7
ctgaacatctgctggatgtgggctttcctcgctgatcgcctgatgggtttgcggtaggaaaagmctgttgcgatcggtctggtgattagggacaacaaaatgcagtaaaacccttttctctgtgagcagctgccatctgggtgatggccacagtggctgggcctggctgcaatggaagcgtttagggtcacattgctgggattgcatgcagatggtcacctgtgatgcctcagaactgtttgccatttttgctcagagttgcagttctgctcatgacttccagatgtgctgcttatctgygctgcagtaagagcaatatctttgaatatttgctatttygctattaaggagcttgctcgaagttatagctctgcttataacttccagatgtattgcttatatatgataaatatccttcctgaccacaaggcttctataataagagcaacatccttgaaatagcagcgtgaatccaaaacagtaaccgagcagtggaaacgaggtggaaaagaggtgtcctcagaaaacctgtgctcaaacgtggtcacagtgagtgggggaagccgtccccaaaggaccaccgagacctccccatcccct

SEQ ID NO: 43915 - DNA, 600 bp, Chicken  19866894282137_8
ctgatgggtttgcggtaggaaaagmctgttgcgatcggtctggtgattagggacaacaaaatgcagtaaaacccttttctctgtgagcagctgccatctgggtgatggccacagtggctgggcctggctgcaatggaagcgtttagggtcacattgctgggattgcatgcagatggtcacctgtgatgcctcagaactgtttgccatttttgctcagagttgcagttctgctcatgacttccagatgtgctgcttatctgygctgcagtaagagcaatatctttgaatatttgctatttygctattaaggagcttgctcgaagttatagctctgcttataacttccagatgtattgcttatatatgataaatatccttcctgaccacaaggcttctataataagagcaacatccttgaaatagcagcgtgaatccaaaacagtaaccgagcagtggaaacgaggtggaaaagaggtgtcctcagaaaacctgtgctcaaacgtggtcacagtgagtgggggaagccgtccccaaaggaccaccgagacctccccatccccttctgcagcacaccaagagaaccagcaggagcacaccctg

SEQ ID NO: 43916 - DNA, 600 bp, Chicken  19866894282144_1
gttgtgctgtcttgatgcagtataaagcatctcaaccagttctccctgatgagacaaatgaggaaattgaataaaatcactctagagctgggcaggggtaggacagggagcagtggcatgtcctgaggtacaactcccaccaagatttacagtgaatttcagactcactaaaagtgaacagaaggaatacagacactgatttcgaaggctgggaggttatcctaactgagtgtgagttatgagaaaagtcagtggtgacttttaattggtttcaaatctgaaatcaattttgagtttttsctcccactgggatgttttgcctctcatctaatcaaaccagaggctgcaatctgtatgacagtgctatctattttcactctgttgttatctttaaactcatattaacatgaaactgatagtgttcttttaaaatgtgatggataacatgattatgataacttcagacatatgactttttttttttctttttctcccctcctttcacctttattagtgtcaaatcaacagtgccttggcttcatttcatactgctttggaacttgcaacagaccaaagggagattcaacatgtctgcttata

SEQ ID NO: 43917 - DNA, 600 bp, Chicken  19866894282144_2
tgaacagaaggaatacagacactgatttcgaaggctgggaggttatcctaactgagtgtgagttatgagaaaagtcagtggtgacttttaattggtttcaaatctgaaatcaattttgagtttttsctcccactgggatgttttgcctctcatctaatcaaaccagaggctgcaatctgtatgacagtgctatctattttcactctgttgttatctttaaactcatattaacatgaaactgatagtgttcttttaaaatgtgatggataacatgattatgataacttcagacatatgacsttttttttttctttttctcccctcctttcacctttattagtgtcaaatcaacagtgccttggcttcatttcatactgctttggaacttgcaacagaccaaagggagattcaacatgtctgcttatatgaaataggtaaatggggtatctttatgctataaatatttcactttcaagttttgactaataacttcaataaagaaaatgaatgattttgttyaggattattaaaaaaggtttcagaatactggctcttgtctcgactggataatgttagtcatagaatggcctgggttgaaaa

SEQ ID NO: 43918 - DNA, 600 bp, Chicken  19866894282144_3
aactcatattaacatgaaactgatagtgttcttttaaaatgtgatggataacatgattatgataacttcagacatatgactttttttttttctttttctcccctcctttcacctttattagtgtcaaatcaacagtgccttggcttcatttcatactgctttggaacttgcaacagaccaaagggagattcaacatgtctgcttatatgaaataggtaaatggggtatctttatgctataaatatttcactttcaagttttgactaataacttcaataaagaaaatgaatgattttgttyaggattattaaaaaaggtttcagaatactggctcttgtctcgactggataatgttagtcatagaatggcctgggttgaaaagaaccacagtgatcattgagtttcaacccccctgctacgtgcagggtcgccaaccaccagaccaggctgcccagagccttctcttctccaagctaaacaagcccagttccctcaacctttcctcataggagaggtgctccagccctctgatcgtgaaatcatcctatcatcttatttggttgagtagcactcaacaattgtttataattttcaagttcc

SEQ ID NO: 43919 - DNA, 599 bp, Chicken  19866894282147_1
  misc_feature (1)..(24): n is any nucleotide
nnnnnnnnnnnnnnnnnnnnnnnnccagatttcagggttctgtaatcccacataacaattgagagcttacatgcatttaagatgagtgtcattcagcttgaccaaattcaaccttggcatgatcctcaaagtcccttaaaccaatagagctctgcacatacaaacacagatttttgtttccagtgtgcacccattcagagcactgagcagagtatttacaaacagtccacagcaagaacaacttgtaatctacgacttcttgcttgtcttttatattttctggctgctatgcaggaaatytgtgggcacaactttctctacaactgaaaccaaaataagatatatctcagatgttaactatatgtgaaaactctggaattttattccttcactgcacaggtcaaattttatactacttccyacctacgtcaaattctgcatttgtgagaaaatcctcagtgaaaagcagtatttaaggttgtctttataaatgttattaattcatagctgtatcatatgtatttgagtaagagatccatcagaatttattcccctacttccaatgatcgagcagccagctaatggcatcctaggagctc

SEQ ID NO: 43920 - DNA, 600 bp, Chicken  19866894282147_2
atcctcaaagtcccttaaaccaatagagctctgcacatacaaacacagatttttgtttccagtgtgcacccattcagagcactgagcagagtatttacaaacagtccacagcaagaacaacttgtaatctacgacttcttgcttgtcttttatattttctggctgctatgcaggaaatytgtgggcacaactttctctacaactgaaaccaaaataagatatatctcagatgttaactatatgtgaaaactctggaattttattccttcactgcacaggtcaaattttatactacttccyacctacgtcaaattctgcatttgtgagaaaatcctcagtgaaaagcagtatttaaggttgtctttataaatgttattaattcatagctgtatcatatgtatttgagtaagagatccatcagaatttattcccctacttccaatgatcgagcagccagctaatggcatcctaggagctccccaaacattcccacatatgcaggtacttttcccatgtactgcaatgcaatatatataggcacacaaaggagttcacattttggacaaccaatgaccccgagttagaatcagaaaacagtac

SEQ ID NO: 43921 - DNA, 600 bp, Chicken  19866894282153_1
tttgttgggaagcagaaggaaaagggagagaattagaattgggggttggggtgggaattatataaggcaagattaattttggagaccataacggcaagtttattgattcagactcgtgaagtatgaagttatagatttcggtgatgctacaaagccagctaaaacagctacataatgtcacacacactatccaagtactggtcaatttgattcttgctttatatcttctgggttcttatgatattttgtagacatgatttaacagctggatcaacaatccagcttttctcttttactagyaagcaacgttctgtattcctcaaacacaatcatgaagaagctatgcaactttcctaaagacatgaataacatcaaaattaataagagaaatttgcagtggaatttacatgttttaaaatatttttagttaaatgcaagtaatttacattgaatgtatcatttgcattgcatctgtctcatawaaaattactttacaataaataagaaagcagttgtattgtttcctgtgcacagtaatgaattgtctggacagattaaacttgagaaactaggwatttgtcgatgtgccagctaatatga

SEQ ID NO: 43922 - DNA, 528 bp, Chicken  19866894282153_2
cacactatccaagtactggtcaatttgattcttgctttatatcttctgggttcttatgatattttgtagacatgatttaacagctggatcaacaatccagcttttctcttttactagyaagcaacgttctgtattcctcaaacacaatcatgaagaagctatgcaactttcctaaagacatgaataacatcaaaattaataagagaaatttgcagtggaatttacatgttttaaaatatttttagttaaatgcaagtaatttacattgaatgtatcatttgcattgcatctgtctcatawaaaattactttacaataaataagaaagcagttgtattgtttcctgtgcacagtaatgaattgtctggacagattaaacttgagaaactaggwatttgtcgatgtgccagctaatatgaattatgccacaaccagattattaagaaataagtttaatcaaaagtcaaaacatccttacatgggaaaaaaatactgtaagcaatttattgttttccagagctgttccagt

SEQ ID NO: 43923 - DNA, 436 bp, Chicken  19866894282153_3
caatccagcttttctcttttactagyaagcaacgttctgtattcctcaaacacaatcatgaagaagctatgcaactttcctaaagacatgaataacatcaaaattaataagagaaatttgcagtggaatttacatgttttaaaatatttttagttaaatgcaagtaatttacattgaatgtatcatttgcattgcatctgtctcatawaaaattactttacaataaataagaaagcagttgtattgtttcctgtgcacagtaatgaattgtctggacagattaaacttgagaaactaggwatttgtcgatgtgccagctaatatgaattatgccacaaccagattattaagaaataagtttaatcaaaagtcaaaacatccttacatgggaaaaaaatactgtaagcaatttattgttttccagagctgttccagt

SEQ ID NO: 43924 - DNA, 599 bp, Chicken  19866894282157_1
  misc_feature (1)..(72): n is any nucleotide
nnnnnnnnnnnnnnnnnnnnnnnnnnnnnnnnnnnnnnnnnnnnnnnnnnnnnnnnnnnnnnnnnnnnnnnncacaacaaaaggccatgaaaagtctctttggtgacgatgataaggagatgtgcgaggagagtgaaatcattcctactttggaaccactgccacctcatgaggtacagaaactttcctgggttagactattttttttttttttttaaattctgtatactaatactgttatcattgtttcagattttaagcttttcagcaagcactatcgcatccaataatggtgcctascgtacagttaccatctatttgtgaatattagatcttagagttccatatttgtaattaatatctgtggattttyaaatcagttgatatttagtccttcttggattccattatgttttgttgatgccatgggaaatataccatgtacttaagtagacatttgtctttgaaatttgtgcatctttgcctctgagtgatctgagagctcattaattttttcatgatatttttcatgatattactcttaaatgaaaatacttgcatgtgtgaatagataatttcatttgttcagttaatgaagt

SEQ ID NO: 43925 - DNA, 600 bp, Chicken  19866894282157_2
acaacaaaaggccatgaaaagtctctttggtgacgatgataaggagatgtgcgaggagagtgaaatcattcctactttggaaccactgccacctcatgaggtacagaaactttcctgggttagactattttttttttttttttaaattctgtatactaatactgttatcattgtttcagattttaagcttttcagcaagcactatcgcatccaataatggtgcctascgtacagttaccatctatttgtgaatattagatcttagagttccatatttgtaattaatatctgtggattttyaaatcagttgatatttagtccttcttggattccattatgttttgttgatgccatgggaaatataccatgtacttaagtagacatttgtctttgaaatttgtgcatctttgcctctgagtgatctgagagctcattaattttttcatgatatttttcatgatattactcttaaatgaaaatacttgcatgtgtgaatagataatttcatttgttcagttaatgaagtatttcctaatcctagaattacttaagatactattgcagagtcttraatgtagtctgttctaggagctagataaa

SEQ ID NO: 43926 - DNA, 600 bp, Chicken  19866894282157_3
atatttgtaattaatatctgtggattttyaaatcagttgatatttagtccttcttggattccattatgttttgttgatgccatgggaaatataccatgtacttaagtagacatttgtctttgaaatttgtgcatctttgcctctgagtgatctgagagctcattaattttttcatgatatttttcatgatattactcttaaatgaaaatacttgcatgtgtgaatagataatttcatttgttcagttaatgaagtatttcctaatcctagaattacttaagatactattgcagagtcttraatgtagtctgttctaggagctagataaacatgagacaactctaaagtctcttcagattcatgacaaccatcacagaagtacgtactgatcagtagcacagcttactgcagctctgtccctggcataacttatctcaaaagagtcttcaatgtgtgagtgcagaaagaagtcttttgcttgacagatgacttctgaggcttcccctcctggaattgtcttgccgattttctcctttgtagtcttgtagcctatccataggccatgctgttgccaacgcagtaaggagaagatctttggaa

SEQ ID NO: 43927 - DNA, 599 bp, Chicken  19866894282159_1
  misc_feature (1)..(76): n is any nucleotide
nnnnnnnnnnnnnnnnnnnnnnnnnnnnnnnnnnnnnnnnnnnnnnnnnnnnnnnnnnnnnnnnnnnnnnnnnnnncacatgatatggacagcgatactatcatttctctatcaatagtgcagggtttacgttcgcatcagatgctaatgtaaatgtctttacattttccgtttgcttagatataaaatgatttggttaatggattctctattgcactatgcctggtggctgtgcaactaatttaatctggtaccgtatctaccacttgctaaggtaagaagattgtatagtgtagaaakgtgtaatttaataaatttttttgagaccttggaaagctgttttgcctcccaggggtttccarctcagtttaagtattcacatggttttgcagttaaagtgttgacaggaacgtatagcttctcatctataggagtattacatttgaggagtaaaaagtttaaaaaaaaaaaaaatcaaacctatgtaaagctcttttttttttttttttttgaaagatttccatttcctctaaggcagcatccaaatattcatgctttaattccacctcagaggagtccagctaagtatgtttcttggc

SEQ ID NO: 43928 - DNA, 599 bp, Chicken  19866894282159_2
  misc_feature (1)..(14): n is any nucleotide
nnnnnnnnnnnnnncacatgatatggacagcgatactatcatttctctatcaatagtgcagggtttacgttcgcatcagatgctaatgtaaatgtctttacattttccgtttgcttagatataaaatgatttggttaatggattctctattgcactatgcctggtggctgtgcaactaatttaatctggtaccgtatctaccacttgctaaggtaagaagattgtatagtgtagaaakgtgtaatttaataaatttttttgagaccttggaaagctgttttgcctcccaggggtttccarctcagtttaagtattcacatggttttgcagttaaagtgttgacaggaacgtatagcttctcatctataggagtattacatttgaggagtaaaaagtttaaaaaaaaaaaaaatcaaacctatgtaaagctcttttttttttttttttttgaaagatttccatttcctctaaggcagcatccaaatattcatgctttaattccacctcagaggagtccagctaagtatgtttcttggcttggacccatacttcatttatggatatgcataagttatctaattacaagcgaaatagagatg

SEQ ID NO: 43929 - DNA, 600 bp, Chicken  19866894282167_1
cagttgagcaatatctccattaacaaaggcttctttcccccttgtatgttttcaagctgttcaaatttttgctagaatttgtaatatttttctcctttcaaactgaagacaaggatttccatccattaggcaaatgaattgccttttctagagaaatgagctggacatttcatgcaagctattaaagatgctttattgcaagcaatgacaattctcagagctttatcaaatgaatggcaatcacagtatatggcactctgttctttaaagcacccaagttggaaaatgaccagtgagagyggattcactgccgtgtctgcaaagaaatatggaccaatatatttgcacttagtgtgcatcagcttgattttgtgtgtttctaacagaraggatgcaaaacactctattgccagtctgcatctatggcatggaattagtttctatggagaactgatagaatctgatggaattttgcttttgagctgcttctatagcaaacatatcatcggctacagaaggcacatgaagcaaaacccctccaaactgacgaatgccttgaatgctgagcatcctgcagaagcagactggcaccagccaagg

SEQ ID NO: 43930 - DNA, 600 bp, Chicken  19866894282167_2
tttctcctttcaaactgaagacaaggatttccatccattaggcaaatgaattgccttttctagagaaatgagctggacatttcatgcaagctattaaagatgctttattgcaagcaatgacaattctcagagctttatcaaatgaatggcaatcacagtatatggcactctgttctttaaagcacccaagttggaaaatgaccagtgagagyggattcactgccgtgtctgcaaagaaatatggaccaatatatttgcacttagtgtgcatcagcttgattttgtgtgtttctaacagaraggatgcaaaacactctattgccagtctgcatctatggcatggaattagtttctatggagaactgatagaatctgatggaattttgcttttgagctgcttctatagcaaacatatcatcggctacagaaggcacatgaagcaaaacccctccaaactgacgaatgccttgaatgctgagcatcctgcagaagcagactggcaccagccaaggtgctggaccattggcctcatgggcatacatggccccatgtgctcaagacaagacgagagcatggggagcctgtccactagcccagccc

SEQ ID NO: 43931 - DNA, 599 bp, Chicken  19866894282170_1
  misc_feature (1)..(18): n is any nucleotide
nnnnnnnnnnnnnnnnnnaaaagtccctcccccagctttcctgcaggcccccttcaggtactggaaggcaactatactccagggaaggccctggtgcctcttctccaggctgaagagcaccaaaaactctcagtcatctctctcagccattctttaaagtcccttcaactttaacctccaaacacaaaatatcttaaattcctaaagaacatgttagccatgttgtaagcacagaagtgaagctacagctacagtcccacaaaaccttccagagaataacactgtgctgcgctgggttcrgaatgtttgattaaaaggcaaagagggaacagttttgacattgtctgagatcttcggtgagaagcatcctttgcaataagggaacagttgagtagctagtaaatctctgcctctccatgtgataacgtgggaattccctttccaggattctttcaccaggatatatagacttctataacgatgacaaaaaagcccacagaataatgacatgcctttgaagaagccctcaatatacaaagataacttatrcacatgtagatccatttgaatacttgatcgtttttacatttacttatttt

SEQ ID NO: 43932 - DNA, 600 bp, Chicken  19866894282170_2
tacagtcccacaaaaccttccagagaataacactgtgctgcgctgggttcrgaatgtttgattaaaaggcaaagagggaacagttttgacattgtctgagatcttcggtgagaagcatcctttgcaataagggaacagttgagtagctagtaaatctctgcctctccatgtgataacgtgggaattccctttccaggattctttcaccaggatatatagacttctataacgatgacaaaaaagcccacagaataatgacatgcctttgaagaagccctcaatatacaaagataacttatrcacatgtagatccatttgaatacttgatcgtttttacatttacttattttttttttaatagatcatagagagtcagcatctttggtagtgaattatttacagctaagcttgaagacagtccagagggtctatggaaaacatatatgtctccggcaacagtttaaaagcagaattcctctagtagcctgaatattcaggttaaagatatcaggtgaaagatagcaggttaaagatattattttaactgtcttgaaccaatagcacagagctggacaactctgtctccacagccattctata

SEQ ID NO: 43933 - DNA, 599 bp, Chicken  19866894282178_1
  misc_feature (1)..(156): n is any nucleotide
nnnnnnnnnnnnnnnnnnnnnnnnnnnnnnnnnnnnnnnnnnnnnnnnnnnnnnnnnnnnnnnnnnnnnnnnnnnnnnnnnnnnnnnnnnnnnnnnnnnnnnnnnnnnnnnnnnnnnnnnnnnnnnnnnnnnnnnnnnnnnnnnnnnnnnnnnnnncagcagagcaaacatcctcctgtaaacaatcctgcgcagatggggctttatttaaacaagctgaggtgtgctgtgcagcgcggtgctggggtggggacaccttgcttgtcccacagccaggggatgcctggcacctcccaaccygtgctcagggccgggaggtccatgggctttgggtctgatgtggcaaaatgggtcyggtggtggtgggactccaacgatctgaccttctccaggtgcttctcgcctccacgaccagagcagctgagtttgtaaatggaaaatggtaatacatggcaaaggtytcacctggaaaatgtcaaagcaaatgggcacctgtgcttcccaagaaacacgagccttttagaagcacggaaatgcaccaacacccttgaatatttttgccctccctctggctatttgcttgctgtgtgctgcgttgg

SEQ ID NO: 43934 - DNA, 599 bp, Chicken  19866894282178_2
  misc_feature (1)..(101): n is any nucleotide
nnnnnnnnnnnnnnnnnnnnnnnnnnnnnnnnnnnnnnnnnnnnnnnnnnnnnnnnnnnnnnnnnnnnnnnnnnnnnnnnnnnnnnnnnnnnnnnnnnnnncagcagagcaaacatcctcctgtaaacaatcctgcgcagatggggctttatttaaacaagctgaggtgtgctgtgcagcgcggtgctggggtggggacaccttgcttgtcccacagccaggggatgcctggcacctcccaaccygtgctcagggccgggaggtccatgggctttgggtctgatgtggcaaaatgggtcyggtggtggtgggactccaacgatctgaccttctccaggtgcttctcgcctccacgaccagagcagctgagtttgtaaatggaaaatggtaatacatggcaaaggtytcacctggaaaatgtcaaagcaaatgggcacctgtgcttcccaagaaacacgagccttttagaagcacggaaatgcaccaacacccttgaatatttttgccctccctctggctatttgcttgctgtgtgctgcgttggcggagtttccctttccccagaacctcattttctgtctgcatcgctgttagctgac

SEQ ID NO: 43935 - DNA, 600 bp, Chicken  19866894282178_3
gagcaaacatcctcctgtaaacaatcctgcgcagatggggctttatttaaacaagctgaggtgtgctgtgcagcgcggtgctggggtggggacaccttgcttgtcccacagccaggggatgcctggcacctcccaaccygtgctcagggccgggaggtccatgggctttgggtctgatgtggcaaaatgggtcyggtggtggtgggactccaacgatctgaccttctccaggtgcttctcgcctccacgaccagagcagctgagtttgtaaatggaaaatggtaatacatggcaaaggtytcacctggaaaatgtcaaagcaaatgggcacctgtgcttcccaagaaacacgagccttttagaagcacggaaatgcaccaacacccttgaatatttttgccctccctctggctatttgcttgctgtgtgctgcgttggcggagtttccctttccccagaacctcattttctgtctgcatcgctgttagctgacatttcccagctctctgacctcgctgcatcctgagcccattccccaccctgcagcccagcagagccctccgggagagcctctccccccaccacgtgtgccccgtgggt

SEQ ID NO: 43936 - DNA, 600 bp, Chicken  19866894282184_1
ctaagaaaaggatgaggtgccttttgtatggaaaagcctgtaactacagtagctactgaccatgaatataaatcggaacttatgacaataatcaggccaggcaaattagccagtgctaagagctgagatatagcccacacatggcaaatgttcctctggagaaatctggtaattgctttaaggacaggcttaagatactgtaagtaaaagccattcaggaaggaagctctcaggaaaacgtttctttccatctccatctagtgggtgaaaccagctattgcttcctcctgagatgctttyctggctccacatgcagagaattayccgtgttacataacgagcccatcagtcccccagctctttccccacagctttcctctgctcctctggctgcagcccactctcttcacgctcatagtagttctctaagtttccccatttggttaacagtattcattgcacattaagacaattttacaatgagatttacagcaatgtcacaaatagagaaaaccgtcataaaataaccatggacaacattattaaatagcagtaaaatcagcaatgatgcacagctgtgtatttatatctgccacctgt

SEQ ID NO: 43937 - DNA, 600 bp, Chicken  19866894282184_2
tgtatggaaaagcctgtaactacagtagctactgaccatgaatataaatcggaacttatgacaataatcaggccaggcaaattagccagtgctaagagctgagatatagcccacacatggcaaatgttcctctggagaaatctggtaattgctttaaggacaggcttaagatactgtaagtaaaagccattcaggaaggaagctctcaggaaaacgtttctttccatctccatctagtgggtgaaaccagctattgcttcctcctgagatgctttyctggctccacatgcagagaattayccgtgttacataacgagcccatcagtcccccagctctttccccacagctttcctctgctcctctggctgcagcccactctcttcacgctcatagtagttctctaagtttccccatttggttaacagtattcattgcacattaagacaattttacaatgagatttacagcaatgtcacaaatagagaaaaccgtcataaaataaccatggacaacattattaaatagcagtaaaatcagcaatgatgcacagctgtgtatttatatctgccacctgttcttttttttcaagccatctctaa

SEQ ID NO: 43938 - DNA, 600 bp, Chicken  19866894282184_3
acagctttcctctgctcctctggctgcagcccactctcttcacgctcatagtagttctctaagtttccccatttggttaacagtattcattgcacattaagacaattttacaatgagatttacagcaatgtcacaaatagagaaaaccgtcataaaataaccatggacaacattattaaatagcagtaaaatcagcaatgatgcacagctgtgtatttatatctgccacctgttcttttttttcaagccatctctaatcagaccacagaaaaaccacagcaaaccacacagaaaactacsagaaaactcctaaataatccaagttgaaagaaackcaacgtcttctaaccaagaggcatggcacacctctgtctgacttgaacaaacagttattatattctagtgcagcaaaacaccctacagaaaaactgctcagagccatattagccctgattttgttcatcactgagtcacacaggagagagcaaggtggtgagttaaggatcctgggatcattagcaaaccctttccttcctctgctcctcaattcacccactcctgccctgggtataacgaagttttctctaactcacaaacttc

SEQ ID NO: 43939 - DNA, 576 bp, Chicken  19866894282184_4
ctcttcacgctcatagtagttctctaagtttccccatttggttaacagtattcattgcacattaagacaattttacaatgagatttacagcaatgtcacaaatagagaaaaccgtcataaaataaccatggacaacattattaaatagcagtaaaatcagcaatgatgcacagctgtgtatttatatctgccacctgttcttttttttcaagccatctctaatcagaccacagaaaaaccacagcaaaccacacagaaaactacsagaaaactcctaaataatccaagttgaaagaaackcaacgtcttctaaccaagaggcatggcacacctctgtctgacttgaacaaacagttattatattctagtgcagcaaaacaccctacagaaaaactgctcagagccatattagccctgattttgttcatcactgagtcacacaggagagagcaaggtggtgagttaaggatcctgggatcattagcaaaccctttccttcctctgctcctcaattcacccactcctgccctgggtataacgaagttttctctaactcacaaacttcaaggcgaaata

SEQ ID NO: 43940 - DNA, 600 bp, Chicken  19866894282188_1
atgtgtaaagcatataatgaatgcagtgtatttgactggaagagcagtaattgaatcagagcttgatttagactgtagcatacatggtctcacatgcctctagttaaataagtcataattttaaatcactcacatttttaagcacttggatttaggatattttgaatgaggggttatttagagataattttaggtagctagtgtggcagaatagctagtaatgacagtaatgagtataacacaaagtaatgaggagtcctctgagaataatgtaggacacagggcctgatctctgccctkcttataagtgaaagaggtcaggtattctcagcctcagaggcagcttcagcactgagctcatttgggtgatttctagtatgaactgtgatgcaaatctgtgacactaaagagttaccaaaatagtaccaaatcacccacggtacagtgaatattaaaaaaaatatatagtgtcaaattacaaattctgtacaatgttacgaactaataaaatgatgacatttttaaagtttcttagagactgaatacgcactttacttatagcatcttttttttcatgtacttagtgaaatggtggaagat

SEQ ID NO: 43941 - DNA, 600 bp, Chicken  19866894282189_1
aattatggcagctaataaccctattatcagggttcaagaaaattgtcatttaatcaaagactgccagcttgaacaggaagataattggcattttccatgttcaagctgagtttggaattaaaaactttatgatgggttgatagaaaataaatgtgattcagctgattgtgatttgtgctaattttgaaaagaaatattttaataccttctttccaagaagcttttcattacctgtatgacacttgcaagttttgtccatacatatactcaaattttctttcctgagtcaaagcaacaacwgttcgaatattttctatggcttcagaagcaacctgtaayatcagaaaaacaagattatatggaaatgtttaagccgaatttgaaaaacaaaatttagaatgactgtgatagaagtgacagaccatatctacagtactgttgaaagtgcatgactgcaatgtttgtagatatgcttctgataaataaaatccaacaagcatgtattatagcagtgaagttgagacagcatacattttagtacaggccagcaatgggagcttactttgcagcaggcttatgcaactgctatccagatttaat

SEQ ID NO: 43942 - DNA, 600 bp, Chicken  19866894282189_2
aaattgtcatttaatcaaagactgccagcttgaacaggaagataattggcattttccatgttcaagctgagtttggaattaaaaactttatgatgggttgatagaaaataaatgtgattcagctgattgtgatttgtgctaattttgaaaagaaatattttaataccttctttccaagaagcttttcattacctgtatgacacttgcaagttttgtccatacatatactcaaattttctttcctgagtcaaagcaacaacwgttcgaatattttctatggcttcagaagcaacctgtaayatcagaaaaacaagattatatggaaatgtttaagccgaatttgaaaaacaaaatttagaatgactgtgatagaagtgacagaccatatctacagtactgttgaaagtgcatgactgcaatgtttgtagatatgcttctgataaataaaatccaacaagcatgtattatagcagtgaagttgagacagcatacattttagtacaggccagcaatgggagcttactttgcagcaggcttatgcaactgctatccagatttaattgctggtagtacccagtctggctaaactgaacaagcctc

SEQ ID NO: 43943 - DNA, 600 bp, Chicken  19866894282193_1
ggaggagcgtcttagtttaaaaatctcccacttacacaatgccctccatgtggagttccccttagtgaggttcatagctcccttctctgcagccttatatctaggatgccttggagacaagttcttttccaaggattctttgtggtccaggagccagaatttcgcctcccatcaagggaaatgtatctcttctttacagtaattaaacctcattttctgataaattcttgtgcttcaaattataagccagatccattttccgaggtagaaaacaggcatttttctataagaatttcaacrcagtattacccatagatgtttcttaaacctccacaaaagttttgggagaaggttttgaagtgaactactagtctgaattttattaaatttaatttctttaaggtttctttgtgtggctttctgtatgttctatcattccagcaaaagtagcatgtaggggcaaataaaagctacttgtcttagcggagttgcctttcccatgcactgtactccattgcttctgagtcaaaggaagtagtactgtctgttattaaggtgaatgaaagaatctgcagagttctgttttatttcatacacgga

SEQ ID NO: 43944 - DNA, 600 bp, Chicken  19866894282193_2
aaggtttctttgtgtggctttctgtatgttctatcattccagcaaaagtagcatgtaggggcaaataaaagctacttgtcttagcggagttgcctttcccatgcactgtactccattgcttctgagtcaaaggaagtagtactgtctgttattaaggtgaatgaaagaatctgcagagttctgttttatttcatacacggagaatgggttacaaataaagatagttgttctagtttccttcatctttggcattagctgcagtagaaagaatcaatgaattacagtgctaataaatgaacraacaggcatcttcatgtctctttctcattctgcaagaaatcatgggaactctaatatcaccaaatggagcatgattaaatgaactatgtcattgccataaccacatgaaagcactctgctattgcatttttaaggtcattttagcctatgagtgtgtgttgacctcatgaacgtgcaaatgagagtctgctccttctgttgtttgtttttgaatttgtgggatgacacacacttggagaaactgttgcacagcacattatgttccctgaggctggtcatctctcatcaaaacatatttag

SEQ ID NO: 43945 - DNA, 600 bp, Chicken  19866894282193_3
ctgctattgcatttttaaggtcattttagcctatgagtgtgtgttgacctcatgaacgtgcaaatgagagtctgctccttctgttgtttgtttttgaatttgtgggatgacacacacttggagaaactgttgcacagcacattatgttccctgaggctggtcatctctcatcaaaacatatttagcggaatgagcataaatccttcggtgaaggagcagtaggaggaacagtaagaggaaggatcagataaatggctcagaatgtcattctgattccaaatttcatgtgattctgggagrggaggagataagattccttcccaagtatatgctgtgtctctacttcattactgtagatcaggttctccttgcagtgtactatgttagtcacattagcaagcacccagcggtgtattgggaagtcccactgaaacactcaggtcctttctaattggcatgcaacatactaagtattattccagtgggaaacttagacttgttctatctgccactctttcctcctactcatgggatatacagccaacattgcaatttcttattctgcagtcaacaaacatctccacagatatgcttctggta

SEQ ID NO: 43946 - DNA, 600 bp, Chicken  19866894282203_1
gggttagtacagtgtctttaacttcagaagtcacaaaagtatgaaagatgtaaatgagtgtttaggatagtccaagttataagactttttgagaaacagacagatggaaagctaatattacacaagagaacagtatgcttcatgttccaattgtggaaatttttagtgttatttctgagaattcaaagaaagttttcttaagttagggtatggtcctagaaggcagatagcagcctagtaaatgtacagttgttatggttgattttagatgtgagttcctggcttgcttctgttttatgmgttttgtttctgaagtagatctatctgccagtttacaaaatgatttacgtaaagttttagggttttgcaaatgtttttgataagtttaggatcccatcctaaatctggctttaattctttaatttccgtgtttcttttttttttaaaaggaatatgtgaagccttgttgctactctctacttttactctcaagttcattttcagtttatccttggcaagtccataacaaagcacacagttctccgtagtcaatgcattttcttctatctaggtcagaatgaacatgttacattataaata

SEQ ID NO: 43947 - DNA, 600 bp, Chicken  19866894282205_1
tataacttaagaaatcctgttttaggggtaaacttatgtttcttaaatatagattggaggtgtgttattaaaggttactataatatctcatgaaacaatctggatagtggcatttcatcaaccaatctacaccagcaggcagaaattaagtgctgttgaaaatggctaaaaaatacaatctgtattatcaacagcacttgttctgagatttactgatagatattttaccctcttatcccactctttgctgacgctggcccagtgacctgtgatttacaaataaagctctggggcagctgrgaggcttttcttccatatactttttgctgtataaaattcagtctccaatcagaagaactttaccctaccacagaaagtctccctcttcatgaataattgccagcagtggatgaggaggtaagatatagatctgagcagaaatgtgggcaccagatgttatctctgtctcaagttgcacgtgccattcctggcaggtacctagctgcttctgcagatagactaaataagaaacacttgtgatccctccccagcaacttgttggggtgattccactatcctggttgttgcttttagcttagt

SEQ ID NO: 43948 - DNA, 600 bp, Chicken  19866894282210_1
gggacatggctctgtattatcagaataattgtaaggatctcttacattcagtaatcccccaaaatacatctgcattaattaaatataaagacagaaataaatctctgtatatgtttgtatataccgtcaggtgtgaaattacatacttatattttaataattcagttttataagtaaaaaagaagataaatattaattcctatatttcttcttaaacccagtttaaactaactgtacatcaaagttcatggtggaaaatgtatgttcagttaattctgaaaacaatagctttagtatgcwggtcattacagtactttccttcttcagggtagggtttttaatctttgctaaagatccatcagctgcatctctgatacctcttaccttcagtacaactttttataatacggtgaaggacatcagaaaactgtctctcatcgtaactgtatgctgctgagaaaaatctggcccaagatctgacctttaggtaattatatttcatgctcaagaatcagagcattmatactcttctgcatgttgtcttcttcttccaatgtataactcctwcaagtttctttccactaaggagtggcagagttc

SEQ ID NO: 43949 - DNA, 583 bp, Chicken  19866894282210_2
ttaaactaactgtacatcaaagttcatggtggaaaatgtatgttcagttaattctgaaaacaatagctttagtatgcwggtcattacagtactttccttcttcagggtagggtttttaatctttgctaaagatccatcagctgcatctctgatacctcttaccttcagtacaactttttataatacggtgaaggacatcagaaaactgtctctcatcgtaactgtatgctgctgagaaaaatctggcccaagatctgacctttaggtaattatatttcatgctcaagaatcagagcattmatactcttctgcatgttgtcttcttcttccaatgtataactcctwcaagtttctttccactaaggagtggcagagttcaaagagcactaattctccaaagcattatagatacatgtgtactagtgtgtcaagattgcacagacaaaatgcataacataatggcttgatgacttttcatcaccccgtcttggcgtatcgtccccgaagttgcaataccccagcccagtagtagtgttttgttaggatgctaagatgtggctccactcctcttccattgcctacg

SEQ ID NO: 43950 - DNA, 538 bp, Chicken  19866894282210_3
agttaattctgaaaacaatagctttagtatgcwggtcattacagtactttccttcttcagggtagggtttttaatctttgctaaagatccatcagctgcatctctgatacctcttaccttcagtacaactttttataatacggtgaaggacatcagaaaactgtctctcatcgtaactgtatgctgctgagaaaaatctggcccaagatctgacctttaggtaattatatttcatgctcaagaatcagagcattmatactcttctgcatgttgtcttcttcttccaatgtataactcctwcaagtttctttccactaaggagtggcagagttcaaagagcactaattctccaaagcattatagatacatgtgtactagtgtgtcaagattgcacagacaaaatgcataacataatggcttgatgacttttcatcaccccgtcttggcgtatcgtccccgaagttgcaataccccagcccagtagtagtgttttgttaggatgctaagatgtggctccactcctcttccattgcctacg

SEQ ID NO: 43951 - DNA, 600 bp, Chicken  19866894282211_1
tctgcataagtgggaactcttatcattttagtataacatttctgaacgtgattacctctgtactgttatccccaaagtattttttttttaatggcatttgctacacaaacgtgtgcgtttctgtcctgttcttgttcctaatttgaatcagtttcctagaaattgagggaggggagagctcaggaccagcggtacagcgcacgtgagccggggctgtgcgcagcactgtcagtgccccgatgggcctcggggtgacgctctgcctcctgcctgggggggtcacacctgtgcagacgtacmcagacgtgagctgaagccggggcagrgctgcgtcctgccggcacggcgctcggcagccagagggagagccgcctgcctggttgggcgctggctgtatttacagcttggaaatattcggtgctgttttcttccgacactctcaggaggttgtgcagatgaggagcccggggctcggcttcctgctgccgaggggcagcgttgtcacatcgcggcgctgagggcagcgtttggtcctaaggaggggaaaggaatggctctgtctgcacagaatcaatcgctcattcaactttttacggaact

SEQ ID NO: 43952 - DNA, 600 bp, Chicken  19866894282211_2
tttagtataacatttctgaacgtgattacctctgtactgttatccccaaagtattttttttttaatggcatttgctacacaaacgtgtgcgtttctgtcctgttcttgttcctaatttgaatcagtttcctagaaattgagggaggggagagctcaggaccagcggtacagcgcacgtgagccggggctgtgcgcagcactgtcagtgccccgatgggcctcggggtgacgctctgcctcctgcctgggggggtcacacctgtgcagacgtacmcagacgtgagctgaagccggggcagrgctgcgtcctgccggcacggcgctcggcagccagagggagagccgcctgcctggttgggcgctggctgtatttacagcttggaaatattcggtgctgttttcttccgacactctcaggaggttgtgcagatgaggagcccggggctcggcttcctgctgccgaggggcagcgttgtcacatcgcggcgctgagggcagcgtttggtcctaaggaggggaaaggaatggctctgtctgcacagaatcaatcgctcattcaactttttacggaactaaacgtatttattcgttaccttctca

SEQ ID NO: 43953 - DNA, 599 bp, Chicken  19866894282215_1
  misc_feature (1)..(68): n is any nucleotide
nnnnnnnnnnnnnnnnnnnnnnnnnnnnnnnnnnnnnnnnnnnnnnnnnnnnnnnnnnnnnnnnnnnnatttgagatgtagctttatcagcccttgctacacagcagtaccaaatggaaaatggtcccaggtgctcagagcctgtagaactcaacaccacaccaagaagtggatttgattcagattttgaaacctttgttaaactgaacagagcacgggatgagcatccagtgttctcaggttcttccctccactcttaaatatgacgttctggggtttgaataagaatcttctatttcwtcttcccatgccatatctgtgctgccaacccagttccgattccgatgatttatacgctttgcccagaatgcagcacataagcacttcactttttaacctgctttactcaaacgttttcagagaactgcttcctcagatgtgtttacatttgggaaattaaaagctaagcaacagctccattaggaacaaaaacatcataaaaattccacggttgccagaaaacatcccaatacagtgacaaacgtggccatgctgtggtactgccgatcatttgtgggatggttcatctatcaattatt

SEQ ID NO: 43954 - DNA, 600 bp, Chicken  19866894282215_2
caaacgttttcagagaactgcttcctcagatgtgtttacatttgggaaattaaaagctaagcaacagctccattaggaacaaaaacatcataaaaattccacggttgccagaaaacatcccaatacagtgacaaacgtggccatgctgtggtactgccgatcatttgtgggatggttcatctatcaattattcatgaccgtcttaaaacgtacaggctaatctcaagtagaaagcactggttttggttttgaagtcagtattttgctcagaaattctccaactggaattctgatctgcayactgtgatctgccaacctccttgcactgaaacaaggtattttccgttagctgtgattccagttctcctgcagtgcatggagagttgttacacagcagtatatttgatagcctgagtatctgtcatcatttctgtgaactttcaggtaaatttaaatcttcccagatgtgattttgggcaggtcctgatctggaaagagcctggcaccttttggtacacaatcttattggtgcaaggtatttctggtaatggtaaattatattggaggccactcatttatttcacagtaaggatgggcagg

SEQ ID NO: 43955 - DNA, 583 bp, Chicken  19866894282217_1
  misc_feature (1)..(80): n is any nucleotide
nnnnnnnnnnnnnnnnnnnnnnnnnnnnnnnnnnnnnnnnnnnnnnnnnnnnnnnnnnnnnnnnnnnnnnnnnnnnnnnntaaataaacccatccctgtaaaagaaaacctctggattatacatcacgcctctactaagtactcagtaagcgtgcaaaccccatagactagcacggaatcaaagtgatgctccgatggacaatattttttctatcaggataaaaataaccgctgatcgcagcctgtaaactttttcagacgttaatttgtgccccggagccgggtgggaggagaagcctytccctgcggagccccgcagtgcgcggagagcggtggggaaagggctgcggggcctcggttgcaccgaggggacggtgctgtagggccggtgctatagagggctgcttcagaactcttctacagggacggtgatcccggctttcgaggttactgggaagcgtaaagcaggaaagaaaagggaaaaaaaaaaaaaaaaaaaaaaaaaaaaaaaagggaggaaaaaaaaggataggaagaaataaaggaaaaagagagagaacaatccaagggagagaacagcccc

SEQ ID NO: 43956 - DNA, 600 bp, Chicken  19866894282224_1
gtcatttgcacacacagttcacaaaccgagttgtgaacgcagcgatgaaggaattcagcagtctctatttttaaggctcctttgataagaaaaaaaagtaagaaattttattagcagcttctcccagacattcctttcaacagtgggattggtggtattaaatctccagtttaagagagaaacaaaacaatacattcttatgagcaggtcctttgtttttgcacctctgtatctacttcttttggcataggagcatttgcagtaatgcatgctgcaagaaattcttgcaaccagccaagwaagcagagctgccaaaaagtgttacagaactacaytgcaacctaccttcacttcaaatatgaggtccctgataaaatactaatttagggaaggacttggtcaacttacagctggtaggtatggctacaatgggcacgttaacrtttttgtattgtcactcatactcatcaaattgtctatcaaaggaaaaaattgtttgcatttaatgaaatattggaaacagtgcagtgtgttttctcgtaccaaaggccttctaatacttgtttctaatgctttaaagagccattgtattaaagtgat

SEQ ID NO: 43957 - DNA, 600 bp, Chicken  19866894282224_2
aacgcagcgatgaaggaattcagcagtctctatttttaaggctcctttgataagaaaaaaaagtaagaaattttattagcagcttctcccagacattcctttcaacagtgggattggtggtattaaatctccagtttaagagagaaacaaaacaatacattcttatgagcaggtcctttgtttttgcacctctgtatctacttcttttggcataggagcatttgcagtaatgcatgctgcaagaaattcttgcaaccagccaagwaagcagagctgccaaaaagtgttacagaactacaytgcaacctaccttcacttcaaatatgaggtccctgataaaatactaatttagggaaggacttggtcaacttacagctggtaggtatggctacaatgggcacgttaacrtttttgtattgtcactcatactcatcaaattgtctatcaaaggaaaaaattgtttgcatttaatgaaatattggaaacagtgcagtgtgttttctcgtaccaaaggccttctaatacttgtttctaatgctttaaagagccattgtattaaagtgattttaaaaaaacacttcagatttcaaaaaataagac

SEQ ID NO: 43958 - DNA, 600 bp, Chicken  19866894282224_3
tgggattggtggtattaaatctccagtttaagagagaaacaaaacaatacattcttatgagcaggtcctttgtttttgcacctctgtatctacttcttttggcataggagcatttgcagtaatgcatgctgcaagaaattcttgcaaccagccaagwaagcagagctgccaaaaagtgttacagaactacaytgcaacctaccttcacttcaaatatgaggtccctgataaaatactaatttagggaaggacttggtcaacttacagctggtaggtatggctacaatgggcacgttaacrtttttgtattgtcactcatactcatcaaattgtctatcaaaggaaaaaattgtttgcatttaatgaaatattggaaacagtgcagtgtgttttctcgtaccaaaggccttctaatacttgtttctaatgctttaaagagccattgtattaaagtgattttaaaaaaacacttcagatttcaaaaaataagactagcagaaatctagatgagctccaagaatttaaaggagatccgagaaaaaaaatagtatatatttgttaacagctctggaggattaatctggaacaccagcctgtaag

SEQ ID NO: 43959 - DNA, 600 bp, Chicken  19866894282234_1
acttgaaaaagtgggaagaaacttagagcagatacatatgcatgcaagttttaactaaaaacatgtagttctggcagagttataagtaagtgaaagctgaatctttcaatgaagaatactaaataactacagctctttctacctgctcccttttgtaataacatttaagtgagcaggagggctagtgctaagtaatttcaagaatctggtctagtgtgtttgcaatcaaatgttctcccacctatgcctagttgcagctttttagcttctgctgacagtttcagctattcgctgtcagtrcaaagatgtccagaatgttaaaaatgtaaggccgtgctagaatgaatagtgcaaacagtattgcattcatagatttatcacaaagagacacccatttatttatataaatcatacatttaatggccaagttagttaaaaactgctgctcttcatctggaattgcaatgtactggcccaatcaatatgctggatagccatgttatgtagtttattacaagtacaaaatttctagtttgttgcaaatctctggcatttgaaccatggtatatatttcatctacatgcagacatgatcaggaag

SEQ ID NO: 43960 - DNA, 600 bp, Chicken  19866894282238_1
cagggaaggagagcactgaggagcagtgaactggcagattgacaaataagctgagactgacccagggctggcaccctccagaactcgcttatatttttgtgttaggcaagatcgtctctaagtgtggctctgattccagctgtcattttaggtcagatgcataatatcagtttacagaacaagaatagttaaaggaccctcatccatcatagccagatggaggaaaaaatcctacaaacaaacaaaataggtatcagcaatgcttggaagatgatttgattctcctttggaactggtagytggacagtggtactaataaaggtggttacttgcaatataacagtcacctgtgaaactgctgtttgctgggagaaatgaatcgatgtttgtcagcactaagagaagttattttcttctcaagaagagaagtgatagaatttgtgatactaatatttgcaagataaatacaaccaaaaataaccatatcaagaggcacaacaacgcactgagaaaatcttctactcacgatgtttaagaaccgtctttttatcagagaactacttatcttgtgaataagacatcttatctctggaaagaccc

SEQ ID NO: 43961 - DNA, 600 bp, Chicken  19866894282240_1
tcctttatgtagtatttggcaggagttatttgtcagcatttacaaaaagaaaacgtctacagaaacttcatttctagttccttccatgctaaatttctcgttttgcctgataaagcctcagaaatagtttttttcttgtgtaaagcaaaaatggataagaaaatatttgctattaataggtgaaatatgggcacctgcactttcctggccacaatactgcagcataatgtttcagtttacttcaaaggaaaagaacctcagtcaagagctgtctctttctccctctccttccacatcaawtctgccacatttcctatccacttcaaatatctataagtaaatcagagcaaaacatagcattttactagcatatttgtttgtttatttgctactaccatctaccaacactgctgcaaagatccaggttgcrcrtcgcaaatcacaggaataaaaataacactgatgcaagtgctttcaagaaagactcttctttggcagctataaacccgttgaatttcacaatcttatctaacgcaccacaggagaaaggagttaattgctttttctaatcccagaagtcagagagttggaaagaactaa

SEQ ID NO: 43962 - DNA, 600 bp, Chicken  19866894282240_2
ttttcttgtgtaaagcaaaaatggataagaaaatatttgctattaataggtgaaatatgggcacctgcactttcctggccacaatactgcagcataatgtttcagtttacttcaaaggaaaagaacctcagtcaagagctgtctctttctccctctccttccacatcaawtctgccacatttcctatccacttcaaatatctataagtaaatcagagcaaaacatagcattttactagcatatttgtttgtttatttgctactaccatctaccaacactgctgcaaagatccaggttgcrcrtcgcaaatcacaggaataaaaataacactgatgcaagtgctttcaagaaagactcttctttggcagctataaacccgttgaatttcacaatcttatctaacgcaccacaggagaaaggagttaattgctttttctaatcccagaagtcagagagttggaaagaactaagcagcacctgtatggggacaaaactggaaaccagttagtagaatactttctgggcagaaaagagccccacacagttgttacttcatgtcataggtattctttgcttggagaaacactgaagcaatgaaga

SEQ ID NO: 43963 - DNA, 600 bp, Chicken  19866894282240_3
ttcttgtgtaaagcaaaaatggataagaaaatatttgctattaataggtgaaatatgggcacctgcactttcctggccacaatactgcagcataatgtttcagtttacttcaaaggaaaagaacctcagtcaagagctgtctctttctccctctccttccacatcaawtctgccacatttcctatccacttcaaatatctataagtaaatcagagcaaaacatagcattttactagcatatttgtttgtttatttgctactaccatctaccaacactgctgcaaagatccaggttgcrcrtcgcaaatcacaggaataaaaataacactgatgcaagtgctttcaagaaagactcttctttggcagctataaacccgttgaatttcacaatcttatctaacgcaccacaggagaaaggagttaattgctttttctaatcccagaagtcagagagttggaaagaactaagcagcacctgtatggggacaaaactggaaaccagttagtagaatactttctgggcagaaaagagccccacacagttgttacttcatgtcataggtattctttgcttggagaaacactgaagcaatgaagagc

SEQ ID NO: 43964 - DNA, 600 bp, Chicken  19866894282250_1
atgggatagatgagacgggatgggattggacggaggaaaggggcagcgggcagcaccacggacagcgccggcagcaccacggacagcgcccaaccaccaaacctgcagcagagatttgacgctgggctggaagaccatgttggtgttgagcaggaaggagcgcagcagcggctgcgggtagcaggccagctgggccaccagccccgtcagcaggaagttcacatagagggagttgtgcagcatgttctccagcttgccaaacagcaccgtcatgaagggccctgtgggtgggtgcaggcrtcaggctgtgaccgtgggacgagacayagaggtattcccgtctgcaccccattcagccccacctgtgaagggttggctgtggggcggccccacagtgcgtggtgggctggccacggcctgtgccagcgggtccagcacccgcacacggcccagtgcctcctcgccctcaggcagagtggcgaagctggcataggcctcctcctcctcacgggacagcagcggctcaggcrtggcaggcggctcagccctggccccgttctccatctcggcctcaatctctcgcagctcctgggtgaaggc

SEQ ID NO: 43965 - DNA, 600 bp, Chicken  19866894282250_2
ggacggaggaaaggggcagcgggcagcaccacggacagcgccggcagcaccacggacagcgcccaaccaccaaacctgcagcagagatttgacgctgggctggaagaccatgttggtgttgagcaggaaggagcgcagcagcggctgcgggtagcaggccagctgggccaccagccccgtcagcaggaagttcacatagagggagttgtgcagcatgttctccagcttgccaaacagcaccgtcatgaagggccctgtgggtgggtgcaggcrtcaggctgtgaccgtgggacgagacayagaggtattcccgtctgcaccccattcagccccacctgtgaagggttggctgtggggcggccccacagtgcgtggtgggctggccacggcctgtgccagcgggtccagcacccgcacacggcccagtgcctcctcgccctcaggcagagtggcgaagctggcataggcctcctcctcctcacgggacagcagcggctcaggcrtggcaggcggctcagccctggccccgttctccatctcggcctcaatctctcgcagctcctgggtgaaggcctcaatgctgacacccgctccgttggg

SEQ ID NO: 43966 - DNA, 600 bp, Chicken  19866894282250_3
agttgtgcagcatgttctccagcttgccaaacagcaccgtcatgaagggccctgtgggtgggtgcaggcrtcaggctgtgaccgtgggacgagacayagaggtattcccgtctgcaccccattcagccccacctgtgaagggttggctgtggggcggccccacagtgcgtggtgggctggccacggcctgtgccagcgggtccagcacccgcacacggcccagtgcctcctcgccctcaggcagagtggcgaagctggcataggcctcctcctcctcacgggacagcagcggctcaggcrtggcaggcggctcagccctggccccgttctccatctcggcctcaatctctcgcagctcctgggtgaaggcctcaatgctgacacccgctccgttgggttcagctggtgccttggccagcagctcctccagcagcgagtccactgagcgcgggggctcccagcccgcaggctgcgcccgggccccgttctgtgccggcctctcgcctcgtggactcctgcgcactttcttcaccaccacgtccccctcgggccgccctggctccgtgtgcccatgcgccccattcaccagtgcccccgagt

SEQ ID NO: 43967 - DNA, 600 bp, Chicken  19866894282256_1
gacaccgacccgctgcctcactgccgtcgtgctttgcaggcgtggtgaggtgctcgcccatcaccgcagccttctgagcgcacatcctcccgcagcaccgcctctcggcctccccatccccgggcacagacagtgctgccgacccccgcaccagcagcaccgggggaagccccgcacgtggcagagaacgggcaaaacctccacgggaggagacgcggcggcacagagcgcagccgaggacagttggacgcagcagcacccggagccgcgggtaccaccctcagcccccccggctccagscgtgcacccacagtgcgcagagacccygcgggacccccccccgctgctcccagccccgmccccacacgcgtggcgcttactgggcaaagaggtgccgggagcggacgatgaacttgaagatgtactccagggccttgaaggtgcgcaggaggggctcgcagggctccccccggctcgcctgctccacgtactgtgtcagcaccccaatcagcttcctgcgggatggggacacatcaggagagcacggtgcttcytcaccacacgtgcccggtgctgagccccactgcggctcctgccccc

SEQ ID NO: 43968 - DNA, 600 bp, Chicken  19866894282256_2
cgtgctttgcaggcgtggtgaggtgctcgcccatcaccgcagccttctgagcgcacatcctcccgcagcaccgcctctcggcctccccatccccgggcacagacagtgctgccgacccccgcaccagcagcaccgggggaagccccgcacgtggcagagaacgggcaaaacctccacgggaggagacgcggcggcacagagcgcagccgaggacagttggacgcagcagcacccggagccgcgggtaccaccctcagcccccccggctccagscgtgcacccacagtgcgcagagacccygcgggacccccccccgctgctcccagccccgmccccacacgcgtggcgcttactgggcaaagaggtgccgggagcggacgatgaacttgaagatgtactccagggccttgaaggtgcgcaggaggggctcgcagggctccccccggctcgcctgctccacgtactgtgtcagcaccccaatcagcttcctgcgggatggggacacatcaggagagcacggtgcttcytcaccacacgtgcccggtgctgagccccactgcggctcctgcccccggtccctgctccggctccggtgcccca

SEQ ID NO: 43969 - DNA, 590 bp, Chicken  19866894282256_3
atcaccgcagccttctgagcgcacatcctcccgcagcaccgcctctcggcctccccatccccgggcacagacagtgctgccgacccccgcaccagcagcaccgggggaagccccgcacgtggcagagaacgggcaaaacctccacgggaggagacgcggcggcacagagcgcagccgaggacagttggacgcagcagcacccggagccgcgggtaccaccctcagcccccccggctccagscgtgcacccacagtgcgcagagacccygcgggacccccccccgctgctcccagccccgmccccacacgcgtggcgcttactgggcaaagaggtgccgggagcggacgatgaacttgaagatgtactccagggccttgaaggtgcgcaggaggggctcgcagggctccccccggctcgcctgctccacgtactgtgtcagcaccccaatcagcttcctgcgggatggggacacatcaggagagcacggtgcttcytcaccacacgtgcccggtgctgagccccactgcggctcctgcccccggtccctgctccggctccggtgccccatacgtacttgtaggcgagcgtg

SEQ ID NO: 43970 - DNA, 395 bp, Chicken  19866894282256_4
agcacccggagccgcgggtaccaccctcagcccccccggctccagscgtgcacccacagtgcgcagagacccygcgggacccccccccgctgctcccagccccgmccccacacgcgtggcgcttactgggcaaagaggtgccgggagcggacgatgaacttgaagatgtactccagggccttgaaggtgcgcaggaggggctcgcagggctccccccggctcgcctgctccacgtactgtgtcagcaccccaatcagcttcctgcgggatggggacacatcaggagagcacggtgcttcytcaccacacgtgcccggtgctgagccccactgcggctcctgcccccggtccctgctccggctccggtgccccatacgtacttgtaggcgagcgtg

SEQ ID NO: 43971 - DNA, 600 bp, Chicken  19866894282259_1
caattgaacacaaagggcgtgaaataccatggaaaaaactttacctatcttccttcaaattctctgtggcagtgtggtcagtggcacgtggcaagacgatgacctgaaagggtcagggaacccccttccctgctgccatatcctcagcaccaccacacaaatcactgcagccccacagcctcgcaggagcgctgcacctaatggacctgcgagtgcgaggctgtgtctgcgggatgcaggcagacagacggtatgcttcaagaacgtgttctcttaaacacatcgcttccctattttctwccttcagcaactaacaaaatgggacttcattaatgttattctagacaaagagtggctgagaaatgtaactttaaaaaagcctgaatttttttaaattgaaagagaccaattacgaaagctataaacactttaatcatttctctgaacatgtggaaatatatacattgtgaacctttttcataaggaaatgctaaaatcctttccttaatggcacattttcttaatggctttacagtttctcagttcatttcaaagggctgttatttgttatgtggacataagtttagattatggtctaga

SEQ ID NO: 43972 - DNA, 600 bp, Chicken  19866894282261_1
ctgtactgactctcctctccctgctctttgacagttcagtcatctggccgtctggggaagcatgctgctctggctcgtcttcttcggtgtctactcggccatctggcccacattccccattgcacccgacatgctggggcaggtcagtatgaaggcttggtagcacagcagtgcctggctgcttctctgcctcagccagcacatgcacaagaggctcgtaaaggattgtatactactaagagcacttgtacttaacattttttaaagctctgtgcattcatttagcttaatctcctcgtyagaagaactctttctccctgaagatgacatcatacacgatcatagrcactgtagaatctacatggcgagtctcacttcacttgaatagcagtgaaattgtctctttgattaatgctttcctagttatacttcatcttttataaaactctaggtacaaatttagtttttgctctagatttgtggagatctttttccattatggattttctctcccatgtattttggtgtaatatttttccctttcccctccatttgttcagaattaatcagaattgacttgagaacagcatgagatggtcg

SEQ ID NO: 43973 - DNA, 600 bp, Chicken  19866894282261_2
gccgtctggggaagcatgctgctctggctcgtcttcttcggtgtctactcggccatctggcccacattccccattgcacccgacatgctggggcaggtcagtatgaaggcttggtagcacagcagtgcctggctgcttctctgcctcagccagcacatgcacaagaggctcgtaaaggattgtatactactaagagcacttgtacttaacattttttaaagctctgtgcattcatttagcttaatctcctcgtyagaagaactctttctccctgaagatgacatcatacacgatcatagrcactgtagaatctacatggcgagtctcacttcacttgaatagcagtgaaattgtctctttgattaatgctttcctagttatacttcatcttttataaaactctaggtacaaatttagtttttgctctagatttgtggagatctttttccattatggattttctctcccatgtattttggtgtaatatttttccctttcccctccatttgttcagaattaatcagaattgacttgagaacagcatgagatggtcggaggcagaagggaagctgacctgttaatggtccctctataacacca

SEQ ID NO: 43974 - DNA, 599 bp, Chicken  19866894282263_1
  misc_feature (1)..(139): n is any nucleotide
nnnnnnnnnnnnnnnnnnnnnnnnnnnnnnnnnnnnnnnnnnnnnnnnnnnnnnnnnnnnnnnnnnnnnnnnnnnnnnnnnnnnnnnnnnnnnnnnnnnnnnnnnnnnnnnnnnnnnnnnnnnnnnnnnnnnnnnnnnncagattggaggcagggcttgcagatgtggcagccaggtatcagcccatgctgtgctctgcagcattgctctgcatggagcaccggagccggctgcaggatgctccattctgtcccactgcgctcctcagggcttgctgccctgctggctgctttggcaccrgctgctgtgggttggtaatgactttccttctccctccagggctggatgtgaatggctgggctggaggtgaaaggccccggttcccattactgatccaatttcctggacttctaccgggtagatgggaattgccagagcggaacagcctgatgggccattgagcccggtgtctcctctctgacagcagctactgtttggcgtgtaattaaaagcctttgtgttatttgacttgtaatgtaatatcgccctgctgtgtccatatctcatttgggaaagaataggccctgacatttgccaag

SEQ ID NO: 43975 - DNA, 600 bp, Chicken  19866894282266_1
ctagtttagctctaggagcattttaaagtcattgctgatttctcttcctgctcttacagttctcctgtcaatggatcctctctctttcaaagaatcctcttctttccctcctacatatccttaaatctacgccgcctataaaacaatgtcttatccttgtgaacactcaccaacgctcattttcccatctgatttattgcctcatttgtcttaaaactctgtgtttgtttgaaatacttgccacaaacaccacgtcttttctaaatgtcttctgcaattatttttaaagaggtagcctcyattcttccttctcaacttctcccttatgaactaagctcaraagtcatttttctcctttgcagctttctacacagcagctcctgtcctcatgatgcttctcctcagcactgatttagtcaccgtccatcttctgttggcagaaactcacacagaacttaggtctgagagtatccactttgccagatacagagctcagagtacgatctccactcttaatctaaactgaatttattrttttaatgttatttcctctggattccctctttatttcccacttgctgtctgggcacatttaaaagt

SEQ ID NO: 43976 - DNA, 600 bp, Chicken  19866894282266_2
tctcttcctgctcttacagttctcctgtcaatggatcctctctctttcaaagaatcctcttctttccctcctacatatccttaaatctacgccgcctataaaacaatgtcttatccttgtgaacactcaccaacgctcattttcccatctgatttattgcctcatttgtcttaaaactctgtgtttgtttgaaatacttgccacaaacaccacgtcttttctaaatgtcttctgcaattatttttaaagaggtagcctcyattcttccttctcaacttctcccttatgaactaagctcaraagtcatttttctcctttgcagctttctacacagcagctcctgtcctcatgatgcttctcctcagcactgatttagtcaccgtccatcttctgttggcagaaactcacacagaacttaggtctgagagtatccactttgccagatacagagctcagagtacgatctccactcttaatctaaactgaatttattrttttaatgttatttcctctggattccctctttatttcccacttgctgtctgggcacatttaaaagtaggtttaaagaaagtgccgcgtgagctctgaccagtatga

SEQ ID NO: 43977 - DNA, 600 bp, Chicken  19866894282266_3
tacttgccacaaacaccacgtcttttctaaatgtcttctgcaattatttttaaagaggtagcctcyattcttccttctcaacttctcccttatgaactaagctcaraagtcatttttctcctttgcagctttctacacagcagctcctgtcctcatgatgcttctcctcagcactgatttagtcaccgtccatcttctgttggcagaaactcacacagaacttaggtctgagagtatccactttgccagatacagagctcagagtacgatctccactcttaatctaaactgaatttattrttttaatgttatttcctctggattccctctttatttcccacttgctgtctgggcacatttaaaagtaggtttaaagaaagtgccgcgtgagctctgaccagtatgaggctgcttatctccatattagacttaaacagtccacatttaagatctcatcccttcaactctcttctacacttaacatcccccctcccaaatcaagatcccggattcatattccctccctttgcacctctctcctttcagctgagaagatccatagctcagacaagtagcgacaggcagcacccaccaccatgt

SEQ ID NO: 43978 - DNA, 600 bp, Chicken  19866894282276_1
aaccttactggaaggaatgcttgctctgcctgggcacagtgctgctggataataacttcctttgcacatgacataggcaatattccgagcgttttcagttatgtctttctctacaacatccctcagtctgtccttacgttgtattgcctatgcttcatgtacatgtgttttctctctgctgtcatgttttctttgtgctccttgaggaaatctctcactttgctgtgtaaatgcagcatcgacacaccatcttgttcacacagcctttacttctttgcacttcgttaccccattggaagrctgttcccaagtagtctccattccaagatgtgaacatccctccaattagccatgttgggcttctaggcagtatattagcaaattatttctccaggctcttgaytgacattgttgaaacaatacttttcatgcatgtcagtctttgtggggtgaaaatgcctttaacatgcttctaggatttacatgggcttccctgggctgctgctgccaagttcagatgcggttggagcatgtggcattctttctcctactctcattacattttccttttcatccaaccctgctgcatatttcatattt

SEQ ID NO: 43979 - DNA, 600 bp, Chicken  19866894282276_2
tctttctctacaacatccctcagtctgtccttacgttgtattgcctatgcttcatgtacatgtgttttctctctgctgtcatgttttctttgtgctccttgaggaaatctctcactttgctgtgtaaatgcagcatcgacacaccatcttgttcacacagcctttacttctttgcacttcgttaccccattggaagrctgttcccaagtagtctccattccaagatgtgaacatccctccaattagccatgttgggcttctaggcagtatattagcaaattatttctccaggctcttgaytgacattgttgaaacaatacttttcatgcatgtcagtctttgtggggtgaaaatgcctttaacatgcttctaggatttacatgggcttccctgggctgctgctgccaagttcagatgcggttggagcatgtggcattctttctcctactctcattacattttccttttcatccaaccctgctgcatatttcatatttttcatatttctgccctgtgatgtaaagagcagccaggtgctaaacgtgcccctgtcatacctgtcctctccagtgtgagccttgcagatcctgctgtgatcac

SEQ ID NO: 43980 - DNA, 600 bp, Chicken  19866894282281_1
tgcgcaacagaaatgcaacgttcaaaaatctcatgtatgaaccatgtgtttatggaaaacatactgcctacactaacagtgcctacaaaaaagcactgtgagactgagactattttatgacttgtcctcttcattttgcatctccttcctttcttaaaatcaatcagaagcgggtcgatattcaatgggcagaaaacacaaattacaccatcaacgtgctattctggatagcattttatccaccaatctgattaaaaacagcagaaaaaaatattaatagtgacctcattttctgcatcyaaagtgacaagctttttggcctgtgccctacaacctrcctacatttttcctctcaagcattgccaaggaggtattcatacctttccaaaaatgacatcttgggcttctggatatactgtttcatgcactggttaaataaaattaaaaatccagcctaagagaaatcaaacaggtcacagacatcgagacatgctattccattacaaaaattatttggaagtgctatggcttgatgctatggtttccttcatttaatttaaaattacctcaggaatgttaatcatctcccagcagtaaatc

SEQ ID NO: 43981 - DNA, 600 bp, Chicken  19866894282281_2
tgaaccatgtgtttatggaaaacatactgcctacactaacagtgcctacaaaaaagcactgtgagactgagactattttatgacttgtcctcttcattttgcatctccttcctttcttaaaatcaatcagaagcgggtcgatattcaatgggcagaaaacacaaattacaccatcaacgtgctattctggatagcattttatccaccaatctgattaaaaacagcagaaaaaaatattaatagtgacctcattttctgcatcyaaagtgacaagctttttggcctgtgccctacaacctrcctacatttttcctctcaagcattgccaaggaggtattcatacctttccaaaaatgacatcttgggcttctggatatactgtttcatgcactggttaaataaaattaaaaatccagcctaagagaaatcaaacaggtcacagacatcgagacatgctattccattacaaaaattatttggaagtgctatggcttgatgctatggtttccttcatttaatttaaaattacctcaggaatgttaatcatctcccagcagtaaatccccagtatgccaagccaagggctttgtgctgtagttt

SEQ ID NO: 43982 - DNA, 600 bp, Chicken  19866894282281_3
aaatccagcctaagagaaatcaaacaggtcacagacatcgagacatgctattccattacaaaaattatttggaagtgctatggcttgatgctatggtttccttcatttaatttaaaattacctcaggaatgttaatcatctcccagcagtaaatccccagtatgccaagccaagggctttgtgctgtagttttagtacctacaacgccttctccgcagtgattgggacccgcagggattaggtgctctatctacagaaaggcaaaaagagagggtaagtctaactgctctctgaagatcyccatgtctcataatccaccataaccccacaaagtgccgcacaaagctctggtcagygatagctccttrccctgccacagatcccctcctgctgaagatcacagctttctgaggagggcacctcacagggcctggatgcacactcacacagctgctacgcttcagccaaggcattacagccccccacgcatgctgttagcccagtgcaaaggcaagtgatgagaattagcaaaacattctttcgttgcagcttacgtgaaggtgaaacrcatctcttttgcggaaggagcgcacgcaaggt

SEQ ID NO: 43983 - DNA, 600 bp, Chicken  19866894282281_4
tacaaaaattatttggaagtgctatggcttgatgctatggtttccttcatttaatttaaaattacctcaggaatgttaatcatctcccagcagtaaatccccagtatgccaagccaagggctttgtgctgtagttttagtacctacaacgccttctccgcagtgattgggacccgcagggattaggtgctctatctacagaaaggcaaaaagagagggtaagtctaactgctctctgaagatcyccatgtctcataatccaccataaccccacaaagtgccgcacaaagctctggtcagygatagctccttrccctgccacagatcccctcctgctgaagatcacagctttctgaggagggcacctcacagggcctggatgcacactcacacagctgctacgcttcagccaaggcattacagccccccacgcatgctgttagcccagtgcaaaggcaagtgatgagaattagcaaaacattctttcgttgcagcttacgtgaaggtgaaacrcatctcttttgcggaaggagcgcacgcaaggtctgctccaaatctgtgttgacgcaaagaaatctgattgtgcctgagccccagctct

SEQ ID NO: 43984 - DNA, 600 bp, Chicken  19866894282281_5
ttggaagtgctatggcttgatgctatggtttccttcatttaatttaaaattacctcaggaatgttaatcatctcccagcagtaaatccccagtatgccaagccaagggctttgtgctgtagttttagtacctacaacgccttctccgcagtgattgggacccgcagggattaggtgctctatctacagaaaggcaaaaagagagggtaagtctaactgctctctgaagatcyccatgtctcataatccaccataaccccacaaagtgccgcacaaagctctggtcagygatagctccttrccctgccacagatcccctcctgctgaagatcacagctttctgaggagggcacctcacagggcctggatgcacactcacacagctgctacgcttcagccaaggcattacagccccccacgcatgctgttagcccagtgcaaaggcaagtgatgagaattagcaaaacattctttcgttgcagcttacgtgaaggtgaaacrcatctcttttgcggaaggagcgcacgcaaggtctgctccaaatctgtgttgacgcaaagaaatctgattgtgcctgagccccagctctcatgttagccaa

SEQ ID NO: 43985 - DNA, 407 bp, Chicken  19866894282281_6
agagggtaagtctaactgctctctgaagatcyccatgtctcataatccaccataaccccacaaagtgccgcacaaagctctggtcagygatagctccttrccctgccacagatcccctcctgctgaagatcacagctttctgaggagggcacctcacagggcctggatgcacactcacacagctgctacgcttcagccaaggcattacagccccccacgcatgctgttagcccagtgcaaaggcaagtgatgagaattagcaaaacattctttcgttgcagcttacgtgaaggtgaaacrcatctcttttgcggaaggagcgcacgcaaggtctgctccaaatctgtgttgacgcaaagaaatctgattgtgcctgagccccagctctcatgttagccaacacgcgt

SEQ ID NO: 43986 - DNA, 600 bp, Chicken  19866894282283_1
ccctttcagtatggtctcctgtttatggcagcccaaccagttccattttgaaagaatgaacacaaccttgctgcacaccacaagatgtgtaaataccagcagctctagtagccttaccttaagcatggataatccaaaaatccccgaacatgaccctagatcggccattgggggttcagctggtagctcctcgattccatgccatggtggtggccccagtcgttgctgagctgctgtactgcaggtgtttgctgcttgaacagctacaaaaaccctgtgtgtgatgccagattaattaargagcttaagaggggaaaaacctgccttccttcctccccggttctacagcgggagagcccatctcaccccagggattaccgctgaaatggggagcagtgaaatggaacgttcagcagtgaggctttgcatatgataaatcaaagtcagggtccagatactctttggagaagcaggaggtggaggggagtgagggaagaaattgaaataaagcaaagcttttattgaactgttgttctccaggaaaaggctaattggcaaacaaataccctccaacagtgggaaatgcagctccgctctctc

SEQ ID NO: 43987 - DNA, 600 bp, Chicken  19866894282286_1
tgtatctcaacataagctagccttaaagaataactttaattcttgtgaatattcagtttgcttctgattgccttgtagtgacttcagatacctaaatagaccttctcacatgttgcaactgtgaaactgccacactgtagtttcacatgaagatctttcggtgaaacaactttgttcagttttaccttaaaatttcatatttctattttctcatattgttgtacagctacctctgtcagtctgtatttttttctgctaatgtacaaatcaagaagcactttctcaagcatgctgtgaaarcaaggccaggtcacatagcagcagaaacayatatccattggatgagttgactgtgaccaaacaaaggcaatagctcaagggttggtgactgatgcagtggagtctggcatctcaattacatgtctagattggactgtgcctgtgcaacactkaggatgattgttcccaaaaatggatttatgtactgaagtgaggaatayttgagctgtccagtaggaacagaggagacaaggaagcatctgaaatcccacattctccgtggactaaactttccaggtcttgactgaagttttgttcctt

SEQ ID NO: 43988 - DNA, 600 bp, Chicken  19866894282286_2
taactttaattcttgtgaatattcagtttgcttctgattgccttgtagtgacttcagatacctaaatagaccttctcacatgttgcaactgtgaaactgccacactgtagtttcacatgaagatctttcggtgaaacaactttgttcagttttaccttaaaatttcatatttctattttctcatattgttgtacagctacctctgtcagtctgtatttttttctgctaatgtacaaatcaagaagcactttctcaagcatgctgtgaaarcaaggccaggtcacatagcagcagaaacayatatccattggatgagttgactgtgaccaaacaaaggcaatagctcaagggttggtgactgatgcagtggagtctggcatctcaattacatgtctagattggactgtgcctgtgcaacactkaggatgattgttcccaaaaatggatttatgtactgaagtgaggaatayttgagctgtccagtaggaacagaggagacaaggaagcatctgaaatcccacattctccgtggactaaactttccaggtcttgactgaagttttgttccttgctaccagttgatgactgcttattagttta

SEQ ID NO: 43989 - DNA, 600 bp, Chicken  19866894282286_3
atctttcggtgaaacaactttgttcagttttaccttaaaatttcatatttctattttctcatattgttgtacagctacctctgtcagtctgtatttttttctgctaatgtacaaatcaagaagcactttctcaagcatgctgtgaaarcaaggccaggtcacatagcagcagaaacayatatccattggatgagttgactgtgaccaaacaaaggcaatagctcaagggttggtgactgatgcagtggagtctggcatctcaattacatgtctagattggactgtgcctgtgcaacactkaggatgattgttcccaaaaatggatttatgtactgaagtgaggaatayttgagctgtccagtaggaacagaggagacaaggaagcatctgaaatcccacattctccgtggactaaactttccaggtcttgactgaagttttgttccttgctaccagttgatgactgcttattagtttagtcttcagtagctcttctgatagaaagtatatctctgtaatttcactaacagaaagatacgaaactgtcagtatgcatttgtagggtcttatgtcattcttctagaaacatacaggagaaat

SEQ ID NO: 43990 - DNA, 600 bp, Chicken  19866894282286_4
ttctattttctcatattgttgtacagctacctctgtcagtctgtatttttttctgctaatgtacaaatcaagaagcactttctcaagcatgctgtgaaarcaaggccaggtcacatagcagcagaaacayatatccattggatgagttgactgtgaccaaacaaaggcaatagctcaagggttggtgactgatgcagtggagtctggcatctcaattacatgtctagattggactgtgcctgtgcaacactkaggatgattgttcccaaaaatggatttatgtactgaagtgaggaatayttgagctgtccagtaggaacagaggagacaaggaagcatctgaaatcccacattctccgtggactaaactttccaggtcttgactgaagttttgttccttgctaccagttgatgactgcttattagtttagtcttcagtagctcttctgatagaaagtatatctctgtaatttcactaacagaaagatacgaaactgtcagtatgcatttgtagggtcttatgtcattcttctagaaacatacaggagaaatggagtcagtgcaggggatctttttagataaacctctgagtgaaagatc

SEQ ID NO: 43991 - DNA, 600 bp, Chicken  19866894282288_1
tagcataactgagtttcagctctggtgtccccccaaaaaggggcaccagactgctcagatctttgagaagccaccagaaacaacactagaataaatagcagcagatttcaaaggacttctgaaagtattctgtgatacctgttcaaaaggaaattttgcattttctcctgatatgtatcccaaactaaagctcagctagaaaacatttaagggccagaaggctataaacagtgagtggtgaatttactacccaactatgctgcagctgggctagaagctttgagtctgactcgtaacacrttttcgggagaarcatagagttttgctgtaaagacttgaggcaaaaggagatgcgccacaactcctgttgaactgtttcaacagttaattcccttgttaaaatctgccctttgttttgtagctttcagccttcaaatctcgttgcatccttgtgtgctcagctgaagagctctttagctaaagaaaacatggctatgttcagtctttgatcaaatcacttttcagtttgctctttatcacgctaaatgggcagagcttctgggcagcttccacatctttcatttgaagggcaataacaga

SEQ ID NO: 43992 - DNA, 597 bp, Chicken  19866894282288_2
tttcagctctggtgtccccccaaaaaggggcaccagactgctcagatctttgagaagccaccagaaacaacactagaataaatagcagcagatttcaaaggacttctgaaagtattctgtgatacctgttcaaaaggaaattttgcattttctcctgatatgtatcccaaactaaagctcagctagaaaacatttaagggccagaaggctataaacagtgagtggtgaatttactacccaactatgctgcagctgggctagaagctttgagtctgactcgtaacacrttttcgggagaarcatagagttttgctgtaaagacttgaggcaaaaggagatgcgccacaactcctgttgaactgtttcaacagttaattcccttgttaaaatctgccctttgttttgtagctttcagccttcaaatctcgttgcatccttgtgtgctcagctgaagagctctttagctaaagaaaacatggctatgttcagtctttgatcaaatcacttttcagtttgctctttatcacgctaaatgggcagagcttctgggcagcttccacatctttcatttgaagggcaataacagaaaatgcaaga

SEQ ID NO: 43993 - DNA, 600 bp, Chicken  19866894282290_1
cagatatattcttgtcatcacagaactgtgagaggtatgtgttattttaaaagaagaaaaaaaatcacataattattttgtactactttataactataaataaaagtgcagaatatctattaatttaacacaaccttttcaagaaaataaatagaaataaggattttcatttttttctccctgattaaaacaaaaggaaagtcttttaatgggcaggtagcattgcctacgcagagcatgagacatggtttggcttaaaatcagagtcaaagtcatggacatcagaaatgtttgttttcycttctgtgatatacaagttggaaagaacatgctttcattgctgaaataaaagagaactactgtttcaagaactgtgcaaatacaacttttgatattatgttgtatggtagaacttcctaaggaatatttactagtgtaatagttttattatttaacaggcttgtcatatttagtctccccatgtgacagttttttgtatagaaatataaaatggaattgtaatactctccttttttaatatatctctcagaaaaaaaaaaaaatcaatatttccattttctctttttattcctgacaacc

SEQ ID NO: 43994 - DNA, 599 bp, Chicken  19866894282292_1
  misc_feature (1)..(17): n is any nucleotide
nnnnnnnnnnnnnnnnntggaaggcggagccgggcgagctgaaggagctcaagtcgggagagcggctgttcctgctgctgaagaagtgcgtcccgctttccgtttccagaaataaaggtactgctcactgctcggctctggaagccccgaccctaaccgagaccgctcaggtcggaactgtttgccctccggtgtgctttcacatgctttcctgcgctgagaacggccttaaaatggctttaaacatctgtcctagctgctggcacggcggagcatgcagcctgtggcattgagctgctygcgggctccagctctgagggccgcatccaaccatggttataagctttgaaatgggaatatttaaacacgttttcccttaactggtttcaaggtttgtacaggaattggcctctgtgtttctcctgtctctcttgtcgttgctaagtcagcaggaccacccgcaggtgtaaggttaggtgcatcrgtgacctggcaggatcaaaggcggtctgatgactagcaagaagatattccctttataaaagagtaaactcgcagctttgggtctgtgtacgtctgtggcgtaggctgctgccctg

SEQ ID NO: 43995 - DNA, 600 bp, Chicken  19866894282292_2
ccctccggtgtgctttcacatgctttcctgcgctgagaacggccttaaaatggctttaaacatctgtcctagctgctggcacggcggagcatgcagcctgtggcattgagctgctygcgggctccagctctgagggccgcatccaaccatggttataagctttgaaatgggaatatttaaacacgttttcccttaactggtttcaaggtttgtacaggaattggcctctgtgtttctcctgtctctcttgtcgttgctaagtcagcaggaccacccgcaggtgtaaggttaggtgcatcrgtgacctggcaggatcaaaggcggtctgatgactagcaagaagatattccctttataaaagagtaaactcgcagctttgggtctgtgtacgtctgtggcgtaggctgctgccctggtggactcacaccttgatggcacctaaacatggtctgtgttgacagctgttctcatgctgtaagagaagggctgagattgaattgcttaaactgaaactgctttttcttccagggaaaatgctgcatgagattaaaagccttctcactgaggaacccaartcctgcctggatgttatygctactt

SEQ ID NO: 43996 - DNA, 479 bp, Chicken  19866894282292_3
cgcaggtgtaaggttaggtgcatcrgtgacctggcaggatcaaaggcggtctgatgactagcaagaagatattccctttataaaagagtaaactcgcagctttgggtctgtgtacgtctgtggcgtaggctgctgccctggtggactcacaccttgatggcacctaaacatggtctgtgttgacagctgttctcatgctgtaagagaagggctgagattgaattgcttaaactgaaactgctttttcttccagggaaaatgctgcatgagattaaaagccttctcactgaggaacccaartcctgcctggatgttatygctacttggagaaagctttcgtagtcatgaggggaaaaaggatgaggcctctcaagaaaaccgatcgcctcacaagagaaaaccagaagaagagattaatattgcatctaaaagacagaaaacagagcaagtaagagagattgcgtctgaagaatgtcaag

SEQ ID NO: 43997 - DNA, 461 bp, Chicken  19866894282292_4
tgcatcrgtgacctggcaggatcaaaggcggtctgatgactagcaagaagatattccctttataaaagagtaaactcgcagctttgggtctgtgtacgtctgtggcgtaggctgctgccctggtggactcacaccttgatggcacctaaacatggtctgtgttgacagctgttctcatgctgtaagagaagggctgagattgaattgcttaaactgaaactgctttttcttccagggaaaatgctgcatgagattaaaagccttctcactgaggaacccaartcctgcctggatgttatygctacttggagaaagctttcgtagtcatgaggggaaaaaggatgaggcctctcaagaaaaccgatcgcctcacaagagaaaaccagaagaagagattaatattgcatctaaaagacagaaaacagagcaagtaagagagattgcgtctgaagaatgtcaag

SEQ ID NO: 43998 - DNA, 600 bp, Chicken  19866894282297_1
attcaccaagggaaggtcatacctgactaatctggtcgccttctgtgacagagggatggtatcggtgggcaagaaggcggcaactgatatcatctacttggacttgtgcaaggtctttggcatggtctctcaccacatccttatctataaattggagagatatgaattttaagggtggaaaatccatatctctccatatttcagtggataaggaattagatagaaggtcatagccagaggattgtggtcaatgcctctgtgtccagctggaggctagtgagaagtggtcccaaggatctktcttcgaacaggtacacttagcatctttatcaataatatagatgatgggatcaagtgcaccctcagcaaccctttgctgacgacaccaagctgagtggtgtggatgataaagcagaaggaaaggatgccatccagagggactttgataaactcaaaaagtgagcccatgtgaacctactgagattcaacaaagtgagtacaaggttttgcacttgggttggggtaatctcaaatatgagtacagactgggtggaaaactctatgagagtagcccagctaagaacgacttagggttccagg

SEQ ID NO: 43999 - DNA, 600 bp, Chicken  19866894282299_1
gcagagtagaggaggacaaggccctacctcagtgtgctggccacccctctgttggggatgcactgcggggtcatgtctggctttttgtccatgaggacccccaagtccttcacagggctgctctcactgagttctcccagtctgtactaatctgggattgtcttgacccatgtacaacacctttcacttgtccttgttaaacctcattaggttcttgtgtttggacttcctgagtgtgtcccaggtccctctgaattgtctctccctcctgttgtgtcaactacactcagcttagtggaytggtagatttctgttgtctgtatagtgatccttgtacatcaagcttgttgtaaattattttttcttcacttgaataactcctaagaagtaattgttagttctgtgtattttagtttcattgaagttgagacataaattggttgacagacagtggtaatgagagaaatattgctgctgctaagttcatctggtttcattgaaataaactgagccctgtcactcttgtttctgtaaaggttgactggagtgggatggttaggcagctaaaatgagttgtttaaaaaaaaaaaatctgtggag

SEQ ID NO: 44000 - DNA, 408 bp, Chicken  19866894282299_2
ttcatctggtttcattgaaataaactgagccctgtcactcttgtttctgtaaaggttgactggagtgggatggttaggcagctaaaatgagttgtttaaaaaaaaaaaatctgtggagatgccatttaaaaataccagagtaggtattttctgcagatgtgttcagatgatgagtctattaaaatagcctcaagtagatgggaagcttatataggccttggtgtgggtagtcattttttttaagtgatctcctgctacagaatttagcttgagccatatacgctgttagcttagcactartaaatgtaagcctctacagaattttagcagttctgtaaaatgtttttttcattttttttctgcagtaagagtaactttgcttattgttatgggggggtgggggggggg

SEQ ID NO: 44001 - DNA, 599 bp, Chicken  19866894282310_1
  misc_feature (1)..(92): n is any nucleotide
nnnnnnnnnnnnnnnnnnnnnnnnnnnnnnnnnnnnnnnnnnnnnnnnnnnnnnnnnnnnnnnnnnnnnnnnnnnnnnnnnnnnnnnnnnnnttgtagagaaattgtttctaatgcccactctaaacctgtcttggtgcatcttgaggcccacagttttcctttttgctttcctaaggggaaaaataaacctttggttcactctcctttatttccggtcttcttccttttcatttcttggaaagacatgccagaacttgtagagcaaagttgtccttttccattagtgcttttcttcctraatacatgtgccatctttttatgtggaaatagaaaagtttctgaatactgattgtcaaaatatggtttccatttcattttctgttacttgaaggtactgttattagaacctcttactctttactactaaagtgctacctacttcctttgtcttttgcagacttaaaatgcatgcaaactaaatatctatgtatttttttcattgcrtataggttcagcacaacgcagataaatctactacactgaaactagcagactttggccttgcaaagctggttacaaaacccatatttactgtat

SEQ ID NO: 44002 - DNA, 600 bp, Chicken  19866894282310_2
tttatttccggtcttcttccttttcatttcttggaaagacatgccagaacttgtagagcaaagttgtccttttccattagtgcttttcttcctraatacatgtgccatctttttatgtggaaatagaaaagtttctgaatactgattgtcaaaatatggtttccatttcattttctgttacttgaaggtactgttattagaacctcttactctttactactaaagtgctacctacttcctttgtcttttgcagacttaaaatgcatgcaaactaaatatctatgtatttttttcattgcrtataggttcagcacaacgcagataaatctactacactgaaactagcagactttggccttgcaaagctggttacaaaacccatatttactgtatgtggaacaccaacatatgttgcccctgagatacttgctgagaagggtgagtgtataaatctatgatttatagcaagtcataacatttcttttaactttgtaatcacagaaatattccagaacatttcaacctactggtaggttggctagcagtaaaatctgtgaaagaaaacttcttagctttcgacaaacccaagtaaggtatcag

SEQ ID NO: 44003 - DNA, 599 bp, Chicken  19866894282313_1
  misc_feature (1)..(91): n is any nucleotide
nnnnnnnnnnnnnnnnnnnnnnnnnnnnnnnnnnnnnnnnnnnnnnnnnnnnnnnnnnnnnnnnnnnnnnnnnnnnnnnnnnnnnnnnnnncatagcaggggggttgaaactagaggatcattatggtccttttcaacccaggccatcctatgattctatgattctatgattcaaggggaactggagggctgaaacagtgcttatcctccttttccggcaaatgtaaataaagctttcctgactccacgatggcaaggaaatgtaacttggtacaaaatttctttcctgtcagcctttcmctgtggcagaacacaccttctaagttttgtaacttacttccactaattaacatttaagacaytgtttacaactgtgtatataacttatctaacgtcatcaaagacttgaggatttctacattatggtagcttatgttcacaaacacacttcaaataacagttttaaagaaaactgatttcaaatcattaccagaaattcactgaaatgctataaaccaacattgtcaccaaatatcttggccagaccaaactagaaaacaaacaaaacccttaacctgaacccaacaatttttgttggt

SEQ ID NO: 44004 - DNA, 599 bp, Chicken  19866894282313_2
  misc_feature (1)..(29): n is any nucleotide
nnnnnnnnnnnnnnnnnnnnnnnnnnnnncatagcaggggggttgaaactagaggatcattatggtccttttcaacccaggccatcctatgattctatgattctatgattcaaggggaactggagggctgaaacagtgcttatcctccttttccggcaaatgtaaataaagctttcctgactccacgatggcaaggaaatgtaacttggtacaaaatttctttcctgtcagcctttcmctgtggcagaacacaccttctaagttttgtaacttacttccactaattaacatttaagacaytgtttacaactgtgtatataacttatctaacgtcatcaaagacttgaggatttctacattatggtagcttatgttcacaaacacacttcaaataacagttttaaagaaaactgatttcaaatcattaccagaaattcactgaaatgctataaaccaacattgtcaccaaatatcttggccagaccaaactagaaaacaaacaaaacccttaacctgaacccaacaatttttgttggttttaatacctctggaatgggactagacatcccacgtgcaattcatagaacttcctacttgtt

SEQ ID NO: 44005 - DNA, 600 bp, Chicken  19866894282319_1
gcaaaaaaaaaccatctttttttaaaatttcattttagggaaggaggaagaagagaaagtagagtatacagttattgattgtttccaggagaaatttggcccagcagtgagtattaactgaagctttcatgcggtgtatatgactttaaagcctccctgttctaattgtcagtacagaattgtgagcattgctatgtggggtcgtagactggaaatcatttctgcaggctgtagtgaaatttgagttttaagtagtaactggcttctttaagttgagtagaaatggtatccttggtggtrttaaggtatatttaagttgtacacacatgcatggaaagagtttgcagcagatatcattgcttgttggttatggttttcagaatctgcatcagctgtgaactgaggtgaagggtcagtattgctacttaatgaacaattacttaaaaaggtaacagtaccaggatttgttggtgtttggagagggaattggcactgctgttatgggcatttggcacttcaggatgcctggaccttggctttttttcttcaaatcgtatgtaacatcagtgaatttggtaggaaggctttgcttcagaacta

SEQ ID NO: 44006 - DNA, 600 bp, Chicken  19866894282323_1
gtcatattgaagcaatcagaattgggttaacaaacttgcatggtgcagaaagtgataagtaaaacctctgaatgcaaacatgttttggaaatgtacatagccagctgttgttccagatgccccgaatggcttatgcattcattggcctcttaaaacctccccattgctgtttgcagagctctcattttaggctcaagagccctaaccaaaagccgagatgcactaaaaagaggtgagtggcttttcagatgagcatggcacaaggagcagtgctctaatgagaaaacagagtgctttttrytartgaagcttctgcaacccatcagaraacagacatctttaaaatgtcccactgtacaggatttctgagaaacctggttgcaattgtagattttcaggctgtaaaaactagggyaatcttttgaaaacacaagcagcaattgctttttgttttgattactttcagtaagacctttgtacatgtgcaagtaggggggatacgtaaaggatttcgctgaacatctggaaagagaagaattggaggcagtgagagatccttaatatccgttggtaggaagaaatgccaaacatagtaagaga

SEQ ID NO: 44007 - DNA, 600 bp, Chicken  19866894282323_2
tcatattgaagcaatcagaattgggttaacaaacttgcatggtgcagaaagtgataagtaaaacctctgaatgcaaacatgttttggaaatgtacatagccagctgttgttccagatgccccgaatggcttatgcattcattggcctcttaaaacctccccattgctgtttgcagagctctcattttaggctcaagagccctaaccaaaagccgagatgcactaaaaagaggtgagtggcttttcagatgagcatggcacaaggagcagtgctctaatgagaaaacagagtgctttttrytartgaagcttctgcaacccatcagaraacagacatctttaaaatgtcccactgtacaggatttctgagaaacctggttgcaattgtagattttcaggctgtaaaaactagggyaatcttttgaaaacacaagcagcaattgctttttgttttgattactttcagtaagacctttgtacatgtgcaagtaggggggatacgtaaaggatttcgctgaacatctggaaagagaagaattggaggcagtgagagatccttaatatccgttggtaggaagaaatgccaaacatagtaagagat

SEQ ID NO: 44008 - DNA, 600 bp, Chicken  19866894282323_3
tattgaagcaatcagaattgggttaacaaacttgcatggtgcagaaagtgataagtaaaacctctgaatgcaaacatgttttggaaatgtacatagccagctgttgttccagatgccccgaatggcttatgcattcattggcctcttaaaacctccccattgctgtttgcagagctctcattttaggctcaagagccctaaccaaaagccgagatgcactaaaaagaggtgagtggcttttcagatgagcatggcacaaggagcagtgctctaatgagaaaacagagtgctttttrytartgaagcttctgcaacccatcagaraacagacatctttaaaatgtcccactgtacaggatttctgagaaacctggttgcaattgtagattttcaggctgtaaaaactagggyaatcttttgaaaacacaagcagcaattgctttttgttttgattactttcagtaagacctttgtacatgtgcaagtaggggggatacgtaaaggatttcgctgaacatctggaaagagaagaattggaggcagtgagagatccttaatatccgttggtaggaagaaatgccaaacatagtaagagattca

SEQ ID NO: 44009 - DNA, 600 bp, Chicken  19866894282323_4
aacaaacttgcatggtgcagaaagtgataagtaaaacctctgaatgcaaacatgttttggaaatgtacatagccagctgttgttccagatgccccgaatggcttatgcattcattggcctcttaaaacctccccattgctgtttgcagagctctcattttaggctcaagagccctaaccaaaagccgagatgcactaaaaagaggtgagtggcttttcagatgagcatggcacaaggagcagtgctctaatgagaaaacagagtgctttttrytartgaagcttctgcaacccatcagaraacagacatctttaaaatgtcccactgtacaggatttctgagaaacctggttgcaattgtagattttcaggctgtaaaaactagggyaatcttttgaaaacacaagcagcaattgctttttgttttgattactttcagtaagacctttgtacatgtgcaagtaggggggatacgtaaaggatttcgctgaacatctggaaagagaagaattggaggcagtgagagatccttaatatccgttggtaggaagaaatgccaaacatagtaagagattcattaaatgtgttatgagttactgat

SEQ ID NO: 44010 - DNA, 600 bp, Chicken  19866894282323_5
gatgccccgaatggcttatgcattcattggcctcttaaaacctccccattgctgtttgcagagctctcattttaggctcaagagccctaaccaaaagccgagatgcactaaaaagaggtgagtggcttttcagatgagcatggcacaaggagcagtgctctaatgagaaaacagagtgctttttrytartgaagcttctgcaacccatcagaraacagacatctttaaaatgtcccactgtacaggatttctgagaaacctggttgcaattgtagattttcaggctgtaaaaactagggyaatcttttgaaaacacaagcagcaattgctttttgttttgattactttcagtaagacctttgtacatgtgcaagtaggggggatacgtaaaggatttcgctgaacatctggaaagagaagaattggaggcagtgagagatccttaatatccgttggtaggaagaaatgccaaacatagtaagagattcattaaatgtgttatgagttactgatttggacagaacctctgatttgccttttgtattgccttgctcaaaccacatgtgggttataaaggtggatcctcgtggagcagtgggg

SEQ ID NO: 44011 - DNA, 600 bp, Chicken  19866894282323_6
atctggaaagagaagaattggaggcagtgagagatccttaatatccgttggtaggaagaaatgccaaacatagtaagagattcattaaatgtgttatgagttactgatttggacagaacctctgatttgccttttgtattgccttgctcaaaccacatgtgggttataaaggtggatcctcgtggagcagtggggtgcagggggagacctccgagcacacctgctgttctgtgataccagaggctgtgctgggactaggagtgaaccgatagaaataactggtctggtgatagagatggkatgaagcatgggtaggtgtgaatctctggctgtccaataacatgggaagctggttgtgattgagaaatccagagagctcagtagggtcatagttcccctgtacagtgggaggaggtgtagtttgcagccaggagactgctgatcttttagcctgccatataggctgcactatggcaggtggaaatgtcaagtagctgtgttaggttcgtgatgtgcctgaacttgtcgggagaaaatagtaacagatttagcttgcatttctatttgctgaggtgttcagagagtggcactgacacaggc

SEQ ID NO: 44012 - DNA, 600 bp, Chicken  19866894282335_1
ctaggttatttccgactattattgtaataatctaatattttatgtcataaaactcaattggtatttggtgcatcaaagcatcacactcatgaaggaaggtcataacagctgtttcttttgaaatctactgaattctgtaggagggaaaataacaaaattaattcatttcatgagtgtctacacactcaatatttttgatagtttgtaatagtcttatataatataataaattatattatatatatatagtaagtataatacatatatatactatatgtacatatatgtaatatatatatkatatatatactatatataatacatatatatatacgtatactatatgcatatagtataatacatacactatacacagcatctataaactttgcaacattaaatcattagtaatatttcaattattttttattaaatttgtaacaatttgttgtgtgggactcctataaagaaatggttttcagtttacaaaaaggataatttcatgttgcaatactgatcattccaaatatacagcactgtaataaacagaagattgcatactttcataaactgccaagttaaatatactttgctatagca

SEQ ID NO: 44013 - DNA, 600 bp, Chicken  19866894282335_2
taggttatttccgactattattgtaataatctaatattttatgtcataaaactcaattggtatttggtgcatcaaagcatcacactcatgaaggaaggtcataacagctgtttcttttgaaatctactgaattctgtaggagggaaaataacaaaattaattcatttcatgagtgtctacacactcaatatttttgatagtttgtaatagtcttatataatataataaattatattatatatatatagtaagtataatacatatatatactatatgtacatatatgtaatatatatattktatatatactatatataatacatatatatatacgtatactatatgcatatagtataatacatacactatacacagcatctataaactttgcaacattaaatcattagtaatatttcaattattttttattaaatttgtaacaatttgttgtgtgggactcctataaagaaatggttttcagtttacaaaaaggataatttcatgttgcaatactgatcattccaaatatacagcactgtaataaacagaagattgcatactttcataaactgccaagttaaatatactttgctatagcaa

SEQ ID NO: 44014 - DNA, 600 bp, Chicken  19866894282344_1
aatgaactttggaagagaataaattcagcattaaggatgctgtgccataccatatgctctgctgagaggatattggaatacacatgcaccatgtgtattttagatataagccaaactcagaagagaaatcttccctaattcctttcactaaggtctatggttttcatcagattattgacagatttagtcagccgtgcactgttggcaaaactcagcaggctttctgtttgcttgcagctgctactggaagatttaaatgggtttacttactacagtatgttaggtctaccagaatatctrcatctcctctgtgcccgcatcttcacttttaaatgtggcatttatctttgcttttaatatttttgtagaaacaacattggtrttttctgaggaaaggaaatcttcttttgaggttctttcttctctcttctgatttctaggtgtgttaaatttactgtcttataggayrtcaaggtacagataaatcctttagcatgtttcactaaggaaatatttgtaattagttctttgaatctctcttagatgcagtgcagggttccgtgataaagcagaatcccttggagcttcacaaagcagcag

SEQ ID NO: 44015 - DNA, 600 bp, Chicken  19866894282344_2
catgcaccatgtgtattttagatataagccaaactcagaagagaaatcttccctaattcctttcactaaggtctatggttttcatcagattattgacagatttagtcagccgtgcactgttggcaaaactcagcaggctttctgtttgcttgcagctgctactggaagatttaaatgggtttacttactacagtatgttaggtctaccagaatatctrcatctcctctgtgcccgcatcttcacttttaaatgtggcatttatctttgcttttaatatttttgtagaaacaacattggtrttttctgaggaaaggaaatcttcttttgaggttctttcttctctcttctgatttctaggtgtgttaaatttactgtcttataggayrtcaaggtacagataaatcctttagcatgtttcactaaggaaatatttgtaattagttctttgaatctctcttagatgcagtgcagggttccgtgataaagcagaatcccttggagcttcacaaagcagcaggcagaaagaggtcaggagtcatkatgccattctgtaacatatagacagaaactaaaccaagagtcaaacccattattatccc

SEQ ID NO: 44016 - DNA, 600 bp, Chicken  19866894282344_3
agattattgacagatttagtcagccgtgcactgttggcaaaactcagcaggctttctgtttgcttgcagctgctactggaagatttaaatgggtttacttactacagtatgttaggtctaccagaatatctrcatctcctctgtgcccgcatcttcacttttaaatgtggcatttatctttgcttttaatatttttgtagaaacaacattggtrttttctgaggaaaggaaatcttcttttgaggttctttcttctctcttctgatttctaggtgtgttaaatttactgtcttataggayrtcaaggtacagataaatcctttagcatgtttcactaaggaaatatttgtaattagttctttgaatctctcttagatgcagtgcagggttccgtgataaagcagaatcccttggagcttcacaaagcagcaggcagaaagaggtcaggagtcatkatgccattctgtaacatatagacagaaactaaaccaagagtcaaacccattattatcccatggtgtatcattcaggtttaatacggattaaaaataagcgatgaagacaattgtgtttttgtccagtacagcttttttgttgtac

SEQ ID NO: 44017 - DNA, 600 bp, Chicken  19866894282344_4
gattattgacagatttagtcagccgtgcactgttggcaaaactcagcaggctttctgtttgcttgcagctgctactggaagatttaaatgggtttacttactacagtatgttaggtctaccagaatatctrcatctcctctgtgcccgcatcttcacttttaaatgtggcatttatctttgcttttaatatttttgtagaaacaacattggtrttttctgaggaaaggaaatcttcttttgaggttctttcttctctcttctgatttctaggtgtgttaaatttactgtcttataggayrtcaaggtacagataaatcctttagcatgtttcactaaggaaatatttgtaattagttctttgaatctctcttagatgcagtgcagggttccgtgataaagcagaatcccttggagcttcacaaagcagcaggcagaaagaggtcaggagtcatkatgccattctgtaacatatagacagaaactaaaccaagagtcaaacccattattatcccatggtgtatcattcaggtttaatacggattaaaaataagcgatgaagacaattgtgtttttgtccagtacagcttttttgttgtact

SEQ ID NO: 44018 - DNA, 544 bp, Chicken  19866894282344_5
cacttttaaatgtggcatttatctttgcttttaatatttttgtagaaacaacattggtrttttctgaggaaaggaaatcttcttttgaggttctttcttctctcttctgatttctaggtgtgttaaatttactgtcttataggayrtcaaggtacagataaatcctttagcatgtttcactaaggaaatatttgtaattagttctttgaatctctcttagatgcagtgcagggttccgtgataaagcagaatcccttggagcttcacaaagcagcaggcagaaagaggtcaggagtcatkatgccattctgtaacatatagacagaaactaaaccaagagtcaaacccattattatcccatggtgtatcattcaggtttaatacggattaaaaataagcgatgaagacaattgtgtttttgtccagtacagcttttttgttgtactgggtggcagactagaatgtctgattattgtaactgtatttcagaagtagctggactacactaacaagtgtgtgtatgttaatgtatttaatatcctca

SEQ ID NO: 44019 - DNA, 600 bp, Chicken  19866894282350_1
attaactgcacatgcatcaaaaatgtgaaaaatgctcatatacaaccagacagagttcttccaggaccagaagttattaagctcgcggatatacggctttctgttatctcagataaagtggaggaggagaaagggttgttttcctagataatggaaaataataacacaagagccatgcaggaggtagtactgcacagacgtggcacccaggaagacttcttagctctcacaccgtgctgagccaaagttgtgtggctttatgcacacattcccaaatcaagaagacttccagggcctggrgcatgatacagaggcaccagggagtgctgcagagctgcagaggacctgcactgctcagacaacccaccctgcgtggggctggtgggcagatgcagggcatccctgctcatgccaagccaccgaatgctgccagagcccacctggaccagggcgagttcagctctgagcagggctctgtgctttgtcctgtgctcccagaacaagccagcaccacacaaattgcatacttaatccatagcctggataagccttccaggatgattaagattctacagtatacggctttgaaaagtaaggttc

SEQ ID NO: 44020 - DNA, 600 bp, Chicken  19866894282356_1
tcctcaccactaaaaatctgaaatggaataaactccagcactcttgataccatggctactgagataatcctaggagagtgagctggatccatgagagaggatgtgtgttctggaatataatgagatccctgctgccattagcagaggcgaaagatgttgtgcaacaaatgaaggcatatgcagcatgaaaaagctcttatcttacctgaccccatgttacctcatcttatggtgatccatgatctgtttccatggaacttcacttcacagcagtggaaaaagaatgtgacactatacacrgtatctcccagcacaccaccaagaaactcactctctctctacttccgtgatcagcagacttccctgacatccttccctcctatgggaggaaactgtctttgagaggaccacatctaccaatcaggccagagatcagccagccactagctcttccacctcttcagcaccacagcaaggatgacatcttcctggcacatagaagaaaaggagatacaattcaaggcactgaaactgtggcaatactgagctttgcaggtaccagaaatctccaaaattggtggttctagtagtagggggtgg

SEQ ID NO: 44021 - DNA, 600 bp, Chicken  19866894282364_1
ttctgtagctctggctttactgagtgaaagtacagatgattaaaaaagtattctgctatttacttttctatcagtaaaagactacatttgtatattaaacaatgtttttcatttttatattatttcataattttgagcagaggggtagctgttcttcagaggctcctttcaagatcagctattacacacatctacaaacttaaaaagtattgcacacaataaaactgagaatgaattcttgtatccatgtagaacacttatttgcactgattattagcagtttgctcaaagactggaccwtatattttactgaataggaactttaacatataagccatccttccatcctcattgtatctccagatagtctgtgtctgcagtctgtatcattaagaaaacattgaggtattttcctttccttcataaattagtcttactttacaaataataaaaggacaggttacagtaagaacacttctaaatttaaggccactttctggtcattgctgtattggttgctagagcaactatggagataaaaaacatccttactttcaaagcattgtaaggtaggaggtacattaagattattattcccca

SEQ ID NO: 44022 - DNA, 600 bp, Chicken  19866894282364_2
aatggtttatttgttttaggcttaaaatggaaaagatttgtaaaaaatgcaggaattaataaattaaaattaaaaaaaaaaaaaaaaaggaaaagatgaccaattgcatcagtaagttgcagtaagatgaattttctaaaaggaacatcaccacaggtcagaggaaagaactatcaagagagagaaaaattgagaatataaatggcatggaacataatgttgttatttttgaaaatattagaaagactgaaggctacagaactgatcctggaacataccaacagtaaaaaatgcttcagrtaaggatactaggaaagaaaatgagaaggtcaccaagcctgaaagaaaaatgttatattagtccattctttttgaattatatgtttgtttattacattgcttctcagtggtaccccatattgaaggatttattagaagtaggctagtgagattatcatctccctgtcttgaggggcactgagtgaactgakggctgaaaagtaccacacatcatgggcatcaatgaccacaagtaaacaggctttatgagttagcagataacaaaaaggagtgaaacctggcttgtgctatagatccagg

SEQ ID NO: 44023 - DNA, 600 bp, Chicken  19866894282364_3
gagaatataaatggcatggaacataatgttgttatttttgaaaatattagaaagactgaaggctacagaactgatcctggaacataccaacagtaaaaaatgcttcagrtaaggatactaggaaagaaaatgagaaggtcaccaagcctgaaagaaaaatgttatattagtccattctttttgaattatatgtttgtttattacattgcttctcagtggtaccccatattgaaggatttattagaagtaggctagtgagattatcatctccctgtcttgaggggcactgagtgaactgakggctgaaaagtaccacacatcatgggcatcaatgaccacaagtaaacaggctttatgagttagcagataacaaaaaggagtgaaacctggcttgtgctatagatccaggtcagctgtgctcccatgctgattgaaacagctaattgccaggcagagaaaacagtagaactgtaaaacagcaaaaggagtatattgcatcagactcaactgtctgaaagcaatattcacctgatatagccaaagatccactggaacatgattagtggcatgaatacaggtaggagatctgtgaaatgtctt

SEQ ID NO: 44024 - DNA, 600 bp, Chicken  19866894282368_1
acgatgtggctggctgctttcctgagactgaaagagcaacgcagcacttaagtagcatccaaggtttgcttaaaagcttttgacacgttgtctctgggcaaaaaggaatgtggaggaggctgcggagcgggcacagctgaacctcttggcagtgctttgggagaagcctctgcttctgtggggttgaccctacatagtgctggctttgttcccttccctatcacttagggccatgtgaggcaggttcttttccccgtgcttgtatgagggctctcaataggaacacagcactgctgcatrcagtgcaggcatcgtacctgcatagcaagggctgtgctggagctgatgctgttccccagctgccccactcattgcccccacttctgcagttctcatcccaaggtacaaataacagaacgtgcttctgggaggagagagtgcgtgcatggattaacggctgtgctacagaggtatttgtttccacacactcttttttcctgcctcttatttatttccttcttgaccttttggcacaggggagcatatggtgatgtgctgtccatctggttgctgctcactgtgaactcacgacgcaggcaa

SEQ ID NO: 44025 - DNA, 600 bp, Chicken  19866894282376_1
aagtctaggtcaggaaacactgtgatataaaatgtggatttgtattgatagtttctgggtcactgcaaatactataaaaatgactgtaaaagcagaactgtgataaaaaaacaacagctaaggaactccccccaaaaaagatgtcaaagaaaacaaacgtcataaacacgtaactggtttcctctgacaaaactccacaaatacctccatacttgtcctgtctcctgctgacctttttagaatagaagatagttctcatttctctcccaacagtgactgttcagaagcacagcctagtartgataagcattttatattttattatgttcatttgcaaatggcaaataacatactttttttttttttttgagattaaatacaggggtttttgttgttgctttctttcactttttgtagtttttaatttccagttaaaattgctcactttgatgtccttaccaagaattaaatgggctagaaaaaatgtattttttttttatgttaaaatagcttccacatcattctaagtgataactctttttttaatacacaaattattatacacaaatttaatgcacaaatctttgacctttactccta

SEQ ID NO: 44026 - DNA, 576 bp, Chicken  19866894282376_2
ctgggtcactgcaaatactataaaaatgactgtaaaagcagaactgtgataaaaaaacaacagctaaggaactccccccaaaaaagatgtcaaagaaaacaaacgtcataaacacgtaactggtttcctctgacaaaactccacaaatacctccatacttgtcctgtctcctgctgacctttttagaatagaagatagttctcatttctctcccaacagtgactgttcagaagcacagcctagtartgataagcattttatattttattatgttcatttgcaaatggcaaataacatacrttttttttttttttgagattaaatacaggggtttttgttgttgctttctttcactttttgtagtttttaatttccagttaaaattgctcactttgatgtccttaccaagaattaaatgggctagaaaaaatgtattttttttttatgttaaaatagcttccacatcattctaagtgataactctttttttaatacacaaattattatacacaaatttaatgcacaaatctttgacctttactcctatgggttctaacttcacatcattcattaatt

SEQ ID NO: 44027 - DNA, 576 bp, Chicken  19866894282376_3; identical to SEQ ID NO: 44026

SEQ ID NO: 44028 - DNA, 600 bp, Chicken  19866894282378_1
gtgctggtgtcttgcagaacatgttattatgagtaacaggatagaggcatacaagtaacaggatagaagggtccaactacaatctagggatctagtggagagattgctgtgcctttagtccagtcattcttggtgcagaccaatgtgttaactcacaattgcactttctcagtcattttccagaatacaaacaaccttaagttggaggtctgtgtgaattttacagaagatatcagcaggtgaggccatgtcatagcccgggtacatattgcccctggtatatcccagggtgttgccagracagggctctgaagcacagtcagcactgcaggtgcaggcaaacacagaacagtaaaagctgcaattgtccaaaactggcactacgttctgtgcttagggttggtttcctggctgctttgcaatgctcagtttacacttgcagtgcctaggcagtgtaatgcctctggcatcctgctgctgctacttcagttgagagaaactgcagtcttcatgtatgtacttcagtgtatgtactcttgctgagttgaggttagggaagagaaaaggaatcacttttttttttttacttgaaccttggct

SEQ ID NO: 44029 - DNA, 600 bp, Chicken  19866894282379_1
cccatccaacctgacctggagtgcctccaaggatgggtcatccacagcttctctggtcaacctgttccagtgcctcactacactctgggtaaaagaatttccccctgaaatctatgttaaatctcaccccttagtttaaaggcagtccctctttcctatcattatcagaccacataaaaaattgttcttcctcctgtttataatctcctttaaatagtggaaggctgcaatgaggtgaccccagaacctgctcttctccaagctgattaagcctggctccctcagccctttttcttaggmgaggtgctcctatgtttgatggrgtagagaggctcttatttattttgaatgtttggattttattttatttattaatttatttagttatggtgcaataggaaggaaaaggaaaacgstacggcatatcaggtttcttgcagtagtgaaaaggatctgctttttactcttgtgggaaggtgagaacaaattgttatttctgagcagcaatggatagcactgctgagctgacatccctagtgctgcaagrctgagctttttgcacccctggactgagttaaattctcctcatgaaggtattga

SEQ ID NO: 44030 - DNA, 600 bp, Chicken  19866894282379_2
cctccaaggatgggtcatccacagcttctctggtcaacctgttccagtgcctcactacactctgggtaaaagaatttccccctgaaatctatgttaaatctcaccccttagtttaaaggcagtccctctttcctatcattatcagaccacataaaaaattgttcttcctcctgtttataatctcctttaaatagtggaaggctgcaatgaggtgaccccagaacctgctcttctccaagctgattaagcctggctccctcagccctttttcttaggmgaggtgctcctatgtttgatggrgtagagaggctcttatttattttgaatgtttggattttattttatttattaatttatttagttatggtgcaataggaaggaaaaggaaaacgstacggcatatcaggtttcttgcagtagtgaaaaggatctgctttttactcttgtgggaaggtgagaacaaattgttatttctgagcagcaatggatagcactgctgagctgacatccctagtgctgcaagrctgagctttttgcacccctggactgagttaaattctcctcatgaaggtattgacccaagtatgcagacaaggagac

SEQ ID NO: 44031 - DNA, 600 bp, Chicken  19866894282379_3
ttaaatctcaccccttagtttaaaggcagtccctctttcctatcattatcagaccacataaaaaattgttcttcctcctgtttataatctcctttaaatagtggaaggctgcaatgaggtgaccccagaacctgctcttctccaagctgattaagcctggctccctcagccctttttcttaggmgaggtgctcctatgtttgatggrgtagagaggctcttatttattttgaatgtttggattttattttatttattaatttatttagttatggtgcaataggaaggaaaaggaaaacgstacggcatatcaggtttcttgcagtagtgaaaaggatctgctttttactcttgtgggaaggtgagaacaaattgttatttctgagcagcaatggatagcactgctgagctgacatccctagtgctgcaagrctgagctttttgcacccctggactgagttaaattctcctcatgaaggtattgacccaagtatgcagacaaggagactgtttgaagttctggatatgtaattttgataaagtgttaagcaagtcttacagtctttcatccttaaagatacagtggtgctgtgcatgctcc

SEQ ID NO: 44032 - DNA, 484 bp, Chicken  19866894282379_4
ctgctcttctccaagctgattaagcctggctccctcagccctttttcttaggmgaggtgctcctatgtttgatggrgtagagaggctcttatttattttgaatgtttggattttattttatttattaatttatttagttatggtgcaataggaaggaaaaggaaaacgstacggcatatcaggtttcttgcagtagtgaaaaggatctgctttttactcttgtgggaaggtgagaacaaattgttatttctgagcagcaatggatagcactgctgagctgacatccctagtgctgcaagrctgagctttttgcacccctggactgagttaaattctcctcatgaaggtattgacccaagtatgcagacaaggagactgtttgaagttctggatatgtaattttgataaagtgttaagcaagtcttacagtctttcatccttaaagatacagtggtgctgtgcatgctccaatgtcagatccagc

SEQ ID NO: 44033 - DNA, 600 bp, Chicken  19866894282393_1
aagaaacagaaagagaaggaaaaagaaaaagaaagagaaagaaggaaagagagagaaaaaatagaaaatagagaaagaatcatggaaggataaagggagttaggaagaaggaaagaaagaagaggaaggtagaaacaggaaaggggaaaatgggagaagggggaaaattgagaggataaaaggggaaaagagaaagaagaaggacactcctagaaaggaaaagcagagccacagtgagaggtcaactccctggctctggtgaagcaggaaatgagaggtgctgatgctgcagtgccaaaycctttactacccttgctctacagatacacagcttagtaacgtcttcagatgatgcagaccaaaagtaaagcacctacaatgcagtcagaaagcttttgtggaatgaaaaaygccaccttttcatttctgaatgcagacagaaggtgaagatagtttgggtgctggggcagaatctcaggcaccgaaggactgatgagccgtgcatctaattgcaaactatgcagccagatggccacagcttgtggacactgctcacgtttggatccacaaaatgattttggctccagatgactgtcggta

SEQ ID NO: 44034 - DNA, 600 bp, Chicken  19866894282393_2
aaagaaagaagaggaaggtagaaacaggaaaggggaaaatgggagaagggggaaaattgagaggataaaaggggaaaagagaaagaagaaggacactcctagaaaggaaaagcagagccacagtgagaggtcaactccctggctctggtgaagcaggaaatgagaggtgctgatgctgcagtgccaaaycctttactacccttgctctacagatacacagcttagtaacgtcttcagatgatgcagaccaaaagtaaagcacctacaatgcagtcagaaagcttttgtggaatgaaaaaygccaccttttcatttctgaatgcagacagaaggtgaagatagtttgggtgctggggcagaatctcaggcaccgaaggactgatgagccgtgcatctaattgcaaactatgcagccagatggccacagcttgtggacactgctcacgtttggatccacaaaatgattttggctccagatgactgtcggtatgaacgcttcaagcaccttttttgagcagttggaaaaatgactgtacccctgaatgaaatggaggagttacgcctccatcccatcagaggtgtgagtgcctctgaatccaa

SEQ ID NO: 44035 - DNA, 600 bp, Chicken  19866894282396_1
tgcttgtagtgagacactcagaaagaaaatggtcaaattcagggttatgagtggtgtactagtggtattggccactacactgtgatggttaggaataaaaatgctgccaaaggtaggacttcctcacctttagcttataaaccttgctgagcattgaagtgagtggaaaatgtccctaaaaactgtattcctggtatataaattaggcagcaagggtacattcaaattttacaactgttgaattgtcatctgtgtatttcacatctgatctgtgtggcctagatgtgaattcaactttayttgaagttgcctcagttgcccagttcaaattgccagggccttgarggcactgccaggctgaattgaccctactcatctctctctctcctgccgaggatcctatttcagcccctgggacagtcagcccctgctgcagcagggccaatatccagcttcccatagttctgcctatccatgggtctcgctgagttgtcctgtccccatggccctgcctactcatactagggctttttctaactctggacgcaatgtaacacatccattcactagtagctgcattactgttaattatcttcatct

SEQ ID NO: 44036 - DNA, 600 bp, Chicken  19866894282396_2
tatgagtggtgtactagtggtattggccactacactgtgatggttaggaataaaaatgctgccaaaggtaggacttcctcacctttagcttataaaccttgctgagcattgaagtgagtggaaaatgtccctaaaaactgtattcctggtatataaattaggcagcaagggtacattcaaattttacaactgttgaattgtcatctgtgtatttcacatctgatctgtgtggcctagatgtgaattcaactttayttgaagttgcctcagttgcccagttcaaattgccagggccttgarggcactgccaggctgaattgaccctactcatctctctctctcctgccgaggatcctatttcagcccctgggacagtcagcccctgctgcagcagggccaatatccagcttcccatagttctgcctatccatgggtctcgctgagttgtcctgtccccatggccctgcctactcatactagggctttttctaactctggacgcaatgtaacacatccattcactagtagctgcattactgttaattatcttcatctcttctttctgaggactaacacaattatcctgaagaggtttttttt

SEQ ID NO: 44037 - DNA, 600 bp, Chicken  19866894282401_1
tctgcacatctaggagttaaagggaaacaagcaggcagaaagtggtggatcaaaagtgacaagcacgcaaccaggtctcagctcacagctgttctggagactatgacaccagcaaagtgaaaacaggtaaaactttcctccatcatctatccctgcccttagcgtgagtgtgtaaggataaccagagcctggttctgctcccaagcccatcactgctgctgtctgcatgcagagtgactgctccatctgtgcccatgcccaaaccgatgtgggacgcagcacagctccaggagcatcccmttcccaaggcactgatctcttgcaggttaaggactgtacagcagcagctctctgcagccctcactgagagcacagatctggagccacccgaggagagctgggtttgcacagaggaatttctacatgatcaraattaaatgcagctaatccgtaacgtcatccttttctccatatttcatttattagggtggggagcatgactcagagaaattatttcctcttttgtccatgcttctcattactgcaaatacgatggtactttttccccttcatttggtgttattgaggataatgatgctg

SEQ ID NO: 44038 - DNA, 600 bp, Chicken  19866894282401_2
actttcctccatcatctatccctgcccttagcgtgagtgtgtaaggataaccagagcctggttctgctcccaagcccatcactgctgctgtctgcatgcagagtgactgctccatctgtgcccatgcccaaaccgatgtgggacgcagcacagctccaggagcatcccmttcccaaggcactgatctcttgcaggttaaggactgtacagcagcagctctctgcagccctcactgagagcacagatctggagccacccgaggagagctgggtttgcacagaggaatttctacatgatcaraattaaatgcagctaatccgtaacgtcatccttttctccatatttcatttattagggtggggagcatgactcagagaaattatttcctcttttgtccatgcttctcattactgcaaatacgatggtactttttccccttcatttggtgttattgaggataatgatgctgaggaggtgtctgataatgggattagaagcccagactgggagttacctgccttattctgtgtgcctgagtgaatatttacccctgaggtaacaattagctccgtttgtgcactgaaaagtcacccatcagtg

SEQ ID NO: 44039 - DNA, 456 bp, Chicken  19866894282403_1
gccttaaaattgattgactgactgtaagtccattcttttcctttaaagcttcaggatatacataggagagagtctgcttggcaagaggttaatatttaggtatacttgtggcagtagaactaattcaaacttttctttgtctctaagttttggagggatatctagaagagaatggcgatgtgttctttcttctgttcagcataaactgtaattaaccaaatctttcatgttacaggaagcaactacagtacagttccttaatgtttttcacagatcacttaatgtaaaggccaagagctstgttaggagatgggtcaccccctgcccatattaggtgcttccattcagtsagactgmgcagtcagactgagttgagggaaatcttcatgtgtgagattgagcgaagtttgcactatgataacttgggagtatggggatacttttgaggatacaaaa

SEQ ID NO: 44040 - DNA, 406 bp, Chicken  19866894282403_2
tcaggatatacataggagagagtctgcttggcaagaggttaatatttaggtatacttgtggcagtagaactaattcaaacttttctttgtctctaagttttggagggatatctagaagagaatggcgatgtgttctttcttctgttcagcataaactgtaattaaccaaatctttcatgttacaggaagcaactacagtacagttccttaatgtttttcacagatcacttaatgtaaaggccaagagctstgttaggagatgggtcaccccctgcccatattaggtgcttccattcagtsagactgmgcagtcagactgagttgagggaaatcttcatgtgtgagattgagcgaagtttgcactatgataacttgggagtatggggatacttttgaggatacaaaa

SEQ ID NO: 44041 - DNA, 399 bp, Chicken  19866894282403_3
atacataggagagagtctgcttggcaagaggttaatatttaggtatacttgtggcagtagaactaattcaaacttttctttgtctctaagttttggagggatatctagaagagaatggcgatgtgttctttcttctgttcagcataaactgtaattaaccaaatctttcatgttacaggaagcaactacagtacagttccttaatgtttttcacagatcacttaatgtaaaggccaagagctstgttaggagatgggtcaccccctgcccatattaggtgcttccattcagtsagactgmgcagtcagactgagttgagggaaatcttcatgtgtgagattgagcgaagtttgcactatgataacttgggagtatggggatacttttgaggatacaaaa

SEQ ID NO: 44042 - DNA, 599 bp, Chicken  19866894282421_1
  misc_feature (1)..(114): n is any nucleotide
nnnnnnnnnnnnnnnnnnnnnnnnnnnnnnnnnnnnnnnnnnnnnnnnnnnnnnnnnnnnnnnnnnnnnnnnnnnnnnnnnnnnnnnnnnnnnnnnnnnnnnnnnnnnnnnnnnatccttgatgcgtcaacttattcagtacccagtctgttaggagaagaagtgctaaaaagtgcaaaaaaaacccacgattttaaaaacaaacgtgaataataagaaaaccctgcgttaaggaggatgcaccggctgcaccccgggccccccgcaggagcaccaccccgggccctgcgactaccgcarcaccgacccgctcggctcggcggggcccgcgcggggccagcgggmggcgttccgtgtaggggcagcgccacctgccggcagcatccgccgcggcctccggggcagaagagcctggctgcgggtctgcgaggagccggactgcgggggcctgcagctcccgccccgctgggtcagagctgaaagccggcaaggaacaaaatctgaaaacttcccgtatttatttatttttttccatcgttctcttcctccgacaaagaatgctgcgagacagagactttcctctgacgatcaaccaactt

SEQ ID NO: 44043 - DNA, 599 bp, Chicken  19866894282421_2
  misc_feature (1)..(69): n is any nucleotide
nnnnnnnnnnnnnnnnnnnnnnnnnnnnnnnnnnnnnnnnnnnnnnnnnnnnnnnnnnnnnnnnnnnnnatccttgatgcgtcaacttattcagtacccagtctgttaggagaagaagtgctaaaaagtgcaaaaaaaacccacgattttaaaaacaaacgtgaataataagaaaaccctgcgttaaggaggatgcaccggctgcaccccgggccccccgcaggagcaccaccccgggccctgcgactaccgcarcaccgacccgctcggctcggcggggcccgcgcggggccagcgggmggcgttccgtgtaggggcagcgccacctgccggcagcatccgccgcggcctccggggcagaagagcctggctgcgggtctgcgaggagccggactgcgggggcctgcagctcccgccccgctgggtcagagctgaaagccggcaaggaacaaaatctgaaaacttcccgtatttatttatttttttccatcgttctcttcctccgacaaagaatgctgcgagacagagactttcctctgacgatcaaccaacttgtcgaagttcaggttggatttcaggaaaaatttcttctctgaaag

SEQ ID NO: 44044 - DNA, 600 bp, Chicken  19866894282426_1
catcaatcaggaaagttaaagctcagctgaaattgaaactagcaaaggatgtgaaatgaaatgggaaggacttctgtaagtgtaccagaagcaagagcaagtgccagtggggcagggaatctagcaacacagagtgaagtaacagctgttgtatgtcacaccttctttgctttagcctttactggtcaagacttttctcagaattctctaatccataatcctacaggcagaatctgagggagtgtggtatggtggatactacctatggtggaacccttaaataaactggatatagacaastccaaagaatcagacaggatgctaagggaactggtcattgtccctgagaaaatgttatcatctttggttaaagagatcacagaagttcctgttagaggacaagtgctacacatatcttcaagaagattgagaaggaagatctgggtaaatttgggttgatcagctgaactagcttcccactgtccctgggaaggctatgaaggaaatctccccatacaccgtgtccagccaaataragacaaaaagattattaggaacagccaggcagatttatgaatgaaaaacttttccacacatatc

SEQ ID NO: 44045 - DNA, 600 bp, Chicken  19866894282426_2
agggagtgtggtatggtggatactacctatggtggaacccttaaataaactggatatagacaastccaaagaatcagacaggatgctaagggaactggtcattgtccctgagaaaatgttatcatctttggttaaagagatcacagaagttcctgttagaggacaagtgctacacatatcttcaagaagattgagaaggaagatctgggtaaatttgggttgatcagctgaactagcttcccactgtccctgggaaggctatgaaggaaatctccccatacaccgtgtccagccaaataragacaaaaagattattaggaacagccaggcagatttatgaatgaaaaacttttccacacatatctgattgtttttgttggcaatacaactgggttagtagaacacagcagtggatgatgataaacttgacattagttagcaagactttcaaagcagcatcccgtggtatctttgtaaacacatgtatgagacataggtggcctgggagttagaaggaaagactgacaggattggttcactcttactggaaggttaaggtggaatcttactgctgaatccatctctgctttttctcaaaga

SEQ ID NO: 44046 - DNA, 600 bp, Chicken  19866894282426_3
cccagctctcattaagcatctttccatataattatttctgtctttcccaattgatttgaaataattgccccacattttggaagataatgagctgtttgttttattttcagcactcagggtgtctgcagctctatgatacaactcagacttttcaagccctttgaaaaactatttgaaacagagtaatagtgtatacctcagtaacaaagaccattgcagagattgcagtaaaaatgtcagactactccttaccttctgtgatggctttctaaaaaatgtaagttcaaagattcagaactyatcctcagggtactcggtggttcagatggacatctaaatcactacctaaagtcctgtgatcaagccatcggttggcatttttgctcatcttgaacaatggaactttttggaacaaaacaattccaagtatcacagaagatgtaaattctttaggattagattaataacaygactgaaatcataataggtctgcagatttttcaaaaacttccttaccatatatctcaaatccttgagataattctctgtctttscttgttctcacaaaaatgcatggcaaaatgcattagaagaagctta

SEQ ID NO: 44047 - DNA, 600 bp, Chicken  19866894282426_4
atttgaaacagagtaatagtgtatacctcagtaacaaagaccattgcagagattgcagtaaaaatgtcagactactccttaccttctgtgatggctttctaaaaaatgtaagttcaaagattcagaactyatcctcagggtactcggtggttcagatggacatctaaatcactacctaaagtcctgtgatcaagccatcggttggcatttttgctcatcttgaacaatggaactttttggaacaaaacaattccaagtatcacagaagatgtaaattctttaggattagattaataacaygactgaaatcataataggtctgcagatttttcaaaaacttccttaccatatatctcaaatccttgagataattctctgtctttscttgttctcacaaaaatgcatggcaaaatgcattagaagaagcttatttaaaaactgtagctatttattttccaaaatattgtcaaatcggttataaattgttgctagatcacaatgatgccgtgctctgtagttcaatggatattgtccacagaagtttcctactagaacagaaacagatgctctaactgttttgggagaagaataaatttaagt

SEQ ID NO: 44048 - DNA, 600 bp, Chicken  19866894282426_5
tctgtgatggctttctaaaaaatgtaagttcaaagattcagaactyatcctcagggtactcggtggttcagatggacatctaaatcactacctaaagtcctgtgatcaagccatcggttggcatttttgctcatcttgaacaatggaactttttggaacaaaacaattccaagtatcacagaagatgtaaattctttaggattagattaataacaygactgaaatcataataggtctgcagatttttcaaaaacttccttaccatatatctcaaatccttgagataattctctgtctttscttgttctcacaaaaatgcatggcaaaatgcattagaagaagcttatttaaaaactgtagctatttattttccaaaatattgtcaaatcggttataaattgttgctagatcacaatgatgccgtgctctgtagttcaatggatattgtccacagaagtttcctactagaacagaaacagatgctctaactgttttgggagaagaataaatttaagtagtcagattatagtacaacttctatgggaaaagtgtgaaaaataaaaagcgttttcaatttttaaaatatttttgcaattaata

SEQ ID NO: 44049 - DNA, 600 bp, Chicken  19866894282433_1
ctaaaatgcaggtctgagttctggcaaactgtgcctggagcccttcaaagacaagtttttattatgtgcagaacttattaagcaatatcccacaaatgtacagttgctgcattccacatgatgaagctgtaaacaatttactgttactaatgcactcctgatcaacttcatctgctactgagaaaaatagtatgacgtgctttagcacagagatacgagactgaaggtatacctaaaggaacagtagttagtgttgcagtctaacataaaaatgcatttgcttttctatcttcagtatgyaatagatatttgaagagacacttctgttgagttgctaaaaaaatgaaacgaacataattttagtgagagagggtcaagatcttaaatatatatatatgtttgtatacaaagtgacactggatttggtgtatgggattgtaccaatttgtaattagtaatcgctctatgctagaggcatcatctcctcactcaagatatgatccagtactgttggccagccaacttttggcttctttactaaaatgttcaacaacatactctattgcagtagtagtgtcttttatttgaacgattgtccac

SEQ ID NO: 44050 - DNA, 600 bp, Chicken  19866894282436_1
gcatttagtaaaaagcatttaagaaaccacataatcttggagatggtagataaaaatatattgggactaagatattcatatggtaaagaaagagagaaaaagagagtttgtgaattgttaacctagtctggtagataaatataatcataatagaagacttaaaagagaagtttcattctaccaaaagcaaaaatattttattgaatgcaaataattgcagaattgaatttattgccaaatatacgtgtatgtatgtatatatatctgtttgtatgtatgtatgtattagcatgtcttgayagaaggaattagtgatggtagaatattctttagatggaaaaataaaaagaataacccctttccacatattattaacatatcaagaaattgaggctaggtttagaatggacagctgtatgcaaattaagttttaccaaaccatgcactttctgcacagacsyaactgatttttgacatttttctcatccagactgcatagtgtcagtgcgcactgtcttgggctatccatcatcttcacatcattaatatcttcattgtcttttctaagatctgatcactgactggaatctgaaacagcat

SEQ ID NO: 44051 - DNA, 600 bp, Chicken  19866894282436_2
aaaagagaagtttcattctaccaaaagcaaaaatattttattgaatgcaaataattgcagaattgaatttattgccaaatatacgtgtatgtatgtatatatatctgtttgtatgtatgtatgtattagcatgtcttgayagaaggaattagtgatggtagaatattctttagatggaaaaataaaaagaataacccctttccacatattattaacatatcaagaaattgaggctaggtttagaatggacagctgtatgcaaattaagttttaccaaaccatgcactttctgcacagacsyaactgatttttgacatttttctcatccagactgcatagtgtcagtgcgcactgtcttgggctatccatcatcttcacatcattaatatcttcattgtcttttctaagatctgatcactgactggaatctgaaacagcatttctgtaaaagtgaagcttcacactgtagtcaggctgattgtatctttctgcatgatgattctacaaaatttctaagtgtggcttattttctaaaacaatttcatctcagtagctgttcaggaagcttattgaaactacgtacataatttagatggaaga

SEQ ID NO: 44052 - DNA, 600 bp, Chicken  19866894282436_3
aaagagaagtttcattctaccaaaagcaaaaatattttattgaatgcaaataattgcagaattgaatttattgccaaatatacgtgtatgtatgtatatatatctgtttgtatgtatgtatgtattagcatgtcttgayagaaggaattagtgatggtagaatattctttagatggaaaaataaaaagaataacccctttccacatattattaacatatcaagaaattgaggctaggtttagaatggacagctgtatgcaaattaagttttaccaaaccatgcactttctgcacagacsyaactgatttttgacatttttctcatccagactgcatagtgtcagtgcgcactgtcttgggctatccatcatcttcacatcattaatatcttcattgtcttttctaagatctgatcactgactggaatctgaaacagcatttctgtaaaagtgaagcttcacactgtagtcaggctgattgtatctttctgcatgatgattctacaaaatttctaagtgtggcttattttctaaaacaatttcatctcagtagctgttcaggaagcttattgaaactacgtacataatttagatggaagag

SEQ ID NO: 44053 - DNA, 600 bp, Chicken  19866894282440_1
caaaaactgagacatctttgtctttgcacactaagaaggaggctgtgacagatgttcacacagaagaaccttctggaacatctttgtcagtttcattgccaccaaatagttccagagcaggatttggtgattccctagagaatgtgtcctcatcatctcttcccaaagacataacaggcaggatttcccatgggtcagtaagcattgtggaaagtgtgtccaaggaggaggctgtcctcagtcataagtctgagatattggaaaacttggaatacataaaatcagaggagaatgagcttsaagattctcatgttaagtctttggagcattctgatgtcttgttgacattagataaagaacacgagggatcacttaacatccttccagagaaaatcctccattccaaaaaygaaccctctctaaaggaaccttgttgtttgactgcggaaagccttcatggtgggaaagaagtcttagacaagagactggcagacaaggatgatgtaactgtcctagacgtagaagaatcttctcacaaactgagtatatcagcagaggaaaaagactatccgctttcagaacatctgtgtagtcaaaagg

SEQ ID NO: 44054 - DNA, 600 bp, Chicken  19866894282440_2
tccagagcaggatttggtgattccctagagaatgtgtcctcatcatctcttcccaaagacataacaggcaggatttcccatgggtcagtaagcattgtggaaagtgtgtccaaggaggaggctgtcctcagtcataagtctgagatattggaaaacttggaatacataaaatcagaggagaatgagcttsaagattctcatgttaagtctttggagcattctgatgtcttgttgacattagataaagaacacgagggatcacttaacatccttccagagaaaatcctccattccaaaaaygaaccctctctaaaggaaccttgttgtttgactgcggaaagccttcatggtgggaaagaagtcttagacaagagactggcagacaaggatgatgtaactgtcctagacgtagaagaatcttctcacaaactgagtatatcagcagaggaaaaagactatccgctttcagaacatctgtgtagtcaaaaggagtcatcatacattgaagactttgaaggatcctcctccaagaaacagccatcaattgaagaagcacttactgtggaagaatacaaagatgattttgaagcatctgttctc

SEQ ID NO: 44055 - DNA, 600 bp, Chicken  19866894282449_1
ggtaaccttcttgttactctttatgtccatagccaactttagttctacctctgcctacgtgcctaggcatgattccatgcctacgttcctgtgccatatccctatgaactttccagaatgcatgttcatgcctccactgccaatgcatttccttttggtgttttcatagattcatagaatatcctactttaatagcctatttactaccctttataattgcagacgaggctgaatttctttccatctgctgaaagagtaagtgcacatgaaggtaccatgactttgttgatatactaggayttttttttttttaagctgctgtcatttgaatgtatgttattgcctctaaattgctccagggtacatgtgcaaattttacttatgaatgatcctgttgacttcactgtattggaatttacctatttgtattccctgcttctctgataatagacacataatagtatcgttaacatattaagtggctgattggtaaaaagccaacttaggcagtagagagtgagctctgatatttgatgttcacagattggtgaaaatgcttgtcagtgatctgcttcatctgcatttagttctattggctgg

SEQ ID NO: 44056 - DNA, 600 bp, Chicken  19866894282449_2
gtaaccttcttgttactctttatgtccatagccaactttagttctacctctgcctacgtgcctaggcatgattccatgcctacgttcctgtgccatatccctatgaactttccagaatgcatgttcatgcctccactgccaatgcatttccttttggtgttttcatagattcatagaatatcctactttaatagcctatttactaccctttataattgcagacgaggctgaatttctttccatctgctgaaagagtaagtgcacatgaaggtaccatgactttgttgatatactaggatytttttttttttaagctgctgtcatttgaatgtatgttattgcctctaaattgctccagggtacatgtgcaaattttacttatgaatgatcctgttgacttcactgtattggaatttacctatttgtattccctgcttctctgataatagacacataatagtatcgttaacatattaagtggctgattggtaaaaagccaacttaggcagtagagagtgagctctgatatttgatgttcacagattggtgaaaatgcttgtcagtgatctgcttcatctgcatttagttctattggctggg

SEQ ID NO: 44057 - DNA, 600 bp, Chicken  19866894282450_1
ctggcaggggggttggagattcatgatacttgatgtcccttccaacccagcccatcctgtgattctgtgattctgtatctacttttattgagtggaaaaagaaacaaaccttaagattttatgagacaatatgcattaaaaaaaaatagaaggataatcaaagtgtgctaatgcaaccattaaggtttctcaataaaacgaatagactttatcagaattgcaagactccagtattcaagcactgttatcaacttttgtgttttataaccttgtcaggtaatttacagcaatgcttgatcyggtcattaaaaacttagcttatgcaatgaagcttggataggatttaccaagagttgttagtaggtcttactaaattttacctggcaatagagacatttttactgtgaaggtgatcaaacactgggacagacttcctagaagagtgattgatgcctcaggctggttggtgttcaagaggcatttggataacgcccttaacagcgtttgtgggtgtttttgtcagccctgaagttgtcaggcagcagtactccttgatatttgtaggctccttccaaaagaaccattttaattctaattata

SEQ ID NO: 44058 - DNA, 600 bp, Chicken  19866894282454_1
gttgtagcttttttttttgtttgttttttttggcatggagttctcatggtgtgtgtagaattaccagctgaagatgtgttcagtatgagcgtggtatgatgttctgtgggcgtgcaggcctagcaggcccaggaggaggcccagcaggcctggagcaggccggagagagaggcccaacaggccgggagcagaccagggaggcctagcaggcccagcaggcccaacaggtctcctctgcgttccaggagctcagtgctgtgctgtgccacacggctccatgattgctccaggttcatcccmcacagccttcacaaaccacatgcgcagttggctgaccaggactcactggcatagacagccactcctttccctcacaaaggagcgatcagtgtggggaggaagtgttttgaaccaaagaagcttttataagggggaaaaaccgtgtggacacgccgccatccagccctggcaggctgtttgtggggagctttgctgtaacagggcggttactgatgcctctgctcagctcgtctgacaccaygaaccacagatgggattcagagaacataaaagggaaacggagcagaaagataccacaaa

SEQ ID NO: 44059 - DNA, 600 bp, Chicken  19866894282454_10
acatttyaaatagtgaagtgtaagcacactgtttccgtttgctgtttcagacttgtttttttgctatttttccaagattcacgcagacaggcataacttttacttggctcatggcacrtctcttattagagctattgttctgcttgggctttggtcctggcaaggaacagcaatttgcctcatggtattttcatctgttccttgttcccttttcatatggtacctaatccacagatggctatcctgttgttttcattcagcgtgatcgatgtcagccccagtgttgctgacatgcmcccmttggcatccatttgtaagcagatgattacaggacattgttttcaaaatggggagaaaataattagcaggagaaacggtggaggtacatggaggatgatgctctccaggtctgcttctggctcttggagcgtgaagttcttatcgatagattagagagggttatcttagggaagtgcaatgttaggagttcacggcttttcctttgtggttctgtttctatcagggtgattttgggtacctgggcagctgcccagcaggcgggtgcctggggtttgcacagggccgtgtgctgacttcgtg

SEQ ID NO: 44060 - DNA, 600 bp, Chicken  19866894282454_2
ccaggagctcagtgctgtgctgtgccacacggctccatgattgctccaggttcatcccmcacagccttcacaaaccacatgcgcagttggctgaccaggactcactggcatagacagccactcctttccctcacaaaggagcgatcagtgtggggaggaagtgttttgaaccaaagaagcttttataagggggaaaaaccgtgtggacacgccgccatccagccctggcaggctgtttgtggggagctttgctgtaacagggcggttactgatgcctctgctcagctcgtctgacaccaygaaccacagatgggattcagagaacataaaagggaaacggagcagaaagataccacaaagggattaaatgaggtagtaagcagtgacccagaaccttcacggaagatcttatgatagttttattttaagcatgtcartttctaagtgtaactgcttttttcccacaagatgaaattatctttcctcagttagaattgctctgaggttttaatggtggtggtgtccataagtgccttctgtttacatgtaaacaggaaacttgctaggtcttgccacagtcagcagctttgtttccagtaa

SEQ ID NO: 44061 - DNA, 600 bp, Chicken  19866894282454_3
ggagcgatcagtgtggggaggaagtgttttgaaccaaagaagcttttataagggggaaaaaccgtgtggacacgccgccatccagccctggcaggctgtttgtggggagctttgctgtaacagggcggttactgatgcctctgctcagctcgtctgacaccaygaaccacagatgggattcagagaacataaaagggaaacggagcagaaagataccacaaagggattaaatgaggtagtaagcagtgacccagaaccttcacggaagatcttatgatagttttattttaagcatgtcartttctaagtgtaactgcttttttcccacaagatgaaattatctttcctcagttagaattgctctgaggttttaatggtggtggtgtccataagtgccttctgtttacatgtaaacaggaaacttgctaggtcttgccacagtcagcagctttgtttccagtaaagcatgaaagtttgtggatgaaatactgcagattatttaagatgcacaaatggcttgtggtcgttacctgagatgagtcatgttcttttctccttgaaaacctggatgaggcagtttggttttctggattgttcagc

SEQ ID NO: 44062 - DNA, 600 bp, Chicken  19866894282454_4
tggtgtccataagtgccttctgtttacatgtaaacaggaaacttgctaggtcttgccacagtcagcagctttgtttccagtaaagcatgaaagtttgtggatgaaatactgcagattatttaagatgcacaaatggcttgtggtcgttacctgagatgagtcatgttcttttctccttgaaaacctggatgaggcagtttggttttctggattgttcagctcttgaaagcctatggaaaaaatacatatttaatagtatgtatttaatccctgatacttgatgtgttagggaatgtaggygtgctggtttctggtcctctgttttggccaccagctggaagwagggatggtggtattaatattgaagaaatgcaggtgcaaattaaggtkcttgtttgggcccctctggccatctggtcccagttttcaggtacccacagtctcattttggccaattctggtttgcatgtgttagtatataactgcacagactgttttcacacatggtaacctatgttgttctgaaggtaattagctaacatggatcaataacttacacggttgatttttggcatatttctctttggtcttggtagacag

SEQ ID NO: 44063 - DNA, 600 bp, Chicken  19866894282454_5
ttgctaggtcttgccacagtcagcagctttgtttccagtaaagcatgaaagtttgtggatgaaatactgcagattatttaagatgcacaaatggcttgtggtcgttacctgagatgagtcatgttcttttctccttgaaaacctggatgaggcagtttggttttctggattgttcagctcttgaaagcctatggaaaaaatacatatttaatagtatgtatttaatccctgatacttgatgtgttagggaatgtaggygtgctggtttctggtcctctgttttggccaccagctggaagwagggatggtggtattaatattgaagaaatgcaggtgcaaattaaggtkcttgtttgggcccctctggccatctggtcccagttttcaggtacccacagtctcattttggccaattctggtttgcatgtgttagtatataactgcacagactgttttcacacatggtaacctatgttgttctgaaggtaattagctaacatggatcaataacttacacggttgatttttggcatatttctctttggtcttggtagacagcaaggtgctttgttttattttaatggccctgtacctttaaga

SEQ ID NO: 44064 - DNA, 600 bp, Chicken  19866894282454_6
aagtttgtggatgaaatactgcagattatttaagatgcacaaatggcttgtggtcgttacctgagatgagtcatgttcttttctccttgaaaacctggatgaggcagtttggttttctggattgttcagctcttgaaagcctatggaaaaaatacatatttaatagtatgtatttaatccctgatacttgatgtgttagggaatgtaggygtgctggtttctggtcctctgttttggccaccagctggaagwagggatggtggtattaatattgaagaaatgcaggtgcaaattaaggtkcttgtttgggcccctctggccatctggtcccagttttcaggtacccacagtctcattttggccaattctggtttgcatgtgttagtatataactgcacagactgttttcacacatggtaacctatgttgttctgaaggtaattagctaacatggatcaataacttacacggttgatttttggcatatttctctttggtcttggtagacagcaaggtgctttgttttattttaatggccctgtacctttaagaagtgttatcagagagtatgattttagatggttacctattctttaacca

SEQ ID NO: 44065 - DNA, 600 bp, Chicken  19866894282454_7
tgggcccctctggccatctggtcccagttttcaggtacccacagtctcattttggccaattctggtttgcatgtgttagtatataactgcacagactgttttcacacatggtaacctatgttgttctgaaggtaattagctaacatggatcaataacttacacggttgatttttggcatatttctctttggtcttggtagacagcaaggtgctttgttttattttaatggccctgtacctttaagaagtgttatcagagagtatgattttagatggttacctattctttaaccacatttyaaatagtgaagtgtaagcacactgtttccgtttgctgtttcagacttgtttttttgctatttttccaagattcacgcagacaggcataacttttacttggctcatggcacrtctcttattagagctattgttctgcttgggctttggtcctggcaaggaacagcaatttgcctcatggtattttcatctgttccttgttcccttttcatatggtacctaatccacagatggctatcctgttgttttcattcagcgtgatcgatgtcagccccagtgttgctgacatgcmcccmttggcat

SEQ ID NO: 44066 - DNA, 600 bp, Chicken  19866894282454_8
taacctatgttgttctgaaggtaattagctaacatggatcaataacttacacggttgatttttggcatatttctctttggtcttggtagacagcaaggtgctttgttttattttaatggccctgtacctttaagaagtgttatcagagagtatgattttagatggttacctattctttaaccacatttyaaatagtgaagtgtaagcacactgtttccgtttgctgtttcagacttgtttttttgctatttttccaagattcacgcagacaggcataacttttacttggctcatggcacrtctcttattagagctattgttctgcttgggctttggtcctggcaaggaacagcaatttgcctcatggtattttcatctgttccttgttcccttttcatatggtacctaatccacagatggctatcctgttgttttcattcagcgtgatcgatgtcagccccagtgttgctgacatgcmcccmttggcatccatttgtaagcagatgattacaggacattgttttcaaaatggggagaaaataattagcaggagaaacggtggaggtacatggaggatgatgctctccaggtctgcttctg

SEQ ID NO: 44067 - DNA, 600 bp, Chicken  19866894282454_9
aaccacatttyaaatagtgaagtgtaagcacactgtttccgtttgctgtttcagacttgtttttttgctatttttccaagattcacgcagacaggcataacttttacttggctcatggcacrtctcttattagagctattgttctgcttgggctttggtcctggcaaggaacagcaatttgcctcatggtattttcatctgttccttgttcccttttcatatggtacctaatccacagatggctatcctgttgttttcattcagcgtgatcgatgtcagccccagtgttgctgacatgcmcccmttggcatccatttgtaagcagatgattacaggacattgttttcaaaatggggagaaaataattagcaggagaaacggtggaggtacatggaggatgatgctctccaggtctgcttctggctcttggagcgtgaagttcttatcgatagattagagagggttatcttagggaagtgcaatgttaggagttcacggcttttcctttgtggttctgtttctatcagggtgattttgggtacctgggcagctgcccagcaggcgggtgcctggggtttgcacagggccgtgtgctgactt

SEQ ID NO: 44068 - DNA, 600 bp, Chicken  19866894282462_1
tccgtaatttacagacaaaccccttcccctcttgcccagtgtaaaaaacaactgcaggcagaagctccatatattcatatactgccttgttctctacggacttaggaaatccaattctccaaaaggttttcagaggaggaatttcttttttcctggctgctgctggctgtgcaatgacctgagtgagtctagatctattcttcatctggcccctactccagttgtcctttggctgctttgctttctcttctccatttttagttcatttccataatgcatttcttgctcttttctgctccrtggcatattttcttcctgaggaagcagcgtattctgtacgccggatgttgtctgcatgctcctgttggcgtgaagccytctgtccccttgagcttctgctggggaggggcacatcatttgtgtgtgcagatggaaatatttttattgctgatttctttttttttggtgctgcattagatatcatccctcacgtgtccttgagccttcagaagagatatggggactgactgcttctgatgcactgattttatagcatcatttattttccctgaattacctctgcctggtcctgtaacaccg

SEQ ID NO: 44069 - DNA, 550 bp, Chicken  19866894282462_2
atactgccttgttctctacggacttaggaaatccaattctccaaaaggttttcagaggaggaatttcttttttcctggctgctgctggctgtgcaatgacctgagtgagtctagatctattcttcatctggcccctactccagttgtcctttggctgctttgctttctcttctccatttttagttcatttccataatgcatttcttgctcttttctgctccrtggcatattttcttcctgaggaagcagcgtattctgtacgccggatgttgtctgcatgctcctgttggcgtgaagccytctgtccccttgagcttctgctggggaggggcacatcatttgtgtgtgcagatggaaatatttttattgctgatttctttttttttggtgctgcattagatatcatccctcacgtgtccttgagccttcagaagagatatggggactgactgcttctgatgcactgattttatagcatcatttattttccctgaattacctctgcctggtcctgtaacaccgcagctggcactgcaattctcatatccat

SEQ ID NO: 44070 - DNA, 599 bp, Chicken  19866894282469_1
  misc_feature (1)..(166): n is any nucleotide
nnnnnnnnnnnnnnnnnnnnnnnnnnnnnnnnnnnnnnnnnnnnnnnnnnnnnnnnnnnnnnnnnnnnnnnnnnnnnnnnnnnnnnnnnnnnnnnnnnnnnnnnnnnnnnnnnnnnnnnnnnnnnnnnnnnnnnnnnnnnnnnnnnnnnnnnnnnnnnnnnnnnnncgcttccctgcatgggaaggttttggtgatggggagaggtgcagcaggcacacggcacaggagacagtcagtcccagagggacaaaggcacagggtcatctcagagccctggacacgtcctgcacccattccaygtgtggaagagcagcgacagcctgggacaggcagaagagcaggtcagagccccaccagcagttgaagttaatcagaaatgagtatctatttccctgctgtgcccttgacggtctcctccagcacttccaggtgcgtgcagtgagatcagtgcacaagcagctcattgctacagacaagaggttccacggccagaaaccgtccccagctctgctccagcaaacaggagagaagctgcttcctggagctgcccttccatttaccaggaggggagagcaacagtgcaatacttgcagtgtca

SEQ ID NO: 44071 - DNA, 600 bp, Chicken  19866894282472_1
ccttgaaaaaatacgtaatcataaaaatttacagaagctgataccttgcaaggtgtgttataacagtgatattgtaggacaaaactgttattatatggaaaggtccttcagacatataattggtgaatttctagatagaagtgaagcaactaaacaagggcacacacatcagacatcacaaaagaggtaataatgagaaagctgggaaaaatcaaaatgaataagttagtattcttttttttttccctatacttcttactctttgaagtccaagatgtattaactatttagtccacattwtaaggtttgttgacttgctgttcatttctgagtagatgctaattgatattgatctcagagccttgtttagtatgatttcctagggaacaaattattctaaggtgatacatctggagtgaattgtggtcctgaaggcagaatcagtatatgaaggaaagtttgaaccaccagcttttctttgaagtacactgtagttagaaaagattaatttagaagtcagatgttaagaagtaggaacaagacacgtactagagggtggtaatgataggagctgtgatggatattgttcccaacattaaa

SEQ ID NO: 44072 - DNA, 600 bp, Chicken  19866894282479_1
aactgagatgcctgtttgtacttcacctcagaaatgaatgatcttttccaaaactggtgaaacaagatgaaaatcatccaagaatgacccttaatattgccacacatgcccagttcaaacttactttacaagatcttttttaaacatccctgaacctgtaggttgcttactctaatcataggaaagcaggtgtcaggataggcatttctccacataaatcatgttgagcaactctaaagttgacatgctagagacaaatgatggacaaggagcagtctattgtgtatttggctaggtagygtgtgttgagrgacacagggttactcggcaataatcttaacagtgtgtgttggcctaattgttgcacgaattgcacaaatatttttattaacacagactgtaaggaaaacaattagaaaggatgaaaaatggcttgaactcagccagccctgcagttaacacaggacaatgggaaagtcatgggcttgcaggagtctggttcagcttcctgcggggcctactgaactggttgggaatatcagagccaaaagtctgacaatcaagaagcacaaatgaattctggctgcatcagcaggactg

SEQ ID NO: 44073 - DNA, 600 bp, Chicken  19866894282479_2
ctgtttgtacttcacctcagaaatgaatgatcttttccaaaactggtgaaacaagatgaaaatcatccaagaatgacccttaatattgccacacatgcccagttcaaacttactttacaagatcttttttaaacatccctgaacctgtaggttgcttactctaatcataggaaagcaggtgtcaggataggcatttctccacataaatcatgttgagcaactctaaagttgacatgctagagacaaatgatggacaaggagcagtctattgtgtatttggctaggtagygtgtgttgagrgacacagggttactcggcaataatcttaacagtgtgtgttggcctaattgttgcacgaattgcacaaatatttttattaacacagactgtaaggaaaacaattagaaaggatgaaaaatggcttgaactcagccagccctgcagttaacacaggacaatgggaaagtcatgggcttgcaggagtctggttcagcttcctgcggggcctactgaactggttgggaatatcagagccaaaagtctgacaatcaagaagcacaaatgaattctggctgcatcagcaggactgtcttttcagtg

SEQ ID NO: 44074 - DNA, 600 bp, Chicken  19866894282479_3
ggtttgtcaatttatagccatatttttcactttatccttgagggaaagtccacagtcatccaaacatggctggacttcttggtgaaaccttttctcctcgtactgcagcccctggcaaatcagtgagagaagagacccatactcctgaaatcactaccagctgggcaatgctcactgcccagggtgagatcaaaatccagctcccagcaacaatctctttaggactattgatgtagaggccaccctgcaagctccacagaccagctggtcccagattgccctgttccaacatgcagctgkctcatccatatttttyctgtcaagaagaatattagatagatagctcctgatgtctgagacaaagtgttttcttttgtaggctttgcagcccatcagagtcccaatacttgaaggacggaaacactggtagctcaaacagatgcactgaacacatgtataccacaaggaggaagcactgtcaatttgtgctgcaaaaaatgccacctcctgtagctcacagtatcctttgtttccctatatataagtaaaccaggctcattttagttaccctggagttctgtttatcctattaytgtatta

SEQ ID NO: 44075 - DNA, 600 bp, Chicken  19866894282479_4
gccatatttttcactttatccttgagggaaagtccacagtcatccaaacatggctggacttcttggtgaaaccttttctcctcgtactgcagcccctggcaaatcagtgagagaagagacccatactcctgaaatcactaccagctgggcaatgctcactgcccagggtgagatcaaaatccagctcccagcaacaatctctttaggactattgatgtagaggccaccctgcaagctccacagaccagctggtcccagattgccctgttccaacatgcagctgkctcatccatatttttyctgtcaagaagaatattagatagatagctcctgatgtctgagacaaagtgttttcttttgtaggctttgcagcccatcagagtcccaatacttgaaggacggaaacactggtagctcaaacagatgcactgaacacatgtataccacaaggaggaagcactgtcaatttgtgctgcaaaaaatgccacctcctgtagctcacagtatcctttgtttccctatatataagtaaaccaggctcattttagttaccctggagttctgtttatcctattaytgtattaaccattttgcattgca

SEQ ID NO: 44076 - DNA, 600 bp, Chicken  19866894282479_5
cagctgkctcatccatatttttyctgtcaagaagaatattagatagatagctcctgatgtctgagacaaagtgttttcttttgtaggctttgcagcccatcagagtcccaatacttgaaggacggaaacactggtagctcaaacagatgcactgaacacatgtataccacaaggaggaagcactgtcaatttgtgctgcaaaaaatgccacctcctgtagctcacagtatcctttgtttccctatatataagtaaaccaggctcattttagttaccctggagttctgtttatcctattaytgtattaaccattttgcattgcaataggygcaggctggcccaggtccttccttccaattccagggctgtaacaagatgtgctcacttatgtccttcttatgactgtttgaatgtctcctcacagcacagattttctgtactgcatttcaggactagcagttcttctcttccaaagccaaactgcttattgaggtgaaatttcattgagacttctgtgggcattatagatatccatcagtaggaaggggcacagacttttctggacaagagggagaagtcactggctcatgtatatgagga

SEQ ID NO: 44077 - DNA, 600 bp, Chicken  19866894282479_6
agaagaatattagatagatagctcctgatgtctgagacaaagtgttttcttttgtaggctttgcagcccatcagagtcccaatacttgaaggacggaaacactggtagctcaaacagatgcactgaacacatgtataccacaaggaggaagcactgtcaatttgtgctgcaaaaaatgccacctcctgtagctcacagtatcctttgtttccctatatataagtaaaccaggctcattttagttaccctggagttctgtttatcctattaytgtattaaccattttgcattgcaataggygcaggctggcccaggtccttccttccaattccagggctgtaacaagatgtgctcacttatgtccttcttatgactgtttgaatgtctcctcacagcacagattttctgtactgcatttcaggactagcagttcttctcttccaaagccaaactgcttattgaggtgaaatttcattgagacttctgtgggcattatagatatccatcagtaggaaggggcacagacttttctggacaagagggagaagtcactggctcatgtatatgaggacaagtgactgctagatcacatttaattgg

SEQ ID NO: 44078 - DNA, 600 bp, Chicken  19866894282480_1
gttcacatccccattccatcctcaattactcaatgttcttgaagatttgatcttgcctcatctctctcctccccgtgtttgctgcaccatgatagggtattctagttcctaaatatatctgctccaattgactggccaaaaagaacagttattctttctcagaacacaccattagggacctgtctgccaattttcacaaaatatcagttatctgaaagatgcctcctcttaaaacagttttgctatatgctgttcaatatatcaaaaggtagagagggatgtggggttggtagggaagaraaggactgccagacacttggacagacaaggtgatggcagaagtctcttcaggaaaacaggctcaaagcttcaaamttatyttttctcagaagcaaaacattctctctatgggtaagagtcagctagctttaaagattttcacaatcagaaactcaccagtttaaggcatgtaattgcagtaaaattaccactgtgtacttatataaacgtttcccacctttcagtgagcaagcttggccctcaaaagtagagctctgygctgtcaaagctttgctgagcagtcttgctaccttgagcata

SEQ ID NO: 44079 - DNA, 600 bp, Chicken  19866894282480_2
tgtttgctgcaccatgatagggtattctagttcctaaatatatctgctccaattgactggccaaaaagaacagttattctttctcagaacacaccattagggacctgtctgccaattttcacaaaatatcagttatctgaaagatgcctcctcttaaaacagttttgctatatgctgttcaatatatcaaaaggtagagagggatgtggggttggtagggaagaraaggactgccagacacttggacagacaaggtgatggcagaagtctcttcaggaaaacaggctcaaagcttcaaamttatyttttctcagaagcaaaacattctctctatgggtaagagtcagctagctttaaagattttcacaatcagaaactcaccagtttaaggcatgtaattgcagtaaaattaccactgtgtacttatataaacgtttcccacctttcagtgagcaagcttggccctcaaaagtagagctctgygctgtcaaagctttgctgagcagtcttgctaccttgagcatattctgcagcctgaactgaaatactgcagatacttgaccagctagcaagagctagacctggtgttatctacacaag

SEQ ID NO: 44080 - DNA, 600 bp, Chicken  19866894282480_3
gctgcaccatgatagggtattctagttcctaaatatatctgctccaattgactggccaaaaagaacagttattctttctcagaacacaccattagggacctgtctgccaattttcacaaaatatcagttatctgaaagatgcctcctcttaaaacagttttgctatatgctgttcaatatatcaaaaggtagagagggatgtggggttggtagggaagaraaggactgccagacacttggacagacaaggtgatggcagaagtctcttcaggaaaacaggctcaaagcttcaaamttatyttttctcagaagcaaaacattctctctatgggtaagagtcagctagctttaaagattttcacaatcagaaactcaccagtttaaggcatgtaattgcagtaaaattaccactgtgtacttatataaacgtttcccacctttcagtgagcaagcttggccctcaaaagtagagctctgygctgtcaaagctttgctgagcagtcttgctaccttgagcatattctgcagcctgaactgaaatactgcagatacttgaccagctagcaagagctagacctggtgttatctacacaagctgca

SEQ ID NO: 44081 - DNA, 600 bp, Chicken  19866894282480_4
atatcaaaaggtagagagggatgtggggttggtagggaagaraaggactgccagacacttggacagacaaggtgatggcagaagtctcttcaggaaaacaggctcaaagcttcaaamttatyttttctcagaagcaaaacattctctctatgggtaagagtcagctagctttaaagattttcacaatcagaaactcaccagtttaaggcatgtaattgcagtaaaattaccactgtgtacttatataaacgtttcccacctttcagtgagcaagcttggccctcaaaagtagagctctgygctgtcaaagctttgctgagcagtcttgctaccttgagcatattctgcagcctgaactgaaatactgcagatacttgaccagctagcaagagctagacctggtgttatctacacaagctgcaatcataaccctaactgcagcataggcatacacygagccatgcctggaatccactttttcccctcacaaacttttgtactgtccagcaaccactgtgaactctgatgttttgaacaagttgaccaagatggctttaaaattaaggcactgtgatagctgttacattacttctagtttta

SEQ ID NO: 44082 - DNA, 568 bp, Chicken  19866894282480_5
aagagtcagctagctttaaagattttcacaatcagaaactcaccagtttaaggcatgtaattgcagtaaaattaccactgtgtacttatataaacgtttcccacctttcagtgagcaagcttggccctcaaaagtagagctctgygctgtcaaagctttgctgagcagtcttgctaccttgagcatattctgcagcctgaactgaaatactgcagatacttgaccagctagcaagagctagacctggtgttatctacacaagctgcaatcataaccctaactgcagcataggcatacacygagccatgcctggaatccactttttcccctcacaaacttttgtactgtccagcaaccactgtgaactctgatgttttgaacaagttgaccaagatggctttaaaattaaggcactgtgatagctgttacattacttctagttttatggtatttaatgtgaaaaaaaatcatatgcaggacatgtaaaaggcacagtttaaaaataacacgatcaaaggcaatacagacctttgcacactgctctgctcacctgcctcctctctgcatt

SEQ ID NO: 44083 - DNA, 599 bp, Chicken  19866894282481_1
  misc_feature (1)..(24): n is any nucleotide
nnnnnnnnnnnnnnnnnnnnnnnnaagaaagaagtcaatatggcagtccatgttgtgcacaaaataaggcagagtagggttccaaagaacctgattgctttttccttcagcatgtcagcgttgtaggtgcaaggacttctgctaaggaaaagttttattttctccttgctgatgcaaagtggtaccacctgctgggaccttccagcttgattcatgggactctcgcatttcctgagaagaccagaacagtggccagtctcctgcaaaggaccagtttcctctgagcatactcattaaagyctattgtggtacttacacatggtttagtgggctgtattggtggtaggtggacagttggcctggatgatcttggaggtcttttcaaaccttaatggttctatgattacatttcacatttgagaaatgcttgccaagcacgcaggttttggtgccagctctcccaagctttgcagaggtttgggcactggaggacatccaagcacaggcaaagtagctcttagtggattacagaagtgatgtatcacagggctctcgagatcatgttttggctatgtgagaatggatacagatttctcggt

SEQ ID NO: 44084 - DNA, 600 bp, Chicken  19866894282484_1
agagctgctataagcctggggacaacccagaccccccttctcacaacttcaacagaaccgtttgcttttattttgctttgaagaatcggagtaacaaaaacccagcatcggaaccaagcgtgggctttgttctgcttttgttaattttagtgcccacgcatgcaaacgatggatgagagtcaatattgactttccgccgcagaaagcacccgggttcattgactgtggtggggccgggcttcacattcacaccctgagcgagcagagagcagaaggagctggggagcagagcatcactcrtgcaaaatcaccaccattcacactgcagcgacctgaccccaaaagaagctccctaccaaagcctggtggcgccagggggaatcgaggagccctgcgctgggaagtccccaagcatcattagtagggaagggaaagaggggacttcccagggcggatggggaaccccacagcgctgtgtgctgtggccgaacctgctgcctttataaagggggtgttcgtgcccagggctgagttgcaatgcagtcacagcacagttgatgcttgtccaggatctgggctccctcccattgcattccttgg

SEQ ID NO: 44085 - DNA, 599 bp, Chicken  19866894282491_1
  misc_feature (1)..(171): n is any nucleotide
nnnnnnnnnnnnnnnnnnnnnnnnnnnnnnnnnnnnnnnnnnnnnnnnnnnnnnnnnnnnnnnnnnnnnnnnnnnnnnnnnnnnnnnnnnnnnnnnnnnnnnnnnnnnnnnnnnnnnnnnnnnnnnnnnnnnnnnnnnnnnnnnnnnnnnnnnnnnnnnnnnnnnnnnnnnattttatttcagtaataaattaatgaaaggatatttgaataccaatggactagactgctgcctattttcaactaacataaaccagcagtctgtttactacaagttctacatgctcaggtaagtttcatstcaaacacagtcatttagaaaactgctttgataaactgggtcacatgcacaaaaaaaaatacataaaattaaaaatagcccattgaagcaaagatgacacgtgaaagcgagarcactacacaataaacatttcagaaataatttacttttatctaagtgtcaggcttaatgcagaaccccatttaactttctctcactggttttggtaaaactaaagacactaaagtgctaaagaactaggttaaagattccctctccagatctcagcatggagaactattttacagtattattttaat

SEQ ID NO: 44086 - DNA, 599 bp, Chicken  19866894282491_2
  misc_feature (1)..(58): n is any nucleotide
nnnnnnnnnnnnnnnnnnnnnnnnnnnnnnnnnnnnnnnnnnnnnnnnnnnnnnnnnnattttatttcagtaataaattaatgaaaggatatttgaataccaatggactagactgctgcctattttcaactaacataaaccagcagtctgtttactacaagttctacatgctcaggtaagtttcatstcaaacacagtcatttagaaaactgctttgataaactgggtcacatgcacaaaaaaaaatacataaaattaaaaatagcccattgaagcaaagatgacacgtgaaagcgagarcactacacaataaacatttcagaaataatttacttttatctaagtgtcaggcttaatgcagaaccccatttaactttctctcactggttttggtaaaactaaagacactaaagtgctaaagaactaggttaaagattccctctccagatctcagcatggagaactattttacagtattattttaataaatcgaaacatactcagcatctcagaatgcagctccatgctttaccagttatgggaccggcaactccaggtggactgttcagctgactacaatattatccagcttcaacaat

SEQ ID NO: 44087 - DNA, 599 bp, Chicken  19866894282500_1
  misc_feature (1)..(90): n is any nucleotide
nnnnnnnnnnnnnnnnnnnnnnnnnnnnnnnnnnnnnnnnnnnnnnnnnnnnnnnnnnnnnnnnnnnnnnnnnnnnnnnnnnnnnnnnnnttacatgtaaaattctaccagaatgctatgctttaatctttttaagatacagctagctcctatgttaaactacccaaacgtataccactacaaaaatgcatagttaacatagctacttacatattttgcatttaactcctcttaattcaactactagttggcctccaaattgttctctgaatagcaaacccaaatgaaatgtttcatatkttaaatatgtattgtctgaatgcaacgtagttgtaacaagacatttccctgaaattgaaccacgttatactacytgcttcaaaacttaaaactgttcccttccacattaggaaaagcaaacaacactgcaaaatgggsccttaaaatataagctggtgacttctggagcacctasactcaaattgcttcttgatttcactgtatactaactttcayttgaatttcccttacccccacatttagaatcacaaatatcttactccttgggtatgcatttttgcattacaaagcctgtacaa

SEQ ID NO: 44088 - DNA, 599 bp, Chicken  19866894282500_2
  misc_feature (1)..(16): n is any nucleotide
nnnnnnnnnnnnnnnnttacatgtaaaattctaccagaatgctatgctttaatctttttaagatacagctagctcctatgttaaactacccaaacgtataccactacaaaaatgcatagttaacatagctacttacatattttgcatttaactcctcttaattcaactactagttggcctccaaattgttctctgaatagcaaacccaaatgaaatgtttcatatkttaaatatgtattgtctgaatgcaacgtagttgtaacaagacatttccctgaaattgaaccacgttatactacytgcttcaaaacttaaaactgttcccttccacattaggaaaagcaaacaacactgcaaaatgggsccttaaaatataagctggtgacttctggagcacctasactcaaattgcttcttgatttcactgtatactaactttcayttgaatttcccttacccccacatttagaatcacaaatatcttactccttgggtatgcatttttgcattacaaagcctgtacaagattaaaaagaaaccaaattcatcaccttccttcttcagatgaactgattataaatgaaacaatttgaacaagt

SEQ ID NO: 44089 - DNA, 600 bp, Chicken  19866894282500_3
acagctagctcctatgttaaactacccaaacgtataccactacaaaaatgcatagttaacatagctacttacatattttgcatttaactcctcttaattcaactactagttggcctccaaattgttctctgaatagcaaacccaaatgaaatgtttcatatkttaaatatgtattgtctgaatgcaacgtagttgtaacaagacatttccctgaaattgaaccacgttatactacytgcttcaaaacttaaaactgttcccttccacattaggaaaagcaaacaacactgcaaaatgggsccttaaaatataagctggtgacttctggagcacctasactcaaattgcttcttgatttcactgtatactaactttcayttgaatttcccttacccccacatttagaatcacaaatatcttactccttgggtatgcatttttgcattacaaagcctgtacaagattaaaaagaaaccaaattcatcaccttccttcttcagatgaactgattataaatgaaacaatttgaacaagtacaaagttacttgagatgcaggcttgtatattattttatctcatgttttgtatcagcagtctaat

SEQ ID NO: 44090 - DNA, 600 bp, Chicken  19866894282500_4
cactacaaaaatgcatagttaacatagctacttacatattttgcatttaactcctcttaattcaactactagttggcctccaaattgttctctgaatagcaaacccaaatgaaatgtttcatatkttaaatatgtattgtctgaatgcaacgtagttgtaacaagacatttccctgaaattgaaccacgttatactacytgcttcaaaacttaaaactgttcccttccacattaggaaaagcaaacaacactgcaaaatgggsccttaaaatataagctggtgacttctggagcacctasactcaaattgcttcttgatttcactgtatactaactttcayttgaatttcccttacccccacatttagaatcacaaatatcttactccttgggtatgcatttttgcattacaaagcctgtacaagattaaaaagaaaccaaattcatcaccttccttcttcagatgaactgattataaatgaaacaatttgaacaagtacaaagttacttgagatgcaggcttgtatattattttatctcatgttttgtatcagcagtctaatcctccttgtatgcctgccgtaaccagttttttgagta

SEQ ID NO: 44091 - DNA, 600 bp, Chicken  19866894282500_5
tgcatttaactcctcttaattcaactactagttggcctccaaattgttctctgaatagcaaacccaaatgaaatgtttcatatkttaaatatgtattgtctgaatgcaacgtagttgtaacaagacatttccctgaaattgaaccacgttatactacytgcttcaaaacttaaaactgttcccttccacattaggaaaagcaaacaacactgcaaaatgggsccttaaaatataagctggtgacttctggagcacctasactcaaattgcttcttgatttcactgtatactaactttcayttgaatttcccttacccccacatttagaatcacaaatatcttactccttgggtatgcatttttgcattacaaagcctgtacaagattaaaaagaaaccaaattcatcaccttccttcttcagatgaactgattataaatgaaacaatttgaacaagtacaaagttacttgagatgcaggcttgtatattattttatctcatgttttgtatcagcagtctaatcctccttgtatgcctgccgtaaccagttttttgagtagtctctttcctctctatgcccttaggaaagatgagttttgt

SEQ ID NO: 44092 - DNA, 600 bp, Chicken  19866894282509_1
gtcaaaggataagggatagatgatgagaagggaagagaaagattaattactttctggctgtcaggtgaagttggatgggggccctgggcaatctgaactagtacttgatctaggggctggcagtcctgctggtgcagggcgattggaacacggtgatccttgaggtcagggcattctatgattctgtgattttaaacactagggtacttctggtgcttgtggatgctgaaagggcagtaagtctccgttgttgagaaagtgtacagatatggtactacagaggacaaaacctttcctctyccacagtaakaytgttccaagtaacagtgtctgcacagtgtaaaaatgtttatcactttacaaagcagctgggcttggaagttagaaaaatcagttactacagaatggagttttcttctatttgtatttggtgcttatgctgcatgttttagcccttgagttgggaasttgctgaatggtggaagaaaggaggggacatttttagaaacgtatctccactcatagataatttgtatgttggacagtctctaaatgatttccagtctcagaggttctgtggttctgttcattgcaattact

SEQ ID NO: 44093 - DNA, 600 bp, Chicken  19866894282509_2
aagggatagatgatgagaagggaagagaaagattaattactttctggctgtcaggtgaagttggatgggggccctgggcaatctgaactagtacttgatctaggggctggcagtcctgctggtgcagggcgattggaacacggtgatccttgaggtcagggcattctatgattctgtgattttaaacactagggtacttctggtgcttgtggatgctgaaagggcagtaagtctccgttgttgagaaagtgtacagatatggtactacagaggacaaaacctttcctctyccacagtaakaytgttccaagtaacagtgtctgcacagtgtaaaaatgtttatcactttacaaagcagctgggcttggaagttagaaaaatcagttactacagaatggagttttcttctatttgtatttggtgcttatgctgcatgttttagcccttgagttgggaasttgctgaatggtggaagaaaggaggggacatttttagaaacgtatctccactcatagataatttgtatgttggacagtctctaaatgatttccagtctcagaggttctgtggttctgttcattgcaattactgattcagtat

SEQ ID NO: 44094 - DNA, 600 bp, Chicken  19866894282509_3
gggatagatgatgagaagggaagagaaagattaattactttctggctgtcaggtgaagttggatgggggccctgggcaatctgaactagtacttgatctaggggctggcagtcctgctggtgcagggcgattggaacacggtgatccttgaggtcagggcattctatgattctgtgattttaaacactagggtacttctggtgcttgtggatgctgaaagggcagtaagtctccgttgttgagaaagtgtacagatatggtactacagaggacaaaacctttcctctyccacagtaakaytgttccaagtaacagtgtctgcacagtgtaaaaatgtttatcactttacaaagcagctgggcttggaagttagaaaaatcagttactacagaatggagttttcttctatttgtatttggtgcttatgctgcatgttttagcccttgagttgggaasttgctgaatggtggaagaaaggaggggacatttttagaaacgtatctccactcatagataatttgtatgttggacagtctctaaatgatttccagtctcagaggttctgtggttctgttcattgcaattactgattcagtatca

SEQ ID NO: 44095 - DNA, 600 bp, Chicken  19866894282509_4
gggcattctatgattctgtgattttaaacactagggtacttctggtgcttgtggatgctgaaagggcagtaagtctccgttgttgagaaagtgtacagatatggtactacagaggacaaaacctttcctctyccacagtaakaytgttccaagtaacagtgtctgcacagtgtaaaaatgtttatcactttacaaagcagctgggcttggaagttagaaaaatcagttactacagaatggagttttcttctatttgtatttggtgcttatgctgcatgttttagcccttgagttgggaasttgctgaatggtggaagaaaggaggggacatttttagaaacgtatctccactcatagataatttgtatgttggacagtctctaaatgatttccagtctcagaggttctgtggttctgttcattgcaattactgattcagtatcactgccttcagtgcagctgctgggtggagaaaggacttctagatgcttactaagtttcttttgctttttaaagaaggaagttaatgaatttcccagttaaactgtatttgagcgtatttcatttaagcagtgttgtggccgaagagttacaactgac

SEQ ID NO: 44096 - DNA, 502 bp, Chicken  19866894282510_1
gatgcttccctttatatgaagggaaaataaattactggtctaaaagtgttcttataaattaaagatactgatgagtactgatgagattagatataccaacaggatccaactttcatgaacatttgaagaaacaaatgacgttttatattttaatcctgtgaaattcatttaaatacttttcacacatgatatacaaggaactatagtatttgatacagattttctagctttttgcatgggcttattcacagtatgtgcgtaactgaaatgtacaacaactttctgctatattcttaagtrtttgttgctgtttaaagaacagttactgatggtactaattcttgtcacctgaaaagggcagggattgatcaatctagggctgtaaaacttatttttaaatgccttttctctatacattttagttaacatcaattgtaccccttattgggctaattttcacaaaataaagtacaaaatatataattagtttgatattactaaa

SEQ ID NO: 44097 - DNA, 599 bp, Chicken  19866894282511_1
  misc_feature (1)..(3): n is any nucleotide
nnnctccagctctgggttcggagacttggaaagctcctggcaggcaggtgcagcccagtgcgtggcccgtggtgtgggagggggcacacagggtgctggggtgggcagagggtgttgggatggcctggagcagttgcaagaagctgtgataggggatatagtgagcagagacagagaaaagagcgtcctgggatggggtaggagctggcagcttctggtgacttgtgtgaaatccacagtgggcttcaatgagggatctcatgtggagcaaatagcagaattgcagtgctgctgcgtgaygttgctcygtgcgtccatcccgagcacaaagctgcccctctggccccgacacaaaggcaggaagaggtttcagcacacagagatgttcatcacacgctcgggagcagaggatgttggtgagaccagaagtctgcccgcaccacagttcaaaaggagcggagaaaaggggctgttgtgaagcgcagcggtgctgagccccacgttcccagggctgggagggctaaagtgggattggggctgagctgtgatgggaggggaaggctgggaatgcagccctggggcgcatcgggcacagagac

SEQ ID NO: 44098 - DNA, 600 bp, Chicken  19866894282511_2
gctctgggttcggagacttggaaagctcctggcaggcaggtgcagcccagtgcgtggcccgtggtgtgggagggggcacacagggtgctggggtgggcagagggtgttgggatggcctggagcagttgcaagaagctgtgataggggatatagtgagcagagacagagaaaagagcgtcctgggatggggtaggagctggcagcttctggtgacttgtgtgaaatccacagtgggcttcaatgagggatctcatgtggagcaaatagcagaattgcagtgctgctgcgtgaygttgctcygtgcgtccatcccgagcacaaagctgcccctctggccccgacacaaaggcaggaagaggtttcagcacacagagatgttcatcacacgctcgggagcagaggatgttggtgagaccagaagtctgcccgcaccacagttcaaaaggagcggagaaaaggggctgttgtgaagcgcagcggtgctgagccccacgttcccagggctgggagggctaaagtgggattggggctgagctgtgatgggaggggaaggctgggaatgcagccctggggcgcatcgggcacagagaccgacgcttt

SEQ ID NO: 44099 - DNA, 600 bp, Chicken  19866894282513_1
gaaggttctttttagcatgctggatactaaattctgaacaccacctgtgctatgagatgtgggttgctggtgtttcctagttagctgaatgatgcagcaatgaaacacgtcagttggaggccttgggggaatgtcccgagctgacacaagacacagagcctagacctggggctgaagtatgactcaagctgggagctctgtgtgcccgtgacctggatcttctagaagggcttgcctatgtcttgtctttcctcctgatgctactaaccagtcctcagttctcctctcatgctgctttgycagggatttttacccatctgttagcaggacggtgaaaatacaccaactgcagaatagttcgggctggaargaaccactgaacatcacctggtcctctygtcactcacctcccctttcatcccacccattgcaggatgtgctctggagttgtgtgaggttgctcagggcatggacagcccagctgtgaagccccaagcagaacatgaggttcacatgtggtctcaagtgctgagcagaggggagcagcttcctcccaaagctgcctttgctcgtgcagcccgctgtgccatcaacaagcac

SEQ ID NO: 44100 - DNA, 600 bp, Chicken  19866894282513_2
tgtttcctagttagctgaatgatgcagcaatgaaacacgtcagttggaggccttgggggaatgtcccgagctgacacaagacacagagcctagacctggggctgaagtatgactcaagctgggagctctgtgtgcccgtgacctggatcttctagaagggcttgcctatgtcttgtctttcctcctgatgctactaaccagtcctcagttctcctctcatgctgctttgycagggatttttacccatctgttagcaggacggtgaaaatacaccaactgcagaatagttcgggctggaargaaccactgaacatcacctggtcctctygtcactcacctcccctttcatcccacccattgcaggatgtgctctggagttgtgtgaggttgctcagggcatggacagcccagctgtgaagccccaagcagaacatgaggttcacatgtggtctcaagtgctgagcagaggggagcagcttcctcccaaagctgcctttgctcgtgcagcccgctgtgccatcaacaagcacgttctctttgctttaaaatgacctttctgcaccgactccatgttttgattcccatgaattaggaactgga

SEQ ID NO: 44101 - DNA, 600 bp, Chicken  19866894282513_3
aatgaaacacgtcagttggaggccttgggggaatgtcccgagctgacacaagacacagagcctagacctggggctgaagtatgactcaagctgggagctctgtgtgcccgtgacctggatcttctagaagggcttgcctatgtcttgtctttcctcctgatgctactaaccagtcctcagttctcctctcatgctgctttgycagggatttttacccatctgttagcaggacggtgaaaatacaccaactgcagaatagttcgggctggaargaaccactgaacatcacctggtcctctygtcactcacctcccctttcatcccacccattgcaggatgtgctctggagttgtgtgaggttgctcagggcatggacagcccagctgtgaagccccaagcagaacatgaggttcacatgtggtctcaagtgctgagcagaggggagcagcttcctcccaaagctgcctttgctcgtgcagcccgctgtgccatcaacaagcacgttctctttgctttaaaatgacctttctgcaccgactccatgttttgattcccatgaattaggaactggaacaatgctgtcatttgggatttgcaaac

SEQ ID NO: 44102 - DNA, 599 bp, Chicken  19866894282515_1
  misc_feature (1)..(31): n is any nucleotide
nnnnnnnnnnnnnnnnnnnnnnnnnnnnnnntgtgggcttaccggggggctggcattgcagtcagcaaatatccatgcatggaggcttgtgcgtgctccttgggcccccctggcatggtttgcagccagctggctgccagtggaatgggaggaacaccagcactgggcattcagtgtcgctattaaactgctattgtggctgtgatggggaaactcagaatccccatttggcagcatgtccccaccagctctttgcttctccccaagcactgcaggcacagtgggtgcagggtgcaacaytgtccccatgggcacacacagcatggggagcgttcayacacacgtctgcatccttcacaaactgagtctggggataatcctcagcctaaaagacatctcatatatgtaaagcagcaatgagaattcccccatatggtgtaattttgtctgaacagcagtgaagggtcactatggatgcccccaacaaggcgatattaatattctctgatacgcgccggcctctgctgcagaccccatgtcccctgcaaagcccacrggggctctcagtgcacttgacagtcattatgccacatccacat

SEQ ID NO: 44103 - DNA, 600 bp, Chicken  19866894282515_2
cttaccggggggctggcattgcagtcagcaaatatccatgcatggaggcttgtgcgtgctccttgggcccccctggcatggtttgcagccagctggctgccagtggaatgggaggaacaccagcactgggcattcagtgtcgctattaaactgctattgtggctgtgatggggaaactcagaatccccatttggcagcatgtccccaccagctctttgcttctccccaagcactgcaggcacagtgggtgcagggtgcaacaytgtccccatgggcacacacagcatggggagcgttcayacacacgtctgcatccttcacaaactgagtctggggataatcctcagcctaaaagacatctcatatatgtaaagcagcaatgagaattcccccatatggtgtaattttgtctgaacagcagtgaagggtcactatggatgcccccaacaaggcgatattaatattctctgatacgcgccggcctctgctgcagaccccatgtcccctgcaaagcccacrggggctctcagtgcacttgacagtcattatgccacatccacatgcagagataatccctccttagttgggcatttttctaat

SEQ ID NO: 44104 - DNA, 519 bp, Chicken  19866894282515_3
ttctccccaagcactgcaggcacagtgggtgcagggtgcaacaytgtccccatgggcacacacagcatggggagcgttcayacacacgtctgcatccttcacaaactgagtctggggataatcctcagcctaaaagacatctcatatatgtaaagcagcaatgagaattcccccatatggtgtaattttgtctgaacagcagtgaagggtcactatggatgcccccaacaaggcgatattaatattctctgatacgcgccggcctctgctgcagaccccatgtcccctgcaaagcccacrggggctctcagtgcacttgacagtcattatgccacatccacatgcagagataatccctccttagttgggcatttttctaatttagtgagaaatcattacagcaaatgcttggagtgtcattttcaaggaccctggtgttgggcaaattaaagtcattttgctgtgggaagagcgtgggcatctctgttagagcaaatgtcagaacacaccaattttcaa

SEQ ID NO: 44105 - DNA, 600 bp, Chicken  19866894282516_1
cgtggtgctcagcgtgagcgagcactcgtggacgctactaaccaataaactccatgtgttacccagctccaaggtgctcggtgtgttggggtggtgtgctgggagtgggggcagtatcaggaaggtgggtggcagatgggaagaaccaactcagtgcacccattcaggcagcaagaacggggtcggcaagacagctggtggggaaatcccaggttggagggaagtagcacccaaaggcagtttgggaaatgctgaaatttcccccagatttcagttgcagtgctcctttgagactgtccrytccmgtccctaccgatggcattgtgtcttacagccctccccgccccacgctgatctcacatctccttaacccacccttccgtacagcccactggctgctcccccagccaggctgattgcgtcccccagtgcttcccgtccctcgcatccggccattgtaccctaccgggaaggactgcatccagggaggaagcgggaggccatggcgggcggctgggccacggcactggggctggggctctgggttactgcactgcgcctggggggctgccacccctccggaggggacatggagtcacc

SEQ ID NO: 44106 - DNA, 600 bp, Chicken  19866894282516_2
gtggtgctcagcgtgagcgagcactcgtggacgctactaaccaataaactccatgtgttacccagctccaaggtgctcggtgtgttggggtggtgtgctgggagtgggggcagtatcaggaaggtgggtggcagatgggaagaaccaactcagtgcacccattcaggcagcaagaacggggtcggcaagacagctggtggggaaatcccaggttggagggaagtagcacccaaaggcagtttgggaaatgctgaaatttcccccagatttcagttgcagtgctcctttgagactgtccrytccmgtccctaccgatggcattgtgtcttacagccctccccgccccacgctgatctcacatctccttaacccacccttccgtacagcccactggctgctcccccagccaggctgattgcgtcccccagtgcttcccgtccctcgcatccggccattgtaccctaccgggaaggactgcatccagggaggaagcgggaggccatggcgggcggctgggccacggcactggggctggggctctgggttactgcactgcgcctggggggctgccacccctccggaggggacatggagtcaccc

SEQ ID NO: 44107 - DNA, 600 bp, Chicken  19866894282516_3
tgctcagcgtgagcgagcactcgtggacgctactaaccaataaactccatgtgttacccagctccaaggtgctcggtgtgttggggtggtgtgctgggagtgggggcagtatcaggaaggtgggtggcagatgggaagaaccaactcagtgcacccattcaggcagcaagaacggggtcggcaagacagctggtggggaaatcccaggttggagggaagtagcacccaaaggcagtttgggaaatgctgaaatttcccccagatttcagttgcagtgctcctttgagactgtccrytccmgtccctaccgatggcattgtgtcttacagccctccccgccccacgctgatctcacatctccttaacccacccttccgtacagcccactggctgctcccccagccaggctgattgcgtcccccagtgcttcccgtccctcgcatccggccattgtaccctaccgggaaggactgcatccagggaggaagcgggaggccatggcgggcggctgggccacggcactggggctggggctctgggttactgcactgcgcctggggggctgccacccctccggaggggacatggagtcacccacca

SEQ ID NO: 44108 - DNA, 600 bp, Chicken  19866894282521_1
tgacaagatgtagcacctaatgtcacagctaaatccttcatctaaattctagccacccatctgaagccttaaaattttgctttgtttacaaacaatcctgacaagtctcacaggcagcaaacagtccttcactttcaggtttggaagggaatctagtgaagtccacaatggacaatacaatgttaaattcagtttcagaactagcaattgcagctaaaaacagacaaacatgcaacaaaaaatgcacgtgaagcaaacccaaaggaacatccatgagcatttaaggcataggtgtccaarcttttggcttgcctgtgctgcactaagtgaagaggaattgtcatgggcttcatacattttaatatgtaatatagttaatgtaaataaccattttttttttttaatatttgctgtttaaaaagaagacaatgaaaaatacaaaattagtgcaatatttgaccttgtttttcatgaaaatgatgcatcaacatctggcttgatagaagcagctgcagttcataatgagttcttaaggcactgccagatttgttatctaatcttactcttccggtgcttcatcctttaaaacagttcttttca

SEQ ID NO: 44109 - DNA, 600 bp, Chicken  19866894282522_1
aattgctcattgtcattcagatgtgaatttgattcagcagagggatttttagaaaacacatgcatgaattccaaagtgaaatgtatttctccatattggtctaacaaatactggtgttttgttaattggagaaagggggaaaaaaaagtgatgagaaaaaaagctggcagcttgttgaaaatcagaagtgatcctgtactggtttgacttaattgtagcacctgcagacttttctcatgaatacttttgaggaagaaggtagcgttctgaaagagttgaatgaaactcactagctaacaktgcatggtagatggaggaaatgaatggaaagcaaactgaaatgccggaatgaaaaggaaggcaagacgaaaaggaaaaactcatgtatctgaatgtttaactcatttttttctgaagcacagaaaatttctagacatttcagatgaattaatktcagatgattggattatattacagaatgttgagaaattygtaagttagtcactctttccagaaaatgactgcaggaaaaacttgctacatttctaatgcatttttcagtttcagtcagacccagttgctctgrctcaggctaccagt

SEQ ID NO: 44110 - DNA, 600 bp, Chicken  19866894282522_2
agaaaaaaagctggcagcttgttgaaaatcagaagtgatcctgtactggtttgacttaattgtagcacctgcagacttttctcatgaatacttttgaggaagaaggtagcgttctgaaagagttgaatgaaactcactagctaacaktgcatggtagatggaggaaatgaatggaaagcaaactgaaatgccggaatgaaaaggaaggcaagacgaaaaggaaaaactcatgtatctgaatgtttaactcatttttttctgaagcacagaaaatttctagacatttcagatgaattaatktcagatgattggattatattacagaatgttgagaaattygtaagttagtcactctttccagaaaatgactgcaggaaaaacttgctacatttctaatgcatttttcagtttcagtcagacccagttgctctgrctcaggctaccagttgccttagtccttgggaagtcctgatgctgtaagcagggcttcacacagagtggagtattgcacatccacaacaaaatggcagaacctcatccctgccttttactaaaatgtgaattgacttctttttagggttttgatttttaattttgttt

SEQ ID NO: 44111 - DNA, 600 bp, Chicken  19866894282522_3
cctgtactggtttgacttaattgtagcacctgcagacttttctcatgaatacttttgaggaagaaggtagcgttctgaaagagttgaatgaaactcactagctaacaktgcatggtagatggaggaaatgaatggaaagcaaactgaaatgccggaatgaaaaggaaggcaagacgaaaaggaaaaactcatgtatctgaatgtttaactcatttttttctgaagcacagaaaatttctagacatttcagatgaattaatktcagatgattggattatattacagaatgttgagaaattygtaagttagtcactctttccagaaaatgactgcaggaaaaacttgctacatttctaatgcatttttcagtttcagtcagacccagttgctctgrctcaggctaccagttgccttagtccttgggaagtcctgatgctgtaagcagggcttcacacagagtggagtattgcacatccacaacaaaatggcagaacctcatccctgccttttactaaaatgtgaattgacttctttttagggttttgatttttaattttgttttgactcattgcctctagtctgaattatgtcatggcccag

SEQ ID NO: 44112 - DNA, 600 bp, Chicken  19866894282522_4
tcactagctaacaktgcatggtagatggaggaaatgaatggaaagcaaactgaaatgccggaatgaaaaggaaggcaagacgaaaaggaaaaactcatgtatctgaatgtttaactcatttttttctgaagcacagaaaatttctagacatttcagatgaattaatktcagatgattggattatattacagaatgttgagaaattygtaagttagtcactctttccagaaaatgactgcaggaaaaacttgctacatttctaatgcatttttcagtttcagtcagacccagttgctctgrctcaggctaccagttgccttagtccttgggaagtcctgatgctgtaagcagggcttcacacagagtggagtattgcacatccacaacaaaatggcagaacctcatccctgccttttactaaaatgtgaattgacttctttttagggttttgatttttaattttgttttgactcattgcctctagtctgaattatgtcatggcccagacttggggaaggggtattgttcaacctattttggggataagctgtcattagatgcttataatcagattacactggttttgaagggaagtttata

SEQ ID NO: 44113 - DNA, 581 bp, Chicken  19866894282525_1
cagcatcgagaagttctcgctaagagaagagtagttatttatgtcaaaacgtcttgtgaataagttctcactgagtaaaccagctctttctgtgaagtagtctcgtattttttttcttacatacggacttctaatagcgattttagactattggaggtcagagttaacctagttgttttatgactgtattttttttttctcagattgttagcagaaaaagcagaactagcaattctgacttgcttgtttcaattatttgctctaagatactgataccacaacgcttgcagtctaaaactrgaaattttaaaacaaaaactaaagccagttaactcaacagtgtattgttcttttacaaagcactatttttattgcattgtaatagttactcagtactgttaaaatctctcctatgttcttaacatacattgtttattaattggttttcttctctactactgtcttcccccacgctctctcaacagggctgtgaaaggatgggaggaagagtactaaaaaagaaaaaaaaatggtagtaacattatctttccttatcagtatatatgccatctttcaagttg

SEQ ID NO: 44114 - DNA, 600 bp, Chicken  19866894282528_1
aaccatgtccctatttgtttaactcacaaagtttttgtttttagcctcaagaataaagtcatgagaattctgaggaaaaatagaaaaatgaatcaaaatcaaaacctggacagctttcataaaaagaatgtcatgtttggggcttttttttttaaactcaagcccttttcaaactggagcgatccaccacagcaggcctcttcctgcataaagcctcagcagtagtaaatatgacattttttttccaacaggatttaaaaaaggctcatgcccagactgctggtgagcccaaagcagggrgacctgtcctggggtcagggtgaggtgagaataggtatggaaatgttgggccatggagtgcaaagcacaactgccaacatgggctaggagaaagggagagggaagaaggagagaaggagaaatgcagtcacatttttctccatcccatcaggtaaataggtggcattttgggttacctgttgcctgtgatccacccacacaaggcccagctgctggagaagcacaaagggcagagtcctgtgagagaagaaaagcaccgataacacrattttgaattattttctatgttaacgaactgca

SEQ ID NO: 44115 - DNA, 600 bp, Chicken  19866894282528_2
atgcccagactgctggtgagcccaaagcagggrgacctgtcctggggtcagggtgaggtgagaataggtatggaaatgttgggccatggagtgcaaagcacaactgccaacatgggctaggagaaagggagagggaagaaggagagaaggagaaatgcagtcacatttttctccatcccatcaggtaaataggtggcattttgggttacctgttgcctgtgatccacccacacaaggcccagctgctggagaagcacaaagggcagagtcctgtgagagaagaaaagcaccgataacacrattttgaattattttctatgttaacgaactgcaggagcatccaccgaccaaaggattcgggtgggcttccagtcagcacccacagaatggtcgagctacgctcatggagttaaaaataaagctttggggctttttgcctcctcatagatgcaggtggggctataaaaccctttagcatgagtcagagaaccagacttggcaaagcttggcttgcctctttaaaaacagagcactaattaaatcaagtaacaacaaggaaaaaaaaaaggtctctttttttccaataactaatccagcctg

SEQ ID NO: 44116 - DNA, 600 bp, Chicken  19866894282544_1
cagaaaaggatacaattttctaaaagatcagaaaaactttggcaagttctttaatgagtgctatttttttgttttccccagcttacagagcatagagaagctcgtaatacctacggtctagattccctttgccattgtccactgtatgaagaagcaatgcacttagcagaagaaggcaaaatttattcacgagtcttaaggtattaatgtattgatttgtctacttaataacttgcaagaaaataaaacagtaaagttaaatattctgtgcagaatgcaggattctcatagtgggtattytttagttgatttttctcgtgcttctttatttgatgtctttgaatttyttttatttttcataggactgaaatgtttgaatgtctyggagacagtgacttccttgctaagctccattgtattcgacaagctttccaggtatgcagaaagygaagtgatctgtcttcttaagcctaagacatgtgacattgaagtgccactatcagtgcagtacttatgccaatgttttaataatatatcccacaattaagcatattcttaattattcctataatctctacatttctgtaattctgaaatggg

SEQ ID NO: 44117 - DNA, 600 bp, Chicken  19866894282544_2
tctttaatgagtgctatttttttgttttccccagcttacagagcatagagaagctcgtaatacctacggtctagattccctttgccattgtccactgtatgaagaagcaatgcacttagcagaagaaggcaaaatttattcacgagtcttaaggtattaatgtattgatttgtctacttaataacttgcaagaaaataaaacagtaaagttaaatattctgtgcagaatgcaggattctcatagtgggtattytttagttgatttttctcgtgcttctttatttgatgtctttgaatttyttttatttttcataggactgaaatgtttgaatgtctyggagacagtgacttccttgctaagctccattgtattcgacaagctttccaggtatgcagaaagygaagtgatctgtcttcttaagcctaagacatgtgacattgaagtgccactatcagtgcagtacttatgccaatgttttaataatatatcccacaattaagcatattcttaattattcctataatctctacatttctgtaattctgaaatggggcatcccaatcttgtgatcaacaaaaatttggaatatttgcacctaa

SEQ ID NO: 44118 - DNA, 600 bp, Chicken  19866894282544_3
acagagcatagagaagctcgtaatacctacggtctagattccctttgccattgtccactgtatgaagaagcaatgcacttagcagaagaaggcaaaatttattcacgagtcttaaggtattaatgtattgatttgtctacttaataacttgcaagaaaataaaacagtaaagttaaatattctgtgcagaatgcaggattctcatagtgggtattytttagttgatttttctcgtgcttctttatttgatgtctttgaatttyttttatttttcataggactgaaatgtttgaatgtctyggagacagtgacttccttgctaagctccattgtattcgacaagctttccaggtatgcagaaagygaagtgatctgtcttcttaagcctaagacatgtgacattgaagtgccactatcagtgcagtacttatgccaatgttttaataatatatcccacaattaagcatattcttaattattcctataatctctacatttctgtaattctgaaatggggcatcccaatcttgtgatcaacaaaaatttggaatatttgcacctaagacttcttgggaacttgcctactagactagtggttat

SEQ ID NO: 44119 - DNA, 600 bp, Chicken  19866894282544_4
aagaagcaatgcacttagcagaagaaggcaaaatttattcacgagtcttaaggtattaatgtattgatttgtctacttaataacttgcaagaaaataaaacagtaaagttaaatattctgtgcagaatgcaggattctcatagtgggtattytttagttgatttttctcgtgcttctttatttgatgtctttgaatttyttttatttttcataggactgaaatgtttgaatgtctyggagacagtgacttccttgctaagctccattgtattcgacaagctttccaggtatgcagaaagygaagtgatctgtcttcttaagcctaagacatgtgacattgaagtgccactatcagtgcagtacttatgccaatgttttaataatatatcccacaattaagcatattcttaattattcctataatctctacatttctgtaattctgaaatggggcatcccaatcttgtgatcaacaaaaatttggaatatttgcacctaagacttcttgggaacttgcctactagactagtggttataaggaagaaaactttattaaatttgattgaagtaaagatcacttgctatactctgtaaatgaat

SEQ ID NO: 44120 - DNA, 599 bp, Chicken  19866894282551_1
  misc_feature (1)..(181): n is any nucleotide
nnnnnnnnnnnnnnnnnnnnnnnnnnnnnnnnnnnnnnnnnnnnnnnnnnnnnnnnnnnnnnnnnnnnnnnnnnnnnnnnnnnnnnnnnnnnnnnnnnnnnnnnnnnnnnnnnnnnnnnnnnnnnnnnnnnnnnnnnnnnnnnnnnnnnnnnnnnnnnnnnnnnnnnnnnnnnnnnnnnnntcaaaacagcagtaatttaaaggtccagatctcaacatctgcaactacagtgttatgctccaaaagcaagcgagcacatgggtgaacactgatgatgttgctaaaactctacatgctgygagcttggatgccttctaaggcatcctttacatctcttcactgaataacctcagacactatctaaaagaaataaaaccaaatacctgttactgtgtcaataagttytgcccaacttttggctgaccacgtgtatttttaataagtgagtattagagtagccttaatctcattattttcattattaatgcaaataaaacacaaatgcaagaggtactttgcctgaacacaggcaatgtatgtagtatgaagaatgacttcagcagataccttcatttgcactttgcttatgatggataca

SEQ ID NO: 44121 - DNA, 599 bp, Chicken  19866894282551_2
  misc_feature (1)..(75): n is any nucleotide
nnnnnnnnnnnnnnnnnnnnnnnnnnnnnnnnnnnnnnnnnnnnnnnnnnnnnnnnnnnnnnnnnnnnnnnnnnntcaaaacagcagtaatttaaaggtccagatctcaacatctgcaactacagtgttatgctccaaaagcaagcgagcacatgggtgaacactgatgatgttgctaaaactctacatgctgygagcttggatgccttctaaggcatcctttacatctcttcactgaataacctcagacactatctaaaagaaataaaaccaaatacctgttactgtgtcaataagttytgcccaacttttggctgaccacgtgtatttttaataagtgagtattagagtagccttaatctcattattttcattattaatgcaaataaaacacaaatgcaagaggtactttgcctgaacacaggcaatgtatgtagtatgaagaatgacttcagcagataccttcatttgcactttgcttatgatggatacagtactacttttgataactgttttattaaccacgctttacatttcatcttracttttgatatgcaacaaaaatccttcacagcgaaattagcttttgaaaagagtcc

SEQ ID NO: 44122 - DNA, 600 bp, Chicken  19866894282551_3
ctcagacactatctaaaagaaataaaaccaaatacctgttactgtgtcaataagttytgcccaacttttggctgaccacgtgtatttttaataagtgagtattagagtagccttaatctcattattttcattattaatgcaaataaaacacaaatgcaagaggtactttgcctgaacacaggcaatgtatgtagtatgaagaatgacttcagcagataccttcatttgcactttgcttatgatggatacagtactacttttgataactgttttattaaccacgctttacatttcatcttracttttgatatgcaacaaaaatccttcacagcgaaattagcttttgaaaagagtcctatttctgcttcagtcagaaaagccttatctttttctggctccatagataccttttatcatctgctccaggtgttcccacagaatgtcacccacatagtcaggtgcaagttccaggaagcgttccttgcccaggttgcagaggtcttggccactcataagaaactgatggatgttcacatttgccaagctaaattcattggtagcccatgcaagccactggcaaacatgctgttcagtccacac

SEQ ID NO: 44123 - DNA, 599 bp, Chicken  19866894282552_1
  misc_feature (1)..(116): n is any nucleotide
nnnnnnnnnnnnnnnnnnnnnnnnnnnnnnnnnnnnnnnnnnnnnnnnnnnnnnnnnnnnnnnnnnnnnnnnnnnnnnnnnnnnnnnnnnnnnnnnnnnnnnnnnnnnnnnnnnnngacacagctcaattcctcttcccccaatgctgttgtgggggcatagacacctgctgactctccacagcactggtgtgccaggcatcactgatgtgccaggcatcactgataagctctctcctcccatagagcagcacagcatgcctacagtccacagcctgcagtgacaagctgtgctcacaarccaggctctgctccccaggctttattacctttttgatgctgttgttttactggagaataatgggggaatttcctccagcttgtgtggtatttagggcttatgtgtgctggcgacatcagctgctagctgaggctgcctaattttgtgctgcataatgaccttacagcagaggaatgggatccactcagaattccttgtagtgctcttacaaatttcatttgcttgtaaatttaggcaagcagcggatgcagtggatgccaragtgttccgtgcctctgccgggctgctctacaatcaac

SEQ ID NO: 44124 - DNA, 600 bp, Chicken  19866894282552_2
tacagtccacagcctgcagtgacaagctgtgctcacaarccaggctctgctccccaggctttattacctttttgatgctgttgttttactggagaataatgggggaatttcctccagcttgtgtggtatttagggcttatgtgtgctggcgacatcagctgctagctgaggctgcctaattttgtgctgcataatgaccttacagcagaggaatgggatccactcagaattccttgtagtgctcttacaaatttcatttgcttgtaaatttaggcaagcagcggatgcagtggatgccaragtgttccgtgcctctgccgggctgctctacaatcaacagcagaggtgcccatttctgcctgcccaggctcggttaaagagagagaaatcaaatctgctcctgccattatgtcccccagctctctgcccagccattaaacaaatgtgacttttacccacaaaatagatgcaaaccacaggtgtagcagtttctcagcttctgaaaaaacacttttgcagccatcccttggaatagcccctcttgcttgtgagcatggcagagtaaataagccagctgtttttgatgatgatttttagttc

SEQ ID NO: 44125 - DNA, 600 bp, Chicken  19866894282556_1
tgcaaaggatcggggatattcacacagacatttattcattattaatatagataataaaggatcatttatgaggctacagatgagatttttatcatcaaaagcttaaaaagggaaatttatttttgcttcaggacagagatgaaaagagtcagtaatgggaaatgtaagagtcaacacaaaactgtcaaattcattcttttcctgaagacagctagcacttgatagcaacagattaaaaataaaataaaataagatatttttggtgtaaaatttctttattgacagggaggggctttctaygtaaatgattttctctgcttttgtcctttagcaaggcagttttctatgctttttcctcatgcatctgtgatttccaaagccttacgagaagacttacagaaggacaatgtgtaattgtctccagagtttctgggagaagtatgaaagaaagcttgatgacagtgaaaatcacctatagggactctttattattggatgcagaaattagagtagtgtgttttgtcttttagtagcatctctctttgtgatttgatggcacaattaaatagtattagaagaatgggcaaatgcaaattgaaa

SEQ ID NO: 44126 - DNA, 600 bp, Chicken  19866894282561_1
tcttccatctcacatacaagatagatagcagatatgatgataaaataataactctaaggcaactattggcatagccacagctttttgctcaaatttgaaacagtcaggtgtccattcctggctatctataatatatccacatatcagaggcaaataatgaggtactcagaactctatcctcatttctgacacagacagagctttaacctcatctgatagaatcagtgttccatagcaaccatttgacacagccaaatatctgttaccatctttgacgttagcaggggttcatcacatctyttacatttctggcttccatggcaactactataacagacagagctctggcctctttctgaacactctgtcccactgtccttcatgaaaaacactatattctaatcagtgataaaccaggacttcatattttatttgacattgccagtgttctatctatgtaaccaatataaccatatgaggtgtcaacctcagccttggtattttcagagctgtgtggcaacagctaatatacgtatatacatgtgagaaaaacgtcctcatcttccagttctgtttgggaaatgtagatataaccaaaga

SEQ ID NO: 44127 - DNA, 600 bp, Chicken  19866894282562_1
caatagtagaagtatttatcttccacttctgaagattttgaagtcacagcagagttctggctgcagcaacaagcccaccaaaagcaagaaacacctcttgcccgtgctcctgttcttacagggctctaaaagtgtagagagctggccaaaagccagctttgctgctgctgagagtggcaggtagcctacaaagcacaaggtagaacaggtgactcagcacagagattttaagccctacgtttggcaatgcttggtttgaggccagaagacttatctgcccaacaagctcagtcgaggtgkactccaccagcaagttcggctgccaaacagcagaaaattgaagaaagctgcaagacagatgggctgaacacaggcatagaggagggcttccaacatgagcctctgctgcagaaacttgctgagtgcgagaaaccatcagggaaatgtaagtgtataacaaaacatttgggaggaccggacaataaagcggtcattcctgacaaaggatgactcctttgacactgaaaataccgaagatacggtcgctgtaccaaggaaagtgatgaaacagagtccactttgcaccgtggctccttgcct

SEQ ID NO: 44128 - DNA, 600 bp, Chicken  19866894282571_1
tggtttcactttattttatgaacttcagtgctttcctcttctcacgtttctttctaattcaaactaacagacttcaaagctgcttgcttggtctggaaaatatcaggtcaggatgagaggatcctgtggcctgctggagaaagatctctattttcttttaccacaaacttcagttactgtccagccaacccagatatggagacttcgctctcgcaaagtctacagagactgaaattctcacacatctgtactgtgcagtggttgtcagcagatcatgaagtaaatagaggtgcccagcaytggcacaatgcttgtttaaactgatcagtggtgtttcggtcaacatcacagctgaagatcctctgagcagaaagacaggaggacgcatcgctgacttcatgctgatttttaatcccatttagaggcttatctgcatgtgtgcatttaatggattatgaaaaaaaatcatactgtaagatgagttaactctaaccctgtttttaaaaggcagaagttgttacagttagctttagccagcagtaatacccaaggctgctgtgctcagaggagccagtgtttgagcagtgcaagccatgaggt

SEQ ID NO: 44129 - DNA, 599 bp, Chicken  19866894282572_1
  misc_feature (1)..(101): n is any nucleotide
nnnnnnnnnnnnnnnnnnnnnnnnnnnnnnnnnnnnnnnnnnnnnnnnnnnnnnnnnnnnnnnnnnnnnnnnnnnnnnnnnnnnnnnnnnnnnnnnnnnnnctctgttactgagttggcagcagctggtggcagcagctctgctctcggatgttttcagatcagtttgctgggcaatatgtgcaagggagagagcgagcaagtgttagggagcagaacaaaagggaaagcaaaccaggttctgtgccttccttcagccgcttccatcctggtgtcacccacatgcatatggcacggggcytctgctgcactcagccctgcgttgttgatcctgtgttgcctgtgggctccagcagtccccacatcccatcctcctcacctgcaaaacagctgcaggaactgtggggcttcactggatccttcaggaatgagctgtgttggcagcaggaggagctcagtgccccgaggtgcccattttttcctggctgctgctggcaattctttatcgatcatcagggaatcactctttgcgtcacttcccattatctcccgagtcagcctgagcaacagtggtgacgcagggagatttcctgcccagag

SEQ ID NO: 44130 - DNA, 599 bp, Chicken  19866894282577_1
  misc_feature (1)..(119): n is any nucleotide
nnnnnnnnnnnnnnnnnnnnnnnnnnnnnnnnnnnnnnnnnnnnnnnnnnnnnnnnnnnnnnnnnnnnnnnnnnnnnnnnnnnnnnnnnnnnnnnnnnnnnnnnnnnnnnnnnnnnnnnctctcaggagcctgtttagggcctgaaaaccctctgatgaagaacattctcctaaaccccagctgccctttccctgacacagctccatgccattccctctggccctgttgcggtcacagagatcagagctcagtgctgcctgcctgctacaggtgaggagctgcagccgccacgcggcctyccctcagctcctctgctctgagttggacacactggggggcctcaatcgctcctcctatgtcttgcccttcagacctttcaccatcttcatagccctcctatggatgctctatagaagtttacaatttgatggagaagatgaggaartgagtttgctttggccttctgcttgcaagcccaggaaaaagcactgaagtttgatttcttccttgttcagctgctgtaagccttagtttagtcagtgctcctgtctgcatggtttctcagtgacacttccacaaattttgtatcgatcttgca

SEQ ID NO: 44131 - DNA, 530 bp, Chicken  19866894282577_2
ctctcaggagcctgtttagggcctgaaaaccctctgatgaagaacattctcctaaaccccagctgccctttccctgacacagctccatgccattccctctggccctgttgcggtcacagagatcagagctcagtgctgcctgcctgctacaggtgaggagctgcagccgccacgcggcctyccctcagctcctctgctctgagttggacacactggggggcctcaatcgctcctcctatgtcttgcccttcagacctttcaccatcttcatagccctcctatggatgctctatagaagtrtgagtttgctttggccttctgcttgcaagcccaggaaaaagcactgaagtttgatttcttccttgttcagctgctgtaagccttagtttagtcagtgctcctgtctgcatggtttctcagtgacacttccacaaattttgtatcgatcttgcaattagcagcaagcaaagcaatgccgggggtcactgctacctccccagcaggaggctgaggcctcacttgcgtgctcg

SEQ ID NO: 44132 - DNA, 599 bp, Chicken  19866894282580_1
  misc_feature (1)..(230): n is any nucleotide
nnnnnnnnnnnnnnnnnnnnnnnnnnnnnnnnnnnnnnnnnnnnnnnnnnnnnnnnnnnnnnnnnnnnnnnnnnnnnnnnnnnnnnnnnnnnnnnnnnnnnnnnnnnnnnnnnnnnnnnnnnnnnnnnnnnnnnnnnnnnnnnnnnnnnnnnnnnnnnnnnnnnnnnnnnnnnnnnnnnnnnnnnnnnnnnnnnnnnnnnnnnnnnnnnnnnnnnnnnnnnnnnnnnnnntatatatatatatatatatttatgtctgtgttaaaaaacagacaaagatttgcttggtagaaacctgctygttttacccttggctaaatcagttagatcccacctctctgtacaaatctttctcaaaacaaaaccaaaaaggagaaaacacagaagttttcaggactcattatcatttcaatattgctctttttcatggctcaactctatggctgactttcagagttggagagatttttgaaaaatgatgcataacatatttatttcctcaggctacttgtgaaatcttactctaatgaccgtgcataccagaattattaccactgtacttcaggatttcagtataagaaattaatcctttgagctctt

SEQ ID NO: 44133 - DNA, 600 bp, Chicken  19866894282581_1
aaaagtagctcgttacaaagtgtgtgacaaagagcgtaagtgtgatgagacaagagttttcaaagataggttcactacaagctctgtgtcactggcaatcatcgacatccagcgagatgttccatgggatacttgagagaagtcagtctggtcacccaagaactcacgaacgcaagctcacaaaacattgatgggttatgcaactgcaaagtgctctaatgcgacattaactacatgcaattaacgatttggtacagtatccaaaaagagacattacattaaacattaggatctcgaggraaaaaaaagcagctttaagttttctggtgcaaattactacacttcgtcttctgatttggtgccccaaaggaagaaagaaaaggaaaagcgaacgaaaggcagtgctggattctggtgggtatggcaagtgaatgtcggggtaacagcaaagattcagaaacgaattttatctccaagatctacaaactggccaaaccggagggcacagacacctgtatgaactgcatccgatcaaaaggccaacttcaggacgagtttgcaatttaagcaacacacctacaaagttctctctcgctctcc

SEQ ID NO: 44134 - DNA, 497 bp, Chicken  19866894282602_1
ctacacccccaaacacgttcaaaacttttctaaaaggatgataaacttaaatgtaagtgttacttgtatcaaggagcagtagcatccaaaggtagacataaggatctccctgtcttgtgaaataaatgagtagctgatagaaatgagaggctattaaatgccactgaggttatataatttacagtgagactattatatatcattttcttaaattgtttctataacttaagttgtaattcttatccaaactcatttccagccaaagagcatgttccctcacatggatttttcacttaactwaaaattgcagccttcatccattaaaaaaaaaaaatacatgataaataggatattttaactgaattgggtaatggagaactgctgtgccactctggagaaatgcctataactcacttatgccttctggtatttgtacagaatgttgactcatgaatcacagagcagcgatcataaaaaaaaaaaaaaaaaaaaaaaaa

SEQ ID NO: 44135 - DNA, 599 bp, Chicken  19866894282604_1
  misc_feature (1)..(77): n is any nucleotide
nnnnnnnnnnnnnnnnnnnnnnnnnnnnnnnnnnnnnnnnnnnnnnnnnnnnnnnnnnnnnnnnnnnnnnnnnnnnntgatgataaaatcttaatcaataacccaaaaaatcccacataaccaaaccaaaaacccctcagcaaatacaattttaataaattatgaaatcatccagcagtgcagtgatgaaatttggtaatatccaaattagttcaaatgttaacaaaggtgaaggagagctgaaacatttaaataattcagataaaaattgtgaactacaattttttacaaattgtgaamttgtaattctgttgagaaagtttccatttgatactaaaggtttgagttcattttttatcacaatagcatcttctgttatctctaaataaagtacacaatctctaacaaaataggcctaattccctcttataggcagagatttataactgagaaggaggtgggtttgaacttataaaacagtgaatggtaggtgtcaaaatcaaaccaatatttctgctgatgctttactgcaaataaatagatttatacacatgtatacacatgcagacacaagaaaacattttttttcctctaaaatc

SEQ ID NO: 44136 - DNA, 600 bp, Chicken  19866894282615_1
acaaacaatgcacagtcttgggaatatgcagaaaacacctacagcttcactgtctgattttccgttttcccctgttctatctttagtgagaactcaataaaatcttcctgaaagtgaccttggtagttacactttgccaaatctctaaactccatatatttgggttggagaaccaagtagttgcatctaataaaactgaaatgagtgcagacaaagtgtaacagagggatatcgcagttaagagagtgctagaactgacatataccattacttgcctgggatctctgtctatactaattstggaggcttggggtgctgatatgttactatgtaagtatgttttaagagaacaaatagaagaagaccatagaatctrtgcatgtgcatttgcatcatactctttagcttccaagtaaacttagcagtatgcacaayggcagaaatgaagataaagtcataaatgaactccttttgtttaaataatttacattctaaacttaatgtgaaatttaaaatatctcaattgattacagtgcaaatatgaggagcttcaagaactttatgatctagtgatcaagagcttatacatgctgagtataa

SEQ ID NO: 44137 - DNA, 600 bp, Chicken  19866894282615_2
ctatctttagtgagaactcaataaaatcttcctgaaagtgaccttggtagttacactttgccaaatctctaaactccatatatttgggttggagaaccaagtagttgcatctaataaaactgaaatgagtgcagacaaagtgtaacagagggatatcgcagttaagagagtgctagaactgacatataccattacttgcctgggatctctgtctatactaattstggaggcttggggtgctgatatgttactatgtaagtatgttttaagagaacaaatagaagaagaccatagaatctrtgcatgtgcatttgcatcatactctttagcttccaagtaaacttagcagtatgcacaayggcagaaatgaagataaagtcataaatgaactccttttgtttaaataatttacattctaaacttaatgtgaaatttaaaatatctcaattgattacagtgcaaatatgaggagcttcaagaactttatgatctagtgatcaagagcttatacatgctgagtataatatacagtttcctccttcacaaaagactcagggtcaagctcacccactgaaccacacagtgttattgtcaacttaa

SEQ ID NO: 44138 - DNA, 600 bp, Chicken  19866894282615_3
gccaaatctctaaactccatatatttgggttggagaaccaagtagttgcatctaataaaactgaaatgagtgcagacaaagtgtaacagagggatatcgcagttaagagagtgctagaactgacatataccattacttgcctgggatctctgtctatactaattstggaggcttggggtgctgatatgttactatgtaagtatgttttaagagaacaaatagaagaagaccatagaatctrtgcatgtgcatttgcatcatactctttagcttccaagtaaacttagcagtatgcacaayggcagaaatgaagataaagtcataaatgaactccttttgtttaaataatttacattctaaacttaatgtgaaatttaaaatatctcaattgattacagtgcaaatatgaggagcttcaagaactttatgatctagtgatcaagagcttatacatgctgagtataatatacagtttcctccttcacaaaagactcagggtcaagctcacccactgaaccacacagtgttattgtcaacttaaagaaaaatgtaggccaagttaaaaagggtaattcctcctgaagtatttctgtagataca

SEQ ID NO: 44139 - DNA, 600 bp, Chicken  19866894282615_4
atgctctcagaaaataccttccaggagaaggtatttcagcaacttccagaaaggtttggaagaccacatgtctcctttgtcatttccaaaacaattacaagtcatcccttctttgtccatgcatatctatataaacaatttaactgtaatctgtgatgctcagatggtctcttttagcgtacagtacagagcagcagactggtttcaagacacactagaagaactgcttttcattactctcaattacagcactcatactgttttatatgttgtttttttctttggaggtctttgtcccaygttgtgccttaggctgttggaagggatatagatgggtacttgaagaaggcgccaagaaaggcagcaagacttctgagagagataaatgccatctgattcaacatgtttgttttctaaaaattcattactgccctaaatacctcctttttcttatcttctctttaaaaaataatgtattcattagttctaaatctcttgcttgcttgtatatgtgacgtgtttctcttgtagctttatttattttctcaaaacctgctaatcagagcatttgttccagatgtatgaaaaatatggaaacat

SEQ ID NO: 44140 - DNA, 600 bp, Chicken  19866894282618_1
cttgaatactgaccagatttctttccctcatagtgcatccttgtcctttcctcactgctgtcattttggtcaaagaaaatatgctgttggtaaacactgacttacattgtgtgaagttggtagatgtcatgcctctacccccagtgtgtggatttacattcaaaaagctccctccccactggactgatgctggtagagtggccactttagtagagtaaaactgagcatccatttctattcatggcagtagcctgtaattgggatttattccctctcaaagtcagtggaaatccctattayggtcaatagctcaatatcaaagcagattatctcttgaaaaagaaggaatagtgatcaatctgtcttcccgatgctgatgattggcaggacaagataaggagagaacctctgtaatattgtcccccggaaatgttattttttatatgttaatctaaaatctgaatatgtagcctaatcctagtattcatatctttgccctcagtaatcatcagcccatctttaatgttccttttgttcagaaaaggtaaactcttcttacttctcagaagcagattacacaaagggaattttatggtatat

SEQ ID NO: 44141 - DNA, 600 bp, Chicken  19866894282618_2
cctctgtaatattgtcccccggaaatgttattttttatatgttaatctaaaatctgaatatgtagcctaatcctagtattcatatctttgccctcagtaatcatcagcccatctttaatgttccttttgttcagaaaaggtaaactcttcttacttctcagaagcagattacacaaagggaattttatggtatatattacactcacaaagcagttttctccatcttgcaatcacttaaaaaaaaaaaaaaaagaaaaaaaaaactttcttatctcatcttccttcctgcatgaatgtctkagataatcaatgaagttcctgtgtagagaataaattgagctcgaatggctcctcttaaactgtacaatcaaagaaagaggaggtttttttgctgatgattttgatactcagtttaactttcttcaccagactgtcagctcagtgaaagtgaggtcaatctgaccacactcttcctaaaggatcctcttctgaaccatctacttgagtatacatctcctgacaaatcaatgacagaattgaaaggtttgtactttgcctaggaacctggagactgattgtcctttgcctgtagccattgag

SEQ ID NO: 44142 - DNA, 600 bp, Chicken  19866894282621_1
agctctctcagctgctcctcataacgcctgtgctccagacccctcaccagttttgttgccattctctggacacactcctcaatgtcattcttgtagtgaggggctcagaaatgaacacagtacttgagatgcagtctcagtgtcaagtacagagggtccctggtcctactggctgcactatttcttatacaagccaggatgctatcagccttctttgccatctgggcacactgctggctcacgttcagctgctgtcagctaacacccccagatctttgacctctgcacagtgtgccaacyactctgccccaaacctgtagcgatgcataggtttgttatgaccaaagtgcaggacccagcacttgatcttgttaaagctcatacaagtggcctcagtccattgatccagcctgtccagatccctctgcagggtctttctgctttcaggcagatggacacttcttcccaacttgatgtcatctgcaaactcactgagggtgactcaatcccttcatccagatcttcaataaggatatcaaacagagccagccccagtactgaaccctgggaaacaccactgaagactggttgccagatgga

SEQ ID NO: 44143 - DNA, 600 bp, Chicken  19866894282623_1
ctgcaatgagtgggatgtgggagcaggcagaccttcaggtttgcctgatgaaaatcacttcacttagtgcactgggcctctctgaaagcagctgcttaacttattttagatacaatattcagcatacccctaagtcggccatgagaaatgatgccaaacacacagaacggtgacagaaaacggtgtggctgtgacacatctcccccaaccttctgttcctgtgtatgtgagctaaaaaagggaaaaaacgtcttgagaaggctcccaggtgaccctctgtgttacgtcttgtctgccctkggttccacaatagctgcaccagccactgaaccatgtcactgcatcaagcacacagaaatggggcagcttcacctcatctctgcttctcagatccattcagaatgggtgtggtacacgcatgcatgtatgcatgtatgtgctttttttatataagtatgtcagtaagtcaataacaaaacaacttgatgtacatttttactttaaaatgttaaaaaatatatttatttagagatatacacacaaacccatttattgttcctttccttttgcagctcttccactatgcaaagagaatgtaaa

SEQ ID NO: 44144 - DNA, 600 bp, Chicken  19866894282630_1
agatctgcaaaaccccaaaagaggagatggggacattgagttcattgagtccccattgacactgagtccccattgagttcagcagaacacgtggcagcaagaggctgcaagagaaccctgggaccccttgggctgcccagtgtccaatccccaaaatgcttcaagggagcctttagcaagagatttaggggtgatttagattggatataagggaaaagtttttttatgatgaagttggtggatgccccatccttggagacacccgaggtctgagcgccccgatggagatgtagctatccytgttcactgcagggagtcggaccagatgacctccaaaggtcccttcctactcaaacggtgctgtgattctgtgataagagccatctgcagccctagggatgccacagctcacgaagggacattgaggtcactggggaattcagtccaaactccaacggcattgcaacggttttatggagaaagagttagctctgtttttctccctgccctctcatgccaggatgatgtgtcatcacgagatgctgcagaatcatttccataagactaggaaaaaaaaaatagctcccgttcatcactgtg

SEQ ID NO: 44145 - DNA, 600 bp, Chicken  19866894282633_1
gcaaataagaaaaagcttcactagataaatgaaagccaacattagcaatagtatatattcatttctcaaaacagtttcaatgcctaaaggctttgccgtgggggcagcagaaatgatacaccgtaattgttgtttctgaaagtccccagatctcattattggcactaaaagtatcgcagtattttactaaactgaattagtgagctattcttgctggaagcagcaaagtgcgtaagagcgttgttgttataatattcaacacacaaaaccctgagctttcacagacaataactagctatrttgctggtaaatactaaccactgaccgctgtgcaatactgcatttttcaaaagaaaacactggttattatttgcctaaaagtacgtccaacaraagctaggattttagttaagctatgggtattatgtatgtggtwaaacctttccattcctttaaaaaaaatcagcatcaatggctctctaccaagcagcagaatctcagcctcaatatcagcagttttaagttactagcaaaagataaaccaaaatcagwgtttcttaaaatgcaawagggcacgttgttttctcaagcatgcctatg

SEQ ID NO: 44146 - DNA, 600 bp, Chicken  19866894282633_2
tgccgtgggggcagcagaaatgatacaccgtaattgttgtttctgaaagtccccagatctcattattggcactaaaagtatcgcagtattttactaaactgaattagtgagctattcttgctggaagcagcaaagtgcgtaagagcgttgttgttataatattcaacacacaaaaccctgagctttcacagacaataactagctatrttgctggtaaatactaaccactgaccgctgtgcaatactgcatttttcaaaagaaaacactggttattatttgcctaaaagtacgtccaacaraagctaggattttagttaagctatgggtattatgtatgtggtwaaacctttccattcctttaaaaaaaatcagcatcaatggctctctaccaagcagcagaatctcagcctcaatatcagcagttttaagttactagcaaaagataaaccaaaatcagwgtttcttaaaatgcaawagggcacgttgttttctcaagcatgcctatgatgccaaaatcccactgttctggactccataatggtaagattcctgcgcccaaaggaagtatgatggaattgacctraaggaagagacataaa

SEQ ID NO: 44147 - DNA, 600 bp, Chicken  19866894282633_3
tgaaagtccccagatctcattattggcactaaaagtatcgcagtattttactaaactgaattagtgagctattcttgctggaagcagcaaagtgcgtaagagcgttgttgttataatattcaacacacaaaaccctgagctttcacagacaataactagctatrttgctggtaaatactaaccactgaccgctgtgcaatactgcatttttcaaaagaaaacactggttattatttgcctaaaagtacgtccaacaraagctaggattttagttaagctatgggtattatgtatgtggtwaaacctttccattcctttaaaaaaaatcagcatcaatggctctctaccaagcagcagaatctcagcctcaatatcagcagttttaagttactagcaaaagataaaccaaaatcagwgtttcttaaaatgcaawagggcacgttgttttctcaagcatgcctatgatgccaaaatcccactgttctggactccataatggtaagattcctgcgcccaaaggaagtatgatggaattgacctraaggaagagacataaaattatagtcttgatgtataagcaagaggaaaaaatgtctagac

SEQ ID NO: 44148 - DNA, 600 bp, Chicken  19866894282633_4
tattcaacacacaaaaccctgagctttcacagacaataactagctatrttgctggtaaatactaaccactgaccgctgtgcaatactgcatttttcaaaagaaaacactggttattatttgcctaaaagtacgtccaacaraagctaggattttagttaagctatgggtattatgtatgtggtwaaacctttccattcctttaaaaaaaatcagcatcaatggctctctaccaagcagcagaatctcagcctcaatatcagcagttttaagttactagcaaaagataaaccaaaatcagwgtttcttaaaatgcaawagggcacgttgttttctcaagcatgcctatgatgccaaaatcccactgttctggactccataatggtaagattcctgcgcccaaaggaagtatgatggaattgacctraaggaagagacataaaattatagtcttgatgtataagcaagaggaaaaaatgtctagacaagcatatttaatgcatgttttcaatgcaacaayggagtagtatttgattcctcaataaaaactactttcccacataactggcctccgcaaactgcacaaaaatgaaataaaaatt

SEQ ID NO: 44149 - DNA, 600 bp, Chicken  19866894282633_5
cctgagctttcacagacaataactagctatrttgctggtaaatactaaccactgaccgctgtgcaatactgcatttttcaaaagaaaacactggttattatttgcctaaaagtacgtccaacaraagctaggattttagttaagctatgggtattatgtatgtggtwaaacctttccattcctttaaaaaaaatcagcatcaatggctctctaccaagcagcagaatctcagcctcaatatcagcagttttaagttactagcaaaagataaaccaaaatcagwgtttcttaaaatgcaawagggcacgttgttttctcaagcatgcctatgatgccaaaatcccactgttctggactccataatggtaagattcctgcgcccaaaggaagtatgatggaattgacctraaggaagagacataaaattatagtcttgatgtataagcaagaggaaaaaatgtctagacaagcatatttaatgcatgttttcaatgcaacaayggagtagtatttgattcctcaataaaaactactttcccacataactggcctccgcaaactgcacaaaaatgaaataaaaattccttttttaacagaaag

SEQ ID NO: 44150 - DNA, 600 bp, Chicken  19866894282633_6
aaagtacgtccaacaraagctaggattttagttaagctatgggtattatgtatgtggtwaaacctttccattcctttaaaaaaaatcagcatcaatggctctctaccaagcagcagaatctcagcctcaatatcagcagttttaagttactagcaaaagataaaccaaaatcagwgtttcttaaaatgcaawagggcacgttgttttctcaagcatgcctatgatgccaaaatcccactgttctggactccataatggtaagattcctgcgcccaaaggaagtatgatggaattgacctraaggaagagacataaaattatagtcttgatgtataagcaagaggaaaaaatgtctagacaagcatatttaatgcatgttttcaatgcaacaayggagtagtatttgattcctcaataaaaactactttcccacataactggcctccgcaaactgcacaaaaatgaaataaaaattccttttttaacagaaagtttcatttttctcagctcaatagctgggaatatctttataccttgaatattttctaaaaatacttctaaatacaaaagtacacttagattgattttgaaattattatt

SEQ ID NO: 44151 - DNA, 600 bp, Chicken  19866894282633_7
aatggctctctaccaagcagcagaatctcagcctcaatatcagcagttttaagttactagcaaaagataaaccaaaatcagwgtttcttaaaatgcaawagggcacgttgttttctcaagcatgcctatgatgccaaaatcccactgttctggactccataatggtaagattcctgcgcccaaaggaagtatgatggaattgacctraaggaagagacataaaattatagtcttgatgtataagcaagaggaaaaaatgtctagacaagcatatttaatgcatgttttcaatgcaacaayggagtagtatttgattcctcaataaaaactactttcccacataactggcctccgcaaactgcacaaaaatgaaataaaaattccttttttaacagaaagtttcatttttctcagctcaatagctgggaatatctttataccttgaatattttctaaaaatacttctaaatacaaaagtacacttagattgattttgaaattattatttcaggtggacagacagaaatgagcttgatattactgagccatccccacagcataaagtaataactaaatagaggtcagaaggcatgtcttttt

SEQ ID NO: 44152 - DNA, 600 bp, Chicken  19866894282635_1
taaaagcacttgcaatattatactaaaattctaagatatgtaggtcataacattcttctgatgttttttctttttttttctgatacatagaaatgcacaagggatcttattaaaaaaaataaataaattcttccaggactaacatttatagaattttgatctatttttttagaagataaataatagttgcattctttctccatcctccataggcatgaagatgttaaaaatgtattatttttcttagagttaaagaagataaaattaagtagcagcattcctcttcccctctgcaaaacwgtaaagtacaggaattatgaaataatcactcctacaatatgacgtacaagccagtttctgcactgtccacaacattctgactgaaaggtatgacaccttcacaactctgttaagagcttgtttttgaatattgataaagaaaaaaagatagtaggacttgcacacaatcatggtacgttcataattttagtttgcaattctgaaagagattgcaaatactactgaaatttgcagatactgtaaaaccttgaggggcagttgagccccaaagtaaagatgcctcaaagattttgcagcttt

SEQ ID NO: 44153 - DNA, 599 bp, Chicken  19866894282639_1
  misc_feature (1)..(60): n is any nucleotide
nnnnnnnnnnnnnnnnnnnnnnnnnnnnnnnnnnnnnnnnnnnnnnnnnnnnnnnnnnnngtaccctggcacaagagcgggacaaggccccacttccctggtcttgcaggcagttcctgataaaagagttaatgtgacaggaaggtcccacaagggcagttattttggtcaggtgtagcatcctgattatccgccaaattctaactttaggagccggacagtcacagagttcatctttcactgtttgtctctgctctgcctggagcagagggaaggagaccactgagatggaggacagcwaggaaaggcctcratgaagggaatgtgcctctcctcttcccttgggacagcagctcgctctcctccagtagtgcaaagcaacccaaaggstctgtgtaagctacccatcatctgcaaggggacaatggaccaggaaagttatgtcccactcccacctcttaaaacctgtgccacatgtaaaagccctgacctacatccagcccagaagaaataaccccactgaacccaacctgcggccccacgtgccccttggggaccgctgcccagctcctgctgctcagatttgctttctttccgct

SEQ ID NO: 44154 - DNA, 599 bp, Chicken  19866894282639_2
  misc_feature (1)..(47): n is any nucleotide
nnnnnnnnnnnnnnnnnnnnnnnnnnnnnnnnnnnnnnnnnnnnnnngtaccctggcacaagagcgggacaaggccccacttccctggtcttgcaggcagttcctgataaaagagttaatgtgacaggaaggtcccacaagggcagttattttggtcaggtgtagcatcctgattatccgccaaattctaactttaggagccggacagtcacagagttcatctttcactgtttgtctctgctctgcctggagcagagggaaggagaccactgagatggaggacagcwaggaaaggcctcratgaagggaatgtgcctctcctcttcccttgggacagcagctcgctctcctccagtagtgcaaagcaacccaaaggstctgtgtaagctacccatcatctgcaaggggacaatggaccaggaaagttatgtcccactcccacctcttaaaacctgtgccacatgtaaaagccctgacctacatccagcccagaagaaataaccccactgaacccaacctgcggccccacgtgccccttggggaccgctgcccagctcctgctgctcagatttgctttctttccgcttgttgtcccacag

SEQ ID NO: 44155 - DNA, 600 bp, Chicken  19866894282639_3
cacttccctggtcttgcaggcagttcctgataaaagagttaatgtgacaggaaggtcccacaagggcagttattttggtcaggtgtagcatcctgattatccgccaaattctaactttaggagccggacagtcacagagttcatctttcactgtttgtctctgctctgcctggagcagagggaaggagaccactgagatggaggacagcwaggaaaggcctcratgaagggaatgtgcctctcctcttcccttgggacagcagctcgctctcctccagtagtgcaaagcaacccaaaggstctgtgtaagctacccatcatctgcaaggggacaatggaccaggaaagttatgtcccactcccacctcttaaaacctgtgccacatgtaaaagccctgacctacatccagcccagaagaaataaccccactgaacccaacctgcggccccacgtgccccttggggaccgctgcccagctcctgctgctcagatttgctttctttccgcttgttgtcccacaggggtttcgttttacactttcatatttgttttatctttgatactaatggaaaagtcagggggcagcggggaggagcgga

SEQ ID NO: 44156 - DNA, 471 bp, Chicken  19866894282646_1
attaccctgtatctgtaaaactgcatacagtttttggcacatctagtacagggaagatgtttatgaactggagtgtgttaagcagaggccacccaagtggttgggctggaggccaggccctatgaaagtagactttgggagtggggctcgctcagcctggagaaaggaagggctggggggcagccttccagtacttataaggaggtaatcaagaaagtagagcaagccttctcacagtggtgtgtggcagagaatgagagactacaggcacaatctcttgttgaaacaagaggtattcargctggatattaagataattttttcagccacaaggacaatgatacatgggagcaggttgcccagagaggttgtgtggtctttatccttgggaatttttaagaccagactgtataataccctgaggaaccagatatggcccttctgaagaccatggtttgaacagaatgttgg

SEQ ID NO: 44157 - DNA, 599 bp, Chicken  19866894282650_1
  misc_feature (1)..(44): n is any nucleotide
nnnnnnnnnnnnnnnnnnnnnnnnnnnnnnnnnnnnnnnnnnnnactgtggttgagtgttatcctattctcaaaatggcagtaagatcctgctaaatcgccttcctcctccagatattcgttcttttacaagaaaatgtttttcagattggcctgtttcagcagcaaattgttctggcatgcagcaaataagaactgagaattgagactatatctttaaagagctttcagctaaacattgctggggatagagtccctctctctgaatggggatctgtgtcagccgcgatacccagaatascattagtttcctcaggctctgttgtactttaaaaagtaattaaaaacaacagaaatatcagaattctcwtacttactgtcagctaatgcacagacaatctgagtgcgtagcaggagacgctgtcttttagtcacagaaataggattctattcaaaaagatgaaaaaaaccctttgaaaattccaaattagttgtaacattcataggattgagacctctgaatgctgtcttaaaggctatwtwttttttttttgaagtgcttcttgtcctttgctttcggttgttattccattacaggag

SEQ ID NO: 44158 - DNA, 600 bp, Chicken  19866894282650_2
tcaaaatggcagtaagatcctgctaaatcgccttcctcctccagatattcgttcttttacaagaaaatgtttttcagattggcctgtttcagcagcaaattgttctggcatgcagcaaataagaactgagaattgagactatatctttaaagagctttcagctaaacattgctggggatagagtccctctctctgaatggggatctgtgtcagccgcgatacccagaatascattagtttcctcaggctctgttgtactttaaaaagtaattaaaaacaacagaaatatcagaattctcwtacttactgtcagctaatgcacagacaatctgagtgcgtagcaggagacgctgtcttttagtcacagaaataggattctattcaaaaagatgaaaaaaaccctttgaaaattccaaattagttgtaacattcataggattgagacctctgaatgctgtcttaaaggctatwtwttttttttttgaagtgcttcttgtcctttgctttcggttgttattccattacaggaggatgttgcggcagagagaaagaaacaggctgtagtagaacaagtgatgctggatcagttatccaggtaag

SEQ ID NO: 44159 - DNA, 593 bp, Chicken  19866894282650_3
ctggggatagagtccctctctctgaatggggatctgtgtcagccgcgatacccagaatascattagtttcctcaggctctgttgtactttaaaaagtaattaaaaacaacagaaatatcagaattctcwtacttactgtcagctaatgcacagacaatctgagtgcgtagcaggagacgctgtcttttagtcacagaaataggattctattcaaaaagatgaaaaaaaccctttgaaaattccaaattagttgtaacattcataggattgagacctctgaatgctgtcttaaaggctatwtwttttttttttgaagtgcttcttgtcctttgctttcggttgttattccattacaggaggatgttgcggcagagagaaagaaacaggctgtagtagaacaagtgatgctggatcagttatccaggtaagtgaatttttaatgtaaaactacagctttccctacagaggaattcaggtctgtgagtggcttctcttgcctaggaggtgttttgatcatctcgttgcgacttgtattatgtagtgcttctatttgtaaaatccctgtaaatgagaattctttttcatttaaaaga

SEQ ID NO: 44160 - DNA, 591 bp, Chicken  19866894282650_4
ggggatagagtccctctctctgaatggggatctgtgtcagccgcgatacccagaatascattagtttcctcaggctctgttgtactttaaaaagtaattaaaaacaacagaaatatcagaattctcwtacttactgtcagctaatgcacagacaatctgagtgcgtagcaggagacgctgtcttttagtcacagaaataggattctattcaaaaagatgaaaaaaaccctttgaaaattccaaattagttgtaacattcataggattgagacctctgaatgctgtcttaaaggctatwtwttttttttttgaagtgcttcttgtcctttgctttcggttgttattccattacaggaggatgttgcggcagagagaaagaaacaggctgtagtagaacaagtgatgctggatcagttatccaggtaagtgaatttttaatgtaaaactacagctttccctacagaggaattcaggtctgtgagtggcttctcttgcctaggaggtgttttgatcatctcgttgcgacttgtattatgtagtgcttctatttgtaaaatccctgtaaatgagaattctttttcatttaaaaga

SEQ ID NO: 44161 - DNA, 600 bp, Chicken  19866894282656_1
tgccagactatcatcacagcctgagtaatccaccagaaatgacagaaaatggctggggataaacaggggcactaatcaggctgctagcttcattccccttgccctactttcagctgctatcaaagttacactcttccctccaaatgaaacagaaaatcttccacggggcagaaaaacgtattttaacacattaattcttaatcagtgtagattaagtacatccacctggctggaaaaggacaatcactcttccttctcccattccagtgtttgcccctgccttttctcccccaacccaamaggcactgactgcaccctgccttggtgagcaccagtaaaaccaactctccccacaacccatactcctttctcttcctcctgatcagcaagacaaccaaaaatcaggtaatttttatcaagcaggtggtagaaggtagcaggcacctggcaacagccttgaggctccatccattcctcacccactgagcacgggatgcacagaggaaagcttcccccagccaacactgtgtggctgagcaaggcacgggaggtctgcaggtcttcataaggtctttacgtgcaggcctccaccaccagcaa

SEQ ID NO: 44162 - DNA, 409 bp, Chicken  19866894282656_2
ggatgcacagaggaaagcttcccccagccaacactgtgtggctgagcaaggcacgggaggtctgcaggtcttcataaggtctttacgtgcaggcctccaccaccagcaagatgctacccccaactgcagatcgagtggagtaccaccaaaccactgctttgtgtcctatcttcccgagacccatttgcaaattttagactaggaaaatgagatacacttattttgctccatttgaggttaaaaactaacaaacattttccatgatgctatttttattgatttgacctttttggaaaattyrtctgcataagaaagaattaaatggctaaaattcttatttagagatttctaatgaaagaatcctgtaaaattcaacaaattgcacgtaggcaggaaaatgtgagatgtt

SEQ ID NO: 44163 - DNA, 408 bp, Chicken  19866894282656_3
gatgcacagaggaaagcttcccccagccaacactgtgtggctgagcaaggcacgggaggtctgcaggtcttcataaggtctttacgtgcaggcctccaccaccagcaagatgctacccccaactgcagatcgagtggagtaccaccaaaccactgctttgtgtcctatcttcccgagacccatttgcaaattttagactaggaaaatgagatacacttattttgctccatttgaggttaaaaactaacaaacattttccatgatgctatttttattgatttgacctttttggaaaattyrtctgcataagaaagaattaaatggctaaaattcttatttagagatttctaatgaaagaatcctgtaaaattcaacaaattgcacgtaggcaggaaaatgtgagatgtt

SEQ ID NO: 44164 - DNA, 600 bp, Chicken  19866894282660_1
aacaggagtttctcagcaagcactttttgcttttctgctttcattgttttttggagacacttgccacaaaagcatgataaacacatcacaacattctaaaaatctgtttggttcccaaatgacaaacatcaaggaattaaaaaagtaaagatgttattattcagaaattaagaacaagtccagcctggtttgcaactaatattttaaattggtcttcaaatatttgcaacttttttggttttattttatttgtacttcaaccatagacttctcatgcacagatcatttaattttagtagktttttttgcgtaaggttttcaaataagtgatttttcagagttcaagttatttccatatgtatgcaggttctaatgttcacatgcctacttccttttcattcctccttccacttttaaaaaacctaaaactcctcttccatttcagctatcaagcagtctgcagcaaagtaatggagaacacccatgaacgtacagcttttccatgaacatataactagataaatctgaagagagaggagcagtaaagaacactgaaattaccagattggaaacttgtaacacataaactggtacagtaaa

SEQ ID NO: 44165 - DNA, 600 bp, Chicken  19866894282667_1
aaacataagaagcatgattaagagctcttgtctgaagtttgaagaagggcgtgaaaaacaggaaaaaaaaacaacaaccaaagaaatagtcctcggtacgtattctaagtgacaatacagaaatactaatagtcatctgtagtgcttgtctaagtgtcacttatttgttgtgatcagctccacagtcagtagagattttcagatatgagaggcctgtggaattgtcaaatctaggcagaggcccaaatgtctaaatgaatttgtgtcagcatatggacttgtacatttggctgaagatckgtactattgcaaaatatattttctaagattttagatacctgaaagtgttggaaaacattgtggagctctcttgctgatgatagttctataccatttaccataactgaaagtctaaatttcacttcatcttaagcttgtttgacattttaaattgtccagctgcccctgaaaatgttgagactattgttttactcccttcttgctatgtaagtcactgataattagcttaaatgtacaatactaacaatacaacaataagtggctcctgttatttccatctctacaaatgatgcctttcac

SEQ ID NO: 44166 - DNA, 600 bp, Chicken  19866894282668_1
cgcttgtattaacccaaagctgcacaccatctgaggctgattcaggaaaatactgaaatctcctggtaatttcctgcagacagaacatttaatcatctcccagcctccaccgcaaaaatcccaactcaatgattcacacttccaaaggaatttgccccacgaacaagcgcagtcctgctgtgggatgcagccctgcgtctgtcccatgaggaggaagcagcttctagcaggaatacagcccagcaggtcgggccatgggcacgtctctcttttggcatccttatggctgctcgtgggacrtgctgtgctccgccaggggatgcrgcaacgcattggctccctgcacccatccattctacatttattcccattgagggctactttctcctgcaacacacagractagaaatctacctttgtcaccacccaggctcactcagcacctttcccgcaacactcccatgctctgccacccgactattttaaggctcccacccaatgcaatgggtgttgggtctgtatgcgtgcacgccagcaccctgcctgtctctccaattgccccaccagatgcatggatagaaacatctgcttccagaggga

SEQ ID NO: 44167 - DNA, 600 bp, Chicken  19866894282668_2
caccatctgaggctgattcaggaaaatactgaaatctcctggtaatttcctgcagacagaacatttaatcatctcccagcctccaccgcaaaaatcccaactcaatgattcacacttccaaaggaatttgccccacgaacaagcgcagtcctgctgtgggatgcagccctgcgtctgtcccatgaggaggaagcagcttctagcaggaatacagcccagcaggtcgggccatgggcacgtctctcttttggcatccttatggctgctcgtgggacrtgctgtgctccgccaggggatgcrgcaacgcattggctccctgcacccatccattctacatttattcccattgagggctactttctcctgcaacacacagractagaaatctacctttgtcaccacccaggctcactcagcacctttcccgcaacactcccatgctctgccacccgactattttaaggctcccacccaatgcaatgggtgttgggtctgtatgcgtgcacgccagcaccctgcctgtctctccaattgccccaccagatgcatggatagaaacatctgcttccagagggaggcacacagctcatttgcactgct

SEQ ID NO: 44168 - DNA, 537 bp, Chicken  19866894282668_3
agcctccaccgcaaaaatcccaactcaatgattcacacttccaaaggaatttgccccacgaacaagcgcagtcctgctgtgggatgcagccctgcgtctgtcccatgaggaggaagcagcttctagcaggaatacagcccagcaggtcgggccatgggcacgtctctcttttggcatccttatggctgctcgtgggacrtgctgtgctccgccaggggatgcrgcaacgcattggctccctgcacccatccattctacatttattcccattgagggctactttctcctgcaacacacagractagaaatctacctttgtcaccacccaggctcactcagcacctttcccgcaacactcccatgctctgccacccgactattttaaggctcccacccaatgcaatgggtgttgggtctgtatgcgtgcacgccagcaccctgcctgtctctccaattgccccaccagatgcatggatagaaacatctgcttccagagggaggcacacagctcatttgcactgcttaaaacaaacacaa

SEQ ID NO: 44169 - DNA, 596 bp, Chicken  19866894282669_1
cttaaaccaacgtcgttccattaatgtgcacaccgtgatgcagctcagagttaacctcccagctccgtgtcccacttactgggtagagcaggaggagagcatttctcacctcaccggccccagcacgagggaggaggaggtgaatgcatcagagaaattttgcactgttcacaccactgcatgctctcttttttttttcagcagtgtcagtctgtcttttatcaaaaaatccctttccggcagtgtctttagttttgctgctggtgtatttttcacacgaagaaaacagggctttacatkatgaagtccaactctctgccaaaaagtagctgtgtaaaatacgacagcrcagtttatactgcaaattaagtcaaactgggttgaaatagttgaagtgcaagggaaggtgatttatttatttatttgttcagtttgttwaactctcaaaagcaaagcttttaccagaaagggatgggctcaattcttaccaattcacaattttcttaccaattcaccaagtcactgataatagacacggttcgattttaagtgatctacctctgcctcccacttatccttaattttcaaatttgata

SEQ ID NO: 44170 - DNA, 547 bp, Chicken  19866894282669_2
gttaacctcccagctccgtgtcccacttactgggtagagcaggaggagagcatttctcacctcaccggccccagcacgagggaggaggaggtgaatgcatcagagaaattttgcactgttcacaccactgcatgctctcttttttttttcagcagtgtcagtctgtcttttatcaaaaaatccctttccggcagtgtctttagttttgctgctggtgtatttttcacacgaagaaaacagggctttacatkatgaagtccaactctctgccaaaaagtagctgtgtaaaatacgacagcrcagtttatactgcaaattaagtcaaactgggttgaaatagttgaagtgcaagggaaggtgatttatttatttatttgttcagtttgttwaactctcaaaagcaaagcttttaccagaaagggatgggctcaattcttaccaattcacaattttcttaccaattcaccaagtcactgataatagacacggttcgattttaagtgatctacctctgcctcccacttatccttaattttcaaatttgata

SEQ ID NO: 44171 - DNA, 458 bp, Chicken  19866894282669_3
ggtgaatgcatcagagaaattttgcactgttcacaccactgcatgctctcttttttttttcagcagtgtcagtctgtcttttatcaaaaaatccctttccggcagtgtctttagttttgctgctggtgtatttttcacacgaagaaaacagggctttacatkatgaagtccaactctctgccaaaaagtagctgtgtaaaatacgacagcrcagtttatactgcaaattaagtcaaactgggttgaaatagttgaagtgcaagggaaggtgatttatttatttatttgttcagtttgttwaactctcaaaagcaaagcttttaccagaaagggatgggctcaattcttaccaattcacaattttcttaccaattcaccaagtcactgataatagacacggttcgattttaagtgatctacctctgcctcccacttatccttaattttcaaatttgata

SEQ ID NO: 44172 - DNA, 600 bp, Chicken  19866894282670_1
atgatcttaaaggtcccttccaacccaaaccattctatgattccatgattctaacaaagaaaggaatatattttctttcatcatccttcttgctctttttttctcttttgaactagattcccaatgtaggccagaggaaactttatttatatccctgcaattcaaggcccacaaaccaattcatcatgttcctgttttatctcatctgctgtaaagaatgacctttgctacaactttctgaagtttgtttgtcattttgcagagtaatatacatataaaatgcagagtaatacacatatstgtgtgtgaaaaaaaatgcatttacagaatacattgtgtgatgttccacaatcagttaaatccataatttaacattcagtaagtacaaatgactctccagtatcacattgaaatgttgtacccatgttccattgagttgaacaacatttttaaccaaaattctatacaayagatattatcttacactgtcttttggatttaataattaaaatcagatttatagctgcatgttacatacatattaccaccaactcatacatgatgagattggaaagtctaatctaatgctgtagacctgga

SEQ ID NO: 44173 - DNA, 600 bp, Chicken  19866894282670_2
acaaaccaattcatcatgttcctgttttatctcatctgctgtaaagaatgacctttgctacaactttctgaagtttgtttgtcattttgcagagtaatatacatataaaatgcagagtaatacacatatstgtgtgtgaaaaaaaatgcatttacagaatacattgtgtgatgttccacaatcagttaaatccataatttaacattcagtaagtacaaatgactctccagtatcacattgaaatgttgtacccatgttccattgagttgaacaacatttttaaccaaaattctatacaayagatattatcttacactgtcttttggatttaataattaaaatcagatttatagctgcatgttacatacatattaccaccaactcatacatgatgagattggaaagtctaatctaatgctgtagacctggatttctctgggtctgttcttggattacttgcactagaagcaagttgtgttcaattatgagtcattgtattttacatttgattgtgttttgtcaatacttaagtgaaaataaatactggaactttctgaaaaggacttaattctattcaaaataattttcacagttaaatga

SEQ ID NO: 44174 - DNA, 600 bp, Chicken  19866894282670_3
taataattaaaatcagatttatagctgcatgttacatacatattaccaccaactcatacatgatgagattggaaagtctaatctaatgctgtagacctggatttctctgggtctgttcttggattacttgcactagaagcaagttgtgttcaattatgagtcattgtattttacatttgattgtgttttgtcaatacttaagtgaaaataaatactggaactttctgaaaaggacttaattctattcaaaataattttcacagttaaatgagtattgaaggaaagtttaattcatgatcyttctttcaagcacagaaaaaaatctgtctggaagaggtaacttccctggtttgagtccagtgagtcaaattctaagtatttaacatggaattgagtatgtccagaatcagtttcaaattctgaaactgttttatttattgtctgttgagctttaacacttatcaaagcaaatggattagattcctaccagtctataacattttaagaattttagttataaaaaaaaaacacaccaaaaaacaaaaaacatccagcaacaacacagatcacaaataacaacaaaaagaagactgattttgt

SEQ ID NO: 44175 - DNA, 600 bp, Chicken  19866894282670_4
acctttaacaatttcagctgcttttatctgctccagaaattcagttctttgctgttacgtttgataagcagccttcctcactgaggaggctataagatgacaatgtcattcaataactctcacgccctttcctgctatttgtccagtgcagggaactaagggttttcttgtcatgtggacacagaggaaatatccagtaaccaaatactgacccttgcatgcaaacaggtccatatcctctttccgcctgacaacttccttcctgcctactaggaacaaatctactcttcattttttccrgagttttttatacagactactcagaaagcccttgggtacagacaaacattttataaatgtaaacttcatgtaacagctggatacttagggcatcaagactcaagtttacagtagaaaattatttgcttcttttaactattgtgttgctgaaactgagtcactaaatgctctgtgccggtgagcaatgtacagagtttactgagatttttggcctcagtctgacaaagacatattttcatttctaacattgcagtgaatgttaaacttaggtatgattattctttttgtgtctttctactg

SEQ ID NO: 44176 - DNA, 600 bp, Chicken  19866894282671_1
ggccagcctatcagtctacttttaaaacatatcaagtggaagaaattaattaaatcaaacaaaggaatcagttctctagctcacctatagaaatctacatgatagacatgtaaatttagatatctacccaaagctgactatgtatttctgtctcatattagaaaatttatttaaaaaaaaatctgcatctatcacctgcatcaatctgaaacagcatcagacagaaaggtaaaatgcagcagtagacacctatgtgtgtttcctaatccaggccttaccattagctttttcatgtctccrtcaatttaacaggatttttttttcctttccactaggaatcactttggggcaggtctgaactctttggaaaacctcactagttttcctaatttactgatgtgtaaagatcttgcaaaaggcacattgttcacataatcccctctcgatcttaatgaataatgttcacatcatataagagactcatgcacagtcttcatcagtagattataggacgtacatccaaattctgtatcagaagctccaggtgatttctactttcttctaaatgcggtctaaatacagagaaaataagaacttttc

SEQ ID NO: 44177 - DNA, 600 bp, Chicken  19866894282675_1
atttcataagtggattttgtagcagatagtgtttttttccccctaaagtaatgtgcatgaataaatgaaatttctatttctatattcatatttattgatgatacaaaaaactgacagcaagaaaagaaaaaaaaagtttttgctatggtgaattgtgatatatgtgttatttgtgatctgactgacaatgtttcaatacttcattttaatcaaatgacttagtttttcttgcattttgtaatacattaaaaagcctcaggcatgaaatgagctttaaatttgcaaactgaaaagcactcraggattaaaacactttgtctttaagcttgacatatagttccagagcttatgcattaygatagcatttaattgcctcaccgtatgctaccctatcctgagatctgtagcctaaaaacatagtaattctacagagcttggccttcctttacttttttttttttttttttttttgacaatagtatttttatcatagtagttatttgcaggtattgttttattacgtcctgacttggttttaacacttctccagtttgaccttcagatttatctgattctacagaattctaggaccttctggag

SEQ ID NO: 44178 - DNA, 600 bp, Chicken  19866894282675_2
tgaataaatgaaatttctatttctatattcatatttattgatgatacaaaaaactgacagcaagaaaagaaaaaaaaagtttttgctatggtgaattgtgatatatgtgttatttgtgatctgactgacaatgtttcaatacttcattttaatcaaatgacttagtttttcttgcattttgtaatacattaaaaagcctcaggcatgaaatgagctttaaatttgcaaactgaaaagcactcraggattaaaacactttgtctttaagcttgacatatagttccagagcttatgcattaygatagcatttaattgcctcaccgtatgctaccctatcctgagatctgtagcctaaaaacatagtaattctacagagcttggccttcctttacttttttttttttttttttttttgacaatagtatttttatcatagtagttatttgcaggtattgttttattacgtcctgacttggttttaacacttctccagtttgaccttcagatttatctgattctacagaattctaggaccttctggagccaacaacttcagctctcatctgacagggagatttaattaaaaatgacctgcaacac

SEQ ID NO: 44179 - DNA, 600 bp, Chicken  19866894282677_1
aagtagatttgtaggtgacaacttaatttctgagggtaaattttctttgtcagttaagtcagttgttaagtcggcaaagtcagttaagataatttacactatctcagggcaaaacccagagtcaaaattaaattcaagaccctttttgaggggtaaaatcacaaattattttagtgaaggtagcacccgactcttgaatgtaacctcaattctgcagtatcagacttttctgttctttcactccaaaacaactttgtacagactgtcaggatatagttttttaaaaccaacacacttaaygttttttctcagttgaaatttaggatgtcagctttaacatatatttatcccattattatttaacccatattattttattctcatcttttttttttttttttttcagtagtgactcactgttatttaactgctgaataaaatgaccctaaaggttttgcacattcataaaaactaattagatcactctgggttctctactcagtgagctcagttgttatgacaacagaatttttatcactttcttaacatctctcctgatttctgcagttatctgtctgtctatatatatatataacgaag

SEQ ID NO: 44180 - DNA, 600 bp, Chicken  19866894282687_1
cagacctgcagaggacttagagatattagtagatgaaaaattggatgcaagccagcactgagcactcgtagcccagaaagccagtcgtgtccagggctgtatcaaaagaaacatgaccagcagagcaagggatgtgattctccccctctactctgctcttgtgagaccccatctcaagtcctacacatagctctgtggtccccagtacaagggagacatggaactgttagagctggactacaaaatgactgtcctatgaagacagactgtatgaattgaggttgtttagcctgggaggasgctagggggaccttactgtggccttaaaatatttaataggtgcttgtaagaaagatggagaaaagctttttaccagggcctgtagtgataggtcaagctttaaagtaaaagagggtagtctgaggttagagataagaaattctttagtcaaaggatggtgagacaacggaatagattgcccagagcagttgagaatggaactgaaatgtccctggaagtgttcaaggccaggttcggtggggattagagcaactttgtctagtgggagtgaggtgaccctgcccatggcagggggttggg

SEQ ID NO: 44181 - DNA, 600 bp, Chicken  19866894282687_2
gattagagcaactttgtctagtgggagtgaggtgaccctgcccatggcagggggttgggactgtgtggtccttcaaatcctttccaacccaaaggatactatgattctgtgcctgtaggtgaggaaggagtgatgagccaaactgcaataggatgtgaagaagctgatgtttctcagccagcatcctggataagctgtacctcttacagctgtgatggcctgagacattatctggcttctaacagtgtcgtatttctgtaactcaggttgttcacagtgtaaccttatagggaattaatrtgaaggcagaagaaggagaatgctgcgtcttgttcacagtatgatctgttcatcttcagtcctggagacgtggtccagaaatgctttattactgtctgttacgaattcatatcacagcttggtctgattaagcccatgcaagaatctggagacaacttggctgtccaggacttgtgtgttattgcttgcatcacatacaatgttttaaaaaagcctgaactgctgagagacttgcttcctgccatggtatgaaaggcttttcagctgtggaggttagcgcatttgggcagctcccttagt

SEQ ID NO: 44182 - DNA, 600 bp, Chicken  19866894282687_3
ttttatgcatttttgttcctagtgtgcactgatatgatgtgaaccataatgctctgtggcattaataatccatgcatagaattctcaagtaggggtaagagaaaagttaacaacacaaatggagccattatactgtattttattaatgaggcacattttgctttcatcacagttgcaaaaccttcatttttaaaccccaaattagaatataagtaataaaaatattgagaaatcagtaatcagagtaaaccgtactgcagaaatagtgttattaacacaaaggcgtataaaatgaactgrgaaaactgatctcatcggcatcacaagtgtgtttttacgccgcacgcaggatctcgatattatttggcagagaatctgaatttcatgtcagttgtcttagatgtgagtaagaatgtaactgcttacctatcattttggaatttgtgtgtgtgtgtgtgtttgtgtcccagtacctgccgaaataaacgagagagacagatcaggatcaaatgtctctagtgccctcgagctactttgctttctgttacccccataggaccaggacagactgttttcctgcagaaaacatcagtgttgagt

SEQ ID NO: 44183 - DNA, 318 bp, Chicken  19866894282691_1
gttgacttcggtagtggtgggattgcattctttgctcttttattaacaaaaggagtaaattaaaaatacacaggatctagaggaattgcttccagcaaaaaatgcaatgcttcagtcactcggattttaaccacagaacctcacaacttgttatagataccagttccattctgtcctagatgtaacgttaatcacacattcatcactgcaaattgacaacataaatgttgacttgtgcaaacaatgttagagaaaatggtgttcttgctgcagaagcgaattacacagccatttaagctycctgtgcttctcagtttt

SEQ ID NO: 44184 - DNA, 599 bp, Chicken  19866894282696_1
  misc_feature (1)..(91): n is any nucleotide
nnnnnnnnnnnnnnnnnnnnnnnnnnnnnnnnnnnnnnnnnnnnnnnnnnnnnnnnnnnnnnnnnnnnnnnnnnnnnnnnnnnnnnnnnnntctgatattaaatgtcctcctgtacttggaatcttaaaggttttactggtgggttgtaagtcatgagaataaaattaccggttcacagtggactgactgaaatctcttctcatgaggttttggggttcctctcttgaaaaccttctctcttgttttttcttccaatgtttttaagtgtgcattcagtctgaagtaagtgcttagcgttsaagtgattgtgctaggctctggtctttcttgatttattattttctcccattctcccttttaaatggcggatggagatggtaacttaatgtaataacatttccacagggaattaaaatggcttttagaaacttgaagtatgctaggatgtagtctgttgtagaaataggcatcagcacctccactgaggtctttggatgcgaatcatccagtaactgctgctttaccaacgagatatggtggtggacttttaatcatgggtgagctaggatggctaaatcaagttagcacattagggcag

SEQ ID NO: 44185 - DNA, 599 bp, Chicken  19866894282697_1
  misc_feature (1)..(30): n is any nucleotide
nnnnnnnnnnnnnnnnnnnnnnnnnnnnnntggcacgtagaggttgtcatcttcagctggttgtaagtgctgaggatccctgactgtgctaaaatcacatcattaagcaatctcaatgatcaaatagtagatgagaacgtgcatgtgtgggctagcatgctttgctttcagcagcagtacagatgggctcagagacctgggtgcccatcactcttacacaggggacctcctggttgctctgccctgctccagcggggctcacctgagctgtgagtctgctcagctgctcgtagcctgtcstggtggtgcagcctggtttgcttatgtggcttaagccaggaagttatctgtgtcacagaatagttgtgcgtccttccatggggattccataatgcaaaatggattgctcgcccttatctgtctgcattgctcttgaaccagattacagcgtgcttagaggctgttaagttgcaatactgcttctcaaaacaagatgatattccttacagataggcgtttaaaatggtttaatgcagaaaatggcaccttttgtgtctagaagtggtattttttaggtacctgcaaaggttgctttaagg

SEQ ID NO: 44186 - DNA, 600 bp, Chicken  19866894282701_1
gaaacacttctgtagacaccatgttcaagcaactgtatcttagcccaatgcctcctctgtatgtaaattatatactagattggggaaaggagctaaaccagcaccgtgttataatactaagtgtgggaatacaagaaagtctattcagagagcagctgtgaagtaagataaacagcatgagaaagaaaggctgagaacttctctagaagaagcaaaaagcaaaagaaatggcccatggctctgattggataagcacttgtatgcacggttaaggagtgtttgtggaatgccttgctgacwtgtaaaggtagatgggaaagttgcaagggtggatgggagagttaaaaagggaaacttgtgaatgtatataagtgatgcaagaacttgtaataaatgtaattataatttgtaaaaaaaacaaccaaccaaccaaccaaaaaccttgtaataaattgtaataaatgatttagatcgttcacatctaattgtgcttggttgtcacaactaagtacaaataccaactacaaataaaaatctggaccttgtaactttctgattttcacaggtttaactgtcatttatttattttttaatatttta

SEQ ID NO: 44187 - DNA, 600 bp, Chicken  19866894282704_1
aaaatcctgttaaaacatttgaaagtgaattcatagtctgagataagcaattatagccttcccataaagctagaatgctggatctaaatgttgctttaggatagtcacctaattaagctattgttttataataatttatggcttatagacctcataaacgtaaaacatatcagaatattcttagatgactgatgtgcaaagatggctcagaagtaatctgctagaagaataacaaagcatgctcagcagtctgctctaagggaggcttacagcatagttgccatcttgctgttaccagcrgatgccaatataaaagagcaaattttcaaagtggtgcataggaaatttgcacaaaatccaattagtaaataaaaggattttggcatgtacctcttgtattgctttaaaaatttaccctgaggtgtccgtggttcacagggatcaaagaaaaaaactgatttgagaaattagtgggaaaagtagcagatccaaaaagtgacaaaatacacatgcacataacataggtggtagacagcaagtttcagttagttcaattttactgatacatctagagacagaagtgcagactgcagattaata

SEQ ID NO: 44188 - DNA, 600 bp, Chicken  19866894282712_1
ctctgatggagcccctgccccatggatgaaatcccactggagccggagggctcagcctcacagccagaaggaggtccacacagagatccagcacactgagtggagcagaagtcaccgagggtgaaaaacgagaaggcctgttggattcacatctgcctgggcacagggaccaagttgtgtgttggtcttctcatttgttaccttctttattttctaaattgcgagtagtaggggtgcctgtggtcactgcagcattttgggtttggaaaggctcaatacagtatttgagggaaaacaatrcattcaattacaaaatcaaagcaatatcttctggcacaygggcagcagcatcagctgaataataagtggtttcagtgggtgtttgtttttagggtaaggagttcttatttatttattttttttgtttgttttatttaccatgggaggtaatttgagctctggtatcaaaacatgtcatgttctgccaagaggggattaaagagaagaatgctatggaaagaaactggatttgtcagtaaagaactaagagattttatttaccagagttttgcaatcagtgcttttaatcttcatcacaat

SEQ ID NO: 44189 - DNA, 600 bp, Chicken  19866894282712_2
gagccggagggctcagcctcacagccagaaggaggtccacacagagatccagcacactgagtggagcagaagtcaccgagggtgaaaaacgagaaggcctgttggattcacatctgcctgggcacagggaccaagttgtgtgttggtcttctcatttgttaccttctttattttctaaattgcgagtagtaggggtgcctgtggtcactgcagcattttgggtttggaaaggctcaatacagtatttgagggaaaacaatrcattcaattacaaaatcaaagcaatatcttctggcacaygggcagcagcatcagctgaataataagtggtttcagtgggtgtttgtttttagggtaaggagttcttatttatttattttttttgtttgttttatttaccatgggaggtaatttgagctctggtatcaaaacatgtcatgttctgccaagaggggattaaagagaagaatgctatggaaagaaactggatttgtcagtaaagaactaagagattttatttaccagagttttgcaatcagtgcttttaatcttcatcacaattgggctattgaaagaccaagaatttccttcgaggggcag

SEQ ID NO: 44190 - DNA, 600 bp, Chicken  19866894282713_1
attgcagaaaaatttattgctgctcagtattatctatttaatgggccattaggcccggctattctttgtttgaatgttgtataatattaaaagaaagcaaatgcattacactcaccagggcattatcttgttacagatacttacataatttaaggcactaccttgatcctatgaagctacctgccctcatgtgccttttcatatattgaggttgtaattgcacatggacagactcagatcctctgaagaagtagaactgtatcagtggtgcataaatagatgtggaaagcaatccaaatyccttaaaatcgyrcacagtttttgaacctaaatcagttactttccaggaataactggactgtgtttagaastcttcagtgatgtggtaggtgccttcgtatctcacgacctttggtatttgtgagagatgggcattttccaaagacagacgctttagcaccttttgacagtggagacttcataacatgacttcagtttcttctcccctccaccagcccccagtcacaactgctcactgctgaggtatgagggaagcctggttttatgagttgccattttgacctatttttagccttcttt

SEQ ID NO: 44191 - DNA, 600 bp, Chicken  19866894282713_2
tttattgctgctcagtattatctatttaatgggccattaggcccggctattctttgtttgaatgttgtataatattaaaagaaagcaaatgcattacactcaccagggcattatcttgttacagatacttacataatttaaggcactaccttgatcctatgaagctacctgccctcatgtgccttttcatatattgaggttgtaattgcacatggacagactcagatcctctgaagaagtagaactgtatcagtggtgcataaatagatgtggaaagcaatccaaatyccttaaaatcgyrcacagtttttgaacctaaatcagttactttccaggaataactggactgtgtttagaastcttcagtgatgtggtaggtgccttcgtatctcacgacctttggtatttgtgagagatgggcattttccaaagacagacgctttagcaccttttgacagtggagacttcataacatgacttcagtttcttctcccctccaccagcccccagtcacaactgctcactgctgaggtatgagggaagcctggttttatgagttgccattttgacctatttttagccttctttgcctttcacaat

SEQ ID NO: 44192 - DNA, 600 bp, Chicken  19866894282713_3
ttattgctgctcagtattatctatttaatgggccattaggcccggctattctttgtttgaatgttgtataatattaaaagaaagcaaatgcattacactcaccagggcattatcttgttacagatacttacataatttaaggcactaccttgatcctatgaagctacctgccctcatgtgccttttcatatattgaggttgtaattgcacatggacagactcagatcctctgaagaagtagaactgtatcagtggtgcataaatagatgtggaaagcaatccaaatyccttaaaatcgyrcacagtttttgaacctaaatcagttactttccaggaataactggactgtgtttagaastcttcagtgatgtggtaggtgccttcgtatctcacgacctttggtatttgtgagagatgggcattttccaaagacagacgctttagcaccttttgacagtggagacttcataacatgacttcagtttcttctcccctccaccagcccccagtcacaactgctcactgctgaggtatgagggaagcctggttttatgagttgccattttgacctatttttagccttctttgcctttcacaatt

SEQ ID NO: 44193 - DNA, 600 bp, Chicken  19866894282713_4
gaatgttgtataatattaaaagaaagcaaatgcattacactcaccagggcattatcttgttacagatacttacataatttaaggcactaccttgatcctatgaagctacctgccctcatgtgccttttcatatattgaggttgtaattgcacatggacagactcagatcctctgaagaagtagaactgtatcagtggtgcataaatagatgtggaaagcaatccaaatyccttaaaatcgyrcacagtttttgaacctaaatcagttactttccaggaataactggactgtgtttagaastcttcagtgatgtggtaggtgccttcgtatctcacgacctttggtatttgtgagagatgggcattttccaaagacagacgctttagcaccttttgacagtggagacttcataacatgacttcagtttcttctcccctccaccagcccccagtcacaactgctcactgctgaggtatgagggaagcctggttttatgagttgccattttgacctatttttagccttctttgcctttcacaattgcaaatcctgcagcaggaggctaacagatatttgtaattattgaataatatttttggt

SEQ ID NO: 44194 - DNA, 600 bp, Chicken  19866894282715_1
caagtaggacacacgcagcctgaaagatcagagtaataattcatagcctagcaaacacaaaagatagctaagagttaataagctatcagtgtaaacataaatatgctcaccacacccaataaaacaaaccaagaatctttgctggcaaagatggcaacatttggagaaaaaaaaggttggcttctactgatctctgaaacaaatcctcaatattgcatcatccaccccatctggtccacatcaatgatatagggtggtgatcagaccagtaattcaactgactatatttttcctttgacrttttatagattttcacttttgccagcagaggcctgtgatatcagtgaattacaagtctattagcctattgacttctatctgaatatgggtatactgaaacagtgcaaataacaaatacgtagatattttttgatggtataggcagacatgaatttatgtgagtacatgagcaatgtgatcaccagaagggaaaacaaagattggtgtagttgcaggtaggagacatccaagtaaacaatttcatcagaggaagggcaaaataagtactgcagatagacaggatatgcttccagacacaca

SEQ ID NO: 44195 - DNA, 600 bp, Chicken  19866894282724_1
agaatgtggaatacaggtagtaaaatctttgtctgattactcagtaattaaattactagggattgctttatgcagtaaatttcagcagtgcattgagaaggaggtgaagtcatgagccagctcaagggtgaattagttgtgcatcctcattgatgatgtgttttacctctccgtgggctgttctggtgtgggaaaacgaagcagtttgacatttcatgtcttttgaaatgctttctgctgaggacaatatctttgtgattaactttggttacaaaatatttgtactgtaattgaagaggrtgtttaataaactacaccaaagactggygccttaaccatactttttaccttcggaactgacttctcaagtgcaaagatgacrtgttttcatccagcattgaggactcaaagcttgagtgaaacaagggatggatcccactcttgtggctattttcatactaactcagaagatttgggaagattataatatctaaagtgctgaacgttagccctaaatgatacgctgttgtgtgcctgtgattcccatactgtgtgttttaaatgcatgctaagatacacagaccatatcgatatgtctgg

SEQ ID NO: 44196 - DNA, 600 bp, Chicken  19866894282724_2
ttgtctgattactcagtaattaaattactagggattgctttatgcagtaaatttcagcagtgcattgagaaggaggtgaagtcatgagccagctcaagggtgaattagttgtgcatcctcattgatgatgtgttttacctctccgtgggctgttctggtgtgggaaaacgaagcagtttgacatttcatgtcttttgaaatgctttctgctgaggacaatatctttgtgattaactttggttacaaaatatttgtactgtaattgaagaggrtgtttaataaactacaccaaagactggygccttaaccatactttttaccttcggaactgacttctcaagtgcaaagatgacrtgttttcatccagcattgaggactcaaagcttgagtgaaacaagggatggatcccactcttgtggctattttcatactaactcagaagatttgggaagattataatatctaaagtgctgaacgttagccctaaatgatacgctgttgtgtgcctgtgattcccatactgtgtgttttaaatgcatgctaagatacacagaccatatcgatatgtctggttttttgctgtttgtttctcttgtttga

SEQ ID NO: 44197 - DNA, 600 bp, Chicken  19866894282724_3
cagcagtgcattgagaaggaggtgaagtcatgagccagctcaagggtgaattagttgtgcatcctcattgatgatgtgttttacctctccgtgggctgttctggtgtgggaaaacgaagcagtttgacatttcatgtcttttgaaatgctttctgctgaggacaatatctttgtgattaactttggttacaaaatatttgtactgtaattgaagaggrtgtttaataaactacaccaaagactggygccttaaccatactttttaccttcggaactgacttctcaagtgcaaagatgacrtgttttcatccagcattgaggactcaaagcttgagtgaaacaagggatggatcccactcttgtggctattttcatactaactcagaagatttgggaagattataatatctaaagtgctgaacgttagccctaaatgatacgctgttgtgtgcctgtgattcccatactgtgtgttttaaatgcatgctaagatacacagaccatatcgatatgtctggttttttgctgtttgtttctcttgtttgacactgaaggatgttgttatcatagaaaatcgtagaataggttagaatagaatag

SEQ ID NO: 44198 - DNA, 599 bp, Chicken  19866894282725_1
  misc_feature (1)..(235): n is any nucleotide
nnnnnnnnnnnnnnnnnnnnnnnnnnnnnnnnnnnnnnnnnnnnnnnnnnnnnnnnnnnnnnnnnnnnnnnnnnnnnnnnnnnnnnnnnnnnnnnnnnnnnnnnnnnnnnnnnnnnnnnnnnnnnnnnnnnnnnnnnnnnnnnnnnnnnnnnnnnnnnnnnnnnnnnnnnnnnnnnnnnnnnnnnnnnnnnnnnnnnnnnnnnnnnnnnnnnnnnnnnnnnnnnnnnnnnnnnnngagaaacaagttaaaaccaaattctccctcgcattaatccagcttccccagcttactgcagggcyccttgtgccccagcaaagtgctgggaagcctggctgttatgctgtctgctgctgcccttggtgtgaatgaaaaccaagctgcttctgctgactcccactctcagccatttgtagcagacagaatgagagcaaaaaaaaaaagggattccgctgaggaaggaaaccaggagggcamaggcgtgggcaaagcagctgaggaacagaaggcagcgtttgttttgactgatgcaagctgacaaaagcccagtaacatgtccatttgcacagctgtatgttgctggggacatsccacgaccaya

SEQ ID NO: 44199 - DNA, 599 bp, Chicken  19866894282725_2
  misc_feature (1)..(60): n is any nucleotide
nnnnnnnnnnnnnnnnnnnnnnnnnnnnnnnnnnnnnnnnnnnnnnnnnnnnnnnnnnnngagaaacaagttaaaaccaaattctccctcgcattaatccagcttccccagcttactgcagggcyccttgtgccccagcaaagtgctgggaagcctggctgttatgctgtctgctgctgcccttggtgtgaatgaaaaccaagctgcttctgctgactcccactctcagccatttgtagcagacagaatgagagcaaaaaaaaaaagggattccgctgaggaaggaaaccaggagggcamaggcgtgggcaaagcagctgaggaacagaaggcagcgtttgttttgactgatgcaagctgacaaaagcccagtaacatgtccatttgcacagctgtatgttgctggggacatsccacgaccayacaaacgatattcaatgtaacaaaccggtaatacatgagagtgtttttttccccactttcacacataaaaatgtgatatgtttctatttcaaagagagtcacaccatctttctaggcaaaccaggttttctcagaattaaacataggatggttttttcctgtgtaaagtagcatgg

SEQ ID NO: 44200 - DNA, 600 bp, Chicken  19866894282725_3
tactgcagggcyccttgtgccccagcaaagtgctgggaagcctggctgttatgctgtctgctgctgcccttggtgtgaatgaaaaccaagctgcttctgctgactcccactctcagccatttgtagcagacagaatgagagcaaaaaaaaaaagggattccgctgaggaaggaaaccaggagggcamaggcgtgggcaaagcagctgaggaacagaaggcagcgtttgttttgactgatgcaagctgacaaaagcccagtaacatgtccatttgcacagctgtatgttgctggggacatsccacgaccayacaaacgatattcaatgtaacaaaccggtaatacatgagagtgtttttttccccactttcacacataaaaatgtgatatgtttctatttcaaagagagtcacaccatctttctaggcaaaccaggttttctcagaattaaacataggatggttttttcctgtgtaaagtagcatgggttcaagcaggaccaatccacacagggttaggacaccacaaaatgcagtgccagtcagcagctggtttgggctcccagaaccacacacagcacagccaggcaggagatgctcag

SEQ ID NO: 44201 - DNA, 600 bp, Chicken  19866894282725_4
cyccttgtgccccagcaaagtgctgggaagcctggctgttatgctgtctgctgctgcccttggtgtgaatgaaaaccaagctgcttctgctgactcccactctcagccatttgtagcagacagaatgagagcaaaaaaaaaaagggattccgctgaggaaggaaaccaggagggcamaggcgtgggcaaagcagctgaggaacagaaggcagcgtttgttttgactgatgcaagctgacaaaagcccagtaacatgtccatttgcacagctgtatgttgctggggacatsccacgaccayacaaacgatattcaatgtaacaaaccggtaatacatgagagtgtttttttccccactttcacacataaaaatgtgatatgtttctatttcaaagagagtcacaccatctttctaggcaaaccaggttttctcagaattaaacataggatggttttttcctgtgtaaagtagcatgggttcaagcaggaccaatccacacagggttaggacaccacaaaatgcagtgccagtcagcagctggtttgggctcccagaaccacacacagcacagccaggcaggagatgctcagggagcactga

SEQ ID NO: 44202 - DNA, 600 bp, Chicken  19866894282747_1
aggaataaaatactttctgctatcttaaatgttataacacattccagaaattattgttataaatgcagctgcaaaggtcctattattaaggattttataggcaaatttgccacacagaaatgtatattcgggtatctaattttgcattcaagagagcagatttgtttgttagctagtatatggctattattaagtcccattagatttccaggcagctcctaaactaagttgaaaacatacagctaacgaacaaataaggaggaatgtaacagaagtgatatgaagtaccgtttttcaaawaggaaaatcttagaacataatggttaatgatagctggagttgtttattttaggcttgtcttattgcattaacagtgacagtagatgttttaatctctaatataaaatgacataggatcattcagaaaacaatgtagattattgaagttctgtagattttaacagcagttccacaggaaaagttacacaagctcctcccattttatccctatcagatcttcattgagacatagcatgttttagtcaactacatgggacctatatctttatgcacaagtgcctacaaataaatagtggttta

SEQ ID NO: 44203 - DNA, 600 bp, Chicken  19866894282750_1
tctgcttttataatgaataccacattcactaaacagttttttttttaatacttttcatacaaagtctttaagatgagaggatttcctttgcgagctagagaggtaacttcagatacatgagttagtgttaagcagtattgccagaagaaggatttaaatttgcaatctaaaccatcaatcttaatcttgaagctttgctgcttgatatttaagaaattatattaaaagattgggttagtgatcctaggtttcacgagttataatagtaaggatatctgagccacaggccattgaattttmaaaaaatattctttgtttgcagacacccaagcccatgcaggcgctcaatgtagacacttacacatgcattaagctttcatctagcctgtacttgaatagcttaaatctagaagctgtatcactgtgtgctgtatgctatttatctttcttttgatttattcataatgtgtattttattaattcacttcctatatttttttttcttaatttactcctgtcttttacagatctctcaacaaacgttccaaatgttaaatagaaatttcctcccatcctagtgctgctgctagttatagtaca

SEQ ID NO: 44204 - DNA, 600 bp, Chicken  19866894282755_1
catcccatgctacggaatccaaaaagacagaatcacagaatcaccaaggttggaaaagacccacaggatcacccaggtcaaccatatgaaatgtaaggtttgagtagcacaaattttacttccaatgtatgacaatcaaaaatgaacctgtttcttttggcagatggagatcaacttgtaatttcagaaccttccccttggtcattcttgcataactttcttcttgctattacatgaaaaattatgctaaacacagctgtaacatttggaattttgtacctttactttggtaatggtctraagctamaaaacatcagcacatcatcccttctttcttggcttatgaactattcatttatgaactactttatacagagattcagtgtccttgaggttttttttccttagttagttaagcctggacactgataacttgggaaagccttaggaatgagttcttccttgactgtatttaccaaaaaataatttcaacttgtagttattttaaactgaaagctgattaatctctaaatgacaattaaaaattaaatgatttggtgctgtcaaggcccagcatttaaaaattggcacacacgcaat

SEQ ID NO: 44205 - DNA, 600 bp, Chicken  19866894282755_2
tgctacggaatccaaaaagacagaatcacagaatcaccaaggttggaaaagacccacaggatcacccaggtcaaccatatgaaatgtaaggtttgagtagcacaaattttacttccaatgtatgacaatcaaaaatgaacctgtttcttttggcagatggagatcaacttgtaatttcagaaccttccccttggtcattcttgcataactttcttcttgctattacatgaaaaattatgctaaacacagctgtaacatttggaattttgtacctttactttggtaatggtctraagctamaaaacatcagcacatcatcccttctttcttggcttatgaactattcatttatgaactactttatacagagattcagtgtccttgaggttttttttccttagttagttaagcctggacactgataacttgggaaagccttaggaatgagttcttccttgactgtatttaccaaaaaataatttcaacttgtagttattttaaactgaaagctgattaatctctaaatgacaattaaaaattaaatgatttggtgctgtcaaggcccagcatttaaaaattggcacacacgcaatatctggt

SEQ ID NO: 44206 - DNA, 600 bp, Chicken  19866894282755_3
ggatttttttcagagcagcattaaatgtgctagacgaaacgcaaacaaaatgtactgtatgtgaatatagcatattgaaatgtaaaacttcatccacgttttcttccacctctccagtcctatccccaaaaccactgaagaagacgtgacaaagaaaagatggggttagtgctatccacaagtggaggaaagggaaggggagaaatgttaaagcccagagtaaaacagacaaccaggattacagttttctgttgtcaggcctttggagcccctgaaatacaagctttctattgaaaactytcctgaaagacagtattaaccacacagagctatcttgaactgtaaggtgattttcatgttctggataacctgcacatgtggcacaaaggacatgagcaaacccytcctcattcatcatattggttacttttgaatgtaggcttttaaagctaaaacactggtgtgtcaacacttcttttccattcactattataaaaacccaatactctacagaatatacccaccctttggcttcatttaatttaccaaaacatggccacttcacagtattacactgctttagacycctctgagggaaaa

SEQ ID NO: 44207 - DNA, 600 bp, Chicken  19866894282755_4
tccacctctccagtcctatccccaaaaccactgaagaagacgtgacaaagaaaagatggggttagtgctatccacaagtggaggaaagggaaggggagaaatgttaaagcccagagtaaaacagacaaccaggattacagttttctgttgtcaggcctttggagcccctgaaatacaagctttctattgaaaactytcctgaaagacagtattaaccacacagagctatcttgaactgtaaggtgattttcatgttctggataacctgcacatgtggcacaaaggacatgagcaaacccytcctcattcatcatattggttacttttgaatgtaggcttttaaagctaaaacactggtgtgtcaacacttcttttccattcactattataaaaacccaatactctacagaatatacccaccctttggcttcatttaatttaccaaaacatggccacttcacagtattacactgctttagacycctctgagggaaaatatttccagctaaccaccctgcccaattcagtttgacagaaaattggttgtttttttaaatttcagaacaggctggttttaataaaagggctcaaatcaagtaa

SEQ ID NO: 44208 - DNA, 600 bp, Chicken  19866894282755_5
tctattgaaaactytcctgaaagacagtattaaccacacagagctatcttgaactgtaaggtgattttcatgttctggataacctgcacatgtggcacaaaggacatgagcaaacccytcctcattcatcatattggttacttttgaatgtaggcttttaaagctaaaacactggtgtgtcaacacttcttttccattcactattataaaaacccaatactctacagaatatacccaccctttggcttcatttaatttaccaaaacatggccacttcacagtattacactgctttagacycctctgagggaaaatatttccagctaaccaccctgcccaattcagtttgacagaaaattggttgtttttttaaatttcagaacaggctggttttaataaaagggctcaaatcaagtaaataaacgtgaagaatattacttggtcagaaagccagcatttttaatgaacgttttatctttacgctataacattttgaaaagtaatgtttgctttgtctttcaggcaaaatatatacaaacttatcattagttctatttatttgttcactaaggttggggtgctgcaggcatgtaccagaca

SEQ ID NO: 44209 - DNA, 600 bp, Chicken  19866894282761_1
aggctgaacagacccaggttactcagcctttcttcatacgggagatgctctgggccctctttgtgaccctctgctggactccttctatgagatccctttcttgtttgaactggggagcccagaactggtgacatcagtccaaatgtggcctcaccagggcagaagagagagggagagtcacctcccctcaacctgctggccgcactcttgttaatgcaccgtgggagactattggtcttcttgaccacaggcacacactgctggctcagagatccaaaactgcattcctggaggaaagamtgtgtccagaaggaattgaaaggagtttcaargactggagaagaaaggacagagtaacttagaagaactcatgcagctgttcttgaggggtttttttgttattttggttccagtggtggcatcctaagtgagacacaattgtgcaataaccgtgagaccccaaaggccacagagtttgtaaacatgtcctgtgtgtccctatcttcacaaaccaggtgtttgccattgtccttctggacaattaatttaaaaatactgtcacataaaagaagaagcgtaacctgtttaaaacaacaaata

SEQ ID NO: 44210 - DNA, 600 bp, Chicken  19866894282761_2
ttcatacgggagatgctctgggccctctttgtgaccctctgctggactccttctatgagatccctttcttgtttgaactggggagcccagaactggtgacatcagtccaaatgtggcctcaccagggcagaagagagagggagagtcacctcccctcaacctgctggccgcactcttgttaatgcaccgtgggagactattggtcttcttgaccacaggcacacactgctggctcagagatccaaaactgcattcctggaggaaagamtgtgtccagaaggaattgaaaggagtttcaargactggagaagaaaggacagagtaacttagaagaactcatgcagctgttcttgaggggtttttttgttattttggttccagtggtggcatcctaagtgagacacaattgtgcaataaccgtgagaccccaaaggccacagagtttgtaaacatgtcctgtgtgtccctatcttcacaaaccaggtgtttgccattgtccttctggacaattaatttaaaaatactgtcacataaaagaagaagcgtaacctgtttaaaacaacaaatacaagagtcgagatcacaatttttcagcttctc

SEQ ID NO: 44211 - DNA, 600 bp, Chicken  19866894282762_1
atattcctcaattccaaatgattttgctggttaggttacgttatctaaaatcatcctctactttcttccacagtaaatagaatgaaactccagagtaagtcatagatgcctatttctggatgggctaaatttttctacgtgcctgtttttatctgttatttacagaagaagcttagacaccaatcttagacaaagacattaagttttttagactgctaaacatagttgtaatgaatccaatccaaacgactggtcctttgcctagcttcccctcaatatggactgggctgagcagaggayctttacytgatgaaaaaaaaaaaaaaaagtgctattaagaaataataatttactcaggagataaaaaaagcatcctagttctgtagatggagctcagaacaagtgctggttctggttttagtccagcgcaccttaaagttttgagatcttagagggttgggatcatataatgacatatcccatgatgctagatacagcaaaagtgtggatttaaagtaacaaagaccagctggatttttttttttcctacagtgtaactagctttgtttctcttatattgttttagcagtatttttacat

SEQ ID NO: 44212 - DNA, 600 bp, Chicken  19866894282762_2
tcaattccaaatgattttgctggttaggttacgttatctaaaatcatcctctactttcttccacagtaaatagaatgaaactccagagtaagtcatagatgcctatttctggatgggctaaatttttctacgtgcctgtttttatctgttatttacagaagaagcttagacaccaatcttagacaaagacattaagttttttagactgctaaacatagttgtaatgaatccaatccaaacgactggtcctttgcctagcttcccctcaatatggactgggctgagcagaggayctttacytgatgaaaaaaaaaaaaaaaagtgctattaagaaataataatttactcaggagataaaaaaagcatcctagttctgtagatggagctcagaacaagtgctggttctggttttagtccagcgcaccttaaagttttgagatcttagagggttgggatcatataatgacatatcccatgatgctagatacagcaaaagtgtggatttaaagtaacaaagaccagctggatttttttttttcctacagtgtaactagctttgtttctcttatattgttttagcagtatttttacatgcactaa

SEQ ID NO: 44213 - DNA, 600 bp, Chicken  19866894282771_1
atttttgattgctgctataattatgcttcatcgcatctccagtaggcatcagagacacacagatacatgcaaaatgcagattattggttgcactatcttaatccacttggcaccttctctttttatgtacgagaacactgtaaggcataaagtaaaaaatgtcctaccctcactgtccaggttgctacaatagcaacagttggtagttgtatttcaacttcatctgtttttctgtgaatactcctcagaactgccactggagcagtgattttggtggtggccacttgaaaacctctgaargcaaaaataatcttgtgtctcacatagtggggaggaggcataatgaaaaaattgttgggrgctatttgggatcttctgagttccccagggaagatcacaggcaagctgctgatggtgacaaagaggcaactttttagctctgcacagtacccatgttgtctgggcctgaagtgcacaaactccacttgcccttggtacatccatttcaggctctgctttctggtaaacgggttctggcacacacttgttcatctttgaaagatgaaggttaggaccaaagttgagtttgatgccttatca

SEQ ID NO: 44214 - DNA, 600 bp, Chicken  19866894282771_2
agatacatgcaaaatgcagattattggttgcactatcttaatccacttggcaccttctctttttatgtacgagaacactgtaaggcataaagtaaaaaatgtcctaccctcactgtccaggttgctacaatagcaacagttggtagttgtatttcaacttcatctgtttttctgtgaatactcctcagaactgccactggagcagtgattttggtggtggccacttgaaaacctctgaargcaaaaataatcttgtgtctcacatagtggggaggaggcataatgaaaaaattgttgggrgctatttgggatcttctgagttccccagggaagatcacaggcaagctgctgatggtgacaaagaggcaactttttagctctgcacagtacccatgttgtctgggcctgaagtgcacaaactccacttgcccttggtacatccatttcaggctctgctttctggtaaacgggttctggcacacacttgttcatctttgaaagatgaaggttaggaccaaagttgagtttgatgccttatcagcttacatgtaacaaggcacgcttgtggcttcacagcgtgcacagaggtgacaccactgg

SEQ ID NO: 44215 - DNA, 599 bp, Chicken  19866894282774_1
  misc_feature (1)..(30): n is any nucleotide
nnnnnnnnnnnnnnnnnnnnnnnnnnnnnnctacagccccagcatggatgcgtgcagaccacatttcaatggcatagagaagatacaggctgcaactgtgagaactctccgggcacccagaccccaaccatggaacatcagccttcctggtatctgggagagggcagtggtacaggcaccaaaattttgccttagtcactgatcattcacaagttagtaatgcctttgtacaggtctatgtacattcatctcaattgctcatatgttgttgtttctgtgagtacatttagtcaggtggcygcaggtgaggtaagcacatatttactgacayaggttggaaaacacttcctttggaggatgtagtattcctttcactgtgttacagtgacccggaagatgctgtcagtggagataagagattggcaygatggctgcaagagccaagggtcaaaaaagtgtastccctgtgttgtagtttcctgctggccagaaaagatgtctttycatcataactcattctgaaatcctctggtaagcggggcttatggcaaaactgattgttatgggcaaacattacctgcaaattgagagagtatttg

SEQ ID NO: 44216 - DNA, 600 bp, Chicken  19866894282774_2
tacagccccagcatggatgcgtgcagaccacatttcaatggcatagagaagatacaggctgcaactgtgagaactctccgggcacccagaccccaaccatggaacatcagccttcctggtatctgggagagggcagtggtacaggcaccaaaattttgccttagtcactgatcattcacaagttagtaatgcctttgtacaggtctatgtacattcatctcaattgctcatatgttgttgtttctgtgagtacatttagtcaggtggcygcaggtgaggtaagcacatatttactgacayaggttggaaaacacttcctttggaggatgtagtattcctttcactgtgttacagtgacccggaagatgctgtcagtggagataagagattggcaygatggctgcaagagccaagggtcaaaaaagtgtastccctgtgttgtagtttcctgctggccagaaaagatgtctttycatcataactcattctgaaatcctctggtaagcggggcttatggcaaaactgattgttatgggcaaacattacctgcaaattgagagagtatttgagagagtatttgggaagctttgcttcatacct

SEQ ID NO: 44217 - DNA, 600 bp, Chicken  19866894282774_3
accatggaacatcagccttcctggtatctgggagagggcagtggtacaggcaccaaaattttgccttagtcactgatcattcacaagttagtaatgcctttgtacaggtctatgtacattcatctcaattgctcatatgttgttgtttctgtgagtacatttagtcaggtggcygcaggtgaggtaagcacatatttactgacayaggttggaaaacacttcctttggaggatgtagtattcctttcactgtgttacagtgacccggaagatgctgtcagtggagataagagattggcaygatggctgcaagagccaagggtcaaaaaagtgtastccctgtgttgtagtttcctgctggccagaaaagatgtctttycatcataactcattctgaaatcctctggtaagcggggcttatggcaaaactgattgttatgggcaaacattacctgcaaattgagagagtatttgagagagtatttgggaagctttgcttcataccttactcactgctttttttttctatctgcatttcagtacaggaaggatgtggagctcttggagtgggtccagaggagggccactaagataatcagag

SEQ ID NO: 44218 - DNA, 600 bp, Chicken  19866894282774_4
gggcagtggtacaggcaccaaaattttgccttagtcactgatcattcacaagttagtaatgcctttgtacaggtctatgtacattcatctcaattgctcatatgttgttgtttctgtgagtacatttagtcaggtggcygcaggtgaggtaagcacatatttactgacayaggttggaaaacacttcctttggaggatgtagtattcctttcactgtgttacagtgacccggaagatgctgtcagtggagataagagattggcaygatggctgcaagagccaagggtcaaaaaagtgtastccctgtgttgtagtttcctgctggccagaaaagatgtctttycatcataactcattctgaaatcctctggtaagcggggcttatggcaaaactgattgttatgggcaaacattacctgcaaattgagagagtatttgagagagtatttgggaagctttgcttcataccttactcactgctttttttttctatctgcatttcagtacaggaaggatgtggagctcttggagtgggtccagaggagggccactaagataatcagagggctggagcatgtctcctatgaggaaaggttgagg

SEQ ID NO: 44219 - DNA, 600 bp, Chicken  19866894282774_5
attcacaagttagtaatgcctttgtacaggtctatgtacattcatctcaattgctcatatgttgttgtttctgtgagtacatttagtcaggtggcygcaggtgaggtaagcacatatttactgacayaggttggaaaacacttcctttggaggatgtagtattcctttcactgtgttacagtgacccggaagatgctgtcagtggagataagagattggcaygatggctgcaagagccaagggtcaaaaaagtgtastccctgtgttgtagtttcctgctggccagaaaagatgtctttycatcataactcattctgaaatcctctggtaagcggggcttatggcaaaactgattgttatgggcaaacattacctgcaaattgagagagtatttgagagagtatttgggaagctttgcttcataccttactcactgctttttttttctatctgcatttcagtacaggaaggatgtggagctcttggagtgggtccagaggagggccactaagataatcagagggctggagcatgtctcctatgaggaaaggttgagggaactgggcttgtttagtttggagaagagaaggctcagggggg

SEQ ID NO: 44220 - DNA, 599 bp, Chicken  19866894282788_1
  misc_feature (1)..(142): n is any nucleotide
nnnnnnnnnnnnnnnnnnnnnnnnnnnnnnnnnnnnnnnnnnnnnnnnnnnnnnnnnnnnnnnnnnnnnnnnnnnnnnnnnnnnnnnnnnnnnnnnnnnnnnnnnnnnnnnnnnnnnnnnnnnnnnnnnnnnnnnnnnnnnnaggatagaatttctgactaaaccgtccgagcttacactactattccgtttaatagttatggagaaaccacaattaacagataaaataataaagatattcatactactgctcttaataaatacagtccagcaaactgaactgataagctataatcatasaagcacataaatagatagaaatacaattctgaaggcagtttacttgaaaacagtttggacagtctttatttgaagtgtagcacagtgtctgttctacaggaaccacacaacaaaagtcagcccttatcaaattcaaatctacaatctatttcctcagaaggattgcttcrtacgttattactagcgatataatgcctttaaaacagacatgagataacacgccatttaaaatacctagcacaaaacactgtagcagttacacagttactggagagatgccagacacctctataccatca

SEQ ID NO: 44221 - DNA, 600 bp, Chicken  19866894282788_2
agcttacactactattccgtttaatagttatggagaaaccacaattaacagataaaataataaagatattcatactactgctcttaataaatacagtccagcaaactgaactgataagctataatcatasaagcacataaatagatagaaatacaattctgaaggcagtttacttgaaaacagtttggacagtctttatttgaagtgtagcacagtgtctgttctacaggaaccacacaacaaaagtcagcccttatcaaattcaaatctacaatctatttcctcagaaggattgcttcrtacgttattactagcgatataatgcctttaaaacagacatgagataacacgccatttaaaatacctagcacaaaacactgtagcagttacacagttactggagagatgccagacacctctataccatcacaccacatttatagttgatactacatggaacatgcacactgatttctgcaacagaaacttcaccattagttttctcaattgcatcctacaggttaatttgatacttgtgcatctttaaattgtaaaaaaaaaagataaaaaaaggaaggcagtaaaatagaaggctggaaa

SEQ ID NO: 44222 - DNA, 600 bp, Chicken  19866894282789_1
aggattcacatagcaggaaggaagaaataaaagcaagttaaaaatacaaccaaggaacgggccttcatgtaggaagatgaagggtttgtgttcagatgctgaattcataggaaataaataagtcttcaggtatgcacattgtgttcagaatgggcccaagtagcacgatgttagccaacataaaacagcactgtcaaaagtgggataacgtgtttgatttggcaatggtttctataaggtaccctcctggttatttttctacaggtgtttgcttacgatcactgcttttggtctatggaygaatctgtcaaagaaaaatatgcaggtaatatttgctgtagctttgcgcgcgttgtctccgtgaacaaatggtctcattataatgcagtatttgctaaagggcacagaccatatggcatggaatatctttccccactatgactgcttgttgtcaaaagaaaaagraaaatcttaaatcattcctgtttttcttttctaaagatgatgattaggatagcaataggcgttgccacccatctgcagtgcwggaaattgaggaatccatcacaataatgggttactcgtatttacatttatatt

SEQ ID NO: 44223 - DNA, 600 bp, Chicken  19866894282789_2
cgatgttagccaacataaaacagcactgtcaaaagtgggataacgtgtttgatttggcaatggtttctataaggtaccctcctggttatttttctacaggtgtttgcttacgatcactgcttttggtctatggaygaatctgtcaaagaaaaatatgcaggtaatatttgctgtagctttgcgcgcgttgtctccgtgaacaaatggtctcattataatgcagtatttgctaaagggcacagaccatatggcatggaatatctttccccactatgactgcttgttgtcaaaagaaaaagraaaatcttaaatcattcctgtttttcttttctaaagatgatgattaggatagcaataggcgttgccacccatctgcagtgcwggaaattgaggaatccatcacaataatgggttactcgtatttacatttatattttgaatactgttctaagtgcatcmttttaraagcatcggatctgtttctttccaggatatgaggaatattgctataatatatgtttgttttctggttctggtgggagcatcatattagaacttaataattggagtattaaaaaagcctaatttaatataggagta

SEQ ID NO: 44224 - DNA, 600 bp, Chicken  19866894282789_3
tggttatttttctacaggtgtttgcttacgatcactgcttttggtctatggaygaatctgtcaaagaaaaatatgcaggtaatatttgctgtagctttgcgcgcgttgtctccgtgaacaaatggtctcattataatgcagtatttgctaaagggcacagaccatatggcatggaatatctttccccactatgactgcttgttgtcaaaagaaaaagraaaatcttaaatcattcctgtttttcttttctaaagatgatgattaggatagcaataggcgttgccacccatctgcagtgcwggaaattgaggaatccatcacaataatgggttactcgtatttacatttatattttgaatactgttctaagtgcatcmttttaraagcatcggatctgtttctttccaggatatgaggaatattgctataatatatgtttgttttctggttctggtgggagcatcatattagaacttaataattggagtattaaaaaagcctaatttaatataggagtatttgattaagagattttggggtgttattggcatattttggcaaacagatttggtaaaatctgaaatatgttagaacttaaca

SEQ ID NO: 44225 - DNA, 600 bp, Chicken  19866894282789_4
ggtaatatttgctgtagctttgcgcgcgttgtctccgtgaacaaatggtctcattataatgcagtatttgctaaagggcacagaccatatggcatggaatatctttccccactatgactgcttgttgtcaaaagaaaaagraaaatcttaaatcattcctgtttttcttttctaaagatgatgattaggatagcaataggcgttgccacccatctgcagtgcwggaaattgaggaatccatcacaataatgggttactcgtatttacatttatattttgaatactgttctaagtgcatcmttttaraagcatcggatctgtttctttccaggatatgaggaatattgctataatatatgtttgttttctggttctggtgggagcatcatattagaacttaataattggagtattaaaaaagcctaatttaatataggagtatttgattaagagattttggggtgttattggcatattttggcaaacagatttggtaaaatctgaaatatgttagaacttaacagttggtgatcttttccttttttcatacttattatcttttaaaartggtatttagtccacaaataaataaaagatccc

SEQ ID NO: 44226 - DNA, 600 bp, Chicken  19866894282789_5
atttgctgtagctttgcgcgcgttgtctccgtgaacaaatggtctcattataatgcagtatttgctaaagggcacagaccatatggcatggaatatctttccccactatgactgcttgttgtcaaaagaaaaagraaaatcttaaatcattcctgtttttcttttctaaagatgatgattaggatagcaataggcgttgccacccatctgcagtgcwggaaattgaggaatccatcacaataatgggttactcgtatttacatttatattttgaatactgttctaagtgcatcmttttaraagcatcggatctgtttctttccaggatatgaggaatattgctataatatatgtttgttttctggttctggtgggagcatcatattagaacttaataattggagtattaaaaaagcctaatttaatataggagtatttgattaagagattttggggtgttattggcatattttggcaaacagatttggtaaaatctgaaatatgttagaacttaacagttggtgatcttttccttttttcatacttattatcttttaaaartggtatttagtccacaaataaataaaagatcccagtatt

SEQ ID NO: 44227 - DNA, 600 bp, Chicken  19866894282789_6
atttatattttgaatactgttctaagtgcatcmttttaraagcatcggatctgtttctttccaggatatgaggaatattgctataatatatgtttgttttctggttctggtgggagcatcatattagaacttaataattggagtattaaaaaagcctaatttaatataggagtatttgattaagagattttggggtgttattggcatattttggcaaacagatttggtaaaatctgaaatatgttagaacttaacagttggtgatcttttccttttttcatacttattatcttttaaaartggtatttagtccacaaataaataaaagatcccagtatttataatttcgctgatgagcagtaggttagtgaggaattgagtgtgatatgcattgggtatatctgacccaaaccatttagctaggtgcagctatttgtagtgctgatgggggagtttgtatgcatcaagtcttgagttggcttgagtgtaaagttatggacttaaagagggaaagcagaagcaggagaagaaaaggatttttttcagcatatgaaattcatagaatcatagaatccttagagttggaagggtcctttaaag

SEQ ID NO: 44228 - DNA, 600 bp, Chicken  19866894282790_1
aagtcagactgacagaaagtctacccatgaacaagcacacaaatagtctgtgcctcctcagcttcaatagcagggagcttggcttcctagtcatgaccgtgaaactgtaatagataacgctgcataacagaacacaggaaaattatgatagtattaccatatgtgcataaattaaataaaaccgtatgcagataccttccataatctctgatgtcttaataccactagccaattaattattcataacatacttgacagcaaaacacaagttaattttcctttcttcttttgttctttccyttaagtgtcaatctgcctggtggtaggaaggccctagtgagggatctgggcaggttggattgctgggctgagaccaatgggatgagggtcaacaagagcaagcaccaggtcctgcactttggccacaacaactccaggcaacgctacaggcttggggcagagtggcttgaagactgcatggagaaagtgggcctgggggtgttgctcaacgctcagctgaacatgagccagcagtgtgcccaggtggccaagacggccaatggcatcctggcttatatcagaaacagtgttgccaggagg

SEQ ID NO: 44229 - DNA, 600 bp, Chicken  19866894282792_1
tttttttttattgggaggaattaatttgtatttttttcctgtaaggcttacccaagcaagtaggcctttctgtccagtttcctcgtttgcagtaaacagtactgggtccgtccaaaagatggtaacgctggcagccatattctatcgagttaccatgtttgtaacttggtaataaaggggcaagaagaacaccatttttaatcactggcggagaggtacagttttgctgtatttctaatacaaagtaaaaagatacataaataaatctttaaaatgatgtcacctctgcaaacggatttraatagcaatggagtttgatccagtatttgcatacaaatacagcgtcttactgacacagtctayaattaccctaccgaagcgcaggctatttttattcattctacactcctcatgtgtgtccgctcttgactccagctcatttacagtagatatggactagttgttcgggcgtgctgagaccatcttaatttgttgcttgaaatgttaaacccatacagagttcaaaataaacctccgtgaactattaaactaagaatcagcaaaatactcctgaatttgcacattcagacaacagtaacg

SEQ ID NO: 44230 - DNA, 600 bp, Chicken  19866894282792_2
gcctttctgtccagtttcctcgtttgcagtaaacagtactgggtccgtccaaaagatggtaacgctggcagccatattctatcgagttaccatgtttgtaacttggtaataaaggggcaagaagaacaccatttttaatcactggcggagaggtacagttttgctgtatttctaatacaaagtaaaaagatacataaataaatctttaaaatgatgtcacctctgcaaacggatttraatagcaatggagtttgatccagtatttgcatacaaatacagcgtcttactgacacagtctayaattaccctaccgaagcgcaggctatttttattcattctacactcctcatgtgtgtccgctcttgactccagctcatttacagtagatatggactagttgttcgggcgtgctgagaccatcttaatttgttgcttgaaatgttaaacccatacagagttcaaaataaacctccgtgaactattaaactaagaatcagcaaaatactcctgaatttgcacattcagacaacagtaacggaagcaatacaaaatgattgcagttaaatgctaatgtgtgtaagaaaattacatatacagcac

SEQ ID NO: 44231 - DNA, 599 bp, Chicken  19866894282797_1
  misc_feature (1)..(82): n is any nucleotide
nnnnnnnnnnnnnnnnnnnnnnnnnnnnnnnnnnnnnnnnnnnnnnnnnnnnnnnnnnnnnnnnnnnnnnnnnnnnnnnnnntatgtttaatatttaagaaatgaaccctgttaccactgacctggagagaacttagcagctttatcatggtgtaatttctgttacaaaaagatgagagaaaaaatagaaaagttggtctagatttgattattttttccatgtttcagtttcactccttcaggatggagggcaatgtgatgctggcaaacagaaatgcatgctacagcgtgccagaatgktgatgtctgaagcaagtggtgatgttgaagcagatttagtagagatattctgtgaatgaatcatgacacacattacttaagtggctggttgcttgcagaaccagggcttgctgctggagtagaaattgcccataaaatttcctgtgattgtattatagtacatatatccatacatacatataaagtaactggtcttacttaaagtgtttagttcaagccacagaaagttctgaaatctatgcaacttgcgtaggcaactctagctgttctgaacaattacaccttcacaagttaataat

SEQ ID NO: 44232 - DNA, 600 bp, Chicken  19866894282801_1
caggtttggtcaccatatatttatatgggttgaactctgcctagccaaattagtttcagtaagttggagaactttatatcagaaattaaatgcaatacctttttgctgagcaatgcaacattcctcaacccttattacatatccgacctgttaccttaatctctgtacccttctctgtacttccgaaaacagaatttattctttctttggttactacatgcacgaaaagccagatcgctagtgactgggtaccaactagatttgaaaaataatgaggtaaagaacaactttttaaaatamaatattgatggcgattagaaaacggatctgagtgggatctttaaggtcttttccaacctaagcaattctatatttgctaaaagtattcaagttcgttttctgggccatccttgtaagrgaaatagtgatttagatatgctacacccaacatctgcaccacaagttgtttttaacatgattcccttaagaatcaaagctttcataccctctcaccacatgtaataacttaagatgctcttagtcaattcagtccaatctgcaaaagggcaaaagtcacaaaatcaccaaattcttagaagc

SEQ ID NO: 44233 - DNA, 541 bp, Chicken  19866894282801_2
cattcctcaacccttattacatatccgacctgttaccttaatctctgtacccttctctgtacttccgaaaacagaatttattctttctttggttactacatgcacgaaaagccagatcgctagtgactgggtaccaactagatttgaaaaataatgaggtaaagaacaactttttaaaatamaatattgatggcgattagaaaacggatctgagtgggatctttaaggtcttttccaacctaagcaattctatatttgctaaaagtattcaagttcgttttctgggccatccttgtaagrgaaatagtgatttagatatgctacacccaacatctgcaccacaagttgtttttaacatgattcccttaagaatcaaagctttcataccctctcaccacatgtaataacttaagatgctcttagtcaattcagtccaatctgcaaaagggcaaaagtcacaaaatcaccaaattcttagaagctttgtgaaaacaggtgcccagatatagaggaaattccatattatcctaaatcgggaaat

SEQ ID NO: 44234 - DNA, 599 bp, Chicken  19866894282809_1
  misc_feature (1)..(34): n is any nucleotide
nnnnnnnnnnnnnnnnnnnnnnnnnnnnnnnnnnatttatacgaaaggatctctaagtgtgtttgcattcattattttacaaagaagatggattctgtgtgagggagggaatgtatttttatgccgtccaaacattactcctttacttgccaccaatgctttaacaactcactgactcttatgtattttctcttgtctagtgtaaaagaacaaataactaaaaaaagagccgtttatttacctcaaaattcttattactttcctagagaatcagagaaaaacaagtcttcttattcatgyggattttgtaagatcctcagtgaatgctgttttttgaggaaatacgtatgtatatttctaaacaatggttcatggacatctaatcctcagctgaatatataatggtcttatggaattgctggctgacatggtccagacctgaagcctcgcataacttgggctgcattgctggttgaatatatagagttgcaatttattttgtacatgcaaattagagatataatgaaaacattcccaattacgaggctggaaggccattattacagatggctttttctgccaacgggcaatttgttctc

SEQ ID NO: 44235 - DNA, 599 bp, Chicken  19866894282810_1
  misc_feature (1)..(30): n is any nucleotide
nnnnnnnnnnnnnnnnnnnnnnnnnnnnnnaaaaacttccatttttatgtttgctgtgtctcgctggagggctgtgctatctgagtaacgtagctcctgactgctgctgctgtggatgggcttcttcctgctacaaacaagtgtgctgcttgaagccttacccagctggttgtactgctggagacctcctctggtggcaactggggctgtgggaacttgctctcagcctccccatacagtgccagctgggctcacccagggatggagtggccatgctgaagtggatcagggagcacttgygcaattattgctactggtagaaggtgcaggagtagtaagctgtaggagatacgcagtaaaaagcagcagggtaggtgggaagrggaaatacttttatcgagtgcagctagaaccagaagaggatgcctcttcacagtttgagaatcctttagtacggattatgcctaaagcaatctgaaggatttattagcgaggtaagtgttgggtgttaccctgttccgcaggtgagctattgaagctaccaagggaatccaagtgtagtcatttgcagaacactcacttcctggctctcaagagcc

SEQ ID NO: 44236 - DNA, 600 bp, Chicken  19866894282810_2
agtaacgtagctcctgactgctgctgctgtggatgggcttcttcctgctacaaacaagtgtgctgcttgaagccttacccagctggttgtactgctggagacctcctctggtggcaactggggctgtgggaacttgctctcagcctccccatacagtgccagctgggctcacccagggatggagtggccatgctgaagtggatcagggagcacttgygcaattattgctactggtagaaggtgcaggagtagtaagctgtaggagatacgcagtaaaaagcagcagggtaggtgggaagrggaaatacttttatcgagtgcagctagaaccagaagaggatgcctcttcacagtttgagaatcctttagtacggattatgcctaaagcaatctgaaggatttattagcgaggtaagtgttgggtgttaccctgttccgcaggtgagctattgaagctaccaagggaatccaagtgtagtcatttgcagaacactcacttcctggctctcaagagccaggccaagcaatagatagggggctttactaagtcgtctttctactacatgtaggaatgcaaaagataggccaaatgtggaatat

SEQ ID NO: 44237 - DNA, 600 bp, Chicken  19866894282811_1
ggcacagctttgacttcctgccagcccaccagcttcaagcagctgaaagaggattaacaagtaggaacggcaatcgtaattgtaaaaaaaaataacagtaattcaaaggatttcttaaaataattttattctcattttaagactttattggaacccaaatgtctacatttagtttttaaatctcacagctatttacagttcttatggttaccaagaaatcacttttcacagctctgcttcacaggaaagtatgaagaagtctatcaggtagaccacctgagatgtatttcccagccattygcttcagtgaaccaacaggtcattgattctcacaccttggaggaagaaaagtaatggcctcaatttgagccagggaaggttcacgttggaaaaattcattttcagagagagtggtgaggctctggcactgctgcccagggagggggtgcagtcaccgtccttggaggggttcaagaaccatggagatgtggcactgagggatgtagtgtgtgggcgtggtgggggtgggttgaggttggattggagagtgttttctgacactgtgcattttgtacccaccagctgaagatccaaggtctt

SEQ ID NO: 44238 - DNA, 600 bp, Chicken  19866894282811_2
aggagagtgattcaagctccttacttcagaaataaagaacagttgtgtgtgtgggtgatattagattagtaagtaggtcacaagcatctgtaaacttaataactgcatgtaaaaccacaaaatggtttgtgttagaagggaccttaaaggtcactaatgtccaacctcccagccggtaatctgtggctgttggcccttgttatatccaaggacagtttggctccttcatcttcataacaccttcaggcagttgttggctgctattaaatcatccctttgcctcctttactcaagactaargagctcaswctctcattttatgtgatgtaggscccctcatcatcttgatagccttccactggactccctccatgtactcaacttccatcttgaagtgagaggctgaaagtgggcacaatataccaggtgccttcctcataaatgctgagtacagggggatgattactgccctcgatctgctgcacgcatacctgacgttgctcagcatatggcttgctttacttttaaagagagctcatgtttggctcacattcaacttactgttcatggagcccccaggttcttttcagcatggttgtt

SEQ ID NO: 44239 - DNA, 600 bp, Chicken  19866894282811_3
gattcaagctccttacttcagaaataaagaacagttgtgtgtgtgggtgatattagattagtaagtaggtcacaagcatctgtaaacttaataactgcatgtaaaaccacaaaatggtttgtgttagaagggaccttaaaggtcactaatgtccaacctcccagccggtaatctgtggctgttggcccttgttatatccaaggacagtttggctccttcatcttcataacaccttcaggcagttgttggctgctattaaatcatccctttgcctcctttactcaagactaargagctcaswctctcattttatgtgatgtaggscccctcatcatcttgatagccttccactggactccctccatgtactcaacttccatcttgaagtgagaggctgaaagtgggcacaatataccaggtgccttcctcataaatgctgagtacagggggatgattactgccctcgatctgctgcacgcatacctgacgttgctcagcatatggcttgctttacttttaaagagagctcatgtttggctcacattcaacttactgttcatggagcccccaggttcttttcagcatggttgttgatcagcc

SEQ ID NO: 44240 - DNA, 600 bp, Chicken  19866894282811_4
attcaagctccttacttcagaaataaagaacagttgtgtgtgtgggtgatattagattagtaagtaggtcacaagcatctgtaaacttaataactgcatgtaaaaccacaaaatggtttgtgttagaagggaccttaaaggtcactaatgtccaacctcccagccggtaatctgtggctgttggcccttgttatatccaaggacagtttggctccttcatcttcataacaccttcaggcagttgttggctgctattaaatcatccctttgcctcctttactcaagactaargagctcaswctctcattttatgtgatgtaggscccctcatcatcttgatagccttccactggactccctccatgtactcaacttccatcttgaagtgagaggctgaaagtgggcacaatataccaggtgccttcctcataaatgctgagtacagggggatgattactgccctcgatctgctgcacgcatacctgacgttgctcagcatatggcttgctttacttttaaagagagctcatgtttggctcacattcaacttactgttcatggagcccccaggttcttttcagcatggttgttgatcagcca

SEQ ID NO: 44241 - DNA, 600 bp, Chicken  19866894282811_5
taaagaacagttgtgtgtgtgggtgatattagattagtaagtaggtcacaagcatctgtaaacttaataactgcatgtaaaaccacaaaatggtttgtgttagaagggaccttaaaggtcactaatgtccaacctcccagccggtaatctgtggctgttggcccttgttatatccaaggacagtttggctccttcatcttcataacaccttcaggcagttgttggctgctattaaatcatccctttgcctcctttactcaagactaargagctcaswctctcattttatgtgatgtaggscccctcatcatcttgatagccttccactggactccctccatgtactcaacttccatcttgaagtgagaggctgaaagtgggcacaatataccaggtgccttcctcataaatgctgagtacagggggatgattactgccctcgatctgctgcacgcatacctgacgttgctcagcatatggcttgctttacttttaaagagagctcatgtttggctcacattcaacttactgttcatggagcccccaggttcttttcagcatggttgttgatcagccagcctgttccctccctgcaccagt

SEQ ID NO: 44242 - DNA, 600 bp, Chicken  19866894282815_1
gaaccagcctgcatgctgagcctggtgcaacaagcctgcgaggcggcatgtgttggtgagctgctggtaattacactgcaagtgaaggttgtttgcaggctcaaggctaacctaaaaaatctgaagcgtattaattatcactgcctgctgcaaagcccctttcactgcaagttggtttcacagtgccctgggcagggggaaggaggtaaatgtgcaatgcagagggataaagtattggctaagaatcagcgttttaggcttccttgttactcgggagcggtggctgccatttttgcccayggatygcaaagaaatgctgttctggtggaaaaatgtcactgatttcaaagggagaggaagatcctgtgtgtgctggaggagactggcatgcaaagatggaacgcagagatacgatatgtaaaaagagtaatgaacgaccgtgtgcttgatccaagcgcccattgaaactgattagactcctttcccagacttcaatgggatcaggtccttgatattttataaagacagatatatatttaaaattatttaagaaagttaagatgatagagagattgtcaacttccagcagtggtggtgaga

SEQ ID NO: 44243 - DNA, 600 bp, Chicken  19866894282815_2
agcctgcatgctgagcctggtgcaacaagcctgcgaggcggcatgtgttggtgagctgctggtaattacactgcaagtgaaggttgtttgcaggctcaaggctaacctaaaaaatctgaagcgtattaattatcactgcctgctgcaaagcccctttcactgcaagttggtttcacagtgccctgggcagggggaaggaggtaaatgtgcaatgcagagggataaagtattggctaagaatcagcgttttaggcttccttgttactcgggagcggtggctgccatttttgcccayggatygcaaagaaatgctgttctggtggaaaaatgtcactgatttcaaagggagaggaagatcctgtgtgtgctggaggagactggcatgcaaagatggaacgcagagatacgatatgtaaaaagagtaatgaacgaccgtgtgcttgatccaagcgcccattgaaactgattagactcctttcccagacttcaatgggatcaggtccttgatattttataaagacagatatatatttaaaattatttaagaaagttaagatgatagagagattgtcaacttccagcagtggtggtgagatagcg

SEQ ID NO: 44244 - DNA, 600 bp, Chicken  19866894282818_1
aggtaaacgttgtggccagtttactaagattttcctaaatttggtatttctttttatttgtgaatttttaacactatcatccttcctaatgcttcagaatcatcccgcttatttctaagtcaactgcagtcagcgtagctcttctcagtgttttgtggtaaagccagttgtgaaacaggtctacagatattaattgtgtgattagaatagaatacaaactgacagatctacagcagaaaagaaggactgtaacgtaggctttttggaaacgcaacaccttgggatctgcactccattttrwtactaaaatattgattttgcaggttgtctaattgttattgatggacagaaaaaaaaacgtaacaactcttttgaaatataagaccaaggaaaatatggaaggacaactaacgagacctgccatttttctttcttagaatgttaatgctcaactcgaatttgtgctctcggtattggcatggccactctgaagaaatgcacagtaattcatttctatttgtaacatcttcccaacacatgatcagctgttttctccccattcctaaagaagagcaaacatgagcatgccagaaacagcag

SEQ ID NO: 44245 - DNA, 600 bp, Chicken  19866894282818_2
ggtaaacgttgtggccagtttactaagattttcctaaatttggtatttctttttatttgtgaatttttaacactatcatccttcctaatgcttcagaatcatcccgcttatttctaagtcaactgcagtcagcgtagctcttctcagtgttttgtggtaaagccagttgtgaaacaggtctacagatattaattgtgtgattagaatagaatacaaactgacagatctacagcagaaaagaaggactgtaacgtaggctttttggaaacgcaacaccttgggatctgcactccattttrwtactaaaatattgattttgcaggttgtctaattgttattgatggacagaaaaaaaaacgtaacaactcttttgaaatataagaccaaggaaaatatggaaggacaactaacgagacctgccatttttctttcttagaatgttaatgctcaactcgaatttgtgctctcggtattggcatggccactctgaagaaatgcacagtaattcatttctatttgtaacatcttcccaacacatgatcagctgttttctccccattcctaaagaagagcaaacatgagcatgccagaaacagcagc

SEQ ID NO: 44246 - DNA, 599 bp, Chicken  19866894282820_1
  misc_feature (1)..(45): n is any nucleotide
nnnnnnnnnnnnnnnnnnnnnnnnnnnnnnnnnnnnnnnnnnnnncagtggtaggcagtgctccagtattaagcaggctggaaaaccagggcagaacagcagcactgctgggctgacccttctgctctgttgattcagtctctcctgtacagaaggcgaattactcagcatagagctgctcctcaattccttctgccccacagggacactccatgcagctcacttgccctgcagacccccagtaataccactgagcacacaggaacccagctgtgtgcatccaggagccctcgagtcagrgagactgaaaggcacttctggaaatcaggcatcacctgagcacaacgttcctctgaattattcatattcagctcatttacggtctttattttgcaccagggagaattcaactctaattgttctactgataaaggcaggttgaagcaaactgctgacctcgtaacctcataacctggataaatgagttcatcctaacaacgaactatgccttaaatgacaccaacaaccattccctgcctgctatttcattgcttagcacacagtcaggctaacaaactcagcaccgacgaggattgtaa

SEQ ID NO: 44247 - DNA, 600 bp, Chicken  19866894282823_1
atgtcctactgacacaaaatttggatgctatactggagtatcacataacatgagaagaataatatgaccttgagcaaatcaagtaaagcaacgaaatcagtcaaaataccaatttaaaagaaagagatcttaattttatcaacagtgacaaaaaaataaaattttctgagctgcagacaaaataaaagaaaatgacagtttgaaattaattagtataaatgttgtggaagcaaaaactttttaacagtctagtaattattattgatataatttaataattttatgctgtgaattggttgmcagagcttcatacacatgcactgattagtgtttttatctagatttataacaggaaattgttacttaagtattcttaagcacatttcttatctatttttagactgatttcccttggaaataagacctatctgatcatatcctcttagtttcttccctaagaaactgcagtaaattggattattttttctattcagaaagtatttgttgatacttcaaagacgataatgttcttactcacaatataggtggacagaacaagagcaaagcttctgcaagtatgaacccatgatctcaccctgc

SEQ ID NO: 44248 - DNA, 600 bp, Chicken  19866894282826_1
gcctcccatatgggctccggctaagagagctgaggctcgtcagcctggagaagaaaaggatcctaagaggactttatagcagccttccattacctgaagggggcctacaggaatgttggggagggactttttataagggcatgtagcaacaagatgaggggaaacagctttaaactggaagagggtggatttagactaaacattttgaagaacttctttactgtgaggatggtaagacactggcacgagttccccagtgaggctgtggatgccccctccccagaggtgtccaaggccagrctggatggggctgtgaacaacctggtctagtgggaggtgtccctttctatagcagggggatggaattagataatcttaaaggtcccttccaacctaaatcattccatgattttcttgaaaaaatgtaacaccaccttctacgttgcttacgctccaaagtgggaaagtgggaagatcttttataaacttctaaggagcagtgaaagttgctatatcattcttttaatgtcagtttttccagctaagactacaaagaccaaatatgatttttaggtttcagattgtgtttcagaatgaaaa

SEQ ID NO: 44249 - DNA, 600 bp, Chicken  19866894282826_2
ctttctatagcagggggatggaattagataatcttaaaggtcccttccaacctaaatcattccatgattttcttgaaaaaatgtaacaccaccttctacgttgcttacgctccaaagtgggaaagtgggaagatcttttataaacttctaaggagcagtgaaagttgctatatcattcttttaatgtcagtttttccagctaagactacaaagaccaaatatgatttttaggtttcagattgtgtttcagaatgaaaatttatgaatgcagactaaattttacaacaaaatctgagaaaytggcagagcctgagctttgcagacatttgtgctggagcaagcacggtgcagtgatgcaaccgtaacattaaaaatgagacagggcagctttaagacagaaacaggaagctgtaactagaatccagctgaattctgagctggggcgctttaccgtgaggctgcaaatcaagcagatgtgcttgctgtgaattgctacagtgtctggacttttctataccaaacgtgataacaccttccttctgtgatttttgtcattcttttatattttgtgtgttctctataaaggaaataaatggagaa

SEQ ID NO: 44250 - DNA, 577 bp, Chicken  19866894282832_1
agtgaatggatgtataacatgaaagtatttttaaaaatttaacattacattaaagtggctgctggagttctgttactgggaatttgtaagctaaaggagatatgacatttactgtaataaaatcaggatggccagaaaaaatgcctgaaaagggcctagactggagaaaagaaggacaattcaacaagatttgtggcataatattttaaggaacaatactgagctcatatcagctgtttaatactgggaacgggtgttcatcggtccaactgaataagcaaaatcaaaaagaggaaagaragaaactgaacagagttctggagctgtgtttgtattgctgaaaggagcaggctgttggtggcaagcagtgtagggaagtactgcttacgtgatccatgaaggggtgcagaggtctgagaattataagcaaaacctacgagtaatgaatgctacagatgatacagcacattttcccttcccttccctttccttcttcctttcattgccctgcactgtgctgcattgcacttctctaaaaggacgtgattttcttccagcatctccttgtaaggagcag

SEQ ID NO: 44251 - DNA, 600 bp, Chicken  19866894282841_1
gaagagcgctgcactggggaaggactctgtgggccatcggctacgccagcgagagcagatgaatgtgctgatgttggctgacagggagttagtggatgcagagctcttgtcctatagggacaatgcaggggatgaggactgcttacgccacatggatgacttgcaggtaaacagccgtagcaccgcagcggtggtgcggtcggtgtgtagtttctcctgttgtcagagggtatcttttcaccccgcacacaacggttggtgggtagcagctgtccattgacacgtagctctcaccagacytcttagrttccccacgcactcagtgagaaaatgggctggggatgtggaaccctgcagtgcctcgtcagaagggatggaagtgaatgagcgttggttaacgacttctctgcactgctgagcggcgcggcttttctctgaggcacaaagctgggttgtcacgtgcaaacacgaggctcttgttaccaggcagcaaaagtttgctctcctctcccccaggtgaacatgatgacacttgcagagcacattattgaagcgacgcctgacaggatcaagcgggagaattttgtgccaatggagtca

SEQ ID NO: 44252 - DNA, 600 bp, Chicken  19866894282841_2
gctgcactggggaaggactctgtgggccatcggctacgccagcgagagcagatgaatgtgctgatgttggctgacagggagttagtggatgcagagctcttgtcctatagggacaatgcaggggatgaggactgcttacgccacatggatgacttgcaggtaaacagccgtagcaccgcagcggtggtgcggtcggtgtgtagtttctcctgttgtcagagggtatcttttcaccccgcacacaacggttggtgggtagcagctgtccattgacacgtagctctcaccagacytcttagrttccccacgcactcagtgagaaaatgggctggggatgtggaaccctgcagtgcctcgtcagaagggatggaagtgaatgagcgttggttaacgacttctctgcactgctgagcggcgcggcttttctctgaggcacaaagctgggttgtcacgtgcaaacacgaggctcttgttaccaggcagcaaaagtttgctctcctctcccccaggtgaacatgatgacacttgcagagcacattattgaagcgacgcctgacaggatcaagcgggagaattttgtgccaatggagtcaccgcagg

SEQ ID NO: 44253 - DNA, 600 bp, Chicken  19866894282845_1
aaacaaacaaaaaaagtcttttatttaatctgaatctctcctcttttagcttgaaaccatctccccttgtcctttcaccagaccccgctaaagagtctgtcccctttcttacagccgttaagctgaacagcaaaggtaggccagaaaagacatcgtagcactgcaaataaataccagtaacccagattttcatcacctcatcctctgccggcgtttgtcccataacagcatgagggcttcagaggagacacgcgcggcctgagcacaacgctgatcaagacaaagtgctcggtaaaagcymgagctgcgtggggaagcctacaaacccggcaggccgttacagctctgtaggtgaggtacagccgtgctcccggcgatctgccacagtcacagcacggggtcacgccgacgctcggcgcggtaccgctgcgcgcgtactcacgttctctatgaactgcgtgttggacagcatgaggaagtcgttgaagacattgtgaaggcggcagtcggcgactttcgtctcgctgatcagcccgtccacctgcttcttgatctcgtgggtcctggagatggtttgctgggagaactcttgcaggaagc

SEQ ID NO: 44254 - DNA, 600 bp, Chicken  19866894282845_2
aacaaacaaaaaaagtcttttatttaatctgaatctctcctcttttagcttgaaaccatctccccttgtcctttcaccagaccccgctaaagagtctgtcccctttcttacagccgttaagctgaacagcaaaggtaggccagaaaagacatcgtagcactgcaaataaataccagtaacccagattttcatcacctcatcctctgccggcgtttgtcccataacagcatgagggcttcagaggagacacgcgcggcctgagcacaacgctgatcaagacaaagtgctcggtaaaagcymgagctgcgtggggaagcctacaaacccggcaggccgttacagctctgtaggtgaggtacagccgtgctcccggcgatctgccacagtcacagcacggggtcacgccgacgctcggcgcggtaccgctgcgcgcgtactcacgttctctatgaactgcgtgttggacagcatgaggaagtcgttgaagacattgtgaaggcggcagtcggcgactttcgtctcgctgatcagcccgtccacctgcttcttgatctcgtgggtcctggagatggtttgctgggagaactcttgcaggaagcg

SEQ ID NO: 44255 - DNA, 600 bp, Chicken  19866894282854_1
acccctcccttacttctcagtcacacaaaccactgtttcatctggatttgctcaccgagctaagcagaggttaagattgctgttttagaaggagagttcattgttttctgcccaaacaaaatccaccaagaggcagaaatgtttcagaagaaattcctgttaaaacaatgaactcctttcttcatgctgaaaaacagggctggcaaaagccaagccagcctcaggtcagcttggtatctctgtggcagtagagctcaggagccagctacccagcccacaccagctcaccgccatgcaccrataccaaggagctcccaggcctttgtcaagcactatttcatcaactcttttttccgctcaaaaaaaaattgagcgtgctaaatcaggatgtaaaaattcacacggacttggcaaacagagagctccgctggtggctaacggcctgtgactgcttgtatctaattgcacagactaacaaaaaacaaacaacatctggtgtagcaggaaaagtacataaatacgttcactttccatatctgaaacccgggaaatgcagacttccttgatctaaaatttgaggaagaaggttgggtgaaaaaa

SEQ ID NO: 44256 - DNA, 599 bp, Chicken  19866894282856_1
  misc_feature (1)..(10): n is any nucleotide
nnnnnnnnnnggtcagcctggctgggttttgggagcaggcctgcagttgacccccctgccatgttgcattttggccaggaaggtgctatttttaaggtgcttctgtggatttaatatcattttggccctgtttctgctgacgttgtgacagcagcaccaggccctgaatgtcagctgtctcctctcctcgtgcttgtcttctctctgctgcgctgtgcctcactgacctcagggctgggtggtttgctatgtgctctttgtggcaaaacaaactgcttctgcctttggatatgtccagcyctctttctcacctccacatggcctgctctggctcacaatcttgaggcgtttcacactgcatttgagatacttgtctgttattgctggttgcctgattcaatcctacttctgcaggtttggggagcccaaggcagttggctctactacgcytgtgattccctccgtctgccaccatcttggttttagcccacctcttctccattttgctgccacttgacctcacaaaagatttggctatctatagtgataggatcagttgagatttgacacctaatggggcagggggaaagaatttgacc

SEQ ID NO: 44257 - DNA, 600 bp, Chicken  19866894282856_2
gcagcaccaggccctgaatgtcagctgtctcctctcctcgtgcttgtcttctctctgctgcgctgtgcctcactgacctcagggctgggtggtttgctatgtgctctttgtggcaaaacaaactgcttctgcctttggatatgtccagcyctctttctcacctccacatggcctgctctggctcacaatcttgaggcgtttcacactgcatttgagatacttgtctgttattgctggttgcctgattcaatcctacttctgcaggtttggggagcccaaggcagttggctctactacgcytgtgattccctccgtctgccaccatcttggttttagcccacctcttctccattttgctgccacttgacctcacaaaagatttggctatctatagtgataggatcagttgagatttgacacctaatggggcagggggaaagaatttgaccccaagttagtcaggaatgtgattgatcagtgtaacaaaaccaggagttgcttgctctgacccagaagatggcattgtgtttggagtctgggtggaaggcaagaaggccttgtcatctgttaatttgctccagtatctgcttggatgtttgc

SEQ ID NO: 44258 - DNA, 522 bp, Chicken  19866894282871_1
cctctccctggctgtactctatgcttttttttctttctttttttttttttttttcccagccaatatcattcctctctctgcagtgcgagatgttcctattgatactgctactcattgcctgttttaagtataaataatacactagggaaaacgttgctccaagcagagtaatggaaaccaaacagcttgcagtatatcagctccaaaccgaaggcttaaaatcctgtcaatagactaagattttaactttagaatttaaaatcctgttacatctgtactatttgatgagcagttgctcartgtgctttgtatactgaaatctgccctcacattcaaaatgcccacgttttgggtggttacaaatatggagggttccaagacgggtacattcttagccactgagaagaaaaatgctgtgtaaaacaaacttccccagttcttatatactgacaatcccagtgtaattgtaatgggtgagtaaaagcgatacagacatttgactttcagaaagcaaattgattg

SEQ ID NO: 44259 - DNA, 599 bp, Chicken  19866894282874_1
  misc_feature (1)..(8): n is any nucleotide
nnnnnnnnaaatctctttttccatctctggaaattttttaagtgttgcttttcgggtacctggcggacatcacatggcagacctgcgaggaggaaggagatgcagaacacacccattcactacaaacctctgcagttctggagctgctgagtgccataggaaggagcagaacaaatgccgtaggacagctgaggttcccctgaggacgcgggctaaaaaaggtgaaagaagtgcaattaagggagcttttcagcacagaaagttaattagctactaaatagcattcatttagtgcagttyagcatggggaaatttatgttttgaaagcaaacagatcaatgggaagctgtggaaccgggcttttgggaagtccatgttgacattgacgtactttgtgctgtgacgtcctcacggttttcagcagtctccgtgacaagtgggaaggactgctggctttgctctgagtgtgcctccacatgaagggtgttcccagctctcatgtcgggattcctggctgtgtgctcaccctgactcctaaccgccccttccctgtgggtcaacatggattgattctgttggggctctccgaggcagaaggg

SEQ ID NO: 44260 - DNA, 600 bp, Chicken  19866894282874_2
aaacagatcaatgggaagctgtggaaccgggcttttgggaagtccatgttgacattgacgtactttgtgctgtgacgtcctcacggttttcagcagtctccgtgacaagtgggaaggactgctggctttgctctgagtgtgcctccacatgaagggtgttcccagctctcatgtcgggattcctggctgtgtgctcaccctgactcctaaccgccccttccctgtgggtcaacatggattgattctgttggggctctccgaggcagaagggcttcaggttccaaatggtttcagcccaasggggaattcagcacagctcccaacytcattacatgctcccaccggctggggtttggcattgggtttgctgccctgcccgtgtccttccatccctctgcagcatcacctttgcaagcagggctgtttgggcaaactgcttcattccacattacctgtgttcttttgcacttctttcatctattgctgaaatcagcacgtttcacaattcattatacatgtatgttgtcaaggacactcttttatttatcagaacaatagatttgggctccagctacccaacctgacctcactttgtaccat

SEQ ID NO: 44261 - DNA, 600 bp, Chicken  19866894282874_3
accgggcttttgggaagtccatgttgacattgacgtactttgtgctgtgacgtcctcacggttttcagcagtctccgtgacaagtgggaaggactgctggctttgctctgagtgtgcctccacatgaagggtgttcccagctctcatgtcgggattcctggctgtgtgctcaccctgactcctaaccgccccttccctgtgggtcaacatggattgattctgttggggctctccgaggcagaagggcttcaggttccaaatggtttcagcccaasggggaattcagcacagctcccaacytcattacatgctcccaccggctggggtttggcattgggtttgctgccctgcccgtgtccttccatccctctgcagcatcacctttgcaagcagggctgtttgggcaaactgcttcattccacattacctgtgttcttttgcacttctttcatctattgctgaaatcagcacgtttcacaattcattatacatgtatgttgtcaaggacactcttttatttatcagaacaatagatttgggctccagctacccaacctgacctcactttgtaccatcgccgcactcagtgtttaggcattt

SEQ ID NO: 44262 - DNA, 600 bp, Chicken  19866894282874_4
acaagagagcgatgggacttgagcaaagagaaaaggtgtaactggcctcgtggctgtgtccatggccttcctgcctctgggtttgctaatcccccagtaatcttttcctctgtcccttctgttcccgtgggggttgcatgtgttctcctggcagtctgctttctctggctcccacgaccccagctctctcttaaatactcctccagctttttgccttgcgctggtgcaaatccctcatccagcaggtattatgatctggctttcataaataataaatggtaaaattcttcccttgtgtcygcacatcaagtgtgcttgaatagaggactccccagaagccacaaaaccagcactggtggtgcgacgtactgctacttgggtacattaacagtgttttaagaagagaccaayggtttaagagtcttttcattcctttttttttcctctttttttccccccaatattgatgtataaaggaaaaagtgaccctaaacacagtgaggttttcttttycctcaattcccacagtgcctgaatgcacacagtgtgcgtggggcagcagatcccagtgagccgtcctctggcacgttgctgtgcctc

SEQ ID NO: 44263 - DNA, 600 bp, Chicken  19866894282874_5
gtcccttctgttcccgtgggggttgcatgtgttctcctggcagtctgctttctctggctcccacgaccccagctctctcttaaatactcctccagctttttgccttgcgctggtgcaaatccctcatccagcaggtattatgatctggctttcataaataataaatggtaaaattcttcccttgtgtcygcacatcaagtgtgcttgaatagaggactccccagaagccacaaaaccagcactggtggtgcgacgtactgctacttgggtacattaacagtgttttaagaagagaccaayggtttaagagtcttttcattcctttttttttcctctttttttccccccaatattgatgtataaaggaaaaagtgaccctaaacacagtgaggttttcttttycctcaattcccacagtgcctgaatgcacacagtgtgcgtggggcagcagatcccagtgagccgtcctctggcacgttgctgtgcctctgttcagctctgcacacacagatgtaagacctctgctcagtcttacagctcgtttgagtcacctcttccagggcaatcctgtggaaccagctgtgcctgctgctgagtgtt

SEQ ID NO: 44264 - DNA, 600 bp, Chicken  19866894282874_6
ccttgcgctggtgcaaatccctcatccagcaggtattatgatctggctttcataaataataaatggtaaaattcttcccttgtgtcygcacatcaagtgtgcttgaatagaggactccccagaagccacaaaaccagcactggtggtgcgacgtactgctacttgggtacattaacagtgttttaagaagagaccaayggtttaagagtcttttcattcctttttttttcctctttttttccccccaatattgatgtataaaggaaaaagtgaccctaaacacagtgaggttttcttttycctcaattcccacagtgcctgaatgcacacagtgtgcgtggggcagcagatcccagtgagccgtcctctggcacgttgctgtgcctctgttcagctctgcacacacagatgtaagacctctgctcagtcttacagctcgtttgagtcacctcttccagggcaatcctgtggaaccagctgtgcctgctgctgagtgttgcttcacaaataccagctgcttacagcaagcagtcccacacgggtgtcccgtaccaggactcctgttacttttgcattaatgtgagctacagagcactttag

SEQ ID NO: 44265 - DNA, 599 bp, Chicken  19866894282875_1
  misc_feature (1)..(52): n is any nucleotide
nnnnnnnnnnnnnnnnnnnnnnnnnnnnnnnnnnnnnnnnnnnnnnnnnnnntatttccaggaaaattaagaggaaagaaaaaaagtcaccaacaaaccaagcacatattccaagatttcacagtttatctaatcctaacctatagcagttgagagagttgattttctctccttctctgctctcatgattctgtcccctggagtacgatgctcagctccgggccctccaatatgacggatatagatgtatggagcaggcccagaggaggacaaccaagacaaccagagggctgcagcacytcctctgtgcagacaggctgaggaagctgggcttgttcagcctgaagaaggctccagggaaatcttatagcactcttcctcttttcaaaggygccctacaggaaagtgcaggaggagcacagcgataggaaaaggggtaatggctttaagctaaaagaggggagttagagatgatgaggaaattttccagagggtggtgaggtagaggcacaggctgcccagataagcagtgggtgcccaacccctggcggtcccacagcaggagtttggaactgggtggtctttaaggtcctgtccaa

SEQ ID NO: 44266 - DNA, 600 bp, Chicken  19866894282875_2
acaaaccaagcacatattccaagatttcacagtttatctaatcctaacctatagcagttgagagagttgattttctctccttctctgctctcatgattctgtcccctggagtacgatgctcagctccgggccctccaatatgacggatatagatgtatggagcaggcccagaggaggacaaccaagacaaccagagggctgcagcacytcctctgtgcagacaggctgaggaagctgggcttgttcagcctgaagaaggctccagggaaatcttatagcactcttcctcttttcaaaggygccctacaggaaagtgcaggaggagcacagcgataggaaaaggggtaatggctttaagctaaaagaggggagttagagatgatgaggaaattttccagagggtggtgaggtagaggcacaggctgcccagataagcagtgggtgcccaacccctggcggtcccacagcaggagtttggaactgggtggtctttaaggtcctgtccaacccaagccattctgtgagcctatggattctgtgtttggaacaggttaatcctgcattaaatgccatcttaacttggccaggttggaaacargt

SEQ ID NO: 44267 - DNA, 600 bp, Chicken  19866894282875_3
gygccctacaggaaagtgcaggaggagcacagcgataggaaaaggggtaatggctttaagctaaaagaggggagttagagatgatgaggaaattttccagagggtggtgaggtagaggcacaggctgcccagataagcagtgggtgcccaacccctggcggtcccacagcaggagtttggaactgggtggtctttaaggtcctgtccaacccaagccattctgtgagcctatggattctgtgtttggaacaggttaatcctgcattaaatgccatcttaacttggccaggttggaaacargtaaggaatgatctccgttactcttcacaaggatacggtgtttctgaatttctgtgacaaatgtccacatttatttggcacacaaayggatggtataaaaatgtagattctgctccttccttggagattgtaaatactaaatttaagcattctcctaacaagctaacaatgactgaagcattcctcccatgacaaggctgtccccactgccgtccattccgagaataccagttagtgaagaaagttgtgaaaactgtatacttaccctccgaatacacaacagatctttttgcagtgtgt

SEQ ID NO: 44268 - DNA, 541 bp, Chicken  19866894282875_4
ggaaattttccagagggtggtgaggtagaggcacaggctgcccagataagcagtgggtgcccaacccctggcggtcccacagcaggagtttggaactgggtggtctttaaggtcctgtccaacccaagccattctgtgagcctatggattctgtgtttggaacaggttaatcctgcattaaatgccatcttaacttggccaggttggaaacargtaaggaatgatctccgttactcttcacaaggatacggtgtttctgaatttctgtgacaaatgtccacatttatttggcacacaaayggatggtataaaaatgtagattctgctccttccttggagattgtaaatactaaatttaagcattctcctaacaagctaacaatgactgaagcattcctcccatgacaaggctgtccccactgccgtccattccgagaataccagttagtgaagaaagttgtgaaaactgtatacttaccctccgaatacacaacagatctttttgcagtgtgtccagctagtactgcctgagactcagaag

SEQ ID NO: 44269 - DNA, 600 bp, Chicken  19866894282879_1
tgtgatattctgttttaattagaagggttttgtttttaaggggcttttggcagcagggtgggttggagctctcagtgctgtccccatgcttcatctgtgctggagttggtgacggcttgttgaggccaggctggatgtggctctgggcagcctggtctgctggttggtgaccctgcacacagcagggggttggaactggatgagcattgtggtcctttgcaaaccaggccattctaggttcttataatccctcatcaaaccccaccgctatcattcatttagcttagaatcacacagtcrttaaggttgggaaagacctctaagatccccaagtccaaccccaacccatccccaccgtgcccactgaccacatccctcacgtgtagcccatgaacgccatttttttttccaggctggaagcaacgtttgcaatcaatgtgactaactgaaatagtaattagtgtgaacgctggctttattttaagacacattcgtcagtgctgcagcccttcggctccgtgctgctggctaatgttactgcagataacctgcagggaaagggcaggtcacctcgcgctgctgagctgcggggtcagagct

SEQ ID NO: 44270 - DNA, 599 bp, Chicken  19866894282883_1
  misc_feature (1)..(156): n is any nucleotide
nnnnnnnnnnnnnnnnnnnnnnnnnnnnnnnnnnnnnnnnnnnnnnnnnnnnnnnnnnnnnnnnnnnnnnnnnnnnnnnnnnnnnnnnnnnnnnnnnnnnnnnnnnnnnnnnnnnnnnnnnnnnnnnnnnnnnnnnnnnnnnnnnnnnnnnnnnnnatttagtgcaaagggacaaatgtcttaaacataagggacatgtctattaatcattttaatgccctcattacaattacacgagaagtctctgtcatcggttttcctgtataaaaaagtaaagattctgtagaatatttattaaawgattttccatattctgggtgcttataacaaaagaatagaaaaaaaattgtatcttccttcatatagaaatatggaacaatctttcaatgtttcaaaaaatgataaagtaccttttggtattgaaatttatgattctgactgagtgaagttacgttttcttttctgttaatgaaacacaaaatggtcattcattactgagtatgaggaatttttttccagatactctcaagcacttaccaaaagtgtatgatttgccagtactacttcccaagtgttttcttccaactcaagtcatttct

SEQ ID NO: 44271 - DNA, 600 bp, Chicken  19866894282885_1
cttcacatttctgccaaaatgggctaaaataacatgcctcttactacagtgtcattcttaagataccatttactttcttaattgtcttatgaaaggtgatactcctgcctatgatgtcattctgtttataattctttgtttataaacttagtaatgcgcatgtcatcaattacaacatgtctcagtaaatatacagaatttgtttccgtttctctgtagagaatataagcattgtcattatcttttggaaactcaagtttacctggatttgatactgtactttttacctgcaagtttcaragttaataacaagaagatcatagagttaactgtacccttcctctttattatcttacacacagactacaattaactacatacagactcatatgtagttaattcttactagagatgagtttagcaatgatgcataccttttgttgagtctgtgtagtactggtcagatgctcatgccaacaaagcaggtagactcttctgaatagtctatgtattgcatatataccttactagttgcaaagtagtagcttatgtcatatttttataattcccaaattattttcatcgtgaagcacgtgatag

SEQ ID NO: 44272 - DNA, 600 bp, Chicken  19866894282891_1
ttaatagtgtaagcagatataaaacaacaaaaaaattcaacccgttgatatgaaactttgatttatttacacaaacacgtaaaatcattgtcagtttatgacaatgcatgtgttcatttgaaaatgtggacaactcagacacctttaaaatctgtgatttcttccaagagggaactccaagtgatagcaaaagcttgaaacattcctgagctgtccacattgtacaaaacattgcagggatacaagtgccagcaaggtttcagaagcataagcagagtggtcactccttctctctcacaygtaattttatactggatggggtcaacattacatacccaggcactttcaccaatatctaagttagttaccattgctgaatgttgaaaatgttcaaatttgttgttcttttttcccctcagaaacacaggagtagtactttttactcatgtaggaacatcaaaaggaccccaaatgactaacacacagagattcttctgtwtgtgagttttgccagctcctctggtcagtktccttgtaattactcaaagtaacaagagtcaatacttctgcgacatccaaattctccttcgcaaccttcat

SEQ ID NO: 44273 - DNA, 600 bp, Chicken  19866894282891_2
acattcctgagctgtccacattgtacaaaacattgcagggatacaagtgccagcaaggtttcagaagcataagcagagtggtcactccttctctctcacaygtaattttatactggatggggtcaacattacatacccaggcactttcaccaatatctaagttagttaccattgctgaatgttgaaaatgttcaaatttgttgttcttttttcccctcagaaacacaggagtagtactttttactcatgtaggaacatcaaaaggaccccaaatgactaacacacagagattcttctgtwtgtgagttttgccagctcctctggtcagtktccttgtaattactcaaagtaacaagagtcaatacttctgcgacatccaaattctccttcgcaaccttcatgaaatcagacagcaactaggagtatttaaagagaactgcacttacctcaaactctccacagagagctacatcattcccagagcactcttcrgtgcaggacttgcttccagcactagcatctagatccagactacagggtgggtcgtacgatgaatcatgttttaaatcagttgatctacagtcaacactactgtcagag

SEQ ID NO: 44274 - DNA, 600 bp, Chicken  19866894282891_3
cattgcagggatacaagtgccagcaaggtttcagaagcataagcagagtggtcactccttctctctcacaygtaattttatactggatggggtcaacattacatacccaggcactttcaccaatatctaagttagttaccattgctgaatgttgaaaatgttcaaatttgttgttcttttttcccctcagaaacacaggagtagtactttttactcatgtaggaacatcaaaaggaccccaaatgactaacacacagagattcttctgtwtgtgagttttgccagctcctctggtcagtktccttgtaattactcaaagtaacaagagtcaatacttctgcgacatccaaattctccttcgcaaccttcatgaaatcagacagcaactaggagtatttaaagagaactgcacttacctcaaactctccacagagagctacatcattcccagagcactcttcrgtgcaggacttgcttccagcactagcatctagatccagactacagggtgggtcgtacgatgaatcatgttttaaatcagttgatctacagtcaacactactgtcagagtcttcttgtagttctatgggtaattcacat

SEQ ID NO: 44275 - DNA, 600 bp, Chicken  19866894282891_4
caaatttgttgttcttttttcccctcagaaacacaggagtagtactttttactcatgtaggaacatcaaaaggaccccaaatgactaacacacagagattcttctgtwtgtgagttttgccagctcctctggtcagtktccttgtaattactcaaagtaacaagagtcaatacttctgcgacatccaaattctccttcgcaaccttcatgaaatcagacagcaactaggagtatttaaagagaactgcacttacctcaaactctccacagagagctacatcattcccagagcactcttcrgtgcaggacttgcttccagcactagcatctagatccagactacagggtgggtcgtacgatgaatcatgttttaaatcagttgatctacagtcaacactactgtcagagtcttcttgtagttctatgggtaattcacatctatttggtttcatacatatttccttactattgctgttagtgaaatcattccttacatccatattctgcaccgattcaccatctggatttctaagacgtgtactgtcaccagacttttcttcttgtgaagtaaggtcagcaaaaataattgaactaccactt

SEQ ID NO: 44276 - DNA, 599 bp, Chicken  19866894282893_1
  misc_feature (1)..(17): n is any nucleotide
nnnnnnnnnnnnnnnnncggaggagctggcaggactcatcccggcttcattttgtaccttctgggaaagctatgagtaacagcagaggcagctgcagcctgaacgagctgatacaaagctggccaagctgcaccatcccctgccagcagtgcagggcccggggtcggctgcacacagaggtctgtgatacctctggcagcacccaaaaatcagacctgaatcatgcagtaacagcgttgcaatggcagcaggcttgtagttgtcctctctcctattcaggcagctgtttcttcccagtcrtaaaggaaagctgaaattaagcctttgaatttggatcaagtcaacaagtgcttaccagtggtctgaacaatttgtttccttttctttccccattctccaatttaccagcaagtactgcaatagaatctagttaattctcactaatgagtgggagaacaattgctaagccaaaaaaaattttgttgtgtgcaagtaagcaaacaaattaatgtaccataaaccatgttttgttcacttattttgacaactgtagtttgcttttaattatgatactccctagcagactagtttgcctgtct

SEQ ID NO: 44277 - DNA, 467 bp, Chicken  19866894282893_2
gtcaacaagtgcttaccagtggtctgaacaatttgtttccttttctttccccattctccaatttaccagcaagtactgcaatagaatctagttaattctcactaatgagtgggagaacaattgctaagccaaaaaaaattttgttgtgtgcaagtaagcaaacaaattaatgtaccataaaccatgttttgttcacttattttgacaactgtagtttgcttttaattatgatactccctagcagactagtttgcctgtctctcttgcagaagtactgaaccctttctcattctcctataygttttccctgaacctgtgttgctggttttcctttcaagctggatttaaaagaacatcccttgtgacaccacatctgttactaactcagttcagcatctcgctctgacttaaattggacacttaagtcttcctacctcctctggatttgatcgatgtaagcagctccc

SEQ ID NO: 44278 - DNA, 599 bp, Chicken  19866894282895_1
  misc_feature (1)..(66): n is any nucleotide
nnnnnnnnnnnnnnnnnnnnnnnnnnnnnnnnnnnnnnnnnnnnnnnnnnnnnnnnnnnnnnnnnntggtgggtctgtaatttgctatagacctttctttactatggactttactatgtcaaaagtggttttcctgagctgcagccgtctcctacagtgagaataattttcatttttctccaagctgactttaattacttgataaattaaccaagagtttgtaggatcaaaaatttgttagagcaaaatgaatggaaatggttaaatgaaaactccagatttctaccatagacactaccygttcactttgatcattatatattatttggattagtcatagctggcactgagtatgttttctgccatgtagtgctccaatttctccacaattagaatctatctttctatctgcctgtctgtctatacattatcattaatggaaaattatcagttcaaaaattctgagtatttttacatcctttaaaggaaataatggcatttasactgctgtttttttctctgagcaaatggacacatttctaaaatgcatgaggatgtgtttgctataaattaaacagcagttttatggaaacaatttt

SEQ ID NO: 44279 - DNA, 600 bp, Chicken  19866894282895_2
aaattaaccaagagtttgtaggatcaaaaatttgttagagcaaaatgaatggaaatggttaaatgaaaactccagatttctaccatagacactaccygttcactttgatcattatatattatttggattagtcatagctggcactgagtatgttttctgccatgtagtgctccaatttctccacaattagaatctatctttctatctgcctgtctgtctatacattatcattaatggaaaattatcagttcaaaaattctgagtatttttacatcctttaaaggaaataatggcatttasactgctgtttttttctctgagcaaatggacacatttctaaaatgcatgaggatgtgtttgctataaattaaacagcagttttatggaaacaattttctatatttttgtcctcagaagtgtttttgttcattagcgctcaataggtccagtgtatttgcttcaagacctggtatttgtccaatggagaatatagaaacatctgattattcttgcacgttcgatgctgaatgtccaggactgaaaaaatgctgcaactcatccaagggagcaggctgtgtgaatccaaagccagagggtatg

SEQ ID NO: 44280 - DNA, 600 bp, Chicken  19866894282901_1
gccatgaaaatatttctcctgggggaattccatcctctttaattcaggagtgtacttttattttattctattattttccatcactctcatagctggtgaaccatgctgcttgagtatattttatgttggttatgatggttacagtcatatctggtttgagtacttcatattcagagctgagatgtctatgaagtcttcatgatctggcattatcaagaaaggtgtggctatgtcataggcattacaactagcgtaagtgtgagaactagctagagtactatacagtggtgctagtgagaygctcctccagggttaatatgtaccactacttagcacattcaaatgatagggctgttctttcacctgacctcgttcagagccagttgggtgttactgttaggtaaatgttaggctccataaagatgtcttttgttttcatatttttaatctctgatgcttgaaattgaatatcattgcatgtagaaaaaaaaatggtcacagtgtcccttgttggaatgaaattcttcaaaccacaaaatccattaaggaaagaaactttgcaaaagcttgttctgtaagcaattagctcacattggtatt

SEQ ID NO: 44281 - DNA, 599 bp, Chicken  19866894282903_1
  misc_feature (1)..(3): n is any nucleotide
nnnattagaaaatcagaaaaaaccaccaccaaacaaaaccagaattccagtatttaatgcctagagacagaaataaaccaatccattctgttcacaagacagatatgtgtctatgaagagactcagaagaactgcacactcttaggaaaaagctaaataaacctactaaacaaatgttaaagaattttcttgtatatgtatgatactgttttactgtattaggctctttaaaaatcagtcaaccaaacacaaaacaaaacaaaacaataaagtacaaaacaagacaacaaagagctcccmcaaaaaaaaaaaaaaaaaaaaaaaaaaaagatataatccagatatttttgtatttttttgcaacaggaataatttaaaaagtaagctttgttacagcaataggcaagcgtgactaaagcaaaattgttatcttttgaaaatctgttggtgatgtgtcattaatattctaaaatctgctgaatcaatttaaagagtgagtttattcttataacccatttcagatctttctttcccgtctgttgcagaatacctaatatgctaattccttgctccttatagaattggtatgtaacaccaaa

SEQ ID NO: 44282 - DNA, 600 bp, Chicken  19866894282909_1
acctgctgctttcagttactgtagctaatagcttgaaattgaggcttaagttaaaataggggattcagactggacatagtgaaaagctcagcatggaggcagtggagcactggagcagtttcttcagggatgttgtgtgatctctgtacttggaagtttcaaagacccaactggacaaagtgctgagcaatctgatgctgcttgaagcaggaggctggactggagatcttctaaagtccatttctagttctttgattctgcacatgcatctggttataagttgaattaaattgtgagagytagccactagagggagacaagatcataaggaatgaacaaatacaacctgtagatctaagttcaaagtgcttatactgtaatgctttgcaggtctgtacatttatattgtgaaaacaaaccatattttagaatgaagatagatataggtatctgataatttgagcagtgtttttagcatgcacaacattctacagtgggttttttctaatgcacaaaatggtgcggtggttccttaaaacaacctctacatccttaaatctcctggaatatattctttgtcagtcagttgattacatttaa

SEQ ID NO: 44283 - DNA, 599 bp, Chicken  19866894282911_1
  misc_feature (1)..(158): n is any nucleotide
nnnnnnnnnnnnnnnnnnnnnnnnnnnnnnnnnnnnnnnnnnnnnnnnnnnnnnnnnnnnnnnnnnnnnnnnnnnnnnnnnnnnnnnnnnnnnnnnnnnnnnnnnnnnnnnnnnnnnnnnnnnnnnnnnnnnnnnnnnnnnnnnnnnnnnnnnnnnnntaagtctgataccatccctttcctagcaatgttgtcccaaggtctacataaagcacattgctccaaaccctcttgggagaagcctctgcccccacggcttcttgagagggcttgaggaggtggactacgagctcaggaaggrgaactgggggccaggggtgctagcagtaaaccatggggctgaaggggacagagaactgactgcccaccagggaaggcagcgccactatctcagtgcatgtacgaggccctttrctcatctgtagtaataggcttttatttctaaagccaggttggcaagtacttttattttctgcaacagctccttctgaaagggcatgggagccagctgtgtacagcagcgtgcagctgtatgacagagcatttcaaacaggaaacaggtaacaataaccgaactgtttgctctttctcctcctattc

SEQ ID NO: 44284 - DNA, 599 bp, Chicken  19866894282911_2
  misc_feature (1)..(45): n is any nucleotide
nnnnnnnnnnnnnnnnnnnnnnnnnnnnnnnnnnnnnnnnnnnnntaagtctgataccatccctttcctagcaatgttgtcccaaggtctacataaagcacattgctccaaaccctcttgggagaagcctctgcccccacggcttcttgagagggcttgaggaggtggactacgagctcaggaaggrgaactgggggccaggggtgctagcagtaaaccatggggctgaaggggacagagaactgactgcccaccagggaaggcagcgccactatctcagtgcatgtacgaggccctttrctcatctgtagtaataggcttttatttctaaagccaggttggcaagtacttttattttctgcaacagctccttctgaaagggcatgggagccagctgtgtacagcagcgtgcagctgtatgacagagcatttcaaacaggaaacaggtaacaataaccgaactgtttgctctttctcctcctattcaacagtgctactgatatatatactttttttaattgggatgaaaagagccagtcaggaagacagaggtacaagcttggaaagcaccctgcattcttcttcagccaccgtcccca

SEQ ID NO: 44285 - DNA, 600 bp, Chicken  19866894282919_1
gtaccattcaatctatgagctgggtggggcagcaataattactatttcatgtgctaggaggagtaagaagtgaacttttcaagtttaacgtgatgtttgggcttttttcctttttttctttttaatgacttagaacatcaataaatgttactgttgtgtgggtgtctataacaaatatattctggttctgattcttgcagaaatagttacattctgttcctcttttagctcttcttttcatgtttaactcttgaagagaaaagggcttgaataaggagcatccctcttatgaacagatayattctccagatgggcatctcctcttgagatcctttccttgtctttctggcacttgaggaaagccatttctcttgttagtttgccaaaggaaaatacaagttgcatctttcccacttcagtrtacaattcattaatcttctagactgagttttgttgttttttgtytttgtttttttttaagatgcacgtatgttataaggaaggcagtactttttttgttggactaatacggctggaaatggctaacaaactcttcaggttggaagcagaaaatgagttgtattgactttgcttttgcat

SEQ ID NO: 44286 - DNA, 600 bp, Chicken  19866894282919_2
ttaatgacttagaacatcaataaatgttactgttgtgtgggtgtctataacaaatatattctggttctgattcttgcagaaatagttacattctgttcctcttttagctcttcttttcatgtttaactcttgaagagaaaagggcttgaataaggagcatccctcttatgaacagatayattctccagatgggcatctcctcttgagatcctttccttgtctttctggcacttgaggaaagccatttctcttgttagtttgccaaaggaaaatacaagttgcatctttcccacttcagtrtacaattcattaatcttctagactgagttttgttgttttttgtytttgtttttttttaagatgcacgtatgttataaggaaggcagtactttttttgttggactaatacggctggaaatggctaacaaactcttcaggttggaagcagaaaatgagttgtattgactttgcttttgcattgcccagctggtggtggctcatcagcctctgtgtgcttaaaaggaactcttagagcactccttctgaaaacactgtgggcaccaggcacactgtcattccaattcctaaccttcacagagc

SEQ ID NO: 44287 - DNA, 600 bp, Chicken  19866894282919_3
ctataacaaatatattctggttctgattcttgcagaaatagttacattctgttcctcttttagctcttcttttcatgtttaactcttgaagagaaaagggcttgaataaggagcatccctcttatgaacagatayattctccagatgggcatctcctcttgagatcctttccttgtctttctggcacttgaggaaagccatttctcttgttagtttgccaaaggaaaatacaagttgcatctttcccacttcagtrtacaattcattaatcttctagactgagttttgttgttttttgtytttgtttttttttaagatgcacgtatgttataaggaaggcagtactttttttgttggactaatacggctggaaatggctaacaaactcttcaggttggaagcagaaaatgagttgtattgactttgcttttgcattgcccagctggtggtggctcatcagcctctgtgtgcttaaaaggaactcttagagcactccttctgaaaacactgtgggcaccaggcacactgtcattccaattcctaaccttcacagagcatgtgytggttgaagtattatctaagggcaggtgtagctgccca

SEQ ID NO: 44288 - DNA, 596 bp, Chicken  19866894282919_4
tcattaatcttctagactgagttttgttgttttttgtytttgtttttttttaagatgcacgtatgttataaggaaggcagtactttttttgttggactaatacggctggaaatggctaacaaactcttcaggttggaagcagaaaatgagttgtattgactttgcttttgcattgcccagctggtggtggctcatcagcctctgtgtgcttaaaaggaactcttagagcactccttctgaaaacactgtgggcaccaggcacactgtcattccaattcctaaccttcacagagcatgtgytggttgaagtattatctaagggcaggtgtagctgcccatgtcttgccactcctgtcaaaccagtagaacggtatttgatgaagtgacccaagagtacctgagtggaggagaagtaaacttctgttaataagagactgactactaaaagttattttacgcacacttcctggcaactgttacctcaacagaatttatgttgtgttaagaagaaagtgttttagaagtaaacttaggaatattaacaaattgtgtcaggacaagtggagagggcagtcatggagggacagagtacttga

SEQ ID NO: 44289 - DNA, 600 bp, Chicken  19866894282929_1
ccttacgagcactaatcatcagtatgaacctgagagtctctgcaacaaagcacaaatcctatcatagagatcttacaagcatgccacatccgaactgcccccactgtttcccatacctttctctggtactttcctctcctccttgtctggcagggtgacataagaaaatatctgaggtttggaagtgactgctctgtcaaagatcatcctgttcatagcgcgctcatagtccaatttcacttctttctccagacagcccatgcagcctagtattattctgttacaagacatggaaacagyggtaacccacagtgtcagaacagaagcctgtctgtagctctactgcaaaatccacccttcactccctccctctctcccatgtttgctagcccataagagcactcataagacagctgtgcagacactggaacagccagcaaagctttcaatcagacatttaagtgaggacctcagacagggactgcagccttcctaagtgtcttttcagatcaaagcaaaatctctactgagggcatacagactgagcagcattacagagagaagtgtaaataaccaagaaacgaagcagcttgcttgtaa

SEQ ID NO: 44290 - DNA, 600 bp, Chicken  19866894282937_1
ttaagggtttttatttgttgcatattgacatctctttgtggataatccatctcggtctgcagtgcccggaggttttattagggctcccgagacggagatgcagcagatataattggccccatgcctcagctgctccgtcacacagcagcacgcggtgccgtgtgatgctgcacacctgcctgagctgcaaggctgccggtcctctgcaagatgggaatggtttgggatcggagtcccacttcccggtgatgtaggcggtcatttgctgtggcactgggagcaggtggcttgctgcaaacrcttcccccaggtacgaggaaggtgggggagcgctggcgtatgttgtgcagcagttattcacgaggctttgggacttcggtgtgccacttggaggctttgtaacaacggtggctgtaattgcttcaatgagccctgacagcagcgaacttccattctagattctaacttgaatacagtgttactggagctggcaggtggttggttgatcacggtccagccctgaggctttacgctgccccatggtgctgacagaacccagcctggtgggctgggaatgcgccccccccttccagcacgcag

SEQ ID NO: 44291 - DNA, 553 bp, Chicken  19866894282939_1
gcttatattttctacctagcttttgacattgtgtcctgtaaaattgcaaagaagctgaggagttgtgggctggatgagcagaccatgaggtggattgaaagctgcctgaatgatcaggaaggtggcaatcagcatcatgaaatctagttggaggccagcaatcagcggtatagctgaagggacaaggctatccaacacttaacttacacacagcccaactatctgtataccctcacaagtttgcagacaacccaaaaatgagagccgtgactggtatgccagagggtcacgctactgtaygaagggaccttgacagactagggaggtaggctgacaggacccacgtgcagttcagcaagaagtgcaaagttctgtaccaaaggtggaaaattctgtaagaacaggcatgcctagctggaaagcagcttggcagaaaaggttgtaggtgtccatccttgttggcatcaagttgagcattgggtgacatgtgtttttgccatccaaaaaggcatcctgggctgcactaggagaagcattgccagcagattgagag

SEQ ID NO: 44292 - DNA, 599 bp, Chicken  19866894282942_1
  misc_feature (1)..(116): n is any nucleotide
nnnnnnnnnnnnnnnnnnnnnnnnnnnnnnnnnnnnnnnnnnnnnnnnnnnnnnnnnnnnnnnnnnnnnnnnnnnnnnnnnnnnnnnnnnnnnnnnnnnnnnnnnnnnnnnnnnnngaaaacagaagtaggatctggttctcatgtctgctgagacctgtgtttccctccctagctcggattatccactttatttaacaaggagagcaggaagtatcaatcagttttcagctgtggttcaaggagtaaaatttacttagatacttaccttgcagaatatcccacacccagaggctttcgyttctgcctccgaggatctctcacttgctgactgccagaggaatgaacattcaccacagatctccgattctttcctttgtgaggagaacgtgcctctccactcctgtcctctcccrtgctgccactttttcttcctttaaatgggatatccaccaggccttggcatttactcaatactttttcccaaccagaaacagagttttcacctttagatgtagcagggagacaggcaaatcccagcaaatggaggaacagagctactgagacctgggcatccctagcagcatagagaacctgcag

SEQ ID NO: 44293 - DNA, 599 bp, Chicken  19866894282942_2
  misc_feature (1)..(1): n is any nucleotide
ngaaaacagaagtaggatctggttctcatgtctgctgagacctgtgtttccctccctagctcggattatccactttatttaacaaggagagcaggaagtatcaatcagttttcagctgtggttcaaggagtaaaatttacttagatacttaccttgcagaatatcccacacccagaggctttcgyttctgcctccgaggatctctcacttgctgactgccagaggaatgaacattcaccacagatctccgattctttcctttgtgaggagaacgtgcctctccactcctgtcctctcccrtgctgccactttttcttcctttaaatgggatatccaccaggccttggcatttactcaatactttttcccaaccagaaacagagttttcacctttagatgtagcagggagacaggcaaatcccagcaaatggaggaacagagctactgagacctgggcatccctagcagcatagagaacctgcagaaaagcaaagacattcacacactggcaaatggcaaacactcccaagcaccatcagtctttaatagtagatgcagcaaagccaggagctggatttatttcccttcaaaactcacac

SEQ ID NO: 44294 - DNA, 600 bp, Chicken  19866894282943_1
gcaaccaccgtgtactagcacccttctcactctgatataattaccatttcactaccaaagtaacgttgaagcagttctactcagaataacgtccttgaaaagcttctctaacccaacctattagtttgaattcctaccctctgatgcattgccctgctccctcctaatccagggataacgctatgtctgagagcaggcaaaacctctcagagaattcttttgaggtccagattcctgctggctgggagaaaagcacattttgagaagcagcgtggtatccaggcaatctctaaacaaccygttatttttagagcttaaagaacattttagaattcaaaaccagagaggatatgtgcgtatggaggagaaagggccacgtgtgtgcaaggcagtgacaggtaatgtggctcccgcagaasaggaatgggagtttcaatgggaaggcagcacataagaggaagctgactatatataaaacagcagactggacacacgtcactttcattcctcctaacttcccgagattgagactgcttgttcttagggaaatggaagcactgatgctgactttggactgaacgtggctaagctgaaggtgtg

SEQ ID NO: 44295 - DNA, 600 bp, Chicken  19866894282943_2
attagtttgaattcctaccctctgatgcattgccctgctccctcctaatccagggataacgctatgtctgagagcaggcaaaacctctcagagaattcttttgaggtccagattcctgctggctgggagaaaagcacattttgagaagcagcgtggtatccaggcaatctctaaacaaccygttatttttagagcttaaagaacattttagaattcaaaaccagagaggatatgtgcgtatggaggagaaagggccacgtgtgtgcaaggcagtgacaggtaatgtggctcccgcagaasaggaatgggagtttcaatgggaaggcagcacataagaggaagctgactatatataaaacagcagactggacacacgtcactttcattcctcctaacttcccgagattgagactgcttgttcttagggaaatggaagcactgatgctgactttggactgaacgtggctaagctgaaggtgtgctccaaactttaacaacatgttaagtgttcaaaattaatgatgggatcttccttagataatacactggtattgatttattaggctcctctgaaagcacgcttgcattctatctgttaca

SEQ ID NO: 44296 - DNA, 600 bp, Chicken  19866894282949_1
gagcaggaaaaaaggctgcctttgatagtttttctggatgagtgataagttgagggtgattaaaaaactttttttttaatcattatgacttgtattctagaaagtgggttcttacataagaaccttatcaaaactacatgctataattaagcacctcttctttagcagtatattgtaatatatatatatatatgtaatacctatatatatatatatataggtagaaactaacaacccagtttaggtgagtctaagtattgacaggtttttttctaattaggagaaatgtatgaagcagartgtttaggatcattaaagtagccattttcccttcacctgatggtgcttgcagtttgtatttcctgacaccagaagttcaytgtatttaataagcaacttcctattgcattagcaaatttccatctggttggaaagctacctgattctattactatatttgtcttcacggctgtgatgcaaaacataatttgcttatagcttcgtaaatatggctaatgtaatgatacgtacatcatattagtcacaaaaaggttttgtgttgtgcagggtactttggaatttatgaatgaacaaggaaca

SEQ ID NO: 44297 - DNA, 600 bp, Chicken  19866894282949_2
cattatgacttgtattctagaaagtgggttcttacataagaaccttatcaaaactacatgctataattaagcacctcttctttagcagtatattgtaatatatatatatatatgtaatacctatatatatatatatataggtagaaactaacaacccagtttaggtgagtctaagtattgacaggtttttttctaattaggagaaatgtatgaagcagartgtttaggatcattaaagtagccattttcccttcacctgatggtgcttgcagtttgtatttcctgacaccagaagttcaytgtatttaataagcaacttcctattgcattagcaaatttccatctggttggaaagctacctgattctattactatatttgtcttcacggctgtgatgcaaaacataatttgcttatagcttcgtaaatatggctaatgtaatgatacgtacatcatattagtcacaaaaaggttttgtgttgtgcagggtactttggaatttatgaatgaacaaggaacatggacagagagaggaggcagccacttcttttataagcctcgtgttgtctcaaaactttacaaaggctttgaaggaaagag

SEQ ID NO: 44298 - DNA, 600 bp, Chicken  19866894282949_3
taagcaacttcctattgcattagcaaatttccatctggttggaaagctacctgattctattactatatttgtcttcacggctgtgatgcaaaacataatttgcttatagcttcgtaaatatggctaatgtaatgatacgtacatcatattagtcacaaaaaggttttgtgttgtgcagggtactttggaatttatgaatgaacaaggaacatggacagagagaggaggcagccacttcttttataagcctcgtgttgtctcaaaactttacaaaggctttgaaggaaagaggaaagattyaaaaaaaaaagagtaaaaagagggaaaaacaaacaaacaacaactaktgcctgaaaatgtcaatgtttctatttgggtatatgaaagggggagggaaggtacgacattttgcatgagagcagaatttttgggaggtgtctgccctctggaaagtcagaggattcttggcatggtaaggatgtctccctaaaatcttactctgttacagctttgtaaccgcggtctgcaaagtagaaacatataaattggtagcaccagaaaaatacagttagaaagggctgaggagaacctattgagcaa

SEQ ID NO: 44299 - DNA, 600 bp, Chicken  19866894282949_4
tacctgattctattactatatttgtcttcacggctgtgatgcaaaacataatttgcttatagcttcgtaaatatggctaatgtaatgatacgtacatcatattagtcacaaaaaggttttgtgttgtgcagggtactttggaatttatgaatgaacaaggaacatggacagagagaggaggcagccacttcttttataagcctcgtgttgtctcaaaactttacaaaggctttgaaggaaagaggaaagattaaaaaaaaaaagagtaaaaagagggaaaaacaaacaaacaacaactaktgcctgaaaatgtcaatgtttctatttgggtatatgaaagggggagggaaggtacgacattttgcatgagagcagaatttttgggaggtgtctgccctctggaaagtcagaggattcttggcatggtaaggatgtctccctaaaatcttactctgttacagctttgtaaccgcggtctgcaaagtagaaacatataaattggtagcaccagaaaaatacagttagaaagggctgaggagaacctattgagcaaaacattaatacaaatggagttttattatttgatttttaccagcctcc

SEQ ID NO: 44300 - DNA, 600 bp, Chicken  19866894282955_1
gaggcaactattgcaccctatgggttaagcatgcctcacaagactaccaaagtatatttataaggctatttcatgacaacaaaagaggcaatgtttatttcacatcaactcccaactctaaaaatgcctttattttccaaagtcctgtagacttgcaaagtcagctaaggatacccctttcccagtttggcttcagccctttaaagtgattctgtccaaaaattgcctgaatttatcaaaactacagaaagcctctcaatattcatggggttctgcagctttttattctctcttccatcycaaagtacccctctccacccctctgtccaacatataccttcaactgactcttaaacaaactaaaagccacagttaaaaattaattgaaggggaccttctccagtaactcgagatccacactggagaggaggcttggttttgtttttcctgagcttatccttttctgacaagtgagaggttgtggatgccccatccctgaaggcattcaaggccaggctggatgtggctctgggcagcctggtctggtggttggtgacactgcacacagcaggggggttgaaactcaatgatcactgcggt

SEQ ID NO: 44301 - DNA, 600 bp, Chicken  19866894282961_1
aggccgtcttcagaatctattgatagcatgggaaccataatgggactgatttcccagcccactgaatttagtagtagatttttctttggattaacctttcttcatggaaatggctcttgtatggagatagtcttcacaaatgaaggagtgccacaaatccctgtggcagcttattacatacacaatagtgtttccaaactactactttgtgccttcttctttgaaggtgaccacagcttgaacaataccaagtaactcagctcagtggccaaatttgtattttcttttcatattctatcraagagaaactgcattaccctgtttgcagctcagttacaggcatagggccaaawctttaattgcatacacagctattgcattgctcataaaacattttttcacagaaatctttatgcctgtggaattttagtggggtcatataatacacttcacttaaagaaagaagggaaaatttagcattttttatatctgggtgagagcatctgaaagtcagttgtcttagtgacaattaaataaatayataatgatatatgtatatatatagtgtttaaaacattattttaaaatacaagatcctca

SEQ ID NO: 44302 - DNA, 600 bp, Chicken  19866894282961_2
ccagcccactgaatttagtagtagatttttctttggattaacctttcttcatggaaatggctcttgtatggagatagtcttcacaaatgaaggagtgccacaaatccctgtggcagcttattacatacacaatagtgtttccaaactactactttgtgccttcttctttgaaggtgaccacagcttgaacaataccaagtaactcagctcagtggccaaatttgtattttcttttcatattctatcraagagaaactgcattaccctgtttgcagctcagttacaggcatagggccaaawctttaattgcatacacagctattgcattgctcataaaacattttttcacagaaatctttatgcctgtggaattttagtggggtcatataatacacttcacttaaagaaagaagggaaaatttagcattttttatatctgggtgagagcatctgaaagtcagttgtcttagtgacaattaaataaatayataatgatatatgtatatatatagtgtttaaaacattattttaaaatacaagatcctcaattttgtccagaataacactcatcttattctcagttttggattctctatttca

SEQ ID NO: 44303 - DNA, 600 bp, Chicken  19866894282961_3
acaataccaagtaactcagctcagtggccaaatttgtattttcttttcatattctatcraagagaaactgcattaccctgtttgcagctcagttacaggcatagggccaaawctttaattgcatacacagctattgcattgctcataaaacattttttcacagaaatctttatgcctgtggaattttagtggggtcatataatacacttcacttaaagaaagaagggaaaatttagcattttttatatctgggtgagagcatctgaaagtcagttgtcttagtgacaattaaataaatayataatgatatatgtatatatatagtgtttaaaacattattttaaaatacaagatcctcaattttgtccagaataacactcatcttattctcagttttggattctctatttcacatcttatttgtaagctatgaatactgttaccatgtgttcagtactacagcttctgtaacagtgaaaaatccaaatcaggaagagtttctgatctctctctctctcccaaggacactgatgcttgattaacttcactatatgccttgctgaaatgtcacttgggataagattgctcactgttctttgc

SEQ ID NO: 44304 - DNA, 600 bp, Chicken  19866894282965_1
acaagttttattttcctagctttcccatctgcccctgcaactttcccatccacctttacatgtcaacagagcattctacaaatactcttcaaccattcatgcaggcgcttatccaatcagagccgtgaactgttctttcttcttctagaggtgtccttggttctcatgctgtttatcttgctacacagctgctgctctgaacagtttttctcatattcccacacccttcctacccctacggttctgtgaaattatactttttttttttctccacttaatgggtagataacaagtctgagrgacagsttctggaatataggcaacaggcgccactctatatactcaggtttcttgttccttgtctcctacgactatttcagacaggcacaggccttccactgcatcaagccatcatctgccagcttaaggtgggtgtctcacatacactcaggtatgcaaaatgtctcccaatgcatgcatttacacatgcccaacaccttcccaagaattgtttaatgaaaggctacttcagaagttataggatgacattcaaatgatagactccctggttcccctgtttgataagattatcgttcctct

SEQ ID NO: 44305 - DNA, 600 bp, Chicken  19866894282965_2
tttattttcctagctttcccatctgcccctgcaactttcccatccacctttacatgtcaacagagcattctacaaatactcttcaaccattcatgcaggcgcttatccaatcagagccgtgaactgttctttcttcttctagaggtgtccttggttctcatgctgtttatcttgctacacagctgctgctctgaacagtttttctcatattcccacacccttcctacccctacggttctgtgaaattatactttttttttttctccacttaatgggtagataacaagtctgagrgacagsttctggaatataggcaacaggcgccactctatatactcaggtttcttgttccttgtctcctacgactatttcagacaggcacaggccttccactgcatcaagccatcatctgccagcttaaggtgggtgtctcacatacactcaggtatgcaaaatgtctcccaatgcatgcatttacacatgcccaacaccttcccaagaattgtttaatgaaaggctacttcagaagttataggatgacattcaaatgatagactccctggttcccctgtttgataagattatcgttcctctaaaaga

SEQ ID NO: 44306 - DNA, 599 bp, Chicken  19866894282975_1
  misc_feature (1)..(33): n is any nucleotide
nnnnnnnnnnnnnnnnnnnnnnnnnnnnnnnnntacgtgtatttgagttaactgagcaagtttggatctgaggagctgcagttaccaagtgtttattaagaattttatccaacatgatgtagctagtatcattgtgcagtgtgctgtgggagaacctgagtacagtctttatctcacctagccagagaaaatggctctaggaggagccctgatgagtactctgtccttcctctactgcccttcctccttaaccaatttgtcccacttgttcgtgagcagggtgtgatgagctctccagasccaccttgtgcactcatttctagtgcttcactctctttgctacagcattttatctattgtctaaccttgtgtcaatttaagcccattactttttgtcttattcagagtgaatgcagagtagtgtacttggtaagaatttcttacgtatctgaaaactgttagtctgtttcttttctcgtgggaagatgatccttaaaagtaacacaaaaagaaataataacagtcataataactatcaagtcctattcactgacacatctttccaaattatctacttttgtctgtcttgcgccctcacc

SEQ ID NO: 44307 - DNA, 600 bp, Chicken  19866894282980_1
ttattgtgatatttggtgcgaagtgtagacaagagctcacggcagaaaaaggagagttcattatgttactaacctcagcaagtttcatacaagctgaatctaataggcatactcaagaacgtatgtctacagcactgaggcttaaaatttttatgatgtgctcagcacgtgctatttgatgaatcagtattctggttcaggttcaggaaaccgccataattaacacagaaattggtacagataattcaaacataatctacaatacatcacgtacttcatgtactggcatcctctcaaaamttaagagctttycaatttaccccaaacaacaacttaaaacaaaaaaaaaatagtagatcagactaagctgcctacctgaactctggattcagtgctttcacccatgtctgacaagaatgtgaaggtatcacaggaattcatgcttgcatgactcagaagcaaatgcattaacagaaaaagcaggatgtgtttcctttactgccaattctttaaaaacagtgtggagccagcagacagaaaaagatcagtttgggtcatgttgatcataagaacagagaatctgaagatgaatttgatact

SEQ ID NO: 44308 - DNA, 600 bp, Chicken  19866894282980_2
ttggtgcgaagtgtagacaagagctcacggcagaaaaaggagagttcattatgttactaacctcagcaagtttcatacaagctgaatctaataggcatactcaagaacgtatgtctacagcactgaggcttaaaatttttatgatgtgctcagcacgtgctatttgatgaatcagtattctggttcaggttcaggaaaccgccataattaacacagaaattggtacagataattcaaacataatctacaatacatcacgtacttcatgtactggcatcctctcaaaamttaagagctttycaatttaccccaaacaacaacttaaaacaaaaaaaaaatagtagatcagactaagctgcctacctgaactctggattcagtgctttcacccatgtctgacaagaatgtgaaggtatcacaggaattcatgcttgcatgactcagaagcaaatgcattaacagaaaaagcaggatgtgtttcctttactgccaattctttaaaaacagtgtggagccagcagacagaaaaagatcagtttgggtcatgttgatcataagaacagagaatctgaagatgaatttgatactgtttatttttat

SEQ ID NO: 44309 - DNA, 600 bp, Chicken  19866894282980_3
ggcagaaaaaggagagttcattatgttactaacctcagcaagtttcatacaagctgaatctaataggcatactcaagaacgtatgtctacagcactgaggcttaaaatttttatgatgtgctcagcacgtgctatttgatgaatcagtattctggttcaggttcaggaaaccgccataattaacacagaaattggtacagataattcaaacataatctacaatacatcacgtacttcatgtactggcatcctctcaaaamttaagagctttycaatttaccccaaacaacaacttaaaayaaaaaaaaaatagtagatcagactaagctgcctacctgaactctggattcagtgctttcacccatgtctgacaagaatgtgaaggtatcacaggaattcatgcttgcatgactcagaagcaaatgcattaacagaaaaagcaggatgtgtttcctttactgccaattctttaaaaacagtgtggagccagcagacagaaaaagatcagtttgggtcatgttgatcataagaacagagaatctgaagatgaatttgatactgtttatttttatttcgctaccattacctgcaaagatgctc

SEQ ID NO: 44310 - DNA, 600 bp, Chicken  19866894282983_1
cgatacctggggagaaggagctcataaataccacgagagcaggggcagggttagccaatttctgcctcttcctgccacccaaccgctgcaggggacgcgagattgctccctgtgcagccccacgaccccgagcccacggcacttcacttctgcagaagggctgggtgccgctccaggtgcggtctcgccggcaggtgcgcgactccgagcccaccagctgaaatccagcgttgcagatgaagtgaacgtcgtggcccacccgagcgctccggcccagcttccgcccgttcaggggcaccrccagcagcggacaggtgtctgcggatggacagatggacacggctgaggatgggagcccaccgctatccctgggttggagcccaggagagccaagctggtgcgatggggacgccgagtgttaccgttgtgtttgccagcgagcctctggatgcggctgtgcagcactgagagctgcttcttgaggctgcgcgtgccctggaggtgggcagcctcctgtgccgacagcagcttctgcatctgccgcacggtgctgagcacctgctggtggctcgggcactcctgggggaacacggggccctc

SEQ ID NO: 44311 - DNA, 599 bp, Chicken  19866894282984_1
  misc_feature (1)..(178): n is any nucleotide
nnnnnnnnnnnnnnnnnnnnnnnnnnnnnnnnnnnnnnnnnnnnnnnnnnnnnnnnnnnnnnnnnnnnnnnnnnnnnnnnnnnnnnnnnnnnnnnnnnnnnnnnnnnnnnnnnnnnnnnnnnnnnnnnnnnnnnnnnnnnnnnnnnnnnnnnnnnnnnnnnnnnnnnnnnnnnnnnnnaaaagaaaaaaaaaaggatggccaagaaaaagaccctcaggcattctttagagaagaactttctaaaacctcatctctacatcagcctctctgtattttcacagcctgactcataaaacacygtgtgcgtgtgggagaggtagagtgggagcgragggatggctctgccattttaaaaataactataaatagattaaacaccagctggctgcattttaccctcaagacttcataaaccagccaagattgttgccatcatctataagcaataatgatatcgatgggaaaagatgattagttttgtttcttaaatttaaaggagggtgtcacaagacttgacaacaacacgtccatcttgcaaagtacagctcaaatcaggatttttctagataggtttggttgtgtttctttttccttttaa

SEQ ID NO: 44312 - DNA, 599 bp, Chicken  19866894282984_2
  misc_feature (1)..(146): n is any nucleotide
nnnnnnnnnnnnnnnnnnnnnnnnnnnnnnnnnnnnnnnnnnnnnnnnnnnnnnnnnnnnnnnnnnnnnnnnnnnnnnnnnnnnnnnnnnnnnnnnnnnnnnnnnnnnnnnnnnnnnnnnnnnnnnnnnnnnnnnnnnnnnnnnnnaaaagaaaaaaaaaaggatggccaagaaaaagaccctcaggcattctttagagaagaactttctaaaacctcatctctacatcagcctctctgtattttcacagcctgactcataaaacacygtgtgcgtgtgggagaggtagagtgggagcgragggatggctctgccattttaaaaataactataaatagattaaacaccagctggctgcattttaccctcaagacttcataaaccagccaagattgttgccatcatctataagcaataatgatatcgatgggaaaagatgattagttttgtttcttaaatttaaaggagggtgtcacaagacttgacaacaacacgtccatcttgcaaagtacagctcaaatcaggatttttctagataggtttggttgtgtttctttttccttttaaaacrgagatggccgacattgcagctttaaaaa

SEQ ID NO: 44313 - DNA, 600 bp, Chicken  19866894282984_3
tgcgtgtgggagaggtagagtgggagcgragggatggctctgccattttaaaaataactataaatagattaaacaccagctggctgcattttaccctcaagacttcataaaccagccaagattgttgccatcatctataagcaataatgatatcgatgggaaaagatgattagttttgtttcttaaatttaaaggagggtgtcacaagacttgacaacaacacgtccatcttgcaaagtacagctcaaatcaggatttttctagataggtttggttgtgtttctttttccttttaaaacrgagatggccgacattgcagctttaaaaaggcgcttttagaaatcatagcagtctgtgctacagtgaagaaagaatttgcagtattgtgcactttgcaccattgataccacttatttcctcttgcttctgctgaaactagctggtttcggtttcatttctgcagaactgcagggtgtgttgcatcttaccccagcttccctgcaccagcacatgccaatgctgcccgggctgcagccttgtggaggtatgtgactcctaaacccaaatgcagagcctgctgtctttggctgtattaaagat

SEQ ID NO: 44314 - DNA, 600 bp, Chicken  19866894282993_1
tattccaacacaagttgtcacaattcaaatgaaaactgcaagatattctacctttttacagtaagagccaaggtctgtttcttcatgagatgcactcttcccacagaaacttcttgctcctgtactaaaatttctggtttgaagagttcacaaaagaactctacctgtgaagagagcatcaagatttccaatagcaacgttgcctgcaacataatgttgagaacacccttgccacactaccagtattaatgtgcaaataatttttttccttagcttttttaatattttatggattattasatattcaccacctaaaatcctgaaggatattatctactgtgtcaacaacacctctccatttaataacttggcaatgagttctatgccattatgctactctgtttactatggtagctcaactcacaaactttaagctgaggacaattatcttaacaaataaaaaataaactccctcaagataaaaaaaaaaataaacataaaccacaaggaataccgctttctaaccaagaatggttaggacaacacatccctgttatcaaacaatggaaggaaagcacaaacaggaggagttttagggat

SEQ ID NO: 44315 - DNA, 600 bp, Chicken  19866894282998_1
cgattaacaatgatgtggtaagcgtttcctcacatgaggtaaaggtactactgttttaagcctttgccctcactgtgaggtcctgtgaggctgcaggggctgaacacgggtgaggatgcctgtgagcgagtcagcctgtgcctgcgtttagagtcttttttttcctgtccagaaacagtgtaagacggcataaatcccaccacccctctcctgaaactggagagaaaacagaaatgtgatcttttgtgtgtgacacccgcgtgtgcgtcggggacgcaggccgggccgggtgcggccggscgcagtgtgccgagggggccgccaggtggcagcgcgctgcggtttgccgccgcgccattggccgcgggtcggaccctcccgccggagtgtggctgaggcgccatgttgtgaggccgcccgcctgctgccggcccctctgttttgcactaacagccgtgtgttgaggcagttcctccgtgtccttccgcctcctcttttcctgttgtttattccaccgagagcacagatgctctccatccctaggattgtattttcaggcactgcaagcccttgagctgtgtgcaggaggtggctgagttg

SEQ ID NO: 44316 - DNA, 600 bp, Chicken  19866894282998_2
ggcccctctgttttgcactaacagccgtgtgttgaggcagttcctccgtgtccttccgcctcctcttttcctgttgtttattccaccgagagcacagatgctctccatccctaggattgtattttcaggcactgcaagcccttgagctgtgtgcaggaggtggctgagttgtgatgcttagaagtcagtccataaaatttgtcagttggttgagcacggctgatgtgagatagcaggtacgagccgccgctatggcacgcggcagtcagtgagtttcaggaactaacttatggtgtttasaataaataaataaatctggagtgccttcgtggctgctgtgcagtgttagcttctgcagactgtcctgccgacagggacgggtctctggttagagatgcacctgccacagtgctactgtcacctgagagttcccacctggcccagtccattggttttatataagttgctgttggccgagcagctggagttgccataatgacctgacaggttggatccagtgtgagctctttcactttcggtcactgttgcacttcaacaacagtagagaagtttcatgttttgctagtacttagagtaaag

SEQ ID NO: 44317 - DNA, 600 bp, Chicken  19866894282998_3
gcccctctgttttgcactaacagccgtgtgttgaggcagttcctccgtgtccttccgcctcctcttttcctgttgtttattccaccgagagcacagatgctctccatccctaggattgtattttcaggcactgcaagcccttgagctgtgtgcaggaggtggctgagttgtgatgcttagaagtcagtccataaaatttgtcagttggttgagcacggctgatgtgagatagcaggtacgagccgccgctatggcacgcggcagtcagtgagtttcaggaactaacttatggtgtttaasataaataaataaatctggagtgccttcgtggctgctgtgcagtgttagcttctgcagactgtcctgccgacagggacgggtctctggttagagatgcacctgccacagtgctactgtcacctgagagttcccacctggcccagtccattggttttatataagttgctgttggccgagcagctggagttgccataatgacctgacaggttggatccagtgtgagctctttcactttcggtcactgttgcacttcaacaacagtagagaagtttcatgttttgctagtacttagagtaaaga

SEQ ID NO: 44318 - DNA, 600 bp, Chicken  19866894282998_4
cccctctgttttgcactaacagccgtgtgttgaggcagttcctccgtgtccttccgcctcctcttttcctgttgtttattccaccgagagcacagatgctctccatccctaggattgtattttcaggcactgcaagcccttgagctgtgtgcaggaggtggctgagttgtgatgcttagaagtcagtccataaaatttgtcagttggttgagcacggctgatgtgagatagcaggtacgagccgccgctatggcacgcggcagtcagtgagtttcaggaactaacttatggtgtttaaastaaataaataaatctggagtgccttcgtggctgctgtgcagtgttagcttctgcagactgtcctgccgacagggacgggtctctggttagagatgcacctgccacagtgctactgtcacctgagagttcccacctggcccagtccattggttttatataagttgctgttggccgagcagctggagttgccataatgacctgacaggttggatccagtgtgagctctttcactttcggtcactgttgcacttcaacaacagtagagaagtttcatgttttgctagtacttagagtaaagaa

SEQ ID NO: 44319 - DNA, 600 bp, Chicken  19866894282998_5
ccctctgttttgcactaacagccgtgtgttgaggcagttcctccgtgtccttccgcctcctcttttcctgttgtttattccaccgagagcacagatgctctccatccctaggattgtattttcaggcactgcaagcccttgagctgtgtgcaggaggtggctgagttgtgatgcttagaagtcagtccataaaatttgtcagttggttgagcacggctgatgtgagatagcaggtacgagccgccgctatggcacgcggcagtcagtgagtttcaggaactaacttatggtgtttaaaasaaataaataaatctggagtgccttcgtggctgctgtgcagtgttagcttctgcagactgtcctgccgacagggacgggtctctggttagagatgcacctgccacagtgctactgtcacctgagagttcccacctggcccagtccattggttttatataagttgctgttggccgagcagctggagttgccataatgacctgacaggttggatccagtgtgagctctttcactttcggtcactgttgcacttcaacaacagtagagaagtttcatgttttgctagtacttagagtaaagaag

SEQ ID NO: 44320 - DNA, 599 bp, Chicken  19866894283001_1
  misc_feature (1)..(202): n is any nucleotide
nnnnnnnnnnnnnnnnnnnnnnnnnnnnnnnnnnnnnnnnnnnnnnnnnnnnnnnnnnnnnnnnnnnnnnnnnnnnnnnnnnnnnnnnnnnnnnnnnnnnnnnnnnnnnnnnnnnnnnnnnnnnnnnnnnnnnnnnnnnnnnnnnnnnnnnnnnnnnnnnnnnnnnnnnnnnnnnnnnnnnnnnnnnnnnnnnnnnnnnnnncctaaaagcttcctttgtctgttgcaaaaatacattttgagggggaaacatcaactgtcgtagaggttaaatttttatttcacaactattttttcctyccctgctccacaagcrtatatgtatgtagataaacatttgccttttgggtgatacattctttttccaagtatgaaagaggtaaattatgaccagtrtttaccatgggcaatcttcacttagttttgcattataaaaagttctcatagtgtccatatattaactcttattataaatttattttagccattgcaggaaataagagtttgtagccagctaattagtatttttcttaatygcttatgtttgagtgagttttaatgctgaaaagcagcctctgaaggtgctatgcatgcaattc

SEQ ID NO: 44321 - DNA, 599 bp, Chicken  19866894283001_2
  misc_feature (1)..(186): n is any nucleotide
nnnnnnnnnnnnnnnnnnnnnnnnnnnnnnnnnnnnnnnnnnnnnnnnnnnnnnnnnnnnnnnnnnnnnnnnnnnnnnnnnnnnnnnnnnnnnnnnnnnnnnnnnnnnnnnnnnnnnnnnnnnnnnnnnnnnnnnnnnnnnnnnnnnnnnnnnnnnnnnnnnnnnnnnnnnnnnnnnnnnnnnnnncctaaaagcttcctttgtctgttgcaaaaatacattttgagggggaaacatcaactgtcgtagaggttaaatttttatttcacaactattttttcctyccctgctccacaagcrtatatgtatgtagataaacatttgccttttgggtgatacattctttttccaagtatgaaagaggtaaattatgaccagtrtttaccatgggcaatcttcacttagttttgcattataaaaagttctcatagtgtccatatattaactcttattataaatttattttagccattgcaggaaataagagtttgtagccagctaattagtatttttcttaatygcttatgtttgagtgagttttaatgctgaaaagcagcctctgaaggtgctatgcatgcaattcagcaatgtagacttga

SEQ ID NO: 44322 - DNA, 599 bp, Chicken  19866894283001_3
  misc_feature (1)..(106): n is any nucleotide
nnnnnnnnnnnnnnnnnnnnnnnnnnnnnnnnnnnnnnnnnnnnnnnnnnnnnnnnnnnnnnnnnnnnnnnnnnnnnnnnnnnnnnnnnnnnnnnnnnnnnnnnnncctaaaagcttcctttgtctgttgcaaaaatacattttgagggggaaacatcaactgtcgtagaggttaaatttttatttcacaactattttttcctyccctgctccacaagcrtatatgtatgtagataaacatttgccttttgggtgatacattctttttccaagtatgaaagaggtaaattatgaccagtrtttaccatgggcaatcttcacttagttttgcattataaaaagttctcatagtgtccatatattaactcttattataaatttattttagccattgcaggaaataagagtttgtagccagctaattagtatttttcttaatygcttatgtttgagtgagttttaatgctgaaaagcagcctctgaaggtgctatgcatgcaattcagcaatgtagacttgaaatgaacaaatggttgagtatttcacattctggccttgagtgaagaacaaagcatgccctgttttggaagctacttcagc

SEQ ID NO: 44323 - DNA, 600 bp, Chicken  19866894283001_4
ttttgagggggaaacatcaactgtcgtagaggttaaatttttatttcacaactattttttcctyccctgctccacaagcrtatatgtatgtagataaacatttgccttttgggtgatacattctttttccaagtatgaaagaggtaaattatgaccagtrtttaccatgggcaatcttcacttagttttgcattataaaaagttctcatagtgtccatatattaactcttattataaatttattttagccattgcaggaaataagagtttgtagccagctaattagtatttttcttaatygcttatgtttgagtgagttttaatgctgaaaagcagcctctgaaggtgctatgcatgcaattcagcaatgtagacttgaaatgaacaaatggttgagtatttcacattctggccttgagtgaagaacaaagcatgccctgttttggaagctacttcagcacatgcttaagcacatagagaatttctactctctgggagctctgaggtagaagtgaaggaaagggaagaagtacatagctatgtgtcttttatcaccatctgaaattgagggcatactgcatcagacaatactaatggaga

SEQ ID NO: 44324 - DNA, 572 bp, Chicken  19866894283002_1
ttgtcattacagatagcacccagtagtcttgcatgatacattcaattgaatatgtgatctggtgaccatttatacccactgtctctaggacaacattaagaactgatacctgagattttgctttcatattcactaagggccacactccagtttcaagtgcatggattcattgttggtctagggcagaaactctgtgcctgaaactgacacatggcctctgagcagaggtgaaaagccataccacttacaaatgatgagacttcatgcatctcatagtgaccacttcaggcacaactgctktgcagatcgttcctctcactgaggtttstttagtcactactggttttctgtaataacaacttctcagtattatcttctgcaaaataaggacacggcagcatacgtgcccttagagaaccccatttgcaaatgtcaatatactacaaatataaactctctgtaagagttccccacacaattgcacttagctacaaagcactgtgggcagtcccatataaaaaccactgcagtctaggggtgctgacagtttctcacacacttatttaattatt

SEQ ID NO: 44325 - DNA, 544 bp, Chicken  19866894283002_2
ttgcatgatacattcaattgaatatgtgatctggtgaccatttatacccactgtctctaggacaacattaagaactgatacctgagattttgctttcatattcactaagggccacactccagtttcaagtgcatggattcattgttggtctagggcagaaactctgtgcctgaaactgacacatggcctctgagcagaggtgaaaagccataccacttacaaatgatgagacttcatgcatctcatagtgaccacttcaggcacaactgctktgcagatcgttcctctcactgaggtttstttagtcactactggttttctgtaataacaacttctcagtattatcttctgcaaaataaggacacggcagcatacgtgcccttagagaaccccatttgcaaatgtcaatatactacaaatataaactctctgtaagagttccccacacaattgcacttagctacaaagcactgtgggcagtcccatataaaaaccactgcagtctaggggtgctgacagtttctcacacacttatttaattatt

SEQ ID NO: 44326 - DNA, 600 bp, Chicken  19866894283004_1
tcgtttttccccacatgatcagaaagagcatgtgtgtgtgttaaatcattctggtttcagttttctttggctgtccttttcctctgtccattttgctggtcgtcatagttacagtgaccgcaagtcctcctcacctttcagggtcttacaagcatttttttaagcgttctcttataaaggtgctttgcaaagccagcttgcccagttcttcagctgttattgtgttgctcaacctgtttgtcccagccttttccctctcttcagtgttgtgtcctgacagacacagggcaggctggaagwgctgttttcatctttgtcccagaatcagtttctgacaagacttgcctactttaatctttccttacttaatgttgaagtcatattttggccctctctttatacagctttaaagtgatatttttgtagctcttttagactgagttaaaccagaacatctcagaattgaagtatctcaaacagctttattttaactgcaggccccatcccatgacttgtggctctgagtgtactagacagagccaaggtcaaccttgaaaacacagaaatacgagattgcacttggcttctcctcaacattta

SEQ ID NO: 44327 - DNA, 600 bp, Chicken  19866894283005_1
cctccctttccgataggcagacttgtaatcttctgctgtttatagcttatttgccattatgcttaagtcttctttgtgatggtagctcggcaggcagctctcatatttgctccgttctcactttgtaggctccacagtcagagccaatgcagttcagcccttctaggaaagctgagtcgcgctcactttacaataggactctttcaaatgataataaaaccgtatctttctactctccttggttttcctggcctctttcatgcagagcttttagctctttcctggcctctgttgtagcgmagcatgctctttgtgtctctctggggaaggacaggagctgtcaagcccatagatgcaggtgcttggagctgggcctgtgctcgactgttcttctggattgagattggagttctcaccgcttggaaagactcaggttgtggtttgtgaagtgctgccagttcctctggagttcaggagttttatataaaatatcagttttaaaagggcaaaagaaaaaataacaggtgcgtgtagtacattaactaaaagctgattggaaaacaacaagaattctctgcagtggtgggacttgtattgcag

SEQ ID NO: 44328 - DNA, 600 bp, Chicken  19866894283009_1
tttcaacccaggccagtctatgattctatgaagcagaccacgggcaacctttgtagtacctcactaacgtttagaaatgtaacagctggcaattatatttctcatttgccactcttggggtgtatctgtcacagatgagtgcaagctcttccttctgttgtcaggagttgcatgcagcgaggttctcagttttgcttaagtgaccacaaaaactcttcttgggaacgttctggcgtcgtacccaatgcagagcatccccatcgtggtgctgagcacctcaattgtgacaacagaccgggwttttctcgaccgataacgctttgtgagacgtttgcaatggggaggtttcccctctagatggcagagatgacagcagcaataccgcacgggcccacgctgcggagcggccaaacgcggaggtgcgcggcgctcgcccagcgcggaggtccccgtccatcgcgtgggacctgcccagctctcaccagatggacgtgcccagccggcccgacagcyccacggtgcccagagctgggctgccagccccgagcagagcgtgcaggagaggtaagcaacacccggtgatgggagatgacaatggtg

SEQ ID NO: 44329 - DNA, 600 bp, Chicken  19866894283009_2
tcttcttgggaacgttctggcgtcgtacccaatgcagagcatccccatcgtggtgctgagcacctcaattgtgacaacagaccgggwttttctcgaccgataacgctttgtgagacgtttgcaatggggaggtttcccctctagatggcagagatgacagcagcaataccgcacgggcccacgctgcggagcggccaaacgcggaggtgcgcggcgctcgcccagcgcggaggtccccgtccatcgcgtgggacctgcccagctctcaccagatggacgtgcccagccggcccgacagcyccacggtgcccagagctgggctgccagccccgagcagagcgtgcaggagaggtaagcaacacccggtgatgggagatgacaatggtgatgctcgktcagctgggggggaaaaagtcatcgggaccgcttcagcygtgggtctctcctcctgctgtgctcctccgtggtggtagcggggagggaagtcctcgataacgtgctctgtgttgggtgacctgctttccatcgctgcctctgtgtgtgatggagtgaagcagcgaccgcctcggtgcccgcgctgatgcgaagcgatggggtggg

SEQ ID NO: 44330 - DNA, 586 bp, Chicken  19866894283009_3
accgataacgctttgtgagacgtttgcaatggggaggtttcccctctagatggcagagatgacagcagcaataccgcacgggcccacgctgcggagcggccaaacgcggaggtgcgcggcgctcgcccagcgcggaggtccccgtccatcgcgtgggacctgcccagctctcaccagatggacgtgcccagccggcccgacagcyccacggtgcccagagctgggctgccagccccgagcagagcgtgcaggagaggtaagcaacacccggtgatgggagatgacaatggtgatgctcgktcagctgggggggaaaaagtcatcgggaccgcttcagcygtgggtctctcctcctgctgtgctcctccgtggtggtagcggggagggaagtcctcgataacgtgctctgtgttgggtgacctgctttccatcgctgcctctgtgtgtgatggagtgaagcagcgaccgcctcggtgcccgcgctgatgcgaagcgatggggtgggcgtagggatggtggtgtgtgaaggagggagcgggcgctgccgtggcacggtgagcatctctgctcatctggagctctgggg

SEQ ID NO: 44331 - DNA, 547 bp, Chicken  19866894283009_4
tcccctctagatggcagagatgacagcagcaataccgcacgggcccacgctgcggagcggccaaacgcggaggtgcgcggcgctcgcccagcgcggaggtccccgtccatcgcgtgggacctgcccagctctcaccagatggacgtgcccagccggcccgacagcyccacggtgcccagagctgggctgccagccccgagcagagcgtgcaggagaggtaagcaacacccggtgatgggagatgacaatggtgatgctcgktcagctgggggggaaaaagtcatcgggaccgcttcagcygtgggtctctcctcctgctgtgctcctccgtggtggtagcggggagggaagtcctcgataacgtgctctgtgttgggtgacctgctttccatcgctgcctctgtgtgtgatggagtgaagcagcgaccgcctcggtgcccgcgctgatgcgaagcgatggggtgggcgtagggatggtggtgtgtgaaggagggagcgggcgctgccgtggcacggtgagcatctctgctcatctggagctctgggg

SEQ ID NO: 44332 - DNA, 600 bp, Chicken  19866894283012_1
tatgagaacaacagaagtgtaaaaatctctgtaataggtcttttccttgtaaatgaaatagctgcagtgcatttccctctatcagttacgtggtaaggactcgaacgaaatactttcaacagcagcatttcattagctttattctcttcccttaccttgagtcaccctgatgatgtttaaagactgagtcagcactacttcagaagccaaagttgaattaccttttaagcaaataaagcagtattaacaacttgcaataattggaagtgaatagatcagatgcagcagcttcacagagamcagagactgccctgagcagggacttagcatgcagactcagataaggggacttgccaaactccactatgggctgcatacaaaattgtttgaattgcttctccggcacttttcagtttcttttggctatgacatgtataatttctctcgattaatgaatgctacagaatttctgatggtattaatgaccacagggcaccatgttatagtcacagggagaccgtggaggtactacaactcctttcagcattccatctgagaactgaccagcaaaaggtaaactatctctagtgctatcttcag

SEQ ID NO: 44333 - DNA, 600 bp, Chicken  19866894283016_1
ttactttgtttttccattttatattacaaaaaatattcatactgtaaatacctcaatatacagctcaatggttggtatacacaggatgttgcagggcagctgtgttttggtcattcactgactgtctttgtttttggtaagactctttcatcagcctactgatgtcatctttttcagcaagcacaaaactttctcacaaaattcatggagtagtactatattttctgctttttcattaagtaggaagtgcttagtctctatctgtctgaaatatgtatcaaaactataaaagtctgtcayctgcaatctcctctactgctaaaccatgttctctcttgctcagtgttgttggttttttctttgrttcttttccttggttcccctgggatctctggagcatttgatcctggctattggaaaaacatcacataacaattcttagcatgtgagaaacccatttttgaagttcatcctgaacatcccctgaactctttgattaatagggatgtatggcaaagaaaataggtaacttaagatattggcacaaagtaggtactgttgcctatttggtaattaagttatgacaccagctctgtggga

SEQ ID NO: 44334 - DNA, 600 bp, Chicken  19866894283016_2
tcaatggttggtatacacaggatgttgcagggcagctgtgttttggtcattcactgactgtctttgtttttggtaagactctttcatcagcctactgatgtcatctttttcagcaagcacaaaactttctcacaaaattcatggagtagtactatattttctgctttttcattaagtaggaagtgcttagtctctatctgtctgaaatatgtatcaaaactataaaagtctgtcayctgcaatctcctctactgctaaaccatgttctctcttgctcagtgttgttggttttttctttgrttcttttccttggttcccctgggatctctggagcatttgatcctggctattggaaaaacatcacataacaattcttagcatgtgagaaacccatttttgaagttcatcctgaacatcccctgaactctttgattaatagggatgtatggcaaagaaaataggtaacttaagatattggcacaaagtaggtactgttgcctatttggtaattaagttatgacaccagctctgtgggaaatgacaaaagtaatttgggagacattctagcttggatgctacattagtgaacagtaatcttac

SEQ ID NO: 44335 - DNA, 599 bp, Chicken  19866894283023_1
  misc_feature (1)..(38): n is any nucleotide
nnnnnnnnnnnnnnnnnnnnnnnnnnnnnnnnnnnnnnccagggccccatccaacctggccttgagcacctccagggatttcagccatcgtattcagaagacccaacccctgtttgcatggtgcaggttgattgcatctaagcagcatcccatttctgggagcacagacactaaaaagctggtgctgatcacagccaagcttgctaatcttccacccttagcaccaaacctcctctaacactgtggagtttcctcctcgctgtggaattaaattgcctgttgctctgtggtgggcagttraaaaaagaccagcaatgtgatcccatccaacaacaaagagctgcaaaaatagaattaaaaaactctccctaaaaaccaccacagcttctggaggccrggcagacatccatgtactttgttycctcctaagggatcatgcagaagcacagstgcgttcacagcaccctcttgtgtccagaaaagaaaataaggacagagagcagcagataagatggaygctgctcacagcccataccccagtttcattatttttttggaacagagagcactatccacagcatcactgctacagtacaaag

SEQ ID NO: 44336 - DNA, 600 bp, Chicken  19866894283023_2
aagacccaacccctgtttgcatggtgcaggttgattgcatctaagcagcatcccatttctgggagcacagacactaaaaagctggtgctgatcacagccaagcttgctaatcttccacccttagcaccaaacctcctctaacactgtggagtttcctcctcgctgtggaattaaattgcctgttgctctgtggtgggcagttgaaaaaagaccagcaatgtgatcccatccaacaacaaagagctgcaaaaatagaattaaaaaactctccctaaaaaccaccacagcttctggaggccrggcagacatccatgtactttgttycctcctaagggatcatgcagaagcacagstgcgttcacagcaccctcttgtgtccagaaaagaaaataaggacagagagcagcagataagatggaygctgctcacagcccataccccagtttcattatttttttggaacagagagcactatccacagcatcactgctacagtacaaaggaggagaatgactactccagaagtaacacagttacaycctttcactttctagaactgctgttagcatggcaggttgctggacgttatcagctttcaca

SEQ ID NO: 44337 - DNA, 600 bp, Chicken  19866894283023_3
tgcaggttgattgcatctaagcagcatcccatttctgggagcacagacactaaaaagctggtgctgatcacagccaagcttgctaatcttccacccttagcaccaaacctcctctaacactgtggagtttcctcctcgctgtggaattaaattgcctgttgctctgtggtgggcagttgaaaaaagaccagcaatgtgatcccatccaacaacaaagagctgcaaaaatagaattaaaaaactctccctaaaaaccaccacagcttctggaggccrggcagacatccatgtactttgttycctcctaagggatcatgcagaagcacagstgcgttcacagcaccctcttgtgtccagaaaagaaaataaggacagagagcagcagataagatggaygctgctcacagcccataccccagtttcattatttttttggaacagagagcactatccacagcatcactgctacagtacaaaggaggagaatgactactccagaagtaacacagttacaycctttcactttctagaactgctgttagcatggcaggttgctggacgttatcagctttcacagcttcagccacaccacctgcaaaa

SEQ ID NO: 44338 - DNA, 600 bp, Chicken  19866894283023_4
catttctgggagcacagacactaaaaagctggtgctgatcacagccaagcttgctaatcttccacccttagcaccaaacctcctctaacactgtggagtttcctcctcgctgtggaattaaattgcctgttgctctgtggtgggcagttgaaaaaagaccagcaatgtgatcccatccaacaacaaagagctgcaaaaatagaattaaaaaactctccctaaaaaccaccacagcttctggaggccrggcagacatccatgtactttgttycctcctaagggatcatgcagaagcacagstgcgttcacagcaccctcttgtgtccagaaaagaaaataaggacagagagcagcagataagatggaygctgctcacagcccataccccagtttcattatttttttggaacagagagcactatccacagcatcactgctacagtacaaaggaggagaatgactactccagaagtaacacagttacaycctttcactttctagaactgctgttagcatggcaggttgctggacgttatcagctttcacagcttcagccacaccacctgcaaaaatcctgtctcatatcagcctgcttctaat

SEQ ID NO: 44339 - DNA, 600 bp, Chicken  19866894283023_5
ttagcaccaaacctcctctaacactgtggagtttcctcctcgctgtggaattaaattgcctgttgctctgtggtgggcagttgaaaaaagaccagcaatgtgatcccatccaacaacaaagagctgcaaaaatagaattaaaaaactctccctaaaaaccaccacagcttctggaggccrggcagacatccatgtactttgttycctcctaagggatcatgcagaagcacagstgcgttcacagcaccctcttgtgtccagaaaagaaaataaggacagagagcagcagataagatggaygctgctcacagcccataccccagtttcattatttttttggaacagagagcactatccacagcatcactgctacagtacaaaggaggagaatgactactccagaagtaacacagttacaycctttcactttctagaactgctgttagcatggcaggttgctggacgttatcagctttcacagcttcagccacaccacctgcaaaaatcctgtctcatatcagcctgcttctaatcccagcagagctaagagaaggctgactaccagtatttgactgaatccctcttacgcatggcttgtaa

SEQ ID NO: 44340 - DNA, 600 bp, Chicken  19866894283023_6
agagctgcaaaaatagaattaaaaaactctccctaaaaaccaccacagcttctggaggccrggcagacatccatgtactttgttycctcctaagggatcatgcagaagcacagstgcgttcacagcaccctcttgtgtccagaaaagaaaataaggacagagagcagcagataagatggaygctgctcacagcccataccccagtttcattatttttttggaacagagagcactatccacagcatcactgctacagtacaaaggaggagaatgactactccagaagtaacacagttacaycctttcactttctagaactgctgttagcatggcaggttgctggacgttatcagctttcacagcttcagccacaccacctgcaaaaatcctgtctcatatcagcctgcttctaatcccagcagagctaagagaaggctgactaccagtatttgactgaatccctcttacgcatggcttgtaacagccacagctacttgaggcctttgcccttcaccagcacaagayttcaagcttctgcatattcttcacaccatgaaaatgaggaagrcttaagccttatcctgaaacccactaagctgt

SEQ ID NO: 44341 - DNA, 600 bp, Chicken  19866894283023_7
gagagcactatccacagcatcactgctacagtacaaaggaggagaatgactactccagaagtaacacagttacaycctttcactttctagaactgctgttagcatggcaggttgctggacgttatcagctttcacagcttcagccacaccacctgcaaaaatcctgtctcatatcagcctgcttctaatcccagcagagctaagagaaggctgactaccagtatttgactgaatccctcttacgcatggcttgtaacagccacagctacttgaggcctttgcccttcaccagcacaagayttcaagcttctgcatattcttcacaccatgaaaatgaggaagrcttaagccttatcctgaaacccactaagctgttctgaccctacaaggcacacagtctgtgatgaaccaggcagccaccaaattccaaatggatttcaggtggttttcactactgggacagtgctggattatttctcccctctgcttcatggccagatagctttcctctacttcttcctttaggtttaagacttgctaacctaaaccttgcatactggagtaagaaagatagagggccaaatgattaatccttgagtt

SEQ ID NO: 44342 - DNA, 600 bp, Chicken  19866894283023_8
gaatgactactccagaagtaacacagttacaycctttcactttctagaactgctgttagcatggcaggttgctggacgttatcagctttcacagcttcagccacaccacctgcaaaaatcctgtctcatatcagcctgcttctaatcccagcagagctaagagaaggctgactaccagtatttgactgaatccctcttacgcatggcttgtaacagccacagctacttgaggcctttgcccttcaccagcacaagayttcaagcttctgcatattcttcacaccatgaaaatgaggaagrcttaagccttatcctgaaacccactaagctgttctgaccctacaaggcacacagtctgtgatgaaccaggcagccaccaaattccaaatggatttcaggtggttttcactactgggacagtgctggattatttctcccctctgcttcatggccagatagctttcctctacttcttcctttaggtttaagacttgctaacctaaaccttgcatactggagtaagaaagatagagggccaaatgattaatccttgagtttagaacagatatttagtggtacttcaacagagcagtttacatg

SEQ ID NO: 44343 - DNA, 600 bp, Chicken  19866894283025_1
ttgttatgcatcgcttcatttgaaaacaggaggttaaaattgtgttttcagtatgtgaacatacctgaattaatcaaccaaaggattatagatttcttgctatgcataacgtcatcttccgtggtaaaatggttcttcttaactgccttgatgctatatgtggaccatctttctttgcatctctatccctgtctaatgttaatttatctttctgtaaagaaatgctgtgacttttaatttaggattcaaatctgttttgaggactgatctgtgaattcagatcaaagaaacttaacgtaygtacagaaaaaaggtttttataactatagtataattckaacatttttcagtatttgtcttcatggcattcatgaaactgtgtttaatttgttggacaaggtatatcatctaaccatttaagagaacagacttagtttcccttctgagcttctgctccttcactgttcagagctgaggcatataagtacagactcttgtcctcatgtctccttatctgattcaacagagtttttggtacaagctcagttctggaaacttagtttgttcataaacagactagtaaattttcatatcgttttg

SEQ ID NO: 44344 - DNA, 600 bp, Chicken  19866894283025_2
attgtgttttcagtatgtgaacatacctgaattaatcaaccaaaggattatagatttcttgctatgcataacgtcatcttccgtggtaaaatggttcttcttaactgccttgatgctatatgtggaccatctttctttgcatctctatccctgtctaatgttaatttatctttctgtaaagaaatgctgtgacttttaatttaggattcaaatctgttttgaggactgatctgtgaattcagatcaaagaaacttaacgtaygtacagaaaaaaggtttttataactatagtataattckaacatttttcagtatttgtcttcatggcattcatgaaactgtgtttaatttgttggacaaggtatatcatctaaccatttaagagaacagacttagtttcccttctgagcttctgctccttcactgttcagagctgaggcatataagtacagactcttgtcctcatgtctccttatctgattcaacagagtttttggtacaagctcagttctggaaacttagtttgttcataaacagactagtaaattttcatatcgttttgttaccttgttccatgatgttagtcttattgctagctta

SEQ ID NO: 44345 - DNA, 600 bp, Chicken  19866894283035_1
tcctgttgcacacacgctgctccatctcctacagggatgcaagtgctccaggacagtcctgaaaccgctccgggcagctggcaccactgccactgctgtgtgtacacacgtggagcctccctgcagcacggactgagcgttcccaggtggctgcggcacagcagcctcagcaaggccaccatcagcgagcgctgtgacaatcacagtgtgctgccgtgggacaccaccgccccaacaccccccgggtcagcaccaggaccggactgcaggaaaccggtccaacgcagctccatgatctayagagtaaatacatggctgagcctggaacaaaactattttcacttgacggtgaacattttccacgtagacaaagcaaaataaagcaatgtagagtttgggcagatcgcagcacccagcaggaaggccgagtgccagcagcaggaggtgcccggtgccctgcctacacaaacagataagagctcagcctccacccaggagctctctccatcacagcaatagctgcaccgcagcccaagcagaaagcagggattgaacaaggagctacaaactgtttgccactactagcaaaagcaaggtttg

SEQ ID NO: 44346 - DNA, 600 bp, Chicken  19866894283040_1
gcgatggtttcgtagggctctgctgccatcaggaggtactgccagcgccggtcagggggctcaatcctttgctcatatgctgacatgaaccgatggcgaggcatgatgctttctgcaatctctgggtaatcaatctgttggggtattatggcagatttacaacaccccctctgcattccctcatacagaacaaacccctcagctatgcaagaattcaagagaagctcccaacagaaaatttactgctgccaaaggaaacagctcaacaattatggtcacggattcttccatttagttgayacagtcatcaacggcaaactagcaagataaggcctttttgtttttattttattattacctcatgagtcttgcaaagaagtgctcatttagccaagcttttacttggataacccagaaaccaagaatctgaccttacctggaagagaaggctctgctggcctgtctctggatctctctgtttggtcactgtaaagaaaataagaaggctcagtacgccacataaagggcagcacagtattatttctgccctaggaagccccagacaacaaaatatgacaggattctgcttcccatttatca

SEQ ID NO: 44347 - DNA, 599 bp, Chicken  19866894283042_1
  misc_feature (1)..(80): n is any nucleotide
nnnnnnnnnnnnnnnnnnnnnnnnnnnnnnnnnnnnnnnnnnnnnnnnnnnnnnnnnnnnnnnnnnnnnnnnnnnnnnnncttggctaaatgagcacttctttgcaagactcatgaggtaataataaaataaaaacaaaaaggccttatcttgctagtttgctgttgatgactgtgtcaactaaatggaagaatccgtgaccataattgttgagctgtttcctttggcagcagtaaattttctgttgggagcttctcttgaattcttgcatagctgaggggtttgttctgtatgagggartgcagagggggtgttgtaaatctgccataataccccaacagattgattacccagagattgcagaaagcatcatgcctcgccatcggttcatgtcagcatatgagcaaaggattgagccccctgaccggcgctggcagtacctcctgatggcagcagagccctacgaaaccatcgccttcaaggtaacgtttgggactgagtgatgacagggagagttcccatattttccgggacatttgttcccagtgatcgccgtcacagacttgttctgttctagcctttggggggttaatggcctg

SEQ ID NO: 44348 - DNA, 600 bp, Chicken  19866894283048_1
tggagggagagggttggccatttattatttggtcccaatttaatatgagctgcagcttctgaaataaaaccagataggtttctatcagttgaatatacatatgtatttatgtacatagatctgaacctacctcattgagatgtgcacactcacagtctagagcactgattaggaaagatgggctctcaagccaacatttataccagtttataacttctagttgatagcatcaataaggtgccttatttaaagcacagaagtgcacacataccttcaaaattactcttcataatcaagtayttcactttttttgtaaaagcatactcaatatcagcacttatataagcagtagagttgcagcttttagtctagattttaaattgtttgctgcttttctcagaatgtcaccttacagtgatttttaaaaaccctgccaggttgagaatatcaaactttttattctaagaacaaaagatcttaataagtaaacatctcccagtatgtttaatgaaaattatttttaccagagagagagcactgtctgaacagaacctgcttatttatttctttagaaaattaacaataacatatctttaaaat

SEQ ID NO: 44349 - DNA, 600 bp, Chicken  19866894283055_1
tgatttttgtttcatgctgttgaaaagtacttgaataaatccaaacatttcctcaaagttaaactggaggtcagggatagaggaagagactggaaattgcttcattccctatagacttgagatcagagcaaaccacaactaacatgtaacaccaccactgacacacagccagccctgcagtgacacttggcagtgctcactatggccaaatcagaggctgcaattcctcttgctgggggtattggagcgcttgcttacctggtggctgccggggcctactgcagtgctacagggaaaacrtggccactgctttatcactatcaattaggcaaatgaaccatggtgaaaagctgcatgtcctcacaactcaaaggttaatatgaatgaggatatttmaaaaaaaaaagttatttattgtttctttaggtagcagctcttgcacagtgctggagctggaacgtggtttcacacaattacgtcagtgtgtgggggtaagatgtatattacagcatcctgacatgctcttgttgtgtatcagatgttgctcacctcactcctgccctctgcttcccttctttactgtcccatctgtgcaaagga

SEQ ID NO: 44350 - DNA, 600 bp, Chicken  19866894283055_2
ttgcttcattccctatagacttgagatcagagcaaaccacaactaacatgtaacaccaccactgacacacagccagccctgcagtgacacttggcagtgctcactatggccaaatcagaggctgcaattcctcttgctgggggtattggagcgcttgcttacctggtggctgccggggcctactgcagtgctacagggaaaacrtggccactgctttatcactatcaattaggcaaatgaaccatggtgaaaagctgcatgtcctcacaactcaaaggttaatatgaatgaggatatttmaaaaaaaaaagttatttattgtttctttaggtagcagctcttgcacagtgctggagctggaacgtggtttcacacaattacgtcagtgtgtgggggtaagatgtatattacagcatcctgacatgctcttgttgtgtatcagatgttgctcacctcactcctgccctctgcttcccttctttactgtcccatctgtgcaaaggagggtttgtagagctggcagggtcagtgattaattacgcaaagataaacaaagttaatattcttcctggatagaactaattactctagtgtttgctt

SEQ ID NO: 44351 - DNA, 600 bp, Chicken  19866894283059_1
gcgtgcccagtaatgtggtcccaagccccctgactcacaggagaggcaagctgtgctcagcgggccatcccctgcaggccttgctctccccaagcccacacccttcaccagcatccctaacagctccaaaaatggcctccatttattaaagctaaagataaaaacaattccgttatgttaagagctttgtcaacagagttgagctcgctttctacctgcagatgaggcagtggggcagacaaagaagcatccttccctgctggcgttctctgcgctcagtaattgggttcagagacatcrgtgatggtggtcccatagatttgagtctcccagtctgaaagctgtttcacaaagccccggtgtggtctcacgttcrttttgcatttcagaacgtagtcccaagctttctgaaaagagaaagcaaagaagtgttagaaayaggagctgaagatgaatttattgtattcacaccaagcagctctgcttgggaacaaagcagcccagtgtttgctgcctgggatggactttggcagacaagcctctggctgccaaactaagggcagatgggatccagatgtgaacttgcgagaagcctttcat

SEQ ID NO: 44352 - DNA, 600 bp, Chicken  19866894283059_2
ggccttgctctccccaagcccacacccttcaccagcatccctaacagctccaaaaatggcctccatttattaaagctaaagataaaaacaattccgttatgttaagagctttgtcaacagagttgagctcgctttctacctgcagatgaggcagtggggcagacaaagaagcatccttccctgctggcgttctctgcgctcagtaattgggttcagagacatcrgtgatggtggtcccatagatttgagtctcccagtctgaaagctgtttcacaaagccccggtgtggtctcacgttcrttttgcatttcagaacgtagtcccaagctttctgaaaagagaaagcaaagaagtgttagaaayaggagctgaagatgaatttattgtattcacaccaagcagctctgcttgggaacaaagcagcccagtgtttgctgcctgggatggactttggcagacaagcctctggctgccaaactaagggcagatgggatccagatgtgaacttgcgagaagcctttcatcttttcatcctgcttccttgagcatgagggcagctcaggcttctcttgttagctggcacgtatcttgcattgtttt

SEQ ID NO: 44353 - DNA, 600 bp, Chicken  19866894283059_3
catttattaaagctaaagataaaaacaattccgttatgttaagagctttgtcaacagagttgagctcgctttctacctgcagatgaggcagtggggcagacaaagaagcatccttccctgctggcgttctctgcgctcagtaattgggttcagagacatcrgtgatggtggtcccatagatttgagtctcccagtctgaaagctgtttcacaaagccccggtgtggtctcacgttcrttttgcatttcagaacgtagtcccaagctttctgaaaagagaaagcaaagaagtgttagaaayaggagctgaagatgaatttattgtattcacaccaagcagctctgcttgggaacaaagcagcccagtgtttgctgcctgggatggactttggcagacaagcctctggctgccaaactaagggcagatgggatccagatgtgaacttgcgagaagcctttcatcttttcatcctgcttccttgagcatgagggcagctcaggcttctcttgttagctggcacgtatcttgcattgttttacaccaatggagacatgcagtcctggattttctcccccaaaaagctaattctttcatgggtga

SEQ ID NO: 44354 - DNA, 599 bp, Chicken  19866894283061_1
  misc_feature (1)..(96): n is any nucleotide
nnnnnnnnnnnnnnnnnnnnnnnnnnnnnnnnnnnnnnnnnnnnnnnnnnnnnnnnnnnnnnnnnnnnnnnnnnnnnnnnnnnnnnnnnnnnnnnntgactgctgaaggctcctgtgcttggggtatcaaattaaggcccattttctgcacgatttaactagattttgttttctcagtgttgtactgcaactgtccttccgtgtaaggtgcacgtcagtcagcgagctgctgtctgccaagggaggcttctaatgaatgccctgctactgtttgctgtgcagaaccgactcctgtttggwgcatggcgatttaaactgcaaagtgaggcttcagatgatcttctcttggctccagattaatcaccaaacagaagttgaagctgtagcattcracagctggctcggagggttttctttttcagcagatgcctttttcaggagtaaatttaagctgcagtctctgtggatgtattccacgcctttayggaatctctatgctaagtgtttgctgcactgatagcaggggctctgtcttgtcatcacagaaatgctggtttatttgcatgtaaggtatgcttgttaaaaagggaggatattga

SEQ ID NO: 44355 - DNA, 599 bp, Chicken  19866894283061_2
  misc_feature (1)..(4): n is any nucleotide
nnnntgactgctgaaggctcctgtgcttggggtatcaaattaaggcccattttctgcacgatttaactagattttgttttctcagtgttgtactgcaactgtccttccgtgtaaggtgcacgtcagtcagcgagctgctgtctgccaagggaggcttctaatgaatgccctgctactgtttgctgtgcagaaccgactcctgtttggwgcatggcgatttaaactgcaaagtgaggcttcagatgatcttctcttggctccagattaatcaccaaacagaagttgaagctgtagcattcracagctggctcggagggttttctttttcagcagatgcctttttcaggagtaaatttaagctgcagtctctgtggatgtattccacgcctttayggaatctctatgctaagtgtttgctgcactgatagcaggggctctgtcttgtcatcacagaaatgctggtttatttgcatgtaaggtatgcttgttaaaaagggaggatattgagcaccccccatattctacttagagccattaactctgtgggtgatcatttgtgcggctggtaaagagcgacagcttctttaagtctggaaaac

SEQ ID NO: 44356 - DNA, 600 bp, Chicken  19866894283061_3
tgcaactgtccttccgtgtaaggtgcacgtcagtcagcgagctgctgtctgccaagggaggcttctaatgaatgccctgctactgtttgctgtgcagaaccgactcctgtttggwgcatggcgatttaaactgcaaagtgaggcttcagatgatcttctcttggctccagattaatcaccaaacagaagttgaagctgtagcattcracagctggctcggagggttttctttttcagcagatgcctttttcaggagtaaatttaagctgcagtctctgtggatgtattccacgcctttayggaatctctatgctaagtgtttgctgcactgatagcaggggctctgtcttgtcatcacagaaatgctggtttatttgcatgtaaggtatgcttgttaaaaagggaggatattgagcaccccccatattctacttagagccattaactctgtgggtgatcatttgtgcggctggtaaagagcgacagcttctttaagtctggaaaacagagagcatccttattccagtttagtcctgacaaaacagggtaacagcagaggtggtttagggatgccaaatgtttcctggaaacgatgaattt

SEQ ID NO: 44357 - DNA, 541 bp, Chicken  19866894283061_4
agcaccccccatattctacttagagccattaactctgtgggtgatcatttgtgcggctggtaaagagcgacagcttctttaagtctggaaaacagagagcatccttattccagtttagtcctgacaaaacagggtaacagcagaggtggtttagggatgccaaatgtttcctggaaacgatgaatttaaaaaagtaactcctcagttggagtttctcttgctggaaggggccatgggtgcacttcagaggctgccttcagtgggagatgtgagcctgaagctgcagcaggctgcgactgraaacgtaatgctgataagtagtttcagtgtgtttcaacaccacgacaaaaatagtgtaacttttctggtttgccatgatagttcaacctgtacatctaaaagcaccatctaaatcacgatcttgaaaaacatgtgctggcttggcgtgtcgttcyctccatgacatcaggtgagttaaggaatctcagaggaagtcccatcctccctgacgatacccaccagggcagcaaggtgttcattg

SEQ ID NO: 44358 - DNA, 386 bp, Chicken  19866894283061_5
gatgccaaatgtttcctggaaacgatgaatttaaaaaagtaactcctcagttggagtttctcttgctggaaggggccatgggtgcacttcagaggctgccttcagtgggagatgtgagcctgaagctgcagcaggctgcgactgraaacgtaatgctgataagtagtttcagtgtgtttcaacaccacgacaaaaatagtgtaacttttctggtttgccatgatagttcaacctgtacatctaaaagcaccatctaaatcacgatcttgaaaaacatgtgctggcttggcgtgtcgttcyctccatgacatcaggtgagttaaggaatctcagaggaagtcccatcctccctgacgatacccaccagggcagcaaggtgttcattg

SEQ ID NO: 44359 - DNA, 599 bp, Chicken  19866894283076_1
  misc_feature (1)..(89): n is any nucleotide
nnnnnnnnnnnnnnnnnnnnnnnnnnnnnnnnnnnnnnnnnnnnnnnnnnnnnnnnnnnnnnnnnnnnnnnnnnnnnnnnnnnnnnnnnccccccccgctgcctgtgtatctctgtttgctgtcttctctctgctgtaccctgtccgttctgcactgctgtttgcttttctgttgctgcttttgtgttgtgcactaatcatgatggtttcttacaaaaagaaactctatctcatgggggcccccacaggtttccgagctgccaggcactgcgtcgctgcaagtaccctctggttctcccrtctcccacctttgctgcagygttgctttgatagggtgcaggaggcaccatgatccagcagggtcagcatggactttcctgacacagttctcagccctgcagtagtttttccatcagacctggaagagcacagagccgggctgtgccacactgctgcaactctagacagctcccaagcctatttgacctgtgctacagacttctaggcactgggagcagcccagaaatctcatggtgttgcttatttgtgagctggggatgcagcgtgggctgttggtctgcagctgaggaaaaggtagt

SEQ ID NO: 44360 - DNA, 599 bp, Chicken  19866894283076_2
  misc_feature (1)..(69): n is any nucleotide
nnnnnnnnnnnnnnnnnnnnnnnnnnnnnnnnnnnnnnnnnnnnnnnnnnnnnnnnnnnnnnnnnnnnnccccccccgctgcctgtgtatctctgtttgctgtcttctctctgctgtaccctgtccgttctgcactgctgtttgcttttctgttgctgcttttgtgttgtgcactaatcatgatggtttcttacaaaaagaaactctatctcatgggggcccccacaggtttccgagctgccaggcactgcgtcgctgcaagtaccctctggttctcccrtctcccacctttgctgcagygttgctttgatagggtgcaggaggcaccatgatccagcagggtcagcatggactttcctgacacagttctcagccctgcagtagtttttccatcagacctggaagagcacagagccgggctgtgccacactgctgcaactctagacagctcccaagcctatttgacctgtgctacagacttctaggcactgggagcagcccagaaatctcatggtgttgcttatttgtgagctggggatgcagcgtgggctgttggtctgcagctgaggaaaaggtagtcaaaagcttgtctctgatat

SEQ ID NO: 44361 - DNA, 599 bp, Chicken  19866894283077_1
  misc_feature (1)..(131): n is any nucleotide
nnnnnnnnnnnnnnnnnnnnnnnnnnnnnnnnnnnnnnnnnnnnnnnnnnnnnnnnnnnnnnnnnnnnnnnnnnnnnnnnnnnnnnnnnnnnnnnnnnnnnnnnnnnnnnnnnnnnnnnnnnnnnnnnnnnttcttgtacctccccctgtagatacttgaaaagctgctatcacatcacttcacagccttctcttctccagggctggaaagccccttagaaagtcttatgaatgatccaggcctccaacttcaaattctagaaacttcctagaattttttatattgtctctcttaagttycacaaataggaacaattttcttatctaataacaaattaaaagaaccaatttggaaaaaagtgaggaggtacactatgtaattwtagctaacctacatcagccaaactgtttgaagatagcaacttcacaaaaacaggagtcccagagactcttgcttcttgataatttattaatgagctcaactaaactcatccacgtcagccaagtataatgctgccatcaccaactgctttccattgaattgcctgggaagtacacagctttaaggtaccataaactctatcatagtacacacttga

SEQ ID NO: 44362 - DNA, 599 bp, Chicken  19866894283077_2
  misc_feature (1)..(48): n is any nucleotide
nnnnnnnnnnnnnnnnnnnnnnnnnnnnnnnnnnnnnnnnnnnnnnnnttcttgtacctccccctgtagatacttgaaaagctgctatcacatcacttcacagccttctcttctccagggctggaaagccccttagaaagtcttatgaatgatccaggcctccaacttcaaattctagaaacttcctagaattttttatattgtctctcttaagttycacaaataggaacaattttcttatctaataacaaattaaaagaaccaatttggaaaaaagtgaggaggtacactatgtaattwtagctaacctacatcagccaaactgtttgaagatagcaacttcacaaaaacaggagtcccagagactcttgcttcttgataatttattaatgagctcaactaaactcatccacgtcagccaagtataatgctgccatcaccaactgctttccattgaattgcctgggaagtacacagctttaaggtaccataaactctatcatagtacacacttgaaaactgaaagcaaatttgagaattgcactgtgtgctcgcagagatagagcctggggtttcatggtgcacacttaaagaatttt

SEQ ID NO: 44363 - DNA, 599 bp, Chicken  19866894283078_1
  misc_feature (1)..(53): n is any nucleotide
nnnnnnnnnnnnnnnnnnnnnnnnnnnnnnnnnnnnnnnnnnnnnnnnnnnnnagagttgggtgaatattctataagggacttgtgatgtgctccaagagatactttgtgcgttccaatagtgtacatggaccaaggtaaggtcaagggatgacaggagacaatctttaggttgccccaaaacacctaaactccattcatattctggagcctggaaggggcagaaaaaagagtgcacaaaatgttagcaggaacaggcaaaaagaaagctgtcactgggtgaagtctgtcctctgggcargaaatattgctttgagactgttttataagttttgttttctgcctatgctccagaggccagtttcaaagagtctgactatttttaaagataagcttgacgcactgggaaagagcttctgtgacacgayaggctgttatagccaggaaatggacaccctgacccaggagaggcattccagtgatgtgctcctgagctcaggctctggctttctgcaaacttctttctcaggaggaggcaggaaaagaagaaagcctttagtttcaacccaagtgaaggcaatcctgaggaaaataggggtc

SEQ ID NO: 44364 - DNA, 600 bp, Chicken  19866894283078_2
tggaccaaggtaaggtcaagggatgacaggagacaatctttaggttgccccaaaacacctaaactccattcatattctggagcctggaaggggcagaaaaaagagtgcacaaaatgttagcaggaacaggcaaaaagaaagctgtcactgggtgaagtctgtcctctgggcargaaatattgctttgagactgttttataagttttgttttctgcctatgctccagaggccagtttcaaagagtctgactatttttaaagataagcttgacgcactgggaaagagcttctgtgacacgayaggctgttatagccaggaaatggacaccctgacccaggagaggcattccagtgatgtgctcctgagctcaggctctggctttctgcaaacttctttctcaggaggaggcaggaaaagaagaaagcctttagtttcaacccaagtgaaggcaatcctgaggaaaataggggtctyggaaaagcaaacccagattaacaaaaaatgtggaaaaatgtggaagtagatgagtatgtcagatgcctcagttaactaacagactgatattgctattcctgaggcttggaagttgacatcaggtca

SEQ ID NO: 44365 - DNA, 600 bp, Chicken  19866894283078_3
aaatattgctttgagactgttttataagttttgttttctgcctatgctccagaggccagtttcaaagagtctgactatttttaaagataagcttgacgcactgggaaagagcttctgtgacacgayaggctgttatagccaggaaatggacaccctgacccaggagaggcattccagtgatgtgctcctgagctcaggctctggctttctgcaaacttctttctcaggaggaggcaggaaaagaagaaagcctttagtttcaacccaagtgaaggcaatcctgaggaaaataggggtctyggaaaagcaaacccagattaacaaaaaatgtggaaaaatgtggaagtagatgagtatgtcagatgcctcagttaactaacagactgatattgctattcctgaggcttggaagttgacatcaggtcagcaatagctgggcaccaatgagttacaacttgctgggttaatgtaaaatcaactgtccatgagaggtctgtgcctccaaatcagctgtgggaacatgttggcaaggtgaggccatactagcatatgcccaaaaagctggaggtactgactgttgaatgttaaccaaagacatag

SEQ ID NO: 44366 - DNA, 600 bp, Chicken  19866894283089_1
ttctctgttttctttgctcttctaaggaaaaaaaagaagtggctgacttctaacaagtagcatcaaattgaacccaagcctccaaggacctcttggttgcaagagagctaaatatattttcagtaaatttgtggttatcgatgcattgtgtttaaaaaacaaagtctcttgtgtttactgttcattcccaaactctcactagatcacctagtgcatgtactcaaacaatttagatgcccttaaaatgttacagatgagaatccatagtaaatgcataccttcagatcgtatggaatgttrctgtgttttctataatgcattattttttgcacgagtctagcacttgtcttcctttttggctgttactgcatgctgaaaagatgtttacattaagctgctcatgactcctggcctttttcttaagtgattagttgattgcagctcaataatattcgagtagttcaaattagttcttgcacttcatgtttgcagtgatctgagcctgtctatatacaacttctgaattgcgcccaattccaggactcgttaagaatgcacgtgtcaggcaggccccaattccagtggaagtgcttgctttct

SEQ ID NO: 44367 - DNA, 599 bp, Chicken  19866894283100_1
  misc_feature (1)..(163): n is any nucleotide
nnnnnnnnnnnnnnnnnnnnnnnnnnnnnnnnnnnnnnnnnnnnnnnnnnnnnnnnnnnnnnnnnnnnnnnnnnnnnnnnnnnnnnnnnnnnnnnnnnnnnnnnnnnnnnnnnnnnnnnnnnnnnnnnnnnnnnnnnnnnnnnnnnnnnnnnnnnnnnnnnnncaatttgagcaggttctttttttcacttcctttcctcgtcctgtgctcacccacaaaaaaccatctcctggagactgcccacatgtctgaggctgctcctaagctttcctaccatccagccctaatgcaggaacttkttggrggtgagtgcttgggactcgcttattcccacctgatattcagcctattggaaacaaatcagtacaagctctaagctgattgatgcaaagcttagaccgagaaaaaaaactctttggttcagatcctacaaatgtgcacatgaagtcaagtgctccagtgctcttctgaaaatcaaagtacagagcatggcttattttttcctttctgaatcaggttttggtgatcttgagatcaaaataataaaacattcattttagcaaccttattttatccactcagtgtgcratttcacgga

SEQ ID NO: 44368 - DNA, 599 bp, Chicken  19866894283100_2
  misc_feature (1)..(158): n is any nucleotide
nnnnnnnnnnnnnnnnnnnnnnnnnnnnnnnnnnnnnnnnnnnnnnnnnnnnnnnnnnnnnnnnnnnnnnnnnnnnnnnnnnnnnnnnnnnnnnnnnnnnnnnnnnnnnnnnnnnnnnnnnnnnnnnnnnnnnnnnnnnnnnnnnnnnnnnnnnnnnncaatttgagcaggttctttttttcacttcctttcctcgtcctgtgctcacccacaaaaaaccatctcctggagactgcccacatgtctgaggctgctcctaagctttcctaccatccagccctaatgcaggaacttkttggrggtgagtgcttgggactcgcttattcccacctgatattcagcctattggaaacaaatcagtacaagctctaagctgattgatgcaaagcttagaccgagaaaaaaaactctttggttcagatcctacaaatgtgcacatgaagtcaagtgctccagtgctcttctgaaaatcaaagtacagagcatggcttattttttcctttctgaatcaggttttggtgatcttgagatcaaaataataaaacattcattttagcaaccttattttatccactcagtgtgcratttcacggaaatag

SEQ ID NO: 44369 - DNA, 600 bp, Chicken  19866894283100_3
gcaggaacttkttggrggtgagtgcttgggactcgcttattcccacctgatattcagcctattggaaacaaatcagtacaagctctaagctgattgatgcaaagcttagaccgagaaaaaaaactctttggttcagatcctacaaatgtgcacatgaagtcaagtgctccagtgctcttctgaaaatcaaagtacagagcatggcttattttttcctttctgaatcaggttttggtgatcttgagatcaaaataataaaacattcattttagcaaccttattttatccactcagtgtgcratttcacggaaatagtggatgtaaaaattaagggaaaaaaaaaaaaaagacktatagccttataagaagttttgcaaaatcatcttaccccaatttttatctggttttgtgtgatctctaatttcagtctgtatgcctatcttattcctgctttgtttcctcctagcacaagttactaagttgtggttcccagtttatctgaattgtgaagaaacgctgctgcactctagggctgccaagttaagctccattgtagttctcctgatggaaagtgaaagaaaggcaggcagggctgcagag

SEQ ID NO: 44370 - DNA, 600 bp, Chicken  19866894283100_4
cttattcccacctgatattcagcctattggaaacaaatcagtacaagctctaagctgattgatgcaaagcttagaccgagaaaaaaaactctttggttcagatcctacaaatgtgcacatgaagtcaagtgctccagtgctcttctgaaaatcaaagtacagagcatggcttattttttcctttctgaatcaggttttggtgatcttgagatcaaaataataaaacattcattttagcaaccttattttatccactcagtgtgcratttcacggaaatagtggatgtaaaaattaagggraaaaaaaaaaaaagacktatagccttataagaagttttgcaaaatcatcttaccccaatttttatctggttttgtgtgatctctaatttcagtctgtatgcctatcttattcctgctttgtttcctcctagcacaagttactaagttgtggttcccagtttatctgaattgtgaagaaacgctgctgcactctagggctgccaagttaagctccattgtagttctcctgatggaaagtgaaagaaaggcaggcagggctgcagaggagaccttgcatcataatttgtctgggtagctgac

SEQ ID NO: 44371 - DNA, 600 bp, Chicken  19866894283100_5
ttcagcctattggaaacaaatcagtacaagctctaagctgattgatgcaaagcttagaccgagaaaaaaaactctttggttcagatcctacaaatgtgcacatgaagtcaagtgctccagtgctcttctgaaaatcaaagtacagagcatggcttattttttcctttctgaatcaggttttggtgatcttgagatcaaaataataaaacattcattttagcaaccttattttatccactcagtgtgcratttcacggaaatagtggatgtaaaaattaagggaaaaaaaaaaaaaagacktatagccttataagaagttttgcaaaatcatcttaccccaatttttatctggttttgtgtgatctctaatttcagtctgtatgcctatcttattcctgctttgtttcctcctagcacaagttactaagttgtggttcccagtttatctgaattgtgaagaaacgctgctgcactctagggctgccaagttaagctccattgtagttctcctgatggaaagtgaaagaaaggcaggcagggctgcagaggagaccttgcatcataatttgtctgggtagctgacttgcttttgtagttttg

SEQ ID NO: 44372 - DNA, 599 bp, Chicken  19866894283110_1
  misc_feature (1)..(179): n is any nucleotide
nnnnnnnnnnnnnnnnnnnnnnnnnnnnnnnnnnnnnnnnnnnnnnnnnnnnnnnnnnnnnnnnnnnnnnnnnnnnnnnnnnnnnnnnnnnnnnnnnnnnnnnnnnnnnnnnnnnnnnnnnnnnnnnnnnnnnnnnnnnnnnnnnnnnnnnnnnnnnnnnnnnnnnnnnnnnnnnnnnntacttgctgttttgcagatttctcacttgagacattcatgggtctggaagtcgattagtgcttgtagccctttgcagaactgcaggcaggacatgagcatggagtgtttcagtgagactgygcygttggtattcattggaattagtgactggtgtgatgcagttaattgtccatatagatgtacacaaatctccaagagaatctgctgccagtctctcttaaatctatttagcaatcctcctggatccattccttgatgctggagatttatcacatagcaggttttgttaggaaggtctaacatgatctgacagagtctaacacagagttcccatgctgtctgaactggctatctcatatatgaatgcagtacagatacatccatggtatatacgttacgggtaaataattacttgttac

SEQ ID NO: 44373 - DNA, 599 bp, Chicken  19866894283110_2
  misc_feature (1)..(176): n is any nucleotide
nnnnnnnnnnnnnnnnnnnnnnnnnnnnnnnnnnnnnnnnnnnnnnnnnnnnnnnnnnnnnnnnnnnnnnnnnnnnnnnnnnnnnnnnnnnnnnnnnnnnnnnnnnnnnnnnnnnnnnnnnnnnnnnnnnnnnnnnnnnnnnnnnnnnnnnnnnnnnnnnnnnnnnnnnnnnnnnntacttgctgttttgcagatttctcacttgagacattcatgggtctggaagtcgattagtgcttgtagccctttgcagaactgcaggcaggacatgagcatggagtgtttcagtgagactgygcygttggtattcattggaattagtgactggtgtgatgcagttaattgtccatatagatgtacacaaatctccaagagaatctgctgccagtctctcttaaatctatttagcaatcctcctggatccattccttgatgctggagatttatcacatagcaggttttgttaggaaggtctaacatgatctgacagagtctaacacagagttcccatgctgtctgaactggctatctcatatatgaatgcagtacagatacatccatggtatatacgttacgggtaaataattacttgttacaga

SEQ ID NO: 44374 - DNA, 600 bp, Chicken  19866894283112_1
cttcttgggcacttcgcaaggaaaaacagttattcctattacaggctggaggtaagagaggagaaatgagccctacacctattagccacccagaagtaattgctgggaatgtgacatgaccttgccgaaaggtataaagatgccaggatgtatggggtgaggtatttccaacagagatcaatgggaagcttggaaacagcatttatgcatacaaagggaggcatttttaagttttttggtcatcttgttcaggactggagtgaatccaatgagagagaagtaggaagaggcactgggtgrtrtggactctggaagatgtgggcttagagatgtcccatccatcatgcrctttggcaccatccatcacacyggtagcacaaaaatcagcactcagcaattattacatcccactgggaatttcatgaggttttacagctatctcaatagccaatgtcttgtttattcaaagcagtgttaatttcttcccatatgccacaccagccagactctgacctgacaagctcagcctatgggagtagaagcagatgcccacagccctgcgtggatgtggctatccaagcacaggtaaaccacagcaaa

SEQ ID NO: 44375 - DNA, 600 bp, Chicken  19866894283112_2
tcttgggcacttcgcaaggaaaaacagttattcctattacaggctggaggtaagagaggagaaatgagccctacacctattagccacccagaagtaattgctgggaatgtgacatgaccttgccgaaaggtataaagatgccaggatgtatggggtgaggtatttccaacagagatcaatgggaagcttggaaacagcatttatgcatacaaagggaggcatttttaagttttttggtcatcttgttcaggactggagtgaatccaatgagagagaagtaggaagaggcactgggtgrtrtggactctggaagatgtgggcttagagatgtcccatccatcatgcrctttggcaccatccatcacacyggtagcacaaaaatcagcactcagcaattattacatcccactgggaatttcatgaggttttacagctatctcaatagccaatgtcttgtttattcaaagcagtgttaatttcttcccatatgccacaccagccagactctgacctgacaagctcagcctatgggagtagaagcagatgcccacagccctgcgtggatgtggctatccaagcacaggtaaaccacagcaaagc

SEQ ID NO: 44376 - DNA, 600 bp, Chicken  19866894283112_3
gaggtaagagaggagaaatgagccctacacctattagccacccagaagtaattgctgggaatgtgacatgaccttgccgaaaggtataaagatgccaggatgtatggggtgaggtatttccaacagagatcaatgggaagcttggaaacagcatttatgcatacaaagggaggcatttttaagttttttggtcatcttgttcaggactggagtgaatccaatgagagagaagtaggaagaggcactgggtgrtrtggactctggaagatgtgggcttagagatgtcccatccatcatgcrctttggcaccatccatcacacyggtagcacaaaaatcagcactcagcaattattacatcccactgggaatttcatgaggttttacagctatctcaatagccaatgtcttgtttattcaaagcagtgttaatttcttcccatatgccacaccagccagactctgacctgacaagctcagcctatgggagtagaagcagatgcccacagccctgcgtggatgtggctatccaagcacaggtaaaccacagcaaagccctgggggcctgcagccctcaccatgggggccgtgctgcttcaggg

SEQ ID NO: 44377 - DNA, 600 bp, Chicken  19866894283112_4
ccctacacctattagccacccagaagtaattgctgggaatgtgacatgaccttgccgaaaggtataaagatgccaggatgtatggggtgaggtatttccaacagagatcaatgggaagcttggaaacagcatttatgcatacaaagggaggcatttttaagttttttggtcatcttgttcaggactggagtgaatccaatgagagagaagtaggaagaggcactgggtgrtrtggactctggaagatgtgggcttagagatgtcccatccatcatgcrctttggcaccatccatcacacyggtagcacaaaaatcagcactcagcaattattacatcccactgggaatttcatgaggttttacagctatctcaatagccaatgtcttgtttattcaaagcagtgttaatttcttcccatatgccacaccagccagactctgacctgacaagctcagcctatgggagtagaagcagatgcccacagccctgcgtggatgtggctatccaagcacaggtaaaccacagcaaagccctgggggcctgcagccctcaccatgggggccgtgctgcttcagggtcatgggttcaaggcctgaacc

SEQ ID NO: 44378 - DNA, 599 bp, Chicken  19866894283121_1
  misc_feature (1)..(49): n is any nucleotide
nnnnnnnnnnnnnnnnnnnnnnnnnnnnnnnnnnnnnnnnnnnnnnnnngtcaaatgcatgtacatggatgaggcaaaaggccatggtgagccttctccgatgggtgggctgttgctgctggtctaccagaagagcattcctcagctgcaagcagacagaaggagtagatttcataatttcatttctgcgtccgtgctatcctgtttgctcctcactcttgttgatgtagctttcagccttttgcttttctttatttaaggcttgctgaatatctcaagtttaacagccataaacaaagrgagtttcatggtcatcaagagcraagagatcattaacgtggaaaaaagttgtttggcagagctcaaaattctgagatcactgcagtctgataggagaatgatttatctccctgtattgattttttttctttgtatgattcctttacacgcatttctattattttcagtgatgatcccaacaatgtggagcattctaaggagggccatgcagattcacagtctggactggcattcgtggctggtgaggagttttttatggtatctgatgacgttgttacactgcacagtacagcagatgg

SEQ ID NO: 44379 - DNA, 599 bp, Chicken  19866894283121_2
  misc_feature (1)..(26): n is any nucleotide
nnnnnnnnnnnnnnnnnnnnnnnnnngtcaaatgcatgtacatggatgaggcaaaaggccatggtgagccttctccgatgggtgggctgttgctgctggtctaccagaagagcattcctcagctgcaagcagacagaaggagtagatttcataatttcatttctgcgtccgtgctatcctgtttgctcctcactcttgttgatgtagctttcagccttttgcttttctttatttaaggcttgctgaatatctcaagtttaacagccataaacaaagrgagtttcatggtcatcaagagcraagagatcattaacgtggaaaaaagttgtttggcagagctcaaaattctgagatcactgcagtctgataggagaatgatttatctccctgtattgattttttttctttgtatgattcctttacacgcatttctattattttcagtgatgatcccaacaatgtggagcattctaaggagggccatgcagattcacagtctggactggcattcgtggctggtgaggagttttttatggtatctgatgacgttgttacactgcacagtacagcagatggtttgcacgctgtgggacacaytc

SEQ ID NO: 44380 - DNA, 462 bp, Chicken  19866894283121_3
gcraagagatcattaacgtggaaaaaagttgtttggcagagctcaaaattctgagatcactgcagtctgataggagaatgatttatctccctgtattgattttttttctttgtatgattcctttacacgcatttctattattttcagtgatgatcccaacaatgtggagcattctaaggagggccatgcagattcacagtctggactggcattcgtggctggtgaggagttttttatggtatctgatgacgttgttacactgcacagtacagcagatggtttgcacgctgtgggacacaytctgagctacaaagcccaggctgagccaccatggaaaccattgcggtttgggctggagaaaagaatttgattcagtcctattttattttctttctggaattacctttgaagcctatttctttctaaatgctctaggatgtctccttttgccacataccagaa

SEQ ID NO: 44381 - DNA, 600 bp, Chicken  19866894283130_1
atattacagagctgaatagtgaggaacgtgactaatgagtgtagaatattaccagagactggattgctgagaggagaaaaggaaagatgaaaataaaagaatcaactttgaatgagactacttacaaatattgtgctagattagaaagcattaacttctttcaaagaagcatattctgagatctttatgttaaatacgtttattgcccctccctccccatcccttctttgcctaaatgttggatgtttccgtttgaagtgaatgcttaaatgttggacaccttgcaccagatgaaacagmggagacttcagatgtagcagcttctgttgagcattacaacctgaacacaggtctttcctattcagagctgctacggatagagtgaaaagtgctcagcatgtgtaaggacaggtaatgaagcgtgtaagaagttgtcacacccacaaaataagtatttgttagacttcttccccactcataagaatcctgaagtggaagcaacattctttcctatctttctgttacaattcatgggatctgcttttgtgttcaataccctttataatcactctgcttatttgtcgctgtagtcctagaagc

SEQ ID NO: 44382 - DNA, 524 bp, Chicken  19866894283131_1
aaaggaaagatatcagttctcactgtttgctaaggagggatctgatattgttctgttttgattgtatgttactttcttttctggagaccatttagcttttggaaccagccagaaatcttccaatagaacaatatcttttgccagcaaagatgagttttataaactgtaagtgtccatgggtaatacaagtaaaatatttctattttggatcaattcaatctcactttaaatatttgtctgctggaactttctgaattaaatcagcggcaacaaaataccactcaagttcatggtccgttyaagaggacaggatcaaatacagagtctcctggaggcagtgcctaccatgtaatattaaaaaaaggccagcaaaatgaagtaagaagcttctaattccccaaagaaaataacacatttttagttgaaaaaaggcaaaagtatttttgcagtttttgcattttggaagtgcctgctttttgtgaaaataattggtttaactgctcaacctgtttaagacaatactg

SEQ ID NO: 44383 - DNA, 600 bp, Chicken  19866894283132_1
ttcctgctctctggcagtataacataacagtcgtctttcacttaaacagcaatgagatcatgctgtcaaaaacaagcatctgaaatcagaacaaaacgcagcactcaattgtaaatcagttgcatactgaccacacatgaaagcatgctccatgtaactttgacaaacaagggtacgtgagcaagtgctacctacagaaagcatgtgactcccagacagatgtccacaacagctgtgatggctctttcttttttttctgcaggttctggttatgtatatataaaaaatataaaaaatgcygttttttaaattttatgttggataaccagaaaccctggttgagtcattccaaatttactggcatatagacccacagaatcatagaagcattaaggttggaaaagaccactaagaacacctaatccagctatcagcccatccccaccatgtccactcaccacatccctcagtgctacatctccatagttcttgaacacccccaaggatggtgactgcaccacctccctgggcagcccattccagcacctcatcaagcttttggagaagaaatttctcctaagatccaatctgaacctcccc

SEQ ID NO: 44384 - DNA, 600 bp, Chicken  19866894283132_2
agtgctacatctccatagttcttgaacacccccaaggatggtgactgcaccacctccctgggcagcccattccagcacctcatcaagcttttggagaagaaatttctcctaagatccaatctgaacctcccctggctcaacttgaggtcatttcctcttgtcctatcactagttacatgggagaagaggccaacccccacttcaccataacctcctttcaagttgtagagaacaataaggtctctcctgaaactccttttcttcacactgaacagtcccagttcccccagatgctccccmtaagacttgtgctccagactcatcacagtttcattgcccttctctgttcatgctctagggcctcaatgtctttcttgtagtgaggagcacaaaacttaacacaccactgagttgcagcctcatcagagctgagtacagagggatgatctcctccctgctcctgctggcaacactatttatggcacaagacaggatgctgttggccttcttggccactgggcacactgcatggttagctgagcactgaccaacatgcccaggtctgtttcttccacacagtttgcctgctgctctgcccca

SEQ ID NO: 44385 - DNA, 424 bp, Chicken  19866894283132_3
gttccctggacagccaggagacaggttgaacgagccctactccctcagcctttccttacaggagaggtgctccggcctactgatcatcttcatggtcctcctctggactcactccatcaactctgcatccttcttgtggtggggaccccagatctggacacagtactccagatgggtcctcatgagagcagtgcagagagggacagtctcctccctcaccctgctggccattcttcttgttcagtttcatcttcctcttgagttcaggtgtgctgatggggctgaaacccttcatttccygcaatgcctgtgaaggcaaggagacaggcagccttcacagcatggatacctgcccaagaagcaggagacatgaagtcttggttccccagagactaacccacagcttctacatcatacaggcatg

SEQ ID NO: 44386 - DNA, 527 bp, Chicken  19866894283134_1
cttaacctctaattcaaacatcaaatagactgatcttactgtagctgctgctttctgtaatgaaagtttcgcatgcccttgcttactgggaactgagcgacaaactgtttcattactgtttctgctttgcttccaagcaccttcatatttacagaggtcggaaaggaggttaaacgcagatgcaaactttatcccatgcaaagctttctgtgggattccagctctctgctcagtgccatgtgcagtcagaggctgccatggtgctcatggctgctctcagcaccagcctgaagattgcayctctcaggcctgagctgtagcgattgagtctctttgcagaataaagcattttttaccccataccttgaagggtagatttcaaattgcattttcaaaggaatgtctggatgcttagcttgccctagaggtaccacgggctctggtggtggaggccctccatgcatcaccgtcagaaccaaagctctctgcagaggctgctgctggcttatgctgcctccaagcacaag

SEQ ID NO: 44387 - DNA, 600 bp, Chicken  19866894283142_1
cacattcttttttctctgccaagagtgttggtaaaaatgaaatgtttctctgcagaaacagtaacacaaacttgcattaaagaagtaatcttcaaaaacacccatctctcctgcaatttatagaaaggaagagctagatttgctagcacagaaaaaaaaaaaaaaaaaaaagtaaaatatagtttcactgcgggaaactcattttggtgtgttcaggactcatacaagaatctattttaattcagaataggtctatacagaaatctgtcagagcagtgttgactcactgcttaaagcttytgaccaacctaggcagaaacaactgctttctaagtggcaaaagcttcagttttaacagactgcacttgtttcaaaccgcccccaactccaggtatatgtaggttttctgtttgctttccaaacacaaggattttccttcctggcaacctacaactaccagtctcagaatatattccaccttgctgctcccctattctatgtgcttcttctgattataaaataattatggttcagaatttttccagatacttaaagggaaactcctattgagcctgaatttgcaaaggctgtgaggtgacc

SEQ ID NO: 44388 - DNA, 600 bp, Chicken  19866894283142_2
agttttaacagactgcacttgtttcaaaccgcccccaactccaggtatatgtaggttttctgtttgctttccaaacacaaggattttccttcctggcaacctacaactaccagtctcagaatatattccaccttgctgctcccctattctatgtgcttcttctgattataaaataattatggttcagaatttttccagatacttaaagggaaactcctattgagcctgaatttgcaaaggctgtgaggtgacctgaatgtggcttttcagaatgtaaaggggagctataggaaagaaggrgacagacacttcagcagggtctatggtaatagaaaaaggggaaatggcttcaagctcaaagagggtagacacaggataagtataaagaaaaaatcttttctagtgatggtggtgaggttctggaacaggttgcccacttatgtggttaatgccccatccctggtgactttcagcatgaggctggataaggccctggcaacctggtctagctggggtgtccctgttcactgcaggggagctggactagatgaccctcagatgccccttccaactgtaaggattctatgattctaaaatcgt

SEQ ID NO: 44389 - DNA, 600 bp, Chicken  19866894283142_3
tgtaagctcacttagctacagtggtaaatatctacatatagcagtttatataacattttatattgaaaaataaaaagtgaaagattcattcagaaaataaccagcattacaatagaaattgttcatagcaattcaactgatagattctccattgtgaattgataagcttctctctgtgactagttagggcagaaacaccagtggtaccttctgcttaacagagaaaagttagataaaaagttaatacttagggagacctcaaataaattatttatcatctgttcactgagaatgatatargggttgtgggaacgacaaataatccagccaattgccttgaaagaacaaagaatttgatacctcagaaaactgtgaggacatctgtatgtgcttgaatgaacgtaatctttcctattggttgaagattatttccctttccaataggaagacataatagacagttgacaaggatttacaaacataatttatattaaaaaaagaaaaaaaaacaactgaaaccagtctccctcatatgtagacaggtgaacaattcatttttcactcactcactggcagtataaagtggtattaatacctaca

SEQ ID NO: 44390 - DNA, 600 bp, Chicken  19866894283144_1
ctaaaataagaacagagaaacacaaactagcacacttacactgggaacaaggggagagaggtaggcagaataagaccagactcatactgccaatacattacacaaaaagaaaggcctgaatgtagcttaaacacacactgctgcttctcctctactccctaaagcaaagcattttgcttagctattccaaggctctcttatatgctctatacgcctgcttttctacttctgatttgactcgtaccattttgttctattagacaaagaccactgttcaaaagacagtattaccagtgactrttcctttctctgctctctatagctagggaacttataggaatgaaaggtttactaacatgaacttgattcccactacactacagacttcaaatgcctgcccaaatatatgttggtcgtgttcaaatacatcccccgatgactgtcagtgtcactatcagtgctaccttggattcagakaaaggtgttagtgaaaaatactttgcattcagataaagatgtctgtatatgtaaactgaggttaacaatttttggtggctgattctaaattccagtactgaaattcatcactgaagccagagc

SEQ ID NO: 44391 - DNA, 600 bp, Chicken  19866894283144_2
ttagctattccaaggctctcttatatgctctatacgcctgcttttctacttctgatttgactcgtaccattttgttctattagacaaagaccactgttcaaaagacagtattaccagtgactrttcctttctctgctctctatagctagggaacttataggaatgaaaggtttactaacatgaacttgattcccactacactacagacttcaaatgcctgcccaaatatatgttggtcgtgttcaaatacatcccccgatgactgtcagtgtcactatcagtgctaccttggattcagakaaaggtgttagtgaaaaatactttgcattcagataaagatgtctgtatatgtaaactgaggttaacaatttttggtggctgattctaaattccagtactgaaattcatcactgaagccagagctgcaatcatgggtatatgcctacctttccttaggaaacaactgggtggctactaagcacagtggtgcggactgctgtttaagaaagccatgtcttatttgacaataccaatgtaagatattcccatcctcttctaccagatactgcaggacaatccaaaattcagcaacagctccct

SEQ ID NO: 44392 - DNA, 599 bp, Chicken  19866894283145_1
  misc_feature (1)..(54): n is any nucleotide
nnnnnnnnnnnnnnnnnnnnnnnnnnnnnnnnnnnnnnnnnnnnnnnnnnnnnnaaccctacaagaaactgaagactttccttcttataacgacatagatctgcatgtgaacacttcaaaaaagttttacatgtcagctttaagatcactgtaatctgtacctctgaacttctgcgtgacaggggtcagacaattgcagcaaataaaaactttgtgaagaccatcatttctagctcagactgttcagagacacaggagcactatgggcttccaggagagatacttaagtgtatgtctacwtgagaaggttacttcagaatgaaggaaagcgtagatgtaaaatgctatagctattcttgaataatgcccaagaggagtgctcctattacaaaataaaaaagaattttcagttttgcttaattcatttcccaggtgaattaaactaaatcagacaaaggttttctttcagccagcgtatgagtgtcaacaataggaattattgtggaacagcacatgtacttaatttccactggtcagcaaatgttagtttgccaaggacacgtaacaggaagarggagcctgagcaaaatggttgcagg

SEQ ID NO: 44393 - DNA, 600 bp, Chicken  19866894283145_2
gagagatacttaagtgtatgtctacwtgagaaggttacttcagaatgaaggaaagcgtagatgtaaaatgctatagctattcttgaataatgcccaagaggagtgctcctattacaaaataaaaaagaattttcagttttgcttaattcatttcccaggtgaattaaactaaatcagacaaaggttttctttcagccagcgtatgagtgtcaacaataggaattattgtggaacagcacatgtacttaatttccactggtcagcaaatgttagtttgccaaggacacgtaacaggaagarggagcctgagcaaaatggttgcagggaactgacacatttcaagcagtggcagagagtagcaggtaagggagctggtgtgggaatggaaagatgctgatgatccccctagtgcaacatcatcacttctctgccttgtgaccagctcccacctccagctcagtgacagtaagtcaccttctgcctcccaccagcaatgcacatgtacatcatgctcccaactgccactcagcaagcagacctaagttctgctattggtagtgcatacacagacttattatttctacccatttgaagctgaca

SEQ ID NO: 44394 - DNA, 600 bp, Chicken  19866894283146_1
tactccagcacacctccagaattgcatagcactcactaaattcagctctccttcctcattgagtcagactaatggaagcttggtgataaaagtgccatgcttggcttccagcaaggtgcacatcttactattctactacacattgaactgaattatgactctttgttatagtcccctgatttctttgttggaaaaaaatccaataatcacactggagaaaggcatataaatactttgaaacactgcttctgattcatcttttacaattatatattgcattttttctcattattttaaaartctagatgtctgttgcttaagaagtggcaattatccctgatattactgtattcagtaagatgtttaacagatattttaacatatttcatatttaaggaagcactggcttaaaaattctatcctcctttctagtctctacctttattttcactgtcttgttttctgaaaacattttatcttaagcacaatgtttacagagttgattctaaaattatatctgaatttgttctcaaccatttaaacagactttacaaggcatttttgagttatatggggatgcaaacatacccttttgtaaaa

SEQ ID NO: 44395 - DNA, 600 bp, Chicken  19866894283151_1
tcatcagctctcacttctattggtagaacattttactagattccccagcaaaccaaatacttctaaacaagtttttcatacctccatttcttcgtaccatatacaagacataaatcatttccattacctggcagacacttccagttacttctttcccttgttagtctgtttagcatcacagcagttactggcattccgccagactatttgagattttatgttttataagaacttaggcttataatgcacagaaaggcactagctgcccaccagctgttatttgtgtaacagacaggcagygtgtgcatggcagcagcaaggcattctgatgctagataatctttggtccccagtacaagtgctgagaggtatcwgcaacagatgctacatggatgtctttagccacagcatagttatgatctggytttgtcctgagcagggatcctgtgcttccttgaggttccattgtgttcaaagcacarcacagacaggagcaagtacactaacatacaagttaaccaagcagatctcattctttgcctctcagagtcgtccacagggacacatgtaagtacagtgtggatactctctagtgagaac

SEQ ID NO: 44396 - DNA, 600 bp, Chicken  19866894283151_2
ttcatacctccatttcttcgtaccatatacaagacataaatcatttccattacctggcagacacttccagttacttctttcccttgttagtctgtttagcatcacagcagttactggcattccgccagactatttgagattttatgttttataagaacttaggcttataatgcacagaaaggcactagctgcccaccagctgttatttgtgtaacagacaggcagygtgtgcatggcagcagcaaggcattctgatgctagataatctttggtccccagtacaagtgctgagaggtatcwgcaacagatgctacatggatgtctttagccacagcatagttatgatctggytttgtcctgagcagggatcctgtgcttccttgaggttccattgtgttcaaagcacarcacagacaggagcaagtacactaacatacaagttaaccaagcagatctcattctttgcctctcagagtcgtccacagggacacatgtaagtacagtgtggatactctctagtgagaacaggcacaaatgttcccrtcgctgtatctttcatggtcagcaatgctacagatcatttatgagtgctctgttaaa

SEQ ID NO: 44397 - DNA, 594 bp, Chicken  19866894283151_3
acctggcagacacttccagttacttctttcccttgttagtctgtttagcatcacagcagttactggcattccgccagactatttgagattttatgttttataagaacttaggcttataatgcacagaaaggcactagctgcccaccagctgttatttgtgtaacagacaggcagygtgtgcatggcagcagcaaggcattctgatgctagataatctttggtccccagtacaagtgctgagaggtatcwgcaacagatgctacatggatgtctttagccacagcatagttatgatctggytttgtcctgagcagggatcctgtgcttccttgaggttccattgtgttcaaagcacarcacagacaggagcaagtacactaacatacaagttaaccaagcagatctcattctttgcctctcagagtcgtccacagggacacatgtaagtacagtgtggatactctctagtgagaacaggcacaaatgttcccrtcgctgtatctttcatggtcagcaatgctacagatcatttatgagtgctctgttaaaggaagtgacaggttaaaaaaacctgagttgcacagttgcagattg

SEQ ID NO: 44398 - DNA, 537 bp, Chicken  19866894283151_4
agttactggcattccgccagactatttgagattttatgttttataagaacttaggcttataatgcacagaaaggcactagctgcccaccagctgttatttgtgtaacagacaggcagygtgtgcatggcagcagcaaggcattctgatgctagataatctttggtccccagtacaagtgctgagaggtatcwgcaacagatgctacatggatgtctttagccacagcatagttatgatctggytttgtcctgagcagggatcctgtgcttccttgaggttccattgtgttcaaagcacarcacagacaggagcaagtacactaacatacaagttaaccaagcagatctcattctttgcctctcagagtcgtccacagggacacatgtaagtacagtgtggatactctctagtgagaacaggcacaaatgttcccrtcgctgtatctttcatggtcagcaatgctacagatcatttatgagtgctctgttaaaggaagtgacaggttaaaaaaacctgagttgcacagttgcagattg

SEQ ID NO: 44399 - DNA, 402 bp, Chicken  19866894283151_5
aaggcattctgatgctagataatctttggtccccagtacaagtgctgagaggtatcwgcaacagatgctacatggatgtctttagccacagcatagttatgatctggytttgtcctgagcagggatcctgtgcttccttgaggttccattgtgttcaaagcacarcacagacaggagcaagtacactaacatacaagttaaccaagcagatctcattctttgcctctcagagtcgtccacagggacacatgtaagtacagtgtggatactctctagtgagaacaggcacaaatgttcccrtcgctgtatctttcatggtcagcaatgctacagatcatttatgagtgctctgttaaaggaagtgacaggttaaaaaaacctgagttgcacagttgcagattg

SEQ ID NO: 44400 - DNA, 599 bp, Chicken  19866894283152_1
  misc_feature (1)..(60): n is any nucleotide
nnnnnnnnnnnnnnnnnnnnnnnnnnnnnnnnnnnnnnnnnnnnnnnnnnnnnnnnnnnnttaaaaagctcatatccttaatctctcaaaaaagcttattagatacccatccacaaatgcaggttctgctaaatgacactgaccctccacaaccttgtattctgggatgcatccacattattctcaaaaagagatccccaagctaagactaatcccaacatgctgtgaaatccacctgcctgctccctggacaagtccatccaagcacagcaggtttctctgcaggctttcagcagcagsttataggtctgaatraatggcattactgcttctaaccctatgctgcakatgctattttcttccaccaggctccaaattaattcaggtataaaatcagaaaaactagatgaccctaaaggtcccttccaacccaaacaattctatgtgccctgcaaagagattttcttatggatgagcatgccaaacgtaaatcatgtttccacacaaagaaagctttcagaacaagagaacctgggaaaaattagattagtcatggacaacaataaaagcagcgctgctcggtgaaaataaggtaaaaa

SEQ ID NO: 44401 - DNA, 599 bp, Chicken  19866894283152_2
  misc_feature (1)..(45): n is any nucleotide
nnnnnnnnnnnnnnnnnnnnnnnnnnnnnnnnnnnnnnnnnnnnnttaaaaagctcatatccttaatctctcaaaaaagcttattagatacccatccacaaatgcaggttctgctaaatgacactgaccctccacaaccttgtattctgggatgcatccacattattctcaaaaagagatccccaagctaagactaatcccaacatgctgtgaaatccacctgcctgctccctggacaagtccatccaagcacagcaggtttctctgcaggctttcagcagcagsttataggtctgaatraatggcattactgcttctaaccctatgctgcakatgctattttcttccaccaggctccaaattaattcaggtataaaatcagaaaaactagatgaccctaaaggtcccttccaacccaaacaattctatgtgccctgcaaagagattttcttatggatgagcatgccaaacgtaaatcatgtttccacacaaagaaagctttcagaacaagagaacctgggaaaaattagattagtcatggacaacaataaaagcagcgctgctcggtgaaaataaggtaaaaaaaaataaatgcatca

SEQ ID NO: 44402 - DNA, 599 bp, Chicken  19866894283152_3
  misc_feature (1)..(12): n is any nucleotide
nnnnnnnnnnnnttaaaaagctcatatccttaatctctcaaaaaagcttattagatacccatccacaaatgcaggttctgctaaatgacactgaccctccacaaccttgtattctgggatgcatccacattattctcaaaaagagatccccaagctaagactaatcccaacatgctgtgaaatccacctgcctgctccctggacaagtccatccaagcacagcaggtttctctgcaggctttcagcagcagsttataggtctgaatraatggcattactgcttctaaccctatgctgcakatgctattttcttccaccaggctccaaattaattcaggtataaaatcagaaaaactagatgaccctaaaggtcccttccaacccaaacaattctatgtgccctgcaaagagattttcttatggatgagcatgccaaacgtaaatcatgtttccacacaaagaaagctttcagaacaagagaacctgggaaaaattagattagtcatggacaacaataaaagcagcgctgctcggtgaaaataaggtaaaaaaaaataaatgcatcatccaacttgtcaagctgatctacatatgctact

SEQ ID NO: 44403 - DNA, 600 bp, Chicken  19866894283167_1
catatacccgctctcagctcactgctgttataaggagacatcacccttgcatctacagctaagcaattctctgactacattctgtttttctctcaaagctcaggaaaataataataataataaaaaagcaagaatatgtagcaagaattttcttagaaactatgaatttggactgatggccattttttacattacttcaactggcatgtacctttctagcacataaatgttagctggctttattagaattttgtataaggaggtacacaaataaaatgagcatgactgctgtccttcaaygggaaatttctttgcaccaatataagcagtgtcaaaagagggaagtaagcagtgggttgtggtcacactctgataagcttcaactgagcttatttttctcattcatattattacatggctcgtacacaacaaagacaggttgctagaaaactctctattgccatatatctcaatacagagttggggggaaaaaaaacctcaaatgtgatcaaaatgcctttcaacagcaatctttaattaatacaaattaatcttatgatttcttcataaataagtgatcatccagcttattcagctgca

SEQ ID NO: 44404 - DNA, 556 bp, Chicken  19866894283167_2
gaaaactctctattgccatatatctcaatacagagttggggggaaaaaaaacctcaaatgtgatcaaaatgcctttcaacagcaatctttaattaatacaaattaatcttatgatttcttcataaataagtgatcatccagcttattcagctgcacccctcaccatagtggtgccattaacaatgacagaacttggatcctgtgctaaatgctcttcaccctaggcaaatgataagttgtacaaccacacaatggctgtacatacatcatacgattgtactgagctatgttgtttgttasgaaacaacatgtatattacaatctgcaacccactgtatacttctcaaccacttcctttgtgatacagctgtattttgttggttgatccgatttagtctatcaggtgattctctatggtattataaaatcaccaaaatgttaaaaatgtgaattttagcttctaaaccttaagaagctgaagggaaaagttacaagatgttaagctgagactaacattccagatccctagggggttctaaacagttctcaaatcaaa

SEQ ID NO: 44405 - DNA, 600 bp, Chicken  19866894283168_1
agtaagtctacaaggagagagttaaacacaggatgttacttcaacagttctacatgcctgctctagaagactgcaaagtttattctcatgaccaaaagtccgtctgaatatagacagaaatcatgcaagttattcttccccgatgtttcaaacctgatttgccacccaattatttcaaccttggcttctgacgcagcacacctcctcaatcagaagggcccctcttcccttgcccccagagagagttactagttcaactatcactaagtttttacacagcaaacattttactcttctacyttcaaatgtaagaatcaaaatgttccaactaactttcctcagtctcagagtgctgagaagccataataacactatgcacagcaacagtcagccaaatcaactctaaacaactaatcaagtgagaaaaagcacagattatatagataccactcccctcctgacctaattccatatatttgcatacatatcttcatcaaggagagcctaacaacatatggttctaaacaagaacttttgtcagtacaatttgactgaagtttcagtaatgcagcttccattcctaattagtctccctgcagg

SEQ ID NO: 44406 - DNA, 600 bp, Chicken  19866894283175_1
tgatgcttgttaatttggtgtggggtttcttttggctgaatactttcgccattttcttttaatgaattgacagaggcagcccaaagtgctgcagcctggagaaccattagcagtgtgtaagcgttaagtggggttcaggcaagggagggccgagggctgagcaggagattgctttcattgtatgctgaggttggaatgtaatgagcagaagtgctgttacacctgggtcacttctcgtaatggctacagagatgtggcagcagattggagtgcgtgacaagatctcatcgcccgctgttkgctgagtggtttctgctcctttagtcagaccttctgcaaccyttggtacccagtatttcttcctttattctgttcttagttaatgagcgtgccttcgctgcaggccttttaaaaacagtttaaaaacaagcatctcattgaagaaaatgctcaaaaatgatgtggcttaaattcatctgtgcatgtaagactactraaaacatccagggatgtcagcactcgtgacagtgtctgagctgactgcagccacgttcagaccgcagctgcccgcagcaactcaccatcccccatcactctctc

SEQ ID NO: 44407 - DNA, 600 bp, Chicken  19866894283175_2
ctttcgccattttcttttaatgaattgacagaggcagcccaaagtgctgcagcctggagaaccattagcagtgtgtaagcgttaagtggggttcaggcaagggagggccgagggctgagcaggagattgctttcattgtatgctgaggttggaatgtaatgagcagaagtgctgttacacctgggtcacttctcgtaatggctacagagatgtggcagcagattggagtgcgtgacaagatctcatcgcccgctgttkgctgagtggtttctgctcctttagtcagaccttctgcaaccyttggtacccagtatttcttcctttattctgttcttagttaatgagcgtgccttcgctgcaggccttttaaaaacagtttaaaaacaagcatctcattgaagaaaatgctcaaaaatgatgtggcttaaattcatctgtgcatgtaagactactraaaacatccagggatgtcagcactcgtgacagtgtctgagctgactgcagccacgttcagaccgcagctgcccgcagcaactcaccatcccccatcactctctctgagctgcctcactgctgcttaaactcctgggctccaaatgg

SEQ ID NO: 44408 - DNA, 600 bp, Chicken  19866894283175_3
tgtaatgagcagaagtgctgttacacctgggtcacttctcgtaatggctacagagatgtggcagcagattggagtgcgtgacaagatctcatcgcccgctgttkgctgagtggtttctgctcctttagtcagaccttctgcaaccyttggtacccagtatttcttcctttattctgttcttagttaatgagcgtgccttcgctgcaggccttttaaaaacagtttaaaaacaagcatctcattgaagaaaatgctcaaaaatgatgtggcttaaattcatctgtgcatgtaagactactraaaacatccagggatgtcagcactcgtgacagtgtctgagctgactgcagccacgttcagaccgcagctgcccgcagcaactcaccatcccccatcactctctctgagctgcctcactgctgcttaaactcctgggctccaaatggtccctcagcacctcaaatggagagagaaataatctgcgtcacaacgtaaggtatgttacaatcttccataacccaacaatttatttaaacttacatcacaatgagaatctattcataaaatacatcagttcacaccagtctgcattgccggatt

SEQ ID NO: 44409 - DNA, 600 bp, Chicken  19866894283184_1
agatgcaataaaaagtgcacaacagcccgtagctaaagatctgtttggcaagcaagatgaaacgttgcacaacagcatttctccttcaaatgcttcactttaagtcattagcccgcttactctaaggctggaaaagcaaatgccaggctggttctgccaagcccttacacaggcagatgcaaggcgatcactgcagagtttgcaactgatcactctgtcagacaccacaccttctgctggcacaggacccacgcgagctccccaggctgctccatgcagacaagggcagagctggtactrcatgatgctaacagctgtcaagtggttaatgctgttctcwctcctatgatgtagactcccaggcgtagctatctgctatttatctgtaatatatcattattgatagcctggggtaggttaataattggcattaggtagggaaaccttcagcaccgattcgagctctgtggatttcacgtatccaacgcattaattttcagcttcaaaggcgagaagtgtgacaggatgatctaatttagtgcaggactggaagctgttaggaacttcatttataccccggcctattccatctatcagagc

SEQ ID NO: 44410 - DNA, 600 bp, Chicken  19866894283184_2
ctgtttggcaagcaagatgaaacgttgcacaacagcatttctccttcaaatgcttcactttaagtcattagcccgcttactctaaggctggaaaagcaaatgccaggctggttctgccaagcccttacacaggcagatgcaaggcgatcactgcagagtttgcaactgatcactctgtcagacaccacaccttctgctggcacaggacccacgcgagctccccaggctgctccatgcagacaagggcagagctggtactrcatgatgctaacagctgtcaagtggttaatgctgttctcwctcctatgatgtagactcccaggcgtagctatctgctatttatctgtaatatatcattattgatagcctggggtaggttaataattggcattaggtagggaaaccttcagcaccgattcgagctctgtggatttcacgtatccaacgcattaattttcagcttcaaaggcgagaagtgtgacaggatgatctaatttagtgcaggactggaagctgttaggaacttcatttataccccggcctattccatctatcagagcaccctaacactccccccggcactctctttagcacgtagac

SEQ ID NO: 44411 - DNA, 599 bp, Chicken  19866894283198_1
  misc_feature (1)..(138): n is any nucleotide
nnnnnnnnnnnnnnnnnnnnnnnnnnnnnnnnnnnnnnnnnnnnnnnnnnnnnnnnnnnnnnnnnnnnnnnnnnnnnnnnnnnnnnnnnnnnnnnnnnnnnnnnnnnnnnnnnnnnnnnnnnnnnnnnnnnnnnnnnnaacactttccacaaataaaaaagtcaaagtctcaaaatgaagatatgagagatgaggagcaacagtagtattagctcaagtgaattttgaaaagatctgttatcaaactgttgaagaaaactgacattttgcctctaactaggactaaaatcttcatatgaygaagagttcatgagtgacaaaccgagttgtgatagtcattccctgtagaaatcttcaaaaggatcaaagacctctttgtctttctcttcatgttcttcagattttttattactgtctttcggggtctgtaaaaaagatcattgtcaacgcaaaataagttgttgagtttcttatttcagttccatactagtgatcaaaacactttcattcttgacagatttctcaagaaacaagacttaaacactcaaacattccaactctaacagaggaagacattcagagagaaagccaagtatgtg

SEQ ID NO: 44412 - DNA, 600 bp, Chicken  19866894283198_2
ttcatgagtgacaaaccgagttgtgatagtcattccctgtagaaatcttcaaaaggatcaaagacctctttgtctttctcttcatgttcttcagattttttattactgtctttcggggtctgtaaaaaagatcattgtcaacgcaaaataagttgttgagtttcttatttcagttccatactagtgatcaaaacactttcattcttgacagatttctcaagaaacaagacttaaacactcaaacattccaactctaacagaggaagacattcagagagaaagccaagtatgtggtagagwactccgaggagggagatgaaggcgagtacgcacttscaattacaaatgcaaaaacaagtacgtaaaaatccataagttttattagctcatgttattcaaaggcattttttcttttgatagactgaacattccactgtgacaaacaggaagctaatgtgtatcactgtcttaatatttcatttctgctttgctatgacaacaacctgggccccatgaagttccccctaatggaacagaagtcatggatgcagtagttattactgagagcaacctattcccagtttcaccatctgcttcctc

SEQ ID NO: 44413 - DNA, 600 bp, Chicken  19866894283198_3
ctgtagaaatcttcaaaaggatcaaagacctctttgtctttctcttcatgttcttcagattttttattactgtctttcggggtctgtaaaaaagatcattgtcaacgcaaaataagttgttgagtttcttatttcagttccatactagtgatcaaaacactttcattcttgacagatttctcaagaaacaagacttaaacactcaaacattccaactctaacagaggaagacattcagagagaaagccaagtatgtggtagagwactccgaggagggagatgaaggcgagtacgcacttscaattacaaatgcaaaaacaagtacgtaaaaatccataagttttattagctcatgttattcaaaggcattttttcttttgatagactgaacattccactgtgacaaacaggaagctaatgtgtatcactgtcttaatatttcatttctgctttgctatgacaacaacctgggccccatgaagttccccctaatggaacagaagtcatggatgcagtagttattactgagagcaacctattcccagtttcaccatctgcttcctcatgtttaatattcatgttagcttacccctcaaaaat

SEQ ID NO: 44414 - DNA, 599 bp, Chicken  19866894283199_1
  misc_feature (1)..(45): n is any nucleotide
nnnnnnnnnnnnnnnnnnnnnnnnnnnnnnnnnnnnnnnnnnnnnattcatactgatttctgcaaatataatttaattcttgaacttttttttttttttttttttaactatgatcttttagagatcataatgattgactggctgtggctgcttgccattacctgcttgggttattatatcacataaatgggattcagcttagaagtgctgattttaggctgatggggatgagttcctgagctttctttcccaggttgttaaatcagaacactctgcacttctctagccttctcaattgcmcagtttctcttttactttgaaaggtaattgctgatggcttgtgaattgctttgattctctaaacataggatgcagaatgttctcctctctgagcagactggattaacttagtatatctaaattccgatgatgtcgtctatctgtatttgacttctgtaattgttcccttattaaagtgagttgtttaaagtatgtagggcaccttaatcatcttataaacactgaacactcaactctttctatactgttttctcatcagatatgcaatactgtctatttcatctttcttttcttgtttg

SEQ ID NO: 44415 - DNA, 600 bp, Chicken  19866894283199_2
aacttttttttttttttttttttaactatgatcttttagagatcataatgattgactggctgtggctgcttgccattacctgcttgggttattatatcacataaatgggattcagcttagaagtgctgattttaggctgatggggatgagttcctgagctttctttcccaggttgttaaatcagaacactctgcacttctctagccttctcaattgcmcagtttctcttttactttgaaaggtaattgctgatggcttgtgaattgctttgattctctaaacataggatgcagaatgttmtcctctctgagcagactggattaacttagtatatctaaattccgatgatgtcgtctatctgtatttgacttctgtaattgttcccttattaaagtgagttgtttaaagtatgtagggcaccttaatcatcttataaacactgaacactcaactctttctatactgttttctcatcagatatgcaatactgtctatttcatctttcttttcttgtttggactgcaatttcctttacatgtttgccatttaaactctattcctcactgttcrctctgtaagcacttcttgttcagtttcttg

SEQ ID NO: 44416 - DNA, 600 bp, Chicken  19866894283199_3
acttttttttttttttttttttaactatgatcttttagagatcataatgattgactggctgtggctgcttgccattacctgcttgggttattatatcacataaatgggattcagcttagaagtgctgattttaggctgatggggatgagttcctgagctttctttcccaggttgttaaatcagaacactctgcacttctctagccttctcaattgcmcagtttctcttttactttgaaaggtaattgctgatggcttgtgaattgctttgattctctaaacataggatgcagaatgttcmcctctctgagcagactggattaacttagtatatctaaattccgatgatgtcgtctatctgtatttgacttctgtaattgttcccttattaaagtgagttgtttaaagtatgtagggcaccttaatcatcttataaacactgaacactcaactctttctatactgttttctcatcagatatgcaatactgtctatttcatctttcttttcttgtttggactgcaatttcctttacatgtttgccatttaaactctattcctcactgttcrctctgtaagcacttcttgttcagtttcttgt

SEQ ID NO: 44417 - DNA, 600 bp, Chicken  19866894283199_4
cttttttttttttttttttttaactatgatcttttagagatcataatgattgactggctgtggctgcttgccattacctgcttgggttattatatcacataaatgggattcagcttagaagtgctgattttaggctgatggggatgagttcctgagctttctttcccaggttgttaaatcagaacactctgcacttctctagccttctcaattgcmcagtttctcttttactttgaaaggtaattgctgatggcttgtgaattgctttgattctctaaacataggatgcagaatgttctmctctctgagcagactggattaacttagtatatctaaattccgatgatgtcgtctatctgtatttgacttctgtaattgttcccttattaaagtgagttgtttaaagtatgtagggcaccttaatcatcttataaacactgaacactcaactctttctatactgttttctcatcagatatgcaatactgtctatttcatctttcttttcttgtttggactgcaatttcctttacatgtttgccatttaaactctattcctcactgttcrctctgtaagcacttcttgttcagtttcttgtt

SEQ ID NO: 44418 - DNA, 600 bp, Chicken  19866894283199_5
gattctctaaacataggatgcagaatgttctcctctctgagcagactggattaacttagtatatctaaattccgatgatgtcgtctatctgtatttgacttctgtaattgttcccttattaaagtgagttgtttaaagtatgtagggcaccttaatcatcttataaacactgaacactcaactctttctatactgttttctcatcagatatgcaatactgtctatttcatctttcttttcttgtttggactgcaatttcctttacatgtttgccatttaaactctattcctcactgttcrctctgtaagcacttcttgttcagtttcttgttattttcaggtcattrgagaactcaaatggtctccttacatgtttttatacctttgtttcttaatataggctgtagtattataccttctgctgctttcttcctgagaggctacattattgagtttcctgatttcctgctaaagcttattttttctttgaaatccaaaattttcttctattctctgccattttgtcatccctttgaactgcagatttagatccgcaaccagctctaattattgagatcagttcaatgagctttgtatttt

SEQ ID NO: 44419 - DNA, 600 bp, Chicken  19866894283199_6
ggattaacttagtatatctaaattccgatgatgtcgtctatctgtatttgacttctgtaattgttcccttattaaagtgagttgtttaaagtatgtagggcaccttaatcatcttataaacactgaacactcaactctttctatactgttttctcatcagatatgcaatactgtctatttcatctttcttttcttgtttggactgcaatttcctttacatgtttgccatttaaactctattcctcactgttcrctctgtaagcacttcttgttcagtttcttgttattttcaggtcattrgagaactcaaatggtctccttacatgtttttatacctttgtttcttaatataggctgtagtattataccttctgctgctttcttcctgagaggctacattattgagtttcctgatttcctgctaaagcttattttttctttgaaatccaaaattttcttctattctctgccattttgtcatccctttgaactgcagatttagatccgcaaccagctctaattattgagatcagttcaatgagctttgtattttaacagctaatagtgggaacctatagaccagactgaatttttttgcat

SEQ ID NO: 44420 - DNA, 600 bp, Chicken  19866894283207_1
acaacatataaaaatcaccatgctttggtcaggacagccaagcttgtaacttgacattctccagttgaagagcaagaccacaaggatttgtttccatcaatgttattatcctcaatttatccttttaaatagccataattggaaagtacactagcaagtaatatgaggattgagagaatatattgaataaacacagtggtctaaccagatgtggagacccctcacaaatcactccaataatacacacacacaggattaccactcagttggcagaacaacgttctctagacaaatccaccyccagaaaaacacaaaacaaagcaaaaaaacyccaccacatgttaaaaacaaatttagggtttcaaagcagcaacgtttggtggtgttcagtcagtttaaccacccacagggacaaggcagcaatatcaggtgatggcaccaatgccatcagcaaacatgcagtagtgagaagctgtttgtgccaagttaccgatcccccygttaccactggaggctccactccataaccaccagttctacttcaaattaattacaaaacccactcgtactgtcggtattctgctcagtgccacagcccca

SEQ ID NO: 44421 - DNA, 600 bp, Chicken  19866894283207_2
ggacagccaagcttgtaacttgacattctccagttgaagagcaagaccacaaggatttgtttccatcaatgttattatcctcaatttatccttttaaatagccataattggaaagtacactagcaagtaatatgaggattgagagaatatattgaataaacacagtggtctaaccagatgtggagacccctcacaaatcactccaataatacacacacacaggattaccactcagttggcagaacaacgttctctagacaaatccaccyccagaaaaacacaaaacaaagcaaaaaaacyccaccacatgttaaaaacaaatttagggtttcaaagcagcaacgtttggtggtgttcagtcagtttaaccacccacagggacaaggcagcaatatcaggtgatggcaccaatgccatcagcaaacatgcagtagtgagaagctgtttgtgccaagttaccgatcccccygttaccactggaggctccactccataaccaccagttctacttcaaattaattacaaaacccactcgtactgtcggtattctgctcagtgccacagccccagctgcagagcaatcacagtttacactgacaa

SEQ ID NO: 44422 - DNA, 600 bp, Chicken  19866894283207_3
ctaaccagatgtggagacccctcacaaatcactccaataatacacacacacaggattaccactcagttggcagaacaacgttctctagacaaatccaccyccagaaaaacacaaaacaaagcaaaaaaacyccaccacatgttaaaaacaaatttagggtttcaaagcagcaacgtttggtggtgttcagtcagtttaaccacccacagggacaaggcagcaatatcaggtgatggcaccaatgccatcagcaaacatgcagtagtgagaagctgtttgtgccaagttaccgatcccccygttaccactggaggctccactccataaccaccagttctacttcaaattaattacaaaacccactcgtactgtcggtattctgctcagtgccacagccccagctgcagagcaatcacagtttacactgacaaataaaaaccacgctgttcgcctgcattgcccagaggtatgcaggggaaaaaaaaaatgaatgaaagtattaacaaattaaccaatttttttcctttaattgaatcattaatcaccttcagcttctgttctggctgaacagatgcgaccattcgtcactgagaacacaac

SEQ ID NO: 44423 - DNA, 600 bp, Chicken  19866894283207_4
tacaacttcaaaaaggaactttcctggactctcttcattgcaggggtgctcaattactctgttgccaggcagaaagatagcaccctaaggaagaaaacaacatcacatatagggtcagaactgctgccttgcttgtgatagacaaatgctccttttcattgggactgagggggacatgcacgtgctgctgctcctgggcagctactttccaaaagactgaggggagattaagccagcaatcacagatcaccttcattaactaaagcattcaataatggctttaggttttttcccatctcyttggtttttgacactatgaagatttttgtactaattacgctcgtgctgcagggcatattctgatatctagcatccgttgccatgaccttccccaagagcagaagtatttacaatttctgtaatgagaagattaaattaaaagagaaaagagtactcttctcaccaaagagcacaccctacaacctcatgacaccttttactgagagcaggggaaactgaggctgtgttggcagcagccactcacagctcactccatgtacaggtgtgttctaacagcagtaggcacccaggcccagcagc

SEQ ID NO: 44424 - DNA, 600 bp, Chicken  19866894283207_5
cccaagagcagaagtatttacaatttctgtaatgagaagattaaattaaaagagaaaagagtactcttctcaccaaagagcacaccctacaacctcatgacaccttttactgagagcaggggaaactgaggctgtgttggcagcagccactcacagctcactccatgtacaggtgtgttctaacagcagtaggcacccaggcccagcagctcatctcagagacatcttccctcaattcctgcacccagcattcactctagagcaactttcagcagctcgtgtccatgaatacagaaaacrcactttggataattacacaccatgttattcaattaaacaaaaacatgagattaacacctagccagcagcactgtaaacacaaatcaatttatgagacagtaaatgaaaattgcacttaacttggctgcacactcattagcagcacacatgctgtggcctcattacaatgggatgtgatggtttcccgttctttgatgcaaaatcctttcaatatttacttcacagcaagttgtcacaataacagatttttgagaacacaagaagaaaacagtcataacgtttataatgtcatctcctcca

SEQ ID NO: 44425 - DNA, 599 bp, Chicken  19866894283211_1
  misc_feature (1)..(75): n is any nucleotide
nnnnnnnnnnnnnnnnnnnnnnnnnnnnnnnnnnnnnnnnnnnnnnnnnnnnnnnnnnnnnnnnnnnnnnnnnnntgtgcttgactgatctggtggacttctatgatggagtgatggctttggtggacaggggaagcgtgatggatgtcacctacctgaacttctgcaaggcctttgacatggtccctcactacatctaaattcgggaggtgtggatttgaaggatggactgttcagtggattaggaattggctggctggatgcagccaaagggttatgatcaatgggtctgtgtcaggstggaggcyggtcacaagcrgtgtcccacaagtgtcagtcttcagaacagtgctcttcaacgtcttcatcaatgacatagaagatggcattgagtgcaccctcagcaagtttgcagatgacaccaagcygagcagtgcagttgatacattggaaggaagggaagccatccagaggracctgggcaggctggcgaagtcagcccatgaaaacctaatgaggttcaataaggccaagtgcagggtgctgcacatgggtcggggcaatcccagatatttatacaaactgggggaagatctcct

SEQ ID NO: 44426 - DNA, 599 bp, Chicken  19866894283211_2
  misc_feature (1)..(67): n is any nucleotide
nnnnnnnnnnnnnnnnnnnnnnnnnnnnnnnnnnnnnnnnnnnnnnnnnnnnnnnnnnnnnnnnnnntgtgcttgactgatctggtggacttctatgatggagtgatggctttggtggacaggggaagcgtgatggatgtcacctacctgaacttctgcaaggcctttgacatggtccctcactacatctaaattcgggaggtgtggatttgaaggatggactgttcagtggattaggaattggctggctggatgcagccaaagggttatgatcaatgggtctgtgtcaggstggaggcyggtcacaagcrgtgtcccacaagtgtcagtcttcagaacagtgctcttcaacgtcttcatcaatgacatagaagatggcattgagtgcaccctcagcaagtttgcagatgacaccaagcygagcagtgcagttgatacattggaaggaagggaagccatccagaggracctgggcaggctggcgaagtcagcccatgaaaacctaatgaggttcaataaggccaagtgcagggtgctgcacatgggtcggggcaatcccagatatttatacaaactgggggaagatctccttgagagca

SEQ ID NO: 44427 - DNA, 599 bp, Chicken  19866894283211_3
  misc_feature (1)..(56): n is any nucleotide
nnnnnnnnnnnnnnnnnnnnnnnnnnnnnnnnnnnnnnnnnnnnnnnnnnnnnnnntgtgcttgactgatctggtggacttctatgatggagtgatggctttggtggacaggggaagcgtgatggatgtcacctacctgaacttctgcaaggcctttgacatggtccctcactacatctaaattcgggaggtgtggatttgaaggatggactgttcagtggattaggaattggctggctggatgcagccaaagggttatgatcaatgggtctgtgtcaggstggaggcyggtcacaagcrgtgtcccacaagtgtcagtcttcagaacagtgctcttcaacgtcttcatcaatgacatagaagatggcattgagtgcaccctcagcaagtttgcagatgacaccaagcygagcagtgcagttgatacattggaaggaagggaagccatccagaggracctgggcaggctggcgaagtcagcccatgaaaacctaatgaggttcaataaggccaagtgcagggtgctgcacatgggtcggggcaatcccagatatttatacaaactgggggaagatctccttgagagcagccctgcggag

SEQ ID NO: 44428 - DNA, 600 bp, Chicken  19866894283211_4
aggggaagcgtgatggatgtcacctacctgaacttctgcaaggcctttgacatggtccctcactacatctaaattcgggaggtgtggatttgaaggatggactgttcagtggattaggaattggctggctggatgcagccaaagggttatgatcaatgggtctgtgtcaggstggaggcyggtcacaagcrgtgtcccacaagtgtcagtcttcagaacagtgctcttcaacgtcttcatcaatgacatagaagatggcattgagtgcaccctcagcaagtttgcagatgacaccaagcygagcagtgcagttgatacattggaaggaagggaagccatccagaggracctgggcaggctggcgaagtcagcccatgaaaacctaatgaggttcaataaggccaagtgcagggtgctgcacatgggtcggggcaatcccagatatttatacaaactgggggaagatctccttgagagcagccctgcggagaaggacttggggtcctggtggacaagaagctggacttgagccagcagtgtgcgcttgcagcccagaaggccaactgtattctgggctgcattaaaaatggggtggccagc

SEQ ID NO: 44429 - DNA, 600 bp, Chicken  19866894283211_5
tgacatggtccctcactacatctaaattcgggaggtgtggatttgaaggatggactgttcagtggattaggaattggctggctggatgcagccaaagggttatgatcaatgggtctgtgtcaggstggaggcyggtcacaagcrgtgtcccacaagtgtcagtcttcagaacagtgctcttcaacgtcttcatcaatgacatagaagatggcattgagtgcaccctcagcaagtttgcagatgacaccaagcygagcagtgcagttgatacattggaaggaagggaagccatccagaggracctgggcaggctggcgaagtcagcccatgaaaacctaatgaggttcaataaggccaagtgcagggtgctgcacatgggtcggggcaatcccagatatttatacaaactgggggaagatctccttgagagcagccctgcggagaaggacttggggtcctggtggacaagaagctggacttgagccagcagtgtgcgcttgcagcccagaaggccaactgtattctgggctgcattaaaaatggggtggccagcagggagagggaagtgattgtgcccctctactcaacttgtgaggcccc

SEQ ID NO: 44430 - DNA, 599 bp, Chicken  19866894283216_1
  misc_feature (1)..(87): n is any nucleotide
nnnnnnnnnnnnnnnnnnnnnnnnnnnnnnnnnnnnnnnnnnnnnnnnnnnnnnnnnnnnnnnnnnnnnnnnnnnnnnnnnnnnnnncgtgcgcagggctccggtggcagtagagccgggtggcactgctgcccacagcctgccactggccagcaagggactcggcactggcactgagccggagctgattcatatcctggacgtgctggcatttggatggtgtccacccagagggtgcgacaacgaaggatcagatctgacctgctggccccgggccggcttgtttgtgtgtgaggcgcrcagtgaccgaggcacggccggcatcgccgagggaagaacagcatccatgcaaaccccaagcctgggttcccaaacctgggtccgtcccagggacgcaatgcgtggcagggctgtggtgggcagggaacacagggctgggtgcagagcagctcgtgcagcaggatcccaggacccaaggtacccgcagtgctgcgctgctggggggggctgagccccgcagatggtggccacagggctgggagataggagcacaggcatgagcggcaccgcttgctcccgtcttgcacagccagcacctg

SEQ ID NO: 44431 - DNA, 600 bp, Chicken  19866894283230_1
gtttttcagttcaccatagcatttcaaaacaccttttctgtttaacaaacatatctgtttctcttatggtgtgctgtaatatctttaattgcaatgccattaatttgtagaagtcatattgtccatctgggattctccaactgtggaagaatatttgcaaaattggagaacagtattaacacctttcagaatgtaaaatatgggtttagtcttcaattaaagcaccgccaaacatttctttctttctgtcacaggtctttttaaggtataaagtagaatttctgctgtgagaaaaaataraactagaaaataaggacaaagtccattaaagtaagtaaaacagactggggtcagggtgcggagaatggtggtgtaaacsaaacctgtagagaatgaaagcagtttctaacagtatatcatcaccatgacagttgcctgttgatgttggttcagttgcttacacttgacaccattttggtgaaataatatagtattccttcccaccattagcacttcaagcaatcacctgaaaagggccaaattgtcaagtaatggtgcagggcagttagtcattccagaacaaactaaggcaggtttaaa

SEQ ID NO: 44432 - DNA, 600 bp, Chicken  19866894283230_2
tatctttaattgcaatgccattaatttgtagaagtcatattgtccatctgggattctccaactgtggaagaatatttgcaaaattggagaacagtattaacacctttcagaatgtaaaatatgggtttagtcttcaattaaagcaccgccaaacatttctttctttctgtcacaggtctttttaaggtataaagtagaatttctgctgtgagaaaaaataraactagaaaataaggacaaagtccattaaagtaagtaaaacagactggggtcagggtgcggagaatggtggtgtaaacsaaacctgtagagaatgaaagcagtttctaacagtatatcatcaccatgacagttgcctgttgatgttggttcagttgcttacacttgacaccattttggtgaaataatatagtattccttcccaccattagcacttcaagcaatcacctgaaaagggccaaattgtcaagtaatggtgcagggcagttagtcattccagaacaaactaaggcaggtttaaatcctgctgatgtcatccttgattaatcaccaaactcaactgcaactattagaagggtatattacacagtctggatgatg

SEQ ID NO: 44433 - DNA, 600 bp, Chicken  19866894283231_1
ttcctttctgttaatggctgatagagcatacactgctaggaagctaactttgtacttatttaatgctcttactttgtggtcattaaaaatgacatgttatatgtggcactttattgcaggaagaagcaaatgcagagtggttgtataacctttgttaatctcaaaatgacaacagtgatgtgaaagaagagaaactgtctgttaattgatttgttccttagacaacttatctaaagatcaggatgaaaaatcctctgcattaaaattggaaatataaaatatgaaacatttcaaaattaycacaggacttacaggaatactttcttactggattgctgttctccatggtgtctcttggaattagatcttgctgtctttcaccagcaggtattggagatgtctgacctcctcacttttttcagtccttctcttyctcttggccaagccattgtaagcgatgcgctggatcacatctgatgtgctacttacttacccactctcatgctgttccaaagcaactacttctgcagggtgctgtggaaaggagggagctcagcaggccagttggagccagccccttgtttggacagcagtaacgca

SEQ ID NO: 44434 - DNA, 598 bp, Chicken  19866894283231_2
agagtggttgtataacctttgttaatctcaaaatgacaacagtgatgtgaaagaagagaaactgtctgttaattgatttgttccttagacaacttatctaaagatcaggatgaaaaatcctctgcattaaaattggaaatataaaatatgaaacatttcaaaattaycacaggacttacaggaatactttcttactggattgctgttctccatggtgtctcttggaattagatcttgctgtctttcaccagcaggtattggagatgtctgacctcctcacttttttcagtccttctcttyctcttggccaagccattgtaagcgatgcgctggatcacatctgatgtgctacttacttacccactctcatgctgttccaaagcaactacttctgcagggtgctgtggaaaggagggagctcagcaggccagttggagccagccccttgtttggacagcagtaacgcaatatcctggttcaggaaggcatttctggtccacaaaggctctgagccacacacacacacacacacacacacacacacacacacgtagaaacaatctcaatcttcttcattttttaaatgaagcttatgtag

SEQ ID NO: 44435 - DNA, 600 bp, Chicken  19866894283233_1
gtgcttttaagagttgtaggatctttgtcacatttgagagacactaatgatccttaaagaaaaaaagagctctgttcaaagtaactttgtgcaagcttttttgtaaatttgtggttttgttatgtcacatataccagagtaatactacttttatgcttcttagttttgaaattattatggtaatagcaaaaattattagactgtaatttctgggaactccacgcatatacactcacagtgattgcaactacaatagttaacaaccatacaataatactcatatcagctgcgttgagggtyccttccaactcaaatgattctatgattctataagctatgcatccatacagcccgtagagaggaagaatgcaaatgaaatacgtcatgcacatacaaaacaggcaagtaagtttcattgctctattttcaggtacttattctgatttggacaatgaactgttcttcccatttaaaactaacgaaagtatatcctactatagaaagcttgatatataacaaaatgactgttccctcagcttttaagagtctgattttgccatgcttattggaggagacttttgaaatctgggtgactcttct

SEQ ID NO: 44436 - DNA, 600 bp, Chicken  19866894283235_1
atttattgaaagaaagttacagcaagcatatcatgcaacccccctcatccacgtcctctgcctgtgaaagggccgatctccctggtagtgagcaaaaaaactatctaaaataggcttatttttcaaagatattacctgtaggctttagacttgggctacaaatccatggaagatcaagatctcaggctgaaacccactgcatcccagcattacccccctcatccttacagcctgcccgctgaaggcttaccgcctcatagtccacgcttctgatcagctgcagctcgtacccctggatgrtaaaataatcaccatctggtgagctagaatcgatagctacagtgaaatttgcttccacagagatagtggtcacaacatatccaggagggttattttcaggaacactcggattgctactgggaacagaacatcctggggggggaaaaaagcacacaaatgaattacaaaattgcccagaattcacgctgtattagagctagataagaactgagatccttctggttacctttggagagaaaatccttgaacaagactctaaaacacatttgttggctgcaatggagctgcctggtgccatgg

SEQ ID NO: 44437 - DNA, 600 bp, Chicken  19866894283239_1
agggacagtgattccaccagctccatgggcagcctgtgccaaggcctcaccactcattctaagaaatttttcctaaatttgtcccatctttaccctttagctgttgacaatgaatactttaggcaggtagaatccttagaggcaatgataacaggaaagtggttgtatgggaaccattaggtctcagcctgaaccagtgactgagcactaggtgaagtggcatagccatatccttgggagcacatatgcaagcaattcacctgtctgactagaaggagtagaccctgcatccactcctcygtaacctcatttgagggctagcacccacaagggaatcatctctaattggagattgcctcgtttcgagtgtttggtcagccctgatccttggaaataggtaagcaactccttctttattgctggattgtaacctctacgtttcttaggtaatccaaaactggttaagcagctatatctgctactgcttatccttacagtggttaaagccagatattgtcctattatcaaactgtgttcttatttaaaaggccaaaatccagaattaatctgaattttgatgcggcccactgtcttctgatt

SEQ ID NO: 44438 - DNA, 600 bp, Chicken  19866894283242_1
tcttggctcggctcatgcccagaaatgttcctgttggcacgagggcaggcgagcacaaggggggacacggcatctccctgacctcactgtgggcttcagtagatgctacctgggccctttcagctcctgtgtccccctgccagactgctattactcccacctgtatcaggcaagaagaaccccgttgccaaggaaatattacgcaattgtgaatgaggtataaagcacctagttttagagatctggatcacacaaaaaaaaaatgagaagaatttggaggagtgtcatggccgtagatasggatgttttgtgcaacacacctggcaccatttgcatgaggttttgtgctaacctctttgtcagccttggttactttgcaaaaggaaaggagaactggaggaatgaagggctgctgtttttgtggtgagagcctcgtgcagagggcagggcttgtgacaaacccgcagagctcctgtatgtttgagcagtttttggtgtctgattgctgtggttttagaaaccacattccttgctggatgaggayttgtgtgctttgtaggccagccgcaaccgcccccgctgttccgccctgttcagctc

SEQ ID NO: 44439 - DNA, 600 bp, Chicken  19866894283242_2
ggatcacacaaaaaaaaaatgagaagaatttggaggagtgtcatggccgtagatasggatgttttgtgcaacacacctggcaccatttgcatgaggttttgtgctaacctctttgtcagccttggttactttgcaaaaggaaaggagaactggaggaatgaagggctgctgtttttgtggtgagagcctcgtgcagagggcagggcttgtgacaaacccgcagagctcctgtatgtttgagcagtttttggtgtctgattgctgtggttttagaaaccacattccttgctggatgaggayttgtgtgctttgtaggccagccgcaaccgcccccgctgttccgccctgttcagctcgaggtaattcgccgggtgccgtaaggtcgtggcgttacctcctgcttgctgtgcttcaagtctcgcacggcgatggctgctgcagcgttgctgctgggtggtaacctgctgcaacctgacctctgcagctgtgcccgcagccctaggagagggaaacaaagtggaggctgacttcccacttyagttttgcagctagcagatgtccttaaaatatatatataaaaatatataagtgctgtcttcg

SEQ ID NO: 44440 - DNA, 600 bp, Chicken  19866894283242_3
gagcagtttttggtgtctgattgctgtggttttagaaaccacattccttgctggatgaggayttgtgtgctttgtaggccagccgcaaccgcccccgctgttccgccctgttcagctcgaggtaattcgccgggtgccgtaaggtcgtggcgttacctcctgcttgctgtgcttcaagtctcgcacggcgatggctgctgcagcgttgctgctgggtggtaacctgctgcaacctgacctctgcagctgtgcccgcagccctaggagagggaaacaaagtggaggctgacttcccacttyagttttgcagctagcagatgtccttaaaatatatatataaaaatatataagtgctgtcttcggtccttcttttcctgtgccccagcaagatgggtaatggttaattaattgagtactcctgcagccgttctccagactcaaattttgttgttgttaagggcgataatgcccccaggcctgcatggtttggttgataaggccaccttttctctacttggcatatttaaagcattggtttcccatgagcctgctgctgttgtgcatttgcacagcggcagatactgattttggtggctgtat

SEQ ID NO: 44441 - DNA, 600 bp, Chicken  19866894283249_1
ctgactgctttgagtcaatttgctttgagatttctgtcgttggcatgagaagctgtgttcactcattgtgccaaacgtgagggagacctggcagaaagtgggtatcacctgcactgggtgtgagttcacctcctgcgcagtgcttcagctccgcttttcagttgctttgcagtgtaggcttaatttctgatcttcctgcatgtgtgggccatgtgttgtctgtttctcaggctgcggccatgatttttccctacatttgcttgtattttctttttttgacttcccctccctccccccatktaaaaaaarcccaacaactgtttttaaggagcagttccccccctcacagctcacacctggaagtgctgaggtgaacgaagtctcctcattccaattacacagattgcacacagtgctcacctggacttcagttctctttttcctccatttycacctgagctgctccttcaggaggaacaccaatatgttggctttggggaagggatggaggtgatccgactttcttcttgggcagatgattggactgtggtacactgagccaaacaaagaggtcattgggcatttatagtggcacgtgtg

SEQ ID NO: 44442 - DNA, 600 bp, Chicken  19866894283249_2
ttgagtcaatttgctttgagatttctgtcgttggcatgagaagctgtgttcactcattgtgccaaacgtgagggagacctggcagaaagtgggtatcacctgcactgggtgtgagttcacctcctgcgcagtgcttcagctccgcttttcagttgctttgcagtgtaggcttaatttctgatcttcctgcatgtgtgggccatgtgttgtctgtttctcaggctgcggccatgatttttccctacatttgcttgtattttctttttttgacttcccctccctccccccatktaaaaaaarcccaacaactgtttttaaggagcagttccccccctcacagctcacacctggaagtgctgaggtgaacgaagtctcctcattccaattacacagattgcacacagtgctcacctggacttcagttctctttttcctccatttycacctgagctgctccttcaggaggaacaccaatatgttggctttggggaagggatggaggtgatccgactttcttcttgggcagatgattggactgtggtacactgagccaaacaaagaggtcattgggcatttatagtggcacgtgtgtgtcttatg

SEQ ID NO: 44443 - DNA, 574 bp, Chicken  19866894283249_3
gtcgttggcatgagaagctgtgttcactcattgtgccaaacgtgagggagacctggcagaaagtgggtatcacctgcactgggtgtgagttcacctcctgcgcagtgcttcagctccgcttttcagttgctttgcagtgtaggcttaatttctgatcttcctgcatgtgtgggccatgtgttgtctgtttctcaggctgcggccatgatttttccctacatttgcttgtattttctttttttgacttcccctccctccccccatktaaaaaaarcccaacaactgtttttaaggagcagrtccccccctcacagctcacacctggaagtgctgaggtgaacgaagtctcctcattccaattacacagattgcacacagtgctcacctggacttcagttctctttttcctccatttycacctgagctgctccttcaggaggaacaccaatatgttggctttggggaagggatggaggtgatccgactttcttcttgggcagatgattggactgtggtacactgagccaaacaaagaggtcattgggcatttatagtggcacgtgtgtgtcttatg

SEQ ID NO: 44444 - DNA, 458 bp, Chicken  19866894283249_4
cgcttttcagttgctttgcagtgtaggcttaatttctgatcttcctgcatgtgtgggccatgtgttgtctgtttctcaggctgcggccatgatttttccctacatttgcttgtattttctttttttgacttcccctccctccccccatktaaaaaaarcccaacaactgtttttaaggagcagttccccccctcacagctcacacctggaagtgctgaggtgaacgaagtctcctcattccaattacacagattgcacacagtgctcacctggacttcagttctctttttcctccatttycacctgagctgctccttcaggaggaacaccaatatgttggctttggggaagggatggaggtgatccgactttcttcttgggcagatgattggactgtggtacactgagccaaacaaagaggtcattgggcatttatagtggcacgtgtgtgtcttatg

SEQ ID NO: 44445 - DNA, 600 bp, Chicken  19866894283252_1
atttcagaaacacactggtcattaagatttttttgttttgtggggtttttgttttgttttttgtattatatgtccataattttttttttttttgagttacagtaacatatagcagccctgagcaagatccatgattagcatttataataaaaattgattatgagttataataatagagagaagatgagtgaaatagtaattcgtacttagccatggactggcttgactttgttttgattccatagttggaatttataaagtgaatgggtattattctgtgaactctgttaaaaaaaaaamaaaaacagttaatctttatttcactttaaaggtgcattgcaagagaaaatggaatgttctcacttgaaagaaattcccttgcacttgagattcaggggagacaagatgttattcaccaagaatgtatggatttaaagaatccacttacatacgctttatcctcaagaacttcatcagtgatttcataaggaaccagacaattaagggcattcaacaaaaactcaacaggagctctttgtagaggcaaaagttggatttctagaaatgaatgagccaaagcctctccagctggcctcttaa

SEQ ID NO: 44446 - DNA, 600 bp, Chicken  19866894283254_1
gacttcctactgtgggacagatacatgacaaaaaatgtttcatacatggttaattttcaacttttaaaaatattaaaaagaaaccaagcaaacaaaaaaataaacagaacaccctctttattagaagagatgataacattttgaactttctgtgaaggcacctggcttcccgtcttcttttctggtatgattaaaataacccccttcaaaatgaccaaagcaaagacttcttattcttcagctacatattgacctattttgaactcaagtgagaagcattcaaagaatggctttcttgcraaatgacatacttatttgacactgttttagttaaagaaacaaattctttgggtattttttgtattccctgaaaaggggatattttgctcttatagtttcatcttttcctgagcttcagactacaaatcagtgtttattacaaaaatttgaaaatgagataggataataaatatttcctaacttccacagtcactaataaaattgatgttaacaaaatgaatgctataaatgtttattttccatttccttacttgaataacatcatcagcttgttaaacatcttgctcatgtcccagtgat

SEQ ID NO: 44447 - DNA, 600 bp, Chicken  19866894283261_1
ttcatatagaataactagtttcagtagtaaccattgaagaattaaaaaaaaagaaaaaaagaaaaaaaaaaagttgtggttcaaggcagatatttttatgaaaagttttctctattgtaaaatttgttgtatatggctatgctactatcatggaataagaaaagaacaagcatacctcaaataaaaaaaattctgagttaaaacatgactgctgcctttttttgttttttaaagcatgtaactgcattgttttaaatgttgcaggtgatagcaaagcctatttcatgctcttttaatgcmtaatarggaatagccggacaccaactatctgccagtttagttcgccttttgtttgacggtaaactgtgagctgtgcagctcggattcctcggcaccatagggtaaatctggcacattctgaggattggctattgattgcaaaaatagaaatatctgttgaagatgcatgtgactgagtgtaagagctcaagaagcctatcgttcttgagcccttgcctcactcaagggtgctattgtcttcactgaataactacagaaaatataaaatagacaatgggataattggggtcacttaaaaaa

SEQ ID NO: 44448 - DNA, 600 bp, Chicken  19866894283261_2
tagaataactagtttcagtagtaaccattgaagaattaaaaaaaaagaaaaaaagaaaaaaaaaaagttgtggttcaaggcagatatttttatgaaaagttttctctattgtaaaatttgttgtatatggctatgctactatcatggaataagaaaagaacaagcatacctcaaataaaaaaaattctgagttaaaacatgactgctgcctttttttgttttttaaagcatgtaactgcattgttttaaatgttgcaggtgatagcaaagcctatttcatgctcttttaatgcmtaatarggaatagccggacaccaactatctgccagtttagttcgccttttgtttgacggtaaactgtgagctgtgcagctcggattcctcggcaccatagggtaaatctggcacattctgaggattggctattgattgcaaaaatagaaatatctgttgaagatgcatgtgactgagtgtaagagctcaagaagcctatcgttcttgagcccttgcctcactcaagggtgctattgtcttcactgaataactacagaaaatataaaatagacaatgggataattggggtcacttaaaaaagggaag

SEQ ID NO: 44449 - DNA, 600 bp, Chicken  19866894283264_1
atgtaaagcacccaattccagacccagctggtttgaaactcaacagactgtgatgcctttgctgcctcaatatgcaacctgagctgactgcaaggggccctgctatgctccagccaggggaaggagaaagctctgctgggagttttcaggaagaactccatgctggaatgaaagtcacactgactcctgtacctttagcttggaagtcactttttatgtggggaattaaaagctgtattcaaatatccagctgtcaaacagcctctctagcgagcagaaatgattcagtttaagtggacyggtttgaatctgtgtaacacaaacctatgagaggggatggtcatattcagaaatcgtttcacctgttgtaacaaatacaagttgaaaagcagaagactcagttctcccttcctatgcaggaacaaaagttttcccacattataagcactgggcaccacacacactgcagcacgtcatctgacaattgctaattaactaaatgcaaatccacttacaactgctcttgtgtactttgcagtaacacagacttacatattgtctaaacataattactattctgatagttatggaattaatcaa

SEQ ID NO: 44450 - DNA, 600 bp, Chicken  19866894283266_1
ctcaacaacgccgtgcaatgggcagtcctgactttggagcatgtggatttctatttcctttgcctgtgacagataaaggatccatccgcagcttgaagacgggtgtgggcgagctgcttggggaaaccaggttctggcatgggaaagactattgcaacttcgtctttaaagactgggttcagcttgacaaaccttttgctggtaagtgccctcgctcactggaagctgtgaaactgctttggtttggcagtcaggaagaagcagcaaatgccctctgaaaggtcttgggccaactctcaygtcatggtccatggacttggactgtgggggcagtcagcctgcattgcccttggggccacgtcacagaaagcttagtgtgaggatggggatgctgcaattttacctgtttgcctccttagtctgaagacatccaaatgtgctttcctgtcccacagacttcattgacagatacaccacccctaggatgccctggcatgacatctcctccgtggtgcatggcaaagcagcgcgcgacgtggcccggcacttcatccagcgctggaacttcaccaaggtgagtaggggrcacagagactggag

SEQ ID NO: 44451 - DNA, 600 bp, Chicken  19866894283266_2
gggccaactctcaygtcatggtccatggacttggactgtgggggcagtcagcctgcattgcccttggggccacgtcacagaaagcttagtgtgaggatggggatgctgcaattttacctgtttgcctccttagtctgaagacatccaaatgtgctttcctgtcccacagacttcattgacagatacaccacccctaggatgccctggcatgacatctcctccgtggtgcatggcaaagcagcgcgcgacgtggcccggcacttcatccagcgctggaacttcaccaaggtgagtaggggrcacagagactggaggtgcacgtgttctttacctgtgtgacctccacagatgtgcttttgtactttactgttttttacrctgctgtgtttcagtctcctcaagggctttttctctctgtttccttggggcagatcatgaagcccaaataccgatccctgtcctacccattcctgttgccaaaatctcagcaaactgctaacgagttaagtatcaggtgcctgatgctgttcatgccacagtccaggtgagtgctggtggtgtcctaattgagttctcctaagagcatttttcatccttctg

SEQ ID NO: 44452 - DNA, 600 bp, Chicken  19866894283266_3
agaaagcttagtgtgaggatggggatgctgcaattttacctgtttgcctccttagtctgaagacatccaaatgtgctttcctgtcccacagacttcattgacagatacaccacccctaggatgccctggcatgacatctcctccgtggtgcatggcaaagcagcgcgcgacgtggcccggcacttcatccagcgctggaacttcaccaaggtgagtaggggrcacagagactggaggtgcacgtgttctttacctgtgtgacctccacagatgtgcttttgtactttactgttttttacrctgctgtgtttcagtctcctcaagggctttttctctctgtttccttggggcagatcatgaagcccaaataccgatccctgtcctacccattcctgttgccaaaatctcagcaaactgctaacgagttaagtatcaggtgcctgatgctgttcatgccacagtccaggtgagtgctggtggtgtcctaattgagttctcctaagagcatttttcatccttctggaaggaagcgtcactaccaaccctctgtaggacttaatttaagtaggagtttttcatgttatgtgtattgtttgtagc

SEQ ID NO: 44453 - DNA, 599 bp, Chicken  19866894283268_1
  misc_feature (1)..(13): n is any nucleotide
nnnnnnnnnnnnnctaagtatataaaaaaaacagtacaaaatcctcctctgctctcatcctccagtcctaaattctttactttctattagtgcttcttagagccagggagaatttctctgaagtagcaggataatagtctctggggcaatatctgtgtagaatgagtacaaatgccaaaatgtttgaattattaattgtttatttacaatcattttctagttgctattgtgacacccttcttatggtcccagtgggcaaacacacttaagacacctaagaagaatgctgtttttgaactygtgtatatattgcaatatttcttaagaaaacatttagtgcaatcagaaagctgataactgaaatttttgtttcgtgcaactaaatggtggttaaactctcacaaaccgtgtgacgttctgtggtgatgattgctgcaaggtgtgcaacagttgggaggtgactgtatttttcggttcaaacaaagtcacacttgacctttgaccccatgtttcactcttggtcccaagtgtgaggtcatctcacggcagcacctgccccatgatgtttcttccccaacatatcaattgctccrgcaaag

SEQ ID NO: 44454 - DNA, 470 bp, Chicken  19866894283268_2
tgaactygtgtatatattgcaatatttcttaagaaaacatttagtgcaatcagaaagctgataactgaaatttttgtttcgtgcaactaaatggtggttaaactctcacaaaccgtgtgacgttctgtggtgatgattgctgcaaggtgtgcaacagttgggaggtgactgtatttttcggttcaaacaaagtcacacttgacctttgaccccatgtttcactcttggtcccaagtgtgaggtcatctcacggcagcacctgccccatgatgtttcttccccaacatatcaattgctccrgcaaagcaattgcatactttttaaagatctgcaggcatattgttcccatatgcgtgttccccctcaatgagatattcagttgtcactgctggggaacaaagtgcccctttaccttcaccccaagccttgaatagtgagaaatttcccctaaaccagcagcaagcactaaa

SEQ ID NO: 44455 - DNA, 600 bp, Chicken  19866894283269_1
gttcttgcctaatcagctataaaggcagcaaatagaaaccctatataagtttgtgaaatctcgtctgccgtagaattgtttaaaggagtattccaatgcgttgacaatttattatttgacaccaattcctcacactttgacaagtacatcccttaaataacacaaaaatacctttttttcctctaacacttgtaataccaatctgcatagtgctgagccactgcagcatctctgatgaaaatctaattaattccatcaggacagaaagacaatattttttgcattataaacaagcatgckaagtttagtatttttattatcaagtctaatgctgggaagaaaatcagccactgtatcagcctttagaaacgctccctgcacctaacatatgactcactcagatgccctatcaaaaaacaaacaaacaaayaaacaaaaacaaacaagcaaaacaaacaaacaaaaaaacaaacaaaaaaacaaacccagaaagttctgttttcaaagggaaaggaaatacttacaatgaagttcactagcaattcctgagggagcaaataattgcttcagactatttcatctttccccagcaaaagtaaa

SEQ ID NO: 44456 - DNA, 600 bp, Chicken  19866894283269_2
cacactttgacaagtacatcccttaaataacacaaaaatacctttttttcctctaacacttgtaataccaatctgcatagtgctgagccactgcagcatctctgatgaaaatctaattaattccatcaggacagaaagacaatattttttgcattataaacaagcatgckaagtttagtatttttattatcaagtctaatgctgggaagaaaatcagccactgtatcagcctttagaaacgctccctgcacctaacatatgactcactcagatgccctatcaaaaaacaaacaaacaaayaaacaaaaacaaacaagcaaaacaaacaaacaaaaaaacaaacaaaaaaacaaacccagaaagttctgttttcaaagggaaaggaaatacttacaatgaagttcactagcaattcctgagggagcaaataattgcttcagactatttcatctttccccagcaaaagtaaattaagaaataagtcaagtacatgagtgatactgagatagtaaggaaaaattcaatttgtacagatgtataaaaaagacataaaataacactttggggaaagaaaagtaaatgcagtgtttgtgaaatatt

SEQ ID NO: 44457 - DNA, 599 bp, Chicken  19866894283271_1
  misc_feature (1)..(187): n is any nucleotide
nnnnnnnnnnnnnnnnnnnnnnnnnnnnnnnnnnnnnnnnnnnnnnnnnnnnnnnnnnnnnnnnnnnnnnnnnnnnnnnnnnnnnnnnnnnnnnnnnnnnnnnnnnnnnnnnnnnnnnnnnnnnnnnnnnnnnnnnnnnnnnnnnnnnnnnnnnnnnnnnnnnnnnnnnnnnnnnnnnnnnnnnnnngaaatcggcataaaagagaagatgcggctgagtaaagacagaacggctacctgagattctattacttgtcgtctttcaagcataatgatgagattatagtaaccctaaactgsctgaaaacagaaatctggctgtctgtcaagttcattgtgttgagttttacaacactccagatctggttcctccgaacctacagtaattataccaagaagacaggctcaaagaaacccttttcaaccttggacctttgtcaggttttggcttatgaccagagtaccattgtttatgtcatgggaaaaaaaaaaagaaagaaaaaagaaaggggggggggagaggaggggaagattaatatttattatgatttttttcatcatgcaattcttaaaaaaaatattgccacaggtctttccac

SEQ ID NO: 44458 - DNA, 600 bp, Chicken  19866894283287_1
atcttgtgctttttattctcagattcttttccaacaatgttgaaactagcatagactgtcactatttgaggaaaactgtgtgtttttcctatttctgcagttctgtggtaatactgtgtttcttgtgttatgatttaggcaccttttttttctggtacaagactgctctcaataaggagtcagctctactcagtggtccttcttgaaattcaaatgttgatgtttcggtattgtatgctgctgatatttgggagtagcaatgatttttcaaattgtttttgagatttttctttctggaartttgttttccctgtcatagaatttaaactgtttcactgtggaaacattgcacagcccttgccaacctgtttgttttcttggtgaggcaaaaattactggcaatctcttttataataacagtgctgccagtcttgcctcactggatcaacctgtaaggtcaccagttgtgcacgtatagcatgcttgtgttctctctttctccattatggtctcaatgctttgtttatgtctaaggtttgagagagatatgataagataatctgcaaaatccaatactacctgagttaatacctttaaggg

SEQ ID NO: 44459 - DNA, 600 bp, Chicken  19866894283287_2
gtgaggcaaaaattactggcaatctcttttataataacagtgctgccagtcttgcctcactggatcaacctgtaaggtcaccagttgtgcacgtatagcatgcttgtgttctctctttctccattatggtctcaatgctttgtttatgtctaaggtttgagagagatatgataagataatctgcaaaatccaatactacctgagttaatacctttaagggtaggcatagtacaatctacttttactttctcataatcattgtgtttccttggtttccttctctgtatatgatgctgaagyagaaagcaacctcctcttatttttgtttgcattgaattttatctactaatgaaaagggtgttgattctgatgaatgaccacagtttctaacaggcattccttacattgcattcctgaatatcatcagaggtgatgatgacttgtgaggctggctggcagagctkatattctgctgcaaaattcacttctaacagtgttgtcaatacctaaacctacgtgctggtaccagggtatgctaaaatgtctacctttgctcatccaggaaggctgaataggcctcattaaaatcttgcttttcct

SEQ ID NO: 44460 - DNA, 600 bp, Chicken  19866894283287_3
gatatgataagataatctgcaaaatccaatactacctgagttaatacctttaagggtaggcatagtacaatctacttttactttctcataatcattgtgtttccttggtttccttctctgtatatgatgctgaagyagaaagcaacctcctcttatttttgtttgcattgaattttatctactaatgaaaagggtgttgattctgatgaatgaccacagtttctaacaggcattccttacattgcattcctgaatatcatcagaggtgatgatgacttgtgaggctggctggcagagctkatattctgctgcaaaattcacttctaacagtgttgtcaatacctaaacctacgtgctggtaccagggtatgctaaaatgtctacctttgctcatccaggaaggctgaataggcctcattaaaatcttgcttttcctatgactaacatgctgcttatgtaatttgtagattatgtaaaattattaatgatgctttatttttctgtctatttcaatgttaaaattattccttattctaatgctagtgactgtgtaaagcagatgctgtactggttgagttaactttcatctgttgtacatat

SEQ ID NO: 44461 - DNA, 600 bp, Chicken  19866894283287_4
aggcctcattaaaatcttgcttttcctatgactaacatgctgcttatgtaatttgtagattatgtaaaattattaatgatgctttatttttctgtctatttcaatgttaaaattattccttattctaatgctagtgactgtgtaaagcagatgctgtactggttgagttaactttcatctgttgtacatatagcatgctgggaggacacctcattttcttcaaacacatacagcagcttggacttgtgcaggagtcaaatgctttgttactgagtaaacagttgactgtttcagtagaargcaatggcttttatgttacgtagtctgaagattcagcctgtatactcaggatagcctttgcatcctgtttactataatcattccacaaagtaattttcatttgactttgcctcaccgaacatttttttccttttcttccaaagtgcaagcctggtacatttattatcattccactatcttgcatttaatttcctctttatttttctacttgtcgtcacttctaatgctaatcagagctttaccaattatttattccagcttgcatttcattaatgctgaatatgtgtaaacccccatcat

SEQ ID NO: 44462 - DNA, 413 bp, Chicken  19866894283287_5
cagcctgtatactcaggatagcctttgcatcctgtttactataatcattccacaaagtaattttcatttgactttgcctcaccgaacatttttttccttttcttccaaagtgcaagcctggtacatttattatcattccactatcttgcatttaatttcctctttatttttctacttgtcgtcacttctaatgctaatcagagctttaccaattatttattccagcttgcatttcattaatgctgaatatgtgtaaacccccatcatctgagtcattctttgctttttcagtgtttttcytcatattgtaagctctrgaataatgctttcttttgctatgattactacatatgatcctctatgcaggatatttttagtgaattttcttgttaagatgtttctttcttcatttt

SEQ ID NO: 44463 - DNA, 396 bp, Chicken  19866894283287_6
atagcctttgcatcctgtttactataatcattccacaaagtaattttcatttgactttgcctcaccgaacatttttttccttttcttccaaagtgcaagcctggtacatttattatcattccactatcttgcatttaatttcctctttatttttctacttgtcgtcacttctaatgctaatcagagctttaccaattatttattccagcttgcatttcattaatgctgaatatgtgtaaacccccatcatctgagtcattctttgctttttcagtgtttttcytcatattgtaagctctrgaataatgctttcttttgctatgattactacatatgatcctctatgcaggatatttttagtgaattttcttgttaagatgtttctttcttcatttt

SEQ ID NO: 44464 - DNA, 600 bp, Chicken  19866894283291_1
cagctgagcacctccttggggcgggcagccccgggcacagcactgggcagcagccttttcgaggtgcctcagagggctcctacgaacccccggacaccaggagctgctgggagcggagctcacccactgcccttctctgtctgcagggcaccacatccctgcctggcgctgtgggtgctgctcatggggacgccagcggtgctgaggaggagggtggctgcctggcctccagcccccccccgtgcctccaggctcatgcagaggagggagtgggggatctggagggaatagaggtgagarygggatgccttgtggctgggtcagccctacacgatgacggctgtrtccctgagtgccaccagccccacagcaagggcacgcacctctgcacagctcccgtccctcatttccctaggatgaactggatttgagctgcaccttcgtcttcaaagcatggcagaaggcaggcgtgaagctgccagcgcctgcaagggataaatcggtcagagctgatkctgcagagcccaacaagaggctgcaggagggggtgagttggatcccactcctccagaggggtgtctccccacatgagaagcgtgc

SEQ ID NO: 44465 - DNA, 600 bp, Chicken  19866894283291_2
agctgagcacctccttggggcgggcagccccgggcacagcactgggcagcagccttttcgaggtgcctcagagggctcctacgaacccccggacaccaggagctgctgggagcggagctcacccactgcccttctctgtctgcagggcaccacatccctgcctggcgctgtgggtgctgctcatggggacgccagcggtgctgaggaggagggtggctgcctggcctccagcccccccccgtgcctccaggctcatgcagaggagggagtgggggatctggagggaatagaggtgagarygggatgccttgtggctgggtcagccctacacgatgacggctgtrtccctgagtgccaccagccccacagcaagggcacgcacctctgcacagctcccgtccctcatttccctaggatgaactggatttgagctgcaccttcgtcttcaaagcatggcagaaggcaggcgtgaagctgccagcgcctgcaagggataaatcggtcagagctgatkctgcagagcccaacaagaggctgcaggagggggtgagttggatcccactcctccagaggggtgtctccccacatgagaagcgtgct

SEQ ID NO: 44466 - DNA, 600 bp, Chicken  19866894283291_3
ggcagcagccttttcgaggtgcctcagagggctcctacgaacccccggacaccaggagctgctgggagcggagctcacccactgcccttctctgtctgcagggcaccacatccctgcctggcgctgtgggtgctgctcatggggacgccagcggtgctgaggaggagggtggctgcctggcctccagcccccccccgtgcctccaggctcatgcagaggagggagtgggggatctggagggaatagaggtgagarygggatgccttgtggctgggtcagccctacacgatgacggctgtrtccctgagtgccaccagccccacagcaagggcacgcacctctgcacagctcccgtccctcatttccctaggatgaactggatttgagctgcaccttcgtcttcaaagcatggcagaaggcaggcgtgaagctgccagcgcctgcaagggataaatcggtcagagctgatkctgcagagcccaacaagaggctgcaggagggggtgagttggatcccactcctccagaggggtgtctccccacatgagaagcgtgctgctyagtgtaggtggtctgcagggcccctgccacaaggagtcct

SEQ ID NO: 44467 - DNA, 600 bp, Chicken  19866894283291_4
ggctgcctggcctccagcccccccccgtgcctccaggctcatgcagaggagggagtgggggatctggagggaatagaggtgagarygggatgccttgtggctgggtcagccctacacgatgacggctgtrtccctgagtgccaccagccccacagcaagggcacgcacctctgcacagctcccgtccctcatttccctaggatgaactggatttgagctgcaccttcgtcttcaaagcatggcagaaggcaggcgtgaagctgccagcgcctgcaagggataaatcggtcagagctgatkctgcagagcccaacaagaggctgcaggagggggtgagttggatcccactcctccagaggggtgtctccccacatgagaagcgtgctgctyagtgtaggtggtctgcagggcccctgccacaaggagtcctggatggggtggggacagagcctggggctgagcagagggatccccaattgcagcttcccctgtggctggcacagtgtggtgatcccagagccaggggagtggtgcccaggtggtgatggggactgctgtgtccatcccatgctgtaggctgggagctgtggcagctcctct

SEQ ID NO: 44468 - DNA, 537 bp, Chicken  19866894283291_5
tgccttgtggctgggtcagccctacacgatgacggctgtrtccctgagtgccaccagccccacagcaagggcacgcacctctgcacagctcccgtccctcatttccctaggatgaactggatttgagctgcaccttcgtcttcaaagcatggcagaaggcaggcgtgaagctgccagcgcctgcaagggataaatcggtcagagctgatkctgcagagcccaacaagaggctgcaggagggggtgagttggatcccactcctccagaggggtgtctccccacatgagaagcgtgctgctyagtgtaggtggtctgcagggcccctgccacaaggagtcctggatggggtggggacagagcctggggctgagcagagggatccccaattgcagcttcccctgtggctggcacagtgtggtgatcccagagccaggggagtggtgcccaggtggtgatggggactgctgtgtccatcccatgctgtaggctgggagctgtggcagctcctctgcagcctctcgtggctttatggagcag

SEQ ID NO: 44469 - DNA, 599 bp, Chicken  19866894283299_1
  misc_feature (1)..(113): n is any nucleotide
nnnnnnnnnnnnnnnnnnnnnnnnnnnnnnnnnnnnnnnnnnnnnnnnnnnnnnnnnnnnnnnnnnnnnnnnnnnnnnnnnnnnnnnnnnnnnnnnnnnnnnnnnnnnnnnnnctctgtcatgtattctaagaattagagaacaagaagttcaatttgagactaaaacacctattcattcatatttatgatatccagtaggtatctaaattttcataatagccaaagacaacacattcattataatacttcatttttcagtctgctatctaccagttgttgacctcttggtgctttcacrattgctttctggagtgcactctgattgtgrtggtttgggctgttaattgcatagatgttacaggctgtgtagacaatgcagaacttccactgacaaacccrtgtgtctctcctctgtccatatagcattcagttaagttctgccaccactatcaatacctctgcactgtttggtttgatatataggtatgaagaagaattgaaaaatgagagtagaagttagaaaagtaggaagtaaattgaagaaaagtaaaaactaggaaggaaatagagaaatggtggtgatgatggttattattc

SEQ ID NO: 44470 - DNA, 599 bp, Chicken  19866894283299_2
  misc_feature (1)..(83): n is any nucleotide
nnnnnnnnnnnnnnnnnnnnnnnnnnnnnnnnnnnnnnnnnnnnnnnnnnnnnnnnnnnnnnnnnnnnnnnnnnnnnnnnnnnctctgtcatgtattctaagaattagagaacaagaagttcaatttgagactaaaacacctattcattcatatttatgatatccagtaggtatctaaattttcataatagccaaagacaacacattcattataatacttcatttttcagtctgctatctaccagttgttgacctcttggtgctttcacrattgctttctggagtgcactctgattgtgrtggtttgggctgttaattgcatagatgttacaggctgtgtagacaatgcagaacttccactgacaaacccrtgtgtctctcctctgtccatatagcattcagttaagttctgccaccactatcaatacctctgcactgtttggtttgatatataggtatgaagaagaattgaaaaatgagagtagaagttagaaaagtaggaagtaaattgaagaaaagtaaaaactaggaaggaaatagagaaatggtggtgatgatggttattattctagatactacaaatgtgaagtaggaatggg

SEQ ID NO: 44471 - DNA, 599 bp, Chicken  19866894283299_3
  misc_feature (1)..(12): n is any nucleotide
nnnnnnnnnnnnctctgtcatgtattctaagaattagagaacaagaagttcaatttgagactaaaacacctattcattcatatttatgatatccagtaggtatctaaattttcataatagccaaagacaacacattcattataatacttcatttttcagtctgctatctaccagttgttgacctcttggtgctttcacrattgctttctggagtgcactctgattgtgrtggtttgggctgttaattgcatagatgttacaggctgtgtagacaatgcagaacttccactgacaaacccrtgtgtctctcctctgtccatatagcattcagttaagttctgccaccactatcaatacctctgcactgtttggtttgatatataggtatgaagaagaattgaaaaatgagagtagaagttagaaaagtaggaagtaaattgaagaaaagtaaaaactaggaaggaaatagagaaatggtggtgatgatggttattattctagatactacaaatgtgaagtaggaatggggacagcacaggcagagtatggtaggaagaggtctgttacataaaaagcaagccatgctgatctaggatgtg

SEQ ID NO: 44472 - DNA, 600 bp, Chicken  19866894283301_1
ttatggaaaaaatgcacctaaattctctttgtttctgtggaaaaggattcagctctatcggtctggtgtgggaaggctccacaagatatcccacagactatgcttctaaaagaatgtatatgcatttaatgctgaagaaccacatgaagagcacttctgtagggtatgctaaaaaggagaagataccatcactttcccagagattttccagctaacttttaaccagatggagagacagaaaagagtaataggaaagtcacaacaggtcacactgctactctaaacagaactcagaccaaytcaaatcaacacttaacacttyattgagaactttcaaagcaaaaacttcacttggctgttctgagcctcagagtcccaactaggtcaaggttggtctccagctatttcagagtgagtttgtaccctcagtcaatcttcagttgtggtgcatggtttctggtaacwctaaacagcactgaggaattaagcaatatgaagatgcctcaaggaatacactgtgagcaaagcatgccccacctatatgctacagttttttttactcaagtctgttctgctgctgcttgactcaagtagccttta

SEQ ID NO: 44473 - DNA, 600 bp, Chicken  19866894283301_2
ttctctttgtttctgtggaaaaggattcagctctatcggtctggtgtgggaaggctccacaagatatcccacagactatgcttctaaaagaatgtatatgcatttaatgctgaagaaccacatgaagagcacttctgtagggtatgctaaaaaggagaagataccatcactttcccagagattttccagctaacttttaaccagatggagagacagaaaagagtaataggaaagtcacaacaggtcacactgctactctaaacagaactcagaccaaytcaaatcaacacttaacacttyattgagaactttcaaagcaaaaacttcacttggctgttctgagcctcagagtcccaactaggtcaaggttggtctccagctatttcagagtgagtttgtaccctcagtcaatcttcagttgtggtgcatggtttctggtaacwctaaacagcactgaggaattaagcaatatgaagatgcctcaaggaatacactgtgagcaaagcatgccccacctatatgctacagttttttttactcaagtctgttctgctgctgcttgactcaagtagcctttaggggctcatcaccaaagctgaa

SEQ ID NO: 44474 - DNA, 600 bp, Chicken  19866894283301_3
atgctaaaaaggagaagataccatcactttcccagagattttccagctaacttttaaccagatggagagacagaaaagagtaataggaaagtcacaacaggtcacactgctactctaaacagaactcagaccaaytcaaatcaacacttaacacttyattgagaactttcaaagcaaaaacttcacttggctgttctgagcctcagagtcccaactaggtcaaggttggtctccagctatttcagagtgagtttgtaccctcagtcaatcttcagttgtggtgcatggtttctggtaacwctaaacagcactgaggaattaagcaatatgaagatgcctcaaggaatacactgtgagcaaagcatgccccacctatatgctacagttttttttactcaagtctgttctgctgctgcttgactcaagtagcctttaggggctcatcaccaaagctgaagaggaacagtaacgttataataatttyaggctgaactgttgcttggccrtttgatgcttcagtcaaagaagcatcaaaactcctcatttcaaaggaaagtattttcattggttacacccatcttagtctgggaaacagctcct

SEQ ID NO: 44475 - DNA, 600 bp, Chicken  19866894283301_4
acttggctgttctgagcctcagagtcccaactaggtcaaggttggtctccagctatttcagagtgagtttgtaccctcagtcaatcttcagttgtggtgcatggtttctggtaacwctaaacagcactgaggaattaagcaatatgaagatgcctcaaggaatacactgtgagcaaagcatgccccacctatatgctacagttttttttactcaagtctgttctgctgctgcttgactcaagtagcctttaggggctcatcaccaaagctgaagaggaacagtaacgttataataatttyaggctgaactgttgcttggccrtttgatgcttcagtcaaagaagcatcaaaactcctcatttcaaaggaaagtattttcattggttacacccatcttagtctgggaaacagctcctttccctccaaaggtatagttaaagctgtatagaaataatacaatgtgaacaaaaattcacctactctcagttcttccactgagagctaaaccttgcatcacctgtagcacttgtatcaaatgctcactaactacaacaaaatgaagtccctgcagtccctttcacttactgtcaagctgttcct

SEQ ID NO: 44476 - DNA, 600 bp, Chicken  19866894283301_5
agtcccaactaggtcaaggttggtctccagctatttcagagtgagtttgtaccctcagtcaatcttcagttgtggtgcatggtttctggtaacwctaaacagcactgaggaattaagcaatatgaagatgcctcaaggaatacactgtgagcaaagcatgccccacctatatgctacagttttttttactcaagtctgttctgctgctgcttgactcaagtagcctttaggggctcatcaccaaagctgaagaggaacagtaacgttataataatttyaggctgaactgttgcttggccrtttgatgcttcagtcaaagaagcatcaaaactcctcatttcaaaggaaagtattttcattggttacacccatcttagtctgggaaacagctcctttccctccaaaggtatagttaaagctgtatagaaataatacaatgtgaacaaaaattcacctactctcagttcttccactgagagctaaaccttgcatcacctgtagcacttgtatcaaatgctcactaactacaacaaaatgaagtccctgcagtccctttcacttactgtcaagctgttcctgggaaataagtgcagcagaatt

SEQ ID NO: 44477 - DNA, 556 bp, Chicken  19866894283308_1
ccaaatctgtcactgttttctaaggcctaggatagcattttttgcactgagagacgtttgtactgtggaattcttaatggcactgcattgaggaccctcatgcagattagaaaggctgcaaggtatcctcacttctacttcaaccactggcctggaactgaaaagaactcatgaggtttttgaagcagaaacagaacaactcagcccaaaacaggaatcaccatatgatgttgctccccaacaccacaaaaccaacagcagcaagtcagctgggcagaagcaaaaaagcctcttacgaargcaaagcatccgaaagcgatgcctttctgccagctctggactcaccgctgcaggggccaaatggaagatacaaacaggggcttgagggtttgggcaggtgatgttggggctcactgtgcagccaccagcatctccccccaggcaggatttggcactgagcggcgcaaggagcagcacagaggagcctatgcagggcgagggagtaacagacatcttcatccacaaaccaccatcatcacaccaaacagcagcgagg

SEQ ID NO: 44478 - DNA, 599 bp, Chicken  19866894283315_1
  misc_feature (1)..(172): n is any nucleotide
nnnnnnnnnnnnnnnnnnnnnnnnnnnnnnnnnnnnnnnnnnnnnnnnnnnnnnnnnnnnnnnnnnnnnnnnnnnnnnnnnnnnnnnnnnnnnnnnnnnnnnnnnnnnnnnnnnnnnnnnnnnnnnnnnnnnnnnnnnnnnnnnnnnnnnnnnnnnnnnnnnnnnnnnnnnncggcgatggggatattaacggcagagggtaattttacagctccaaataaagctggggggaaatgctggtggtattcagagctctgccacgtccacccagcactcccacagccaaaaggatgcaaacarccccattacctctgcacctcccgtccctctcctcgaagccggggctgcagaggcacttcccgacgggcaccaaccactctccctcagcactgcagtgcatccggggggggttatccacatccacccgggcatgctccacacacgtgcccttcacctccaccaacgtggcaaaagccgtctctgccaccgtgtccggaaaatccgccaggttctgcacggtgctgaggcacttcttgtaataaaccctcacagagaccagggccacgcaggcacccacgtcctggaagcccaggtggaag

SEQ ID NO: 44479 - DNA, 600 bp, Chicken  19866894283315_2
caggtggaagcctcgcttgctcagatgcccaatctcccgcagctccgtgttcagcttcatcttcctctcgcccaggtccccctgcgtgaagctctcatcagcagcgatggtgtcaatcttggtgtgcttgctctcacggatgctgtggcccagatcggcgtcggactcagcatagtagaggttgaaggtctccttgcaggtgcctgtcacacccgggatgctgttgcagtccctcagggtgaacttgagctcgatgaagatccgctggccgtcgcgccgggcgatccaacccgtctgcarccagttgttctggttgggctccataacgttgcacacctggtaggtgcggatgggtttgtactcctcgtccacgccgctgatttcctcccactgtggaaagaacacagaggctgagagggttcaggaactgcgggcagctggagccagagcccgagcagaacacagccacygctataaatgcctcccccagctgcctctccacctacagacctgcacagcacgggcactgagcatccctcagccacccaaaccacacgctgtggtcacagggctgtggaaccaccccacaccggagctccc

SEQ ID NO: 44480 - DNA, 543 bp, Chicken  19866894283315_3
catagtagaggttgaaggtctccttgcaggtgcctgtcacacccgggatgctgttgcagtccctcagggtgaacttgagctcgatgaagatccgctggccgtcgcgccgggcgatccaacccgtctgcarccagttgttctggttgggctccataacgttgcacacctggtaggtgcggatgggtttgtactcctcgtccacgccgctgatttcctcccactgtggaaagaacacagaggctgagagggttcaggaactgcgggcagctggagccagagcccgagcagaacacagccacygctataaatgcctcccccagctgcctctccacctacagacctgcacagcacgggcactgagcatccctcagccacccaaaccacacgctgtggtcacagggctgtggaaccaccccacaccggagctcccagagccacccacagaaggcacagatggtttgggacacacggagccatcgtgacaatatctcaaccagcagcagctcctctgctggacaagttggagctgggacaggatgggtc

SEQ ID NO: 44481 - DNA, 600 bp, Chicken  19866894283316_1
aacattgacctaaattgatacaagtacctagcacatgaagaaaaattcttcctcctgaccttttcagtaatattcacaaggtttggagaggaagtctcagcctccattttctcatggtttactgcttctttcttaccaggtaacttcattatattgggtttaggtttttgcaagcgcctcctctctgctggcttttcagttttccttaagatgtaagaagaggtagttcatattattactagagagaaccagacactgatgcatcagtttcacaaagataaggtcaaatatcccagtagytttgtgtttttgttgccctcttttttaaaataaaaaatattcaaaattgaattgttactaatacacattaactatatcatatatttttgaaggctactgcgagagtaacacctcctgytttattgtgttggcccacagtgtcagagacggatgttggtggtatggctgtaggggttgaaccttcccaccaattcccatgccatgttgttgctatgtgacagatggcagcagaggggcaatctgacagaakggtgactgacatggaagtgcagatgaagcaaaggtctggaactgaattct

SEQ ID NO: 44482 - DNA, 600 bp, Chicken  19866894283316_2
ttactgcttctttcttaccaggtaacttcattatattgggtttaggtttttgcaagcgcctcctctctgctggcttttcagttttccttaagatgtaagaagaggtagttcatattattactagagagaaccagacactgatgcatcagtttcacaaagataaggtcaaatatcccagtagytttgtgtttttgttgccctcttttttaaaataaaaaatattcaaaattgaattgttactaatacacattaactatatcatatatttttgaaggctactgcgagagtaacacctcctgytttattgtgttggcccacagtgtcagagacggatgttggtggtatggctgtaggggttgaaccttcccaccaattcccatgccatgttgttgctatgtgacagatggcagcagaggggcaatctgacagaakggtgactgacatggaagtgcagatgaagcaaaggtctggaactgaattcttccatgagaaaaaaatggcagcyactgacattcatcagtgtttgctgaacatttatggagaccacccagtggacatgagcgcagtgtggtggtggatggatggtgcttttcaggagtg

SEQ ID NO: 44483 - DNA, 600 bp, Chicken  19866894283316_3
agacactgatgcatcagtttcacaaagataaggtcaaatatcccagtagytttgtgtttttgttgccctcttttttaaaataaaaaatattcaaaattgaattgttactaatacacattaactatatcatatatttttgaaggctactgcgagagtaacacctcctgytttattgtgttggcccacagtgtcagagacggatgttggtggtatggctgtaggggttgaaccttcccaccaattcccatgccatgttgttgctatgtgacagatggcagcagaggggcaatctgacagaakggtgactgacatggaagtgcagatgaagcaaaggtctggaactgaattcttccatgagaaaaaaatggcagcyactgacattcatcagtgtttgctgaacatttatggagaccacccagtggacatgagcgcagtgtggtggtggatggatggtgcttttcaggagtggtgacagtgacagcaggtcacctctgcaagtgcagatttctacaagcacagcaagcaggctccagctcattgctggtgaaaatgtacagctaacgatggtagctatgttgaaaaataatgctttgtagctga

SEQ ID NO: 44484 - DNA, 600 bp, Chicken  19866894283316_4
tttaaaataaaaaatattcaaaattgaattgttactaatacacattaactatatcatatatttttgaaggctactgcgagagtaacacctcctgytttattgtgttggcccacagtgtcagagacggatgttggtggtatggctgtaggggttgaaccttcccaccaattcccatgccatgttgttgctatgtgacagatggcagcagaggggcaatctgacagaakggtgactgacatggaagtgcagatgaagcaaaggtctggaactgaattcttccatgagaaaaaaatggcagcyactgacattcatcagtgtttgctgaacatttatggagaccacccagtggacatgagcgcagtgtggtggtggatggatggtgcttttcaggagtggtgacagtgacagcaggtcacctctgcaagtgcagatttctacaagcacagcaagcaggctccagctcattgctggtgaaaatgtacagctaacgatggtagctatgttgaaaaataatgctttgtagctgagaatttgctctatcaaatagtattactgtaccctttttatccattgtttccatggaaataaagaggaggtatt

SEQ ID NO: 44485 - DNA, 599 bp, Chicken  19866894283317_1
  misc_feature (1)..(151): n is any nucleotide
nnnnnnnnnnnnnnnnnnnnnnnnnnnnnnnnnnnnnnnnnnnnnnnnnnnnnnnnnnnnnnnnnnnnnnnnnnnnnnnnnnnnnnnnnnnnnnnnnnnnnnnnnnnnnnnnnnnnnnnnnnnnnnnnnnnnnnnnnnnnnnnnnnnnnnnaatgtgcctgtgtcaattgtacgcaagactggccaaacgtgagagggcttctggttgcacttaccaagacagttttactcctgacagagggttcctagatatcactgagccttgcattttgttgtaaaacttcaagatgatatttggargggtgaccgtttttaacgacatttcagactttgccctgaatgcatttatgtttacagcactggaaattttacgtgcatatgaagagcagaatttgcagtcgtcttactaatctctctgctagtttaaataataagtataaatggtggactgtgtagagttggtggcctacagtgaactttgtaatcttattgtctgccttctttttcaaacacgaacaagggctcaagtatactaagctggccttcttttaaagtgtttagtgaaggggtgctctgcaagtggcttgttcccatggtta

SEQ ID NO: 44486 - DNA, 600 bp, Chicken  19866894283317_2
cagaatttgcagtcgtcttactaatctctctgctagtttaaataataagtataaatggtggactgtgtagagttggtggcctacagtgaactttgtaatcttattgtctgccttctttttcaaacacgaacaagggctcaagtatactaagctggccttcttttaaagtgtttagtgaaggggtgctctgcaagtggcttgttcccatggttaactactctttagaattaagaattattttcataaaacaaaagggttttttgtagtgtcttatctgaaaaaaaaaaggggggggggcaragtatgagaaaggcacttggtcagtgcagagggttggactactctcctatctcatctgtggcagggactaatagcagatgctgagagaagggtaggaaaaagggagcttatgtagtgatgagctgtttcccaactatttgtgtctcaaggagttcttgagccagcgggggtarctgtcagcttaacagctcacgatggaattttcttccaaacaactgaacagatttgttcaggctcacatttgsttgattattactagttccartgccatgatgtgttcatctttttatgggtttctat

SEQ ID NO: 44487 - DNA, 429 bp, Chicken  19866894283317_3
agtgaaggggtgctctgcaagtggcttgttcccatggttaactactctttagaattaagaattattttcataaaacaaaagggttttttgtagtgtcttatctgaaaaaaaaaaggggggggggcaragtatgagaaaggcacttggtcagtgcagagggttggactactctcctatctcatctgtggcagggactaatagcagatgctgagagaagggtaggaaaaagggagcttatgtagtgatgagctgtttcccaactatttgtgtctcaaggagttcttgagccagcgggggtarctgtcagcttaacagctcacgatggaattttcttccaaacaactgaacagatttgttcaggctcacatttgsttgattattactagttccartgccatgatgtgttcatctttttatgggtttctataa

SEQ ID NO: 44488 - DNA, 357 bp, Chicken  19866894283317_4
aaacaaaagggttttttgtagtgtcttatctgaaaaaaaaaaggggggggggcaragtatgagaaaggcacttggtcagtgcagagggttggactactctcctatctcatctgtggcagggactaatagcagatgctgagagaagggtaggaaaaagggagcttatgtagtgatgagctgtttcccaactatttgtgtctcaaggagttcttgagccagcgggggtarctgtcagcttaacagctcacgatggaattttcttccaaacaactgaacagatttgttcaggctcacatttgsttgattattactagttccartgccatgatgtgttcatctttttatgggtttctataa

SEQ ID NO: 44489 - DNA, 337 bp, Chicken  19866894283317_5
gtgtcttatctgaaaaaaaaaaggggggggggcaragtatgagaaaggcacttggtcagtgcagagggttggactactctcctatctcatctgtggcagggactaatagcagatgctgagagaagggtaggaaaaagggagcttatgtagtgatgagctgtttcccaactatttgtgtctcaaggagttcttgagccagcgggggtarctgtcagcttaacagctcacgatggaattttcttccaaacaactgaacagatttgttcaggctcacatttgsttgattattactagttccartgccatgatgtgttcatctttttatgggtttctataa

SEQ ID NO: 44490 - DNA, 600 bp, Chicken  19866894283320_1
agacctgcagtatatacaaatttgtagtagacactcactacgtctttagaggatttggtcagcaaacccttcgcacaagcacaccctgtccttttttctgatctttcttaggcacaagttgtccatgcagtgttactgatcattctttctcccgacgttatgtcagcagaatatgattttaatgatttgcttttgtactgaaattgaaaccaagtatgtgctgaatctcttagcacctgctttgttggaagacaagtgtcatggagttcagtgaacagagaaaaataagtgactgagagygtggttctgggagctagagttgataagtaagacagaaagaagctgaaaaagtagaaaatgttctcctctcccctgctttgtttttatcattgtttgtgtaaaggaaaaggtagtgagaggaaaaaagcatgtaaaacccagaaagcacagagaggattggaagaggggacctcaacagaagctggaaatcttgagaggaggtggaatagaaaccagtagactaggggcagaagcttggaaagaagggaagaaaacaagagagcacaagggtatgttttgtgtggtgtgggaacatgagaa

SEQ ID NO: 44491 - DNA, 600 bp, Chicken  19866894283329_1
caggagtgtggggtggcaggaactgtgtgaacttcagcagtactccagtacgaatctcagaaacatgctaccagctaagaggggggaaagacagtaagagctcagagcatgctgctgcaagaagtgccgatgtgacgctaggcagcttcatgccaaccactttccaatgacccagccctactgtcagtatgcaaagccctggtgaaacctcaggtgccttctagaggctgtctcaaggtggagggctgcagagggaggatgctgggacacttagaagaatggagatacggaagggtgttsctgaaagcagctgggctcgggaacagcttttacagtgctagcttattcctcagagctgaagcatcactgcttagtaggattgacaaggtcttcctaccagcaggacacagacaatccctgcatactcgttggtcatcccaggtcctgaggaaggacatctcctgcgctctctctagacagagaaatgcataagagtcccatgaacatctctttctgcactgagcagaaatggtggcctcagagcagaaacttcaaccgagagatataaaagactagcacagggaagatcaacagagcacc

SEQ ID NO: 44492 - DNA, 599 bp, Chicken  19866894283334_1
  misc_feature (1)..(6): n is any nucleotide
nnnnnntcctttaacatagcagtggtcccagtgaaagagttattctttggaatgtcagcctgaactttcaaatttctttgcttctgctggttactggtcttaagttttttgaacagtagtcctctattccctcagagaaaatacatatttagactaatttaaatgcattcaatggcatacttatttttgtgccctgcctttaaggtacatactgttacacataatttcctataatataaattagaattcaatatccattaagttacaccttgagattttaccctggagtatttgttatcraagtatgatccttacctgatttggtacatattttgatacagagaaggcactgcatctccctttcacctcagggatgtaaataaatgttttgtaaacatrcactacttaacttgaacatcacagtagctcctgcaaatccgtattttgcttctagaaaawaatcagtagagtttttctataggraaacttyccaaaaggaaaggaattccaagttccaaatgtcttmgttacatggaatctattttctcaaaacaaccttactggtcatatttaatcacagccccttgcataaagaatga

SEQ ID NO: 44493 - DNA, 600 bp, Chicken  19866894283334_2
ttaagttttttgaacagtagtcctctattccctcagagaaaatacatatttagactaatttaaatgcattcaatggcatacttatttttgtgccctgcctttaaggtacatactgttacacataatttcctataatataaattagaattcaatatccattaagttacaccttgagattttaccctggagtatttgttatcraagtatgatccttacctgatttggtacatattttgatacagagaaggcactgcatctccctttcacctcagggatgtaaataaatgttttgtaaacatrcactacttaacttgaacatcacagtagctcctgcaaatccgtattttgcttctagaaaawaatcagtagagtttttctataggraaacttyccaaaaggaaaggaattccaagttccaaatgtcttmgttacatggaatctattttctcaaaacaaccttactggtcatatttaatcacagccccttgcataaagaatgaggcagaacacaatacattatgcaaaaacacctggacaaattgcaacatgccagccagctttcttatgagcagaagacatagactgcttatccttaggtga

SEQ ID NO: 44494 - DNA, 600 bp, Chicken  19866894283334_3
taaatgcattcaatggcatacttatttttgtgccctgcctttaaggtacatactgttacacataatttcctataatataaattagaattcaatatccattaagttacaccttgagattttaccctggagtatttgttatcraagtatgatccttacctgatttggtacatattttgatacagagaaggcactgcatctccctttcacctcagggatgtaaataaatgttttgtaaacatrcactacttaacttgaacatcacagtagctcctgcaaatccgtattttgcttctagaaaawaatcagtagagtttttctataggraaacttyccaaaaggaaaggaattccaagttccaaatgtcttmgttacatggaatctattttctcaaaacaaccttactggtcatatttaatcacagccccttgcataaagaatgaggcagaacacaatacattatgcaaaaacacctggacaaattgcaacatgccagccagctttcttatgagcagaagacatagactgcttatccttaggtgattgtgcaatttctgtctttccctctcctcttttcccttcttttgggctgtttgactctga

SEQ ID NO: 44495 - DNA, 600 bp, Chicken  19866894283334_4
tttttgtgccctgcctttaaggtacatactgttacacataatttcctataatataaattagaattcaatatccattaagttacaccttgagattttaccctggagtatttgttatcraagtatgatccttacctgatttggtacatattttgatacagagaaggcactgcatctccctttcacctcagggatgtaaataaatgttttgtaaacatrcactacttaacttgaacatcacagtagctcctgcaaatccgtattttgcttctagaaaawaatcagtagagtttttctataggraaacttyccaaaaggaaaggaattccaagttccaaatgtcttmgttacatggaatctattttctcaaaacaaccttactggtcatatttaatcacagccccttgcataaagaatgaggcagaacacaatacattatgcaaaaacacctggacaaattgcaacatgccagccagctttcttatgagcagaagacatagactgcttatccttaggtgattgtgcaatttctgtctttccctctcctcttttcccttcttttgggctgtttgactctgagtgttaaagaatcatctttgggct

SEQ ID NO: 44496 - DNA, 600 bp, Chicken  19866894283334_5
gccctgcctttaaggtacatactgttacacataatttcctataatataaattagaattcaatatccattaagttacaccttgagattttaccctggagtatttgttatcraagtatgatccttacctgatttggtacatattttgatacagagaaggcactgcatctccctttcacctcagggatgtaaataaatgttttgtaaacatrcactacttaacttgaacatcacagtagctcctgcaaatccgtattttgcttctagaaaawaatcagtagagtttttctataggraaacttyccaaaaggaaaggaattccaagttccaaatgtcttmgttacatggaatctattttctcaaaacaaccttactggtcatatttaatcacagccccttgcataaagaatgaggcagaacacaatacattatgcaaaaacacctggacaaattgcaacatgccagccagctttcttatgagcagaagacatagactgcttatccttaggtgattgtgcaatttctgtctttccctctcctcttttcccttcttttgggctgtttgactctgagtgttaaagaatcatctttgggctgatagaa

SEQ ID NO: 44497 - DNA, 600 bp, Chicken  19866894283334_6
tcctataatataaattagaattcaatatccattaagttacaccttgagattttaccctggagtatttgttatcraagtatgatccttacctgatttggtacatattttgatacagagaaggcactgcatctccctttcacctcagggatgtaaataaatgttttgtaaacatrcactacttaacttgaacatcacagtagctcctgcaaatccgtattttgcttctagaaaawaatcagtagagtttttctataggraaacttyccaaaaggaaaggaattccaagttccaaatgtcttmgttacatggaatctattttctcaaaacaaccttactggtcatatttaatcacagccccttgcataaagaatgaggcagaacacaatacattatgcaaaaacacctggacaaattgcaacatgccagccagctttcttatgagcagaagacatagactgcttatccttaggtgattgtgcaatttctgtctttccctctcctcttttcccttcttttgggctgtttgactctgagtgttaaagaatcatctttgggctgatagaaactgatttcaggagcagagagagtgatggagatccc

SEQ ID NO: 44498 - DNA, 599 bp, Chicken  19866894283338_1
  misc_feature (1)..(110): n is any nucleotide
nnnnnnnnnnnnnnnnnnnnnnnnnnnnnnnnnnnnnnnnnnnnnnnnnnnnnnnnnnnnnnnnnnnnnnnnnnnnnnnnnnnnnnnnnnnnnnnnnnnnnnnnnnnnnngaagatgcaaacctttcttgcccacatgctggcctgcccagtgcatgaatgggatttgttgataccagaaatgagatcctgttgtctgggactgggatatttctcaagcacttgcttcaggaaataggaataaaagtgtcaggcagcaaccaagtgatatctctggtcatctttgtcctataactggctratgctgtaaagtaaatggttagagtagttgggaaagtaatactacctcccctgtaaaagtaagctagtttgtgtattttcctatttttgccatctccattatttgttctagaattcctccttttcagtacatttcccttgtttaaaaagatgttcttggcagttttctcaactcccacctctttgctctctcttttgccactattcatactacagcagctcctaggagtctgagtcccataaacaagactgctcactgctagacagtgtaaacaaagcacaacaaaggaaaataacagt

SEQ ID NO: 44499 - DNA, 600 bp, Chicken  19866894283355_1
gtgtgttaaacattatatttcagcccagttcactgaaagactgatgcacgtctatgtgacccttgatcagcctgtgaatcttgatcgatttcccaacttttcttgcctctctgcattacttccaatcacaaatcacagaaagactgctatactcttccagactgctaacaaaacctgcaggctgctaagcgacctggttaagaatgggaacctcagcccatgggaaaacactactgcatctttaccgttctgcatggtaacatatgtgctttgcatggcaatagcaaatacagagctcakaaacacagggaagagccaccatccccactaaccaactgacttcttgacaatcgccccaagagacctccctaggccaggactcttgctcagctcacargttccagactcagctgcaagataatttaccttccagctacagctggtgaaaagaaaatgaatgtatatggaaaagctggctgataagaatatctattacctgcaaacctgaaatcatcttctttgcttcctccatttccttttccaaattatcctgttgttccaatagctgctcctcccatgaattctccaaacatgaccccg

SEQ ID NO: 44500 - DNA, 600 bp, Chicken  19866894283355_2
ttttcttgcctctctgcattacttccaatcacaaatcacagaaagactgctatactcttccagactgctaacaaaacctgcaggctgctaagcgacctggttaagaatgggaacctcagcccatgggaaaacactactgcatctttaccgttctgcatggtaacatatgtgctttgcatggcaatagcaaatacagagctcakaaacacagggaagagccaccatccccactaaccaactgacttcttgacaatcgccccaagagacctccctaggccaggactcttgctcagctcacargttccagactcagctgcaagataatttaccttccagctacagctggtgaaaagaaaatgaatgtatatggaaaagctggctgataagaatatctattacctgcaaacctgaaatcatcttctttgcttcctccatttccttttccaaattatcctgttgttccaatagctgctcctcccatgaattctccaaacatgaccccgggttccctgcttgccattcaggctggaagtgagattctctctcttctggaagaaagaacaactaaatgtggtcattacatacagagagatagaaaag

SEQ ID NO: 44501 - DNA, 600 bp, Chicken  19866894283361_1
aagggagaatgcataccagagttgtgctctttgttctttggtggttttgtttgtttgtttgtttgttttgcttcatgcttttatcagctcttcatttaaataaaaagcttaattaagtatagctttctcctaacagtctatgtaaaagtggagcctaaggaacatggagtgggcttaagagtagcttactgttcttatgcagcccatcattttctttacaaaaacaactcctgcatataattatttggttattccaatatatttatcttttgcaacttaatgcgtgactcttgcagattytcctggcactctgacagcctgagcttcccatgcactcagactgtatttttcccccaagcttctaaaattgcattagagtggagttttctccttacttcttttaatctaaatttgttttttttatgcttcataggccacaatgctcacacttgtgtgtacaacccatctgcacacagaacaggaacatgcagggttcattagtcagatagggtgaatggcttgaaatgtttaattaaagaaaaaacacaaaacgcccagtgaatcagatgttcacacagtagcagaggtggggaaaagact

SEQ ID NO: 44502 - DNA, 600 bp, Chicken  19866894283365_1
gtgtattgtttttcccctttttcctcattgcacagatgttcagtaatctacagaggtcactgacaagaattcaagatgcaaaccagcactaagaccgacctcacaaatgagaactttgcccttaaatcctgaccttatttttaatgaagaccaatgacaatctttagactgaagtctaaaatgtgactgggagtaagctagagaagaaaaagataaaaaggtcatgcctcatttttacgtgctgacagttagaaaagaattaacttatcagttttaaaaatgtgctgtcctgactaatayttcacattctcacgtatatgagaattttatagtacattacactagagagctatgtcagaatggagtttaaatactaagcttccccctcaggccactgaaaagaaacacgacctttcttcctcccwacagcctgagaactcccatggcccaaaacaatctcctttccatatttcttttatcctcaccagaattcatagttctacaggtggtcagcatcctgacttggtttcaaacaggtatgtatacctctaacgacagagtgcaatccaggagttgagagggctcttctgagtaataata

SEQ ID NO: 44503 - DNA, 600 bp, Chicken  19866894283365_2
atcctgaccttatttttaatgaagaccaatgacaatctttagactgaagtctaaaatgtgactgggagtaagctagagaagaaaaagataaaaaggtcatgcctcatttttacgtgctgacagttagaaaagaattaacttatcagttttaaaaatgtgctgtcctgactaatayttcacattctcacgtatatgagaattttatagtacattacactagagagctatgtcagaatggagtttaaatactaagcttccccctcaggccactgaaaagaaacacgacctttcttcctcccwacagcctgagaactcccatggcccaaaacaatctcctttccatatttcttttatcctcaccagaattcatagttctacaggtggtcagcatcctgacttggtttcaaacaggtatgtatacctctaacgacagagtgcaatccaggagttgagagggctcttctgagtaataatagaataggaaaataggtaacatttcctatagataaattgtacgtgaaatacagcaactattgacatagcatccttgatcatttagatcacctagtttacgttaggttacattccccaaattttcac

SEQ ID NO: 44504 - DNA, 600 bp, Chicken  19866894283371_1
gtagcacaaggttgcccaaccaacagcaggtgtaggagcagaacctatgacttccacgctgcctctggggtctgtccatcgtgttacatggctacaactctcattcaaaacaagttaagagtatctacataactattgatgtctgcctggatcttcaacctcattttttgctgtggatgcttgggctgctaagagactatcaggcatatagttatataactgttctttggagatgcattgaagagctggtgttgctgtctgtaatgtagaaatatgttaacttggaggaatgagatgagrtacccccacagcatgaatcacactgatctctgtggctaatgctgtgttaccctggaagaattgatctcatggtttctgggctctgtgctggggcagctatgctcagcgccaaattgcttctgagtgctctcagggcacagagccccacgtgaggagagcagcggggttgctgtgctggtggctggtgcctgggcctgtgccttctttccccttggtggcttccatgtctcctgctgctctgctgactcctggggggtggcagggagcatgtggatagaaggggcatggatgccaagcagc

SEQ ID NO: 44505 - DNA, 600 bp, Chicken  19866894283377_1
cagctgaagcccatcagcaggtggcccatgtgcctggttgatttgtgccctgggggccctcacctgtgtgaagggtccagagcagcagacccatggggttctgcagagaggctcaggagcagctggtgtgagcagcacagatgcactgctgggggcctgatggagctatgctagctctaggcaggctgtgcagagccctgactttgccagggtggcttggtgtgacagaatttggtcctgggaacagcattacaaggctgtaataacaagacaggttgaagcctccatcagctaggaccrtccctacagagcatggctcagtcctgctatgactctggccttagcttggctctgccccactatccatcctattccaaaggtgctgcactctgtcccarcccaccatggccaagaggtcagctcccagaatgtcagagcctccaaggccccactgagggaaggggaaggagtgcaggtgccagacatgaagtctaggcctctgtcagtacctgcatttyacggctttctgccagtaagtgcagctttccaggactctgttagctgtctgcactgtgaacatgacaatatgtacaccatgct

SEQ ID NO: 44506 - DNA, 600 bp, Chicken  19866894283377_2
ttctgcagagaggctcaggagcagctggtgtgagcagcacagatgcactgctgggggcctgatggagctatgctagctctaggcaggctgtgcagagccctgactttgccagggtggcttggtgtgacagaatttggtcctgggaacagcattacaaggctgtaataacaagacaggttgaagcctccatcagctaggaccrtccctacagagcatggctcagtcctgctatgactctggccttagcttggctctgccccactatccatcctattccaaaggtgctgcactctgtcccarcccaccatggccaagaggtcagctcccagaatgtcagagcctccaaggccccactgagggaaggggaaggagtgcaggtgccagacatgaagtctaggcctctgtcagtacctgcatttyacggctttctgccagtaagtgcagctttccaggactctgttagctgtctgcactgtgaacatgacaatatgtacaccatgctcatggagtggtaccgtccagttctgatctgtaaatatcccttgatgtctcaggcaagaggtctgttacttccctctcactattttcttacctttttta

SEQ ID NO: 44507 - DNA, 600 bp, Chicken  19866894283377_3
ggtgtgacagaatttggtcctgggaacagcattacaaggctgtaataacaagacaggttgaagcctccatcagctaggaccrtccctacagagcatggctcagtcctgctatgactctggccttagcttggctctgccccactatccatcctattccaaaggtgctgcactctgtcccarcccaccatggccaagaggtcagctcccagaatgtcagagcctccaaggccccactgagggaaggggaaggagtgcaggtgccagacatgaagtctaggcctctgtcagtacctgcatttyacggctttctgccagtaagtgcagctttccaggactctgttagctgtctgcactgtgaacatgacaatatgtacaccatgctcatggagtggtaccgtccagttctgatctgtaaatatcccttgatgtctcaggcaagaggtctgttacttccctctcactattttcttaccttttttatatcaagttttacataaagagtcgccaggagtgaactgatgatagaaaattaattttcgtatttgattcagtactaaaatgcattttttaagtcatctaagataaatactttaaagtaag

SEQ ID NO: 44508 - DNA, 600 bp, Chicken  19866894283393_1
attaaagaaaatgagactgctttgaaaagaacaagccatgaaggagatagttatttttctctgctggaaaaaaaatagaagcaagatggggaaaatgagattatttcacatggttcttgttgttatgcagattgctgttttatatccatacggtcagcacatctggctcccttgtgggtttgctctttgagttgggaggaagaatgtgctgtgagattaagggcaaaataaggcggaaggacagaagtggggaaatagctgtggagtaagggctagcaggagtaaggaggatttccctcrgaagcctgcaaatctgtcttctcttcgcctttaagctcttccatcttgttggggcttgcggctacacactcatacctcctcttgcactgtggccttcctaatcactgcaatcaagcaactaacaccgcccttactttgggctgcagaggaaaggcagaacctgagagctgatgtagatcacaaagccagccctcgctcatggtttcatgctacgcagggcctgtgtgtgctctggcagctctgggaagctcgctgggagcacacggccatgacagacgggtgctgctggttcacatggaa

SEQ ID NO: 44509 - DNA, 599 bp, Chicken  19866894283394_1
  misc_feature (1)..(105): n is any nucleotide
nnnnnnnnnnnnnnnnnnnnnnnnnnnnnnnnnnnnnnnnnnnnnnnnnnnnnnnnnnnnnnnnnnnnnnnnnnnnnnnnnnnnnnnnnnnnnnnnnnnnnnnnnaaaatactgttttcttcctgaagtaagaaaaaaataaatagaatatttaattaagaactagctgagagttgaattatgaacaaacttacatctctccagttcctctggagactgaatgtcatgcttctcatattgttatgtagtccagaataatgtagtaccattttaatttattttggcttcactttggttgtrgggaaccaaattccacttgccgctgagattaccacacaaattcaaaatctgtttctgcttatgttccaaggaaatactctcttaatagagtgcaggttctatttatagcacatattcaagagaaattctggacttcagttagagccagaggaatacagaaagctaacaaagtgagttgatatttcagtcttcctctctacgttttctgcttggtatttatctgcatactgtattacatcgcatgaaaagtattaatgaattatgctttttttttttcccaaaacttaaaatatagtata

SEQ ID NO: 44510 - DNA, 520 bp, Chicken  19866894283394_2
caaggaaatactctcttaatagagtgcaggttctatttatagcacatattcaagagaaattctggacttcagttagagccagaggaatacagaaagctaacaaagtgagttgatatttcagtcttcctctctacgttttctgcttggtatttatctgcatactgtattacatcgcatgaaaagtattaatgaattatgctttttttttttcccaaaacttaaaatatagtatagttctttctactcagtgatgaagagcaatatttaaaaacattaagataaatagaaacaggccaagaytacctcagtgcaataaaatctgagagagcaaagtttttgaaaatagtgtttctgctcttttctttttttcttttttcttttttctcttgctctttcttctgaagggcagggtttgcatgctgtctttggaagaaagtagctgtattttggtgtaggcactgaatcccatggataggtctgtactgtaagccgagttttgttatctagaagaaaaacttct

SEQ ID NO: 44511 - DNA, 599 bp, Chicken  19866894283403_1
  misc_feature (1)..(25): n is any nucleotide
nnnnnnnnnnnnnnnnnnnnnnnnnttggtactatataagaagaaatctctccaccctgcaaagataatgtaggaacagaggtaattttcctgaagccagttgcattccctgtcatcagaagtttggggaggggaacattttaggaaaaaatatatagggaatgccctggtgcactttgcagaaggttggactggatggtttttgtaggcgtctctcagttgcttacctatatgcatgatggaacacagagcgggagatgtcaagaggatttgctctggcttcattgtgaaacaaagagratgattgtgaaggagagattcttggcagacatgagaaaaactgcagtgtgtcctatagatttattgtatcartgtttcacctgatggtactgtgcaacagtgagatattaacaagaggaaaagacacagatgagggcaaaatgcataggagaaaaaaaacaggcatgaaaatagaaaataaaaaacagttcatagtacagttggcttttctcaccattataatgccatgtttagatacaaatattagacaaaaatcctgaaaatgatttagaagtcttacagctggccttaaattaggc

SEQ ID NO: 44512 - DNA, 600 bp, Chicken  19866894283403_2
ggaacagaggtaattttcctgaagccagttgcattccctgtcatcagaagtttggggaggggaacattttaggaaaaaatatatagggaatgccctggtgcactttgcagaaggttggactggatggtttttgtaggcgtctctcagttgcttacctatatgcatgatggaacacagagcgggagatgtcaagaggatttgctctggcttcattgtgaaacaaagagratgattgtgaaggagagattcttggcagacatgagaaaaactgcagtgtgtcctatagatttattgtatcartgtttcacctgatggtactgtgcaacagtgagatattaacaagaggaaaagacacagatgagggcaaaatgcataggagaaaaaaaacaggcatgaaaatagaaaataaaaaacagttcatagtacagttggcttttctcaccattataatgccatgtttagatacaaatattagacaaaaatcctgaaaatgatttagaagtcttacagctggccttaaattaggccttgctttttggctgcctgatttctaaatatcctgcatagctactctatgtttctttagttgttgcagagttc

SEQ ID NO: 44513 - DNA, 599 bp, Chicken  19866894283412_1
  misc_feature (1)..(76): n is any nucleotide
nnnnnnnnnnnnnnnnnnnnnnnnnnnnnnnnnnnnnnnnnnnnnnnnnnnnnnnnnnnnnnnnnnnnnnnnnnnnctgtgcttaatttttgcacccctggagatgtcacgcacgcaatttcagcagcacagtacaaaatattgatgttatctattatttttaatctgttttaatacacattatgcttatgcaagtaaatcatatgccattttctagaaagcttgcacagatgctttccttccattcaaaaggacacacatgatccacatgcacatttggagggcagagctgtaaccacyctccccagcagtttctcatcctcaagttgtccccatcacaaacagggtccatcaggggtattttccttttttgagcacagtgaacataatggacttcagaggggaaaaaagaagcattaataattatattaagtagcctctgcttcttagtcttggctgtttctaatcacagattgcctctttctcctcccttccttttctcagatgggacagggtcctgtaaagaagtgataggatatggcaagatgagaactaatggattcaatatgaaagtactgaaaatatgggtaacattgaaa

SEQ ID NO: 44514 - DNA, 600 bp, Chicken  19866894283419_1
tttttcctttgaaacaaagcaaaggctttcatttgttaagtgaaaattccctggtggaaactcgtctctctttccctcccatttctgaccccatattgggcactttaatctaatttcggtttgaggttttagaagctgaacgctgcttctgaagatcactgagggaaaagaaatcactgggaggaacatcacactttgaactgagagtctctggcacaatgcattgtggaaaaagcaccaagagcatttcccaatcgatgtagctgtatttttcacacccggttaagagaaatggaaacytgtggtaaataacactgctttgcacaagtccaattaccctaaatgataaattgcctaattatttcagctctagagtctttcccaagttctttatccttttctttgtagtcagtgtctgcagaacaagagcgtttgactgttactaattagtgggagagaaagatgcaggacacttagtaaattcactttcctttaaatccatcttagagctatttttccccatcatgggaaaaaaaaaaataaagcaataatttatttaaaagctgctctgctggaagaaattttctctccatgcctact

SEQ ID NO: 44515 - DNA, 588 bp, Chicken  19866894283424_1
gatggctgtaagttcttatatttcatggctggttttcgtgatgtatgtgacctattcataatgctgctcaagctgcattggaacaagacttaattcctcttcttgttaaagcttttctgctgactaccttcactactagcatactcgtgaagcatgtatactgtatgcttaaaaaatatcccaaacccaaaggaccactgtatgcaaatctccacctgcaaaagttcttcagacaagaaaactatatcagtagtttaactctttcaagttaacatgatagattgttgtttcctatatggrtgtgttcagtcatccttccagaatctgattacaatgtgcctagtgaaaaaaaaaaaaaaatccaattaaaatgaacgcattcattagaagagtttaaattttattcttgtcggtagggtacatcatattactggaattttacagcatcaaagttagcaatagctcccatcttataagtattttgaaggcttctagttgttgtcttcagaggcactgacaccagtagatcaataggtttttaaaagcagacaggaatcactgtgataatctagtctacttacatagtac

SEQ ID NO: 44516 - DNA, 599 bp, Chicken  19866894283425_1
  misc_feature (1)..(95): n is any nucleotide
nnnnnnnnnnnnnnnnnnnnnnnnnnnnnnnnnnnnnnnnnnnnnnnnnnnnnnnnnnnnnnnnnnnnnnnnnnnnnnnnnnnnnnnnnnnnnnnttaatgaagaggactttgcagacccaaaataggatagtataaattccttccttgtggtcgtaaaatacctctaggaattgaattatcaatttttaaattatgccgttgtgtataattttgatatatgttatggcactcagttctgattatgatacttcacattatatggtactttccatccaaaaatcttaaaggagttagaaaygccatgttaattctccaagtactcctctgaaaaaaagtcagtattgtttatctcattatggataatgaaaacccagcatggaaaaaaatggcatagaaaatcatttgggctgctttttgcagagtgacctccagactgcactgaagacctttaactatataccaaaaggccacttgcactgcagtttaaaagttcattcacaaggaagtaaggtgtttttttttaccgtaaatatggtttatatcccaatgcaagtarataaaggaaagttattgaagtattawttaaagagtagtgtt

SEQ ID NO: 44517 - DNA, 600 bp, Chicken  19866894283425_2
tatatgttatggcactcagttctgattatgatacttcacattatatggtactttccatccaaaaatcttaaaggagttagaaaygccatgttaattctccaagtactcctctgaaaaaaagtcagtattgtttatctcattatggataatgaaaacccagcatggaaaaaaatggcatagaaaatcatttgggctgctttttgcagagtgacctccagactgcactgaagacctttaactatataccaaaaggccacttgcactgcagtttaaaagttcattcacaaggaagtaaggtgyttttttttaccgtaaatatggtttatatcccaatgcaagtarataaaggaaagttattgaagtattawttaaagagtagtgttcatgataagtatttttttgaataggacaaagaccaagagatacacacctgtgttgtttcctgtcttctcttttcctcaagtcttcactttttcttctttggttagttgtccttcagaaagttgcttctttgtctaccagcgatgatcagtgtgactactctccaataaatgtttttcaagacttctrccactcaacaaacaagagataaatttcata

SEQ ID NO: 44518 - DNA, 600 bp, Chicken  19866894283425_3; identical to SEQ ID NO: 44517

SEQ ID NO: 44519 - DNA, 600 bp, Chicken  19866894283425_4
atatggtactttccatccaaaaatcttaaaggagttagaaaygccatgttaattctccaagtactcctctgaaaaaaagtcagtattgtttatctcattatggataatgaaaacccagcatggaaaaaaatggcatagaaaatcatttgggctgctttttgcagagtgacctccagactgcactgaagacctttaactatataccaaaaggccacttgcactgcagtttaaaagttcattcacaaggaagtaaggtgtttttttttaccgtaaatatggtttatatcccaatgcaagtarataaaggaaagttattgaagtattawttaaagagtagtgttcatgataagtatttttttgaataggacaaagaccaagagatacacacctgtgttgtttcctgtcttctcttttcctcaagtcttcactttttcttctttggttagttgtccttcagaaagttgcttctttgtctaccagcgatgatcagtgtgactactctccaataaatgtttttcaagacttctrccactcaacaaacaagagataaatttcataagaaaggagctcatttctatctattctatcatattctatctg

SEQ ID NO: 44520 - DNA, 600 bp, Chicken  19866894283425_5
taaaggagttagaaaygccatgttaattctccaagtactcctctgaaaaaaagtcagtattgtttatctcattatggataatgaaaacccagcatggaaaaaaatggcatagaaaatcatttgggctgctttttgcagagtgacctccagactgcactgaagacctttaactatataccaaaaggccacttgcactgcagtttaaaagttcattcacaaggaagtaaggtgtttttttttaccgtaaatatggtttatatcccaatgcaagtarataaaggaaagttattgaagtattawttaaagagtagtgttcatgataagtatttttttgaataggacaaagaccaagagatacacacctgtgttgtttcctgtcttctcttttcctcaagtcttcactttttcttctttggttagttgtccttcagaaagttgcttctttgtctaccagcgatgatcagtgtgactactctccaataaatgtttttcaagacttctrccactcaacaaacaagagataaatttcataagaaaggagctcatttctatctattctatcatattctatctgtgggacacctgttgaaaggtagtcta

SEQ ID NO: 44521 - DNA, 600 bp, Chicken  19866894283425_6
taaaagttcattcacaaggaagtaaggtgtttttttttaccgtaaatatggtttatatcccaatgcaagtarataaaggaaagttattgaagtattawttaaagagtagtgttcatgataagtatttttttgaataggacaaagaccaagagatacacacctgtgttgtttcctgtcttctcttttcctcaagtcttcactttttcttctttggttagttgtccttcagaaagttgcttctttgtctaccagcgatgatcagtgtgactactctccaataaatgtttttcaagacttctrccactcaacaaacaagagataaatttcataagaaaggagctcatttctatctattctatcatattctatctgtgggacacctgttgaaaggtagtctagttaaactagtaagttgtagtttaattggccaatggctgaagcagcctttctcttgttctcctgctcacccaagactggctgttccagtgttattccagaagaaacttctagtcatgttagtgagcactgtggaaggttttcaaaactaaggaggaaaattatgaattatattaaatgttagatggaaagccagttttggag

SEQ ID NO: 44522 - DNA, 434 bp, Chicken  19866894283430_1
tccacgcagctttgcagacacaaattttcccatgcacgcaagcaagaaaatgctcacctcaacacactgctggctgcagcccttcactgcttgcaatgcctttgtgcaatgatatttcagtactgccatgcgggatcaaggtctggtgggcctcatctcccatcaaacctcttttcttcagttgcacattgcacattaaccctgcaaagaccaagaaagatgttaaattcgtatagctcagcatatcaacatggctgctttgacattaattctggcaccgtggcgttgtgctttcttgcytcctgcagacacacaggacacagatgtcaacacggggcactgtgcacccatcagtgggcgcggacagaataagacacgcgtggctgttctctgagtgttgcccacagagctgcagcccagggagatttgggatg

SEQ ID NO: 44523 - DNA, 600 bp, Chicken  19866894283431_1
gagctcaaattctgtatccctagcaacctcacatttcccctcactttgttcttacaactttgttgaacaaggaacataaacccacaacctcagattctgaggataggccatgccatgtgtaatgatggtgctctccaaggctacgacaggtctcccctccaccagggcttcctgtatggagggctgaatcctgaaataagcacctggagataaacgtaaagaagacaattatttgcaggggtatttgcagtgactactgagctattttataaaaggcaatttgtcatcatcacaataaaygyattcctctcttcagctcttcttttgagtgggtttgcaagtaacttcatgaagactaaaactgtgttttatgtgattgagctattaaaaaaaaaatcaccataattaatacaaataatgatcctcttcgtgatctgaatgttactctcccaccattattacagctgtgttgctacttgctccaataatactactttaatatcactttaaattgatgttgctgtgaatgaactgagcactgtaatcgtgcctgawtaatgctgtattttaaaagagtgcaaacacaagtacaccgagcct

SEQ ID NO: 44524 - DNA, 600 bp, Chicken  19866894283431_2
gctcaaattctgtatccctagcaacctcacatttcccctcactttgttcttacaactttgttgaacaaggaacataaacccacaacctcagattctgaggataggccatgccatgtgtaatgatggtgctctccaaggctacgacaggtctcccctccaccagggcttcctgtatggagggctgaatcctgaaataagcacctggagataaacgtaaagaagacaattatttgcaggggtatttgcagtgactactgagctattttataaaaggcaatttgtcatcatcacaataaaygyattcctctcttcagctcttcttttgagtgggtttgcaagtaacttcatgaagactaaaactgtgttttatgtgattgagctattaaaaaaaaaatcaccataattaatacaaataatgatcctcttcgtgatctgaatgttactctcccaccattattacagctgtgttgctacttgctccaataatactactttaatatcactttaaattgatgttgctgtgaatgaactgagcactgtaatcgtgcctgawtaatgctgtattttaaaagagtgcaaacacaagtacaccgagcctaa

SEQ ID NO: 44525 - DNA, 421 bp, Chicken  19866894283431_3
actgagctattttataaaaggcaatttgtcatcatcacaataaaygyattcctctcttcagctcttcttttgagtgggtttgcaagtaacttcatgaagactaaaactgtgttttatgtgattgagctattaaaaaaaaaatcaccataattaatacaaataatgatcctcttcgtgatctgaatgttactctcccaccattattacagctgtgttgctacttgctccaataatactactttaatatcactttaaattgatgttgctgtgaatgaactgagcactgtaatcgtgcctgawtaatgctgtattttaaaagagtgcaaacacaagtacaccgagcctaaatgtatagtaagacagttgtgcatcaaaatgtcacctatttttagtgctattatcaaacaacggaaatttcctg

SEQ ID NO: 44526 - DNA, 600 bp, Chicken  19866894283433_1
cccactatcctggtctgcctcctgatccagcccaaattctgcagaatccttggtgacagcacgtgaagagaactgcagtcagcattcaggcaagtataaagcttaattttgaacgatacatttgccatcctatttccattcagttcattccaatattttccttgaaaccccttttatcaactgccaaaataaagagaaagagatgaagagataaccctacccttacacttctgccattgagcacactttccattcatacattttgcttcccattcataagactatgactgtatagtttcktttgtagctttcataactacctttacaaaagctttttgaaagacttatgtgccatcaccggtattctttcatttgcttgttcagggtgttatttacacacctcttaaccccttaaacaactcttaacagtttgggggatgtgattttctatccaagccactgtttgttggactcaaagctctgtctttccatcggttgggaatccaaggaaaagcccgaggcgatacgggggaggtggagtcaggcgcacacctacacgtgctgtgtctgctctgcctgcctttccgagcccacactgat

SEQ ID NO: 44527 - DNA, 599 bp, Chicken  19866894283435_1
  misc_feature (1)..(79): n is any nucleotide
nnnnnnnnnnnnnnnnnnnnnnnnnnnnnnnnnnnnnnnnnnnnnnnnnnnnnnnnnnnnnnnnnnnnnnnnnnnnnnncattgctctctccttctccaaccctctgctaatctccttttgccttgttcaggtggtgcattggcaatgctgcctgcaagcctgctctggcctagctcactcccctttaatagaactgctcttaacaaaataatgtgtattctcccacttatcccagagcaacattgcaaccactgccttgcaatctagtagccacttctgttcagcagcccagttcctcytttggaaatctcagcttcctctgttaggagcattctcatttcttcgggctcccagcaactcatcccatagtactatggtacagttgcaacaaacccttctccctctaataaaacgggcccatgccctcatcytttcagggacttaccgctttaggtattttctggtagggcaaaccatggaggtgcttccagttctcagcagtactgtgaacatggccgctctgtggctctacccagcactcagtgaccaggttcagttctgtgtccacctcaatggcctccacctctgtatcattgtc

SEQ ID NO: 44528 - DNA, 600 bp, Chicken  19866894283435_2
tggtgcattggcaatgctgcctgcaagcctgctctggcctagctcactcccctttaatagaactgctcttaacaaaataatgtgtattctcccacttatcccagagcaacattgcaaccactgccttgcaatctagtagccacttctgttcagcagcccagttcctcytttggaaatctcagcttcctctgttaggagcattctcatttcttcgggctcccagcaactcatcccatagtactatggtacagttgcaacaaacccttctccctctaataaaacgggcccatgccctcatcytttcagggacttaccgctttaggtattttctggtagggcaaaccatggaggtgcttccagttctcagcagtactgtgaacatggccgctctgtggctctacccagcactcagtgaccaggttcagttctgtgtccacctcaatggcctccacctctgtatcattgtcatcatctgtggagaagctgaaagaaagacacaaagtaagttctatgagatgggacagagccagaagcctactgaagctcctctctgagctgtgagagcagtgacacaaactgcagrtttgcargcaaagcccc

SEQ ID NO: 44529 - DNA, 410 bp, Chicken  19866894283435_3
ggcccatgccctcatcytttcagggacttaccgctttaggtattttctggtagggcaaaccatggaggtgcttccagttctcagcagtactgtgaacatggccgctctgtggctctacccagcactcagtgaccaggttcagttctgtgtccacctcaatggcctccacctctgtatcattgtcatcatctgtggagaagctgaaagaaagacacaaagtaagttctatgagatgggacagagccagaagcctactgaagctcctctctgagctgtgagagcagtgacacaaactgcagrtttgcargcaaagccccacctaactggtgagctatctgtggcagcttgggtgtttgtgctagattacaggatggccttcttgctctccacactacccaccaaggttgagt

SEQ ID NO: 44530 - DNA, 403 bp, Chicken  19866894283435_4
gccctcatcytttcagggacttaccgctttaggtattttctggtagggcaaaccatggaggtgcttccagttctcagcagtactgtgaacatggccgctctgtggctctacccagcactcagtgaccaggttcagttctgtgtccacctcaatggcctccacctctgtatcattgtcatcatctgtggagaagctgaaagaaagacacaaagtaagttctatgagatgggacagagccagaagcctactgaagctcctctctgagctgtgagagcagtgacacaaactgcagrtttgcargcaaagccccacctaactggtgagctatctgtggcagcttgggtgtttgtgctagattacaggatggccttcttgctctccacactacccaccaaggttgagt

SEQ ID NO: 44531 - DNA, 599 bp, Chicken  19866894283438_1
  misc_feature (1)..(176): n is any nucleotide
nnnnnnnnnnnnnnnnnnnnnnnnnnnnnnnnnnnnnnnnnnnnnnnnnnnnnnnnnnnnnnnnnnnnnnnnnnnnnnnnnnnnnnnnnnnnnnnnnnnnnnnnnnnnnnnnnnnnnnnnnnnnnnnnnnnnnnnnnnnnnnnnnnnnnnnnnnnnnnnnnnnnnnnnnnnnnnnnctgagattagttgcatcttgtaactctgaaactgatactgcagagaagatgtgaacacagacttaactgtcaagtgtctcgtcaagctagagttgcttctgcagctgaaatcacttgtggaaayttaaagcattaaagatacagacaacacagcaataccacagggcaaaattgcatgaaacaaagttctggcaattagcacccaaagcaaaggagtggacattttgcttgagtgggtatggtggtttgagaagggaggcttatagtctacttataggtttgctctttttctgctaatacagaactatgttaaaaagaatcctgctttttaagttttttaagaagttcaatttatattggtgttgcaattgtatcattaaaaaayggccactacaacctgactgggggtgggctgttaagtct

SEQ ID NO: 44532 - DNA, 600 bp, Chicken  19866894283438_2
gctagagttgcttctgcagctgaaatcacttgtggaaayttaaagcattaaagatacagacaacacagcaataccacagggcaaaattgcatgaaacaaagttctggcaattagcacccaaagcaaaggagtggacattttgcttgagtgggtatggtggtttgagaagggaggcttatagtctacttataggtttgctctttttctgctaatacagaactatgttaaaaagaatcctgctttttaagttttttaagaagttcaatttatattggtgttgcaattgtatcattaaaaaayggccactacaacctgactgggggtgggctgttaagtctgttagaggtgattaattattagatctcaggcatggaagtatgtatgtttgattcattttatctttgttgcaataacattgtgttgaataattggtggccagaaaagtagcttcattgatatttgatgagagagagaagaaaaatatactgactgttattatgtgagaacaggagaagtgtctttcatccctcatcacaaattgccattctctctagccagcagttacttgtgactccgcactgaagttcacattcatctgcc

SEQ ID NO: 44533 - DNA, 577 bp, Chicken  19866894283454_1
ctaccacatttcctcaatacattttactggttttaagactaagataatttaattatagtatttttagtaactttactagtggaggaatttgtacttttcctagctccttgtcttaatgagaatttcagataactccaaggccttgagttcacacagagaaacatatcagattcttaataatgaaatctaaagcctcttaccccaacaaaacaggttcaagagcacccaaagcccctgtaaccacagcacacagtctggcagaacactttagcacatacctaacttcacacatgtgacttytgtgggagagctcacacatgtaaagctaaagacgtgcacaagcatcaaggtcagagctcamaactagagcgcctgatggtccctgtggggattggtactgagtgatttgatggccttaatctagttgctggagtttactgcttacgtgcatgcatgcaagtacacatatacacatttcccattaggagaaactttgtgagataaatatctttgaccagcaaaccaaaacaactgtgtcactgtccctcactggccgtgtgcagcaggagcatcctca

SEQ ID NO: 44534 - DNA, 516 bp, Chicken  19866894283454_2
ttttagtaactttactagtggaggaatttgtacttttcctagctccttgtcttaatgagaatttcagataactccaaggccttgagttcacacagagaaacatatcagattcttaataatgaaatctaaagcctcttaccccaacaaaacaggttcaagagcacccaaagcccctgtaaccacagcacacagtctggcagaacactttagcacatacctaacttcacacatgtgacttytgtgggagagctcacacatgtaaagctaaagacgtgcacaagcatcaaggtcagagctcamaactagagcgcctgatggtccctgtggggattggtactgagtgatttgatggccttaatctagttgctggagtttactgcttacgtgcatgcatgcaagtacacatatacacatttcccattaggagaaactttgtgagataaatatctttgaccagcaaaccaaaacaactgtgtcactgtccctcactggccgtgtgcagcaggagcatcctca

SEQ ID NO: 44535 - DNA, 600 bp, Chicken  19866894283455_1
cgctctgaatgctgagttgtgcttccgccatcccagcagtgcagccttctggatggagaggttgagagtcctcctggaggcattcccatcccagacgttcccccagacacacttgactgtggatttctttattccaagcttttatgtttcctgcagccctcttgagctcctgagcactggccacttaatggctacagagcctgatccgtgtttctgtgtcactgagcactgggagagctctgagggcgcgttgctatgctgtgagaaatgaagcaatgcaaaaacgaggctgtgtgttayggtgttctggtgcacagggcccagcatcgaccactgagcatgagctgctgcggctggaaggcgctgccaccagctcacctgctccgcttgatcccccgcatcaggctggcaaaccatccttgtyagaggtgtacttagccttatccttgaatgtctctgggaaaagcaattcaacaacctccctgagcagcgtgttcagtgtctgaactctagttagagttataaaggtttccctaatgtttaactttaattttctctactgcaacataacaccgttattactggttcgagctcctcgat

SEQ ID NO: 44536 - DNA, 516 bp, Chicken  19866894283455_2
ttctttattccaagcttttatgtttcctgcagccctcttgagctcctgagcactggccacttaatggctacagagcctgatccgtgtttctgtgtcactgagcactgggagagctctgagggcgcgttgctatgctgtgagaaatgaagcaatgcaaaaacgaggctgtgtgttayggtgttctggtgcacagggcccagcatcgaccactgagcatgagctgctgcggctggaaggcgctgccaccagctcacctgctccgcttgatcccccgcatcaggctggcaaaccatccttgtyagaggtgtacttagccttatccttgaatgtctctgggaaaagcaattcaacaacctccctgagcagcgtgttcagtgtctgaactctagttagagttataaaggtttccctaatgtttaactttaattttctctactgcaacataacaccgttattactggttcgagctcctcgatggctctttttcccctaagcccccatttaggagagatgggg

SEQ ID NO: 44537 - DNA, 600 bp, Chicken  19866894283456_1
ctaagggagtcagaagtgtaattgctagtgctatcagaggaaccttgatatttctaacaggaagtttaattataaactgaattccccactgtgtcctttattacccaggcctatgcttcccaaagatattattagcctcattgcacattacaggtctgtggctccctctacagagcaaagggttactaatgcttggtactgttggtggctctgcttgcccgggccttggagaagggtgtcagatgtgggagcagagggttaacaagatggtcagtgtccttactgtgcttgcagtgtggytatggcctgcccctgcagggtgcttctgtggcactcacaacaaggtgttttgggtacagattcctgaaactggattgttttctctttgaagcccataagcatcataacgcctgyaccctgactcccyggtatcttcttgaccttatstccaagtgcccaattatgagaaaagtcacgacttttcttcctgtgctgcctgcaagatgagtaatttcccacagggcagccacatcttcttgttgttgatcttgattaggacaggtgtatgacaaataatgctgcccttaaagcttattgaat

SEQ ID NO: 44538 - DNA, 600 bp, Chicken  19866894283456_2
gcttcccaaagatattattagcctcattgcacattacaggtctgtggctccctctacagagcaaagggttactaatgcttggtactgttggtggctctgcttgcccgggccttggagaagggtgtcagatgtgggagcagagggttaacaagatggtcagtgtccttactgtgcttgcagtgtggytatggcctgcccctgcagggtgcttctgtggcactcacaacaaggtgttttgggtacagattcctgaaactggattgttttctctttgaagcccataagcatcataacgcctgyaccctgactcccyggtatcttcttgaccttatstccaagtgcccaattatgagaaaagtcacgacttttcttcctgtgctgcctgcaagatgagtaatttcccacagggcagccacatcttcttgttgttgatcttgattaggacaggtgtatgacaaataatgctgcccttaaagcttattgaataatctccccaagcagttgttaattattacataaagccactaccctcagttttccattgacatggtgctgaagatgtttaattttaattatcaaattgtcaaagggatatttatt

SEQ ID NO: 44539 - DNA, 600 bp, Chicken  19866894283456_3
attattagcctcattgcacattacaggtctgtggctccctctacagagcaaagggttactaatgcttggtactgttggtggctctgcttgcccgggccttggagaagggtgtcagatgtgggagcagagggttaacaagatggtcagtgtccttactgtgcttgcagtgtggytatggcctgcccctgcagggtgcttctgtggcactcacaacaaggtgttttgggtacagattcctgaaactggattgttttctctttgaagcccataagcatcataacgcctgyaccctgactcccyggtatcttcttgaccttatstccaagtgcccaattatgagaaaagtcacgacttttcttcctgtgctgcctgcaagatgagtaatttcccacagggcagccacatcttcttgttgttgatcttgattaggacaggtgtatgacaaataatgctgcccttaaagcttattgaataatctccccaagcagttgttaattattacataaagccactaccctcagttttccattgacatggtgctgaagatgtttaattttaattatcaaattgtcaaagggatatttattcatcttggacaaa

SEQ ID NO: 44540 - DNA, 600 bp, Chicken  19866894283456_4
ttacaggtctgtggctccctctacagagcaaagggttactaatgcttggtactgttggtggctctgcttgcccgggccttggagaagggtgtcagatgtgggagcagagggttaacaagatggtcagtgtccttactgtgcttgcagtgtggytatggcctgcccctgcagggtgcttctgtggcactcacaacaaggtgttttgggtacagattcctgaaactggattgttttctctttgaagcccataagcatcataacgcctgyaccctgactcccyggtatcttcttgaccttatstccaagtgcccaattatgagaaaagtcacgacttttcttcctgtgctgcctgcaagatgagtaatttcccacagggcagccacatcttcttgttgttgatcttgattaggacaggtgtatgacaaataatgctgcccttaaagcttattgaataatctccccaagcagttgttaattattacataaagccactaccctcagttttccattgacatggtgctgaagatgtttaattttaattatcaaattgtcaaagggatatttattcatcttggacaaagagctgctggcacagaacta

SEQ ID NO: 44541 - DNA, 599 bp, Chicken  19866894283457_1
  misc_feature (1)..(183): n is any nucleotide
nnnnnnnnnnnnnnnnnnnnnnnnnnnnnnnnnnnnnnnnnnnnnnnnnnnnnnnnnnnnnnnnnnnnnnnnnnnnnnnnnnnnnnnnnnnnnnnnnnnnnnnnnnnnnnnnnnnnnnnnnnnnnnnnnnnnnnnnnnnnnnnnnnnnnnnnnnnnnnnnnnnnnnnnnnnnnnnnnnnnnnncctccccgggtcggagagcccgctgcctgcggcctcctgttgcagccccgtgcctgcccttgtagaggggaagcagcaccttgtggggctcctgcttttccttttggggcaataaaraaccaaggaaaataacgaagctttaatcggcaggcaggcaggcgctgccacagctccgtgtctgaagcgcggagcgacgggcatcgcccttaggggaaccgccgggagcgcggggcgtaccgcgctcttcggtcggcgctgtgagagcggcgctgtccgcccccgcggccccgccgtgcgctcgcggtacttcacgcgctccatccgaacgcccggtgccgaaccgccaacttgggcaacttcctccggccgcgttccgcagcaggtcgtgccgcaaccttccgcccgagcgcctgccc

SEQ ID NO: 44542 - DNA, 577 bp, Chicken  19866894283463_1
tggttaatgcgtatcagcaaaacagtgcaccaaaaatacccctacccccaatcaaaaacaacaaaacaagggccacttgactaacaggtgttgctttttcccggattgaaactgaatttctctgtaaactgatcttttcagaagtgaaatctctcatatgaagtcctttgttttcaaacagtcagaaatccaacgcctcttggaaaaaaatatggcaaaaaagaactgcgaagatgaaaaaaaaatcagaatttgggctccagctgaacaaaagcaggaagcatttacctgggggatccmataaagctgctgagcacccagtgctgtttcgattacaaagcaattctacagctcttcccatagggacatttgctattgagagtttgtcggaaacgcaacgcagctatgcaagctgtgttactataaggatccagactgcactaccgtctgctgactgtaccaccttctgctgccagcaacgctcattcacattcaggaagttgggaagttctgtccctcctcccatttctttccgcctttggagcaccatctctgctcttgaaaaaaaatcaataaa

SEQ ID NO: 44543 - DNA, 600 bp, Chicken  19866894283465_1
aaaagtccaagagggggcacagaatacaaatacagtattaaaaccattattctgaaggaatgattttgccttatgtgtcagatgatgttcagcgatgcattcactctattcacattcagccttttcttgagcagtctgttgtggtctttctgtgaagcactcggcccttgtattccttgtatgtaagaagaacctcttgtgtgtatgtgtgtgcatgtgtgcatgagcaagcaagctggaggtataatggctatgattcagcctgcagagcacaactttttgttttgcttttatgccacraagtgcattttatgcataccttatggcatggtacacaaaatatgagattattcacagatacaaaccttctgctacggtgccagcagactttttgaagtggaggaattcagaacttgttccgttgtactttctggaggctgttcctggagcaaacgaatctctcagaatccaccagaaatattgttcagaagctagctgactgggtaggttgtgactggatgaattaatatttgtgtacagaagatgacaagagagtaggagggcagaatckgggatggcagcataggaatatttattgcc

SEQ ID NO: 44544 - DNA, 600 bp, Chicken  19866894283465_2
acaactttttgttttgcttttatgccacraagtgcattttatgcataccttatggcatggtacacaaaatatgagattattcacagatacaaaccttctgctacggtgccagcagactttttgaagtggaggaattcagaacttgttccgttgtactttctggaggctgttcctggagcaaacgaatctctcagaatccaccagaaatattgttcagaagctagctgactgggtaggttgtgactggatgaattaatatttgtgtacagaagatgacaagagagtaggagggcagaatckgggatggcagcataggaatatttattgcctctaagtaaataaatcatggaccaagtggcatgccagtggcatggtattacaaccacaaggcaaaacaaatatcctatctagatccataatggaaaatgttactggcatgtgctgttccctatcctgtgcctgaacattaactgggagagtcagcatagccagaaggatgcttaccattaaaaaataagtgtaactgaaggccagcatttgaactaatgaactaacccaattttgttgttgttgttgttgtttttcatttgkttggtttta

SEQ ID NO: 44545 - DNA, 560 bp, Chicken  19866894283465_3
gcagaatckgggatggcagcataggaatatttattgcctctaagtaaataaatcatggaccaagtggcatgccagtggcatggtattacaaccacaaggcaaaacaaatatcctatctagatccataatggaaaatgttactggcatgtgctgttccctatcctgtgcctgaacattaactgggagagtcagcatagccagaaggatgcttaccattaaaaaataagtgtaactgaaggccagcatttgaactaatgaactaacccaattttgttgttgttgttgttgtttttcatttgkttggttttaagtagcatggatagaagaaaaaatacatatttttaatgactgatttctcagcatttgcagtgagggaaaataatgctgtttttaaagaataaatatgtaagaattatctaattttaattaaaaatagtaggtgcagtaagacaattagatgactacatttgcctcctttcataattgctttaaaatgcaagtctttaacacttatttttggacaatgttttcaaaattaaaataacttcagctttatctta

SEQ ID NO: 44546 - DNA, 600 bp, Chicken  19866894283467_1
ttcacagctgtggctgcacacttcagttagctttcatcctgctgtggtgctgagaagaatgggaatgcatgcttcccctttacaagactgcctcctcccatcttggagaacttgccaatgtgagaagttcagcgatacatggagagagcttacagccttcctctgaaacccgcatcacactcagccaagcagtgcccagaacttacctgttcattagcaaagcagggtcttgtcctgctgggaaacatctgtgtatgaaaggcagagctcactgcacactgctgctcaagcctaattgargctgcctgagttcagctgggggagatgtgcagcaactactgatggccccaaccaggttgtggtgcaactggaaaaagggccgagggaaattacaggggaggtttaactgggacaggggaggtttaggttggatatagaagaagtttttcacacagagggtgatgacactggaacaggttgcccaaggaggttgtggaagccccatcgctggaggcatttagggccaggctggatgtggctctgggcagcctggtctggtggttggcgaccctgcacatagcagggggttgaaactcaatg

SEQ ID NO: 44547 - DNA, 599 bp, Chicken  19866894283471_1
  misc_feature (1)..(249): n is any nucleotide
nnnnnnnnnnnnnnnnnnnnnnnnnnnnnnnnnnnnnnnnnnnnnnnnnnnnnnnnnnnnnnnnnnnnnnnnnnnnnnnnnnnnnnnnnnnnnnnnnnnnnnnnnnnnnnnnnnnnnnnnnnnnnnnnnnnnnnnnnnnnnnnnnnnnnnnnnnnnnnnnnnnnnnnnnnnnnnnnnnnnnnnnnnnnnnnnnnnnnnnnnnnnnnnnnnnnnnnnnnnnnnnnnnnnnnnnnnnnnnnnnnnnnnnnntgaaattattccaagattgttttttcccctttgcttccgtaccactaattwtrttatacttacttttccattctttctctctcacctggcytgacctgctttgaagaactcctaagctggcaacagctctcaaaacaaggtcagtttctttatttgccttggccattactcggtgtattgaaacactgcaatatctacaggtgcatatttgcctacgaagccaaacttgctttaaaaaaawattatatattttgcagttcttgaagggagatataaatctgctggctataacctgccagttccagctctgggcagcaggccacagagaaatccaaagcttcctttagctg

SEQ ID NO: 44548 - DNA, 599 bp, Chicken  19866894283471_2
  misc_feature (1)..(247): n is any nucleotide
nnnnnnnnnnnnnnnnnnnnnnnnnnnnnnnnnnnnnnnnnnnnnnnnnnnnnnnnnnnnnnnnnnnnnnnnnnnnnnnnnnnnnnnnnnnnnnnnnnnnnnnnnnnnnnnnnnnnnnnnnnnnnnnnnnnnnnnnnnnnnnnnnnnnnnnnnnnnnnnnnnnnnnnnnnnnnnnnnnnnnnnnnnnnnnnnnnnnnnnnnnnnnnnnnnnnnnnnnnnnnnnnnnnnnnnnnnnnnnnnnnnnnnntgaaattattccaagattgttttttcccctttgcttccgtaccactaattwtrttatacttacttttccattctttctctctcacctggcytgacctgctttgaagaactcctaagctggcaacagctctcaaaacaaggtcagtttctttatttgccttggccattactcggtgtattgaaacactgcaatatctacaggtgcatatttgcctacgaagccaaacttgctttaaaaaaawattatatattttgcagttcttgaagggagatataaatctgctggctataacctgccagttccagctctgggcagcaggccacagagaaatccaaagcttcctttagctgca

SEQ ID NO: 44549 - DNA, 599 bp, Chicken  19866894283471_3
  misc_feature (1)..(209): n is any nucleotide
nnnnnnnnnnnnnnnnnnnnnnnnnnnnnnnnnnnnnnnnnnnnnnnnnnnnnnnnnnnnnnnnnnnnnnnnnnnnnnnnnnnnnnnnnnnnnnnnnnnnnnnnnnnnnnnnnnnnnnnnnnnnnnnnnnnnnnnnnnnnnnnnnnnnnnnnnnnnnnnnnnnnnnnnnnnnnnnnnnnnnnnnnnnnnnnnnnnnnnnnnnnnnnnnntgaaattattccaagattgttttttcccctttgcttccgtaccactaattwtrttatacttacttttccattctttctctctcacctggcytgacctgctttgaagaactcctaagctggcaacagctctcaaaacaaggtcagtttctttatttgccttggccattactcggtgtattgaaacactgcaatatctacaggtgcatatttgcctacgaagccaaacttgctttaaaaaaawattatatattttgcagttcttgaagggagatataaatctgctggctataacctgccagttccagctctgggcagcaggccacagagaaatccaaagcttcctttagctgcactgcgtttccttctttctgaatacctggaagcagccaa

SEQ ID NO: 44550 - DNA, 599 bp, Chicken  19866894283471_4
  misc_feature (1)..(59): n is any nucleotide
nnnnnnnnnnnnnnnnnnnnnnnnnnnnnnnnnnnnnnnnnnnnnnnnnnnnnnnnnnntgaaattattccaagattgttttttcccctttgcttccgtaccactaattwtrttatacttacttttccattctttctctctcacctggcytgacctgctttgaagaactcctaagctggcaacagctctcaaaacaaggtcagtttctttatttgccttggccattactcggtgtattgaaacactgcaatatctacaggtgcatatttgcctacgaagccaaacttgctttaaaaaaawattatatattttgcagttcttgaagggagatataaatctgctggctataacctgccagttccagctctgggcagcaggccacagagaaatccaaagcttcctttagctgcactgcgtttccttctttctgaatacctggaagcagccaatgcctacatttattaacttctgaaagcagctgctttcctcccacaccgtagtcttagctcacctgctattttgatgttaaggttagcatccagaagaagattttctgctttgagatctctgtgaactatgttacggcagtgacagaagtt

SEQ ID NO: 44551 - DNA, 599 bp, Chicken  19866894283473_1
  misc_feature (1)..(24): n is any nucleotide
nnnnnnnnnnnnnnnnnnnnnnnncaagttggcatgcccttgcagacaggcctttcagcactgcctgggcatctttgtgaatttgtttatgacctagggttgaggtgaatcaaaaggctgtttattaacttaatgtatactgtcactgctggcatccagggcactgatgtcgtgatgaagtgttttggagaggtctgataaaacaggttatatcacactgccctgtagagatacctgggacagtgtggggggaacaagttactgtgttgcacaagtgggattcagcctgtcctggtatgyatttatagttaatgatcgtactcctgcctgctgtgttagtgtttgtcttcctggttttagtaatttacatctctgtcagttttatcttaatgcatctgcaagatgacagacctggtaggtgaaagtgcctggggcactttgttttgctgtcagcaagtatagcacttctcaggattatagctgtatatctttgatgtaagaatccagattctatsgttctttgatgggtctacatatgactatttcttcattataagtgcttcatggtctttctgttttacagcttgcattactcttgc

SEQ ID NO: 44552 - DNA, 600 bp, Chicken  19866894283473_2
cactgccctgtagagatacctgggacagtgtggggggaacaagttactgtgttgcacaagtgggattcagcctgtcctggtatgyatttatagttaatgatcgtactcctgcctgctgtgttagtgtttgtcttcctggttttagtaatttacatctctgtcagttttatcttaatgcatctgcaagatgacagacctggtaggtgaaagtgcctggggcactttgttttgctgtcagcaagtatagcacttctcaggattatagctgtatatctttgatgtaagaatccagattctatsgttctttgatgggtctacatatgactatttcttcattataagtgcttcatggtctttctgttttacagcttgcattactcttgcaattaccagttgtttttaaaataacatttcttttctaaataattacctgcttggactagatgggttacattatcacagtggtgcagagaaggttaggcatctgatctctgttaataagtaatcacagaatcatagaataaccraggttggaaaagacctttaggaacttccagtccaaccatccataccaccaatatttccccactaaactgtgtt

SEQ ID NO: 44553 - DNA, 600 bp, Chicken  19866894283473_3
tttgctgtcagcaagtatagcacttctcaggattatagctgtatatctttgatgtaagaatccagattctatsgttctttgatgggtctacatatgactatttcttcattataagtgcttcatggtctttctgttttacagcttgcattactcttgcaattaccagttgtttttaaaataacatttcttttctaaataattacctgcttggactagatgggttacattatcacagtggtgcagagaaggttaggcatctgatctctgttaataagtaatcacagaatcatagaataaccraggttggaaaagacctttaggaacttccagtccaaccatccataccaccaatatttccccactaaactgtgttcattagtacaactagatgtttcttgagcacctccagggacagtgactccaccacctctctgggcagcccattccagcacctgaccactgtctcagagaaatgtttcctaatgtccaacctgaatgtcccctggtgcaacttgaggccgctccctctaatcctatggctagtttgtgggagaagaggccgatccccacctcaccacaatctcctttcagatacaatcc

SEQ ID NO: 44554 - DNA, 600 bp, Chicken  19866894283475_1
gaaacatatcagttaaaaacattttctagttttaatgtttaatttgtttcagatgtacctttaagtctgcaaaatgttacatggataaaaggttgggaaaagttgcagggctactatttaaaattatctggtttagaagaaggaaggacaattatccatatttgttgtgaagaatgcatttgcatattcaaggaaaaatagtctggaaagtttgttacaaacttgtaaacaaagttggtcccaaaaagaagacttccctcctcttccttcagaagaaagttctgaaagttcttaccatcrcatttttgtgtcacttcattaaacttgtgtccagctgggcatttgcactcaaaagatccaacagtattaatgcaatttcccccttgacagatcccagggatagcttggcattcatccacatctatcatataaaaaaagaaaaaaacaaacatccccttttacttcatttctgaagaacagccataataatttgtctacatataaattaatgtaaatatgcctaaatctattattcacccatcataatattatgatacttgcttgtgaagacagacactaattttgtaattactctgtgca

SEQ ID NO: 44555 - DNA, 600 bp, Chicken  19866894283476_1
caggtgacactgagttgagtggtgcagttgatatgacagaaggaagggatgccatccagagggacctgaaccagcccttgggtccatgtaaccctaatgatgttcaacgagggccaggtacgcctgggtcagcacaatcccagctatgagtacagagtgggagaagatctcaaatgagagcagccatgctgagaaggacttgggggtcgtggcagatgacaaacaacgtgagccagcagtgcgtgcttgcagcctggaagccaacagtgtctcaggctgcattaaaagaggagtggccgsgagggcaacgcaggtaattgtccctctctgctctgcccttgagagacctgactaatggaaaggtttcaagagcaacagttakatgttgatggatctacaggatgcagtacaaatagctttgtggctctcaaagccagcaaagaatttgataattgaagcacttgtgaatccagcattactaatgtattttgcccttagtacagttcagatgtaaaaaatgtcactgtgtacagagttgacctgaaggtaggaagcagatgcacgttccagagttcctgagtgctgctttgagtggggggc

SEQ ID NO: 44556 - DNA, 600 bp, Chicken  19866894283476_2
tccatgtaaccctaatgatgttcaacgagggccaggtacgcctgggtcagcacaatcccagctatgagtacagagtgggagaagatctcaaatgagagcagccatgctgagaaggacttgggggtcgtggcagatgacaaacaacgtgagccagcagtgcgtgcttgcagcctggaagccaacagtgtctcaggctgcattaaaagaggagtggccgsgagggcaacgcaggtaattgtccctctctgctctgcccttgagagacctgactaatggaaaggtttcaagagcaacagttakatgttgatggatctacaggatgcagtacaaatagctttgtggctctcaaagccagcaaagaatttgataattgaagcacttgtgaatccagcattactaatgtattttgcccttagtacagttcagatgtaaaaaatgtcactgtgtacagagttgacctgaaggtaggaagcagatgcacgttccagagttcctgagtgctgctttgagtggggggctggacttgaaatgactgtattatctggtgattcaggcagcatccagatgcgtctgcttttgttttcatcattaagtgcagat

SEQ ID NO: 44557 - DNA, 600 bp, Chicken  19866894283479_1
gaggcagaaagtgttcaagatgcactcctgcctttttacacttaaactgggagctatcccaggcttggctcttctccgtgggcagcaggagtataccacatgggggggatgcagaggggtctcttcacctttctcccacctccagatccaaccaggccctccacatagcttcccttcctgcacattctttggggcacagcttatgatcacaaccaacacgcagtgttgacgttggtgttgtggaccttaagtggcagccagacagatgggttgtgagcacactgagccctggaaccaacrctgcctccagcctcagtatgttctgtggctgtgcggcgctgttgagaacagtgagggctcgcggtccctggaggcaccacagcagtacatcacagcaattagactgggggaagtctgaggtgagagctgttttttgtgtctcttggtacatgtgagcttggctgaagctggaaggagtcgcaacaccagcatctgtatctctagcggcttctgctttccaaaggatggaagggcagggagcagcagcccagcccgaccctgtggctcttgtggcatggaacgtgtcctgccgtgcctcaa

SEQ ID NO: 44558 - DNA, 600 bp, Chicken  19866894283488_1
tcttccaactgctaaggctactgatgctgtgaggaagcaaaaccagcctttttagtgggaaatagctcttctgagatattttattggcatgatgatgttttcttgtatggtgtaggtgtacagtaactatcctcccaccaaagggtgaggtgctgccgtcttggttgtggagccagactagcaataggctttgccttgtgcttagctctcatggagaggtatctttctgtttctgctgctcacaacttgatttgaggataactgctatgaaaagtggcccttgagctgttctgggatccyctgttcttgctggggaaaggctacggagcagccagctgtccttctcctcccaggagctgtaaatctcctctgtgcagccctgggagaaaatgtgaaactgaacttccctacagtttaatcttcaaagcaataacccaattcactgaacagctgtgagatatggcactgacccagaatattaacttgtctccctgcagtgaatgggagctacagttcaaaagccactggcccccgttatgtcctgcaatggatgttccctgtgatgaatgtctcctgtgatgccatgtgctgtccccacag

SEQ ID NO: 44559 - DNA, 600 bp, Chicken  19866894283489_1
aagggctgcgtcgtgggcccaaagaagcgtgtgctcactctgcggaaggtgagagcgcagccggtgctggggagggactgactgtagctctccactaacagatgcaccacgtggagaatgatgaagcccatgaatgctggggagtgagactggttgggctctcaatgctgtgtgcagagaacgtgtggcacatgagcatggtgctcagtgagaccatttgcagagtggctgaccatggcagtgtgcagacaaatgtaggtgtacctttgggggtgtggctgggggagctgcaagtggaarccttggccgtaaacagatggtgaggaaatgaaatgcaaagcaaagagcaggcttgtttcagagcagctctgcaagcaaaggtatcacctgccatctgagcaccagggtgttcctctgagaaagcagattttcgtggagctaattgtctaatggatgcactgagggcacttgagcactgcctccgtcagagcagatatccagattttctgtaaagataagccygatgcactgtgactcatctctttcagtcccttctggtgcacacacgccgacgagctcatgaagccattgaactcaaat

SEQ ID NO: 44560 - DNA, 600 bp, Chicken  19866894283489_2
gagtggctgaccatggcagtgtgcagacaaatgtaggtgtacctttgggggtgtggctgggggagctgcaagtggaarccttggccgtaaacagatggtgaggaaatgaaatgcaaagcaaagagcaggcttgtttcagagcagctctgcaagcaaaggtatcacctgccatctgagcaccagggtgttcctctgagaaagcagattttcgtggagctaattgtctaatggatgcactgagggcacttgagcactgcctccgtcagagcagatatccagattttctgtaaagataagccygatgcactgtgactcatctctttcagtcccttctggtgcacacacgccgacgagctcatgaagccattgaactcaaattcattgataccacttccaagtttggccacggctgcttccagacagctcaggagaagcgtgcattcatggtgagttacgctgtgcaccagctccagctgctgggctgtgctcacagctggggctaaagcaactgactgactccagccaagcatctgcttctagacataataacagccaactgagtgattgggaccgtcttgcataaaagacaaacatgaattc

SEQ ID NO: 44561 - DNA, 600 bp, Chicken  19866894283499_1
taattaaagaatatacttaatatacttatgtctctctaaaggtaatgcctttatttccatgaagactagaatagatacaaatatcacaataacattgtttgacagagcaaattcttagctgttcaagagcatgtttgatgtccagcagggttccatgcaagactgataagctccagtggagaatttctgctctcattattcaaagcagagagcaggtccatcagtgaagcctcaaggtaattttgccacgtaactgcaaaccattgttctgatatccctgaagataagaaagatctattstgtgggaaattccatggttttattttagaagattaaacatgctataagatttgtgtttgcttgtgagcacagtgtagaatttaatataaaatgatatcacctacagggtaggaaaaaatactgagataatgactattaaaatcaaaaacatattcagagaaatttctcaagaatgcactgtgcatgattcttctatggggtctatatactttccttaagttcacagaagctcgtaaagatgaagagtactgaattacagagatcgtagagaatcttgtgatcttatttctgggattctgt

SEQ ID NO: 44562 - DNA, 599 bp, Chicken  19866894283500_1
  misc_feature (1)..(74): n is any nucleotide
nnnnnnnnnnnnnnnnnnnnnnnnnnnnnnnnnnnnnnnnnnnnnnnnnnnnnnnnnnnnnnnnnnnnnnnnnnattctggtactgtgttcgatgctgcttttagtcccgggtatgttggatttcagttttaacggtatacacttgggagtttcctgattacatgtaatgcactctggttattggaattacaagtccaaggggaatggtgagatctagcagaaggtatccttgcctatggcagggtagttggaactagatgatctttaaaggtcccttccaattcagtcattctgattcygtgacgcacttctttgctataaaagaagtctttaactgatgcaaggccttaccaaactgtagcccagtagtctaaattctagaccagtgtttatcattgtatggttgcagacaatgtaaattttctgtaaataagtaggtcaggcctatcacagccaacatgctgcactgcggactgtgatgataactaggactgcgtatctaaatgtgctccttttgtttgttgttgtcatggttttctctcttgtgtagatggcagacatctactcagtgcgggagaagactgttgttttaaagtaa

SEQ ID NO: 44563 - DNA, 600 bp, Chicken  19866894283500_2
gtttatcattgtatggttgcagacaatgtaaattttctgtaaataagtaggtcaggcctatcacagccaacatgctgcactgcggactgtgatgataactaggactgcgtatctaaatgtgctccttttgtttgttgttgtcatggttttctctcttgtgtagatggcagacatctactcagtgcgggagaagactgttgttttaaagtaatagatgtacagactggaatgcttatatcttctgtgactgctggtgagccacaaaggtaagtgtgagaacatacgtaaggattatgaagmtkcatggccagcttagttaactgtggagatgctcagtggttggccatagcaaaaagagaagtgtggtaacagtgaaggtactgaatttaatgaaacagttaatttgcacttaagcgcaaagacttgtgtgtgctttccaatcaagcttttcaaacagcaatgaaagaaacaactatctaaggaagtaactcttcgttttttatacaagttgaaaatggtgttgaaaaagagctgcttagctgtagtaccaatgggctcttccagaacttaagataccgccatttctagcaagcggacagt

SEQ ID NO: 44564 - DNA, 600 bp, Chicken  19866894283500_3
ttatcattgtatggttgcagacaatgtaaattttctgtaaataagtaggtcaggcctatcacagccaacatgctgcactgcggactgtgatgataactaggactgcgtatctaaatgtgctccttttgtttgttgttgtcatggttttctctcttgtgtagatggcagacatctactcagtgcgggagaagactgttgttttaaagtaatagatgtacagactggaatgcttatatcttctgtgactgctggtgagccacaaaggtaagtgtgagaacatacgtaaggattatgaagmtkcatggccagcttagttaactgtggagatgctcagtggttggccatagcaaaaagagaagtgtggtaacagtgaaggtactgaatttaatgaaacagttaatttgcacttaagcgcaaagacttgtgtgtgctttccaatcaagcttttcaaacagcaatgaaagaaacaactatctaaggaagtaactcttcgttttttatacaagttgaaaatggtgttgaaaaagagctgcttagctgtagtaccaatgggctcttccagaacttaagataccgccatttctagcaagcggacagttc

SEQ ID NO: 44565 - DNA, 599 bp, Chicken  19866894283501_1
  misc_feature (1)..(62): n is any nucleotide
nnnnnnnnnnnnnnnnnnnnnnnnnnnnnnnnnnnnnnnnnnnnnnnnnnnnnnnnnnnnnnccatatacaaatacaagatacatgccccgtatccactattcacacccagtgtccattttacatgtatatatgctgcagactcacacagtgcctacctctaacattcatcgtctagctagactgcaaagtggaactggtcccagattaaaattgcattgaatttcccatgacaataatgaagggttttgataaaattactctagaagcactgctcgcaaatattaatctacttgcattygtaagaagtataataaagaataaaaaagactcctgacagttcttggcagctttgccattaattacataattgaattcaaggtaaagctagtctccagtctcaacccccagtacaatgtttttaagagtgatgggggaaagcaaagaaagcctgcagctttgtgtgccgagctgtgatgcagctctgcctcccagcccagctgagctcaccgctgcgccggacaaaactgccgcttatcctggagacgttaccgcactaaaacaacatccccggagctcattgggaagctgctgtgagtg

SEQ ID NO: 44566 - DNA, 600 bp, Chicken  19866894283507_1
agttgggttgaatgggattctgggcagtcagatccaatgggaggagtccccgcccaaggcagggggattggaaccaggtggtctttgaagatccctccaactcaaaccaatatatgattcattgtaagataaacacaaacaaaagacttaaaatgaatatctgaaatgtggggaaatttacagccagtgctacacagttttgaggtaggtagggtgatatgaaacttcaaacaagcatggtgtatttttgacaatactaaagaaaatgagcagaacctaagttcacttggaatttaaacygggttactttcagtcctaattggtctctcacaacgcttaacttgtgttctgttaatcctgtgtgctaaattgggcctgtaggtatgcttggcatttcttctattcagcggtcttgaacaggtttgcagagataaccagtctgaatagacttgttaagtttaatgattttgagaatataattcatttctagcgtgtaggtttgcttctagccttatgcttttaaaattcatatagaatgataatcttacaggttcataaggagatggacttctttttttaaaaccataattatagtctacc

SEQ ID NO: 44567 - DNA, 600 bp, Chicken  19866894283509_1
aaaagattggggtaaaaagactgtttctaacaaaataaaacagagcaaatgtaaactgaaaaagttacaggggacacagtacagttaagacctatttgtaaccccttctacagcatgctttagatcattttacttgctgtctcccacacttagtatcttctataaagtcctttgcaaataagttcctgggtgcccacctgttttgcctgaaagaaatgtcctggaaaaaatctcgaacagcagagctactgcaatgaggccggtaacgagcggagtcccccaggggtctgtcttgggacyggtgctctttaacatctttatcagtgacatcgacaatggaattgagtgcaccstcagcagatttgctgatgacaccaaactgagtggtgcggttgacacagaggaaggaagggatgccattcagatggaccttgacagacttgaaaggtgggccygggtgaacctgatgaggttcaacacggcaaagtgcagggttttgcacttgggccggaggaaccccaggcatctayacagactgaaaggagcagtccttgggagcagctctgcagagaaggacctgggggtcctgatggatgacca

SEQ ID NO: 44568 - DNA, 600 bp, Chicken  19866894283509_2
aactgaaaaagttacaggggacacagtacagttaagacctatttgtaaccccttctacagcatgctttagatcattttacttgctgtctcccacacttagtatcttctataaagtcctttgcaaataagttcctgggtgcccacctgttttgcctgaaagaaatgtcctggaaaaaatctcgaacagcagagctactgcaatgaggccggtaacgagcggagtcccccaggggtctgtcttgggacyggtgctctttaacatctttatcagtgacatcgacaatggaattgagtgcaccstcagcagatttgctgatgacaccaaactgagtggtgcggttgacacagaggaaggaagggatgccattcagatggaccttgacagacttgaaaggtgggccygggtgaacctgatgaggttcaacacggcaaagtgcagggttttgcacttgggccggaggaaccccaggcatctayacagactgaaaggagcagtccttgggagcagctctgcagagaaggacctgggggtcctgatggatgaccaacttaacatgagccagcagtgtgctcttgcagctcagaaagcaaatggtatcc

SEQ ID NO: 44569 - DNA, 600 bp, Chicken  19866894283509_3
tcttctataaagtcctttgcaaataagttcctgggtgcccacctgttttgcctgaaagaaatgtcctggaaaaaatctcgaacagcagagctactgcaatgaggccggtaacgagcggagtcccccaggggtctgtcttgggacyggtgctctttaacatctttatcagtgacatcgacaatggaattgagtgcaccstcagcagatttgctgatgacaccaaactgagtggtgcggttgacacagaggaaggaagggatgccattcagatggaccttgacagacttgaaaggtgggccygggtgaacctgatgaggttcaacacggcaaagtgcagggttttgcacttgggccggaggaaccccaggcatctayacagactgaaaggagcagtccttgggagcagctctgcagagaaggacctgggggtcctgatggatgaccaacttaacatgagccagcagtgtgctcttgcagctcagaaagcaaatggtatcctgggctccatcatgagaggggtggtcagcagagacaggaaggtgattgtctctctctactctgctcttgtgaggccccatctggagtactgcgtccaggtac

SEQ ID NO: 44570 - DNA, 549 bp, Chicken  19866894283509_4
tctcgaacagcagagctactgcaatgaggccggtaacgagcggagtcccccaggggtctgtcttgggacyggtgctctttaacatctttatcagtgacatcgacaatggaattgagtgcaccstcagcagatttgctgatgacaccaaactgagtggtgcggttgacacagaggaaggaagggatgccattcagatggaccttgacagacttgaaaggtgggccygggtgaacctgatgaggttcaacacggcaaagtgcagggttttgcacttgggccggaggaaccccaggcatctayacagactgaaaggagcagtccttgggagcagctctgcagagaaggacctgggggtcctgatggatgaccaacttaacatgagccagcagtgtgctcttgcagctcagaaagcaaatggtatcctgggctccatcatgagaggggtggtcagcagagacaggaaggtgattgtctctctctactctgctcttgtgaggccccatctggagtactgcgtccaggtacggagcccccagtacaagaaagaca

SEQ ID NO: 44571 - DNA, 599 bp, Chicken  19866894283511_1
  misc_feature (1)..(21): n is any nucleotide
nnnnnnnnnnnnnnnnnnnnnatttatttaggaaactgctattatctagcactgggatcgggttttctcttgaaaccccagtttcctattacccgtgggcattgttgtgcatgcagagatgtagttttagagagacctggcatctgccagagcagatcagtgatatatggcaaaaccagaaggaagccaaacaaacaaacgagagatctgtcgtgaaaaatgagatcatcggtccctcagtgataaagtattacgttacttccaggggggtggtcagcattcaacatgctgctccagackccaggagccagggtccagcycctgctgtgctctggttcctcctgcacttcagctcctcctcatccagaaaaggaacggtgagaacagccgtgctgagactgggaagtgatcrgacagagataacggtgatattccccatcggtgactgccagcaaaaggcctttgatcacagctggagctgtgcaaggatggccacctggagccgtgcagacacacagtgagagtgatcgtgctttttacattaagtacctgtaggtctttaatacctgatatacacgtttcttaacgccactctcccc

SEQ ID NO: 44572 - DNA, 599 bp, Chicken  19866894283511_2
  misc_feature (1)..(1): n is any nucleotide
natttatttaggaaactgctattatctagcactgggatcgggttttctcttgaaaccccagtttcctattacccgtgggcattgttgtgcatgcagagatgtagttttagagagacctggcatctgccagagcagatcagtgatatatggcaaaaccagaaggaagccaaacaaacaaacgagagatctgtcgtgaaaaatgagatcatcggtccctcagtgataaagtattacgttacttccaggggggtggtcagcattcaacatgctgctccagackccaggagccagggtccagcycctgctgtgctctggttcctcctgcacttcagctcctcctcatccagaaaaggaacggtgagaacagccgtgctgagactgggaagtgatcrgacagagataacggtgatattccccatcggtgactgccagcaaaaggcctttgatcacagctggagctgtgcaaggatggccacctggagccgtgcagacacacagtgagagtgatcgtgctttttacattaagtacctgtaggtctttaatacctgatatacacgtttcttaacgccactctccccagccctaaatgctgtcaatt

SEQ ID NO: 44573 - DNA, 600 bp, Chicken  19866894283511_3
gcagagatgtagttttagagagacctggcatctgccagagcagatcagtgatatatggcaaaaccagaaggaagccaaacaaacaaacgagagatctgtcgtgaaaaatgagatcatcggtccctcagtgataaagtattacgttacttccaggggggtggtcagcattcaacatgctgctccagackccaggagccagggtccagcycctgctgtgctctggttcctcctgcacttcagctcctcctcatccagaaaaggaacggtgagaacagccgtgctgagactgggaagtgatcrgacagagataacggtgatattccccatcggtgactgccagcaaaaggcctttgatcacagctggagctgtgcaaggatggccacctggagccgtgcagacacacagtgagagtgatcgtgctttttacattaagtacctgtaggtctttaatacctgatatacacgtttcttaacgccactctccccagccctaaatgctgtcaattcctttgtcacagtcagctcagaacaagcaggactggtccctctgacacgttgttatgtagcactgaggcagaacaccaggaaggcccagctca

SEQ ID NO: 44574 - DNA, 600 bp, Chicken  19866894283512_1
gatttttaaacgctaaaggattctacttcatcgaattccacagtgagggcagtgatgcttgtgataataaccaaagttagacactcattcctcaaagtgaagaacttgtattttcaaaataaactggttcataaagaaaaataataataataattctgaggctttagtacatatcataggaaaggaattgcaccagttaatgaaaataacagagcaagaaacacttaattattttgcaggtaatacttgaatggctcttgcagaaataattccatttatctgtgctcacacaattgcacyctttaataagctytctaatgacttccttgaaaatataagcctaggttcctgtctgctgctgtatacacctgaaacacacttaccataattcacatacgataaatgacataaaaaaaactctctgacatgaagcagaagcacttaaaaaggaatcaaacacttcagtggtaccatattcattttaactatcttctatgtatgaacactgcattttttgtttgtttgttttattctattgaacagatattcctggttttattcctgtgtttgaaatgcaagaaaagatcaatacatcaaaaa

SEQ ID NO: 44575 - DNA, 600 bp, Chicken  19866894283512_2
taaaggattctacttcatcgaattccacagtgagggcagtgatgcttgtgataataaccaaagttagacactcattcctcaaagtgaagaacttgtattttcaaaataaactggttcataaagaaaaataataataataattctgaggctttagtacatatcataggaaaggaattgcaccagttaatgaaaataacagagcaagaaacacttaattattttgcaggtaatacttgaatggctcttgcagaaataattccatttatctgtgctcacacaattgcacyctttaataagctytctaatgacttccttgaaaatataagcctaggttcctgtctgctgctgtatacacctgaaacacacttaccataattcacatacgataaatgacataaaaaaaactctctgacatgaagcagaagcacttaaaaaggaatcaaacacttcagtggtaccatattcattttaactatcttctatgtatgaacactgcattttttgtttgtttgttttattctattgaacagatattcctggttttattcctgtgtttgaaatgcaagaaaagatcaatacatcaaaaatgttggggtttcc

SEQ ID NO: 44576 - DNA, 492 bp, Chicken  19866894283523_1
aactgcggtctgcactgagattcactgatagtgggtgagcaatgacatggcacctgtgtagggtgtctctcctttctgggagtgcacccaggcccatttacactataacatgcatttgctgttggcagtcatcttccttcacacacatttaactcagtaattgccctattcatatgttacacgtgctcctaggtttcgatttgtagcagcacctgttcagttcctgccatatatttttaatattacatttggacattcctggatggaggggatctgtttccagactaagacacatttggrgtctacttgtgtccggattcttgttatattaaaaaaaaaaaggtctgggcaatgaaaatgaattagagaaattaaattcagttcaccataaatagatatcaagacagaaattcagcagctcaaccaaaaagtgtcgaattccatttgaactgtcctgaaaagtctaggtattagcactttaatttggttacg

SEQ ID NO: 44577 - DNA, 599 bp, Chicken  19866894283525_1
  misc_feature (1)..(94): n is any nucleotide
nnnnnnnnnnnnnnnnnnnnnnnnnnnnnnnnnnnnnnnnnnnnnnnnnnnnnnnnnnnnnnnnnnnnnnnnnnnnnnnnnnnnnnnnnnnnnncaggatagatctatgagctcagactgcatgtagtaaattccacagggggactggaattacattatttttgcattcaaatcagtaaatgaaaatgtatttctacagcttgaaacaaatgccaaggatttattttagaatattaaaaacttctgttttgacagccattaattaagtggaaaatatttttgtttatctgtcttactttrcagaaaagcaagcaaatcaagtcagaacaaatagatttgtatgtgagcacaaacactcaattatggaattgctccagccttcatgtcatttggtcaaggttttcttttccctcaagatgcacagcagtctgctggcagctaatggggtaaaaataaacagggataagtagaaatcgtataattaacatattttttccrctataaatactgatttgtttaaagtgagtttgatgtatttgataagtttccaagattaaaagtagaagagaagaataattttatgaaaaattatttgatta

SEQ ID NO: 44578 - DNA, 600 bp, Chicken  19866894283525_2
gcttgaaacaaatgccaaggatttattttagaatattaaaaacttctgttttgacagccattaattaagtggaaaatatttttgtttatctgtcttactttrcagaaaagcaagcaaatcaagtcagaacaaatagatttgtatgtgagcacaaacactcaattatggaattgctccagccttcatgtcatttggtcaaggttttcttttccctcaagatgcacagcagtctgctggcagctaatggggtaaaaataaacagggataagtagaaatcgtataattaacatattttttccrctataaatactgatttgtttaaagtgagtttgatgtatttgataagtttccaagattaaaagtagaagagaagaataattttatgaaaaattatttgattacataggctatcatttaattgttatttttcacttgtcagttctgaaaagttgaattttatctgatatattaatattttatcatggatatatcaatttatacttygttactakaactaaataytaattacttaggcaattaccattatgatttttaagatactttatcttgtctattttaacctttctccttgaagagaaa

SEQ ID NO: 44579 - DNA, 490 bp, Chicken  19866894283525_3
tcttttccctcaagatgcacagcagtctgctggcagctaatggggtaaaaataaacagggataagtagaaatcgtataattaacatattttttccrctataaatactgatttgtttaaagtgagtttgatgtatttgataagtttccaagattaaaagtagaagagaagaataattttatgaaaaattatttgattacataggctatcatttaattgttatttttcacttgtcagttctgaaaagttgaattttatctgatatattaatattttatcatggatatatcaatttatacttygttactakaactaaataytaattacttaggcaattaccattatgatttttaagatactttatcttgtctattttaacctttctccttgaagagaaaaatgctaccaaacaatagtttaaacctacaatacagtctctaaaatcttcatggggacagttaatttcctaccacattgagtaatcagctataa

SEQ ID NO: 44580 - DNA, 482 bp, Chicken  19866894283525_4
ctcaagatgcacagcagtctgctggcagctaatggggtaaaaataaacagggataagtagaaatcgtataattaacatattttttccrctataaatactgatttgtttaaagtgagtttgatgtatttgataagtttccaagattaaaagtagaagagaagaataattttatgaaaaattatttgattacataggctatcatttaattgttatttttcacttgtcagttctgaaaagttgaattttatctgatatattaatattttatcatggatatatcaatttatacttygttactakaactaaataytaattacttaggcaattaccattatgatttttaagatactttatcttgtctattttaacctttctccttgaagagaaaaatgctaccaaacaatagtttaaacctacaatacagtctctaaaatcttcatggggacagttaatttcctaccacattgagtaatcagctataa

SEQ ID NO: 44581 - DNA, 472 bp, Chicken  19866894283525_5
acagcagtctgctggcagctaatggggtaaaaataaacagggataagtagaaatcgtataattaacatattttttccrctataaatactgatttgtttaaagtgagtttgatgtatttgataagtttccaagattaaaagtagaagagaagaataattttatgaaaaattatttgattacataggctatcatttaattgttatttttcacttgtcagttctgaaaagttgaattttatctgatatattaatattttatcatggatatatcaatttatacttygttactakaactaaataytaattacttaggcaattaccattatgatttttaagatactttatcttgtctattttaacctttctccttgaagagaaaaatgctaccaaacaatagtttaaacctacaatacagtctctaaaatcttcatggggacagttaatttcctaccacattgagtaatcagctataa

SEQ ID NO: 44582 - DNA, 600 bp, Chicken  19866894283528_1
ttaacagttgaaaagaataccccactaatcccaaggtgaaatgctcgagagatttcagactgtttcaaatgattttggggatgcttctgttcagacaaatacattcactgcaaaaaaagattatgaagatctctttaagcagtaaagtcattattacttgctcacaggcaacctgaggaagagactaggctagggagcagaggatcagaggcagaggctgctgtgagtggcagctgtttgcacaggctgatgtacaggagtgctctgaagcccaaatctgcctcctgggctctccaggtrgggtcatactggtctgcattactctaagaaagaaaatcaagccttcttcaaatcaagtaaggttccataggtgtgcaccacagtcaggaacaaggttaccattccccttttagataataactcataygatgttttaaatagaagcctctgaatgtgtgcttgaggcaggaaatgggtagagatactgatgaagtaactctgaaaatccaacctttctgttgagctatgcctggtactttccatacgtggccacaacaaataatatagatattatagcaacgagaggaaagtgagagcagc

SEQ ID NO: 44583 - DNA, 600 bp, Chicken  19866894283528_2
gatctctttaagcagtaaagtcattattacttgctcacaggcaacctgaggaagagactaggctagggagcagaggatcagaggcagaggctgctgtgagtggcagctgtttgcacaggctgatgtacaggagtgctctgaagcccaaatctgcctcctgggctctccaggtrgggtcatactggtctgcattactctaagaaagaaaatcaagccttcttcaaatcaagtaaggttccataggtgtgcaccacagtcaggaacaaggttaccattccccttttagataataactcataygatgttttaaatagaagcctctgaatgtgtgcttgaggcaggaaatgggtagagatactgatgaagtaactctgaaaatccaacctttctgttgagctatgcctggtactttccatacgtggccacaacaaataatatagatattatagcaacgagaggaaagtgagagcagcgttctgcatgttatgcagccttgatttggtatttcagcttgtgacactgttgaagtttggtcattagaccgcaaatactccccatcatcactaatgctgaaaagttgttttctcatgagggggttat

SEQ ID NO: 44584 - DNA, 600 bp, Chicken  19866894283529_1
actagattactatacctttaatttgatttcagcacacagctttccatacaatatttggcgttaatatgaaaaatgcaaatggcataaaatggaaaaattggacactgagaaatttggatttactatgcaaaaatagaaaagtatgttatatgtgaaaatacacagtttgaaggacaaaagacatctctgaaatactatcaaaatcagtcaacttttttgaccccatcagatcccaaatcagtaaagaattgcttattatgatcacgtgtgactacatatccatatatgtattcttctcayattttatcaaatattcaaaatattcagaatattttcatgtgtcttcctccaaagagagaaaaaagaaaacatcctggatgcattcagtgttatgaatcrcaattatctgtgttgtaaaagagtgttataagttattgctcttgtccccacatatactttctccttcttcggtgctgatttatttctgccaatagcatatgagcctaatccaaaatccactgaagccaaagtcagattagtgacttcaatggagtttgcacaccagaggaaaaatcagtggattttggttgaggtaaaggg

SEQ ID NO: 44585 - DNA, 557 bp, Chicken  19866894283529_2
ggacactgagaaatttggatttactatgcaaaaatagaaaagtatgttatatgtgaaaatacacagtttgaaggacaaaagacatctctgaaatactatcaaaatcagtcaacttttttgaccccatcagatcccaaatcagtaaagaattgcttattatgatcacgtgtgactacatatccatatatgtattcttctcayattttatcaaatattcaaaatattcagaatattttcatgtgtcttcctccaaagagagaaaaaagaaaacatcctggatgcattcagtgttatgaatcrcaattatctgtgttgtaaaagagtgttataagttattgctcttgtccccacatatactttctccttcttcggtgctgatttatttctgccaatagcatatgagcctaatccaaaatccactgaagccaaagtcagattagtgacttcaatggagtttgcacaccagaggaaaaatcagtggattttggttgaggtaaaggggaaaatttgacttttttcatcaacacaaaactttcactttagtgaaggatgggcag

SEQ ID NO: 44586 - DNA, 600 bp, Chicken  19866894283535_1
ttctcaaatatgaaaaataacttctacttgccccccaaaaatgtcctcaaattctataatttagactttaaaaacatcataagggaagaggacatacggaaaatatctcaatttttattgttttgaaaaagatggaaacatcagtttaaaaatgagccagcattttccccactgttaggaagaattctgtaatgctttctacaaggcggtttagtctgaaagatgtgtcaccaaatatccaagctgacaagaaaatggtgaagaaacctggatattgctgacaaaccacagatgcttccytctttttcagagttatcactcacccaaatttaggaccagagatgacactcatacaaatgaacagtatttctgaattacatgatgtttctttccctgcttgacagtctctctgtgggtaagataagccccagtcactctgctctacttaagtttttgggtcatatgctcttctgactccaaaatgaatcagtacattttatctcctaaaaatgtcattaggttctcttactttgttatgaaaccagtaatattctctgtttcataacaagactgcagaagataactgagtcaatttctgat

SEQ ID NO: 44587 - DNA, 600 bp, Chicken  19866894283535_2
ataagccccagtcactctgctctacttaagtttttgggtcatatgctcttctgactccaaaatgaatcagtacattttatctcctaaaaatgtcattaggttctcttactttgttatgaaaccagtaatattctctgtttcataacaagactgcagaagataactgagtcaatttctgatgctgattgaaatgaattcctctgggaatgaatttttctggcacaaataatatttcctataaattttatcagtcttttcaagcaaataatttatattttacaatttatttaaagctgtatwtgatttattattatattatttatttaaaggctcattatttgcatctagaaaaagatacagctaaaagcatgctgataaactgcttctaatctctctgtaccaacctccttcagccccatacaaatcttctggtcaatgataaatttggcagctctgttttcagtattggctcaaactcagctgatttgaatgctctttttaaaccacaaatgagaacaacaactcctttacaaaatacatggtcactgttcactccaggctgcaagtatttagctgtaaaagggttaaatcccacttttg

SEQ ID NO: 44588 - DNA, 600 bp, Chicken  19866894283544_1
ctttggcttggaggctgctacagcagaagcagccttaagatagaaggagaatgccacttgcctgtgttctttggtgtagaagctaaggaggcacatacagatcataagcatctcaaacatccttgactacgtggtgtttatacagcgtgaaatgtgtgcaaggaaagctgttctttgtctgctaagtctacagagtaaagcattctgaagtcagaaaactgcatacagaggtaacagcaaaagcctggctcttctcagctagtgtattgtgttaaccagatgtcaggttctttgggacaytatcacctcaattcttgttttggctcttactgtggggtttcttgcaggtgaaatgaagactgtttaattcatacygctgaacacactgtgttacagagggcagattcctctgtagggacattggtcacgcttttgtttaaggattcacttgtccctgtcaggctgctggcagtcagcagtgcccaggagcactgagctggagttggtttggagcttttctgcaattctgttcaggtttgaaacttttccctttccttctttgtgtcatcagcaaagtctgtgatcgtataacatctatga

SEQ ID NO: 44589 - DNA, 600 bp, Chicken  19866894283544_2
gtagaagctaaggaggcacatacagatcataagcatctcaaacatccttgactacgtggtgtttatacagcgtgaaatgtgtgcaaggaaagctgttctttgtctgctaagtctacagagtaaagcattctgaagtcagaaaactgcatacagaggtaacagcaaaagcctggctcttctcagctagtgtattgtgttaaccagatgtcaggttctttgggacaytatcacctcaattcttgttttggctcttactgtggggtttcttgcaggtgaaatgaagactgtttaattcatacygctgaacacactgtgttacagagggcagattcctctgtagggacattggtcacgcttttgtttaaggattcacttgtccctgtcaggctgctggcagtcagcagtgcccaggagcactgagctggagttggtttggagcttttctgcaattctgttcaggtttgaaacttttccctttccttctttgtgtcatcagcaaagtctgtgatcgtataacatctatgagcagtaagcatgctgctgcaggcaccccacagcacccacaccaagcaggcactcattgtaatgctgctcgtggat

SEQ ID NO: 44590 - DNA, 599 bp, Chicken  19866894283551_1
  misc_feature (1)..(78): n is any nucleotide
nnnnnnnnnnnnnnnnnnnnnnnnnnnnnnnnnnnnnnnnnnnnnnnnnnnnnnnnnnnnnnnnnnnnnnnnnnnnnntacatttcaatatcattacaaatcctagtgttattcaaattacatcaattattcaatttctacgcgaagtcgggctgcacaatggctgctcagcactgctccagcccttccgaaaggatttacaattcagatgggatccatcggagtgccattaacctttactttgggcccccgataagaccaatgaattgattcagagatgctttcaaattcattcggggrgaacagtttgcggtggggaattgcgtgaaccaactttctgttggctttggtggcaattttttgcccctttttgctttgctgctcccattggccccatggaaatccccattgaacccactgaggcccccactggccccactgagatccccaccgaccccattgggatccccattggccccactgggatacccattgacccaactgagatccctgttggccccattgagatccccattgaccccattgggatccctgttggccgcagtgagatccccattggccccactgagatccccatt

SEQ ID NO: 44591 - DNA, 600 bp, Chicken  19866894283552_1
acccagtcctgatttcaggatgccaaatctctaaccttctcacatgtaggcatctaatccatgctaaacaggaaggcttcctctatccccaaggagagagggagagatcacaacacagcggttcaacttgactctggagaaatctttctccatggaccagacacatcttgctgactaccctggaggggttcctcacttcagatagaaaaagccaagggaaatgagctgtgtctgaacagtgtcacatgctggactcctgattccttcttctactctgatctcaccactgtacctgttggyttctgcaaacatttccctgcagggctgagctggccagcaccccacttgcaaggccacatcttatctcggatgtggtcttctatggaactgttacagggcctctctttgccccagggctgatggtccgtccagagacccaggcaggcatcatcatgctgctcactgccaaatcacatcttggaagttttccctgtacattttattttcttaatgattctgacatgattaatatcaagtctcaaagttcagggtgagagctttcagaaaataaaaatagaacagcgatatgtgagctgacaa

SEQ ID NO: 44592 - DNA, 595 bp, Chicken  19866894283557_1
tacaaataagatggacagtggaaagaaaaacctttgtgctttaagcacatctgtggtttaactcaattttatttgaaagccttaacgaataggctttctattaggtgacatgcaaaacagatacacatgcttttccagtgtgatatttgcatacacattgtttgtatttccaatatcaaatcttggtctgtagctattttaaattccagctcaagacactctaaattacgttatatatccatgttggtgttacacaactgacagataaaaatgtgcacattgaaaagctaaggtgattakttctttgagcaaaactgaattctcacttttgttgtagaaaatgctattactggaaaatgccacactaagtgcagaaaaataagcctgtttatggcaacttagtttgtgtctgagtctcattattgtactttttaaatactgtaagatgctctaccatttacaaaggaaccatttcttttaataccctaaaagtggtgacgtttctgattcaggtagaaagatcagatagattttataggaactggcattccagtagaagtagatatgaagtagaaatgcaacttgtgcataacat

SEQ ID NO: 44593 - DNA, 600 bp, Chicken  19866894283561_1
gattactcaccaggtctgaatttccatagcttaccagtgaggaaatggctgtgattgaagtcagtggaattataaataactgttgcatttctcagcactgattggtggatagcattccgtggctgaggaatgttttgtggttctccatgctctgaaataacattgcctaagaagcttccctttggttttggcctgtgcgtgttacacagatgcacagttaaggtcccactaatatctggctgatgtattaaatcccacatttgcagaatgcaaggtttgttcagctctgggaggcttgaytgggaaggtctctgctgagacccttagagtagatggagacctctactgcacagatttcccagctcagaatcagtcaaacagagcaaaggcattaattgtctgagtaggatggcaggtgctaatttaagggctaataaaaatttaataaaagacaaaaatggcaaatgatgaaaatttagattgaagagatgggaagttttcctcctttctttcctgttggtcttccagtctgcgatgatcacacctttcattttggtgtagcctttatggaggggggaygtgttcctcccagascatcct

SEQ ID NO: 44594 - DNA, 600 bp, Chicken  19866894283561_2
ttcagctctgggaggcttgaytgggaaggtctctgctgagacccttagagtagatggagacctctactgcacagatttcccagctcagaatcagtcaaacagagcaaaggcattaattgtctgagtaggatggcaggtgctaatttaagggctaataaaaatttaataaaagacaaaaatggcaaatgatgaaaatttagattgaagagatgggaagttttcctcctttctttcctgttggtcttccagtctgcgatgatcacacctttcattttggtgtagcctttatggaggggggaygtgttcctcccagascatcctgtaagctttacagtggtaaaaatgggcttgggggtgattttctgcccgaaagagcaggttgcatgttatgcctctgtgataaggaatcgccttaggatgactgattggcagcgcatttttgcacgcacacttttaggggggtggaatttggaagttttcctatgtgtctcggagctcagtttgatgagcaagcaaagaaagctggatgaatgaaggctaacctgaatgttgctcccttattaaaacagctagtgcatttcacacacttgcccaatctat

SEQ ID NO: 44595 - DNA, 600 bp, Chicken  19866894283561_3
cttgaytgggaaggtctctgctgagacccttagagtagatggagacctctactgcacagatttcccagctcagaatcagtcaaacagagcaaaggcattaattgtctgagtaggatggcaggtgctaatttaagggctaataaaaatttaataaaagacaaaaatggcaaatgatgaaaatttagattgaagagatgggaagttttcctcctttctttcctgttggtcttccagtctgcgatgatcacacctttcattttggtgtagcctttatggaggggggaygtgttcctcccagascatcctgtaagctttacagtggtaaaaatgggcttgggggtgattttctgcccgaaagagcaggttgcatgttatgcctctgtgataaggaatcgccttaggatgactgattggcagcgcatttttgcacgcacacttttaggggggtggaatttggaagttttcctatgtgtctcggagctcagtttgatgagcaagcaaagaaagctggatgaatgaaggctaacctgaatgttgctcccttattaaaacagctagtgcatttcacacacttgcccaatctatctctgttgcattttg

SEQ ID NO: 44596 - DNA, 600 bp, Chicken  19866894283563_1
attactaaatggtgtatttaatgaggaagaatctgcaaagtcttttcaggaagctttgattcaatggagaaatggtaatcatgatcacagacgagaacagcatgctggtgaggttctacctagtatgatttctttgttgtttgaattgcatcttaaaaatagtagccgtttggataagttagcagctattttaggtagcaaggataggtattctgctagaataacaaatgtttacttgttcctctgcattctagtgtaaattagcaacaacctatgaagtcttatggctaccaccactgytgaaaatattgygcaatsactggttttaacatctcatgcacccttctgagaattaatagcaatcatatgtgacaggctttacaggtgtgacgagcaatgtgtcatacatcattaggtacaaggaatgcttgtatgtgttgctgctaatctgtagaaaacttctgtgtattttacaatctgagattactttttaatttccttttagtaataggaagagaagctaggtaaccattagctgtatgatcctatctaaacctatataaaaccagtgttttccacaagttctgacagcgtgaattc

SEQ ID NO: 44597 - DNA, 600 bp, Chicken  19866894283563_2
tgtatttaatgaggaagaatctgcaaagtcttttcaggaagctttgattcaatggagaaatggtaatcatgatcacagacgagaacagcatgctggtgaggttctacctagtatgatttctttgttgtttgaattgcatcttaaaaatagtagccgtttggataagttagcagctattttaggtagcaaggataggtattctgctagaataacaaatgtttacttgttcctctgcattctagtgtaaattagcaacaacctatgaagtcttatggctaccaccactgytgaaaatattgygcaatsactggttttaacatctcatgcacccttctgagaattaatagcaatcatatgtgacaggctttacaggtgtgacgagcaatgtgtcatacatcattaggtacaaggaatgcttgtatgtgttgctgctaatctgtagaaaacttctgtgtattttacaatctgagattactttttaatttccttttagtaataggaagagaagctaggtaaccattagctgtatgatcctatctaaacctatataaaaccagtgttttccacaagttctgacagcgtgaattccttctggctgaa

SEQ ID NO: 44598 - DNA, 600 bp, Chicken  19866894283563_3
taatgaggaagaatctgcaaagtcttttcaggaagctttgattcaatggagaaatggtaatcatgatcacagacgagaacagcatgctggtgaggttctacctagtatgatttctttgttgtttgaattgcatcttaaaaatagtagccgtttggataagttagcagctattttaggtagcaaggataggtattctgctagaataacaaatgtttacttgttcctctgcattctagtgtaaattagcaacaacctatgaagtcttatggctaccaccactgytgaaaatattgygcaatsactggttttaacatctcatgcacccttctgagaattaatagcaatcatatgtgacaggctttacaggtgtgacgagcaatgtgtcatacatcattaggtacaaggaatgcttgtatgtgttgctgctaatctgtagaaaacttctgtgtattttacaatctgagattactttttaatttccttttagtaataggaagagaagctaggtaaccattagctgtatgatcctatctaaacctatataaaaccagtgttttccacaagttctgacagcgtgaattccttctggctgaattcagt

SEQ ID NO: 44599 - DNA, 599 bp, Chicken  19866894283565_1
  misc_feature (1)..(86): n is any nucleotide
nnnnnnnnnnnnnnnnnnnnnnnnnnnnnnnnnnnnnnnnnnnnnnnnnnnnnnnnnnnnnnnnnnnnnnnnnnnnnnnnnnnnnnaacctgctttttgtttttctcaaaggactttaggctgacctcacataatgctgctttggaagtaggtggatgctgaagctgtaaaatacctatcatgcttcaacagaaacatgcattctgtttgaggaggtacttagtcaggcttcctgtggagataaggcataagctatttttcactgcttgtcttcctcctcttttctgtgctctctccatractttctagttgaatgtagcagaaaggtaggggtctcaaggcaacagtgtttttacgtatgtaataaaaaatgaaagagcaaggataggagaaatcctgctagaaccaggctacacagatctcaattattgttaggcatcagcgaatcccggtgggtgagagatgtaatggacacccacttgtgggaaaggcttcagtttgagcctgtatctcctgggccaggtgccagtcagaagacatgtatgtaggaaaccaggcctccttaatgttagtatttgcaaagatgcttgttttcaaat

SEQ ID NO: 44600 - DNA, 600 bp, Chicken  19866894283569_1
tcatgaaaaagttactgcctatgcacagcaaaaggggaatggctgattcaagtcccacatggtagtcaccttccttccttgttagcataacatttattgttttcacaatgtctgcttctgtgatgacagaaaccaccatttactgtgctcccagcaactttcactgtaacctctgcaagggtgttagggcaggttctatgagctaactgttcaacagagagctctcagaatgcctccagctgccaaccaaccttgggactactcaccagctgtatggtaactgtccctctgcactatatwagcagagcaactggttaggagttttctgactgaacaggcaagagtttcttattaaaagagaagttcaaataaggccttttcttgcttgctagcaaccagtttgttagaaaagagcatgcttggacatccaggaatcccaaaggtatggatgacccaactactatgtacagatttttcatcgcacagtattttcccacaaggcagacacctctttttcgccagctctgctcacttttttcatatatctacaattatgttatgcttgtacgatagaaaagtacaaccatcctcatgttacac

SEQ ID NO: 44601 - DNA, 600 bp, Chicken  19866894283572_1
ccaatatttaaacagagtcacagtgaaaacctttgagatgaagagccagtttgtaaacctggcatccgcagaaataaatctagtgggtactgtaataacacatacaaatctctggacacttgtctacactacagagtttttaatggcagtcctaactttcatgaatgcttcaggtttttgtgttttgtttctttaatgtagaacattgtctacactgtgctaagggcatagcccatgttagtgagctgctgtatcacttctgggtttgtatcttcattgcttctccagcaggagtttccygagccctggataattcaacatatgcagcaakcagtgtttgcaaaaagtcttgaaatactaatctaggctgaggtatcaaagctgacatggatttggaggccagaaagaaccaggagagtcatagaagtggtatttcagtagtaaagagatatcacaggcaagtaggaggccactgttttagagtgaaacagggaacaacataaaaagtagatgtgaaaaggaattatgaatggagccccataggaagccttgcctcagctattcatcacttttagaaatgtaccacaaaaggaaaaagga

SEQ ID NO: 44602 - DNA, 600 bp, Chicken  19866894283572_2
tttgagatgaagagccagtttgtaaacctggcatccgcagaaataaatctagtgggtactgtaataacacatacaaatctctggacacttgtctacactacagagtttttaatggcagtcctaactttcatgaatgcttcaggtttttgtgttttgtttctttaatgtagaacattgtctacactgtgctaagggcatagcccatgttagtgagctgctgtatcacttctgggtttgtatcttcattgcttctccagcaggagtttccygagccctggataattcaacatatgcagcaakcagtgtttgcaaaaagtcttgaaatactaatctaggctgaggtatcaaagctgacatggatttggaggccagaaagaaccaggagagtcatagaagtggtatttcagtagtaaagagatatcacaggcaagtaggaggccactgttttagagtgaaacagggaacaacataaaaagtagatgtgaaaaggaattatgaatggagccccataggaagccttgcctcagctattcatcacttttagaaatgtaccacaaaaggaaaaaggagtgagatgaaagagttttctgctgatgctga

SEQ ID NO: 44603 - DNA, 600 bp, Chicken  19866894283573_1
ttatcaggaggattgaactattgttcactcctggtggcactacaatgagttatattcatttctgaagttctgatagcgatcagaaacatctccatcagtgttgtagagggatattttacaaacaattaataacatttactgaagttctctgtgtgaagtatgataacttcattttaatgaagaagtgaacccagcaatccatcttgttctcttcagtgtgctttcagcacagaactcaccagagccatgaagttaagaggctgtggtgttaatttctggattattgtccctttttcatamagttggcatcattttaccaccacctgggcatatgtttcagaacataaatcttccaaagaagatgtatcaaggtttgtaagtcatttggactctaaaacacatacatggttacactacagckgatgggaaatcaaactggactaagaytgcaaggttgttagtcatgtaagatgtcctagattcagagagtcattcttgaaatacctcwaagacctttcctagaaaggacaaatgcttgccatgttccaaattgagtgtacaatactgtgattgcctacaggaagggcagccctgcaccta

SEQ ID NO: 44604 - DNA, 600 bp, Chicken  19866894283573_2
acaattaataacatttactgaagttctctgtgtgaagtatgataacttcattttaatgaagaagtgaacccagcaatccatcttgttctcttcagtgtgctttcagcacagaactcaccagagccatgaagttaagaggctgtggtgttaatttctggattattgtccctttttcatamagttggcatcattttaccaccacctgggcatatgtttcagaacataaatcttccaaagaagatgtatcaaggtttgtaagtcatttggactctaaaacacatacatggttacactacagckgatgggaaatcaaactggactaagaytgcaaggttgttagtcatgtaagatgtcctagattcagagagtcattcttgaaatacctcwaagacctttcctagaaaggacaaatgcttgccatgttccaaattgagtgtacaatactgtgattgcctacaggaagggcagccctgcacctactctggcttgttgcagtgagcagcattaccaactgccataacaaagcttgaccaatgacaccttgcataaccaagcctgagttttgcagaggcatttgtacaccaatttgtacacaagagc

SEQ ID NO: 44605 - DNA, 600 bp, Chicken  19866894283573_3
tctgtgtgaagtatgataacttcattttaatgaagaagtgaacccagcaatccatcttgttctcttcagtgtgctttcagcacagaactcaccagagccatgaagttaagaggctgtggtgttaatttctggattattgtccctttttcatamagttggcatcattttaccaccacctgggcatatgtttcagaacataaatcttccaaagaagatgtatcaaggtttgtaagtcatttggactctaaaacacatacatggttacactacagckgatgggaaatcaaactggactaagaytgcaaggttgttagtcatgtaagatgtcctagattcagagagtcattcttgaaatacctcwaagacctttcctagaaaggacaaatgcttgccatgttccaaattgagtgtacaatactgtgattgcctacaggaagggcagccctgcacctactctggcttgttgcagtgagcagcattaccaactgccataacaaagcttgaccaatgacaccttgcataaccaagcctgagttttgcagaggcatttgtacaccaatttgtacacaagagcaaaaacagaaagagaataaacagtaa

SEQ ID NO: 44606 - DNA, 585 bp, Chicken  19866894283573_4
ctcttcagtgtgctttcagcacagaactcaccagagccatgaagttaagaggctgtggtgttaatttctggattattgtccctttttcatamagttggcatcattttaccaccacctgggcatatgtttcagaacataaatcttccaaagaagatgtatcaaggtttgtaagtcatttggactctaaaacacatacatggttacactacagckgatgggaaatcaaactggactaagaytgcaaggttgttagtcatgtaagatgtcctagattcagagagtcattcttgaaatacctcwaagacctttcctagaaaggacaaatgcttgccatgttccaaattgagtgtacaatactgtgattgcctacaggaagggcagccctgcacctactctggcttgttgcagtgagcagcattaccaactgccataacaaagcttgaccaatgacaccttgcataaccaagcctgagttttgcagaggcatttgtacaccaatttgtacacaagagcaaaaacagaaagagaataaacagtaacaaaggagggaagatttacgctggatgtagggggggaagtttttta

SEQ ID NO: 44607 - DNA, 600 bp, Chicken  19866894283575_1
tgggcagcgtttcagggtggagagaattaatcaccatgctgttccaaacattctcatgcaacagcacaaagtgttgtttccttttcctttcagggaatcactgacaaaatataaagaacagtgtttgcttaaagagtccttcctgctgctgcattttatggccaggtcagctcctggctccctcagcacactgatatgcagccatacacatccaccaatggatatgccaatgccctagtgccagcctggctctgtgcatgcctcacacaacttcccggccacagaacatgattccttacycaaaacagcagatctgtgtcagggtggtggaaatagggtggtgaggacctcagctgccttccccccatccttggaagcggaagacaaagacaccacctattcccaatgcagtctgtctgccccatttaatcttgggagaaccacattttccatgcagtgaacaaaaacttctgcctccacttggccacagacagccaggaccttcaacctccaacctctttcttgcaaaactaaaactctcaaaactgtcataaaaactctgagaaagaagaaggaacacaataaaatgcctgcttacag

SEQ ID NO: 44608 - DNA, 599 bp, Chicken  19866894283577_1
  misc_feature (1)..(84): n is any nucleotide
nnnnnnnnnnnnnnnnnnnnnnnnnnnnnnnnnnnnnnnnnnnnnnnnnnnnnnnnnnnnnnnnnnnnnnnnnnnnnnnnnnnnggatttggtgctactttgatttagattttagagcaattgtcagcgtgtttctttgtttacctgaggagttgagcctttgtcagacactttacccacgtctagcaaataaagaagttgtgtgtaaaacagcagcatcttaccattcacttgtgccagttatgtggatgtttttagctgcactcagatttgttgccatttatacagattatttttttktgtgtgtgtgaatacatttaggtgaaaaatacccatttctaaacagtttttgttagcatacttcatacccacacaaatgttctgcattctcgtgaaggttagaattgggctggaattgtcttcagtcatttgaaaactaggctggtatttgacacgtgctcctagcaggcgttaagcactcattagcacatagaatgttctaattatgtatttcaaggagcaatactgtcaaggaagtcatagtcactgtgctttccccatcactgctgactgataggtgttcttttttcattcatagc

SEQ ID NO: 44609 - DNA, 600 bp, Chicken  19866894283577_2
catttaggtgaaaaatacccatttctaaacagtttttgttagcatacttcatacccacacaaatgttctgcattctcgtgaaggttagaattgggctggaattgtcttcagtcatttgaaaactaggctggtatttgacacgtgctcctagcaggcgttaagcactcattagcacatagaatgttctaattatgtatttcaaggagcaatactgtcaaggaagtcatagtcactgtgctttccccatcactgctgactgataggtgttcttttttcattcatagcattacgatctagtgrwctcagactagstaggaatgtgttgtccaggaaagagcactagctggctgtgtaagactgatagtaataatgttccagacccaggacagagtaagaaatcacagtaagtcactctggcatatatgagagagtaagcatgacaagggcaatgctgtgaactcgcattaggaatactgacagcacagccagaagtgagcaggttaggacagagagcatagtctgaagtaaaagattcttcttatttgggagcaaatgcttgttttgatagcagaatagatgcataatgaattttggccccaa

SEQ ID NO: 44610 - DNA, 600 bp, Chicken  19866894283577_3
atttaggtgaaaaatacccatttctaaacagtttttgttagcatacttcatacccacacaaatgttctgcattctcgtgaaggttagaattgggctggaattgtcttcagtcatttgaaaactaggctggtatttgacacgtgctcctagcaggcgttaagcactcattagcacatagaatgttctaattatgtatttcaaggagcaatactgtcaaggaagtcatagtcactgtgctttccccatcactgctgactgataggtgttcttttttcattcatagcattacgatctagtgrwctcagactagstaggaatgtgttgtccaggaaagagcactagctggctgtgtaagactgatagtaataatgttccagacccaggacagagtaagaaatcacagtaagtcactctggcatatatgagagagtaagcatgacaagggcaatgctgtgaactcgcattaggaatactgacagcacagccagaagtgagcaggttaggacagagagcatagtctgaagtaaaagattcttcttatttgggagcaaatgcttgttttgatagcagaatagatgcataatgaattttggccccaaa

SEQ ID NO: 44611 - DNA, 600 bp, Chicken  19866894283577_4
aaatacccatttctaaacagtttttgttagcatacttcatacccacacaaatgttctgcattctcgtgaaggttagaattgggctggaattgtcttcagtcatttgaaaactaggctggtatttgacacgtgctcctagcaggcgttaagcactcattagcacatagaatgttctaattatgtatttcaaggagcaatactgtcaaggaagtcatagtcactgtgctttccccatcactgctgactgataggtgttcttttttcattcatagcattacgatctagtgrwctcagactagstaggaatgtgttgtccaggaaagagcactagctggctgtgtaagactgatagtaataatgttccagacccaggacagagtaagaaatcacagtaagtcactctggcatatatgagagagtaagcatgacaagggcaatgctgtgaactcgcattaggaatactgacagcacagccagaagtgagcaggttaggacagagagcatagtctgaagtaaaagattcttcttatttgggagcaaatgcttgttttgatagcagaatagatgcataatgaattttggccccaaaagcctttcctg

SEQ ID NO: 44612 - DNA, 600 bp, Chicken  19866894283577_5
gcaggttaggacagagagcatagtctgaagtaaaagattcttcttatttgggagcaaatgcttgttttgatagcagaatagatgcataatgaattttggccccaaaagcctttcctgcctgtgatcctgaatgaccacactctttgctaatgtaatcctcgcgctgtgtccttgactcttatgtcagaaggtttatacattttctgctagcacagatgagctattaattctagtgaagtggaagagaatttccttatagggaattgaggatagaatagtatggataggatgagaagagaytgttgtagaacactaatatgtttttagccagaaatagaactgatcctacctatcattagctgtctgccagtgctgtggtggatgtaatgctactttagatggcacttcgagttagcaatactcagatggcagcaacatgagaaggtgtgcacagtgaattttgctgtctatggttcttgtgccaagcaaagcttagtgtcacatctgtgtgacacctctgaactgtgcttctgtatgcagtaatttctgctgatgtttctctctgatgctttgccctgttcatgcttcagcagaagcgat

SEQ ID NO: 44613 - DNA, 599 bp, Chicken  19866894283587_1
  misc_feature (1)..(45): n is any nucleotide
nnnnnnnnnnnnnnnnnnnnnnnnnnnnnnnnnnnnnnnnnnnnnccttccccacccccggcaccccctgaccctgctgtctctttgcagacgtggatgagtgcgccctggggctcgatgactgccacccggatgccatttgccagaacaccccccaagctgtacaagtgcatgtgcaaggtcggctacaccggcgaagggaagaaatgcgaaggtaacgtgacagaagctctgagtccgcggtgccatctctctccctccctgtaaggttctgaggtgttttacagagctacctgaatrtgtgagaaacgtttcctgctagcagcatagaggcagaatgtgggtatgataagcagtttgctgtgatcataygggctgtcaatcaacttgagctgtgctgtgatgggccgtgacagcaacctggtgataaagtattctgacttytccttgtgtgctgtccccttttagtcgtgccatctcactcctgcctgctgcagggagcccagaaagcagcctctractgttcagagggccttcaggcggagctttccgctatcccttcatcaggcagccttgcaaagatgagattaccagaactt

SEQ ID NO: 44614 - DNA, 600 bp, Chicken  19866894283587_2
cctgctgtctctttgcagacgtggatgagtgcgccctggggctcgatgactgccacccggatgccatttgccagaacaccccccaagctgtacaagtgcatgtgcaaggtcggctacaccggcgaagggaagaaatgcgaaggtaacgtgacagaagctctgagtccgcggtgccatctctctccctccctgtaaggttctgaggtgttttacagagctacctgaatrtgtgagaaacgtttcctgctagcagcatagaggcagaatgtgggtatgataagcagtttgctgtgatcataygggctgtcaatcaacttgagctgtgctgtgatgggccgtgacagcaacctggtgataaagtattctgacttytccttgtgtgctgtccccttttagtcgtgccatctcactcctgcctgctgcagggagcccagaaagcagcctctractgttcagagggccttcaggcggagctttccgctatcccttcatcaggcagccttgcaaagatgagattaccagaacttactatgacgttacgtgtgaaagcatgagaaattcctaaggcaaaacaggaaattaaaaaaacgtatcttaaaa

SEQ ID NO: 44615 - DNA, 591 bp, Chicken  19866894283587_3
agaacaccccccaagctgtacaagtgcatgtgcaaggtcggctacaccggcgaagggaagaaatgcgaaggtaacgtgacagaagctctgagtccgcggtgccatctctctccctccctgtaaggttctgaggtgttttacagagctacctgaatrtgtgagaaacgtttcctgctagcagcatagaggcagaatgtgggtatgataagcagtttgctgtgatcataygggctgtcaatcaacttgagctgtgctgtgatgggccgtgacagcaacctggtgataaagtattctgacttytccttgtgtgctgtccccttttagtcgtgccatctcactcctgcctgctgcagggagcccagaaagcagcctctractgttcagagggccttcaggcggagctttccgctatcccttcatcaggcagccttgcaaagatgagattaccagaacttactatgacgttacgtgtgaaagcatgagaaattcctaaggcaaaacaggaaattaaaaaaacgtatcttaaaacaaggtggatgacttattcttcaggatgagcctaaaatcggaatacctcctctgtttcttgat

SEQ ID NO: 44616 - DNA, 516 bp, Chicken  19866894283587_4
gtgacagaagctctgagtccgcggtgccatctctctccctccctgtaaggttctgaggtgttttacagagctacctgaatrtgtgagaaacgtttcctgctagcagcatagaggcagaatgtgggtatgataagcagtttgctgtgatcataygggctgtcaatcaacttgagctgtgctgtgatgggccgtgacagcaacctggtgataaagtattctgacttytccttgtgtgctgtccccttttagtcgtgccatctcactcctgcctgctgcagggagcccagaaagcagcctctractgttcagagggccttcaggcggagctttccgctatcccttcatcaggcagccttgcaaagatgagattaccagaacttactatgacgttacgtgtgaaagcatgagaaattcctaaggcaaaacaggaaattaaaaaaacgtatcttaaaacaaggtggatgacttattcttcaggatgagcctaaaatcggaatacctcctctgtttcttgat

SEQ ID NO: 44617 - DNA, 600 bp, Chicken  19866894283590_1
tgatgttgcaatagcaaagttgaggaggagaagcatggttcttctccagtcctaggaaaaagtctttcagtggtaattgattcaaaatactattctcccttctttcttctgcccatttgtcattagcagcccttcatcttgcaggcaaggcactcagcattacggatgtctggcacctgaattgttcagtgcaaggagataagtagtggttagctgttagcagtatccatttcagcttgtaggagttctgagtgatctaggactagcatgtatattaatgtcatcattttttggtaagakgaaatcttacttattataaatgctattaacgggtgaatattcaatgctggctggagcatacatcatttccgtctcttattcttagaatgtaattgtrgtagcatgtgagaattttagttgggagacgctgggtactgaagcatcagaatggagtccaaattgcctccttacaatggaaagttgatagctgagcagaaatttgaggctatttgaaattcagaaatgtgtgcwgtgctgtgcaagatctaactagagcattttgtcargtagcctctttccagttgttggtactgtctgaag

SEQ ID NO: 44618 - DNA, 600 bp, Chicken  19866894283590_2
ccttctttcttctgcccatttgtcattagcagcccttcatcttgcaggcaaggcactcagcattacggatgtctggcacctgaattgttcagtgcaaggagataagtagtggttagctgttagcagtatccatttcagcttgtaggagttctgagtgatctaggactagcatgtatattaatgtcatcattttttggtaagakgaaatcttacttattataaatgctattaacgggtgaatattcaatgctggctggagcatacatcatttccgtctcttattcttagaatgtaattgtrgtagcatgtgagaattttagttgggagacgctgggtactgaagcatcagaatggagtccaaattgcctccttacaatggaaagttgatagctgagcagaaatttgaggctatttgaaattcagaaatgtgtgcwgtgctgtgcaagatctaactagagcattttgtcargtagcctctttccagttgttggtactgtctgaagttctttggagggataaactttatctgatggatttctggtggatttcgaatcccagtgtgctgatgggagttttattcaaataactttgcatagaagt

SEQ ID NO: 44619 - DNA, 600 bp, Chicken  19866894283590_3
tcagcttgtaggagttctgagtgatctaggactagcatgtatattaatgtcatcattttttggtaagakgaaatcttacttattataaatgctattaacgggtgaatattcaatgctggctggagcatacatcatttccgtctcttattcttagaatgtaattgtrgtagcatgtgagaattttagttgggagacgctgggtactgaagcatcagaatggagtccaaattgcctccttacaatggaaagttgatagctgagcagaaatttgaggctatttgaaattcagaaatgtgtgcwgtgctgtgcaagatctaactagagcattttgtcargtagcctctttccagttgttggtactgtctgaagttctttggagggataaactttatctgatggatttctggtggatttcgaatcccagtgtgctgatgggagttttattcaaataactttgcatagaagtggtgctccacagcgagcatttaaatgttatgagtagtgaattgtgtgactgtaatgcaaaaataaataatcttttgttatataataatcatatccctttgaagatagagaatacatgtcctgatttacagctgt

SEQ ID NO: 44620 - DNA, 600 bp, Chicken  19866894283590_4
catgtatattaatgtcatcattttttggtaagakgaaatcttacttattataaatgctattaacgggtgaatattcaatgctggctggagcatacatcatttccgtctcttattcttagaatgtaattgtrgtagcatgtgagaattttagttgggagacgctgggtactgaagcatcagaatggagtccaaattgcctccttacaatggaaagttgatagctgagcagaaatttgaggctatttgaaattcagaaatgtgtgcwgtgctgtgcaagatctaactagagcattttgtcargtagcctctttccagttgttggtactgtctgaagttctttggagggataaactttatctgatggatttctggtggatttcgaatcccagtgtgctgatgggagttttattcaaataactttgcatagaagtggtgctccacagcgagcatttaaatgttatgagtagtgaattgtgtgactgtaatgcaaaaataaataatcttttgttatataataatcatatccctttgaagatagagaatacatgtcctgatttacagctgtaattaacttattgcataagaatgtaagaatgattt

SEQ ID NO: 44621 - DNA, 600 bp, Chicken  19866894283594_1
ttggctgaataaaaagcataactgaattctccttaaaaaaaaataatcacacaaatctgcagtgccactcatcattaagaggagttggacaaggcactttcacagagatccattctgtgacagacaatggaatggagaaggaaaggaagaaaaaagatggtgagttgtgttgcagggcagtgttaacaaccacagcaagcagatatgtgaatacaggtaggcagacagcaaacagatactcccatgttaactgtaggaaaaggatattaagtaatgactaagaagacccgggctccaaaygatgtaaaaacaattccatccaatacaaaacacagcatttgaactgtggaaaacaactgaagttactttccttataaacggatccatattaaaayattaacacatcaaaataaccagaaaagcaggagatgcaggatacaattcacttctctaacactatgggaaaaagaaaaagccactgaacatccacagaggatgcaaagtgaagggggaaagtactgaagaccctctgttatagctcagcctgtagctgcacatcactctgcttagggccagaaggttgcttcctcagttctgcaa

SEQ ID NO: 44622 - DNA, 600 bp, Chicken  19866894283594_2
actttcacagagatccattctgtgacagacaatggaatggagaaggaaaggaagaaaaaagatggtgagttgtgttgcagggcagtgttaacaaccacagcaagcagatatgtgaatacaggtaggcagacagcaaacagatactcccatgttaactgtaggaaaaggatattaagtaatgactaagaagacccgggctccaaaygatgtaaaaacaattccatccaatacaaaacacagcatttgaactgtggaaaacaactgaagttactttccttataaacggatccatattaaaayattaacacatcaaaataaccagaaaagcaggagatgcaggatacaattcacttctctaacactatgggaaaaagaaaaagccactgaacatccacagaggatgcaaagtgaagggggaaagtactgaagaccctctgttatagctcagcctgtagctgcacatcactctgcttagggccagaaggttgcttcctcagttctgcaaagtgctagtgttcaggactgagaaacaaagggtgtgagctacagtgcaggctcacttagagccaacagggaactggccatgggctatatgcaggt

SEQ ID NO: 44623 - DNA, 600 bp, Chicken  19866894283597_1
tttcgcagtggtgccaccctgaatccaaggccatttgatcagctctcccagggctggtagaggggatgtttttggtgatatcagtaaaggcagatacaaaccagaacaccaaagactccttgcagagctgttctcctgatatggtggtagcagaactcaattcaagcaggtgagactgtgccattgcactgctggctgcgctgaaatcctacagctaatggacaaacagtgttaattaaattcccagagcaccatctttaattaacccctctgctgtccctgtgcctagaagctgttccwgcctagcaccaggaagatcacgttgctggtggccaccagctgactgaggtggcattgaacctgtctgggtgcaggacctggcaggccatctcactctcagtaccagggggtgcctgctgaaagcattttttgggatgtaccagagaaactgtctcactgcaagttagcttttctgtgcacaccagctacattgcctccagtagagctatgaccatggaggacctcattttctctatgttccttaatgtacatctacaatgtactacagccctgcatccattacaaataaattgggaaggt

SEQ ID NO: 44624 - DNA, 600 bp, Chicken  19866894283600_1
caagcagtctttgtactcatggctccatagggaaaaaaaaaaattgatttcatgccatatgaagacatataaataggaaggcctgtttccttggaggatataattctattttatctggagagaatatttcatcctcacaatatcacagattgctctaaatgttatcttgcactttgtgtgtttgtttttgtcttgtgtctttttgttgatgattatgttcttgagaggttattgtgtgtatatatctcatttatgcagtataaaaaatactgctagttttaattctgattgttaaacttycctgcttttactttggtttcctttaccttattcatttgtctcctttactttttgccttgtcacaagtcagatatttctgtaatcagtattaaaaatgtgctagtgtatgatatggataaggtcttgttccactcttttatccgaacacatagtctaaagaagttaatttaagtgaagatctacaagtgagtgtaactgttgttgtttcttgttcattcactctccctacctctcaagaacttctttacataatccaaggaaagatgttgtctgttgaattctaagttactgaccatcagc

SEQ ID NO: 44625 - DNA, 600 bp, Chicken  19866894283600_2
cactcttttatccgaacacatagtctaaagaagttaatttaagtgaagatctacaagtgagtgtaactgttgttgtttcttgttcattcactctccctacctctcaagaacttctttacataatccaaggaaagatgttgtctgttgaattctaagttactgaccatcagcttctgagccctcttaaccttagtataaacttcagacaattccttactctaaacccttaatttaattagaatgtagagagaaatgaaaatgaaataaaatatgtttttatatacttaatactattaatgkctctggaggtatttttgaagtaagtactacggtattttgtaacaacgtagatattttgaacactttcatttgttggtttaagaagataagggcgaattccaggcttcccctgcccctccaattttatttgcttacttatgaaacagaaatctttggaagagcgttctctcatgttttaatgtattagtccagaaagattttggagacacattcgatacaggcagaccgtgattgttaattgatctcttcccttctacagtgaacactttaaaatctgaattatttgaactattatagaat

SEQ ID NO: 44626 - DNA, 600 bp, Chicken  19866894283601_1
tggggggaggaggtcagagggggccctgtctgtgcagggtgaagaaatgcagaccaggaagcatcagcaggatgaggtgctgatggtctggatgcagcacatgggcacagggagggcacagggggctggatgctgtccgtggacatctaccctgccgcagacccagcccaagagttcgtgatggagctctgatcagacgttaacaaagagaccttctgctctggggtaatgaaacccagggtgacttctctatgcccggtgctgggggaggtgggaaagtagtgcactggcacagtgagraagggaacagggaaaagtctcctagtaaaaataagcagcttcaagtgtctcctcaattaggtaatggcatgcaggtgatgataggtttcaggactgtgaaggacagcctcttgctgtaagacctctgctgacactacagccaggagcagggcagggagacaggctcctccctggggatgctcctccctgaggatgctcttagaaacctccttccccatctgctcctccttccagctttatgccacccccagacggtttgggcagctccagcatcccctcctgcccacatgcttgctgcat

SEQ ID NO: 44627 - DNA, 600 bp, Chicken  19866894283603_1
ctccacaagcccctgtattctcccttgaaaggctgtcctgtctatgtcacaaaccttcacattcccattttccctagatggatccccagcacagctctctcctatatacaaacattactctagtgtatactgtattttcccctaacccatctaccaagccaaagccagttgttaatcactgctggatctgctctggtagccctccaagttctgcagtgtcttctcttacagctcatgagtttgcacttcccagccagctgcctcatccattccaaccatttatgtttcatgctgacaagratggaagtgcgtcagtagcattagaagtaaaaggcactttggtctggatgactgaatgttcatgaccaacagaataccacacatgggaggttcatatctctagaaacacacatacacattagcatctcaagtatttgcttcacccgcatgcagaaatcctacagcagcatctatttccactataccacacgcagacccctcatgttagaactggtcattttatttacatctctaaagagcatcttagatttcactcgagttattgttacacacaattttccagcttgtactacatgacga

SEQ ID NO: 44628 - DNA, 572 bp, Chicken  19866894283603_2
tggtctggatgactgaatgttcatgaccaacagaataccacacatgggaggttcatatctctagaaacacacatacacattagcatctcaagtatttgcttcacccgcatgcagaaatcctacagcagcatctatttccactataccacacgcagacccctcatgttagaactggtcattttatttacatctctaaagagcatcttagatttcactcgagttattgttacacacaattttccagcttgtactacatgacgaccttaccacatgaaacttagctttgatgaaagatcacamtgaatcttcctttgatagggaaattaagtcctctgaaggatacttctgggaagctctaacagacaggtcttcatctcttgtagttcctggatctgagtactctgcggaccacagtgtactgataaaatctcctckgctctttgaattgtgctcagagcttcagaaactgcaaatctgaaatagggaaagtgtataccaaataattaattcagctccctgaacttgcacaaacttcaaaccttcccaccccaagaagcctcaccctgttcatg

SEQ ID NO: 44629 - DNA, 437 bp, Chicken  19866894283603_3
ttccactataccacacgcagacccctcatgttagaactggtcattttatttacatctctaaagagcatcttagatttcactcgagttattgttacacacaattttccagcttgtactacatgacgaccttaccacatgaaacttagctttgatgaaagatcacamtgaatcttcctttgatagggaaattaagtcctctgaaggatacttctgggaagctctaacagacaggtcttcatctcttgtagttcctggatctgagtactctgcggaccacagtgtactgataaaatctcctckgctctttgaattgtgctcagagcttcagaaactgcaaatctgaaatagggaaagtgtataccaaataattaattcagctccctgaacttgcacaaacttcaaaccttcccaccccaagaagcctcaccctgttcatg

SEQ ID NO: 44630 - DNA, 600 bp, Chicken  19866894283609_1
aagaaaattctgttcagctcagatatcccaaggaatgccattccagaggcaaagctgtgtacttttgttacctggacaggtaggcaacattcccttttgcttattgcacaaagcagcgcacgttaaaaaggagcacttggggggactgttattcgtgcctggtgtaggactgtcctgcagtgatggctgtaaggcagcagcgcccaccaccccatcgcaggtctgctgctatgtggctgtgcaccttcttgcccagctgttggtttgtttgcttgtttggtaacctctgggtcgttcagrtgagaataatgcccaatttgcaggtgttaggattaaagaaacgttaattctttgcttgttcttgtcctccctgtgcagactgggacctgggtgtgtgcttgcactacgagtgtaagaggaagcagttatggaaacctgacatcttcaattcatggattgatctcaaagcaacatacagggtgagaaaagtcagtaggccgaaacgtggatcagtgttcagaagctaactgtatctcacctatgaggcagcactgtgttccggtgatcagagttacccaactgtttccataccgtgttact

SEQ ID NO: 44631 - DNA, 600 bp, Chicken  19866894283617_1
gcctacgttgtactgaaatgatagcaacaaagtacacaacaggggcatgaacacggcaaagatgtccaagcacttttcagcaaagaaattttttgtcaaaaaatgtcaacttgccaaagcaaaaagctatcattaccagatcagttttggtaacactcctttcggcaagagagcatcacatgtcagcctccctctggctatcagttaaggacatggaacaatgccaagaaatgagatggtcccatagccaaccaaacagcatacaagaactccagggacaggttttttcagcagaacctygtggcaaagagcccaagcactgccctcctcccccccacaccaagctggcagccaacaattctcctcagcttccttcagaagcacctctccgtgtcacagctgaccacagacacacctatgcatcattttaagagaagaaactggagggaaaagccaaacctggttcatctcagcctccattttttccccactagtaaacgtgaagtaagctttgcaagcaacaaaacctgttttcctttacttcagctatatcaaatatgttttccacgctttccaatatttcagtttctaagtcacaag

SEQ ID NO: 44632 - DNA, 600 bp, Chicken  19866894283620_1
tcccttataaatcacgagaagacatgactggaataattagctgttaaaaatcaattaaaattatctaaggtttaagccttagtccagctaagtcagtaggatatttgccattgtcttcattgatcatcatatgcaggttatgagatggatgagaaatggcatcgaggtcctttcctttctccttcaccctcactcagatttgcaagttttctctctttgcccaacaggctgttctcattagcagtttctctgtcccgttggcatcatttcccagcccaatagagccagagtggaacagcytggrgacaccttgattctccaactcctgcaataacactgacaagaattcagccaggctcaggactcagccccggtacattaagtcattaatactgttgggtcattatttgcagagaacctgcttcttctgagaataaggtgatatttttcagagccacagaatggaaaatacatcccactagcatcaatggaaattttgcaactagcttaaaaatgcccaagatattactgccaacattatcctgattattaaattgaccagaaagcgtacattctcaaaccagtactaaacttgaataa

SEQ ID NO: 44633 - DNA, 600 bp, Chicken  19866894283620_2
ttataaatcacgagaagacatgactggaataattagctgttaaaaatcaattaaaattatctaaggtttaagccttagtccagctaagtcagtaggatatttgccattgtcttcattgatcatcatatgcaggttatgagatggatgagaaatggcatcgaggtcctttcctttctccttcaccctcactcagatttgcaagttttctctctttgcccaacaggctgttctcattagcagtttctctgtcccgttggcatcatttcccagcccaatagagccagagtggaacagcytggrgacaccttgattctccaactcctgcaataacactgacaagaattcagccaggctcaggactcagccccggtacattaagtcattaatactgttgggtcattatttgcagagaacctgcttcttctgagaataaggtgatatttttcagagccacagaatggaaaatacatcccactagcatcaatggaaattttgcaactagcttaaaaatgcccaagatattactgccaacattatcctgattattaaattgaccagaaagcgtacattctcaaaccagtactaaacttgaataaaaaa

SEQ ID NO: 44634 - DNA, 600 bp, Chicken  19866894283624_1
tgttggttgccactagttcaggctttattagttggttccagaagctcggtgctcagaaagcaaaacaaagcgttacgtctcctgatagctgtgctgtgccgacagtacgttgtgcagctccaagtaattaaacacatcagttgttattcaccaggcttggaacgagctcaaatgctacccctctgactgggttgtgccatactatttaacttaataaattccatcgcagaagattattttgcaatgaaaacagatcatgttttcaaaaaattaaggctagcatatgatttacattttgcrgtataccttagaaagcaaatgtgttggtatttcaattgcattkaaagataaccaaaagaaaaaaaccaaagcaagatttcctattgtgccatttctaccctaccttgtgcattctttactccataggtaactgctaccaatgaagaacacatgtaaactcaccatccaaagaaagggagatagaaattaatttgcaaaaacaaaacaaaaaaagtcttagataagacagtaaacatgatactctaagaaaacacttcattaaaatgctatttctcatcagaacatagctgatgaccgtac

SEQ ID NO: 44635 - DNA, 600 bp, Chicken  19866894283624_2
gctcggtgctcagaaagcaaaacaaagcgttacgtctcctgatagctgtgctgtgccgacagtacgttgtgcagctccaagtaattaaacacatcagttgttattcaccaggcttggaacgagctcaaatgctacccctctgactgggttgtgccatactatttaacttaataaattccatcgcagaagattattttgcaatgaaaacagatcatgttttcaaaaaattaaggctagcatatgatttacattttgcrgtataccttagaaagcaaatgtgttggtatttcaattgcattkaaagataaccaaaagaaaaaaaccaaagcaagatttcctattgtgccatttctaccctaccttgtgcattctttactccataggtaactgctaccaatgaagaacacatgtaaactcaccatccaaagaaagggagatagaaattaatttgcaaaaacaaaacaaaaaaagtcttagataagacagtaaacatgatactctaagaaaacacttcattaaaatgctatttctcatcagaacatagctgatgaccgtacgttattaaactaagtgatctaaattgtataaacggtataacgt

SEQ ID NO: 44636 - DNA, 600 bp, Chicken  19866894283626_1
aaatgagttaacacatagcttgcaaccgctctggctgtattaatgttctgttctttatagcctaaaatctatatttggatactggtcgtcatgctttgcaccctaatttatcactgaattctctgctatttgtaattttaattaaaaattctataatcaatacaatgtgatattaatgtacatgaagaagggcttagaaataaaaaacatccgcttaattttcaaagatcagtttttagatttatcagctgaaactttcacattgaactatgtaaaccatgtctgctttaaacagaatcrttcatttatttgttaactttactcataggccactagttttacagctgtagatgtccacatttgcagttaaaaagggacagtgtataacaccaattgccttcacaaattttatctcacatttttctgtgtgtgcaggaagtatactatacaagaacttccttctttctactctaatagttttcttggctattattttaagacccatctactatactgttcagatgacaaagctggacgcaatatttcatagaggagtatatcaacttgaggagggttttcaaatatgtattgaaatgttgt

SEQ ID NO: 44637 - DNA, 600 bp, Chicken  19866894283629_1
ttacttacaccacactagctaatttttgattttgtaaaatgcaaaaataaattcagtgacattaatgaaaagatccacagctctttagattatattacttgggatcacctatgcatattggagatataaaatgtgaaaataatttaaagaatactattacagattttgcttcttcctttgcttctttttccagaaattaaattttgatcttccacttaaattaacatgaattcctttcacattcttccttgaatagtgtgtagtccaaatactgtataactaagaacaacagataatgtrtattttcaaaggcaagtgtttgaaagtcgtttttgtcagatagaatatgtttacagttcaaggtttagctggtatctgcaatttcattttttgtgaatttatttcatttatgaaagtatttatacaattgctaaattctgctgtgttacatgtatcttttatattttcaataaagttgtaaactcacatgatttktgtcatgttactaaacttttcaaaatttctaagcacatgaaaatacaataactccccaaaatatgcctcactggttatattttagttaaattaatatttaatgaa

SEQ ID NO: 44638 - DNA, 590 bp, Chicken  19866894283629_2
attaaattttgatcttccacttaaattaacatgaattcctttcacattcttccttgaatagtgtgtagtccaaatactgtataactaagaacaacagataatgtrtattttcaaaggcaagtgtttgaaagtcgtttttgtcagatagaatatgtttacagttcaaggtttagctggtatctgcaatttcattttttgtgaatttatttcatttatgaaagtatttatacaattgctaaattctgctgtgttacatgtatcttttatattttcaataaagttgtaaactcacatgatttktgtcatgttactaaacttttcaaaatttctaagcacatgaaaatacaataactccccaaaatatgcctcactggttatattttagttaaattaatatttaatgaatattgacagaatagtattaattccttaaaagagaaataaaaacataatttccatctcaaattttctgtgtattaagagcacaccagaaaatgctattagaagttctatttttatgatttttgaaaatttcctgagaaatagcatccttatatgctactgaccctttgcttaaagagaaatttcaa

SEQ ID NO: 44639 - DNA, 600 bp, Chicken  19866894283640_1
gctggaaaaagagaacaagtccataaacacctaacatgggtaatgctgtttagagagttgtttttaggggttttgagaaggacagaaagaaactggaggtgctcaaagccaggttggatgggaccctgggtagcctgatttagtggttgtcaaccctttccacagcaggggtttgcaactgggtggtctttaaggtcccttcttacccaaggcgttctatcattctgtgaaactcctccaaaatagcagagcatgaaatagaagtgctacctgcgagatgcttcttcccttggagggaargtgggcagtggtggactgcrgtgttggaacttgatgatctttgaggtcccttccaacccaagccgttctatgattcaytctatggcagtactttcyrccttctgaaagtgtactgaactcaactgttggccttgggatatcatttagtgtctgtactgaggtttggagccacggcttgtaatggagggcattacaaagcagctgggaccttggcagggtttctagctgggcaaagcacatctcagtgtaaggaggtacaagggtgctccaagcttctcagctctcatgatcccatcaccc

SEQ ID NO: 44640 - DNA, 600 bp, Chicken  19866894283640_2
ccataaacacctaacatgggtaatgctgtttagagagttgtttttaggggttttgagaaggacagaaagaaactggaggtgctcaaagccaggttggatgggaccctgggtagcctgatttagtggttgtcaaccctttccacagcaggggtttgcaactgggtggtctttaaggtcccttcttacccaaggcgttctatcattctgtgaaactcctccaaaatagcagagcatgaaatagaagtgctacctgcgagatgcttcttcccttggagggaargtgggcagtggtggactgcrgtgttggaacttgatgatctttgaggtcccttccaacccaagccgttctatgattcaytctatggcagtactttcyrccttctgaaagtgtactgaactcaactgttggccttgggatatcatttagtgtctgtactgaggtttggagccacggcttgtaatggagggcattacaaagcagctgggaccttggcagggtttctagctgggcaaagcacatctcagtgtaaggaggtacaagggtgctccaagcttctcagctctcatgatcccatcaccctgaatgagccaagcagggct

SEQ ID NO: 44641 - DNA, 600 bp, Chicken  19866894283640_3
aggacagaaagaaactggaggtgctcaaagccaggttggatgggaccctgggtagcctgatttagtggttgtcaaccctttccacagcaggggtttgcaactgggtggtctttaaggtcccttcttacccaaggcgttctatcattctgtgaaactcctccaaaatagcagagcatgaaatagaagtgctacctgcgagatgcttcttcccttggagggaargtgggcagtggtggactgcrgtgttggaacttgatgatctttgaggtcccttccaacccaagccgttctatgattcaytctatggcagtactttcyrccttctgaaagtgtactgaactcaactgttggccttgggatatcatttagtgtctgtactgaggtttggagccacggcttgtaatggagggcattacaaagcagctgggaccttggcagggtttctagctgggcaaagcacatctcagtgtaaggaggtacaagggtgctccaagcttctcagctctcatgatcccatcaccctgaatgagccaagcagggctgggtctgtccttaggacagtgatatagtacacaatttccactgggatgaaattccttc

SEQ ID NO: 44642 - DNA, 600 bp, Chicken  19866894283640_4
aggtgctcaaagccaggttggatgggaccctgggtagcctgatttagtggttgtcaaccctttccacagcaggggtttgcaactgggtggtctttaaggtcccttcttacccaaggcgttctatcattctgtgaaactcctccaaaatagcagagcatgaaatagaagtgctacctgcgagatgcttcttcccttggagggaargtgggcagtggtggactgcrgtgttggaacttgatgatctttgaggtcccttccaacccaagccgttctatgattcaytctatggcagtactttcyrccttctgaaagtgtactgaactcaactgttggccttgggatatcatttagtgtctgtactgaggtttggagccacggcttgtaatggagggcattacaaagcagctgggaccttggcagggtttctagctgggcaaagcacatctcagtgtaaggaggtacaagggtgctccaagcttctcagctctcatgatcccatcaccctgaatgagccaagcagggctgggtctgtccttaggacagtgatatagtacacaatttccactgggatgaaattccttcttgtaataaacgccctat

SEQ ID NO: 44643 - DNA, 600 bp, Chicken  19866894283640_5
ggtgctcaaagccaggttggatgggaccctgggtagcctgatttagtggttgtcaaccctttccacagcaggggtttgcaactgggtggtctttaaggtcccttcttacccaaggcgttctatcattctgtgaaactcctccaaaatagcagagcatgaaatagaagtgctacctgcgagatgcttcttcccttggagggaargtgggcagtggtggactgcrgtgttggaacttgatgatctttgaggtcccttccaacccaagccgttctatgattcaytctatggcagtactttcyrccttctgaaagtgtactgaactcaactgttggccttgggatatcatttagtgtctgtactgaggtttggagccacggcttgtaatggagggcattacaaagcagctgggaccttggcagggtttctagctgggcaaagcacatctcagtgtaaggaggtacaagggtgctccaagcttctcagctctcatgatcccatcaccctgaatgagccaagcagggctgggtctgtccttaggacagtgatatagtacacaatttccactgggatgaaattccttcttgtaataaacgccctatt

SEQ ID NO: 44644 - DNA, 599 bp, Chicken  19866894283641_1
  misc_feature (1)..(108): n is any nucleotide
nnnnnnnnnnnnnnnnnnnnnnnnnnnnnnnnnnnnnnnnnnnnnnnnnnnnnnnnnnnnnnnnnnnnnnnnnnnnnnnnnnnnnnnnnnnnnnnnnnnnnnnnnnnnatgcagttgtataatggaaaggagtgttctgagactttgctgatgggatgccaaatgtatatgtatacaggagtttgacaaaattttatactttggtttaatgctggggaagagtctcttgtggaatactgtggtcattaaaagaaatgatctgtgtggtccaatactggctggcagcctttttcttctatstagtgatagatgcttttccatctaaatgcttctcatgtcaaaagcctgaggctcattctaagtgaactcatctgatgctttctagctaggcagtaaaatccttgaagcaggagcagaagccctgtatcataatgcttcatctcactaaaaacacacacacatgctggttccagccccctgggaagttttccatatttgatcattaagaagctataagtgttgcttggcagttgatcagagagagatccaccccttaactgaaaaagtgcttcaagaagatctgcgttgacattcgtaga

SEQ ID NO: 44645 - DNA, 588 bp, Chicken  19866894283641_2
ggctcattctaagtgaactcatctgatgctttctagctaggcagtaaaatccttgaagcaggagcagaagccctgtatcataatgcttcatctcactaaaaacacacacacatgctggttccagccccctgggaagttttccatatttgatcattaagaagctataagtgttgcttggcagttgatcagagagagatccaccccttaactgaaaaagtgcttcaagaagatctgcgttgacattcgtagacagcaacttcaggttttgaagccaagacaggatgtttttctaacagttcrccttagaagtgctttcctgggaactcaaagcaaaaaaagctgaatgttgaacttctgaagaagggacttgtagtgattggtgtgactccatccgagtttgctggcaggtggagggagagctgtgctggctgctgcagggtctctgtgaaggagctgtttggtgctgcaggaccttgctgagtactgtgaattctcccttttttgcatctcaacctgtgtctcaagttgaccagtaaagtggggggttgtctagagctgtgttgctgttgtgggcagcatacatagagg

SEQ ID NO: 44646 - DNA, 556 bp, Chicken  19866894283641_3
ctagctaggcagtaaaatccttgaagcaggagcagaagccctgtatcataatgcttcatctcactaaaaacacacacacatgctggttccagccccctgggaagttttccatatttgatcattaagaagctataagtgttgcttggcagttgatcagagagagatccaccccttaactgaaaaagtgcttcaagaagatctgcgttgacattcgtagacagcaacttcaggttttgaagccaagacaggatgtttttctaacagttcrccttagaagtgctttcctgggaactcaaagcraaaaaagctgaatgttgaacttctgaagaagggacttgtagtgattggtgtgactccatccgagtttgctggcaggtggagggagagctgtgctggctgctgcagggtctctgtgaaggagctgtttggtgctgcaggaccttgctgagtactgtgaattctcccttttttgcatctcaacctgtgtctcaagttgaccagtaaagtggggggttgtctagagctgtgttgctgttgtgggcagcatacatagagg

SEQ ID NO: 44647 - DNA, 600 bp, Chicken  19866894283644_1
tatttctcaagcctttcatttttctacaaaagcttgctctgtagatagtactactataacttgtgcatttggttttcaaggatacgctatggaaaagggcatcccacagggttagtcttagggtcataggctcactggcatgtataggtgtaaatgctcatctgaaaagtaagaatagtctccccttactccacagtggaagcatatacactaggctgaggcctctctattggcaaaactgttcaaaatacccctgaaatactcagtacctgctcacacacagtgagaatttagttctcygtgcttaacgtgactagagatattctgctttgctgcttctatawaatctaaaacaaattctgtgaaagtcaaaataggaggcaagaaggaagcaaggaggagggaggaattgctctgcaaccttcagcagatttccccatcaaatacctgatccagagactgaactttgtgggcttttcttattgttcctaaccaaagaagagatttgactgtttttaaccccagcgtgatcaaaaccaaaatgtaattatatctgaaaaagggatgtaggaatattttaagcaattttcctcaactcat

SEQ ID NO: 44648 - DNA, 600 bp, Chicken  19866894283644_2
atagtactactataacttgtgcatttggttttcaaggatacgctatggaaaagggcatcccacagggttagtcttagggtcataggctcactggcatgtataggtgtaaatgctcatctgaaaagtaagaatagtctccccttactccacagtggaagcatatacactaggctgaggcctctctattggcaaaactgttcaaaatacccctgaaatactcagtacctgctcacacacagtgagaatttagttctcygtgcttaacgtgactagagatattctgctttgctgcttctatawaatctaaaacaaattctgtgaaagtcaaaataggaggcaagaaggaagcaaggaggagggaggaattgctctgcaaccttcagcagatttccccatcaaatacctgatccagagactgaactttgtgggcttttcttattgttcctaaccaaagaagagatttgactgtttttaaccccagcgtgatcaaaaccaaaatgtaattatatctgaaaaagggatgtaggaatattttaagcaattttcctcaactcataaagaaaacttcagacaacacgttcactatcttttttttgcact

SEQ ID NO: 44649 - DNA, 600 bp, Chicken  19866894283646_1
cccacaggaaactctgaccagcatgtgccaagcaaaacttaaagaaaaaagtcctgccttgccctgtacttggcttgtcggccaaatcttgaccaaatcttaccatgtgcagggaacggagggccaacatgagttctgcatgtgttcctatgcagaactacatcagtcccagaggcccagcctctgttgcagcaagttcccttcgctagcaacaggaaggagtgagagatggatgaccgcatctgctgagctctccgtcctcactgtgtgctgaggtggtgggagggagctcacacagcrtgaaactcactcaggccaaagatcagtccaacactaagcaccacttaagtgctattgaagtgcctgtagcagacataagaggaacagaagggtcctcccaagagtgacagtcattcctggtgaacagcctgggtttatttccaaattatggtccacttttgagttgcacagcactgctctcattccgcttgctacctacaatcccgctgcttccttcctttctgcgggctgtgacaatactgcagaaaagagtagacagtaggcacaaaacccagtgtgcactcaaggagcaacccagag

SEQ ID NO: 44650 - DNA, 600 bp, Chicken  19866894283648_1
gcttttctccaaccattttacagactaagagactttgcagacttaaagctttctacacctcagtgaacagctgctgaataaaaaggctttgtgatccgcttgaatgaaacacttctcccccaccacaatcaactttatttatttttcctctcttttcctctctcattcactacctcttctccttctcacagtgctgccatactcaggaatagaatggctccctacagagaatattttgatgaaataaaatgaaaaactgctctcccacgctgtcagggagctacacctgtggtgctcccygagctttacccatcaaggaagcttcattcacactcaagtttaagaaaatttttgttgacattttgctttgggaaaaaatcaagtttacaaatgttacatgagaaatgtgatacaaaaggataaatgctggtataattctgttaatccaggaacctttgccaaatatatgcctttggaggaactggccaattatttttatttctactcaactctgattctttcatttgccctaaaaacatttattttctttaattccttagatgacatttccagtaccttctgcgtttttttatgccgtat

SEQ ID NO: 44651 - DNA, 600 bp, Chicken  19866894283658_1
gtgatgtcaacagtgttaccctgaaagtctacctacgtttcctgaaaaattctgtttaaaaagcaaaggatttttattttgtttatttattgagtcacaaaactgttaaataggggaagttctgagttgcatccagttcctttcagtcttatctttcaggtactgtttggagtagaaatgtgttgggacacccatatttctcaaacatcttattgggaggactgttaaagagagtacacaaaacatatgtaaaaagtctacttaccctgatgtttcttctccatgttctttttgtatccrttctttgctccatcgttcagattgttaggattcctatattataattctgataatttcatttcatcatcataagaaattttgtacttgtataatgctaaaactcacattctaggattctgccagccccagagtacaaaatattgtttcttctgaattagcctggtcttcaatatatatcattccattgtactgtaataaaatttttgtagtcctatattttatttaattcagtaatctatagggggattacytcttccattattctcttgaaatttgacctcacaggattaccgtaacata

SEQ ID NO: 44652 - DNA, 600 bp, Chicken  19866894283658_2
aaaagtctacttaccctgatgtttcttctccatgttctttttgtatccrttctttgctccatcgttcagattgttaggattcctatattataattctgataatttcatttcatcatcataagaaattttgtacttgtataatgctaaaactcacattctaggattctgccagccccagagtacaaaatattgtttcttctgaattagcctggtcttcaatatatatcattccattgtactgtaataaaatttttgtagtcctatattttatttaattcagtaatctatagggggattacytcttccattattctcttgaaatttgacctcacaggattaccgtaacatactgggggaatgatacttcaggatgagccatctattcatttagactacgttcggtattttgttacttgtatcctttatcatttcctcccaattgatttcttttttcattagcaagtccttgactaaaccatttcacatagaagatatgaaaaaaaaacatgtaaataatgaagtgatgtgcttacagagtgggtacaggtgggctgtttttagaatatttttatgtttgaagataatgaagacaatttattg

SEQ ID NO: 44653 - DNA, 600 bp, Chicken  19866894283658_3
ttatctgagaaaacagaaatgagaaagaaaagctgtaaaaaataaggcatgaaatttaagctgaaatctactgtgtttttatgagctgtgagctcctcttacatggcaaaagcaggggtttcttgctgccttgtattaaatgtcaagacagaacagcacaccactgtctcacatgctactttctgttatgcagatccaagtgaataagcctgccattcgagattagtcaagtaaaagtgcatcacttacaagggtgataccttaacaaaaaagtaagccgggatcctttcagcattcccmctcttcctataatgttgtacacagaagacttctctgcttactgtccattcctgtaacactcaaagtttctaaagcatagaatgcaattttcgtcagtatcaaagcacagtgattacctttgggaggtttggtatttgtccttaggaaaattacgtaagatctacaagtgttatgtctagcaatgaaaacagagaaatgtggactagctatgttttcagattacatggatatgttttctttttttttgacctaatgaagatagaaaaccagcgtttataaaatctaaaattaaaatttgaa

SEQ ID NO: 44654 - DNA, 599 bp, Chicken  19866894283663_1
  misc_feature (1)..(131): n is any nucleotide
nnnnnnnnnnnnnnnnnnnnnnnnnnnnnnnnnnnnnnnnnnnnnnnnnnnnnnnnnnnnnnnnnnnnnnnnnnnnnnnnnnnnnnnnnnnnnnnnnnnnnnnnnnnnnnnnnnnnnnnnnnnnnnnnnnnggaacaacaactgtcgccccatgtctccacagacagtgttttgcctcgctgcactcttttggggtgctgtgggtgcaaacacgaagccatgagagagcagcagaagggcagcgggctgcaaagcacggcctgcaggaggtgcctgagggatcaggctgagagtgtttcrgagaaagtggtttttttccagatctgagagcgctgggactgtgatgtgygtgctgtgagaaccgctgtgacccacaggaaggaggcacactgaagcagctcagtgatttaccactgaggaagttgtgcaacatccttcagtgaaggcgtttaggagctttaggcccttcccaaagggcctgggcctgacttgggcccagtgtgcgtgagaaagcagagggacaaagataaggttgatgtgaccatgagagagaacacaggagcaatggaaaacaagagacaagagagataagctgtggt

SEQ ID NO: 44655 - DNA, 599 bp, Chicken  19866894283663_2
  misc_feature (1)..(82): n is any nucleotide
nnnnnnnnnnnnnnnnnnnnnnnnnnnnnnnnnnnnnnnnnnnnnnnnnnnnnnnnnnnnnnnnnnnnnnnnnnnnnnnnnnggaacaacaactgtcgccccatgtctccacagacagtgttttgcctcgctgcactcttttggggtgctgtgggtgcaaacacgaagccatgagagagcagcagaagggcagcgggctgcaaagcacggcctgcaggaggtgcctgagggatcaggctgagagtgtttcrgagaaagtggtttttttccagatctgagagcgctgggactgtgatgtgygtgctgtgagaaccgctgtgacccacaggaaggaggcacactgaagcagctcagtgatttaccactgaggaagttgtgcaacatccttcagtgaaggcgtttaggagctttaggcccttcccaaagggcctgggcctgacttgggcccagtgtgcgtgagaaagcagagggacaaagataaggttgatgtgaccatgagagagaacacaggagcaatggaaaacaagagacaagagagataagctgtggtccagctgcactcagtcaaagtctcagcagaggaagatacttgcttgcac

SEQ ID NO: 44656 - DNA, 600 bp, Chicken  19866894283664_1
tattttcacagcagtttccacctgaccttgcacagaggtgagagtaacggcaggctgtttcagaaactgagtaacattcctgtgattaaaaggactggtttctgacttagctctcaaacagtcacaatcctgggaaatagtagaaagcaaacaaaacgccacacatctaactatatctatgcatatcaattattggctccatacagtaacatatattaaatgttctatgctatttttccaagcaggaataccaatgcttcctgcaggggtcatttgcttaagatgtggaagtaaagcaartgagacatctggggattaataaaaactgagatcaccagagtagctttgaaattggtaggaaactggtaaaagaggtggcagaaagygcagtgagraaagggatagccaaagtgaaaataataaagaagttcttcaaatcatcagcctctgaaccagtcttaatatttcatatgttttattactaagctatacatgtcaactccaatttcctgtttcaaacatccatatagaaaagttagaccatgagcagagtgcatggaaggaagaatagccataatagtggtaagtctattatacagg

SEQ ID NO: 44657 - DNA, 600 bp, Chicken  19866894283664_2
taaaaggactggtttctgacttagctctcaaacagtcacaatcctgggaaatagtagaaagcaaacaaaacgccacacatctaactatatctatgcatatcaattattggctccatacagtaacatatattaaatgttctatgctatttttccaagcaggaataccaatgcttcctgcaggggtcatttgcttaagatgtggaagtaaagcaartgagacatctggggattaataaaaactgagatcaccagagtagctttgaaattggtaggaaactggtaaaagaggtggcagaaagygcagtgagraaagggatagccaaagtgaaaataataaagaagttcttcaaatcatcagcctctgaaccagtcttaatatttcatatgttttattactaagctatacatgtcaactccaatttcctgtttcaaacatccatatagaaaagttagaccatgagcagagtgcatggaaggaagaatagccataatagtggtaagtctattatacaggaggaagctaaaggaagatagctgttatggaaagaaagaaatggaaacaacagtccttgataaatacactgataagagatgaagaat

SEQ ID NO: 44658 - DNA, 598 bp, Chicken  19866894283664_3
tggtttctgacttagctctcaaacagtcacaatcctgggaaatagtagaaagcaaacaaaacgccacacatctaactatatctatgcatatcaattattggctccatacagtaacatatattaaatgttctatgctatttttccaagcaggaataccaatgcttcctgcaggggtcatttgcttaagatgtggaagtaaagcaartgagacatctggggattaataaaaactgagatcaccagagtagctttgaaattggtaggaaactggtaaaagaggtggcagaaagygcagtgagraaagggatagccaaagtgaaaataataaagaagttcttcaaatcatcagcctctgaaccagtcttaatatttcatatgttttattactaagctatacatgtcaactccaatttcctgtttcaaacatccatatagaaaagttagaccatgagcagagtgcatggaaggaagaatagccataatagtggtaagtctattatacaggaggaagctaaaggaagatagctgttatggaaagaaagaaatggaaacaacagtccttgataaatacactgataagagatgaagaattccctga

SEQ ID NO: 44659 - DNA, 599 bp, Chicken  19866894283666_1
  misc_feature (1)..(143): n is any nucleotide
nnnnnnnnnnnnnnnnnnnnnnnnnnnnnnnnnnnnnnnnnnnnnnnnnnnnnnnnnnnnnnnnnnnnnnnnnnnnnnnnnnnnnnnnnnnnnnnnnnnnnnnnnnnnnnnnnnnnnnnnnnnnnnnnnnnnnnnnnnnnnnntatcaattctctccaaggtacacattcgtagactttctccagatttggttttgttaaaggaggtgtagattttcattgcgattattattattatttttaatatattcaaaacaaaaagcattggcaagcaaaaactggttttgcctgaagatttcakctttgaccgatgtttcatgttttgggatgtggtagacgtttgcagtagaaacagcacgctgttttagatgttctttcttttctgttgctcattaccaatatatgtgtatatttactctgttgcccaggcagagccatttggatagagacaatgagagtctgctccaggacaatgttaggcagcttaaagtaaagagctttcattgggttgaattaacctgttagcctttgtaaggggagtgaagaggagccctgtggtgggggagatacttcattcagagggcagctgaaggtgggacc

SEQ ID NO: 44660 - DNA, 600 bp, Chicken  19866894283668_1
tcctgcgtgcatgtccacccagttcagatgggattctccacggagggactgattttgcatggaaggtgctcaggccccacactgataagcagtagcttaaagcgtgaacggaaggtgggcttcatctgcagatcccagtaagacatacagcaataaaaggcatgtggcacctttgctgcaagaagcaacaagcttacacatcaaaatgactttgggagtagttatttcctttcatccatcactccagcctgtcctgagcagcagttctgcacacaggctacccatgtgagttgagaattstggcgtgctctggcactactcagcaacatacaccactgtcttctttaaataactgttagcatttagtattgatttaacccagatactctttggtgttctactatagcaaaggggagcttatatgatcacagtagatctgagagtaaacggttttatatttggaatgacaaataccatcttctggaaaagttatctggataataatttcttttgccttttaatgttagcattggtatgaatttttctgtgtgactgtgtctctccttatagcttctcatatatatatatatatatataatt

SEQ ID NO: 44661 - DNA, 600 bp, Chicken  19866894283699_1
tgtgatggtgtattgagtaaatccctcttagtttgtggattattggtctgacaggcaggaacttcctcagattcattctgctttatcacgtcaggccagctgctgtgcacgtgtaccagatctgtgcactcaaagccccatgtatctttcactgaaagaagatgggagtacgtgaagggagctgtgttgttaatgaaagcaggatttcactccatgacaaccgagatactggttttacttttttgtcgtcgtgactggctgccagattatttggtagctggtggtttaaaaatcatctgygggggaacttgatccttggctttgcaacragctatcacaatgaagttggcacacaactttctaaggctaaaccaggtaattcaagtagattgtgcacttctctttcattcagctgaaatacaggagcaccagaacacaagaacagaatgaaggcaaactgattttttttctcccctgtggttgccattgatttaaattccaaaagctgtatcttcttactttcattgacagcaactgctctccctaaagctgatagggctacactgtatgatactcattatgagaagggaatcagacgcc

SEQ ID NO: 44662 - DNA, 600 bp, Chicken  19866894283699_2
agtttgtggattattggtctgacaggcaggaacttcctcagattcattctgctttatcacgtcaggccagctgctgtgcacgtgtaccagatctgtgcactcaaagccccatgtatctttcactgaaagaagatgggagtacgtgaagggagctgtgttgttaatgaaagcaggatttcactccatgacaaccgagatactggttttacttttttgtcgtcgtgactggctgccagattatttggtagctggtggtttaaaaatcatctgygggggaacttgatccttggctttgcaacragctatcacaatgaagttggcacacaactttctaaggctaaaccaggtaattcaagtagattgtgcacttctctttcattcagctgaaatacaggagcaccagaacacaagaacagaatgaaggcaaactgattttttttctcccctgtggttgccattgatttaaattccaaaagctgtatcttcttactttcattgacagcaactgctctccctaaagctgatagggctacactgtatgatactcattatgagaagggaatcagacgccagtaggtcaagtcagcatttgactacctt

SEQ ID NO: 44663 - DNA, 560 bp, Chicken  19866894283703_1
aaaacaagccagggcagaaaattgtaatacaatcctggcaagtttctgctattaaacatatgttgatctggactttggttatttttagctgaccttggtactagtgtttgaaaatgaacacagtgaccagtcaaaaactgctccataaaagttaagtgcctgtgacatttcattatccaatggcacttgcactgaccattctgaaagcaaacagccttaagaattttgttcatttttgagctattttccttctcctgtgtttgttcacagaaaagtgcactctggtgacatcccaagtcytaatgaaaatgagggagtttttctgcattggactcaccaaaataaaataaaataaaataaatatatatatgtttttaaaaggttctaaaagagtgaaaagcatctaataaaaaatgatgatgcttaattatttcagtttaaggcatctctgtgaacagagaaaaaaaggcataatttggtacctgcataattgtcatccagcaaagcactggtagcaatacactctctctctctctttgcagtgtgggacaaacagtatt

SEQ ID NO: 44664 - DNA, 599 bp, Chicken  19866894283710_1
  misc_feature (1)..(138): n is any nucleotide
nnnnnnnnnnnnnnnnnnnnnnnnnnnnnnnnnnnnnnnnnnnnnnnnnnnnnnnnnnnnnnnnnnnnnnnnnnnnnnnnnnnnnnnnnnnnnnnnnnnnnnnnnnnnnnnnnnnnnnnnnnnnnnnnnnnnnnnnnnctagagccagccgagtccctccttgccccagcccagttcccaaaacatccccttgtccccgtggtgcctctgtacgatgctgcccaacccacggccgtgcctccccagccctcaccttgtgccatgaggtgccgcaggacatcctgtaggcgctgcagcacrggggaggtgacctgaaagtggggcttgtcctgcaccgagcccacctggcactgcccaaacagcccatctgcaagagagcggggaggtggggaggaggaataggtggagcagccccacctgcctcctgtcctgctgccctccacaaggcaccacctcggatagagcaggaccgggggctcttctgtaggcactcaccctgcacacacacctcctgcggggagcacagcctccggtcaaacagacagcctggggggcagacagacagacagacagaagccagcacggtcagcaaggggggc

SEQ ID NO: 44665 - DNA, 600 bp, Chicken  19866894283712_1
ttgagagcagctctgggaagaaggatttggggtgtctgttgatgaaagactcaacatgtgctggcgatgtgcgcttgctgcccagaaggcctaccatattctgggttgcatcaagagaattgtgaccagcaggtcaagggaggtgattctgcccctctactctgctcttgtgagtccctacctggagtactgcaaccagttctggagcccccaacacaaggacatggagctgttggagcaggtctagaggagggccacgaagatgatcagagggctggaacacttcccttatgaggacaygctgagagagctggggctcttcagccaagaggagagaaggctccagggagaccttatagtagccttccagtacctgaaaggggcctacaggaaagctggggagggacattttataagggcaggtagtgacaggacgaggagaaayggctttaaactggcagagggtagatttagactagatactaggaagaaactctttactgtgggggtggtgagacactggaacaggttgcccagagaggttgtggatgccccctccctggaagcattcaaggccaggctggatgggactttgagcca

SEQ ID NO: 44666 - DNA, 600 bp, Chicken  19866894283712_2
attctgcccctctactctgctcttgtgagtccctacctggagtactgcaaccagttctggagcccccaacacaaggacatggagctgttggagcaggtctagaggagggccacgaagatgatcagagggctggaacacttcccttatgaggacaygctgagagagctggggctcttcagccaagaggagagaaggctccagggagaccttatagtagccttccagtacctgaaaggggcctacaggaaagctggggagggacattttataagggcaggtagtgacaggacgaggagaaayggctttaaactggcagagggtagatttagactagatactaggaagaaactctttactgtgggggtggtgagacactggaacaggttgcccagagaggttgtggatgccccctccctggaagcattcaaggccaggctggatgggactttgagccatctggtctagtgagaggtgtccctacctatagcaggggggttggaactaggtgatcttaatggttcctcccaacccaaaccgttctacaattctttaaggtcatcccatgctgcacaggcagtctggctccttgcactgatttta

SEQ ID NO: 44667 - DNA, 531 bp, Chicken  19866894283716_1
tacgtcttacataactgtgtgaatgactgcagtaatgagaattaatcaggagctttcttttgatctttaggacgcacgctggtcttcacagaccgctcaggtatgagtgcggcaggccacgtaatgctggggaccatggatgttcaccatcactggaccaaagtaaggtttcagagcaagtgctgttgtctgttgttatgacatccttttttaaactacaaccaaaatattgttgctgattactgatgagtaatttaaaggaaaaaaacatggctgctatgtttagcataaccttgtacrtcgcatcctaaatttaatcttaytaacagcaatctttgtcagatctttactgctgcttctactaacaaaccagtctcatctttgattagatataaataacactaataagttatgcattattccagtctgtaatatgtacaataagcactggcggaatatttcttcatctataaagagctcattccgatgaagaatttacgaattctgttctggttgttgatgtaaatggga

SEQ ID NO: 44668 - DNA, 508 bp, Chicken  19866894283716_2
tgactgcagtaatgagaattaatcaggagctttcttttgatctttaggacgcacgctggtcttcacagaccgctcaggtatgagtgcggcaggccacgtaatgctggggaccatggatgttcaccatcactggaccaaagtaaggtttcagagcaagtgctgttgtctgttgttatgacatccttttttaaactacaaccaaaatattgttgctgattactgatgagtaatttaaaggaaaaaaacatggctgctatgtttagcataaccttgtacrtcgcatcctaaatttaatcttaytaacagcaatctttgtcagatctttactgctgcttctactaacaaaccagtctcatctttgattagatataaataacactaataagttatgcattattccagtctgtaatatgtacaataagcactggcggaatatttcttcatctataaagagctcattccgatgaagaatttacgaattctgttctggttgttgatgtaaatggga

SEQ ID NO: 44669 - DNA, 597 bp, Chicken  19866894283722_1
  misc_feature (1)..(5): n is any nucleotide
nnnnnccccagcccaacctgcagagccaggcactcctttccccatggcactccatgctctggggcagtgctgtcctaacacaaacccccaggctgcagaggccatgcatgggagtgccagacaatcacaaaggatggtcctagtgtttgacatggcttctgccacttgttctcacaaaaactttaaaagactgaaagtgagaaaagcacaggagcagctggctgcagtaataacgtgtcttccctgcattttacagactgttgtggagttgttcccgtgtgactgtatttactcacttcraggtgctgtattttgccataactgagcagggctggccagtaatcaaacctttataaactattgcttttttttccactcactgtgcactcgctgactccccartacccagaaattcacgtgcacagtgatgtttggaggctctgtaaggctgtcactgcttgtttgttgcacgttgcagggctgttattttatactcattgtagggcacaggctgtaatgccaggggttaaaggtttaaggctaaaaatgtgaaaatccacattgtgttgtaccccaccaaatcatcgtacctcactt

SEQ ID NO: 44670 - DNA, 495 bp, Chicken  19866894283722_2
ccccagcccaacctgcagagccaggcactcctttccccatggcactccatgctctggggcagtgctgtcctaacacaaacccccaggctgcagaggccatgcatgggagtgccagacaatcacaaaggatggtcctagtgtttgacatggcttctgccacttgttctcacaaaaactttaaaagactgaaagtgagaaaagcacaggagcagctggctgcagtaataacgtgtcttccctgcattttacagactgttgtggagttgttcccgtgtgactgtatttactcacttcraggtrtacccagaaattcacgtgcacagtgatgtttggaggctctgtaaggctgtcactgcttgtttgttgcacgttgcagggctgttattttatactcattgtagggcacaggctgtaatgccaggggttaaaggtttaaggctaaaaatgtgaaaatccacattgtgttgtaccccaccaaatcatcgtacctcactt

SEQ ID NO: 44671 - DNA, 599 bp, Chicken  19866894283724_1
  misc_feature (1)..(118): n is any nucleotide
nnnnnnnnnnnnnnnnnnnnnnnnnnnnnnnnnnnnnnnnnnnnnnnnnnnnnnnnnnnnnnnnnnnnnnnnnnnnnnnnnnnnnnnnnnnnnnnnnnnnnnnnnnnnnnnnnnnnnnaacctatctaatttacagaaaataactgcagatcacccgatatgcagacagtttcagatcaacctcaggcaaaccagtcagatcctagtcaaactgggtaagcatgggcacccagccatggctcaggagcatctccgtagtgtgagtctggacctgaggctggtgccagtctagtgcacaaraatgagaataaaacatgggggcaagatgttctcccatcttgcttgtaaacaccctttagttagcttgcttctccacaccccaaaccacagcatccaaccaaaggcatagggatttcattacactgaaataacaaacatgaaatggctcagtgtgctgaagctacaggtgtagcaaagcttaaaaaccttgtaaacagaggactggggaaaagtcagccaagtgttttaaaatattttcttcacagttcataataatccttctagaagcttgaaatctgtttgcttaccaaatattcatt

SEQ ID NO: 44672 - DNA, 600 bp, Chicken  19866894283725_1
tgtcatgtgtagctatagtctttcttactgaaatccatgatccctaattatgtgcttcaggaacattggacagatgaaagctataagcttgaggtatctgaggagtttagatacttcactgtaaactgcaggaatgcattatttccagatgtgactcataaccatacattctgttctgaaatatgatatttcatttataaaataataaggatccagtcttttcaaaatactggttgtggcagtacttttccctggcaaaattaaagatttctttcagtatatattgttatttattaaaakatatttttggtgaagtaatatataagaaaggactggtacgtctaaatccaagctatgcacagataagattgtggtttcagagtccttgttttgcattgtttrgtgagaggcatcctcagtctgtcactcgtctctttctgcagtgtgtatgttatggttggtgcagatgttccattctcgtcatgcttacgggaagtggaaaacccacagaaccaactgagatgcagtcaagaaatggagccttcaataacgtgcgacaaaaagtttcgtactcaattccatattgattggtgtaaaatc

SEQ ID NO: 44673 - DNA, 600 bp, Chicken  19866894283725_2
gagtttagatacttcactgtaaactgcaggaatgcattatttccagatgtgactcataaccatacattctgttctgaaatatgatatttcatttataaaataataaggatccagtcttttcaaaatactggttgtggcagtacttttccctggcaaaattaaagatttctttcagtatatattgttatttattaaaakatatttttggtgaagtaatatataagaaaggactggtacgtctaaatccaagctatgcacagataagattgtggtttcagagtccttgttttgcattgtttrgtgagaggcatcctcagtctgtcactcgtctctttctgcagtgtgtatgttatggttggtgcagatgttccattctcgtcatgcttacgggaagtggaaaacccacagaaccaactgagatgcagtcaagaaatggagccttcaataacgtgcgacaaaaagtttcgtactcaattccatattgattggtgtaaaatctctctggtgagttgttttattattgcatgaaaatgatatttgttgaagtacaatatttcattctagacatcatctaggtaagaattttgccagccggccaga

SEQ ID NO: 44674 - DNA, 600 bp, Chicken  19866894283734_1
ataactcttaattatgccatggcgctccttaataaaacaatacactattgggattaaatcaaactaattgaattaatctgttatcctcttttacgggtaatttggtgcacggataaaagcagtcacggagctgttttcatggcaagcagcccaaaacaactttccatgcattctttttccttctttaccttgaaaagagaagaggtgcccctgatttcaaagggcatctacaggttagcaagagcactgtaagtctctccagaccatccacaaggcagggcaatttgggaacagagagcrctgctcctgaacagctgctgaggcagaagggcagcttcccagccgcgctcactgcctggccgcttgatgctttcatttcatacactctaaccccactaaatcacctgcagttactttttcccgtccatctcctgtgaggcccaaggccaaggagaccatccccagcccacctcccctcatactcagccaccccaccagctgcccttcctgccacctccttcagtcctattagctgtgcagagccgcttactctctggttggaattgcttagcacttgtcacaactaaacgcaggtttcat

SEQ ID NO: 44675 - DNA, 600 bp, Chicken  19866894283738_1
ttttccttgtcacagacggaattcagaattaaaatccccaaaggactttaaatacacataatctagacaatctaaaaacaaactgcagatgagtcatctatttaatagaagaagtcaaatcatcagcatcagctgtcacaataaatgctatcaagtctatttccactggtatgtgttctctattagagatttgctgtgcttcccaaaggcagcagagtttagttgaagctcatctaccctctatttcaatctttacacagtatatgttacttgatagcttgaagagtcactttgagctcscatgataactagtgaacagaaagtggcacttttagagacccatattaattgtctagcttcaaatagagaagatgataccctaggcaccactaatcatactgatttggtcatcctgactacaaacacagccccatctgatcagttcagatatggtctttcgtttgattctaaagagatgtggctctcacaacactgctggcagcagaattacatcacttctgttctctctgttgtgaagttaaatgacaggtgaccagagtttcatgtgtaacaaagaggaagttttgtcttcattgaaac

SEQ ID NO: 44676 - DNA, 600 bp, Chicken  19866894283742_1
gcagagtgctgacagtgatggaaaaaataagaacagagaatatcctagatttggcacactgaagtaaaataaaactataatgtttatcaaaaaagggctttggaaaaagtttaacagttggctagaatatgttaaactctgctgtctccttgtactcagtatccttcaaaaatactttattcaggctgtatctgtaacacaagactgtttatgaagtctaatttttagtacctaattaatgcatctcaatctatttagcacggtgacattgtgctagtttgttcagtggtatcacacaaygtttttctttttcttttctttttcttattttttttaaacaaagctggaacggcaccattttcctagcacactgtatttcaatgctaacagcaaaccyagggtagggagctgatcagcagcagcatacaaacagctaagaagggactaggcttcttgactactcaccttatgagagctgagaaccacttttagctcctctaagagcccgtaggccagtttgtaccctcccagagaggacaaaagcttcctaactgtctgatgggcctgtcttcgaacgtgccaggtccgactcagcagcac

SEQ ID NO: 44677 - DNA, 600 bp, Chicken  19866894283742_2
ctttggaaaaagtttaacagttggctagaatatgttaaactctgctgtctccttgtactcagtatccttcaaaaatactttattcaggctgtatctgtaacacaagactgtttatgaagtctaatttttagtacctaattaatgcatctcaatctatttagcacggtgacattgtgctagtttgttcagtggtatcacacaaygtttttctttttcttttctttttcttattttttttaaacaaagctggaacggcaccattttcctagcacactgtatttcaatgctaacagcaaaccyagggtagggagctgatcagcagcagcatacaaacagctaagaagggactaggcttcttgactactcaccttatgagagctgagaaccacttttagctcctctaagagcccgtaggccagtttgtaccctcccagagaggacaaaagcttcctaactgtctgatgggcctgtcttcgaacgtgccaggtccgactcagcagcactgcaacaagggcacggtgatactgcctgaaaatggaggaacaaacagctttagcaacaggacacaaaagcacaaagcattcagcgttccgtacaaag

SEQ ID NO: 44678 - DNA, 600 bp, Chicken  19866894283745_1
caacagaagttgtacagtttaaattaatgtcaataggggatatgcacaggcatcatgggaagaatagacttcatagtgtgctaattaaaatatattcccctattgtacttttccctagcaccccactcttataaccaatttactctgcagaactgattatcatgctaatagcattccctccagttctcaaataggactccagttgagaatatccattaaatgtaaagttatataacctgtgaggtgcaatatgggaagtaaaaacttgttaaaggctttctttggtatgagtttactttsttatggcgttctgctttttggctttatttttgaatgttcacataacaatttccaggtgcagattggttgattctatagctgaggaggaaagccaaagaagtcttccttcatgcatttccctactaattttttcagtttctttttgactttgtttttacctgattctccttcactttctcatgctgttgttttgaagtcttccccttctcactttactgttatctttagttttcctattttcttgatatgcaaaggtgtctgtcattccttcgtcccttccacgcagccatactctttctt

SEQ ID NO: 44679 - DNA, 447 bp, Chicken  19866894283745_2
catgctgttgttttgaagtcttccccttctcactttactgttatctttagttttcctattttcttgatatgcaaaggtgtctgtcattccttcgtcccttccacgcagccatactctttctttaggttcagtggatctcagtatgcactcagtcctgcaagtgttatcaacagagtgctgagaaatgaatagaagtaggtcagggtgaaacttcatcatcagtgctgctttccaaaaagctcctgcattttctttgtttttcacacaaaatactgttcatgagcagtactcttccataaytgggctttaaacaatttctattttgatatagatgtactccaattactttcaagctacagttttcccaaatcttagttttttcctctatggcttaactgggattttggtagcagcagaatttcactctatgtctttcatgaaatcctc

SEQ ID NO: 44680 - DNA, 599 bp, Chicken  19866894283754_1
  misc_feature (1)..(149): n is any nucleotide
nnnnnnnnnnnnnnnnnnnnnnnnnnnnnnnnnnnnnnnnnnnnnnnnnnnnnnnnnnnnnnnnnnnnnnnnnnnnnnnnnnnnnnnnnnnnnnnnnnnnnnnnnnnnnnnnnnnnnnnnnnnnnnnnnnnnnnnnnnnnnnnnnnnnnttttaatagttgaatgtaaagcagatcataagctaatgccaaagaatgaagatgagactaaatacttaatgcctttgatctgttagtattgaatgaaatgagatgtctgtaaatataatagcaggaagcagtaaaataccacccctatccrcaagtccccagacctgtaatatagttgacatttcagacatatagcaggttcttgagcctgacaggaccttcttacagcctgaatactctaatccttttactttaggggtctgtctgcttggatatgccacgcagacacgcagcttaagtcatctgctgtgttttggcctaaggctaatcaatttacttggtaaattgtctgtgttagtgttgtgatctcttcagtatatccaaacgtgtcatagtttgttagcatggacagatttcaggtgggaactggtttatgcatgtccagcttga

SEQ ID NO: 44681 - DNA, 600 bp, Chicken  19866894283757_1
tacaggatcacagaaatataggggctggaaagggcatctggagaccatcaagaccaaatcccttgctgaaagaggttccttacagcagatcacacaggaaagcatccaggtgggtcttggatatctccagaggagactccacaacctctctggacagcccattccagtgctctatcactctcacagcgaagaagtttttcctcatgtttgtatggaactttccatgttctactttttgcctattaccccttgttcaatcgctacgcaccactggaaagagcatgaccctatccacttgastcccatgttttagatgcttataaatagttatgagttcccctcccaaacttttcttcaacagactgaagcgtcccaggtctcccagcctttccttatatgggagattcttcaggcccctgatcatccttgccaccctctgctggactctttctaggagattcctgtcctttttgaatgagggagcccagaactggatacagtactccagatgtggcctccccatggcagagtagagggggaggatcacctccctcaacctgatggccatgctctttttactgcactccaagatactactgg

SEQ ID NO: 44682 - DNA, 600 bp, Chicken  19866894283773_1
acgccgctgcctttagagccgtccttgctgttttctgccctaagcagacccccagcagcgttctgtggggtgctgagctgcagctccgcagacctcatctgtccggaggagggcaggaccgggtggcggtgtaggaaagcacagtgctggcccgcctgaagcaggcggtgggagctctcgcctgttggcgtgtagctggtacagaagtcacgcagggtcgattacgctgagtgacaaatggaaccacctaacatttttctcctattccttgtgttattttcctcctccactgctgtacaygagggccaagtaccaggcattgctttaaccacacatggaccctgagctgccatcacagcggggttggggcagcgctctggtgcagactgcaccttttctgggcccttgcacaaacatctcacgtgccttttctgcaggcaccactgcaggtagtgcagttgggtacatacctggggagctccatcgcccagaaggcacaaattcatctaaacctgctgtcacaaaagtcagttcgtaccttagagcctctgatggactccatggctaacaaggacaaacaaatcacataaacagaagtct

SEQ ID NO: 44683 - DNA, 600 bp, Chicken  19866894283774_1
ccaaaaaatggcacccattgacatttattgatgtttgctgaatgtttatggagacccaacagtggatgtgagcatggtgaggtgatggggggacgtctttcatggcactgtcactgctgctgacacacaagtctcattcagatgactatgatatagtaactgttcgatcgcagtctgaacctctgattgatcacctgaggtgagcactgagtcagccatgggagcacaggtgaaggcaattcagctgtgtgatggaaggggcggagcctggctgcacctctccctagaccccatttaagrgctgactgccactgaggaaraatctctttctggagatcactccctttggagtttttttctgtgagcctaggatacaggtgagtattttaatttatttttgattatccttttccactgtgataatctttctagttatacagtctgtagataccagcctaactacaccactctgtatatttgttgattgtataaccatgcacagctgtcacaccatgaaatgaagagtctcatacagctcatttgtgtgaatgagctgatggtggtgactatgttaaagaacagtgttttgtagctgggaat

SEQ ID NO: 44684 - DNA, 600 bp, Chicken  19866894283774_2
acatttattgatgtttgctgaatgtttatggagacccaacagtggatgtgagcatggtgaggtgatggggggacgtctttcatggcactgtcactgctgctgacacacaagtctcattcagatgactatgatatagtaactgttcgatcgcagtctgaacctctgattgatcacctgaggtgagcactgagtcagccatgggagcacaggtgaaggcaattcagctgtgtgatggaaggggcggagcctggctgcacctctccctagaccccatttaagrgctgactgccactgaggaaraatctctttctggagatcactccctttggagtttttttctgtgagcctaggatacaggtgagtattttaatttatttttgattatccttttccactgtgataatctttctagttatacagtctgtagataccagcctaactacaccactctgtatatttgttgattgtataaccatgcacagctgtcacaccatgaaatgaagagtctcatacagctcatttgtgtgaatgagctgatggtggtgactatgttaaagaacagtgttttgtagctgggaatttactccatcagakagcgtt

SEQ ID NO: 44685 - DNA, 562 bp, Chicken  19866894283774_3
aggaaraatctctttctggagatcactccctttggagtttttttctgtgagcctaggatacaggtgagtattttaatttatttttgattatccttttccactgtgataatctttctagttatacagtctgtagataccagcctaactacaccactctgtatatttgttgattgtataaccatgcacagctgtcacaccatgaaatgaagagtctcatacagctcatttgtgtgaatgagctgatggtggtgactatgttaaagaacagtgttttgtagctgggaatttactccatcagakagcgttattgtgctctttgtgtctgttgtagtttccattgatataaatgggaggcattgctttcagagcaacctattcagtcttttgttaagcacctagtacttatatataggtagcgtaagcaaagaggtccccagttggaaaatctgtttgcagtaaaggtaaatggctgtgtatagtgttcattatttatatggtagtcatctccaaactgttttgattgtacatccctatcagtaaaaaaactttgagcatgctcttg

SEQ ID NO: 44686 - DNA, 600 bp, Chicken  19866894283784_1
tgaagaaacttgccgtaggaacaaatttcctgagtttcattatccaaagctttaaaatgactggcaagcttcacttttgagtcatataagttaattgatgacaccctaatcacgaggagcaatgctagtctagtcaggtattctttcttcctggtaaatacaatccaggataccctgagggtttctgctcagcacagatgtagagagaaacacacagaaaaagaggacaggaacacatttttcaacatgtcttttccccttattcaactgtcgaaaagaacaaatgcattgtctgatgargattataaatgagcatgtgcccaatgttaaaacagaacttctgaaaatatacgtgctaccactttgaatttcatccctcagatactgaaaacttttattttactgaaatkatttaggtattcttatttaactacttaaattctccagmttatgaaattatatacactgcctttccattgaaagaagggacaaacagatctggccacatatatgcatagatctgccagctcacatgacaagctgataagcctacctttaacattttttttccattttagaaaaatttatcatttaataatc

SEQ ID NO: 44687 - DNA, 600 bp, Chicken  19866894283784_2
cacgaggagcaatgctagtctagtcaggtattctttcttcctggtaaatacaatccaggataccctgagggtttctgctcagcacagatgtagagagaaacacacagaaaaagaggacaggaacacatttttcaacatgtcttttccccttattcaactgtcgaaaagaacaaatgcattgtctgatgargattataaatgagcatgtgcccaatgttaaaacagaacttctgaaaatatacgtgctaccactttgaatttcatccctcagatactgaaaacttttattttactgaaatkatttaggtattcttatttaactacttaaattctccagmttatgaaattatatacactgcctttccattgaaagaagggacaaacagatctggccacatatatgcatagatctgccagctcacatgacaagctgataagcctacctttaacattttttttccattttagaaaaatttatcatttaataatcctatagaaagggccataagtacacagtcacctttcagtatgcaaaacagactaggatatgaggaaggaatcctttgctctgagggtggtgagacattggaacaggttgcc

SEQ ID NO: 44688 - DNA, 600 bp, Chicken  19866894283784_3
tcctggtaaatacaatccaggataccctgagggtttctgctcagcacagatgtagagagaaacacacagaaaaagaggacaggaacacatttttcaacatgtcttttccccttattcaactgtcgaaaagaacaaatgcattgtctgatgargattataaatgagcatgtgcccaatgttaaaacagaacttctgaaaatatacgtgctaccactttgaatttcatccctcagatactgaaaacttttattttactgaaatkatttaggtattcttatttaactacttaaattctccagmttatgaaattatatacactgcctttccattgaaagaagggacaaacagatctggccacatatatgcatagatctgccagctcacatgacaagctgataagcctacctttaacattttttttccattttagaaaaatttatcatttaataatcctatagaaagggccataagtacacagtcacctttcagtatgcaaaacagactaggatatgaggaaggaatcctttgctctgagggtggtgagacattggaacaggttgcccagtgaggttctggatgcctcctccctggaagcattca

SEQ ID NO: 44689 - DNA, 599 bp, Chicken  19866894283792_1
  misc_feature (1)..(41): n is any nucleotide
nnnnnnnnnnnnnnnnnnnnnnnnnnnnnnnnnnnnnnnnnctgacttggggaagttggcgagtgtgtgacatttcgtgtgctttctgcaggaaagggatttacttcccaaaaagagtcctgcctgaaaatgcgtgtcagtgtggtgcaaaaatgctcaagctgtcttcctggtggtgtttcctttctttgtcactctgctagttgaggtagcagaagcaaacttaaagcaagagtaatagaggttgggggagttttcatgctttcttccgtctttctcccatttttgccttcctgatgstgttggatgccctctgctctttcttgcttcgttacaaatttaggcttggtcaactgaagagcaccagagaggtaccaaggagggatgctcttcccccagtgctgctggcttcatccagcccstttggccaagtctctgctcagarcccattcattactttgaggtttggtgggtattcaggagcaaatgacaatacctgggatcaggaatcatttgatcgcatcccgccctgatgagacaaatgcatgtgctgagcctgaaaaatggacttgtcatttactgatttaatgagtaaataa

SEQ ID NO: 44690 - DNA, 600 bp, Chicken  19866894283792_2
cctgaaaatgcgtgtcagtgtggtgcaaaaatgctcaagctgtcttcctggtggtgtttcctttctttgtcactctgctagttgaggtagcagaagcaaacttaaagcaagagtaatagaggttgggggagttttcatgctttcttccgtctttctcccatttttgccttcctgatgstgttggatgccctctgctctttcttgcttcgttacaaatttaggcttggtcaactgaagagcaccagagaggtaccaaggagggatgctcttcccccagtgctgctggcttcatccagcccstttggccaagtctctgctcagarcccattcattactttgaggtttggtgggtattcaggagcaaatgacaatacctgggatcaggaatcatttgatcgcatcccgccctgatgagacaaatgcatgtgctgagcctgaaaaatggacttgtcatttactgatttaatgagtaaataatgagccattctgaacagactgtggggatattatgccagtgcttctctctgagcatttacacactttaactccagtttttttttttgttgtgtgtgcgtgtggttttttttttaaattgaggtt

SEQ ID NO: 44691 - DNA, 600 bp, Chicken  19866894283792_3
tgcaaaaatgctcaagctgtcttcctggtggtgtttcctttctttgtcactctgctagttgaggtagcagaagcaaacttaaagcaagagtaatagaggttgggggagttttcatgctttcttccgtctttctcccatttttgccttcctgatgstgttggatgccctctgctctttcttgcttcgttacaaatttaggcttggtcaactgaagagcaccagagaggtaccaaggagggatgctcttcccccagtgctgctggcttcatccagcccstttggccaagtctctgctcagarcccattcattactttgaggtttggtgggtattcaggagcaaatgacaatacctgggatcaggaatcatttgatcgcatcccgccctgatgagacaaatgcatgtgctgagcctgaaaaatggacttgtcatttactgatttaatgagtaaataatgagccattctgaacagactgtggggatattatgccagtgcttctctctgagcatttacacactttaactccagtttttttttttgttgtgtgtgcgtgtggttttttttttaaattgaggtttatttttacagtggtgcttggaa

SEQ ID NO: 44692 - DNA, 600 bp, Chicken  19866894283801_1
tgtgaagccactggcctggtagtgacctcaggacatgatgcaggaaggaggggactgacaggttcctctgctctgtgttataatcagatgaagctgtagattttcagggcatctgaccatggaatccacaggccctggccatggctcaccttggccattgtaacttctcctggcatgcaagttcttgctcctcttctctgtcctgacatgtactatctgggacattcttactggttctcagtaagctcagctgaatgataccctacacgatcctcttgaacacagaagtattgacttctragggasacaaagtgttaagaggcaggtttctttatgggcctycaatgacaactgagtaattcatagactgctgtcatctggtagcctggttatgaagtaaaactgtccaaaagctgtgtcagaaacacttcaaggagatgcttgtattctgagaaggaatgtgccaactccctgatttcccctggaattacggagtaaaattcttcagtttatttactgattttcaaaagacaggcaagattatgaaattacactgtaaaaatctatttgttattactctgttttgaggacctaagccta

SEQ ID NO: 44693 - DNA, 600 bp, Chicken  19866894283801_2
gccactggcctggtagtgacctcaggacatgatgcaggaaggaggggactgacaggttcctctgctctgtgttataatcagatgaagctgtagattttcagggcatctgaccatggaatccacaggccctggccatggctcaccttggccattgtaacttctcctggcatgcaagttcttgctcctcttctctgtcctgacatgtactatctgggacattcttactggttctcagtaagctcagctgaatgataccctacacgatcctcttgaacacagaagtattgacttctragggasacaaagtgttaagaggcaggtttctttatgggcctycaatgacaactgagtaattcatagactgctgtcatctggtagcctggttatgaagtaaaactgtccaaaagctgtgtcagaaacacttcaaggagatgcttgtattctgagaaggaatgtgccaactccctgatttcccctggaattacggagtaaaattcttcagtttatttactgattttcaaaagacaggcaagattatgaaattacactgtaaaaatctatttgttattactctgttttgaggacctaagcctactgact

SEQ ID NO: 44694 - DNA, 600 bp, Chicken  19866894283801_3
ggaaggaggggactgacaggttcctctgctctgtgttataatcagatgaagctgtagattttcagggcatctgaccatggaatccacaggccctggccatggctcaccttggccattgtaacttctcctggcatgcaagttcttgctcctcttctctgtcctgacatgtactatctgggacattcttactggttctcagtaagctcagctgaatgataccctacacgatcctcttgaacacagaagtattgacttctragggasacaaagtgttaagaggcaggtttctttatgggcctycaatgacaactgagtaattcatagactgctgtcatctggtagcctggttatgaagtaaaactgtccaaaagctgtgtcagaaacacttcaaggagatgcttgtattctgagaaggaatgtgccaactccctgatttcccctggaattacggagtaaaattcttcagtttatttactgattttcaaaagacaggcaagattatgaaattacactgtaaaaatctatttgttattactctgttttgaggacctaagcctactgactaaccatgatgtagaacaacttaygyattatgctaca

SEQ ID NO: 44695 - DNA, 600 bp, Chicken  19866894283801_4
ctttatgggcctycaatgacaactgagtaattcatagactgctgtcatctggtagcctggttatgaagtaaaactgtccaaaagctgtgtcagaaacacttcaaggagatgcttgtattctgagaaggaatgtgccaactccctgatttcccctggaattacggagtaaaattcttcagtttatttactgattttcaaaagacaggcaagattatgaaattacactgtaaaaatctatttgttattactctgttttgaggacctaagcctactgactaaccatgatgtagaacaacttaygyattatgctacagctgtaaggcctcgtgcttccttgctttcgctgagactcagtagttaggaggacagccttgaactgcagagtccgtcccttctgccccagcaattcttgccagcatgatccaaccacgctgcttcagtttgtctccttgctgctctctccctttcagagcaatagtagcactgggggggaactatcacgtgggaatgggagtagtaatccctgcttttggagaaggattcatccacctgcagctcatttccatgctcatcctaaacctgacttgaacccttgctcat

SEQ ID NO: 44696 - DNA, 600 bp, Chicken  19866894283801_5
ttatgggcctycaatgacaactgagtaattcatagactgctgtcatctggtagcctggttatgaagtaaaactgtccaaaagctgtgtcagaaacacttcaaggagatgcttgtattctgagaaggaatgtgccaactccctgatttcccctggaattacggagtaaaattcttcagtttatttactgattttcaaaagacaggcaagattatgaaattacactgtaaaaatctatttgttattactctgttttgaggacctaagcctactgactaaccatgatgtagaacaacttaygyattatgctacagctgtaaggcctcgtgcttccttgctttcgctgagactcagtagttaggaggacagccttgaactgcagagtccgtcccttctgccccagcaattcttgccagcatgatccaaccacgctgcttcagtttgtctccttgctgctctctccctttcagagcaatagtagcactgggggggaactatcacgtgggaatgggagtagtaatccctgcttttggagaaggattcatccacctgcagctcatttccatgctcatcctaaacctgacttgaacccttgctcatag

SEQ ID NO: 44697 - DNA, 600 bp, Chicken  19866894283807_1
gacttgacttgtgggtattgatagacacctggcagaatatagagtgagtggatagggttgtggagcactggaaaaggcttccttgggaagtagctgagtaaccatctctggatgtatttaaaagatgtgtagatgtggtgcttatggacatgatttagaggcatcttgaaagtgctaggctaatggttggacttgaccttagaggccttttgcatcctaaatgattctatgatttcacgttctcatttcaaaaagcaagcacttaagtttttataaaagccaaagaactttctaagattycctgcccaattgctgataaatcaaagatctgtcatcagaaatgttaatatgaaaccacgccattgacactacacctaaatttcagacttagtgttttaagttccagttctattatctgtgcaccaccagcagtaaaaccgtactctaactttacatcctaaattcaaattatctcaaaattgtctggggtctttctgctgttgaggaagtagaaagagtgcaacaacttcttccagtctacagtgaaggtggtgaggcattggaacaggctacccagagatgtggttgacgccctatccc

SEQ ID NO: 44698 - DNA, 599 bp, Chicken  19866894283810_1
  misc_feature (1)..(91): n is any nucleotide
nnnnnnnnnnnnnnnnnnnnnnnnnnnnnnnnnnnnnnnnnnnnnnnnnnnnnnnnnnnnnnnnnnnnnnnnnnnnnnnnnnnnnnnnnnnctgcagaatttgaaagattctgaagctgacaagtgatactaattatagttatcttggtagtcctgttaacaggaatacatggttagggagtgctctgtactgcctttttgtgttaccagcagcagtcttatgcattagcatgctacaacatttgtatttactagagctatgggttttctgtatttatattttatttaaattaagaagcyatttgccagtggctcctgtgacattgaaagttcatttggtagaagattagtcaggaaatagcctgggtcttattcagtactgaccttgggaaaataaatacattccaatattggattttggcagatcacacctggattttttaaatttattttttatttcccctccgtggcttaattacttgaatcttattattgtatttttatatgcctaaactgaacattgaacttggggcttcaagggcatcttgaaaagatacttacttggaagttaacaaataatctcattgttaatgaggcaa

SEQ ID NO: 44699 - DNA, 599 bp, Chicken  19866894283812_1
  misc_feature (1)..(101): n is any nucleotide
nnnnnnnnnnnnnnnnnnnnnnnnnnnnnnnnnnnnnnnnnnnnnnnnnnnnnnnnnnnnnnnnnnnnnnnnnnnnnnnnnnnnnnnnnnnnnnnnnnnnnatttgattttttttttaaagtgttggctgtatctagaacagtaggaagatgtgagcattctgaatctgagtggtgttgacttactcttatgtttaagacattcaccttcaatttgcagctctgggcaatgaagaagttctctaggaggaggtgagtgtagcttggagaggttgttatgcttacaagtacagtctagatytttgatatcttgacctggaggacaaggagtcactgttctgtgtctgagagaggattggagaggtattagttgagtctattccaccttgtaaatagtatatcgttatgatgctaaatagagttttgcccatagttgtgtaaattcacaacttcttgatgctgctcagtgtwcataattcatacagaagactagctccaagttactatcaagtctctcttaattgaaacattccactcttctaacagtgagacttctaacaaaataggatctctgtgaagaggcttgataagtattttgca

SEQ ID NO: 44700 - DNA, 600 bp, Chicken  19866894283812_2
gtggtgttgacttactcttatgtttaagacattcaccttcaatttgcagctctgggcaatgaagaagttctctaggaggaggtgagtgtagcttggagaggttgttatgcttacaagtacagtctagatytttgatatcttgacctggaggacaaggagtcactgttctgtgtctgagagaggattggagaggtattagttgagtctattccaccttgtaaatagtatatcgttatgatgctaaatagagttttgcccatagttgtgtaaattcacaacttcttgatgctgctcagtgtwcataattcatacagaagactagctccaagttactatcaagtctctcttaattgaaacattccactcttctaacagtgagacttctaacaaaataggatctctgtgaagaggcttgataagtattttgcaaggtgtttgcaaaagggctgtgaaaaaggtgaggtcagtgtctgtgtagacagggtggtaagcgttttaaacattatattcttaactgttgctacaacattacttttagagctacaattttagattgtcctcaaccttgaatcttgttgaaagatcaaagttgattcttta

SEQ ID NO: 44701 - DNA, 600 bp, Chicken  19866894283813_1
acacactggaggctgacgagctggaaagtagctctggagaaaaagacctttgtgtcttggtggacactccgttgatcatgagtgaaaggcgagcaatagcctgcttgtctgcattaggaagagtgttgtcagcagattgaaggaggtaatcctctgctctggtaagacacatctgaagtgctgtgtcctgttctgggcttcctggtacaagacaggtgcggagatagtccagaaatacatgctgaaaaggatcaaggcactggagcatctgctgtatgaggaaactctgaaagctggaaytgtcctgcctgaacaagagaacgctcggggagaatcttatccatgtgatgaggggaataaggaaagtagagttagagtcttcacagtggcgtcaatgaaatggcaagtcaaagtcaaggggtataaatagaaatwctataacttccatttaaacataagaaaaaatcttttttttttttttttttactatgaaggtagctgaacacttgaasaagttgtgtcttgaagtctccatgcatggagatattcaaaacttgactggacacagccaagagcaacatgctgtaggtgactgctttg

SEQ ID NO: 44702 - DNA, 600 bp, Chicken  19866894283813_2
attgaaggaggtaatcctctgctctggtaagacacatctgaagtgctgtgtcctgttctgggcttcctggtacaagacaggtgcggagatagtccagaaatacatgctgaaaaggatcaaggcactggagcatctgctgtatgaggaaactctgaaagctggaaytgtcctgcctgaacaagagaacgctcggggagaatcttatccatgtgatgaggggaataaggaaagtagagttagagtcttcacagtggcgtcaatgaaatggcaagtcaaagtcaaggggtataaatagaaatwctataacttccatttaaacataagaaaaaatcttttttttttttttttttactatgaaggtagctgaacacttgaasaagttgtgtcttgaagtctccatgcatggagatattcaaaacttgactggacacagccaagagcaacatgctgtaggtgactgctttgagaaaggaattgtactagatggtcttcagacagccttccattctcagctactctaattttgactgcggtgttgttgaaaccatgacaagactggattgctacagaaagattttgcagtatttactctacaaaatt

SEQ ID NO: 44703 - DNA, 600 bp, Chicken  19866894283813_3
caggtgcggagatagtccagaaatacatgctgaaaaggatcaaggcactggagcatctgctgtatgaggaaactctgaaagctggaaytgtcctgcctgaacaagagaacgctcggggagaatcttatccatgtgatgaggggaataaggaaagtagagttagagtcttcacagtggcgtcaatgaaatggcaagtcaaagtcaaggggtataaatagaaatwctataacttccatttaaacataagaaaaaatcttttttttttttttttttactatgaaggtagctgaacacttgaasaagttgtgtcttgaagtctccatgcatggagatattcaaaacttgactggacacagccaagagcaacatgctgtaggtgactgctttgagaaaggaattgtactagatggtcttcagacagccttccattctcagctactctaattttgactgcggtgttgttgaaaccatgacaagactggattgctacagaaagattttgcagtatttactctacaaaattcagtaagacattctctaatgtgcaacatttgaagcactagattttcaaactggaattatcaaggaatcaaggaatta

SEQ ID NO: 44704 - DNA, 599 bp, Chicken  19866894283818_1
  misc_feature (1)..(137): n is any nucleotide
nnnnnnnnnnnnnnnnnnnnnnnnnnnnnnnnnnnnnnnnnnnnnnnnnnnnnnnnnnnnnnnnnnnnnnnnnnnnnnnnnnnnnnnnnnnnnnnnnnnnnnnnnnnnnnnnnnnnnnnnnnnnnnnnnnnnnnnnnagagctctttctaggctctggaactgagaattttacttgacagaattaatgcctttcagtgaatatatcatgctaagcttggcctatagaagctatagaagataatgggaaatatggtattgtttctactagattcacatggctggaaatggaaaaaagtccrtgaagttgatatgctatcttagttatccatttgatgtaacatgcttagttctttttcatgatagatccttgattctctgacagggacttcagtggggcaggcccagggccacatatagatgcctgagagaaaactcagttcccagactgtccctggccttactgctttcccaaacatgaagacttcccttagcagagtttctcaaaccagaggataatgtttacattcatgtatgtgcactctgcgccccagcatgggcccacgtctatagcagtaaatggcagtgtggcatatagttc

SEQ ID NO: 44705 - DNA, 434 bp, Chicken  19866894283818_2
catgaagacttcccttagcagagtttctcaaaccagaggataatgtttacattcatgtatgtgcactctgcgccccagcatgggcccacgtctatagcagtaaatggcagtgtggcatatagttccagctggctgtgctacaggtagcaaagcagctttcttctgcatatatgcatacatatatatttgcacttctgtgatttctttttaatataatgtgagattcgacccaacgttccctttaactgttaagaaatatctactttccaacgtatacattggagtggacacattaccttyraaaatgtaacttccctagagacatgtaagaattataatgaaatattattgaactatacaatactgtgctttatggagggacagtagctgacaaagcacttgccacgacttggagcttggaaccggacaggcaa

SEQ ID NO: 44706 - DNA, 433 bp, Chicken  19866894283818_3
atgaagacttcccttagcagagtttctcaaaccagaggataatgtttacattcatgtatgtgcactctgcgccccagcatgggcccacgtctatagcagtaaatggcagtgtggcatatagttccagctggctgtgctacaggtagcaaagcagctttcttctgcatatatgcatacatatatatttgcacttctgtgatttctttttaatataatgtgagattcgacccaacgttccctttaactgttaagaaatatctactttccaacgtatacattggagtggacacattaccttyraaaatgtaacttccctagagacatgtaagaattataatgaaatattattgaactatacaatactgtgctttatggagggacagtagctgacaaagcacttgccacgacttggagcttggaaccggacaggcaa

SEQ ID NO: 44707 - DNA, 582 bp, Chicken  19866894283826_1
cgtttgctttccactttccttttctcaaggttttcggggtgagcccacgttccaaagttaaaccagagtccagcccccatagctgcacccacactgggcattcagtgacctttggactgagcagcaccacagcccttcctgcagggaaacacctcctcccgagggggcaaccagagtgggtgattcttcaggggtccaattccccgcatcctgcccgtctttgggcacagaaatccactgagtgtggagctggttgagctgcaccaggagcttcgcttcacagcagcacctcgccgttcstcctggccctttcacagcggtggggagggaggtctgggggtccttggcttggctcccagaacagcttggcttggaaggaaccttacagccccaacccgtgctgtgggctggcaccattgcctcgggtggcagctgcaggtggggctgtgactgcagcaggtggaggcgaggacttggctggcgatgaggtgaacgcacagcagctccctgcgggcgtaaaatcacagtcataaggtctgaaaagacctcatcgatgcacggagtccaacagggaactcatca

SEQ ID NO: 44708 - DNA, 600 bp, Chicken  19866894283828_1
caagataaaagatgtagtcctctctgtcaccattggctgctcagtgacttcgtggtttctcattataatgcagttccaatatcttacaaatccgtaacttgagaaccaggacacaaagaaaaggagagtaaacagagcaaggcaggtcactgttttccagtggacagaaatcaagccagtgagtctccctagggcagtggtgagcgtagcaagggcaatcatctgagtataaagccaaactttccttctgaaggctctatccatctctggttcttctgttgtttggcagtcacttattartgtaaaaggcatcccataaaaatattcaaacccatggttcaaagggtgatgacaatggtcgtttcggtgttcacagttaacacctagatgccactttcctgaaaatacatattattaaaatgtaaagaaataatatgtaaaaatgaacttttcctcattaaaacatttatcaaaaaatgtttttgtttctttttcttgcttgcatctaaatttccaccggagttactggttctctrtatacatattcatgtcctgtagctatgatcaaatgcaaataagtctggactataaaaggatata

SEQ ID NO: 44709 - DNA, 600 bp, Chicken  19866894283828_2
aaactttccttctgaaggctctatccatctctggttcttctgttgtttggcagtcacttattartgtaaaaggcatcccataaaaatattcaaacccatggttcaaagggtgatgacaatggtcgtttcggtgttcacagttaacacctagatgccactttcctgaaaatacatattattaaaatgtaaagaaataatatgtaaaaatgaacttttcctcattaaaacatttatcaaaaaatgtttttgtttctttttcttgcttgcatctaaatttccaccggagttactggttctctrtatacatattcatgtcctgtagctatgatcaaatgcaaataagtctggactataaaaggatatatggaaaaaatcagtttttcatatctctatgaaatgtagggccttcctgaagacctgttaggtatgaaataggagaagggagacctttggaaagcacagggaaaaataacactgttctattgtctcttcactttcaagatgctatgaagactggtttctggaaagtttttaataacttaatggaaggatttcagcaagactcagtgatgtttggtgtcaatcaaatagcatgcatct

SEQ ID NO: 44710 - DNA, 600 bp, Chicken  19866894283840_1
agaacttacggcttcctactgattaattcaacagatgagacagttggaagatctctcacagaaatgaatctttagccaaatagcatttttttttccccagagacatcacatcatcatttttactgtctgggaagtagtatgctcctgttttacttcttataacctttggcagatttatctcacgatatacccagatcataccgtagaaagccagagagctgtcttagcaaaacttttccatatattatttcatgcctgtctttggagctttttaggcacaaacttcctgctaatttatgycttcacagcttttaggaatacttggtaagaggtaatgtggattttgtgtgatagaaaggcatgagaatgacatgagtggactatataggttaawtgcacaagttgactaaattctatgcaccttaaactgaaagtttccgattctgtgctggcgcagaaattgaggtcaggagtgaggagaagctgtgtttggtagaaataactaattgatataaaaaaaattacttgatggtagagtcagttgtcatctgcctttccagttttgtttcagagaacaaagatatttcccattgtacttta

SEQ ID NO: 44711 - DNA, 600 bp, Chicken  19866894283840_2
ccccagagacatcacatcatcatttttactgtctgggaagtagtatgctcctgttttacttcttataacctttggcagatttatctcacgatatacccagatcataccgtagaaagccagagagctgtcttagcaaaacttttccatatattatttcatgcctgtctttggagctttttaggcacaaacttcctgctaatttatgycttcacagcttttaggaatacttggtaagaggtaatgtggattttgtgtgatagaaaggcatgagaatgacatgagtggactatataggttaawtgcacaagttgactaaattctatgcaccttaaactgaaagtttccgattctgtgctggcgcagaaattgaggtcaggagtgaggagaagctgtgtttggtagaaataactaattgatataaaaaaaattacttgatggtagagtcagttgtcatctgcctttccagttttgtttcagagaacaaagatatttcccattgtactttatcgtacaaataatttctcttattattttacaatttctgactatcatcaacataaagcttaataagcttactgtaaagcgcttttgctgctaatt

SEQ ID NO: 44712 - DNA, 600 bp, Chicken  19866894283841_1
gggttggcctcttctcccatgtagttggtgataggacaagaagtaatggctttaagttgtgccaggggaagttcaggttcaatattaggaaaaaattattctccaaaagagtgttaatgcattggaacaggctgcctggggaagtggtggagtccctggaggtgttaataaaaggtgtagatgtggcacttagggaggtggttagtgggcatggtggggacagattggtggttggactagattaccgtagaggtcttttccaatgttaatgattctatgattctatggattatgaggttmtctctgggactcctctctcatggcttctccaccacatctttggccgcactactgtgatgtagatgcccttctgaggaggatctgaaagaggcatgccataccttccacaagctgggtacagaatttccctcctgtgcatcttgctgaccatactggagcagtagttggagctcagtttccttcctgttgcttctcccataacaaaaggccagagaagatggtgttctagaatgaactcaccaacatgatcttgcattagactttttgtctagcatagatgaggaaagtcacatttctaaa

SEQ ID NO: 44713 - DNA, 600 bp, Chicken  19866894283843_1
aggttgtggtgacctctgcagcctttgagctgcatgcaaagctgaagagacagcatccaacagctctgcatgatgctggcacctgtggggctgctgactgatagcaaattgcttggctctgtcttctgtgtcactactggaagaagcacagccttgtggtgtttttttcttagtgatatgagagatggtcaaattattgtagctgaagttttcctaaaagaggaagtgagcctcagagaaagacctgtcaggaaaacttgagatgttcaaatgttagtagttataaaccaatgtgttttktttttttaagtaaaacttgtatagtaaataataaaatcttagttgtgaaaattgttacttagtggtgtcaaatctttattgataaacagatggatgtaacagatactatgcagtctaagtacagaactgcatttctgttccatgcaagtggaagcattaaatgagtacagaacatcagaatgtgcacgaatcaatggggttactatggcttcttgatttacccagtgatatgaacaagtcatgtcctgaatgttattctctgaaggctattttggctgctagtataaccctgaagaagac

SEQ ID NO: 44714 - DNA, 600 bp, Chicken  19866894283845_1
gggctacagctgcgagaaacgggccacctacgtcctcgatggcaaagcctgcaccgaagccttcctcagctgctgcctctacatcaagggcatccgcgacgaggagcgcgagctgcaatacgagctggctcgaagcaagtgctgggagcagtggggtgacagcagggagggatggacgggaagagcttgggaaatgcttggatggatgttaagagaagagtgggtgatgcttgggtgatgcttgcgtgtatcttgggaacgcctgggcaaaagttgggtgaagcgggagcaaagctcacrtgaagtttgggggaagcttcagtgaactgtggtcaatgcacgagtggtcttgtgcatatcttgggagatgtttgggcagtggttgggtgatgctggcgcaaaggttgggcagggatggcccagcaattgggagatcgtggggcaaagtttaggtgakgctcgcacaaaggttgggtgacgttcgggcaaagattgggtgatgctctggggaagcttcagtgaggtgtgatcaatgcacgagtgatgcttgcacgtatcttgggagatgtttgggcaaaggttggatgaagcatgagtgaa

SEQ ID NO: 44715 - DNA, 600 bp, Chicken  19866894283845_2
gacagcagggagggatggacgggaagagcttgggaaatgcttggatggatgttaagagaagagtgggtgatgcttgggtgatgcttgcgtgtatcttgggaacgcctgggcaaaagttgggtgaagcgggagcaaagctcacrtgaagtttgggggaagcttcagtgaactgtggtcaatgcacgagtggtcttgtgcatatcttgggagatgtttgggcagtggttgggtgatgctggcgcaaaggttgggcagggatggcccagcaattgggagatcgtggggcaaagtttaggtgakgctcgcacaaaggttgggtgacgttcgggcaaagattgggtgatgctctggggaagcttcagtgaggtgtgatcaatgcacgagtgatgcttgcacgtatcttgggagatgtttgggcaaaggttggatgaagcatgagtgaagctcatgtgaagcttaagaggggctcggttgatatttaggcaatgccaaggcaaagactgggcaacgctcaggtgaaagttgggttgtgcctggataatgcttggctgacacacggatggtgctggggatgattcgggcaccatccaacgggtggga

SEQ ID NO: 44716 - DNA, 599 bp, Chicken  19866894283849_1
  misc_feature (1)..(104): n is any nucleotide
nnnnnnnnnnnnnnnnnnnnnnnnnnnnnnnnnnnnnnnnnnnnnnnnnnnnnnnnnnnnnnnnnnnnnnnnnnnnnnnnnnnnnnnnnnnnnnnnnnnnnnnntgtgctgacaaaatgatggcatcctctaaaatacacaaacacgctcaaaagaaggaaaaccatgaaattgaggataacaaacaacaaagagaagctcatacacaaaatctgttggtgtttatgagtcactgaggccttcctgtcccatctcagaagttgtgggaatgcactgcagcccatcctctccctgcaaagyactgaggtgctgttaggtgctgtttccctcccagtgctgggccgggggcagcccctgcacaaaccaatggctattttttccttgtttttctcatccttcgaagtaggaaaacaaacctgaggagcaaatgctgcactgtgtgtgagcagggagtgcagctcggcgatgggattgtgctgtgttcctgcatggccatctgacacggggggctttacaatggaatggatgggaaatgccaggagaagctgaagtgctccagacatgaggtctttgtagaagcccattcttgactgttaaca

SEQ ID NO: 44717 - DNA, 600 bp, Chicken  19866894283850_1
ctttccattgtatgctcagtgtaaatgaaaatgaaagactgcttgctcatccaaacttctacaaacagaaaatgggagtgaataggagtgtatctaagaaaatctttatgagtgttggctttgttacacgcagaaggtgcagtgtactataaaatacattggtcagtctgaatgtaagcctcctattcatttccatggaaattacaacagataaaatgggcaccagtaacactatttgatagagcaaattctcagctacaaaacactgtttttcaacacagtcaccatcatcagcaacgytttttcacctgccatgaacaagagcctgcatgccattctcataaaaatctgcaccaacggaggtrcctcattgtctcacagctgccaggatggtgtcattgctaggaaaatgttgccccacacagtccatctgtcatgagcctgaacagatggaagtcagaaagcgccaaatccagactttaatgtggatgtggtgggccaatccagccaagattggcagtgtgctccacagttttcaatctggtatgggagctggtaatattgtgttgcgagagagaggttgttttcctctctggtctc

SEQ ID NO: 44718 - DNA, 593 bp, Chicken  19866894283850_2
cagaaaatgggagtgaataggagtgtatctaagaaaatctttatgagtgttggctttgttacacgcagaaggtgcagtgtactataaaatacattggtcagtctgaatgtaagcctcctattcatttccatggaaattacaacagataaaatgggcaccagtaacactatttgatagagcaaattctcagctacaaaacactgtttttcaacacagtcaccatcatcagcaacgytttttcacctgccatgaacaagagcctgcatgccattctcataaaaatctgcaccaacggaggtrcctcattgtctcacagctgccaggatggtgtcattgctaggaaaatgttgccccacacagtccatctgtcatgagcctgaacagatggaagtcagaaagcgccaaatccagactttaatgtggatgtggtgggccaatccagccaagattggcagtgtgctccacagttttcaatctggtatgggagctggtaatattgtgttgcgagagagaggttgttttcctctctggtctcactctaaaaatttgagcattcagcttagccagggacgcagtgtagtagtgctcagagt

SEQ ID NO: 44719 - DNA, 600 bp, Chicken  19866894283852_1
ccctggtgtgtcagtcatagctatgttccagggcactgcctcgcgtaattgcttccctcttttggctggtcttcagcaaactgcagaaatgaacatgtcctcatctgtttccaacagggcaagcactgtattcttgatgtgtcaggaaatgcgatcaaacgactacaagttgcacaactatatcccatcgctatcttcattaagcctaaatcatgggagcctctgatgtaagtataaactcctccaagtgttgttttttttttcagaatgcatcctcaacaggtcttcagtctggcctcyragatcaatagtaacaaaaggacaggggaacagtgaagacttgttctccatgcatgtcagccactgtaacacggagtaccaatgaatgagccaaagctgcctttgaacctttyccactgggacatatgggcttaggtgcaagtccatgaaagtctccccaccagcgcacaatgcacttgttacaacctggacagctaattcaccaaggatttgtgtgtttcaccttgtcccatccagtcttggggtatagtttggtcactacacacatgagcaaagcagaggataaacctgtgtcagatt

SEQ ID NO: 44720 - DNA, 600 bp, Chicken  19866894283852_2
cctggtgtgtcagtcatagctatgttccagggcactgcctcgcgtaattgcttccctcttttggctggtcttcagcaaactgcagaaatgaacatgtcctcatctgtttccaacagggcaagcactgtattcttgatgtgtcaggaaatgcgatcaaacgactacaagttgcacaactatatcccatcgctatcttcattaagcctaaatcatgggagcctctgatgtaagtataaactcctccaagtgttgttttttttttcagaatgcatcctcaacaggtcttcagtctggcctcyragatcaatagtaacaaaaggacaggggaacagtgaagacttgttctccatgcatgtcagccactgtaacacggagtaccaatgaatgagccaaagctgcctttgaacctttyccactgggacatatgggcttaggtgcaagtccatgaaagtctccccaccagcgcacaatgcacttgttacaacctggacagctaattcaccaaggatttgtgtgtttcaccttgtcccatccagtcttggggtatagtttggtcactacacacatgagcaaagcagaggataaacctgtgtcagattc

SEQ ID NO: 44721 - DNA, 600 bp, Chicken  19866894283852_3
acagggcaagcactgtattcttgatgtgtcaggaaatgcgatcaaacgactacaagttgcacaactatatcccatcgctatcttcattaagcctaaatcatgggagcctctgatgtaagtataaactcctccaagtgttgttttttttttcagaatgcatcctcaacaggtcttcagtctggcctcyragatcaatagtaacaaaaggacaggggaacagtgaagacttgttctccatgcatgtcagccactgtaacacggagtaccaatgaatgagccaaagctgcctttgaacctttyccactgggacatatgggcttaggtgcaagtccatgaaagtctccccaccagcgcacaatgcacttgttacaacctggacagctaattcaccaaggatttgtgtgtttcaccttgtcccatccagtcttggggtatagtttggtcactacacacatgagcaaagcagaggataaacctgtgtcagattcactgtgtgtacttcttcatcaacccttcatttgcttgaaggtctgtaagaggataggcaaggacctgtaggactggagcagggcaaacaatccttaaaagaaggaaaagaga

SEQ ID NO: 44722 - DNA, 600 bp, Chicken  19866894283871_1
cagaacttgctgatgctatttttgacctgaaaattgcataggacttgcatatacctaagaaaccatgcgtctcctcatgccacgttaccacagttgctgtcagcagaaagactctcaacaaacacatttggtattaaaggaaaaagtgtgattagtcagcaagaccaactcactacgggataagttactttttcatttactcaaatatttggtatgaaatagataaaatctactgacctgtaaggtagactaaacagcacactttttccttacaaatgtgataaagaacagtaaatgctrttttcagatgtctgaaatagtttctaactcttgcttgtttttcctgttgttagggttatgaatacaaaagcaagtctgaggtctttaccctttaagatactgtccttaagtcttatacctcattgtcagaatacacacattttactaaaataagatttttgatctcgtwagaacgaacagcagagcagaagtatgctgataactctaactcttaaagggatgccatctatctggtcatgaagtgctggccttccaatttagaatggttaagaatacagataacagtaaatacttatgtta

SEQ ID NO: 44723 - DNA, 600 bp, Chicken  19866894283871_2
tcactacgggataagttactttttcatttactcaaatatttggtatgaaatagataaaatctactgacctgtaaggtagactaaacagcacactttttccttacaaatgtgataaagaacagtaaatgctrttttcagatgtctgaaatagtttctaactcttgcttgtttttcctgttgttagggttatgaatacaaaagcaagtctgaggtctttaccctttaagatactgtccttaagtcttatacctcattgtcagaatacacacattttactaaaataagatttttgatctcgtwagaacgaacagcagagcagaagtatgctgataactctaactcttaaagggatgccatctatctggtcatgaagtgctggccttccaatttagaatggttaagaatacagataacagtaaatacttatgttagctttgagaactcctctgagaagggacaaaagaagggccaaaaactgtctactcatcaagttcagcaggtagacaactactacatattaataacatatttctgtgctcagtttgcccacctccagtcattcagttaattagtatcaggacacaagactaaaaggcaaat

SEQ ID NO: 44724 - DNA, 599 bp, Chicken  19866894283874_1
  misc_feature (1)..(94): n is any nucleotide
nnnnnnnnnnnnnnnnnnnnnnnnnnnnnnnnnnnnnnnnnnnnnnnnnnnnnnnnnnnnnnnnnnnnnnnnnnnnnnnnnnnnnnnnnnnnnnaagtatcaaagaagtacagctacctcctgtgagaagcagaggccatacagacctctgaccatgtatcctctccctaggcaagtacatacgcaaccacatgcgtacgcaaaaatccaggtggggatgaagaccaatccagcacaggactgcactgaagtatcagtactcaacacagctctgcctacagctcaaggcagctgccattyggcatcctacagacgctgcactgtgcacttggcctgcggcacagatcctgcatccctgaaggaaataaagactcgaggctgcactcccagccttcccatataatcaagagtgaccaaaactttccacagcccattaatccagcatgcccactaattcccttgcttcacaatggatttgcattagtcactgtaaaaactgactacacagcgttgctgttacacagagcgtagaaaaccagtcctgatcttacgcctttattcgagccacccataaatcacctcacaactrggttatatta

SEQ ID NO: 44725 - DNA, 600 bp, Chicken  19866894283874_2
agctgccattyggcatcctacagacgctgcactgtgcacttggcctgcggcacagatcctgcatccctgaaggaaataaagactcgaggctgcactcccagccttcccatataatcaagagtgaccaaaactttccacagcccattaatccagcatgcccactaattcccttgcttcacaatggatttgcattagtcactgtaaaaactgactacacagcgttgctgttacacagagcgtagaaaaccagtcctgatcttacgcctttattcgagccacccataaatcacctcacaactrggttatattaattaagcatgattaacagggagtagctcaactcaatagcatttgtaatcacacggcagtatttttcttgcattagtttcatttgaagttttctcccttggacataagctgtcaagccttcttacagagaaataattcttcctttttttaaacaccctccagctcctggcagctgctcttgctgtcagcattcagccttccagaaagaaagaatttatttcctgtctatgtgaagtctccaacaccttccatccagagcaaaagaacatcagtagcacatcacctttgaaa

SEQ ID NO: 44726 - DNA, 600 bp, Chicken  19866894283878_1
tagtcttggctcattttggcttttgttctgccaccgttatttactttgaagttgcatgggtcttcctgacagagagtttggagactgcaagcagagactcttgattatgcacacaaaacacttaaatatagttttgttacacctcattgcatcttctcttattagtcagcaagggctgactatgtggatgtgctttgcatctaggagtttggttctgcaggcatctaagtcggtttcacatctgcatttttttgttttcctctgtactttgataggaaagctgctgataagagcggcagwgcatgagcagcttgtgatcgtgattagagaatatgttccttctgtgtccttcttctgcttggtctgctgggaataggttgtttatattgctggaaattgttaatgcggttaaaccatcttccagcatgcaaacctatgtcattccactctgttagtgtcccttggctataaatgaatgctttgatgtaattgtatttgagttgctttatgatttattaacaattccattaaaataccatggatgtctgctacagggagagttatgcaacccacagtagaaaagatgtgaaatttcaaagt

SEQ ID NO: 44727 - DNA, 600 bp, Chicken  19866894283878_2
ttccttctgtgtccttcttctgcttggtctgctgggaataggttgtttatattgctggaaattgttaatgcggttaaaccatcttccagcatgcaaacctatgtcattccactctgttagtgtcccttggctataaatgaatgctttgatgtaattgtatttgagttgctttatgatttattaacaattccattaaaataccatggatgtctgctacagggagagttatgcaacccacagtagaaaagatgtgaaatttcaaagtttctcaaaaatgctttaaagaatcttttctttatstttgattttctttctttctttctttcttttcttttttattcccctatgttaagaaaactgaatcaaatgcagagcttggtgttacactgcataagagcttgcttagggcttctgacttgtacagattgttatctttcttaaacacattaaaaacattcctctttcataaaccacattaaaatgtttgctgttaataccgagtagtatctctcaagtggtatttctgtagtgcagcttgcagtgtaaaccactttcttagagcagtgatgacagcttacttgagagctcagcctcagctct

SEQ ID NO: 44728 - DNA, 600 bp, Chicken  19866894283885_1
gaggtcatgcgagttgaggctcactgaagctttgcagccttccttggaaacacagttgatccaacagctgtgatgtagctccctccatctagatggttttacttcaaatatgtctttttgttcgtagagtatcagccttagttccctgctgttctagggtgttcttgggagtagtcagcccactttaaaaaaaaataaaaaaggcaactggatcattctgaaatatttctcaagatttggaactgcggtgcgcaaggaagagaacttcaaagattatttcaaaccaataatcaaggactsaatctttgaaatagttactgttttgaaaagttgaacatatctaccagaccatcatgcattatatacctattaaatgttagcagctgtgtatactaacagtcagtgtacccaaaatgaaaaatsgctgtagtcagctcttttaactttgttttaggctggtaaacagacttgttgaggattttgccagtctaccctttgaaaaaattcatgttgtcttttcattcactggtaccataagaaatggaataaactcaatggtattctatttgtagagggggggaaatctcaggcagaaaaatc

SEQ ID NO: 44729 - DNA, 575 bp, Chicken  19866894283885_2
gtagagtatcagccttagttccctgctgttctagggtgttcttgggagtagtcagcccactttaaaaaaaaataaaaaaggcaactggatcattctgaaatatttctcaagatttggaactgcggtgcgcaaggaagagaacttcaaagattatttcaaaccaataatcaaggactsaatctttgaaatagttactgttttgaaaagttgaacatatctaccagaccatcatgcattatatacctattaaatgttagcagctgtgtatactaacagtcagtgtacccaaaatgaaaaatsgctgtagtcagctcttttaactttgttttaggctggtaaacagacttgttgaggattttgccagtctaccctttgaaaaaattcatgttgtcttttcattcactggtaccataagaaatggaataaactcaatggtattctatttgtagagggggggaaatctcaggcagaaaaatcattttttcttaatgaaaaagtatttgaatagaagtatcttgacaataggacctttaagagtaaatgtgctgcttgctgttggtttcctgatttgcttg

SEQ ID NO: 44730 - DNA, 599 bp, Chicken  19866894283886_1
  misc_feature (1)..(94): n is any nucleotide
nnnnnnnnnnnnnnnnnnnnnnnnnnnnnnnnnnnnnnnnnnnnnnnnnnnnnnnnnnnnnnnnnnnnnnnnnnnnnnnnnnnnnnnnnnnnnnatactgaacttgcaaaggatcttggtactcctactgctgagaaactctgagactcagttttttcagatgcgacagtgcatcttgtgaacactggacctggaactctttgctctcttgattctgaagtgcagttaatgcaaacttcctcagtaggtctgaaattgcagcattgatggcgacagatccaagcaccagcagtaagctaygtaaagagagggaggcaagtgacaaattgataaagaaagtaccaaagaagacagaatggggaaaagggccaggagcaaagagcttacgaaacaataaccaggagccagggagagttgggatgtkagaggtgtgtgaatctaggaagactgagaaaggaaaggtaytggtcacaagtctccctaaccttctttctgctgttggtacagcccagctagcaggcaccgcgtggattccaggttccggaaaatattagtggaacggatactgaaagacagaaagcagcgtgtgaggtagcact

SEQ ID NO: 44731 - DNA, 600 bp, Chicken  19866894283886_2
ctactgctgagaaactctgagactcagttttttcagatgcgacagtgcatcttgtgaacactggacctggaactctttgctctcttgattctgaagtgcagttaatgcaaacttcctcagtaggtctgaaattgcagcattgatggcgacagatccaagcaccagcagtaagctaygtaaagagagggaggcaagtgacaaattgataaagaaagtaccaaagaagacagaatggggaaaagggccaggagcaaagagcttacgaaacaataaccaggagccagggagagttgggatgtkagaggtgtgtgaatctaggaagactgagaaaggaaaggtaytggtcacaagtctccctaaccttctttctgctgttggtacagcccagctagcaggcaccgcgtggattccaggttccggaaaatattagtggaacggatactgaaagacagaaagcagcgtgtgaggtagcacttgctccttcacatggctggggctgcaactggggargacttgctggaactgaggattcagctttcatcatggctttggaaacctgtgcttgggtttcatctggccctgctatagataccttaaagt

SEQ ID NO: 44732 - DNA, 600 bp, Chicken  19866894283886_3
acagtgcatcttgtgaacactggacctggaactctttgctctcttgattctgaagtgcagttaatgcaaacttcctcagtaggtctgaaattgcagcattgatggcgacagatccaagcaccagcagtaagctaygtaaagagagggaggcaagtgacaaattgataaagaaagtaccaaagaagacagaatggggaaaagggccaggagcaaagagcttacgaaacaataaccaggagccagggagagttgggatgtkagaggtgtgtgaatctaggaagactgagaaaggaaaggtaytggtcacaagtctccctaaccttctttctgctgttggtacagcccagctagcaggcaccgcgtggattccaggttccggaaaatattagtggaacggatactgaaagacagaaagcagcgtgtgaggtagcacttgctccttcacatggctggggctgcaactggggargacttgctggaactgaggattcagctttcatcatggctttggaaacctgtgcttgggtttcatctggccctgctatagataccttaaagtatagacacctctatcttaagtaccgtgtaacttcccttcaa

SEQ ID NO: 44733 - DNA, 600 bp, Chicken  19866894283886_4
gaaagtaccaaagaagacagaatggggaaaagggccaggagcaaagagcttacgaaacaataaccaggagccagggagagttgggatgtkagaggtgtgtgaatctaggaagactgagaaaggaaaggtaytggtcacaagtctccctaaccttctttctgctgttggtacagcccagctagcaggcaccgcgtggattccaggttccggaaaatattagtggaacggatactgaaagacagaaagcagcgtgtgaggtagcacttgctccttcacatggctggggctgcaactggggargacttgctggaactgaggattcagctttcatcatggctttggaaacctgtgcttgggtttcatctggccctgctatagataccttaaagtatagacacctctatcttaagtaccgtgtaacttcccttcaaagaaggtggagatgaaaaatgggcacttatctgtaactttatctcatcctaaaccagacgctcccagcactcatgatgtgagcagcagcaatgtgctttatatctcaatgaactttagactgtgccccagaaacacttgtttctcttcactcgccattaaagcacacat

SEQ ID NO: 44734 - DNA, 600 bp, Chicken  19866894283889_1
tgcattctttagtcaattactctcccatttagtgagcatttcacgacacaaattgcaatgtacagagctgaccatacacaaaggtccagatgtagcctggcactacttataatggatcacctactcattgcaagttgcagtggaagagtactgttgacaatatactacttgtatcagtattttcacttaaagtattctataggtacttacagataagcaatatatttatgcatggaaaacaaaaggagtaaacaaatgacttgataagtaatcaccacttgtcaaaaaacacaggttacrtagctcttactgcaagayrttatttgttgatacagaaaagaacacatacatcacttttcagaaaacaaattgagtactaagtattgcagttctgagagatttcagtaaaaatctgaccccaagatacggattttttaaaattcatttttcatttgctaacacaatagaaacaaggagcattgctgagagagaaaccgagagatgatcctgtattctggaccatctaattcatttttagtaaggctgttcatttattgtcaatctgttaagatatacagcaggaatggtccattttttatt

SEQ ID NO: 44735 - DNA, 600 bp, Chicken  19866894283889_2
actctcccatttagtgagcatttcacgacacaaattgcaatgtacagagctgaccatacacaaaggtccagatgtagcctggcactacttataatggatcacctactcattgcaagttgcagtggaagagtactgttgacaatatactacttgtatcagtattttcacttaaagtattctataggtacttacagataagcaatatatttatgcatggaaaacaaaaggagtaaacaaatgacttgataagtaatcaccacttgtcaaaaaacacaggttacrtagctcttactgcaagayrttatttgttgatacagaaaagaacacatacatcacttttcagaaaacaaattgagtactaagtattgcagttctgagagatttcagtaaaaatctgaccccaagatacggattttttaaaattcatttttcatttgctaacacaatagaaacaaggagcattgctgagagagaaaccgagagatgatcctgtattctggaccatctaattcatttttagtaaggctgttcatttattgtcaatctgttaagatatacagcaggaatggtccattttttatttatttttaatcttttttc

SEQ ID NO: 44736 - DNA, 600 bp, Chicken  19866894283889_3
ctctcccatttagtgagcatttcacgacacaaattgcaatgtacagagctgaccatacacaaaggtccagatgtagcctggcactacttataatggatcacctactcattgcaagttgcagtggaagagtactgttgacaatatactacttgtatcagtattttcacttaaagtattctataggtacttacagataagcaatatatttatgcatggaaaacaaaaggagtaaacaaatgacttgataagtaatcaccacttgtcaaaaaacacaggttacrtagctcttactgcaagayrttatttgttgatacagaaaagaacacatacatcacttttcagaaaacaaattgagtactaagtattgcagttctgagagatttcagtaaaaatctgaccccaagatacggattttttaaaattcatttttcatttgctaacacaatagaaacaaggagcattgctgagagagaaaccgagagatgatcctgtattctggaccatctaattcatttttagtaaggctgttcatttattgtcaatctgttaagatatacagcaggaatggtccattttttatttatttttaatcttttttca

SEQ ID NO: 44737 - DNA, 600 bp, Chicken  19866894283914_1
aaatcataggaacccaacccacttagcatccatggcaacatcggactcaccttccattagggaagctggtggtagatgccagcccagaaaaacactggttgcactgtgactggaggaatgtgtgagaacctattcctgttttcttgggcactggcacaggctgcccagagaagttgtggatgcctcattcctgggggtgttcaaggccaagttgcctgatctggtgggtggcagccctgcccatgccaggaggttggaactggatagtctttaaagtcccttccaacctgaaccgttctrcaattctattctgactttcaggcaggcatggggatgcagtgaatggcagggttgtaagttcaggtacaggcactgctgaggaagctgtggatctgggcatgaggtggattggctgtggtgtgtaggatgaggccacatttgaagtatggatggcgctcataccctctccaaaattccttcttcatatcatctgaacaagggctgacagagcccggagttgccaaacatgagctcagtagggctctgcacctggctccacaaaccatcagggctcccatgggggactgactgttcctcgcc

SEQ ID NO: 44738 - DNA, 600 bp, Chicken  19866894283921_1
ctaacaccgcgttctgcgtttcttaggtgaggcagggtggaaccacacgggaatcgttctaatttctgcaacgaaagccttgttttaagacgtgtggaattcctcaaaagacggacagagggattttaggacacaggtaactgcaggggacgggaaatataaagaacatggaaaggcttccggatctacaggcgggcgcgaaagtacccggtaaatgctgctgcgtgtttgggcttttgtttgtttgtttttcctctccagtctttgccgttcattattgttaactggagaaacagtagraaaagytgttagcagatgttgtctgctaacagacagaagagggagctcttgccgcgcctaccctgggaagtgcccgtccytgcggctgctgtacggaagccctccttcggcagagcagttccagggaaggggcgtggaacgaaagcggtctctactcttactttgcttggaggtgactgacagggccttacttgccaaattcatgctgatgcggctccatgctcagcggaggatgaagtcagtgaaaatgtaaaaatgttgcctgaagcaaataatggtgtcttattaaaaaccaaactc

SEQ ID NO: 44739 - DNA, 600 bp, Chicken  19866894283921_2
ccgcgttctgcgtttcttaggtgaggcagggtggaaccacacgggaatcgttctaatttctgcaacgaaagccttgttttaagacgtgtggaattcctcaaaagacggacagagggattttaggacacaggtaactgcaggggacgggaaatataaagaacatggaaaggcttccggatctacaggcgggcgcgaaagtacccggtaaatgctgctgcgtgtttgggcttttgtttgtttgtttttcctctccagtctttgccgttcattattgttaactggagaaacagtagraaaagytgttagcagatgttgtctgctaacagacagaagagggagctcttgccgcgcctaccctgggaagtgcccgtccytgcggctgctgtacggaagccctccttcggcagagcagttccagggaaggggcgtggaacgaaagcggtctctactcttactttgcttggaggtgactgacagggccttacttgccaaattcatgctgatgcggctccatgctcagcggaggatgaagtcagtgaaaatgtaaaaatgttgcctgaagcaaataatggtgtcttattaaaaaccaaactccaggca

SEQ ID NO: 44740 - DNA, 600 bp, Chicken  19866894283921_3
tgttttaagacgtgtggaattcctcaaaagacggacagagggattttaggacacaggtaactgcaggggacgggaaatataaagaacatggaaaggcttccggatctacaggcgggcgcgaaagtacccggtaaatgctgctgcgtgtttgggcttttgtttgtttgtttttcctctccagtctttgccgttcattattgttaactggagaaacagtagraaaagytgttagcagatgttgtctgctaacagacagaagagggagctcttgccgcgcctaccctgggaagtgcccgtccytgcggctgctgtacggaagccctccttcggcagagcagttccagggaaggggcgtggaacgaaagcggtctctactcttactttgcttggaggtgactgacagggccttacttgccaaattcatgctgatgcggctccatgctcagcggaggatgaagtcagtgaaaatgtaaaaatgttgcctgaagcaaataatggtgtcttattaaaaaccaaactccaggcaagcccccagactcagagaacccaccctttttccctcaacatccttgcgtgagcgtatgctattgagttggtggg

SEQ ID NO: 44741 - DNA, 600 bp, Chicken  19866894283924_1
taaggatgttcttttccaaagttgtacttccatcctgacaactcaaaagctatcacaacataaatacagaccccaaaaaggctccattgttcttgacaatcgaaaccatatttgctatttacgttttcttcaaaagtgaaattgctttaatgaagtctccacaaacagagctcatggaatccacaaacatctggcggaggctgccttcatgtttccactctgaattgaattacatcccttctgtaaacggggatagacagagagtaatgtctgaaattacaattggggatcatttctccrtcctcagaaaaccaagagccataatagcaggacaaagcaagcaaacacagagtgctgtgtgcctggaatatcttctgagagtacgaagagaaagaaaacgtgagagacagagatacaaaccagaaatcctccaggcaggagatctgctggtccttacaacaccaactttcctgcatcactgaaatctgtaggatccaaattcccttcctctgctggggttcttagaaaggatgcccgccttgcaaattccrtagggattgtattactgtggttctggagaggaaacacagcccatggccg

SEQ ID NO: 44742 - DNA, 600 bp, Chicken  19866894283924_2
gatagacagagagtaatgtctgaaattacaattggggatcatttctccrtcctcagaaaaccaagagccataatagcaggacaaagcaagcaaacacagagtgctgtgtgcctggaatatcttctgagagtacgaagagaaagaaaacgtgagagacagagatacaaaccagaaatcctccaggcaggagatctgctggtccttacaacaccaactttcctgcatcactgaaatctgtaggatccaaattcccttcctctgctggggttcttagaaaggatgcccgccttgcaaattccrtagggattgtattactgtggttctggagaggaaacacagcccatggccgccaagctgaacatctctgacatgtggtgcatcactctggggatggacattgctggcgggagtggtgtgctgcaggattgctcctgagggcttggcaccccacctctggatccagctacatccaaacccagctccctgctgtgccagccaacctctgtcttgggaactggatccagctcggctcttgcttttacgagagcgataataaatatccccttcatccctcctgctggtacaagcggagctgaaaac

SEQ ID NO: 44743 - DNA, 600 bp, Chicken  19866894283926_1
ctccacaaacgttcagcaagtgtcagtcaatgccattttttccccatggaggaatttgatgacagacctttgcttcatacacatttcagtatcagatgccattttgtctgctgctgtctgtctcatggcaacaaaatgtcatggaatattggtgggaaggttcagtctctactgctctattaccaacatctgtgtctgatgtcatgggtcaacataataaaataagaggcattacttttggagcagcatgtctgcttgagtggaagagagttgactgtaaaactttctaaggatccataygtttagatgacttctgttctgtaaatattaagtaattaacttttggagcctgacttattttaaactcagctctatttttctcaccacaaaatctcttatttacagctctgctaaccacaaccacatgatggcactgcttcagcagcttctctacaatgagtccctgtctctgtcatggagggatatcattgtacctgtggtctgtcaggtagttcagactgtaaggcctgatgtcaagaacagagatgatgacatggatatccgccagtttgtccacatcaaaaaagtaagttttcgaca

SEQ ID NO: 44744 - DNA, 599 bp, Chicken  19866894283933_1
  misc_feature (1)..(162): n is any nucleotide
nnnnnnnnnnnnnnnnnnnnnnnnnnnnnnnnnnnnnnnnnnnnnnnnnnnnnnnnnnnnnnnnnnnnnnnnnnnnnnnnnnnnnnnnnnnnnnnnnnnnnnnnnnnnnnnnnnnnnnnnnnnnnnnnnnnnnnnnnnnnnnnnnnnnnnnnnnnnnnnnnntggtaccttggaggccccatggaagccctgcagaggccccatgagccgcagagttcagattttgctcttttctgccttttggtgatcctagagtcaataaagttggaaaagacctctttgatccataggaatcctgtwatttttggaggtgagaagtgcaaaagcctgcccatgagaggtcatctccagcccaggagaaaccactgccatggggttgccatgcagaggctgcagagcgtggtctgttctgaacaggagggaatctgggggcaaattctccattgaaagaacttcaggatttgaatgttaggaatacagttagattggggtcaaaaccagactgaaatgccacagcagctgctctgcatctttacagtcatcctgtggaataacccagtgcttcctgaattgcaacgtyggttcttctgccccaaaca

SEQ ID NO: 44745 - DNA, 600 bp, Chicken  19866894283933_2
tgatccataggaatcctgtwatttttggaggtgagaagtgcaaaagcctgcccatgagaggtcatctccagcccaggagaaaccactgccatggggttgccatgcagaggctgcagagcgtggtctgttctgaacaggagggaatctgggggcaaattctccattgaaagaacttcaggatttgaatgttaggaatacagttagattggggtcaaaaccagactgaaatgccacagcagctgctctgcatctttacagtcatcctgtggaataacccagtgcttcctgaattgcaacgtyggttcttctgccccaaacacacacagttccccctctcccatagtttgtaacaacaaatgtatttctgtcctttctcagcrttccacaacttgtatcagcgccacatggctctgtcagacagaggaaaggaagagggttaacacagtggatggaagaattaaatcagaagctggtaggggaaaaaagatccaatgtttatttgttaatgaacgttggcagctgaaagctctggctcttggaatcaattcgttggcacagcaaatggggctccttccaccccaggccttcctcattagcagc

SEQ ID NO: 44746 - DNA, 600 bp, Chicken  19866894283933_3
aaccactgccatggggttgccatgcagaggctgcagagcgtggtctgttctgaacaggagggaatctgggggcaaattctccattgaaagaacttcaggatttgaatgttaggaatacagttagattggggtcaaaaccagactgaaatgccacagcagctgctctgcatctttacagtcatcctgtggaataacccagtgcttcctgaattgcaacgtyggttcttctgccccaaacacacacagttccccctctcccatagtttgtaacaacaaatgtatttctgtcctttctcagcrttccacaacttgtatcagcgccacatggctctgtcagacagaggaaaggaagagggttaacacagtggatggaagaattaaatcagaagctggtaggggaaaaaagatccaatgtttatttgttaatgaacgttggcagctgaaagctctggctcttggaatcaattcgttggcacagcaaatggggctccttccaccccaggccttcctcattagcagcactgactgtgctcagcaggtgaagcacgtgtgtggatgtgcttctcttggtacagcgagtcactgggaacatggtgatgg

SEQ ID NO: 44747 - DNA, 599 bp, Chicken  19866894283936_1
  misc_feature (1)..(18): n is any nucleotide
nnnnnnnnnnnnnnnnnncaaagcagaagcaatggataaagaatcctagaaaaatccctcaacttcagagcataaaatcatatcattgcagaccttggggtgagctgggtatgtatgacatacatccttaggcaattttatcttgtgtttaaattccaaaggagtctaccacggcctggattcataccatgtatgtttggcacagttgagggcaaggggcaaccccaacagtaaaactcagcagtttggtttcaaaaaaaattgtacttctgtcatgcttttcacacgtgtctccttgcyctttgctgagcaagttatcccatacatggtttcaaagccaaggtaaacaaaagatatttaatagcctacttacctcttccatggagagacccagcacagagcttccttgccttcctgttgctttttccctcccggaggacatcaagtttttcatttcaacatcactggcagaaagaggacgggtacgctgcagagacagtgcaaatacaaatctttcccttcctctcacaaatttcctaattttttaagttacattcaaactctaggactcaatttccaacagaatctacagtctagag

SEQ ID NO: 44748 - DNA, 571 bp, Chicken  19866894283938_1
gttctcagctctcagggagccaagattacagctctgagcataatacaaatttcccctgagtagattacagctttgattgcctctggtgttaatttttagaatataaaccttaaatttccatagttcttaagtaaataatagacttctgagggttttttcttttgtttcaaagaaaagacaaagctcagagaaagtcaggaatctcccaaggcccactgtctgagttgggagttatgccaactccttatggttatgctctgctctgtgaccttcccagccatggccatgttgtccatcgcrgacagtgccaccttcatggccaatgcatgcaggttcaggtgctgcaagcaggtctgtgagcacatgtgcaccatttcccacctttcaggcaagcaggtctatctgtagtaccagacctttcatcacatcttcttccaagctgtgtctttctttccacagtttctgcacaacagtcaccccatatgcagatggcaaatacagctaagtagaaacgcgatcaggaacaaaatgcaatataagaatttgcctgctacccacagataagtaggca

SEQ ID NO: 44749 - DNA, 599 bp, Chicken  19866894283940_1
  misc_feature (1)..(114): n is any nucleotide
nnnnnnnnnnnnnnnnnnnnnnnnnnnnnnnnnnnnnnnnnnnnnnnnnnnnnnnnnnnnnnnnnnnnnnnnnnnnnnnnnnnnnnnnnnnnnnnnnnnnnnnnnnnnnnnnnntgtgcacccatgaagtattatcctccaaacccaaagaggaatgaaaatatctatgatttcagccacaaaccagatattcaggaacagctgaagctccccagtagctttaggagacttcctcaattgagggagatgcttcagcttttttctcccattcagtcagtgtcaaattcatcttacctggaycaagactcactagctttcatccaggccctgatttcagctagacattaggaaaatagagakataggactatcccgattgattgaaaaagagacagagctaagaattatttrcatagtgacaatacaaaacaaactattgcactgcctgtctccctcagacagtgacccagagggggacaacgtggaaatccgcaatacctcactgaagagctgccagcaccagacccttgaagtcctcagaaggcaaacactggagccaagcagagtgtaacctctgccccttcctgctaggatctgcac

SEQ ID NO: 44750 - DNA, 599 bp, Chicken  19866894283940_2
  misc_feature (1)..(54): n is any nucleotide
nnnnnnnnnnnnnnnnnnnnnnnnnnnnnnnnnnnnnnnnnnnnnnnnnnnnnntgtgcacccatgaagtattatcctccaaacccaaagaggaatgaaaatatctatgatttcagccacaaaccagatattcaggaacagctgaagctccccagtagctttaggagacttcctcaattgagggagatgcttcagcttttttctcccattcagtcagtgtcaaattcatcttacctggaycaagactcactagctttcatccaggccctgatttcagctagacattaggaaaatagagakataggactatcccgattgattgaaaaagagacagagctaagaattatttrcatagtgacaatacaaaacaaactattgcactgcctgtctccctcagacagtgacccagagggggacaacgtggaaatccgcaatacctcactgaagagctgccagcaccagacccttgaagtcctcagaaggcaaacactggagccaagcagagtgtaacctctgccccttcctgctaggatctgcacaaggtgatgttaacagtayctcatagtcaaaaacagcagcgataactcagcagattgaaa

SEQ ID NO: 44751 - DNA, 599 bp, Chicken  19866894283940_3
  misc_feature (1)..(4): n is any nucleotide
nnnntgtgcacccatgaagtattatcctccaaacccaaagaggaatgaaaatatctatgatttcagccacaaaccagatattcaggaacagctgaagctccccagtagctttaggagacttcctcaattgagggagatgcttcagcttttttctcccattcagtcagtgtcaaattcatcttacctggaycaagactcactagctttcatccaggccctgatttcagctagacattaggaaaatagagakataggactatcccgattgattgaaaaagagacagagctaagaattatttrcatagtgacaatacaaaacaaactattgcactgcctgtctccctcagacagtgacccagagggggacaacgtggaaatccgcaatacctcactgaagagctgccagcaccagacccttgaagtcctcagaaggcaaacactggagccaagcagagtgtaacctctgccccttcctgctaggatctgcacaaggtgatgttaacagtayctcatagtcaaaaacagcagcgataactcagcagattgaaagctgttcataaatttgggaaacatcacaatatctagaaactcacggggtc

SEQ ID NO: 44752 - DNA, 600 bp, Chicken  19866894283940_4
atccaggccctgatttcagctagacattaggaaaatagagakataggactatcccgattgattgaaaaagagacagagctaagaattatttrcatagtgacaatacaaaacaaactattgcactgcctgtctccctcagacagtgacccagagggggacaacgtggaaatccgcaatacctcactgaagagctgccagcaccagacccttgaagtcctcagaaggcaaacactggagccaagcagagtgtaacctctgccccttcctgctaggatctgcacaaggtgatgttaacagtayctcatagtcaaaaacagcagcgataactcagcagattgaaagctgttcataaatttgggaaacatcacaatatctagaaactcacggggtcagtgtagtgtctgcactgtgatgaaatttaaaactgcaacgaaggaaattagtggcatgtaaagatacaactacttgtacaaaacttcccatgtgaaaggaaaatgggagagtataccatacctgatgagattgtctatactagcatgttgtcctcctgaaaactattggtaaaaacaattactggacttagatgtgcataatgcacaa

SEQ ID NO: 44753 - DNA, 600 bp, Chicken  19866894283942_1
tgccttcctaaagggcaggagtgaagaaagtgaaattcatgctattcgtgtttctgcaggaattatgcaagagcttagtcttaagtgaatagttgtcatcttctatggaactgcagactgtatttacttcctcattttaacttgtcatacacacaaaaccttgctgctagtggcctgaatcttcatctcaaagcttttttttttttttttttttttttttgctttactgtcttttgagtataagagtataaagtaaggatatagtatgtggagttggtctagagtgttttctgtaacatrattaatgacattagtaattacagggataatgagatctagtgaaagttgtaggtgctaattcttagaacaaagaaagaaattcaaatttggaaagactgtaacacgaagattcctcccagtattatcttgtattaaatatttcaagttcctctcttgtggaagagacctctctgtgccttacattaaatttctagataatgctttgtagaagaagagaatggcaggcatttgtttgggaggagagagttgtctttattattattattaatttattatggtaggaaatgcttttcaattctg

SEQ ID NO: 44754 - DNA, 599 bp, Chicken  19866894283943_1
  misc_feature (1)..(42): n is any nucleotide
nnnnnnnnnnnnnnnnnnnnnnnnnnnnnnnnnnnnnnnnnncacatctgctccatcacactttttccactgacgggatgagagcactcagcagagctcacctttgggagcacagcctcatgctgtgccgattcccagctgacgcaggcagtgctttgagccccgctcagcctctggtgggtgcccagcaggaaggcagatttgttttgttttcaaccaaatccctgcccgtaactgtcagggagctatcagggcagtggtaaacgtgcccaactgcagcagcctcggaggcagcagatycacagccccacacactccgttcaggttcaggttgttcagctgctccatctgtgctctgccactgaaaataacggcgcagctgctttgccagacacrrccttttactgacttctcatataagcttcacacgaattcttgtctccgttttttcctcctggttgaagacccaagaaggagtggctcagcacgggggactcaaatacagagccagaagcagcccttgcccagctcctcttctctggggagaacagcggtgtgtgaaggtaagaatgaaactcatgggaaatggcacggattga

SEQ ID NO: 44755 - DNA, 600 bp, Chicken  19866894283943_2
ctcacctttgggagcacagcctcatgctgtgccgattcccagctgacgcaggcagtgctttgagccccgctcagcctctggtgggtgcccagcaggaaggcagatttgttttgttttcaaccaaatccctgcccgtaactgtcagggagctatcagggcagtggtaaacgtgcccaactgcagcagcctcggaggcagcagatycacagccccacacactccgttcaggttcaggttgttcagctgctccatctgtgctctgccactgaaaataacggcgcagctgctttgccagacacrrccttttactgacttctcatataagcttcacacgaattcttgtctccgttttttcctcctggttgaagacccaagaaggagtggctcagcacgggggactcaaatacagagccagaagcagcccttgcccagctcctcttctctggggagaacagcggtgtgtgaaggtaagaatgaaactcatgggaaatggcacggattgatggagcagagataaygacacctgcatgcacacctgccaaagtttggatctgcttattaaaatgatgccaaatcctgggagccgcagccaaggagcag

SEQ ID NO: 44756 - DNA, 600 bp, Chicken  19866894283943_3
tcacctttgggagcacagcctcatgctgtgccgattcccagctgacgcaggcagtgctttgagccccgctcagcctctggtgggtgcccagcaggaaggcagatttgttttgttttcaaccaaatccctgcccgtaactgtcagggagctatcagggcagtggtaaacgtgcccaactgcagcagcctcggaggcagcagatycacagccccacacactccgttcaggttcaggttgttcagctgctccatctgtgctctgccactgaaaataacggcgcagctgctttgccagacacrrccttttactgacttctcatataagcttcacacgaattcttgtctccgttttttcctcctggttgaagacccaagaaggagtggctcagcacgggggactcaaatacagagccagaagcagcccttgcccagctcctcttctctggggagaacagcggtgtgtgaaggtaagaatgaaactcatgggaaatggcacggattgatggagcagagataaygacacctgcatgcacacctgccaaagtttggatctgcttattaaaatgatgccaaatcctgggagccgcagccaaggagcaga

SEQ ID NO: 44757 - DNA, 600 bp, Chicken  19866894283943_4
ctccgttcaggttcaggttgttcagctgctccatctgtgctctgccactgaaaataacggcgcagctgctttgccagacacrrccttttactgacttctcatataagcttcacacgaattcttgtctccgttttttcctcctggttgaagacccaagaaggagtggctcagcacgggggactcaaatacagagccagaagcagcccttgcccagctcctcttctctggggagaacagcggtgtgtgaaggtaagaatgaaactcatgggaaatggcacggattgatggagcagagataaygacacctgcatgcacacctgccaaagtttggatctgcttattaaaatgatgccaaatcctgggagccgcagccaaggagcagagcctggttatgtaaagcaagaaacaaaaccacagagggaacagacagaagtgagcatttgtccaaggaggcagaaggtgatcagaggcagcacagggatgcagggctttgtttctgggctggctgcacatgaagcatgccgaggccccggggggtcacacagggccacctgctgccccattcttacattggcttttgggtaacatttggcagcygct

SEQ ID NO: 44758 - DNA, 600 bp, Chicken  19866894283943_5
aaygacacctgcatgcacacctgccaaagtttggatctgcttattaaaatgatgccaaatcctgggagccgcagccaaggagcagagcctggttatgtaaagcaagaaacaaaaccacagagggaacagacagaagtgagcatttgtccaaggaggcagaaggtgatcagaggcagcacagggatgcagggctttgtttctgggctggctgcacatgaagcatgccgaggccccggggggtcacacagggccacctgctgccccattcttacattggcttttgggtaacatttggcagcygctgccaggtgccctccccaggctctctgctggtcacaccgatgcccacaggtgtcatctaagaacagccttaatgaccttcaagtgtttgtcacaccgttgcctgcggcagctgaattccaggctctgccaggattaaaaataaccagaaatagaaaayrggccgcgtgtcctcggtgggaagaacagtctgtcacccactgagctcccagctgagctcagactgccactaaaaggcacattctgcagcacaggggccgggaggacacggggaatgcagccctgctacaacagcagcag

SEQ ID NO: 44759 - DNA, 600 bp, Chicken  19866894283943_6
aggtgatcagaggcagcacagggatgcagggctttgtttctgggctggctgcacatgaagcatgccgaggccccggggggtcacacagggccacctgctgccccattcttacattggcttttgggtaacatttggcagcygctgccaggtgccctccccaggctctctgctggtcacaccgatgcccacaggtgtcatctaagaacagccttaatgaccttcaagtgtttgtcacaccgttgcctgcggcagctgaattccaggctctgccaggattaaaaataaccagaaatagaaaayrggccgcgtgtcctcggtgggaagaacagtctgtcacccactgagctcccagctgagctcagactgccactaaaaggcacattctgcagcacaggggccgggaggacacggggaatgcagccctgctacaacagcagcaggagtgaggttaccacgtgctcctccatggctttgctggaagggtgtttccaaggcaggttggaacgattggagcaacgccccctcctcggtgccatcgttctgcagtgggaatggctgcattccaacttggtgggcaaacagtggagtgctgctcaaagg

SEQ ID NO: 44760 - DNA, 600 bp, Chicken  19866894283943_7
ggtgatcagaggcagcacagggatgcagggctttgtttctgggctggctgcacatgaagcatgccgaggccccggggggtcacacagggccacctgctgccccattcttacattggcttttgggtaacatttggcagcygctgccaggtgccctccccaggctctctgctggtcacaccgatgcccacaggtgtcatctaagaacagccttaatgaccttcaagtgtttgtcacaccgttgcctgcggcagctgaattccaggctctgccaggattaaaaataaccagaaatagaaaayrggccgcgtgtcctcggtgggaagaacagtctgtcacccactgagctcccagctgagctcagactgccactaaaaggcacattctgcagcacaggggccgggaggacacggggaatgcagccctgctacaacagcagcaggagtgaggttaccacgtgctcctccatggctttgctggaagggtgtttccaaggcaggttggaacgattggagcaacgccccctcctcggtgccatcgttctgcagtgggaatggctgcattccaacttggtgggcaaacagtggagtgctgctcaaaggg

SEQ ID NO: 44761 - DNA, 600 bp, Chicken  19866894283947_1
tttaaggaaaaagatgtgaacagaaattaagttttcctattgccaaatctagaagaaaaaaaaaataccttaaaaatgtgaaccattacttggaataagaaaaaggttgcctgcatcttcacacagtttgccctgataattctcacaaccaaaaatgaccccttcctcaaagatctcaggaacaagagacagagctaacaggcagagaatcctaaaggagtgatggtatcatgcctacattgctacttttattgtccagaaactacgcttagagacacccaagcagtcctgtagttcccraagaagcctcacaccttcttgaaggccaggttgccattcccaggcgyatttcamacagtgctacctacacctgtgttttggcaaatgactatcagactatcaggaggactaaatgctgccattaacttgccttttttatctgcactaaaacaaattcatgaaaggaattccttcccattctgtaagagggtaargctccttctgccttactagcagtaggaaaggctgtgacacaatcagatgtggtcagggagatgatacaactagatctgatgtctaaccaacaacagcaataacaaa

SEQ ID NO: 44762 - DNA, 600 bp, Chicken  19866894283947_2
tctagaagaaaaaaaaaataccttaaaaatgtgaaccattacttggaataagaaaaaggttgcctgcatcttcacacagtttgccctgataattctcacaaccaaaaatgaccccttcctcaaagatctcaggaacaagagacagagctaacaggcagagaatcctaaaggagtgatggtatcatgcctacattgctacttttattgtccagaaactacgcttagagacacccaagcagtcctgtagttcccraagaagcctcacaccttcttgaaggccaggttgccattcccaggcgyatttcamacagtgctacctacacctgtgttttggcaaatgactatcagactatcaggaggactaaatgctgccattaacttgccttttttatctgcactaaaacaaattcatgaaaggaattccttcccattctgtaagagggtaargctccttctgccttactagcagtaggaaaggctgtgacacaatcagatgtggtcagggagatgatacaactagatctgatgtctaaccaacaacagcaataacaaagggcatacactccgtaaacacacctagaacaactttttccccctcag

SEQ ID NO: 44763 - DNA, 600 bp, Chicken  19866894283947_3
gaaaaaaaaaataccttaaaaatgtgaaccattacttggaataagaaaaaggttgcctgcatcttcacacagtttgccctgataattctcacaaccaaaaatgaccccttcctcaaagatctcaggaacaagagacagagctaacaggcagagaatcctaaaggagtgatggtatcatgcctacattgctacttttattgtccagaaactacgcttagagacacccaagcagtcctgtagttcccraagaagcctcacaccttcttgaaggccaggttgccattcccaggcgyatttcamacagtgctacctacacctgtgttttggcaaatgactatcagactatcaggaggactaaatgctgccattaacttgccttttttatctgcactaaaacaaattcatgaaaggaattccttcccattctgtaagagggtaargctccttctgccttactagcagtaggaaaggctgtgacacaatcagatgtggtcagggagatgatacaactagatctgatgtctaaccaacaacagcaataacaaagggcatacactccgtaaacacacctagaacaactttttccccctcagggggaaa

SEQ ID NO: 44764 - DNA, 600 bp, Chicken  19866894283947_4
ctaacaggcagagaatcctaaaggagtgatggtatcatgcctacattgctacttttattgtccagaaactacgcttagagacacccaagcagtcctgtagttcccraagaagcctcacaccttcttgaaggccaggttgccattcccaggcgyatttcamacagtgctacctacacctgtgttttggcaaatgactatcagactatcaggaggactaaatgctgccattaacttgccttttttatctgcactaaaacaaattcatgaaaggaattccttcccattctgtaagagggtaargctccttctgccttactagcagtaggaaaggctgtgacacaatcagatgtggtcagggagatgatacaactagatctgatgtctaaccaacaacagcaataacaaagggcatacactccgtaaacacacctagaacaactttttccccctcagggggaaagagaaagggactccatttccacaccctacagcttcagtccacccagtggtgataccactacttgggtccacctctcatcccttccttgaggatttacaaggttcttatactaccaaattaccacatccccctattcccag

SEQ ID NO: 44765 - DNA, 600 bp, Chicken  19866894283950_1
tgcagaagactaagttcatgtgatacgaagaaaaaaacacctagggccctggcaaaacctgcaggaagagccagtgccaagtcttacattacactgttcagcagctctgcaggatgccgtgcttacagcaattcaaagtttgcaagcagcggcatggagtataacttatcgtttgtcataatcccttcctaagaagcgaagaaagagtttacagactttgtagtggatttctgcagctgaagtctgtggtgaacacttgactgtacttcttaccagaagactgaaaataaagtgacttgwgaaagattaagcttaattttacaagcaacagaaaaatggcaaatctttctctggttttattaagagtaagattcttcagaagtcatttaacatttcataccatcatatgacttatttgtatgtawgatatcacagctattccagaagttcagtatctacagtagtagaatctgtttgcataatacatgcccttgttttctgaaaaaaagtgagaggagaaaaccatctttaaaaaaaatttcaagaataaaaacctccaaccctaaattaggaagatcatttgtttaccagtaagtgact

SEQ ID NO: 44766 - DNA, 600 bp, Chicken  19866894283950_2
cagcaattcaaagtttgcaagcagcggcatggagtataacttatcgtttgtcataatcccttcctaagaagcgaagaaagagtttacagactttgtagtggatttctgcagctgaagtctgtggtgaacacttgactgtacttcttaccagaagactgaaaataaagtgacttgwgaaagattaagcttaattttacaagcaacagaaaaatggcaaatctttctctggttttattaagagtaagattcttcagaagtcatttaacatttcataccatcatatgacttatttgtatgtawgatatcacagctattccagaagttcagtatctacagtagtagaatctgtttgcataatacatgcccttgttttctgaaaaaaagtgagaggagaaaaccatctttaaaaaaaatttcaagaataaaaacctccaaccctaaattaggaagatcatttgtttaccagtaagtgactcccagcaggcaacagaaactagttttcttggtcaccagctatcagttacaatataaaatgtaacaaaggaaacctccaagcgtagtgttgtacatgatcctatattttccattaaagtctcaggc

SEQ ID NO: 44767 - DNA, 600 bp, Chicken  19866894283953_1
ggaatgtgatggagaaaaagggaaacgtcgcttgctcggctcttcaccccatcccctgatgagaccttggacacggcacacccacacagcacaccagcataaccataacccagccaggcttcaagggcaacgtcctgctcagagaggaaaacaagcagggcattgaattgggtgggaacagaatttgttttcttttactttttataacccaggcagtgccccaaaacctcaaattgccaggaaacaatggaacggcatagagcctaggaagccaggattgggacagctggaaaacagctmyaagtgaaagccaccccaggagcacagcaggcccctccagaaggaggacgcctgcttacagcagctcctttgtttattgaatacctaacacctccctcacgacaaaaccaggacagagaacctggtggcgacttggcaagtcccagagaactgctgaagccaagaggcgttccctgcggttcctgctcctccgggctgatgttgctgttagcaagcaggcgacacacaaagcagcagcacggagacggcgctgctggtaatcgctgctgcagccggagggctgtaatcactcctctgtaa

SEQ ID NO: 44768 - DNA, 600 bp, Chicken  19866894283953_2
gaatgtgatggagaaaaagggaaacgtcgcttgctcggctcttcaccccatcccctgatgagaccttggacacggcacacccacacagcacaccagcataaccataacccagccaggcttcaagggcaacgtcctgctcagagaggaaaacaagcagggcattgaattgggtgggaacagaatttgttttcttttactttttataacccaggcagtgccccaaaacctcaaattgccaggaaacaatggaacggcatagagcctaggaagccaggattgggacagctggaaaacagctmyaagtgaaagccaccccaggagcacagcaggcccctccagaaggaggacgcctgcttacagcagctcctttgtttattgaatacctaacacctccctcacgacaaaaccaggacagagaacctggtggcgacttggcaagtcccagagaactgctgaagccaagaggcgttccctgcggttcctgctcctccgggctgatgttgctgttagcaagcaggcgacacacaaagcagcagcacggagacggcgctgctggtaatcgctgctgcagccggagggctgtaatcactcctctgtaat

SEQ ID NO: 44769 - DNA, 599 bp, Chicken  19866894283959_1
  misc_feature (1)..(160): n is any nucleotide
nnnnnnnnnnnnnnnnnnnnnnnnnnnnnnnnnnnnnnnnnnnnnnnnnnnnnnnnnnnnnnnnnnnnnnnnnnnnnnnnnnnnnnnnnnnnnnnnnnnnnnnnnnnnnnnnnnnnnnnnnnnnnnnnnnnnnnnnnnnnnnnnnnnnnnnnnnnnnnnntcttttgcatcaattttaagcgctatacactgtgcacttgatcaactcggtggtttggtttgttttttaaagcagaagcttgttatttcttgttgctaatcctaaaaacaagcagaagacagctgtacagaatcagaackttcaagtaaacaaatgctgggctattatttatctcgagtctgggtaccattcaacagcatcaggtaaaacgacattgacttcttacccttaagatacaagttcagctccagcgtgattctggaagtattcatgtcacagaagtgcaaatgcagcgttcaagtaagtagtaggcagccttagaaatataaaagctgggagaaatacacragctccagtgtattttagaagaaggttaacgttccatctcagcgcttaaatgagaaggaagaaagcctgcccatctttatcccaattcact

SEQ ID NO: 44770 - DNA, 600 bp, Chicken  19866894283959_2
ggtggtttggtttgttttttaaagcagaagcttgttatttcttgttgctaatcctaaaaacaagcagaagacagctgtacagaatcagaackttcaagtaaacaaatgctgggctattatttatctcgagtctgggtaccattcaacagcatcaggtaaaacgacattgacttcttacccttaagatacaagttcagctccagcgtgattctggaagtattcatgtcacagaagtgcaaatgcagcgttcaagtaagtagtaggcagccttagaaatataaaagctgggagaaatacacragctccagtgtattttagaagaaggttaacgttccatctcagcgcttaaatgagaaggaagaaagcctgcccatctttatcccaattcactccaattcaaccggagatctccggcatcctatcaactgtatcwcagttcagcaatgtattaacagaacttctggcattgcaacagtcataagaagcctattgtgttttcttcttacaatttgactgctactttaaaatacgaatgtctgtgtactttatcacttgagagggaaagcaactccccaaagctgagctctaaccaaaagcttt

SEQ ID NO: 44771 - DNA, 600 bp, Chicken  19866894283959_3
gggtaccattcaacagcatcaggtaaaacgacattgacttcttacccttaagatacaagttcagctccagcgtgattctggaagtattcatgtcacagaagtgcaaatgcagcgttcaagtaagtagtaggcagccttagaaatataaaagctgggagaaatacacragctccagtgtattttagaagaaggttaacgttccatctcagcgcttaaatgagaaggaagaaagcctgcccatctttatcccaattcactccaattcaaccggagatctccggcatcctatcaactgtatcwcagttcagcaatgtattaacagaacttctggcattgcaacagtcataagaagcctattgtgttttcttcttacaatttgactgctactttaaaatacgaatgtctgtgtactttatcacttgagagggaaagcaactccccaaagctgagctctaaccaaaagctttcagtaattttcatcaaagaaaatcatttttaaatttttcctgcaagaagtgctagtatgagtatgccacagcagcagcagcaaagctgcatgagcacaaagcacagcacaggtagacgagcaaggaatgcctt

SEQ ID NO: 44772 - DNA, 600 bp, Chicken  19866894283967_1
caaaaggaaaagcgctttccaagcggttgtgttgtatttagtatattacccacccccccctcggaggaggcggatgaatgtggaggaggatgaggttgttctggagattttgtgagaaacttctttgagtgacagcattctgtgacagttcccaaatgtggtgcttctaactggctcctgaatttgcttatctgttggcaaatctccccagcctgctgcctctcctccctgggaaactgagacgtcgcaaaggcactacaaaagaggcccccagcacagtgccgtgatggcacagggacrcgccgtgaccgcaccgcgattccttttggccctgctgaccagaatcctgatctcatgtcccccgttattttctgagctgctgctgacttctaaggcctgctgcacgggctaactgatgggaaataaagcctttctcagtgctactggcagtagtggtgggggaggatcctattataaagccctatgtggcacgctggcctatgccataactgtgtgtttcgattgtgctctgcaaactttgcccctgcagactgatggaaactggcgagatggagcatggattcattttctaaaggaaat

SEQ ID NO: 44773 - DNA, 600 bp, Chicken  19866894283968_1
caacgctgcccacaaaactatttaacccttcagcattgtgggtccaattgttttcgcaccacaatggaagccgaaaaccagctgtgcaagcagctcctgctgccacagaagtgtccgtggcacagggaggcaggtgggacgcatttaactaatgagttttgccggaacatttgggccagtcactgcaaacaaaggttggaggtcatctggaatactaggctgtaatgctggatgcctttcacaggtggcaccattcaagttaaagcagcgcaggcaagtttataacatcaggaagagaarctgctgcctgatctctgagctacccaagtcttgtgctcaggaagctgaaaggaagtaagttgtttttcttctttttttttttttttcatttttaaaacttggagtgttgtttagagaaactgttgggctaatcctgcaggagtggccaaatatggattgctgagttggactagttatttaaaaaactgctaccctaaataaaagatcaccagtgtgtgttggcgattaggcccttgtgctgctctgctcagattaaaagccccgtttctctccctgtcaaacactgtaaagaaggaactt

SEQ ID NO: 44774 - DNA, 600 bp, Chicken  19866894283971_1
agtagtatgtcagatttttttattctatttaggacaagtaaattaaaatcaagctccagattaacccatcttcagttttcttagtgtaatgaaaaactgaaattaaaactatagcaaatttattcaaatgcaagtgtctgtgactacatgtatacacacagattatattttaaaagtgaaacacatggctacaaagctaacaagtggttagatcactgttctatcctatgaagatcacatcacaaaatattttgacaatacctgtactaaataaaaccaacctgctagtaatttgaaatkgccttggttttcaatctggcaaaaacctgggaaatatcacatctttggatattataattatgaatgatgattaactgaagcaatgagacaagcaagccaaacagcagaacaccatgaaaattagggttttcatatgtattgtttcaagcagctgtcagttttggcacagttgagttccatatgctttgggtgattcaacatatatggaggaaaagactgttataacaaaatacaaaaaataaatgctagatggatcacacagctagtgaaaagcttctgctgtcagccatcagttctcac

SEQ ID NO: 44775 - DNA, 600 bp, Chicken  19866894283979_1
ataaaaacatgactgaatacaaagccgggaaaggaggtggtggggaaggaggaatggaggaggaggtgagagagagagaagtgtgtgggattttgtcggggtcacggagtcgttcccaggtagctgggctgaatggaaatcacctccattctgtaagtcataaagtgcatataaatgtgtgcacacaaacctttaacacgtttctctgcattcctgctatgaataccagaatatgtttcatagttagaagattcagagacttcccttaagcagaggagcagagagtcacatccagctggyggccggtcacagtggtgttcccaaggggttggtagtggggcctgtcctgtttaataccttcactgatgacctggatgagggcaccgagtgcaccctcagtatgtttgcagatgacaccgagctggctggaagtgtggatctgcctgggggtaggaaggccctgcagagggatctggacaggctggatagctgggctgaagccaacgggatggagttcaacaaggcccagtgccaggttctgcactttggccacaacaaccccaggcaatactacaggcgtggggcagagtggctgaaggc

SEQ ID NO: 44776 - DNA, 600 bp, Chicken  19866894283979_2
caccgagctggctggaagtgtggatctgcctgggggtaggaaggccctgcagagggatctggacaggctggatagctgggctgaagccaacgggatggagttcaacaaggcccagtgccaggttctgcactttggccacaacaaccccaggcaatactacaggcgtggggcagagtggctgaaggctgtgtagaggaaacagacgtggggaatacaggaatctttacaaccaatactgtgccatacatttgcaaggccagcattcccaacccggggatgtcaggaacggccgtggttcaratctgcccagctcagcaccacgcagtgctcatctcacgccgggagagcaatctgcttacccagcacagccttcccaaacatatgtttcccgggcagagccggaggtggcagcaaatgacatttcacaaatggagcttcttttcctgttggtaaccttcctcccttccatctttttggtgaagcatacggaatgagattttctcacgtttcctatgagcagagaataactcaccacgcagaaaggttcaactgagatgcaggagaaggtgcacagcacacgatgaacagatgagatcctca

SEQ ID NO: 44777 - DNA, 599 bp, Chicken  19866894283980_1
  misc_feature (1)..(71): n is any nucleotide
nnnnnnnnnnnnnnnnnnnnnnnnnnnnnnnnnnnnnnnnnnnnnnnnnnnnnnnnnnnnnnnnnnnnnnntgtggatttctcacaacttctacattgctgctcatgcagtgttagcagagatcagactcatcccttttgtttgttgcttttttaagtaatggcttcccatggacttcctacccattttgaaggaactccaggtcctactaagtcaaaacagtcagggactttaacatgggcaggcgtttcatgactgtcaacgggtcaatcataaaaccatgacagtgacctttggttytgagcagagatccttaatgtttggccatgaacatttttgttctgagaatgagactttcctgtctggatggaagcactgaattttgatgcctgcctgtctgacataactattctgagcatgcctttttttttaatgctaaccctcctggtagtctttatcctgtccttacctgtggagcaagttctcctcatagcacccagactaaaagttaagaagcagaaggaaaatgaaggaaattcttaatttttgttgctgtattcatgatttagccatgcactttatcagacactgatgcagta

SEQ ID NO: 44778 - DNA, 598 bp, Chicken  19866894283980_2
taatgctaaccctcctggtagtctttatcctgtccttacctgtggagcaagttctcctcatagcacccagactaaaagttaagaagcagaaggaaaatgaaggaaattcttaatttttgttgctgtattcatgatttagccatgcactttatcagacactgatgcagtagcacacacacaaggaacaagactgcttgcaagcatccctctcttgtcctggacaacaagcagcgtgtcaaccagggaccttgccttctattttcatctgcaccccttcatcagtccctcttctcagaagcrattacttatagaagatgaaggctggtacacaattaaacaaaacaactttgataatttcttttctcagatccagtaaaaaaagactgttgaacagcttgctgtgcataaagcaaggtgcagttgagtttttgtgttctttctgttagataccaaacctgagcaaccctagccatggtagtacctgtaaaaattgcatagtattgtgcagacacattcctctcttactgagcaagtatctttttctttttaaagtagtcccacttaaggactgagggaggaaaggagtgagaaagaaaaa

SEQ ID NO: 44779 - DNA, 600 bp, Chicken  19866894283983_1
aaattcacttgcaagagaagaggactgaaaagttcacagagttagcctgatactgcacacatctgaaacacttcagtttgcgagcagaatattcttgaaatatttttgttcttcagaggactataactgcaacattctgcaactactaaggtattctctggatttttaaatggaactacatgtaatttttaatatcaatactaagatgtttatttgtcatgctcacctccagcatccaaaattctcctacccatgtcactcctaaaaaagtaagcagtgtttcatcaaattatgacagcraaacaaagcatagaagaaaagtttacttaattataacttctcaacgtatgagatgaaactctgattcagtcaaattattaagactccagaggggcaggtcttccatctgcaaagagcatccatctgaaagcaatactggggaattgaatcaccaggtacatgtcttttttctttgttttaatgctgtaaaaagttttccaaacatgcaaataatctgtccttccagtgagtgattcacacagtcttataattaactatgaatgtaactgtttaaagacaacaaggattaaataaagccta

SEQ ID NO: 44780 - DNA, 600 bp, Chicken  19866894283987_1
tcaccagaattaagcaagagccttgtgactaccaaatgaatctgcttgaggttcaaagtccagcctctgaaagagaatgtcaggatcaacaaggtaggggcatatgacagtgtagctcagtacagagcaggggactgagattaaatgcagctctgcagacaacaagccaggactccactaggtttcacatagctctttcctacagttttactcattttcacatcagtgtaacccagggttatacagttgtctcattctagcactgactttaaacaaagacaggcaaatccctgggtgagrgaaatgtggttgatacacagagggctttgacatagtgtttttcagcagttccatctttagtcactcacttcagtctattgaactactgttatctagatgcattttctttatacaaagtttatattgcattactttttgttaatatgttgtatccaatattcatattttccagtaatattgtccttaattcagtgctttgaaatasttgagttttgggacacaggctgaacttcaatctctcttgattcagagctctctgaggaaggcacttaatgtaggtctcagaagtttgattttttt

SEQ ID NO: 44781 - DNA, 600 bp, Chicken  19866894283987_2
ttttactcattttcacatcagtgtaacccagggttatacagttgtctcattctagcactgactttaaacaaagacaggcaaatccctgggtgagrgaaatgtggttgatacacagagggctttgacatagtgtttttcagcagttccatctttagtcactcacttcagtctattgaactactgttatctagatgcattttctttatacaaagtttatattgcattactttttgttaatatgttgtatccaatattcatattttccagtaatattgtccttaattcagtgctttgaaatasttgagttttgggacacaggctgaacttcaatctctcttgattcagagctctctgaggaaggcacttaatgtaggtctcagaagtttgatttttttccattagttatgaaaagagaatatttttaatgacagttcatgtttatgaagataaaaagagaatcagaatcagaaacttatatgaaaccatacatactgactgaagattttcaagacaaaaaaaccttttgttgagcatttattgtcagcaaatactggtcacaagttctgtaactagtgtatagcaaaactaccattagctaaa

SEQ ID NO: 44782 - DNA, 600 bp, Chicken  19866894283989_1
ctgtctgtctgcaggaatcctcatttgactcagcaaacctttcgaaacaatagaaatgtttgatttatgccccttattttctttcgtgattgcatctgctgcaaagctgcttcgatacttcagaatttgtgacggccagcttatctgaaaggagggaaaaaagtgaagaaagagctattggtgaagagcagatggggacggtttgctgtagactgaattattaaatgcagctatagttactttcacactagtgtttcaaagtacccagctccctggtatgcatgcaggaatgccaggtcytcctgcgcctgagtcttattttgctgaggttacgttctttgtgtcactgtgtacaatgctgaactgaaaattcataaattcaggagttatcaaaagcacctttcaaactgatagttattacctgatttatttgggatatgggcatgtgtgtgtatgctggtatgccgcagacaatgtattttggtctgctagtgaaacattgttggaaaggtgacaacgtatatgggaaaaagcaggaaactattggaaaagccagttttcttctctagaggatatgattagtgttaacagtgtttgtga

SEQ ID NO: 44783 - DNA, 546 bp, Chicken  19866894283990_1
aggcagcagccaggctgggtctccacagcacgaatgacccgagaaagcgacgttctgatgggcgctctccgaagcccggggctgcgacccgagggcgccgcgcaccgccggctccgtgcgctcactgtcggagggcgccgatagggggcgcgagagagcggggcggtggcacggtgcgcgcgttgccccgcccaccgccggctctccgccaatcagctttgcttccggcgcacggtgatgacgtcggaggcggtgctgggctgcgggtcggagcgggttgaggtgagtgcggggctcggycgtaggacggacccttcgttgtcccctcgggtcccttctgctcctccgggtccccgggtctgcggagcctctggggcgggcggaggccacgggcagcgcgctggagctgacggcaacgcgcaaccccgcgctgtgcggccgcctgtgggcccctgggtgcactcagagggcggtcggggcgcggctgtgggccggagctgctcgtcctgtggcgctgtgcctcctttggggggcctcaggagagaa

SEQ ID NO: 44784 - DNA, 600 bp, Chicken  19866894283994_1
agcactttccacccagatcccttttaagtgatctaaaggttatggtttggccttcagaaataagagcaggaggagacagaggattctgtacctcttgcacagaagccagtttacaggtggagtaccaatcaaccaagaggattggtaccttcaacacctctggaactcatcctccccctcagttccaaccttttcctgtgtccccatctcttctttttcacacaggccaaaatcagtgaaactggctagattgaataggcaggagtacagcttgaagctgaaatataagaatataaatcyacacctttttttctcactatccaakgtacattctgcaatccttctttagcttgaaatttcattccaagctgataagacataaggtctcttagccttcttgggaaacactgtatttacaccatcctgcaagatgacatttttagacattgcttgakccacagtcctgaaacagtgccctgctgccaatatgtatacctcactagtctgtgggggaaagcatgaggctgtcacctctctaaaaatgctgtggcagaaccaggccacccttctcttctcattttcagggcatgccatgctgtc

SEQ ID NO: 44785 - DNA, 600 bp, Chicken  19866894283994_2
aagtgatctaaaggttatggtttggccttcagaaataagagcaggaggagacagaggattctgtacctcttgcacagaagccagtttacaggtggagtaccaatcaaccaagaggattggtaccttcaacacctctggaactcatcctccccctcagttccaaccttttcctgtgtccccatctcttctttttcacacaggccaaaatcagtgaaactggctagattgaataggcaggagtacagcttgaagctgaaatataagaatataaatcyacacctttttttctcactatccaakgtacattctgcaatccttctttagcttgaaatttcattccaagctgataagacataaggtctcttagccttcttgggaaacactgtatttacaccatcctgcaagatgacatttttagacattgcttgakccacagtcctgaaacagtgccctgctgccaatatgtatacctcactagtctgtgggggaaagcatgaggctgtcacctctctaaaaatgctgtggcagaaccaggccacccttctcttctcattttcagggcatgccatgctgtcacatcacttactggagaccttccag

SEQ ID NO: 44786 - DNA, 600 bp, Chicken  19866894283994_3
acctctggaactcatcctccccctcagttccaaccttttcctgtgtccccatctcttctttttcacacaggccaaaatcagtgaaactggctagattgaataggcaggagtacagcttgaagctgaaatataagaatataaatcyacacctttttttctcactatccaakgtacattctgcaatccttctttagcttgaaatttcattccaagctgataagacataaggtctcttagccttcttgggaaacactgtatttacaccatcctgcaagatgacatttttagacattgcttgakccacagtcctgaaacagtgccctgctgccaatatgtatacctcactagtctgtgggggaaagcatgaggctgtcacctctctaaaaatgctgtggcagaaccaggccacccttctcttctcattttcagggcatgccatgctgtcacatcacttactggagaccttccaggaggaaggacatgttacacaagaactccacaagaaattctagtgttagaagaacaatgagcatgtctgcaaccaaactaaagcccaactcacccactgcagtaaattacatttctgcaacttagggaagg

SEQ ID NO: 44787 - DNA, 600 bp, Chicken  19866894283995_1
actatttttcacatagccaccaccagtagctgtgtatttttgccagcgatgaacaagagcctgcatgccacactcgtaaaaattgacaccagtggaagtgatcctctttttgacagctgctatgacactgtcgttgataagaaaatgttgcccatgcaatccacctttcatcaggctgaacagatgaaagtcaggaggtgccaaatcctgactatatgctgggtgtggtaggacagtccaacccagattggtagtgtgctccatgatcttcaaatgggtatctggcttggtgttactgcrttgcaagagaaagattgtcttcttctctggcctgagtctagaagctcaagacttcaggttagtgttatggtcagtgctgatggtctgtcctggttcccggaaatccaaaaggatcacccctttcctaacccaaaagacagtgcacatcactttatacactgatggctgcatcttgaaccttttcttacatgaggaattcatgtcgccactccatggagtgctgttttgactccggctcttagtggtgacgccacgtcttgccaccagtggtgttatgatccaggaaactgtcaccttcag

SEQ ID NO: 44788 - DNA, 600 bp, Chicken  19866894283995_2
tcttgaaccttttcttacatgaggaattcatgtcgccactccatggagtgctgttttgactccggctcttagtggtgacgccacgtcttgccaccagtggtgttatgatccaggaaactgtcaccttcagcctcatgttggttcaacaggtcctgacaaacttgcacatgctgttctttctgttcctgtgtgagcatttcagggactcacctggcacgaactttgtgacatttcaacattgtcaccattgtttccaacacactgaagccagtattcagccctgtacacagttccctggtygtaatctgccaattcacgtggacaagctgatcaagatgctcttcattttatccagaatgtggcttgtcttccgcatgagtgttgccagttctgaatttcaccacccacctcactgtgctgacatccaccatttgatattcataagtgttcagcaagtattgatgaatgtcagtgggtgccattttttccacatggaggaattcagtttccaagcctttgcttcatacatgcttccatatcaaacactgttttcatagaatcgccaaggttggaaaagatatccaagatcatccagaccaa

SEQ ID NO: 44789 - DNA, 600 bp, Chicken  19866894284011_1
gaaacaagccagatatgtgcgttgctttatgaaaccatgctaccaggaatccctcagccagtgcgttccccagggatccacaacgtgcagctggagcagcaaaagcttgggatcgaaagctatgttgtcttttattgggaagtctccagctgtctagcaaagaaatgggaactccagctgtttcctccacatctgggctctccagtgctgctgactgctgtttgtgaggtcccaggtaagttttgaacaccgaaggcttatcttcatgtttgcaagaggatcgtgtgatgcatctactgrgggtagatgcattctaaagggtctgaaagcacctctatgccttctttgaagctcactccgtttttctttataatcacgtttatgtagtcttacagctaacatgcttgagagctacaagtgctactgagaatacttttttccccaactgctgcagtgtttttcagacctctcagcatctgtgagatattccctaaagggctgggaaaggggaatgaaaagcattctagaagggagatgctgcaaagaggaaatgtaagtctgaaaacagctgatgtacagcaaatagagtctactctttgt

SEQ ID NO: 44790 - DNA, 600 bp, Chicken  19866894284022_1
aactccatttaatgctaatagggctgcgaggcaaggtggagcttgttccctcaaggaggagagctggcgctggagcagtatgccagggggagggtgaagcacgtggccaggagccgggctgggggtgccgtggcccatggagcacagcggggcgcagagctgtgccccacagaaccaggtgccccgggggccgttccccgcaaagcagacccgggcgccttcccggcagggaagtgggggaggtgatgcttcctctttcccggctgcgcagcagagcgtggccaggggacacggcatttygggtgycccaggctgggttcctcctccggcagagccccccgccgcctcctgtttctcaaaaagaaggaaatcagcagatctggtttcatgggctgaggaggtctgaaagtctctgactgatgatgaactcaccgcatcccccggccattggttaattttgccaagtggcaaacaaggccacgggagtttctaactcgccccccggtccccattcctctgtgctccacacacgcagccaaaatagctgctgagatcacagagacatttggggtttggtggggggaggtgaagcagctgcgt

SEQ ID NO: 44791 - DNA, 600 bp, Chicken  19866894284022_2
atttaatgctaatagggctgcgaggcaaggtggagcttgttccctcaaggaggagagctggcgctggagcagtatgccagggggagggtgaagcacgtggccaggagccgggctgggggtgccgtggcccatggagcacagcggggcgcagagctgtgccccacagaaccaggtgccccgggggccgttccccgcaaagcagacccgggcgccttcccggcagggaagtgggggaggtgatgcttcctctttcccggctgcgcagcagagcgtggccaggggacacggcatttygggtgycccaggctgggttcctcctccggcagagccccccgccgcctcctgtttctcaaaaagaaggaaatcagcagatctggtttcatgggctgaggaggtctgaaagtctctgactgatgatgaactcaccgcatcccccggccattggttaattttgccaagtggcaaacaaggccacgggagtttctaactcgccccccggtccccattcctctgtgctccacacacgcagccaaaatagctgctgagatcacagagacatttggggtttggtggggggaggtgaagcagctgcgtttcctc

SEQ ID NO: 44792 - DNA, 600 bp, Chicken  19866894284022_3
cgctcccagccttgctctgcgcccgtgggtgtgcagggaaccggcggagcccccgtggtgctggggcagctcctggcccacgccgagccctgcagtggagcaggacctggcattgctcccatctctgccgtcatctcagggcactcagctgtggctcggccgcctgcagcatctccctgcattgcccctttctgctcccttctgagtgcccatggttcgtggagctgccagccccggccccactccccgctgctgttgcttttccagtaactttcccagtatcaatgagcacagggcagygggtgctggggctcagggggcggcagcacagctgaccgaggccgctgggcagggggaagggccctygtcgagccgtgcagctcaggagctgcgaaagagctgatatttcttatctctctttgcagcaacttcccccctcggctgtggtcagggcgcttgctgcacgcaggggaagtggcggccgggccagctgccttcgggcctgtgctgtgcttcatggagctgtgtcagaggaggaggaggaagaggaaagagtgctctcaaccacaggctgcctgcctgacccctcgctgctgtccc

SEQ ID NO: 44793 - DNA, 600 bp, Chicken  19866894284022_4
cagctcctggcccacgccgagccctgcagtggagcaggacctggcattgctcccatctctgccgtcatctcagggcactcagctgtggctcggccgcctgcagcatctccctgcattgcccctttctgctcccttctgagtgcccatggttcgtggagctgccagccccggccccactccccgctgctgttgcttttccagtaactttcccagtatcaatgagcacagggcagygggtgctggggctcagggggcggcagcacagctgaccgaggccgctgggcagggggaagggccctygtcgagccgtgcagctcaggagctgcgaaagagctgatatttcttatctctctttgcagcaacttcccccctcggctgtggtcagggcgcttgctgcacgcaggggaagtggcggccgggccagctgccttcgggcctgtgctgtgcttcatggagctgtgtcagaggaggaggaggaagaggaaagagtgctctcaaccacaggctgcctgcctgacccctcgctgctgtcccggggagtgggaaaggggtatgcgtgctgctgtctcctcagcctcaatggcacagatctctgggagc

SEQ ID NO: 44794 - DNA, 600 bp, Chicken  19866894284028_1
atgtgacttgcacaagtgattataatgcaagttacctgcccattattgttggttctgtatatatttattttgttgtgatcaatatgttatgtttttaatttatagaggatttttttttcgtatttttggaagggttttttattatttaaataaagtggacaattttgtctcaaaactggtcctaatctttgtaaaagatatgcccagaaagaattctaatgcctaagaaaaactactctcgtattcacattcgccactttcagcatcatatgtaatacttgtacagaaacctagtaaacycatgaaaactgacagtatattattctgaaagtcaacagttacttcagaagaaccaatttagatttagtttggaagataatctcagaggaagtaaatatgcaacctttactagtaactggagggctggaaactcaaatgattcttcagtaggtagatcttagtctatttttttatttataagacttagaagtactaattaatagaatgactgctggttcattttcttcagtctatatgtaggtacaggtaaaagagacaaaagggctagaaagaaaggaaaaagaaagcataataagaaaa

SEQ ID NO: 44795 - DNA, 600 bp, Chicken  19866894284034_1
gggcagggattgtaaaataaaatgttcctaaaccatacctgagaactcatgatggggtagaggagaatgacatccaaattgatgcctccacagtggaaaagagggcagctggagcacagctactttaattaggcactggagaatctgtatgggagcacactgcaggaaatcaggctgcatagttcacagactagttgttattaacagggtagcctgcagggtccctgggcttgcagtgaaagtttgtttataatgcaacattctcctactctgaagtaaaggaagtgtggatggggtttrgaaatcagatttaactcattgmtgggactagtctgagctcaaaacagaaacttagactgttactctcctagccagggcttctctctcttagagcatttacttgtttctgacctgaaaytcattttcaatgaattgtgagagtcaaacacactcctatgagtgaaatagaatacatctcgttttgcttgagaacctcagaatccccagtctaatgggaagggagtccttttgaatgaatcaaagtaaattttattctctrtgtttgtatgagagagagcagtggtatttatttggctggtg

SEQ ID NO: 44796 - DNA, 600 bp, Chicken  19866894284034_2
tgttcctaaaccatacctgagaactcatgatggggtagaggagaatgacatccaaattgatgcctccacagtggaaaagagggcagctggagcacagctactttaattaggcactggagaatctgtatgggagcacactgcaggaaatcaggctgcatagttcacagactagttgttattaacagggtagcctgcagggtccctgggcttgcagtgaaagtttgtttataatgcaacattctcctactctgaagtaaaggaagtgtggatggggtttrgaaatcagatttaactcattgmtgggactagtctgagctcaaaacagaaacttagactgttactctcctagccagggcttctctctcttagagcatttacttgtttctgacctgaaaytcattttcaatgaattgtgagagtcaaacacactcctatgagtgaaatagaatacatctcgttttgcttgagaacctcagaatccccagtctaatgggaagggagtccttttgaatgaatcaaagtaaattttattctctrtgtttgtatgagagagagcagtggtatttatttggctggtgtgtgggcacgctctctctgaag

SEQ ID NO: 44797 - DNA, 600 bp, Chicken  19866894284034_3
gctactttaattaggcactggagaatctgtatgggagcacactgcaggaaatcaggctgcatagttcacagactagttgttattaacagggtagcctgcagggtccctgggcttgcagtgaaagtttgtttataatgcaacattctcctactctgaagtaaaggaagtgtggatggggtttrgaaatcagatttaactcattgmtgggactagtctgagctcaaaacagaaacttagactgttactctcctagccagggcttctctctcttagagcatttacttgtttctgacctgaaaytcattttcaatgaattgtgagagtcaaacacactcctatgagtgaaatagaatacatctcgttttgcttgagaacctcagaatccccagtctaatgggaagggagtccttttgaatgaatcaaagtaaattttattctctrtgtttgtatgagagagagcagtggtatttatttggctggtgtgtgggcacgctctctctgaagtacgcagtaaaacaaagcataacaaatctgtatttacaaacctgaggaagtctgtgctgcagtcaacatattgaagttcttagaggagctcagggg

SEQ ID NO: 44798 - DNA, 600 bp, Chicken  19866894284034_4
attctcctactctgaagtaaaggaagtgtggatggggtttrgaaatcagatttaactcattgmtgggactagtctgagctcaaaacagaaacttagactgttactctcctagccagggcttctctctcttagagcatttacttgtttctgacctgaaaytcattttcaatgaattgtgagagtcaaacacactcctatgagtgaaatagaatacatctcgttttgcttgagaacctcagaatccccagtctaatgggaagggagtccttttgaatgaatcaaagtaaattttattctctrtgtttgtatgagagagagcagtggtatttatttggctggtgtgtgggcacgctctctctgaagtacgcagtaaaacaaagcataacaaatctgtatttacaaacctgaggaagtctgtgctgcagtcaacatattgaagttcttagaggagctcaggggatgatttgcactgagtgccttcatgcaggtttactaagacaaagaaaggtgttggtgtagtatacgtttgagacattgcttgcagtttctcacacaaaacttctgctgctctttcaaactttgccacgtgctgtgccaaag

SEQ ID NO: 44799 - DNA, 600 bp, Chicken  19866894284035_1
caccacattatgatggtcaattggggacatctgtgctgatgaaaatgacttttgattgtacctagatggcttttacatgcagtactccatgccggttcactttccagttcaaagagattaaaatcaattccatttgctgaatggggcttctttttttcctagctagctaatcagcatttatatgccttatattgaattatctggtttgtaatctctggactaggaatatacatagataactgaagtattttgcttttaaaaattagatagtgttattttgaagttattattactttttcratggtattaacatgttatctttacagtaataaacaagtcattgtgttgatagtggctcacattaacatgtatgggtgcagaacaacgggtgctctggctggagaatttagtaggttctgtgttcctcacttcctaaactctgaaattcacttttcaagctgatttccagtgtgcttaccattttggcrtgaattgaattgctatcatggttgaaagttggattgtagaatgactgttaggattaaggcttcggtgactacctgatagaatggtgcattccatcttaacagataggtacag

SEQ ID NO: 44800 - DNA, 600 bp, Chicken  19866894284035_2
atattgaattatctggtttgtaatctctggactaggaatatacatagataactgaagtattttgcttttaaaaattagatagtgttattttgaagttattattactttttcratggtattaacatgttatctttacagtaataaacaagtcattgtgttgatagtggctcacattaacatgtatgggtgcagaacaacgggtgctctggctggagaatttagtaggttctgtgttcctcacttcctaaactctgaaattcacttttcaagctgatttccagtgtgcttaccattttggcrtgaattgaattgctatcatggttgaaagttggattgtagaatgactgttaggattaaggcttcggtgactacctgatagaatggtgcattccatcttaacagataggtacagcagatagcactctaaaaaagggaaaagaaagattcaaacataatttccagctagtagtagttctcacattttttcccaaaaagattcttacagtctctgagacttctaaacaaatcataattctatctgccatcctgtgcaaagataagaaagaaagaagagagagtggagagagctttatgctatct

SEQ ID NO: 44801 - DNA, 600 bp, Chicken  19866894284039_1
ttaggcagctcacggtggttaaaaacacaggtaaatgtgctcctgcacaactgatctgcaaacattttcctcagactttaacatgacgttatttagaagtattctaaataactgaatgtgccccaggacaagttcttaaaggaactttggtcttaatctcaaacatttccacctcacctggaaacggccttctgctggagcacagcactgctgcacacagcgcccacgtctgcaatgcagtgcgtgctctgtgcctccccaggaaaggcacacctgtgaagcacaagctgacatcacagsacaaggttctgcacactccgtgctactcacactatgtgacagcaattggctaccaacatagagcgattcyggaaagtctgggctgtcacctttggagtttattacacctacctgagatgaaagaaacccacccttgtgacttgcagggaaatgctggagtaagtttgggaaaaaaatccttctgtgtcttcccccaaaaataaaataaaaagctcaacattagactcgctgcttcaacaaactattattacatgcttcaccagtccattaaagaaagtaatttaatcagttggtattttc

SEQ ID NO: 44802 - DNA, 600 bp, Chicken  19866894284039_2
tcagactttaacatgacgttatttagaagtattctaaataactgaatgtgccccaggacaagttcttaaaggaactttggtcttaatctcaaacatttccacctcacctggaaacggccttctgctggagcacagcactgctgcacacagcgcccacgtctgcaatgcagtgcgtgctctgtgcctccccaggaaaggcacacctgtgaagcacaagctgacatcacagsacaaggttctgcacactccgtgctactcacactatgtgacagcaattggctaccaacatagagcgattcyggaaagtctgggctgtcacctttggagtttattacacctacctgagatgaaagaaacccacccttgtgacttgcagggaaatgctggagtaagtttgggaaaaaaatccttctgtgtcttcccccaaaaataaaataaaaagctcaacattagactcgctgcttcaacaaactattattacatgcttcaccagtccattaaagaaagtaatttaatcagttggtattttctcaggaaaatctcattcagagaaattttattgccagctatctaaatagtaaatacttattatcctctcaa

SEQ ID NO: 44803 - DNA, 600 bp, Chicken  19866894284049_1
atacagccaagtctcatgttgctttagcaaatcatttattgttgaatcatcaaaattatttagatttttggctgttaggggaacagagacccgtgaaactttgacttttattaccctgtgcttccttattaaaatggtacttaagctacatttgtatcagtgtattctgaacatcagcagaagctgatctgcagatcaatatcaatcatgctaaggccctcatgattacataaaggggtttttgtttgtttatttctttgttgcttttttttaatacccatagtagctccaatcaagtcytgtcaattagatgatcaccaatggttgaagaagaatatcacctgtgctcttgcaatacatttttgactaatttcatccaaaatgaatccattttgtgtgtatttacattattgactcctgtagtgtaaagagggagggccatgggttctattttttttgcatggtgctccggtgatgggtcacagtgcctcagccagagatgaagtgtgtaccgatggccaagcttaggtgcatagtgtgcatgagcggagcatgaagtccaggaaggaaaaactagcaagaaggaccttgtgttgttct

SEQ ID NO: 44804 - DNA, 600 bp, Chicken  19866894284049_2
gaaaatccttcaaagtgttccagggctctgctttgtgtcatcaaggacagacacaatgccaactaccattgatattcctataaaatggcatatagtgaccatcagaagactctcctccataacatacacacagttccaagtaaaatactagcacgttgtcatcctaagattttgtcctgctgtggaaatacacataaacttaagacatatttgcctttattcaggcctcaaaatgaaaagctgctgaagcaagacacttcagtacaacgaatcctcatgttaatatacgacattattgcyattactcactgctagacttactgctcttgaagtttcttcaagcaaatgatgaaagcaatgtcctgagaggttggtgatgtcatgaacagccccagaagtcaggagagggttttttttttaatgaatttgtaaggtgaaacccaggttggttcaacatggaacaataaatacagctttgatctcaaggatgaacagtcattattatgtgcataaggtatgtataaagtatatgaaaattacagacgttgagccttcaaatacatgataaggaaatttctcccaaacaaaaacctgtatgtg

SEQ ID NO: 44805 - DNA, 600 bp, Chicken  19866894284052_1
gcattcctgtcccattcatccatgacttcccaacgcatgcttctacagcattatcccattccaggtcagtaagctgccatatttctttctcttatctgcaaattcatgttcttctatctcttattcagctaagtcattgctgtaccaaagtcccgagtcaacaaaaagtcaatttatttttatttttacattaaatacaacctgctcaaactctttttactgagcctaacaaaaaaaaaaatatattcaatgcttgtaggtcaagtcattttgcaggtatgacaagcaagaaaaagttgraaatatgttccagaagcaaagagtgaaatgatttgacacaccatgcatttagctctgattcatcagacttcgggaaaaaactcaactgcatggtaatgtggacaaaactttagaaaatgaggcttatgtgagggaaatctgtgaggtacagagatgaaactgaggatcctgactggaagccaggatcgagtccaactacagagtagctactgcaatttcataaaactgtacgttttggcataaaaaactaycacaggagagggagtaaatggatcaccacatggagtagctgagcaaaca

SEQ ID NO: 44806 - DNA, 600 bp, Chicken  19866894284052_2
gcttgtaggtcaagtcattttgcaggtatgacaagcaagaaaaagttgraaatatgttccagaagcaaagagtgaaatgatttgacacaccatgcatttagctctgattcatcagacttcgggaaaaaactcaactgcatggtaatgtggacaaaactttagaaaatgaggcttatgtgagggaaatctgtgaggtacagagatgaaactgaggatcctgactggaagccaggatcgagtccaactacagagtagctactgcaatttcataaaactgtacgttttggcataaaaaactaycacaggagagggagtaaatggatcaccacatggagtagctgagcaaacatgtgtttttattttcaaagaacagctgagattgggtcagctggttgtgataaaagaggcttcagtgtttctgaactgatatataggraaggattatagggtgctccaagagtcaatggaaaagcaattccaaaataacttagcaattctaagttcctttggtatttgttgtaataatatttgttactggaaatttatttggtacaaaatgtaaatgttatctatcatgtttcctttggtagtcagcactgt

SEQ ID NO: 44807 - DNA, 600 bp, Chicken  19866894284052_3
gcatggtaatgtggacaaaactttagaaaatgaggcttatgtgagggaaatctgtgaggtacagagatgaaactgaggatcctgactggaagccaggatcgagtccaactacagagtagctactgcaatttcataaaactgtacgttttggcataaaaaactaycacaggagagggagtaaatggatcaccacatggagtagctgagcaaacatgtgtttttattttcaaagaacagctgagattgggtcagctggttgtgataaaagaggcttcagtgtttctgaactgatatataggraaggattatagggtgctccaagagtcaatggaaaagcaattccaaaataacttagcaattctaagttcctttggtatttgttgtaataatatttgttactggaaatttatttggtacaaaatgtaaatgttatctatcatgtttcctttggtagtcagcactgtaaaattaatgtgcaggggtttctttgcactggaaactgtaatgcttttgagcagtgagaacactgtgaaacagaaggattgagagctcactgggggcacatcaagttttgtgccgtcacagttatatctccaggct

SEQ ID NO: 44808 - DNA, 600 bp, Chicken  19866894284056_1
ttgcttgcaaactctgagttttcaaacttcagagaagtgctggaatggtcagggttgcctcacaaagaacaaaacgaccagacctgcagctgcacaacgcagcagcacctctgcctctggtccctgggtcacccctgctcctgcccaacagccacaacccagagcactttcaatctgatgcctgaccccacacagtctaacagctgtgattgctgtctcccagtttccagcctcaacacacagcagatcagtctgcagattctcccatgcctatgctggccttagtcagccaaaacaagyggtgacttttctccttccctcatgtttcactgcatcagggaatgtggggaarggcaggaagaggaaggggcaaattaacctcagtgtacacayacacatacgtgagtatattaacatctatttatgtgtacacagtatacctaaaattaggtttacaaacatgaggtggccatgtaattagaaatgaaaggtggaattacgaatccatagactaagccgccttgcctaatggctccaagttttgctcctgttcacacggggtaatcctggagaaatgcagcacatattgaagttcactgc

SEQ ID NO: 44809 - DNA, 600 bp, Chicken  19866894284056_2
ggttgcctcacaaagaacaaaacgaccagacctgcagctgcacaacgcagcagcacctctgcctctggtccctgggtcacccctgctcctgcccaacagccacaacccagagcactttcaatctgatgcctgaccccacacagtctaacagctgtgattgctgtctcccagtttccagcctcaacacacagcagatcagtctgcagattctcccatgcctatgctggccttagtcagccaaaacaagyggtgacttttctccttccctcatgtttcactgcatcagggaatgtggggaarggcaggaagaggaaggggcaaattaacctcagtgtacacayacacatacgtgagtatattaacatctatttatgtgtacacagtatacctaaaattaggtttacaaacatgaggtggccatgtaattagaaatgaaaggtggaattacgaatccatagactaagccgccttgcctaatggctccaagttttgctcctgttcacacggggtaatcctggagaaatgcagcacatattgaagttcactgcctgacgtgaccccgtattttgggtgaatccaaggatgcccctttaaatcact

SEQ ID NO: 44810 - DNA, 600 bp, Chicken  19866894284056_3
acaacgcagcagcacctctgcctctggtccctgggtcacccctgctcctgcccaacagccacaacccagagcactttcaatctgatgcctgaccccacacagtctaacagctgtgattgctgtctcccagtttccagcctcaacacacagcagatcagtctgcagattctcccatgcctatgctggccttagtcagccaaaacaagyggtgacttttctccttccctcatgtttcactgcatcagggaatgtggggaarggcaggaagaggaaggggcaaattaacctcagtgtacacayacacatacgtgagtatattaacatctatttatgtgtacacagtatacctaaaattaggtttacaaacatgaggtggccatgtaattagaaatgaaaggtggaattacgaatccatagactaagccgccttgcctaatggctccaagttttgctcctgttcacacggggtaatcctggagaaatgcagcacatattgaagttcactgcctgacgtgaccccgtattttgggtgaatccaaggatgcccctttaaatcactgtcagcaacacctgatgctcaagaagaaaagggaagatttc

SEQ ID NO: 44811 - DNA, 600 bp, Chicken  19866894284057_1
tcccccagagatttggctgctgaatggctgcagctcggtggccaggattcctggggcaccctgcattctgcctgctggtggcacagatgggacactggggacaacaaaaccacaggtccccacccacccgctgcagggtaggaactcaacttggctcatcaaaaccaaaccgattcttcaaaaagtttaatttcgaccattcactgctccagtagagacactcacagtaacctggggtgtttgattaccaaatgctcaagaggtagctgtacctctcatggcacaaaaagccttctgatrtcccatgctcttgagtaaaggggcactgatgtagaggtagtgtggaaagaaatggactgaaacccaaggcattgcttctgcctcagtccttcactaacatccagaatcctttaacacaatgctatggaaagacgaagtgcaaagtgagggctggagcacttcccctacgaaggcaggctgagaaagctgggcttgttaagcctggagaaagttgtgggggtgacctcattgtagcctcccagtacctaaaggaagcctacaaacaggagggggagttgactctttacaaaggtagataat

SEQ ID NO: 44812 - DNA, 600 bp, Chicken  19866894284063_1
ttagtgggaataaatatgggctattactttttttttcccattgtcaatatgaaattctgatgatagtcactttattgctctgtatgagactgcatatattatttaactagtatgaaacatttccatttattcagctacgtgggcagtttttgtatgataaatttttattctggcaggggagtactgttaagctttactttggttaagtacattaaaagaaattctataatctatgtaagtcttgcattgtaaaattttggtttgttgcctggatagttatttctactaaggctatcagcrcaagaaacttcagtattttttagcacacagttgctatgtaaatctaattgcaagcagacagtaaactcttgctagggcttctaaaaattaggtatgtgatggtattgaaatcaatgttaagactctaacctacagaaygggggaactttactgtcttatgaaatcctgtacatacagctataaatctctagttcatagcacattctgttatggtgccctttgtttctaaaatcatttcatcattgatgggcttttggtttactagcatacattttatgttgtcaaaacataacatcaagt

SEQ ID NO: 44813 - DNA, 479 bp, Chicken  19866894284063_2
gtgggcagtttttgtatgataaatttttattctggcaggggagtactgttaagctttactttggttaagtacattaaaagaaattctataatctatgtaagtcttgcattgtaaaattttggtttgttgcctggatagttatttctactaaggctatcagcrcaagaaacttcagtattttttagcacacagttgctatgtaaatctaattgcaagcagacagtaaactcttgctagggcttctaaaaattaggtatgtgatggtattgaaatcaatgttaagactctaacctacagaaygggggaactttactgtcttatgaaatcctgtacatacagctataaatctctagttcatagcacattctgttatggtgccctttgtttctaaaatcatttcatcattgatgggcttttggtttactagcatacattttatgttgtcaaaacataacatcaagtattaataaaaaataggt

SEQ ID NO: 44814 - DNA, 600 bp, Chicken  19866894284065_1
cagagtgggtccacatccctcctttaaccttcttatcattgatatgcaaatttatttatttatttatttatatgaatagataggtatataaaatagttatgaaccatcatcatccataggatgggcagaagtattaaagaccttaagtgcctaaataaaaaaagctagtttcccagaaatcactgcaattgagggaaaggcacttaaaaatatattcacagcaggagcatgatttaagtaaatattccctattatgtaacagtatgcatttaatgtcatcttgaaagaatgcactgtcckgaaaatagaagaaaaatattatcaatcataatgcatgttyctagacctgacaagctactgagcagcattaacaggaattccagtgctgaaaatggcagtgttgtgtctcaacttttcaggaattcattcagttaggaaagagaagatagaactaaaattatatttatctaatccatgtggtctcccctctaacaagacctaatgaaagatgtacgtgcaacagagaatacatattcaaagagtattcattgcacagttacgatctgcaggatgcattacaaaatcatctctcaacatgaa

SEQ ID NO: 44815 - DNA, 600 bp, Chicken  19866894284065_2
gatatgcaaatttatttatttatttatttatatgaatagataggtatataaaatagttatgaaccatcatcatccataggatgggcagaagtattaaagaccttaagtgcctaaataaaaaaagctagtttcccagaaatcactgcaattgagggaaaggcacttaaaaatatattcacagcaggagcatgatttaagtaaatattccctattatgtaacagtatgcatttaatgtcatcttgaaagaatgcactgtcckgaaaatagaagaaaaatattatcaatcataatgcatgttyctagacctgacaagctactgagcagcattaacaggaattccagtgctgaaaatggcagtgttgtgtctcaacttttcaggaattcattcagttaggaaagagaagatagaactaaaattatatttatctaatccatgtggtctcccctctaacaagacctaatgaaagatgtacgtgcaacagagaatacatattcaaagagtattcattgcacagttacgatctgcaggatgcattacaaaatcatctctcaacatgaaatattggtggtaaagaggaatgtagaatactcattttcca

SEQ ID NO: 44816 - DNA, 600 bp, Chicken  19866894284069_1
tggctcgagaatccccatttaccacctggtggattggtttggaggagcagcctgcttttatattcacgacaagcaccgaaaaaatgaatgaatctgctgtgaaaatcccatgtgcctttgacaactgcagacagctggagtggagtgctagctaggtgaggggcttggccacacctcagcatcccatcacaggttctggtctgctctgggctattactcaaaagctcaaattacctttgccatagaatcatagaatccttagagttggaagggacctttaaaggtcatccagtccaactyccctgcaatgaacagggacatccagagtcggtcatcacttcagatgattttcattgttcaaactactgtttatggccacgacatctttcccagtaacctccagtgcaaaaccaagtgctaactgaacagtaaacactcctctcacaaagtcagctttattcactgggaatgagatacctcagcagggagtmttggtggagctgctggggggatgcagagccccattgcccactgcagttaagaaacatcacagccctctgactttatgcccacaaaaagctacatgatctggtttttcac

SEQ ID NO: 44817 - DNA, 600 bp, Chicken  19866894284069_2
ggttctggtctgctctgggctattactcaaaagctcaaattacctttgccatagaatcatagaatccttagagttggaagggacctttaaaggtcatccagtccaactyccctgcaatgaacagggacatccagagtcggtcatcacttcagatgattttcattgttcaaactactgtttatggccacgacatctttcccagtaacctccagtgcaaaaccaagtgctaactgaacagtaaacactcctctcacaaagtcagctttattcactgggaatgagatacctcagcagggagtmttggtggagctgctggggggatgcagagccccattgcccactgcagttaagaaacatcacagccctctgactttatgcccacaaaaagctacatgatctggtttttcactgcaaagtgagtaacagcaatttgaccacaacaggcaaactttcttgggtaggctgggccatagatctccacccagccgtggatgagatgctgtcaacaggattgctttgtgtcctataggctctcctgagtgatccactctatattggactgaaacacaaagagggtccgtgggaaacaatacgacgaac

SEQ ID NO: 44818 - DNA, 600 bp, Chicken  19866894284072_1
tgcacatcagggaaaaaaaaatgggatcacttttgaactggaacaggaactcaacaggaactcactgcaaactgaattatttaagtaactaagaaccagttaggacctgttcagtgattacaaacagcaagtcaagtccaaagttttgccagtctaaaatatttattccagtatctaactatttgattgaaaactgataaaatttgatttatctagacaccagggagctcccacctaagatttcttcacagtagactttacacctgaagctagcatcttgaatgccttgatttaaattgwccycagtttaaacatccatattgtgcttaaattttcagcaccatacttgagagttgcaaaagaagagagcttgaaacacctgatattatcaagggcaatacacctgaatggtaacttttcctgcttacgaattattttaatctattttttggggggaggggtgtacaatccatgtcctaataaatatttaatcacaagactctaggtctaaatcaagcaagcagaaaaaaattaaagtgatactgtaattggtagaatatagtcctaccatattctcagtcacttacatattctgtccaa

SEQ ID NO: 44819 - DNA, 600 bp, Chicken  19866894284072_2
acatcagggaaaaaaaaatgggatcacttttgaactggaacaggaactcaacaggaactcactgcaaactgaattatttaagtaactaagaaccagttaggacctgttcagtgattacaaacagcaagtcaagtccaaagttttgccagtctaaaatatttattccagtatctaactatttgattgaaaactgataaaatttgatttatctagacaccagggagctcccacctaagatttcttcacagtagactttacacctgaagctagcatcttgaatgccttgatttaaattgwccycagtttaaacatccatattgtgcttaaattttcagcaccatacttgagagttgcaaaagaagagagcttgaaacacctgatattatcaagggcaatacacctgaatggtaacttttcctgcttacgaattattttaatctattttttggggggaggggtgtacaatccatgtcctaataaatatttaatcacaagactctaggtctaaatcaagcaagcagaaaaaaattaaagtgatactgtaattggtagaatatagtcctaccatattctcagtcacttacatattctgtccaaaat

SEQ ID NO: 44820 - DNA, 600 bp, Chicken  19866894284075_1
ttgttttctggcaaacagagaagtagtcgagttgtcgtcgcggctctgcgtggcggggtgtgcagcgggaggttttgtaaccttccttggcaattttgggttttatgtggcatttcctgtgcagggtcacagataggaaggctctcgcccgcgatccgagatgttttcgtgcgcagcggacgcgctctgaaatgcaccacaggctctgctggtgcctcctctgcgatcccaaccacgctgggcgtgaagtgcccatatgccgtggcctgtgtggggccggcgggctgcttggggcgctcygaactcgggggagggggctcttatttttgctgtgtgcatttcataaggagcattcttgtttacacgatcgcgttattaattccttgctccggtttaaatatttgtatttccctcacgatttggctctgcgaaaggtaagtttggaaagtgcttctctctttaccttatttaaaatgttgctgatcagaaaaaggggcttttctgtctgctgacgacatgtgtgtgacatgtgagcctgaaccacccagcgtctgtgcaggagctgtaaacatgtttacctgaacaggaaagaaaatggat

SEQ ID NO: 44821 - DNA, 600 bp, Chicken  19866894284076_1
cttggggcagtcgcaagggtgcttggtgctgggtctcttcgccaggtccccatcacatctaccatttcccaggaattgatgttccgcactcgtaccagcgcacgtagttgatgtgagtctccccacctatttttccaaacttgacaggttcctgacgaactgccctgaagaatcctaggaacagagaacagagtttgtttgcaggaagccatgagagagaaccttcttttgatttccccgtggggcttgtgtatgatcccagtaatggctaccaatacgccacagccgtcactccctccstgcatttcaggtcaaacatccattaactctggttggtcttttgctttcttttttgttggtggattgtacttytatttgtttaggttttcaaatgaaaaatgaatgcagcttacgaatccagccagctaaatccagtaggtggaaacaaattggctttacctttctcataagcttacaaggtaggcagttttttatttcacatttataaagtcttctttaataagtgaatctgatacaattgagagggtggctgccctggcaatgctgagccggattcagacaattccttacacaaacaaa

SEQ ID NO: 44822 - DNA, 600 bp, Chicken  19866894284076_2
gaattgatgttccgcactcgtaccagcgcacgtagttgatgtgagtctccccacctatttttccaaacttgacaggttcctgacgaactgccctgaagaatcctaggaacagagaacagagtttgtttgcaggaagccatgagagagaaccttcttttgatttccccgtggggcttgtgtatgatcccagtaatggctaccaatacgccacagccgtcactccctccstgcatttcaggtcaaacatccattaactctggttggtcttttgctttcttttttgttggtggattgtacttytatttgtttaggttttcaaatgaaaaatgaatgcagcttacgaatccagccagctaaatccagtaggtggaaacaaattggctttacctttctcataagcttacaaggtaggcagttttttatttcacatttataaagtcttctttaataagtgaatctgatacaattgagagggtggctgccctggcaatgctgagccggattcagacaattccttacacaaacaaaactcctttacgagtgtggaacgctgactgtgggaagaagtaaagcctaacctacacctacacctaccacagt

SEQ ID NO: 44823 - DNA, 600 bp, Chicken  19866894284076_3
gcactgcagtggtaatgctgcaaacaagcaaggcggaggctcagctgacagaacctgcttacacttcagcctgaggaacatgtgaaaaaataggcagggcggtcacggatgcctgtaggacatccacaccccgtccccttaggccagaccagcattttgggcacccaccttgaattagtgtattcagaattactgcagcatgaattatattttccagtaataacttcttagtttcttgttagcactaaacagagctgtctgatgctcaagtgatgatttatggcacttaacattaacctygctagtttcagcataacacttcatgccgctatgcaaactgaaaattgcagttgggtttgaatatgcaataccaaatgtgaataacctgttggaatgttttaaacaggagggaggctgtttactacctcacagaacctgagccataatggtctttattaagtaagtcatggctcatcttaaaatcatagaatcgcagaacaatttgggttggaagtgaccttaaagtccacacagttccaacctccctgctgtaggcagggctgccatccaccagctcaggttgtcccatccagcctggcc

SEQ ID NO: 44824 - DNA, 600 bp, Chicken  19866894284093_1
ggccgaggcgccgacccctggctgaccatcggaggaccacccggtgggccacgcgctccaactttccccagaggaaaatccaggtcaagcagtggcggcagcagcctgcggcgctaagccacttactgaaagcttccccagccagcccagcaccgcggcacacgtgagcccgcgacgcatcgctcctcgtgggggatcggcgctcaccttacagccgtgggcagcacagagctcagccccacacggccccgccgcggagctcggctccccagccctaccaccttacagacagagccacascagacaaaggaagaattatgatttccagtttagcaaggtacaacgctcattaagtgacttgtcaaaggtcacttggcaaacgccaggcagagctgggaaccaaacaaaacctcacggatttcggtccgccacgagcccctcttccaactcccctccgatgcgtttccacctctgctgcaggtctcacccctctgcccactctccctgcacagttaagacgcttccctttcatttcctgcacgggaggaaatggataaatacacagatggaacgaacgagaacttttacctcacttccaaa

SEQ ID NO: 44825 - DNA, 600 bp, Chicken  19866894284100_1
aagtcaggtaaaatacttcctgtaaattaacattaactaatattaatccacttgtcaattcaaaggatgattagcatatttttgtttagaagcaacaactgcttttatataaatggatttagtgagaaaactgaaaatgatcaaacatgcatgcaaaaacattctttcttccattgggctgcttttttaagtctataaaaagcaacttaattgagaggtttgtaggtggcctccttgaaatgccaatttccaaactttcaaagttcaaaataaggatatgtgaacattacacaatccagytttgttaagttttaaaacagaaaaacaactatttggctctacattgagttccccatagatacacgtggacaagcaagctgtaaaattaacatctgtttgtagcaattgcctaactgctttttttttcttgctaagaactacagttcttaggagtgccaattgtccacattgaagtattttctctcttttttgctcatagaccacaattatagatcaatcaagagttcaaataaaatgcataagctttaccccattacgttcgtagcatacactccctgttggactctgacccggggcagc

SEQ ID NO: 44826 - DNA, 599 bp, Chicken  19866894284105_1
  misc_feature (1)..(85): n is any nucleotide
nnnnnnnnnnnnnnnnnnnnnnnnnnnnnnnnnnnnnnnnnnnnnnnnnnnnnnnnnnnnnnnnnnnnnnnnnnnnnnnnnnnnnacagatacaaaagcacaataacactgtttggtagagcaaatcctcagctacgaagcaatatttttcagcctagtcactgttattagctatgcatttttgccagtgatgaagaagagcatgcacgctgcacttgtaaaaatctgctccagcagaggtgacctgttttcgccactgctgaaatgcagcacccaccactccactgtgctcatatccaytgtttggtctccacattcagcaagcattgatgaatatcagtgggtgccattttttccacatgraataattcagttacacatcttaggttcacacacacctccatgtcagatgccattttgtcagatagcctctctgctgccatctgtcacacagcaacaaaacagaacggaatattggtggkaaggttcaacctctactctcatactgcccacatctgcctctgacatcatgggccaacataataaaataggaggcattcattttggagcagccctygtactgtattctatactatatt

SEQ ID NO: 44827 - DNA, 599 bp, Chicken  19866894284105_2
  misc_feature (1)..(22): n is any nucleotide
nnnnnnnnnnnnnnnnnnnnnnacagatacaaaagcacaataacactgtttggtagagcaaatcctcagctacgaagcaatatttttcagcctagtcactgttattagctatgcatttttgccagtgatgaagaagagcatgcacgctgcacttgtaaaaatctgctccagcagaggtgacctgttttcgccactgctgaaatgcagcacccaccactccactgtgctcatatccaytgtttggtctccacattcagcaagcattgatgaatatcagtgggtgccattttttccacatgraataattcagttacacatcttaggttcacacacacctccatgtcagatgccattttgtcagatagcctctctgctgccatctgtcacacagcaacaaaacagaacggaatattggtggkaaggttcaacctctactctcatactgcccacatctgcctctgacatcatgggccaacataataaaataggaggcattcattttggagcagccctygtactgtattctatactatattaaaataccaatcgaagccagtaaattctataagctaaatctgctggaagaatgctcaaaacta

SEQ ID NO: 44828 - DNA, 600 bp, Chicken  19866894284105_3
tgccagtgatgaagaagagcatgcacgctgcacttgtaaaaatctgctccagcagaggtgacctgttttcgccactgctgaaatgcagcacccaccactccactgtgctcatatccaytgtttggtctccacattcagcaagcattgatgaatatcagtgggtgccattttttccacatgraataattcagttacacatcttaggttcacacacacctccatgtcagatgccattttgtcagatagcctctctgctgccatctgtcacacagcaacaaaacagaacggaatattggtggkaaggttcaacctctactctcatactgcccacatctgcctctgacatcatgggccaacataataaaataggaggcattcattttggagcagccctygtactgtattctatactatattaaaataccaatcgaagccagtaaattctataagctaaatctgctggaagaatgctcaaaactaggtgaaaatactccttatctcatataagagcaacagagagcacaaaaaggagataaaggtacctagaaggaattgtccatccaacttgattcttgttttctccagcaggtcaaaagatgt

SEQ ID NO: 44829 - DNA, 600 bp, Chicken  19866894284105_4
cactccactgtgctcatatccaytgtttggtctccacattcagcaagcattgatgaatatcagtgggtgccattttttccacatgraataattcagttacacatcttaggttcacacacacctccatgtcagatgccattttgtcagatagcctctctgctgccatctgtcacacagcaacaaaacagaacggaatattggtggkaaggttcaacctctactctcatactgcccacatctgcctctgacatcatgggccaacataataaaataggaggcattcattttggagcagccctygtactgtattctatactatattaaaataccaatcgaagccagtaaattctataagctaaatctgctggaagaatgctcaaaactaggtgaaaatactccttatctcatataagagcaacagagagcacaaaaaggagataaaggtacctagaaggaattgtccatccaacttgattcttgttttctccagcaggtcaaaagatgttttggtttgtggtaaactagacatttcctctgtatgccagccagcacccatcacaaactacaaaatggctcacaacrctttaaatcaagttacag

SEQ ID NO: 44830 - DNA, 600 bp, Chicken  19866894284105_5
cattttggagcagccctygtactgtattctatactatattaaaataccaatcgaagccagtaaattctataagctaaatctgctggaagaatgctcaaaactaggtgaaaatactccttatctcatataagagcaacagagagcacaaaaaggagataaaggtacctagaaggaattgtccatccaacttgattcttgttttctccagcaggtcaaaagatgttttggtttgtggtaaactagacatttcctctgtatgccagccagcacccatcacaaactacaaaatggctcacaacrctttaaatcaagttacagatcaaagtaaaagatcaaaatgcacaactgyaatgtgtcagagggaaagagaaagggaaaatgaggccattgtctacatcccaggcccctgcaagaaattggcatatgagatcatttctctaagaaatgtattccttatcctaaaccccagatttacatcttaaagttttgaccagaagcatctgtaaattaaaagcatccagttgtgtttgtgtgtctgtgcacccatatacatgtgtgtgaatattttagagagtgcaagacctcttgtttttaaatcat

SEQ ID NO: 44831 - DNA, 600 bp, Chicken  19866894284105_6
atcgaagccagtaaattctataagctaaatctgctggaagaatgctcaaaactaggtgaaaatactccttatctcatataagagcaacagagagcacaaaaaggagataaaggtacctagaaggaattgtccatccaacttgattcttgttttctccagcaggtcaaaagatgttttggtttgtggtaaactagacatttcctctgtatgccagccagcacccatcacaaactacaaaatggctcacaacrctttaaatcaagttacagatcaaagtaaaagatcaaaatgcacaactgyaatgtgtcagagggaaagagaaagggaaaatgaggccattgtctacatcccaggcccctgcaagaaattggcatatgagatcatttctctaagaaatgtattccttatcctaaaccccagatttacatcttaaagttttgaccagaagcatctgtaaattaaaagcatccagttgtgtttgtgtgtctgtgcacccatatacatgtgtgtgaatattttagagagtgcaagacctcttgtttttaaatcatcactgataatctagcagttgtttatatttaaatgaatggtgttgctaac

SEQ ID NO: 44832 - DNA, 600 bp, Chicken  19866894284108_1
gataaatgcagtttctacagcagtaggtaccactgcttccactgaaacccctacccattctggatgctccctataactgcaaactcagcccaaacactgcacttctcaaaccaatgatcagcaattttttacttcaatgtaggctttcaaacttgtagtaggaaggccttctctttccaagatagcccaggataggagaggcacaatgaggctcaccagacagcacacaggcagagatagcaatgggagggttaggaaaagcaagcaacatgccaccaccagaacttctgtttagttcawtataaagcaaggcctgcactgctaatgataaagaaacggtatcatgatttgtttggttacagctacagccatcatcattttgcagagaactggcagctcccaaatatttgtcttccagagagttcagttaaatataaccctctctgcctgagccaggaataaaatctatcccatttaatatgatatcagctaaatctaaagagttaacagtcaaagagctacatattgattatgccacttgcattccgatgaaaatgactttgaaatagcacccagwtcccaatattttccctgatgcca

SEQ ID NO: 44833 - DNA, 493 bp, Chicken  19866894284108_2
accagaacttctgtttagttcawtataaagcaaggcctgcactgctaatgataaagaaacggtatcatgatttgtttggttacagctacagccatcatcattttgcagagaactggcagctcccaaatatttgtcttccagagagttcagttaaatataaccctctctgcctgagccaggaataaaatctatcccatttaatatgatatcagctaaatctaaagagttaacagtcaaagagctacatattgattatgccacttgcattccgatgaaaatgactttgaaatagcacccagwtcccaatattttccctgatgccattacattctcctatcaagttttctaataccctgtttattttaattgtaacagggaatactcactggcatacttccagaccccactcagatatttatcaaccaatacaacaaatacatgcatacaactgtattctcacatgtacacacactcattcttacacattcatttt

SEQ ID NO: 44834 - DNA, 600 bp, Chicken  19866894284110_1
attctaatgtagtttcttggggccctgaattttaacatccttaaagctcagatatgtccaagatgcggtgctgtagttttggcacagatctccagggctctactaccaggcaggcttgtaaagcacatggagtacacggctgcaacatgtactccctggcatttgtgtgagtaaaactagccagctgctcttctttcctgcctcaagccctcactgtcagcagaaatcaaatcacaaaaatgatttactcttcctttaggggtttgatctagtttgtttcatttttgctggcaaatgttkttttttttcttctctgagtgattcctattgagtatgatgcaagtgtgcagaatatcacagggacacttttctggtacaaaaatgacctatgggtgtcactgtttatcttcctcttcaggttaagcttcttatgaaaaatatctcttctctgataaactctatatacttctgctgtgctttgttttctaaccactatccaatcataccttgtttctacccaacttattttacttaaggattatttatactgccatagcggtaggagttagatatttctttctagcttgctttcttacttgt

SEQ ID NO: 44835 - DNA, 600 bp, Chicken  19866894284120_1
ctgccaggctggcgctggcagggcacaggagcccaagagcccagtgccacataggcacattgctgcccaggctcagcgagaacacacactctccccccacagacatacacttctcaggcaatatgctgtaaaagtgtgcacagaagctcctctttgcccctcaccatgcatcatcttgccccagacaaggaactccacctttttactcccccccgattaggtgaacgtgaatgctgcctagccaagaaaaatacgctgaaagcctttatggttcctgagatacatgcccacatctctggraagcccattaggtttccaggtaaaagctgtttctatatatttaatgctgttatgcctcttgcagaaacaaagcacaggactggaggtaacagcaagaagatacattaattgtattagtagggtaatgaaggcaattcatctgcaaatacgttagtatgacagctcacgaattggcccaaagtaatggtccataaaaccacttagtatgaactttattggagtttatctttaaaacatggcttgataccaaatacattgtttggcagcaacagcttggatatcatttgtacacagcagtaa

SEQ ID NO: 44836 - DNA, 600 bp, Chicken  19866894284120_2
ccagtgtacaagaagctgcgttcacccagcccgtggttccaaaagcagcagggaagctgcttgggaagcagcattcatcctcccacacccctccaggagctcgctcccatcttcacatcccactcccttggtgctggcacagcttttcccacggttgagcgattaaccagatgggaaagagctgatttggctggagggaaagaaacccatttctgcagggcgggatgtgctgcccatctggctcactgcgctgccacaagtactgctgcaagcagagcagcaacgaggggatggccacayggctggcaccctggcacagacgtacaatgggcacagcgatgctggatgttgctgctgagttgtgccggtggacgctgaagacagagctccaagtgaagcagagagcaggagtgccttcccagcagatcccacctccagatatatgaagccacaaggttatccacactcayagcccagcaggataaatgtcagaccttcaggttgttacacggtcagcatggtgctcacttcagttgtacgcttcttagagcaatatatcttacagggcttgagcaggtgtgaaaggccacaacaggtaca

SEQ ID NO: 44837 - DNA, 482 bp, Chicken  19866894284120_3
atgggaaagagctgatttggctggagggaaagaaacccatttctgcagggcgggatgtgctgcccatctggctcactgcgctgccacaagtactgctgcaagcagagcagcaacgaggggatggccacayggctggcaccctggcacagacgtacaatgggcacagcgatgctggatgttgctgctgagttgtgccggtggacgctgaagacagagctccaagtgaagcagagagcaggagtgccttcccagcagatcccacctccagatatatgaagccacaaggttatccacactcayagcccagcaggataaatgtcagaccttcaggttgttacacggtcagcatggtgctcacttcagttgtacgcttcttagagcaatatatcttacagggcttgagcaggtgtgaaaggccacaacaggtacaggaagatgagtttaaagaagccacttccaaagcttcacgttgcttccagaag

SEQ ID NO: 44838 - DNA, 344 bp, Chicken  19866894284121_1
ttcttagtattacaagatcttctggtagattcacacaagaacattgaagaacataacttcgctgttaccgtatttccatttagaaaaagaccttgattagtcatttcctcaagatccttcttgacagtcactttaaaacaataaagactggaaataatctcctgatggacacttactaccatcttgtaaaattacatataacaataaaaaaaaaccatctaatctcccatccaaaaatacaattgaccaggtcataatttttatcctcctgacattatcactcaagtatctcttttcttyctttctttctttcttcctttcctcctttcctttcctttcctttc

SEQ ID NO: 44839 - DNA, 600 bp, Chicken  19866894284127_1
ttctaagaacttatttacctactcagtaatgcattcctaatacttacagatgaagactacaagagattctaccaaatctcacgtttaatgacatcacatgttccactagctcagctgggaacaggctttttccctagatcactgctcagtgagcataccaggcacactcttcccctcttggtaagacccaccagaaacatgccaaggatggggataaataagagcactgtgccagaaacagaaaatccttgtctttgtgtgcctagcttgtgcattctgcttacagtcagagtgataccwccagtaygtgttcccctcccaggccctgtgacacatactgcaacaaaccgcagtgttaatgggaaagtcaactcatcctcctctcctagaaaacctgcccttagttctcttcccacttcgccatgtgctctgaaataatgccctaggaggccaaataaagaccataattacagatttatttttgtgccacatcctcgattagtgacgagccttcatggatccaatgcaagataccagaacctaagtcaactcagacaaggggctggaccaccgcaagtcaaatgtaggaaacaggccact

SEQ ID NO: 44840 - DNA, 600 bp, Chicken  19866894284127_2
aacttatttacctactcagtaatgcattcctaatacttacagatgaagactacaagagattctaccaaatctcacgtttaatgacatcacatgttccactagctcagctgggaacaggctttttccctagatcactgctcagtgagcataccaggcacactcttcccctcttggtaagacccaccagaaacatgccaaggatggggataaataagagcactgtgccagaaacagaaaatccttgtctttgtgtgcctagcttgtgcattctgcttacagtcagagtgataccwccagtaygtgttcccctcccaggccctgtgacacatactgcaacaaaccgcagtgttaatgggaaagtcaactcatcctcctctcctagaaaacctgcccttagttctcttcccacttcgccatgtgctctgaaataatgccctaggaggccaaataaagaccataattacagatttatttttgtgccacatcctcgattagtgacgagccttcatggatccaatgcaagataccagaacctaagtcaactcagacaaggggctggaccaccgcaagtcaaatgtaggaaacaggccactcatttta

SEQ ID NO: 44841 - DNA, 600 bp, Chicken  19866894284132_1
attaggcagccagctgcagacattgctggaagttaacgacattaagttccaagaaaaataaccccgggagaagtacaatcctgcatatgcctccaaacgtttccccaacacatgaatggaatatctgtttgaatggcagaagtcaaagagttttgacgctcaattaaaggaaatagtgatttaattgtaaggtatcttctcattctattcacaactgctttccctgcagtgcctgaggtctggtccctgtttacaggaaggcactgctgcagtgacacagtacaaaattatctcaaaagyaaaaaaaaagaacgctgagcaacagctctgaaagaatcacctcccwgcagagatcaccacagaagtcrgrgctgagcagaggggcggctcagggcctgcatggccccacacagcccgccaggcctccgccaggaaacgttcgctctggaggtggaatgggcacacttctacctctgctgaacatgagaaggcagtggaagagatcagcagctcaccccttcctcttgtagggcgagcatcagtgcaattagatgagaatcccctttgccttcactcatttaaagcaagtactgaatgact

SEQ ID NO: 44842 - DNA, 556 bp, Chicken  19866894284132_2
ttccaagaaaaataaccccgggagaagtacaatcctgcatatgcctccaaacgtttccccaacacatgaatggaatatctgtttgaatggcagaagtcaaagagttttgacgctcaattaaaggaaatagtgatttaattgtaaggtatcttctcattctattcacaactgctttccctgcagtgcctgaggtctggtccctgtttacaggaaggcactgctgcagtgacacagtacaaaattatctcaaaagaaaaaaaaaagaacgctgagcaacagctctgaaagaatcacctcccwgcagagatcaccacagaagtcrgrgctgagcagaggggcggctcagggcctgcatggccccacacagcccgccaggcctccgccaggaaacgttcgctctggaggtggaatgggcacacttctacctctgctgaacatgagaaggcagtggaagagatcagcagctcaccccttcctcttgtagggcgagcatcagtgcaattagatgagaatcccctttgccttcactcatttaaagcaagtactgaatgacttc

SEQ ID NO: 44843 - DNA, 534 bp, Chicken  19866894284132_3
agaagtacaatcctgcatatgcctccaaacgtttccccaacacatgaatggaatatctgtttgaatggcagaagtcaaagagttttgacgctcaattaaaggaaatagtgatttaattgtaaggtatcttctcattctattcacaactgctttccctgcagtgcctgaggtctggtccctgtttacaggaaggcactgctgcagtgacacagtacaaaattatctcaaaagaaaaaaaaaagaacgctgagcaacagctctgaaagaatcacctcccwgcagagatcaccacagaagtcrgrgctgagcagaggggcggctcagggcctgcatggccccacacagcccgccaggcctccgccaggaaacgttcgctctggaggtggaatgggcacacttctacctctgctgaacatgagaaggcagtggaagagatcagcagctcaccccttcctcttgtagggcgagcatcagtgcaattagatgagaatcccctttgccttcactcatttaaagcaagtactgaatgacttc

SEQ ID NO: 44844 - DNA, 532 bp, Chicken  19866894284132_4
aagtacaatcctgcatatgcctccaaacgtttccccaacacatgaatggaatatctgtttgaatggcagaagtcaaagagttttgacgctcaattaaaggaaatagtgatttaattgtaaggtatcttctcattctattcacaactgctttccctgcagtgcctgaggtctggtccctgtttacaggaaggcactgctgcagtgacacagtacaaaattatctcaaaagaaaaaaaaaagaacgctgagcaacagctctgaaagaatcacctcccwgcagagatcaccacagaagtcrgrgctgagcagaggggcggctcagggcctgcatggccccacacagcccgccaggcctccgccaggaaacgttcgctctggaggtggaatgggcacacttctacctctgctgaacatgagaaggcagtggaagagatcagcagctcaccccttcctcttgtagggcgagcatcagtgcaattagatgagaatcccctttgccttcactcatttaaagcaagtactgaatgacttc

SEQ ID NO: 44845 - DNA, 570 bp, Chicken  19866894284133_1
  misc_feature (1)..(89): n is any nucleotide
nnnnnnnnnnnnnnnnnnnnnnnnnnnnnnnnnnnnnnnnnnnnnnnnnnnnnnnnnnnnnnnnnnnnnnnnnnnnnnnnnnnnnnnnnggagcagcacctgggccctggtggtcctgcaccgccccgtgaggagaagcaagagcccgtggtggtgcggccctacccgcaggtgcagatgttggccccgcaccaccctgtgccccctggggccccagtgacagtggcggccccccctgcacatctggcaccggctgtgcccctctccttctccgatgggctcatgaaggtaaggggggcrtgggggaatgcatttaaatgagaaaagyaattcaattactgattaggttttttttcccctcaagtagctctaggataactgtgggtgcatttcttcttttaatctgtattaaaacttgaagtgctgagcaaaagtcagggagttccctgttttcattgtttgatctttgcttctgtgctcttatggctctgcatggagctgtttcatgtgccgcactgaggccatcctgtcatcacagtgttatcctggaggggtgggttttttgcactc

SEQ ID NO: 44846 - DNA, 542 bp, Chicken  19866894284133_2
  misc_feature (1)..(61): n is any nucleotide
nnnnnnnnnnnnnnnnnnnnnnnnnnnnnnnnnnnnnnnnnnnnnnnnnnnnnnnnnnnnnggagcagcacctgggccctggtggtcctgcaccgccccgtgaggagaagcaagagcccgtggtggtgcggccctacccgcaggtgcagatgttggccccgcaccaccctgtgccccctggggccccagtgacagtggcggccccccctgcacatctggcaccggctgtgcccctctccttctccgatgggctcatgaaggtaaggggggcrtgggggaatgcatttaaatgagaaaagyaattcaattactgattaggttttttttcccctcaagtagctctaggataactgtgggtgcatttcttcttttaatctgtattaaaacttgaagtgctgagcaaaagtcagggagttccctgttttcattgtttgatctttgcttctgtgctcttatggctctgcatggagctgtttcatgtgccgcactgaggccatcctgtcatcacagtgttatcctggaggggtgggttttttgcactc

SEQ ID NO: 44847 - DNA, 600 bp, Chicken  19866894284136_1
tgctgcatctgaggactaaaagtaaggtgtcttcaaagaatatttttatgggaataaaggtgaattttcaaaggggaattttaaatagaagacagaaaatttcagggcttctgctagtgtttgccttcaacataacactagtatagatgcatttcacatggaaatgaactccagtcctaggggatgtgtgtggcacttgcagttattctgagggctttttttccagttgcggtattttgcaaagacctgcacttacggacaagcacttttggtcatagagtgctcactccctgttattcraagggtcttacagcaattgtgtccaaaaaggagttcctgcagttccttatgaggcaggctgcggctgtggcaagggatttgctttgcacttggaaaaattcacaaggaagggatttgaccaggttgattctgtacaaccaaagctagagaagcaccagtccataagagaaatccaattttgctttcactttgttggaagcgcagctttcattctagccaaaggggtgagaactgctggttcctttacattttatgttttggttctgaaaattcaaatgcaagagaaagcacagctctgac

SEQ ID NO: 44848 - DNA, 600 bp, Chicken  19866894284136_2
agctttcattctagccaaaggggtgagaactgctggttcctttacattttatgttttggttctgaaaattcaaatgcaagagaaagcacagctctgacacactaagggacgagcttcctgcactgatctgagcgcagccgtaccagtatgagcgtgggtagtgctggacttgatccctgtgtttgtgctatatggttgctgctgttaactgagtggaaactcactggattatttccattaggaggagaaattgatgataggagacgggaatgcctttggtttatttacaaagtgtgtackcagaatcttgtttctctgaatacarcagaaacaaacagcaggcacttcacttactcagagtttccgagcctgcttctggtgcagagcgtgtttgctgcacagccgcactgctttgatgtgtcccctcgcaggacagcttctccagcgacggttccttaggacagacagacaagtagacacatgaaaaaccagctagctgcctcccagcctccgtgtgccccagctgactccactttggtgcagcccacttcagcctgggcttggctgtgatttgggtggcatcttccgaagtctccaggc

SEQ ID NO: 44849 - DNA, 600 bp, Chicken  19866894284136_3
agaactgctggttcctttacattttatgttttggttctgaaaattcaaatgcaagagaaagcacagctctgacacactaagggacgagcttcctgcactgatctgagcgcagccgtaccagtatgagcgtgggtagtgctggacttgatccctgtgtttgtgctatatggttgctgctgttaactgagtggaaactcactggattatttccattaggaggagaaattgatgataggagacgggaatgcctttggtttatttacaaagtgtgtackcagaatcttgtttctctgaatacarcagaaacaaacagcaggcacttcacttactcagagtttccgagcctgcttctggtgcagagcgtgtttgctgcacagccgcactgctttgatgtgtcccctcgcaggacagcttctccagcgacggttccttaggacagacagacaagtagacacatgaaaaaccagctagctgcctcccagcctccgtgtgccccagctgactccactttggtgcagcccacttcagcctgggcttggctgtgatttgggtggcatcttccgaagtctccaggctcctgtgcatgtaggcactaagctg

SEQ ID NO: 44850 - DNA, 600 bp, Chicken  19866894284148_1
tcatagagtggattgcattgcagccccttctgctctctgaagggtcagctggctggggtgtcttctaccaggacctggatgaggcaggtgctccagctgaggattaactctgattcttttggactggcacaaattaacctcatttaggctggtggaaatatttatcacacttggacaacaaactctgacatctgaggttaagctgaatgaaatcacagaatcatagttaaagttagagttggaagggacctatggaagtcattttgtccaacccccctgcacaagtagagatacctggarcaggtaaatccttcctagtgctcaaccrttgggcattggaagcaccacattgtgctycccagccttctgagaaagcacaattctgcttctcttcaccactactgaaccagcaggggtatgagtgtaaatccactacagctgtaggttcaagcttgtcattcttagccctgcttatctgagcacctgcagccagggcacaaaggggaactcccacagcagccagcaccagactttgttaagtattgccttggctgaaagcaccagaaagctcttctcacctgtaatcaagctagagacaat

SEQ ID NO: 44851 - DNA, 600 bp, Chicken  19866894284148_2
tctgctctctgaagggtcagctggctggggtgtcttctaccaggacctggatgaggcaggtgctccagctgaggattaactctgattcttttggactggcacaaattaacctcatttaggctggtggaaatatttatcacacttggacaacaaactctgacatctgaggttaagctgaatgaaatcacagaatcatagttaaagttagagttggaagggacctatggaagtcattttgtccaacccccctgcacaagtagagatacctggarcaggtaaatccttcctagtgctcaaccrttgggcattggaagcaccacattgtgctycccagccttctgagaaagcacaattctgcttctcttcaccactactgaaccagcaggggtatgagtgtaaatccactacagctgtaggttcaagcttgtcattcttagccctgcttatctgagcacctgcagccagggcacaaaggggaactcccacagcagccagcaccagactttgttaagtattgccttggctgaaagcaccagaaagctcttctcacctgtaatcaagctagagacaatgagaggaagaaccagcatctggagcatg

SEQ ID NO: 44852 - DNA, 600 bp, Chicken  19866894284148_3
gtgtcttctaccaggacctggatgaggcaggtgctccagctgaggattaactctgattcttttggactggcacaaattaacctcatttaggctggtggaaatatttatcacacttggacaacaaactctgacatctgaggttaagctgaatgaaatcacagaatcatagttaaagttagagttggaagggacctatggaagtcattttgtccaacccccctgcacaagtagagatacctggarcaggtaaatccttcctagtgctcaaccrttgggcattggaagcaccacattgtgctycccagccttctgagaaagcacaattctgcttctcttcaccactactgaaccagcaggggtatgagtgtaaatccactacagctgtaggttcaagcttgtcattcttagccctgcttatctgagcacctgcagccagggcacaaaggggaactcccacagcagccagcaccagactttgttaagtattgccttggctgaaagcaccagaaagctcttctcacctgtaatcaagctagagacaatgagaggaagaaccagcatctggagcatgcgcatcagcagctctcctgggaaggagaa

SEQ ID NO: 44853 - DNA, 599 bp, Chicken  19866894284151_1
  misc_feature (1)..(172): n is any nucleotide
nnnnnnnnnnnnnnnnnnnnnnnnnnnnnnnnnnnnnnnnnnnnnnnnnnnnnnnnnnnnnnnnnnnnnnnnnnnnnnnnnnnnnnnnnnnnnnnnnnnnnnnnnnnnnnnnnnnnnnnnnnnnnnnnnnnnnnnnnnnnnnnnnnnnnnnnnnnnnnnnnnnnnnnnnnnnaattagcacaggagcagactgattccgtctaaaataattaaaatgccatcctacaatactgtggggccatgtttcctacaccagtgcaaaacatctctgaagctcacacactatgctcacaaacatgkttttttcttgtttatttttaatccaagcattggatgctaccccagtaaccaccctgcccactcccaggttggcagtggtgagaaggcaccaggcccagccctgcctccagcagggccatctgagcaggctgctgccacactgcagagcgctsgcattagactcagtcactccacagagcacacaactttattaaaggggaagaagacacagaagagccatgtgggctgcaacccttccctaggaactgctaaaacagtcagaaaatgtcttcatcttaacctctcccctgaaaataaga

SEQ ID NO: 44854 - DNA, 599 bp, Chicken  19866894284151_2
  misc_feature (1)..(20): n is any nucleotide
nnnnnnnnnnnnnnnnnnnnaattagcacaggagcagactgattccgtctaaaataattaaaatgccatcctacaatactgtggggccatgtttcctacaccagtgcaaaacatctctgaagctcacacactatgctcacaaacatgkttttttcttgtttatttttaatccaagcattggatgctaccccagtaaccaccctgcccactcccaggttggcagtggtgagaaggcaccaggcccagccctgcctccagcagggccatctgagcaggctgctgccacactgcagagcgctsgcattagactcagtcactccacagagcacacaactttattaaaggggaagaagacacagaagagccatgtgggctgcaacccttccctaggaactgctaaaacagtcagaaaatgtcttcatcttaacctctcccctgaaaataagaagcattgcacacttccatctttgtttcatttttacacacttgrctttatcttcccttaacaagtcatgaaggtgaataatggtctgagaataatgtgtatatatttaaagatataacagycagcacaagtcaagacaaggataaattcttcc

SEQ ID NO: 44855 - DNA, 600 bp, Chicken  19866894284151_3
cagtaaccaccctgcccactcccaggttggcagtggtgagaaggcaccaggcccagccctgcctccagcagggccatctgagcaggctgctgccacactgcagagcgctsgcattagactcagtcactccacagagcacacaactttattaaaggggaagaagacacagaagagccatgtgggctgcaacccttccctaggaactgctaaaacagtcagaaaatgtcttcatcttaacctctcccctgaaaataagaagcattgcacacttccatctttgtttcatttttacacacttgrctttatcttcccttaacaagtcatgaaggtgaataatggtctgagaataatgtgtatatatttaaagatataacagycagcacaagtcaagacaaggataaattcttccccagcacagtaaattaacaactaaagtagtaaatcaaattaaaaataataataacaaccaagccatattgttagatgtataaaaccctgctcagaggctccggtgagcagccatcactctgtcctacaagaagcttcactatattgttgcccatggagccagcccactccatgcaaacagaacacctgatg

SEQ ID NO: 44856 - DNA, 600 bp, Chicken  19866894284151_4
ctgagcaggctgctgccacactgcagagcgctsgcattagactcagtcactccacagagcacacaactttattaaaggggaagaagacacagaagagccatgtgggctgcaacccttccctaggaactgctaaaacagtcagaaaatgtcttcatcttaacctctcccctgaaaataagaagcattgcacacttccatctttgtttcatttttacacacttgrctttatcttcccttaacaagtcatgaaggtgaataatggtctgagaataatgtgtatatatttaaagatataacagycagcacaagtcaagacaaggataaattcttccccagcacagtaaattaacaactaaagtagtaaatcaaattaaaaataataataacaaccaagccatattgttagatgtataaaaccctgctcagaggctccggtgagcagccatcactctgtcctacaagaagcttcactatattgttgcccatggagccagcccactccatgcaaacagaacacctgatggagttttccctttgcctctagaggagtgcacacacagccccactcctgcctctccttaagctgacatggcaccacag

SEQ ID NO: 44857 - DNA, 600 bp, Chicken  19866894284152_1
agtggccccatccagtttagtgccctggctctgtgacaactatgatacttgctttggccttctgcaaaccagacatacgaagggagatgccctacatgccctctgtctgcagaaacggttgctgaggaacagtgctagcttataaatctgaaggaaatcattttcttgatacactcatcttcaagagctcttcagcctcctcaggtctggagtgctgtttttatgctagtggtactttacaatcttctagcaatgcgcctgcttttcaatctatatatacctttcattttcacagcatcycctgtcaactaaattcacagctccaactaatacaacattactccagctaatggttttgccccattagatttcctttaaggcttctgattyttgtttaagaggaaaccatgaacaattattccctggtcaccatcagcacatcatgtgtgattttatagaccactaccatagccccaggctcagatgcccaagccacatcaaccaattcctctcgtagaggtcaatccatacctcaagaagaaccaccaggatcacacacactattagaacatttatgtaaacgatgcacctggttttctt

SEQ ID NO: 44858 - DNA, 541 bp, Chicken  19866894284152_2
cctacatgccctctgtctgcagaaacggttgctgaggaacagtgctagcttataaatctgaaggaaatcattttcttgatacactcatcttcaagagctcttcagcctcctcaggtctggagtgctgtttttatgctagtggtactttacaatcttctagcaatgcgcctgcttttcaatctatatatacctttcattttcacagcatcycctgtcaactaaattcacagctccaactaatacaacattactccagctaatggttttgccccattagatttcctttaaggcttctgattyttgtttaagaggaaaccatgaacaattattccctggtcaccatcagcacatcatgtgtgattttatagaccactaccatagccccaggctcagatgcccaagccacatcaaccaattcctctcgtagaggtcaatccatacctcaagaagaaccaccaggatcacacacactattagaacatttatgtaaacgatgcacctggttttcttttctattactttcttatcgattcctagcatt

SEQ ID NO: 44859 - DNA, 600 bp, Chicken  19866894284163_1
caatgctggtatattactatggaaagaaaaaagctccctgcaaatacacaaaatgtaacaccattctcagaaaggtcactgggagcttggtcactcatttgagttctcacagcatggaaagcaagatcagtcaggacttgcttctgtaatgttatgggtattttttacatttcttagtgcatagcagtactataaaggcacccccgtatgcatgaagtttcatatttttcatttatattatcaaacaacataagcccactccagtgtatttggtgggagaaaaacagtaaggacagtatktcttttctctatgcactgaaagctgagtactccacatacaaatacatgcatgtatagaaatacaaatacaaatgtaaataaatttgcttttgtaagggtttcagctcactagcatgggttctcagataaaataataacacaaagaaaaggcagagggctaagttttgagcacaatcaaaagtagagtagatgataagcatacgtctgtgtgcagtatcgagagccaatgatagcagggaaaagatgggcttctgtatcagctgttagtggactatattcctgtcaaatgctgataagctc

SEQ ID NO: 44860 - DNA, 600 bp, Chicken  19866894284177_1
aggaggaggcgcagtggggagcggacgcggctgcctgcggtccccgctgccttccaacggagcaaacgctgcagcggggctgagcgctcccatccttacagcgctggctgcgggctgacctgcgctctgtgtgagctcgcagtccaaggtcccagaataaacaaggaggcactgcgctcccttttttggggattgtgctgtggggacgcgcggggccgggactgcagcggctctggagctgcgctgaagcactggttgccccgtgggatgggggttttccccactgcagtgggggcttcrtttgctctcttcctccttccgtgtgaaatctttttggttttgaaagcttttccccccaggattcctgggcaaggccctgccaaacaagtggcgcggtaaatgagcagcacattaattgcctgttgcctttgtctttcgcaacgcagccagcttctcagtgcccataattctgtggcttgcagaacgtggtggtgccgggtctccgttctgcactgcatcccctgagagccgctctggttttcccagcagcgcagtttcccggtcggatggctgagcagagctgctgctctcctttcctcc

SEQ ID NO: 44861 - DNA, 600 bp, Chicken  19866894284192_1
tattcatccaaactaatcttctttaacagttttaatgaacacagatagcagatgtaccaggtaatgattgctttaaaataaaagtcctatttcttaattttctaaaataggttctttctctcttacacggaggcgtattcactctacccaccttaagataataagtatgtattagattacagacctaatctgcagtatatcttcagagatttttgttctcgttagggataagtagatggatgtgacaaacagaagaacgaacttttttttctctcttcctcctgacttcaaagcatttcrtttagtrcttaaactaccagtattcgtttttgagctctctttacactctatttgattatggcagatcatctcacctatcccacacctagcagycttgctatttctgtcattttttgttttcaggcttaatattgtagctgttcatgtgtatctgaaataaaatagccatgtttgtwagtgattaaaactgttcatctcactatggaaattaaatagctactgtattttctgtcttctgtwgaatctttgatgtgtcttttatatgacaagactcagaaccccgtaatatataattattgc

SEQ ID NO: 44862 - DNA, 600 bp, Chicken  19866894284192_2
ccaaactaatcttctttaacagttttaatgaacacagatagcagatgtaccaggtaatgattgctttaaaataaaagtcctatttcttaattttctaaaataggttctttctctcttacacggaggcgtattcactctacccaccttaagataataagtatgtattagattacagacctaatctgcagtatatcttcagagatttttgttctcgttagggataagtagatggatgtgacaaacagaagaacgaacttttttttctctcttcctcctgacttcaaagcatttcrtttagtrcttaaactaccagtattcgtttttgagctctctttacactctatttgattatggcagatcatctcacctatcccacacctagcagycttgctatttctgtcattttttgttttcaggcttaatattgtagctgttcatgtgtatctgaaataaaatagccatgtttgtwagtgattaaaactgttcatctcactatggaaattaaatagctactgtattttctgtcttctgtwgaatctttgatgtgtcttttatatgacaagactcagaaccccgtaatatataattattgcttctcat

SEQ ID NO: 44863 - DNA, 600 bp, Chicken  19866894284192_3
ttaattttctaaaataggttctttctctcttacacggaggcgtattcactctacccaccttaagataataagtatgtattagattacagacctaatctgcagtatatcttcagagatttttgttctcgttagggataagtagatggatgtgacaaacagaagaacgaacttttttttctctcttcctcctgacttcaaagcatttcrtttagtrcttaaactaccagtattcgtttttgagctctctttacactctatttgattatggcagatcatctcacctatcccacacctagcagycttgctatttctgtcattttttgttttcaggcttaatattgtagctgttcatgtgtatctgaaataaaatagccatgtttgtwagtgattaaaactgttcatctcactatggaaattaaatagctactgtattttctgtcttctgtwgaatctttgatgtgtcttttatatgacaagactcagaaccccgtaatatataattattgcttctcatttttgctttattgtttgctgctgatgaaagtgttccagtgyggcttttacaaagagttttatctattgaaargcattttttctttg

SEQ ID NO: 44864 - DNA, 600 bp, Chicken  19866894284192_4
ttacagacctaatctgcagtatatcttcagagatttttgttctcgttagggataagtagatggatgtgacaaacagaagaacgaacttttttttctctcttcctcctgacttcaaagcatttcrtttagtrcttaaactaccagtattcgtttttgagctctctttacactctatttgattatggcagatcatctcacctatcccacacctagcagycttgctatttctgtcattttttgttttcaggcttaatattgtagctgttcatgtgtatctgaaataaaatagccatgtttgtwagtgattaaaactgttcatctcactatggaaattaaatagctactgtattttctgtcttctgtwgaatctttgatgtgtcttttatatgacaagactcagaaccccgtaatatataattattgcttctcatttttgctttattgtttgctgctgatgaaagtgttccagtgyggcttttacaaagagttttatctattgaaargcattttttctttgtgatgatggccatgctcctgaaactacccagcatgcattcctttactgtaggaatccaagattcattcacagacatttaccct

SEQ ID NO: 44865 - DNA, 600 bp, Chicken  19866894284192_5
tgtgacaaacagaagaacgaacttttttttctctcttcctcctgacttcaaagcatttcrtttagtrcttaaactaccagtattcgtttttgagctctctttacactctatttgattatggcagatcatctcacctatcccacacctagcagycttgctatttctgtcattttttgttttcaggcttaatattgtagctgttcatgtgtatctgaaataaaatagccatgtttgtwagtgattaaaactgttcatctcactatggaaattaaatagctactgtattttctgtcttctgtwgaatctttgatgtgtcttttatatgacaagactcagaaccccgtaatatataattattgcttctcatttttgctttattgtttgctgctgatgaaagtgttccagtgyggcttttacaaagagttttatctattgaaargcattttttctttgtgatgatggccatgctcctgaaactacccagcatgcattcctttactgtaggaatccaagattcattcacagacatttacccttactgcagtcttagagcagctgccattttatgaactatgtgagacttgaccaatactgacaatc

SEQ ID NO: 44866 - DNA, 600 bp, Chicken  19866894284192_6
tatttgattatggcagatcatctcacctatcccacacctagcagycttgctatttctgtcattttttgttttcaggcttaatattgtagctgttcatgtgtatctgaaataaaatagccatgtttgtwagtgattaaaactgttcatctcactatggaaattaaatagctactgtattttctgtcttctgtwgaatctttgatgtgtcttttatatgacaagactcagaaccccgtaatatataattattgcttctcatttttgctttattgtttgctgctgatgaaagtgttccagtgyggcttttacaaagagttttatctattgaaargcattttttctttgtgatgatggccatgctcctgaaactacccagcatgcattcctttactgtaggaatccaagattcattcacagacatttacccttactgcagtcttagagcagctgccattttatgaactatgtgagacttgaccaatactgacaatcaaattcttttttttacccacacggtctccctgctggactgtggcaagatggaggaagcgtgccacataggcacatcatacatttgactgatattccacctataaaata

SEQ ID NO: 44867 - DNA, 600 bp, Chicken  19866894284192_7
ccacacctagcagycttgctatttctgtcattttttgttttcaggcttaatattgtagctgttcatgtgtatctgaaataaaatagccatgtttgtwagtgattaaaactgttcatctcactatggaaattaaatagctactgtattttctgtcttctgtwgaatctttgatgtgtcttttatatgacaagactcagaaccccgtaatatataattattgcttctcatttttgctttattgtttgctgctgatgaaagtgttccagtgyggcttttacaaagagttttatctattgaaargcattttttctttgtgatgatggccatgctcctgaaactacccagcatgcattcctttactgtaggaatccaagattcattcacagacatttacccttactgcagtcttagagcagctgccattttatgaactatgtgagacttgaccaatactgacaatcaaattcttttttttacccacacggtctccctgctggactgtggcaagatggaggaagcgtgccacataggcacatcatacatttgactgatattccacctataaaatatttgtgaattttatagctggtggacatcttg

SEQ ID NO: 44868 - DNA, 600 bp, Chicken  19866894284197_1
tttatggaggctttatgcagcacctgtatctctccaaacctggggaacaagtgggctgagcagtgagacactgcaggaatccttgagaatccttgagtacttgcctataaaagagattaaaagttgttgtgcatccagtcacagcttgagacttgcccaaagcctgttcgtataacttttctttgggatctggagtttttctttggtcagccttacatacatacagaactttgggcaagcacagtgtcatcactggaggagcagatgagggaaagctgacttcaggctaaaatgacagaygtggcacttccatatccttaagcataagacacagtgtgtgtacagaacattaactctggattttgaataatacaaacgaattaaaactactgacagtttatattcagccacagagaaaacgtagaatccagtaaatgatctacctggtttttctcaggcaaatattttacacttcacattgtaatattgtaacaggaaagctaatgcaagctttacaaaggaagaaaggtacctgtaactgttacagctctttgttcatgttgagcaaaagttcagccatactctgaaatgctctgcaga

SEQ ID NO: 44869 - DNA, 600 bp, Chicken  19866894284199_1
gctaatcagccaaagccctgccaagcaaatctattgtttcgctgcctgtccccagtcaaaaccccatgctcagcagccccagaccccattctgccaactaagcacggctgtgcaaagccccgactcccactgctttgtcccaaaagcctcgtggcagcagctccactgcccagcccatatatagcggggtggcctcgcgtgctgcggggtcgggtcagcttctgatttacggtcctggagagcagccatcaggaaatgtctcagtgctcaggaaaagtaagtacggcctcatgctgggaygggctgctgtggggtgagggttgggtgatgccccactcaggtgtaaattcagcgcagcagggatggggagggtgtggggatggagtgcatttgggagtagggctttgtgtttgaatcttcatgctggagaccatggaacgatttgagttggatgggactcgtaaaggccatctggtccaacccccctgcagtaaacaggaacacccacagctccgtcaggtgttcagagccccatccagcctgaccttgggtgtctccaagggtggggcacccaccacctctctgtgcaacctgtgccag

SEQ ID NO: 44870 - DNA, 600 bp, Chicken  19866894284203_1
aagaataattgtatgacacatggagtcttcttctctggagatattcaagatccatttggatgcctacctgtgccacttgctgtagggagcctgctttagcagggggttggactcaatgatctcttgaggtcccttccaacccctgattctgtgattctgtgatttgagaggataacatgaggtgacgtttagtcagctcagctgaggcttctagaacatacacacaatttcagagtattcagatacagtaaagataatgtaaaaacgtgagtattgcatacacatcccatttatattgawtgctctgatttcattgtgaaatgtgtctaattataagagagatatccatacttttatttgttgctttacctcatttgtcctgcagtattggaaagaagcaatacaagatgctaatgaggctgtcccactggaccctgcaaactctgtcaytgtgatatgaactctatgttccaacattcaacttctgtgactgtttgattttatccatttagctattactgattcctggaaatcatttatctacgctgctatatttattacacaagagcaacacttcaactcactttcaaatagtactac

SEQ ID NO: 44871 - DNA, 600 bp, Chicken  19866894284203_2
gtgattctgtgatttgagaggataacatgaggtgacgtttagtcagctcagctgaggcttctagaacatacacacaatttcagagtattcagatacagtaaagataatgtaaaaacgtgagtattgcatacacatcccatttatattgawtgctctgatttcattgtgaaatgtgtctaattataagagagatatccatacttttatttgttgctttacctcatttgtcctgcagtattggaaagaagcaatacaagatgctaatgaggctgtcccactggaccctgcaaactctgtcaytgtgatatgaactctatgttccaacattcaacttctgtgactgtttgattttatccatttagctattactgattcctggaaatcatttatctacgctgctatatttattacacaagagcaacacttcaactcactttcaaatagtactactaaaattgaaacaatcctacatatatttgtataaaatgtattattatgtaagatatttcgaagtgggaggaaatgatcatttgatacagaagtatttgcagatttacatttttatacctaaaaattgtctatctaaatggaacccttttt

SEQ ID NO: 44872 - DNA, 600 bp, Chicken  19866894284206_1
tatttctgcattgagaagctcagcagcaacccagttttggccacagttaattcaacagggagactgacagaaattcctgcagctctttactttacagaagacaaactcaaatcctcattaatttctcagatgggaaactgtatgaaaatggtgccaagactgacagtgtttagcagtaattgaagtgaaaaagttacagacagaaatgctcaaattgtcacaaaatctggcacgataaaaacaagaaatttaaagttacaggttgtgattacgagcagctggaagggaaacgacgatggygcggtccagaagctgtgtgccatgcagagcccctaattaagtgcacgtctgtcaaaatgataycgcttggccataaastgtactacacaatcacaacaattagaaaccacgctcataaaccaggtagcttaataacaaccgacttatttcagtatgagctccgattaagttaaatatacgttaagcctgaagcacatacattactaccttattcagacaataggaagaaaaaattaaaacagaatggtctatttcaaaatcaaaataattgtaattcaatgaatgtaactatcacacaaa

SEQ ID NO: 44873 - DNA, 600 bp, Chicken  19866894284206_2
ctgacagaaattcctgcagctctttactttacagaagacaaactcaaatcctcattaatttctcagatgggaaactgtatgaaaatggtgccaagactgacagtgtttagcagtaattgaagtgaaaaagttacagacagaaatgctcaaattgtcacaaaatctggcacgataaaaacaagaaatttaaagttacaggttgtgattacgagcagctggaagggaaacgacgatggygcggtccagaagctgtgtgccatgcagagcccctaattaagtgcacgtctgtcaaaatgataycgcttggccataaastgtactacacaatcacaacaattagaaaccacgctcataaaccaggtagcttaataacaaccgacttatttcagtatgagctccgattaagttaaatatacgttaagcctgaagcacatacattactaccttattcagacaataggaagaaaaaattaaaacagaatggtctatttcaaaatcaaaataattgtaattcaatgaatgtaactatcacacaaaataattacgaactcacccataaattctcaaaaatactctggatttgttcccacacatataaaa

SEQ ID NO: 44874 - DNA, 593 bp, Chicken  19866894284206_3
gcagctctttactttacagaagacaaactcaaatcctcattaatttctcagatgggaaactgtatgaaaatggtgccaagactgacagtgtttagcagtaattgaagtgaaaaagttacagacagaaatgctcaaattgtcacaaaatctggcacgataaaaacaagaaatttaaagttacaggttgtgattacgagcagctggaagggaaacgacgatggygcggtccagaagctgtgtgccatgcagagcccctaattaagtgcacgtctgtcaaaatgataycgcttggccataaastgtactacacaatcacaacaattagaaaccacgctcataaaccaggtagcttaataacaaccgacttatttcagtatgagctccgattaagttaaatatacgttaagcctgaagcacatacattactaccttattcagacaataggaagaaaaaattaaaacagaatggtctatttcaaaatcaaaataattgtaattcaatgaatgtaactatcacacaaaataattacgaactcacccataaattctcaaaaatactctggatttgttcccacacatataaaaatcagtat

SEQ ID NO: 44875 - DNA, 600 bp, Chicken  19866894284219_1
cttagtaatagcaagagatcccaggcaaagatcaagcctgcattttagttaaaaataaataagcaaatcctgtctcactcaattcaaatataggttgaaagacaacaggtagatgcagtgtgagagaaggagaaggaaggtgacagtgatgattattgcagtaaacagcactcaccaattacctagtcattgtttagctttctttttaaaacatagtacatctggaaggctggtaaatgttatctttagatctgtcttttgtttctgtaaactagcagtatcctttacagctatttgaamaatgtgttttctccaatgaagaaatggaaaacttcatgttttgtatgcaaataaataaataaataaataaataaaatgtttctgcacattagggtctgaagcagtcaagctcatctagtctaatgtcccacatatttcaagcaatttattttctcctaattatcatcgtaataatcccaataacctcttttagggaatgcagagagtaatcctgccttgatcaagaaaagttagtagatgaagagttcatactttttgctactttgttgcaatgcttaatcatgctgaatgctcaatgct

SEQ ID NO: 44876 - DNA, 600 bp, Chicken  19866894284219_2
tcattagcagctagaatcatcttccaggaaaataattcaggttatttcactatcaatttttggattaaaaaaaaaaaaaaaaaattcaactcaaaacaatttccccaacttcagatttattcttatatatgtatctcctcattttttggacatcttttccccttggacaaatcacaatgcagaacttcagtatcctttccactcagtgtattacacagacatcccttgtcccacgcccaatccctcgtttgttacttgactaccaaggactgacttagccctctttgccatgatgcatgycattccccactctgattcctaaatctcttcctggtaaactaaatgcagaacacttggtccctttttttcagtgcattgtgttatttgcaccagattacagcaatctttgctacattaaagtgtattttgctcaaatgagcccaccttgtgctgtcctttcctgatcattacagcaaaagttgccacttttttcatcagtagttaacttttgtttatttctggaatactgataagaatctgaagagcttttagtttataggtactgatattagaaagtatttgatagtttcatattagctt

SEQ ID NO: 44877 - DNA, 600 bp, Chicken  19866894284221_1
ttctatgcaaattctgaaggattgggctgctgggcccaagttttgttatgttgaatacatacagcattaaaacaaaccagttactctacaaagtaattgtcatgctggaagagcaggacattttcttcagtaaacagctgtggaagaaggagtttcctttttttggcagagcagactacctacaatctccagtttctataaggctgtggctttgaaaattgaagaccccttgttttaaatttaatatcgattacttgtaagtagtgagaaggtgtagttcatggctgcagtactccaggrcaagtaacctttctctttttttcgttaaaacagcagcagatgtttcttggacagttctgcctggtgaaatacaattattgctgcttgggcagtaaacgtttgtcagccagatcatcagagatcattgggcagacttgcttctaatttcatctgaaattcagtccaaatctgtcacctgccttccaaaattagttttaaatttgttagttttttcattgtttccccttaaacatggaatagcaacagtgactgaaactgaagcacttgggctttgagctgttcatactcagcgttctgttg

SEQ ID NO: 44878 - DNA, 589 bp, Chicken  19866894284222_1
tttacctggctgagactctcattctttaaaattttaatctttcttttattacaaggaagtgaatttaatttcaaaaaatcctttactgtacccacatgcttagaatccttaaaacaagatatttcttctttcattttctcatcatgtggaaaattcatgaaaatgagcatgcagtgcagtcagtggatggaaaattattgctttctctcataaaattggcaaagagaggttctaaatagttactaaaataacaccagaacatagcaatttttacaaagttgggcagatgctatgtatttygttttgttaagttggctaatcttccataaactaagtaactctcttctcaaattagttttaattgtttctatccagcttttcagtgagctacaaactacaaagcaatcttattatcccctttagatagccaaacgcatttgctaatagtgagcttttcaagccaggacatctacattctccacctttgcagagaggaagccaattacttaataggattctcaggtggctttgattctagtaatcactgaatgagtctgcaacaaccttttaccccaactctgatcttcta

SEQ ID NO: 44879 - DNA, 600 bp, Chicken  19866894284227_1
ttctagactcaatgccaggtgttgcttcccatgaaagcttaatacagcttaactttgaagtactcaggagcagaattttttatttggagatccataaataaactgtcaggtaaaataccaagtcttgttcattaaattattttgtccagttggtatgtatactgtactatacttggcaggaaaatcacttgcatatacagtgaagtattggttaccataactttaatgatgatcactaattgccaccaaaacttcaatactgaattttcatttgctgagttagaattcctggtatatcargtgtccagtgaacaaagccagctcmgaacacactgacacactcattgttttccctcagtttcaacatccctccagctcatcattggtccttaagttggttatcataagtatgaagatcaacatgataacttccagccactggttatttaatatatatatgaacattttatatttatgctatatacaaattatttctgctcatataacatttaataattcatatactataataattatataatttactgtataatatattattatatatttcacaataatgctatatctaatatatcattt

SEQ ID NO: 44880 - DNA, 600 bp, Chicken  19866894284227_2
ttcccatgaaagcttaatacagcttaactttgaagtactcaggagcagaattttttatttggagatccataaataaactgtcaggtaaaataccaagtcttgttcattaaattattttgtccagttggtatgtatactgtactatacttggcaggaaaatcacttgcatatacagtgaagtattggttaccataactttaatgatgatcactaattgccaccaaaacttcaatactgaattttcatttgctgagttagaattcctggtatatcargtgtccagtgaacaaagccagctcmgaacacactgacacactcattgttttccctcagtttcaacatccctccagctcatcattggtccttaagttggttatcataagtatgaagatcaacatgataacttccagccactggttatttaatatatatatgaacattttatatttatgctatatacaaattatttctgctcatataacatttaataattcatatactataataattatataatttactgtataatatattattatatatttcacaataatgctatatctaatatatcattttacaattattaatattaacataata

SEQ ID NO: 44881 - DNA, 600 bp, Chicken  19866894284228_1
caaagcgagaaataataaagggaggcagactgtcacagaggatttttagcaaccagtactcacgttaatcctctgacctagtttctaaaaggcctatataaggaagaacatcatgagcagctaatatgcagtgcccacatttaagactttggagcgcatcagttctgagattcatctatctcttcctggaaaaaaaaataaagctcagaaagcaaaccgtcttcaaagaaaattccccccaccccccatcttacaaaagcttcatgtcttagcagtgttgtgagttggcaccaaggcccyaaagtctgtgctgtgtttgcccacctgtgtgtatgttgccagatggacttcatgagaaaggaaaattcctccctaaaatgaccccagtgcactttggtggagttactgcagcactgtgtcattgcaaagcacatatagaaagatctctgcagccatgagtgtagtctgggcatcaccctatgacacagaagcatagaatggaatggcttggaagggacctcaaagatcatctagttccaaccactgctatgagcagggttgccaactaccaaatcaggtatcagatcacacagcccaggc

SEQ ID NO: 44882 - DNA, 600 bp, Chicken  19866894284228_2
ccttggtagactccttccttgctttatgttttgatgctgttggcaacctgaagtctacagtctctttaggtccaagccagatggagaccgctcacttcaactgaactgaccacctaaattcacctgaatctggggccactccattcccacgtggccagtgcaagaggtctgggggcttctttcttctgcaggacattccctttttctcctaatggggctgaaggtactcagcaaatcagtacaaattttaacaagttggacttaaaaagcgggaaacctagagcttctgtccatatgtgrtcctttctggccatttttcacacctgacagctcttattccactgcttaaactggtactagctgaatgtacacgcaatacatgacactggtgytgtttttaatttaagttgaaggttatgtagttaatccttgtaagagacgtgagtctatttctcatgtcattgtcctttcaagagctggttggtatgctctagagtaagagacatgacaatgttttaatgcttcttacccatcagtctataaaaaggtataacagtaattatagagatgtatattctcttgtgagggctgcagcctggc

SEQ ID NO: 44883 - DNA, 600 bp, Chicken  19866894284228_3
cacttcaactgaactgaccacctaaattcacctgaatctggggccactccattcccacgtggccagtgcaagaggtctgggggcttctttcttctgcaggacattccctttttctcctaatggggctgaaggtactcagcaaatcagtacaaattttaacaagttggacttaaaaagcgggaaacctagagcttctgtccatatgtgrtcctttctggccatttttcacacctgacagctcttattccactgcttaaactggtactagctgaatgtacacgcaatacatgacactggtgytgtttttaatttaagttgaaggttatgtagttaatccttgtaagagacgtgagtctatttctcatgtcattgtcctttcaagagctggttggtatgctctagagtaagagacatgacaatgttttaatgcttcttacccatcagtctataaaaaggtataacagtaattatagagatgtatattctcttgtgagggctgcagcctggcttataggctcaggtacagaaatgttagctcaaaacagtctgctcctcaggctgaggatgttttcaaggccattgggagaaagtgaaaaccca

SEQ ID NO: 44884 - DNA, 598 bp, Chicken  19866894284230_1
ctcaacaggctgaaaattatggcctgttcaacctcaaaggattaaatcagcagagcaaaagcttagcattgaaaaaggcatttccatggcccctcaataagaagaggaagagaactggaaaaaaaataggacttgtgggttgagattaaaaaaagcatatttactaagacagaaaaggaaaaatagaaacaaaaatgcaatgataaaaatactgggtccagaagtattacctcctgttttatgttggcccatcatgacagaagcagatggtggtacagcagtagagattgaacctttccwccaagatttcattacattttattgcagtgcaacagatgacagcaaaggggcagtctgacaaaatggtgtctgacatggaagcatggatgaagcaaaggggcatcactgagttcctccatgcagaaaaaatgtcacctgcagacttcactgacatttgcttatggaaaccaaacagtggatgtgagcacagtgaagtggtgagtggtgtgtttcaacagtggcaacagcaaagtgaaagataagccacgttctggacagctgtcacaccatgaaatgaaaagcatcttaatcagttcat

SEQ ID NO: 44885 - DNA, 599 bp, Chicken  19866894284235_1
  misc_feature (1)..(24): n is any nucleotide
nnnnnnnnnnnnnnnnnnnnnnnncacgaataggcgagaagatacgaagtacactctgtttacggctcgtgaagtaatatggactgaaaaccaccctctgctcctcctctgtggttataccagatcagtcgacacaaggatgctcttctttgaatatgcttctgatgtgctagtgaagtgttcaaggattccagatttatcaagcatatttagtcagctgaatctctgcaggtgatcatataaatgcatggtggttgaatgctagagacattcccagttttatgtcagcaaatgtcctcrgcccagttatgccatccgtgacacttggtaccacagctgctgccaatatatgtagtccctaatacaatataggcattgtctctgaagcctttaccttcaatgatacctgrcaagagaaataatctgagcaagacacagattgaacaggtggtcaacaagctgttttaaaacccagcttttgggcacagaaagccatgctcaacaggtggagaaggcagccaccagtgggttatgggggttttccaggaggttgagacctgtgctggtaatgtttaacacccctatcgccaggttggatg

SEQ ID NO: 44886 - DNA, 600 bp, Chicken  19866894284235_2
gtggttataccagatcagtcgacacaaggatgctcttctttgaatatgcttctgatgtgctagtgaagtgttcaaggattccagatttatcaagcatatttagtcagctgaatctctgcaggtgatcatataaatgcatggtggttgaatgctagagacattcccagttttatgtcagcaaatgtcctcrgcccagttatgccatccgtgacacttggtaccacagctgctgccaatatatgtagtccctaatacaatataggcattgtctctgaagcctttaccttcaatgatacctgrcaagagaaataatctgagcaagacacagattgaacaggtggtcaacaagctgttttaaaacccagcttttgggcacagaaagccatgctcaacaggtggagaaggcagccaccagtgggttatgggggttttccaggaggttgagacctgtgctggtaatgtttaacacccctatcgccaggttggatgaggaaaccctgctcgggcctctggatgacaccacagtgagggcagcagctgaaaggctgcaggactgagctccatgaggagcctcaacaccctgctgtggctgagtggagc

SEQ ID NO: 44887 - DNA, 600 bp, Chicken  19866894284237_1
ggatagaggaggcatattcagagaccacagccactgaagagtaaagggcacaactttttgtttggagagctgcttttgttggtattcaagaagcagtatccaacaataacagtacttctcattaccaaacatttagaacttctgcagattacagagctttacttcccgtgatatatgaacttgccaaactgatttttgtcagtgttcaggtgaagtagagaaaagggctgcacaaattcttcaacatgaatctaataaaatgttgccttaccttttgggtatcctaaatggagtcttctycacaaggcaccctcaagctagccagctcctgaaagcgcaggtgcagaaatactgtgaggttcaacatagacataggagatctaaaaagaaattgaatagtaaagtaacagaattcaccgaggatataaaaatcaacttcaagggagttaaagagcagcagaggaatctcacagcacagtgatttaaacaagtgtcacatggcagtcagtattaaaaaagtgaagcacatataaaatgaaatgactccaacgttatatacacaatcataggtcctcgaggaaaacagtcattttgtagaca

SEQ ID NO: 44888 - DNA, 599 bp, Chicken  19866894284238_1
  misc_feature (1)..(129): n is any nucleotide
nnnnnnnnnnnnnnnnnnnnnnnnnnnnnnnnnnnnnnnnnnnnnnnnnnnnnnnnnnnnnnnnnnnnnnnnnnnnnnnnnnnnnnnnnnnnnnnnnnnnnnnnnnnnnnnnnnnnnnnnnnnnnnnnnctggatggagtctcctctaggcccgggcagtggcctgaagctgcccacaccagcagtcagtgcactgacaggcaccacactgccctctcccaaataatcccagagcatctggatggtctgaacatggccattctggtctggagggcaactggggagagctgcaaggaagcratctgtgccacagtaattcatctccaggactcaaaatggagtctggctctttygactcactgttaaattccatgctttgttctctctctgctctaaaaagctaaatgtcctgacttttactcggatatgcttttgagtttaaaagtcctggtctttgggctttcactacaaaaatagttgatgttgtcccccatctcaagattttcatcaaaacatttgtaaatcctacacatcctaatgcattagattttctagtacagagagtctctggcccaaagcaacactcaaaaagcataatg

SEQ ID NO: 44889 - DNA, 599 bp, Chicken  19866894284238_2
  misc_feature (1)..(76): n is any nucleotide
nnnnnnnnnnnnnnnnnnnnnnnnnnnnnnnnnnnnnnnnnnnnnnnnnnnnnnnnnnnnnnnnnnnnnnnnnnnnctggatggagtctcctctaggcccgggcagtggcctgaagctgcccacaccagcagtcagtgcactgacaggcaccacactgccctctcccaaataatcccagagcatctggatggtctgaacatggccattctggtctggagggcaactggggagagctgcaaggaagcratctgtgccacagtaattcatctccaggactcaaaatggagtctggctctttygactcactgttaaattccatgctttgttctctctctgctctaaaaagctaaatgtcctgacttttactcggatatgcttttgagtttaaaagtcctggtctttgggctttcactacaaaaatagttgatgttgtcccccatctcaagattttcatcaaaacatttgtaaatcctacacatcctaatgcattagattttctagtacagagagtctctggcccaaagcaacactcaaaaagcataatgcaggcagtgcccttggcaaatcattaggattagtgatgaaacaatccacagta

SEQ ID NO: 44890 - DNA, 600 bp, Chicken  19866894284238_3
gctttgttctctctctgctctaaaaagctaaatgtcctgacttttactcggatatgcttttgagtttaaaagtcctggtctttgggctttcactacaaaaatagttgatgttgtcccccatctcaagattttcatcaaaacatttgtaaatcctacacatcctaatgcattagattttctagtacagagagtctctggcccaaagcaacactcaaaaagcataatgcaggcagtgcccttggcaaatcattaggattagtgatgaaacaatccacagtacagctagcccatgcaacctgmagagaaagagctcaaagacttcagctgactgctcaaaaaccttcctaatgtacaaaaaacccagtatattttagtctcacaataactcaagttgaaggttgcccttaggctctggtagcctctctccatctagtgagtttgcccagccaccctgggagcacctctctgcagcaggaatgcctgagtggtttccactgttacgctcaagtatttcagcagcagggaagtgggtggataagaactttgggacatactattggaagaccgatgaggaagtgcaaataggaacagtacaactta

SEQ ID NO: 44891 - DNA, 599 bp, Chicken  19866894284242_1
  misc_feature (1)..(120): n is any nucleotide
nnnnnnnnnnnnnnnnnnnnnnnnnnnnnnnnnnnnnnnnnnnnnnnnnnnnnnnnnnnnnnnnnnnnnnnnnnnnnnnnnnnnnnnnnnnnnnnnnnnnnnnnnnnnnnnnnnnnnnnngcggggcggggctatgcgttgcgaggcgggagaggcggggcgaggtggggcgaggcgatgcttggcaggcgaggtggggccaggcaaggcgaggcaaggcggggtagggcgagacggtgtgaggcgaggtggggcaggttgaggagttgcggggcgagcgggggcgagacggggcgaggygatgcgtggcaggcgaggtggggccaggcaaggcgaggcaaggtggggtggggcgaggcggggcaaggcgatgcaaggcagggctaggctaggcgaggtgaggcaaggcagggctgggcgagaagatgcggggagatgtggggcgaggcgggctggggcggagcgaggaggggcgaggcgagrcaaggcggtgcgaggcgaggcgtggtgaggcgaggcggggtgaggcgtggcagggcggagcgaggcagggcagagcggggctaggggaagtgacacggggcaaggctaggcatggc

SEQ ID NO: 44892 - DNA, 568 bp, Chicken  19866894284242_2
ggcaggcgaggtggggccaggcaaggcgaggcaaggcggggtagggcgagacggtgtgaggcgaggtggggcaggttgaggagttgcggggcgagcgggggcgagacggggcgaggygatgcgtggcaggcgaggtggggccaggcaaggcgaggcaaggtggggtggggcgaggcggggcaaggcgatgcaaggcagggctaggctaggcgaggtgaggcaaggcagggctgggcgagaagatgcggggagatgtggggcgaggcgggctggggcggagcgaggaggggcgaggcgagrcaaggcggtgcgaggcgaggcgtggtgaggcgaggcggggtgaggcgtggcagggcggagcgaggcagggcagagcggggctaggggaagtgacacggggcaaggctaggcatggcggggtgaggcggggcgaggcgaggcgaggcgaggaggggcgaggcgaggcgtggcatgcgaggcatcgcagggcggggtgagggcaagcgaggcagggcgaggcgaggtgaggcggggtggggtgaggcgaagtgaggcgaggcaggggggg

SEQ ID NO: 44893 - DNA, 600 bp, Chicken  19866894284255_1
aaggggaacctcacagatgaaagaaggataaaagagaaactagacatcttccaacatgctgaatcatgagaatccatgctctttccaaaacgccatttataaaggcctcgctgttggaaagcaggtatcacggctgaacagtctttagactaaaactgaaatgattaacatgacaaactgagaaagacacccgattctgtggtgtcatacagaagagcaaagtttcctgaagttaggaagaaagacttgcaagacagatgtagatggtagacatctcctggcagccaagccacagcctgyccaactggctgcttccaacaagaagcaacccaaaaagcaatgcccaaggaaaaataaatagagcaaaaagaaatcaacacagtttctgggaaaaaaaaaaaagggactgctttgcatgtggtcaaaatcaaacccagaactgatgaagaaagaaggacctatgctgcatgttccaacccaaagtcagyacagactagccatgataaaacacagtcagggcactagctgagatacaggtgacagcattgacagcgttgctcaagcacacaacaaacgggggggggggggagcaagttagct

SEQ ID NO: 44894 - DNA, 600 bp, Chicken  19866894284255_2
acccgattctgtggtgtcatacagaagagcaaagtttcctgaagttaggaagaaagacttgcaagacagatgtagatggtagacatctcctggcagccaagccacagcctgyccaactggctgcttccaacaagaagcaacccaaaaagcaatgcccaaggaaaaataaatagagcaaaaagaaatcaacacagtttctgggaaaaaaaaaaaagggactgctttgcatgtggtcaaaatcaaacccagaactgatgaagaaagaaggacctatgctgcatgttccaacccaaagtcagyacagactagccatgataaaacacagtcagggcactagctgagatacaggtgacagcattgacagcgttgctcaagcacacaacaaacgggggggggggggagcaagttagctgtaaaaaaaaagccattaccacacactaacttgttctcttcagaattctacaagctgaaatctaaccatggaaagagcacaaagcaaaaaatggcagtaatgaataaatacatgaacatgcttttgaagtgaactgaaaactcacagaagatacctaacaagaacacacatctatatagttttactta

SEQ ID NO: 44895 - DNA, 483 bp, Chicken  19866894284259_1
tatctcaattgtttttaagtgttactttaactcaccttctgcttgtgataagcaacactgttcttttcactttcctctttgtgacctctgtgagacccaggtgttctcggcatctttggatctcatgtccagacatggaaataagagtcctggcttaggaaggttatatttgaagttgagatcacagctgtactaaacaaaatgtagttgcttttatcaccagacaactttagttcctcactcctagcacctacagttagaaccactaaggctggaaaagacctctaaaattatctagtscaaccatccacctacctccartattgcccaccattgctatgcactatgcattggtatgcaccgactgcagtactggccacctgaagtctgatggcatcttctccagcaagtcatagggaaatggtgtctcgtattcattatatgactctggacagaatgaactccttggcagaagtgttgagc

SEQ ID NO: 44896 - DNA, 462 bp, Chicken  19866894284259_2
ttactttaactcaccttctgcttgtgataagcaacactgttcttttcactttcctctttgtgacctctgtgagacccaggtgttctcggcatctttggatctcatgtccagacatggaaataagagtcctggcttaggaaggttatatttgaagttgagatcacagctgtactaaacaaaatgtagttgcttttatcaccagacaactttagttcctcactcctagcacctacagttagaaccactaaggctggaaaagacctctaaaattatctagtscaaccatccacctacctccartattgcccaccattgctatgcactatgcattggtatgcaccgactgcagtactggccacctgaagtctgatggcatcttctccagcaagtcatagggaaatggtgtctcgtattcattatatgactctggacagaatgaactccttggcagaagtgttgagc

SEQ ID NO: 44897 - DNA, 600 bp, Chicken  19866894284263_1
tgtcagcatttaataatgaacactaattgcaaatagggggatggagttctccattcctgttctttcagcagccaaaagccacccaagccaagagatgtggccattcacaaatcaggatctgctaatcacagaatggacctcactgaggggctgactgcctgccccaggcctgcttggtatccatcttacccaccaaacagacagcctcttggagcattctgccatacaaatacaagggccttagagaagcaggttcaaaagccttttgggcgtgttgtggatttgctctacaatacttgygaagttctaacatcttgaaacatcttgtttcttgccttaaatcccatcccaaaatactgtggagcatgctggtgaggggcctcaacatcccagtacctctagagaaagctattgcaaaggacaaaaggcttcattgaatcacttgagttggaaggggcccttaaaggccacctggtccaacttccctgcaatgaacggggacacctacagctccctcaggttgctcagagcctggtctagtatggccttgactgtcttcaggggcagcacatcaccatatctttgagcaaccagttccag

SEQ ID NO: 44898 - DNA, 600 bp, Chicken  19866894284279_1
tgttgtggtgcaggacccagcacttggtcttgtcaaacttcaccccattggtgtcagtccagcagtccagcctgtccagatccctctgtagatcaacacttcctgccaagttggtgtgatctgtaaacttactgagggttcactcagtgccctcatccaggtcatcaataaagatattgaacaggacaggccctggtaccaacccctggggaacatcatttgtgtctgatcagcatctggatttaactccattcaccaccactccctgcgcccagccacccggccagttctttacccagyaaagagtgtacctgtccaagccacgggctgccagtttctccaggagaatactgtgggagacagtgttgaaggctctactgaagtccaggcagtctacatcaatggactgcttgacttgggcttgctttccaatctgtactccatctgcctgttggtccattatcactgctgagtgtcatctatccagagatccaccacatggctaataagtttcatttacattcatctgtgctttttcttattctgaccttataattctgtgagcatctgtaaaactgccttattattctctaattaatt

SEQ ID NO: 44899 - DNA, 600 bp, Chicken  19866894284290_1
aggaaagctttctgacatgtgacatggataagatatgtaatggtacaataatagtccttgtagttcaccttgtaggacatatacaaaaatgctgctttgatgccaccgaaccaagatgaacgatttgttttggttagctgggtggcacagccagtttggctgttcggagggggtgagttttggattgggatgatgacaacaattcattgggtttgcagaagtcactgcagagcttgtaaggcacattgccagcaggctggatgtaaatgtggataagggaggagaaaagaaatctcttaygtagaccagcatgattgagggggaaaagaacttgggctcaccaagcccttcaagctatgctgtcaaagaaatgtatgttctggttaatccatcacttctgatgacaggttgcatatggtgaactgcttgaaatgtgcttcctttgcccaaactctcacttcttaaagattggctttgaaaactgttttagcgataggagacgctgcttctgttgttgaaaaatgtataaagcacaagtgtatgaaacacatgtgtctagcttaatagaattcagctttctttttatagtctggatcagaa

SEQ ID NO: 44900 - DNA, 600 bp, Chicken  19866894284297_1
cttaaattattaagcatgtaatctaattctaatggaatttttattctaagtgctatttcttcacaaaagaaagattttcccctgtttttcataagatctatgcacacagaaaaaaaaattaaataatgaccagaggtgacaaattatccactgctttgtatcccaacaacccaccatgcccaccagacctgacactgaatttatattcatcttcttttaagaagtagtagaacaacaacagaaaattggtatttggactgcatctgttttctcattctcccctgtcaggagacaccgcayagaagaacattcgtcttgtttagtcccccaggagctgcagtacatacaaacacagctccagtctgccttaggacacagtcagccctctcactcagcaaacaccatgaggttaacattcttttccagaatgagatttcttctccttctccaacctttttcaattttaaacttcaattacaacatcactgacttctcaagtacttctggaaaaccaaatttaatttttaggattatcagctactcagttgttggggctgaagatcatttgaacaaatgtcaatggctttgaagtccagtact

SEQ ID NO: 44901 - DNA, 600 bp, Chicken  19866894284302_1
gagcaagagcggagcctgatcccagcgctgtccccgttccttggggatgagtcccatactgctctgttggctctgaagctgtctggggctgtgtgctctgcaatgagctgctgttgggctgagtgctgctgtgacacacagcagagtttgggacctgctgctgcagaagatgaccagctgtggactcctgacttctggtacctgtagctttcccagccttttcttgcctcctgtatttcccaagctggaaaactactgatcaagcccacatacacatcttcaagggcgaagcttttgtgytctttgtctgtccttgctgtcctctcctccagcacatgggtctctactctccctgctgcgcccggaacgctaacgctgccaagtggctcagccccacgcagctggagcccctaaaccccactctctgttttgccctgacaggccatcgctcaggccccgaatgctatgactgaggacatttacaccaatggctctgccaccctgggcagcccttcccacagcaacggccgtgaggtgcgcaagatccgcctggtccagtttgagaaggtgacagaggagcccatggtgagagctgggaag

SEQ ID NO: 44902 - DNA, 600 bp, Chicken  19866894284303_1
agaatctggcagccaatttgtttactgcgataccattaccagcccagctccgcttgtttctgctcaccccgctgctctccagcctccagggggaaatgctgactactgggagcgccagcactgatttaagtggacccaggagtttacctgaagcatttaactacactttcctttttctttacttttttttttttttaaactaggatacattagacaggcaaattcgtattaatgatctggttctgagttaaacaacaaggaagagggatgaagggtaagaaaggtggcagagatcacagrgaagcaacagcacaaaaacagtaatgcagttttagtacccatagaacagctttgcaaaatttgcacaacaggtgctggaactttcagtctgtaatgaccaaagccctcattttttaaaaatgcattttctaccttaactatatactttcggaatgtaaatattaatactccaggaaaggatcattattttgaggactctgcggggcattaaatcaggttaatagcggttctgttcatgagattgcaaaaagcaccatgtgctgctctctgcggcgcttaatggagtcagcaaacccatcc

SEQ ID NO: 44903 - DNA, 599 bp, Chicken  19866894284305_1
  misc_feature (1)..(38): n is any nucleotide
nnnnnnnnnnnnnnnnnnnnnnnnnnnnnnnnnnnnnntcgtgtataggagatgtgttccccctttgctttgccggctgtgcaataggtacagagggagagcttctggatcagggagtgagccagacatctaaatcagcttttgctcaccactccaaagcaaattatccaaagcataggtgagggcactggttaaaaattccgattttgatgtgtgtattagagggtgcttggtgggaaggtgtaacaggcagtggagaggaactctcttgacagcaaatggttgggttcttgcacttargaggaagtggagaatagctgttaggaaagcacagatgtctgagtttaaagaagtaataaaaaaatgagcagaacaaacagtactttgtaaggaatctctgatataaaaaccaatatgaagccatcaacagaaacaaaagaggttgcaaatagccttggtgactggattaagtgatgtacattttgtggagcttagcactgctaggaaaggtgtgttttgcattcatctgtcccctgggaagcacagcagaaatgaatgtgcacatattttttaatatttttaagcatgcagaattttca

SEQ ID NO: 44904 - DNA, 600 bp, Chicken  19866894284306_1
aataccatgaatattcaccgcttggcacccagctggcagctgagctgttttgacacaaaaaccttcaaactcaaagagtttttaatcagtctgcaagagagagaagaagaaagtgagagaaagaaataggaacagtgaaaatgaatcagtgagttcaacagaggggggggggaatacccgaatccggttaaccccttccctcctctgcgtccacgagcgctctctgtatctgcacagccctccccagggctgcagggatggagaaggggcaccccatgcccctggcaccccctgagtgcyctttcycccgggccaacccatcccactgactctccatgctcggggtttagcacctcatgccgcgtttgcctgtttccacgtgcgggaaacatttgaactcttaggctgggctgtgtttgtgactggctaccagtcacttttattgcaggcagcgcaatttcactcacagtatgggatgcgcttcagtgcagtcaatctttgcctgcgagagcgttcatctcagaaggatggctggcagtgctatccactgccccctccaatgttcttactggagtctcggagttgcctgctgtccacatg

SEQ ID NO: 44905 - DNA, 600 bp, Chicken  19866894284306_2
atgaatattcaccgcttggcacccagctggcagctgagctgttttgacacaaaaaccttcaaactcaaagagtttttaatcagtctgcaagagagagaagaagaaagtgagagaaagaaataggaacagtgaaaatgaatcagtgagttcaacagaggggggggggaatacccgaatccggttaaccccttccctcctctgcgtccacgagcgctctctgtatctgcacagccctccccagggctgcagggatggagaaggggcaccccatgcccctggcaccccctgagtgcyctttcycccgggccaacccatcccactgactctccatgctcggggtttagcacctcatgccgcgtttgcctgtttccacgtgcgggaaacatttgaactcttaggctgggctgtgtttgtgactggctaccagtcacttttattgcaggcagcgcaatttcactcacagtatgggatgcgcttcagtgcagtcaatctttgcctgcgagagcgttcatctcagaaggatggctggcagtgctatccactgccccctccaatgttcttactggagtctcggagttgcctgctgtccacatgacaccc

SEQ ID NO: 44906 - DNA, 600 bp, Chicken  19866894284307_1
cactgcttgaggttgaaaaaagcatcttggagcagatggcaagaacataggatttaagaaagggacagatgtatccatattagggagtctggaagataaatctcttgaaggcttgtggcagacgtgatcattactttgtttacatagatgaaatatgactagtttcaattaacagttgctgttgtccatatttgggatcttttcccttcagatggtctttgaaacctgttgtaaatcatcatgtttgtgctacttacattctgtgtataaaccatataggtatcccagcatctctactcyttatggaaaatgtttagatagatataatacagcataaaaacaaattgtggagcratttgctttctattaagcagtttgcaagtactgtctctaatgacatacagtctccagtgatggacagggatgctaggaaagcacaaaaagaaggacgttattattcagcctctgtgctgcccatccactctttccctcagcttcctccctgatgctaccagtattgttcccatcacaaacagctcctcttaggacacaaaccaagaacctgacttttgtacatctggggaataggaaagcaacaca

SEQ ID NO: 44907 - DNA, 600 bp, Chicken  19866894284307_2
taagaaagggacagatgtatccatattagggagtctggaagataaatctcttgaaggcttgtggcagacgtgatcattactttgtttacatagatgaaatatgactagtttcaattaacagttgctgttgtccatatttgggatcttttcccttcagatggtctttgaaacctgttgtaaatcatcatgtttgtgctacttacattctgtgtataaaccatataggtatcccagcatctctactcyttatggaaaatgtttagatagatataatacagcataaaaacaaattgtggagcratttgctttctattaagcagtttgcaagtactgtctctaatgacatacagtctccagtgatggacagggatgctaggaaagcacaaaaagaaggacgttattattcagcctctgtgctgcccatccactctttccctcagcttcctccctgatgctaccagtattgttcccatcacaaacagctcctcttaggacacaaaccaagaacctgacttttgtacatctggggaataggaaagcaacacaggaaaaattgtattctcttcctgtggaaacatctataagttgcatatagggcag

SEQ ID NO: 44908 - DNA, 600 bp, Chicken  19866894284307_3
tcagcttcctccctgatgctaccagtattgttcccatcacaaacagctcctcttaggacacaaaccaagaacctgacttttgtacatctggggaataggaaagcaacacaggaaaaattgtattctcttcctgtggaaacatctataagttgcatatagggcagttaggaaataacatgttgtctgtgtgcagcctcctcactgcagaggagtggaagaacttttgctgaccttgggaaaacaatgctttgcagatgtgaagaggaagtcctcttaaagcatgcgtatgtgcatggattrgtgtgtgtgtgtatatatacatatatatatatatatataaatgcacacgtgtgcttgggtgaattcagaagctgctgctttaatatactctttaaaaagtggtgatcttaaaaatgtgaagarcaaccagtacaggctgctgtggttgtgactccagctcatcctttcattactgcttgaactcagaaacaagtagacataaattcctaaggaggtgttctaacattaatcacagtacttttaggggcagatattagtactgaattagagtagccacgaagcatacatacactcctacag

SEQ ID NO: 44909 - DNA, 600 bp, Chicken  19866894284307_4
cagcttcctccctgatgctaccagtattgttcccatcacaaacagctcctcttaggacacaaaccaagaacctgacttttgtacatctggggaataggaaagcaacacaggaaaaattgtattctcttcctgtggaaacatctataagttgcatatagggcagttaggaaataacatgttgtctgtgtgcagcctcctcactgcagaggagtggaagaacttttgctgaccttgggaaaacaatgctttgcagatgtgaagaggaagtcctcttaaagcatgcgtatgtgcatggatttrtgtgtgtgtgtatatatacatatatatatatatatataaatgcacacgtgtgcttgggtgaattcagaagctgctgctttaatatactctttaaaaagtggtgatcttaaaaatgtgaagarcaaccagtacaggctgctgtggttgtgactccagctcatcctttcattactgcttgaactcagaaacaagtagacataaattcctaaggaggtgttctaacattaatcacagtacttttaggggcagatattagtactgaattagagtagccacgaagcatacatacactcctacagt

SEQ ID NO: 44910 - DNA, 560 bp, Chicken  19866894284307_5
tctcttcctgtggaaacatctataagttgcatatagggcagttaggaaataacatgttgtctgtgtgcagcctcctcactgcagaggagtggaagaacttttgctgaccttgggaaaacaatgctttgcagatgtgaagaggaagtcctcttaaagcatgcgtatgtgcatggatttgtgtgtgtgtgtatatatacatatatatatatatatataaatgcacacgtgtgcttgggtgaattcagaagctgctgctttaatatactctttaaaaagtggtgatcttaaaaatgtgaagarcaaccagtacaggctgctgtggttgtgactccagctcatcctttcattactgcttgaactcagaaacaagtagacataaattcctaaggaggtgttctaacattaatcacagtacttttaggggcagatattagtactgaattagagtagccacgaagcatacatacactcctacagtaaaacattcttttarcatctcctttctccatctgaaaactgtaaacactgggtctcttgtgtctatttaagtcagattcctc

SEQ ID NO: 44911 - DNA, 367 bp, Chicken  19866894284307_6
atacatatatatatatatatataaatgcacacgtgtgcttgggtgaattcagaagctgctgctttaatatactctttaaaaagtggtgatcttaaaaatgtgaagarcaaccagtacaggctgctgtggttgtgactccagctcatcctttcattactgcttgaactcagaaacaagtagacataaattcctaaggaggtgttctaacattaatcacagtacttttaggggcagatattagtactgaattagagtagccacgaagcatacatacactcctacagtaaaacattcttttarcatctcctttctccatctgaaaactgtaaacactgggtctcttgtgtctatttaagtcagattcctc

SEQ ID NO: 44912 - DNA, 527 bp, Chicken  19866894284311_1
agtgtggagcagcactttcctatgttacctcatctgagaggtccagtgccagcttagagaggactattgcattcatagcctgggaacagagctgccctcacctgtcccaagggggaggcagcatggcacctgggttatgtgctccgtgggtgtaagacctggactacccacctcctcagagcttacatctgaaggcattgttctacactgcagctgaaagagcagcagctctcacagtttcttttccacacactcagtagacaatttctctaactgctgcttctgcagatgtaggctggrgtctctgcattcaagagaggcctcctttatttttttacttcatgtgaaacatgggaaaaatgaaaattctctgggtgatttctaccttcatttgtgcaagggcaatgacattcccttcgaaggatgtctttgagtgatgccatggaaacctccccatttttaaaggatatgaacagtataattcactggaagttgcagaacaactaccggtgtgccagggaagataa

SEQ ID NO: 44913 - DNA, 600 bp, Chicken  19866894284312_1
gtataaataatacagtccgtgttattttatacacagttgtttattcttgttccatgtttcaaaacttggactcagaaaaatcacaggaagtttggtttttttacccttgtttttccaataaaagcaccataattacatggctcgattcaatcgtccttttctacaatcacttctccatgaagcacctttcttctctgccgcagcatgtgtaagtagagttgtggaaatacttcatcaaagcataaaagaaagcaaattagatgaaaaagaaataaatcagcagatcatattatggaaaamtacactttttcagaatgaagaaccaagtaaaaatttgggcacgatgtgccacagctggtcaaggcaagtaacaacgagtcaygaatttctcartgagtttgaaacagtaattactcataagtcagacaaagccctctgaaggaatactgtttttatggatcttctcttcaaaattttctttgtttgaaccatttttagcagcgcctgaagccttcaaaatatggacagaatgcttgaacatagattttgaggaggatccaaatttaccctacttgtccaagtatgaaaagctctgtcctt

SEQ ID NO: 44914 - DNA, 546 bp, Chicken  19866894284312_2
acaggaagtttggtttttttacccttgtttttccaataaaagcaccataattacatggctcgattcaatcgtccttttctacaatcacttctccatgaagcacctttcttctctgccgcagcatgtgtaagtagagttgtggaaatacttcatcaaagcataaaagaaagcaaattagatgaaaaagaaataaatcagcagatcatattatggaaaamtacactttttcagaatgaagaaccaagtaaaaatttgggcacgatgtgccacagctggtcaaggcaagtaacaacgagtcaygaatttctcartgagtttgaaacagtaattactcataagtcagacaaagccctctgaaggaatactgtttttatggatcttctcttcaaaattttctttgtttgaaccatttttagcagcgcctgaagccttcaaaatatggacagaatgcttgaacatagattttgaggaggatccaaatttaccctacttgtccaagtatgaaaagctctgtccttctcctggccttactgtattacctctctt

SEQ ID NO: 44915 - DNA, 535 bp, Chicken  19866894284312_3
ggtttttttacccttgtttttccaataaaagcaccataattacatggctcgattcaatcgtccttttctacaatcacttctccatgaagcacctttcttctctgccgcagcatgtgtaagtagagttgtggaaatacttcatcaaagcataaaagaaagcaaattagatgaaaaagaaataaatcagcagatcatattatggaaaamtacactttttcagaatgaagaaccaagtaaaaatttgggcacgatgtgccacagctggtcaaggcaagtaacaacgagtcaygaatttctcartgagtttgaaacagtaattactcataagtcagacaaagccctctgaaggaatactgtttttatggatcttctcttcaaaattttctttgtttgaaccatttttagcagcgcctgaagccttcaaaatatggacagaatgcttgaacatagattttgaggaggatccaaatttaccctacttgtccaagtatgaaaagctctgtccttctcctggccttactgtattacctctctt

SEQ ID NO: 44916 - DNA, 600 bp, Chicken  19866894284313_1
atttgacaacctttatttttttttattttttatttattttttattaagctcctttattttccttccatgctgtctaacacccttttggcgttcctaaaactttcatccagtcattctcattcatcattgatattaacatttttatgctcagtgtcaacctgtctgaatttgacataaaaacatcagtgtttgttatctcctttcaggaaacacaaagatcagtatcccaaagaatatttcccatgtaagtgcattttatttgtgagcaagccacagcttacttgcctccccccgcccccyagaaaggtaaatttagaaggcctcctttgtctatcactaagaggatgtttcccatactctcaatcatcctcaaggctttcagataccagtatcctttccaagtaataaaattgatcaggatattccaaatgttttaaacactgcgtcccagattctgttctactccatataccaaaatttattccatagtcctcaagaacataatcacagaatcatagagtcacagaatggcttgggttggaagggaaatcaaagaacatccagttccagtcccttgctgtgggtacgattgccaatcac

SEQ ID NO: 44917 - DNA, 600 bp, Chicken  19866894284313_2
ggtaaatttagaaggcctcctttgtctatcactaagaggatgtttcccatactctcaatcatcctcaaggctttcagataccagtatcctttccaagtaataaaattgatcaggatattccaaatgttttaaacactgcgtcccagattctgttctactccatataccaaaatttattccatagtcctcaagaacataatcacagaatcatagagtcacagaatggcttgggttggaagggaaatcaaagaacatccagttccagtcccttgctgtgggtacgattgccaatcactaaaytggacactagatcaggatgcccaaggccccatccaatgtggccttgagttcctccagggatggggcatccacagcttctttgggcagcctgtgccagcacttmaccaccctcagtgaaaaatgtcctcctaacgtctaatctaagtttcccttctacagcactgaactgaaaatttgtgttcaacttctgacaggccaaggaggcccaggacattctgcagattcatcgcaatgaatccaaccagtggtgcttgatttcatacacaggctgtgctccctttcttgatgtatgactttaga

SEQ ID NO: 44918 - DNA, 600 bp, Chicken  19866894284313_3
aattgatcaggatattccaaatgttttaaacactgcgtcccagattctgttctactccatataccaaaatttattccatagtcctcaagaacataatcacagaatcatagagtcacagaatggcttgggttggaagggaaatcaaagaacatccagttccagtcccttgctgtgggtacgattgccaatcactaaaytggacactagatcaggatgcccaaggccccatccaatgtggccttgagttcctccagggatggggcatccacagcttctttgggcagcctgtgccagcacttmaccaccctcagtgaaaaatgtcctcctaacgtctaatctaagtttcccttctacagcactgaactgaaaatttgtgttcaacttctgacaggccaaggaggcccaggacattctgcagattcatcgcaatgaatccaaccagtggtgcttgatttcatacacaggctgtgctccctttcttgatgtatgactttagaattggcctttttaagaacactcgtgtttcacgtcacacagcctgccactctttcctctctgacctgcacagacagcaggatgactcacaccatcccatttgcc

SEQ ID NO: 44919 - DNA, 600 bp, Chicken  19866894284316_1
gagagaaaacagaactattagttgtggagagttaaaacctggattttgcctcttacatatactgcaaagtgtgttcatctcttaaatttcatttgctttagagatactgaaaatgagggatttcagaggtacattaattatgaaatcttactatactaaaaaaaaaaatctcttcaattaaaagtaactttaagaataaattactcttctactaagtgaaaccaatcagcttttacagcggcagaaaatccacaaaatggtgggataaatgaagtctgcagtggaaaaagcaatgtcccraccagctctgctggggactcccacattatgtaggtgacaatcagttaagcagctgtgatgaggaacgtgcaggaaaagtatctggcagacatccaacagtgagtttcctgggcatactcacatcatcaagaagagcccagacctgccccttcccctaatacagatttgcttcatgaagaaatctgcttcaagcagaagtgaaattwttatctgcctatgacatytaaggaaaaatattgactgaatttggacctaaaaarcacactagctctccccttgggagaagcaagagcttcagtc

SEQ ID NO: 44920 - DNA, 600 bp, Chicken  19866894284316_2
ttctactaagtgaaaccaatcagcttttacagcggcagaaaatccacaaaatggtgggataaatgaagtctgcagtggaaaaagcaatgtcccraccagctctgctggggactcccacattatgtaggtgacaatcagttaagcagctgtgatgaggaacgtgcaggaaaagtatctggcagacatccaacagtgagtttcctgggcatactcacatcatcaagaagagcccagacctgccccttcccctaatacagatttgcttcatgaagaaatctgcttcaagcagaagtgaaattwttatctgcctatgacatytaaggaaaaatattgactgaatttggacctaaaaarcacactagctctccccttgggagaagcaagagcttcagtcccacagagaaatcaacaggaattatgagtgctcagtacttgtcagccaatctccctactggcataatatgtggctctgatacacaggacactgaaattagtaaaaattccactttgaagactaatgaagctaaattttgaaattaaaaatgtttaagagataaataataacacatttctgtgatctctgctcagagtcagttgcag

SEQ ID NO: 44921 - DNA, 600 bp, Chicken  19866894284316_3
atcagcttttacagcggcagaaaatccacaaaatggtgggataaatgaagtctgcagtggaaaaagcaatgtcccraccagctctgctggggactcccacattatgtaggtgacaatcagttaagcagctgtgatgaggaacgtgcaggaaaagtatctggcagacatccaacagtgagtttcctgggcatactcacatcatcaagaagagcccagacctgccccttcccctaatacagatttgcttcatgaagaaatctgcttcaagcagaagtgaaattwttatctgcctatgacatytaaggaaaaatattgactgaatttggacctaaaaarcacactagctctccccttgggagaagcaagagcttcagtcccacagagaaatcaacaggaattatgagtgctcagtacttgtcagccaatctccctactggcataatatgtggctctgatacacaggacactgaaattagtaaaaattccactttgaagactaatgaagctaaattttgaaattaaaaatgtttaagagataaataataacacatttctgtgatctctgctcagagtcagttgcagaggattacattatgagca

SEQ ID NO: 44922 - DNA, 600 bp, Chicken  19866894284316_4
tgggataaatgaagtctgcagtggaaaaagcaatgtcccraccagctctgctggggactcccacattatgtaggtgacaatcagttaagcagctgtgatgaggaacgtgcaggaaaagtatctggcagacatccaacagtgagtttcctgggcatactcacatcatcaagaagagcccagacctgccccttcccctaatacagatttgcttcatgaagaaatctgcttcaagcagaagtgaaattwttatctgcctatgacatytaaggaaaaatattgactgaatttggacctaaaaarcacactagctctccccttgggagaagcaagagcttcagtcccacagagaaatcaacaggaattatgagtgctcagtacttgtcagccaatctccctactggcataatatgtggctctgatacacaggacactgaaattagtaaaaattccactttgaagactaatgaagctaaattttgaaattaaaaatgtttaagagataaataataacacatttctgtgatctctgctcagagtcagttgcagaggattacattatgagcaaatgttgtatgttgtcctgaatttggtaaacatatg

SEQ ID NO: 44923 - DNA, 600 bp, Chicken  19866894284319_1
ttaacaatcatttgctctgctttagttgagatggatataaacactatggcctactgaacactgaagatgacacaccttgtgtcacctctagagttgctccactgagcctacttccacttatgtacttctgtcctgttgatgcggaattacattgaggatgtaaggatattttgattagccatcatagttttcacatccgaagtaagaagtagttttagtggaatgaggaaacaagtcccagcaggtaggcaaacaatcatttcagttcacctgtcctggactgggtgtgagtcctgtgakcaatgcaaatgcaatttccacactgaaggacaccaccacagaaccagagttagggtgtgagctgctcagaaatccaggtctgtaggaggatggaactttcaaagtcagcgttagtatatggcatgtggactttagcccatctcactgcaggatcccagtggaagcattgacatctcctactcatggacttctccaggaattcagcattcacatggccattgatcccttcatagtgcaattccctgggtcacaagtgctggccttcaggcctgcaccaaaaagcagtctgcagatgaaggc

SEQ ID NO: 44924 - DNA, 600 bp, Chicken  19866894284320_1
ttctcccactgtattttttaaatctaacataaaagcgtgagtaagtaaaataaagtaaaatgtaatgttatttactatgaactagaatctagataatgaaatttgacgcacttagaagactagaaagggaatcgtaggagatggtcacatttaagtgtctataatatctttgacaatatgatattgtattatgatgtaagttcaggttaggggtttcattgtttttttgacagctgaagacagaagcccacaagtgaatgtaaagcccatatttctatgtttattcaaaaattgtaaagstgtaaacctctagcaggagctgcagttgcacagtagctaaccttggcaaaggaaattgctttgaggctaggagtagagatctgagtaattccagactttgttgtgtgtgtcgtattatgttttggcaaaccacaatgcagtctgttgctgtactactgtaaatcaaacgaggctttttttttttgtcacttaatagattatagccacagccagcctggagaatcttttctcagcacttggactactgctaaagttattcatccaaagaagagtatatatatgtattttcctgaataggat

SEQ ID NO: 44925 - DNA, 600 bp, Chicken  19866894284320_2
cctggagaatcttttctcagcacttggactactgctaaagttattcatccaaagaagagtatatatatgtattttcctgaataggattgatttatagtcttaaaaccaaaaaagagagtaagattgtgatctgtgaaccaactcaattttctgtagcctgttgggaagatacaaagatgcttgtgataagatttgatgttactatcttagttgaattccaggcacagccatttccttttctgaggagcaatcaggtttatcctacataaaagtacaaaaacaggtacaaataacaagttyccaaacagtaggaaaaacaaaaaaggtaatttaaaatattttgtgtaacagttgatacttttgtgtcctaaatccccatctaattttagatgtctctaaattgttatttacatcttctttwgttgcaagttctgagaacagctattaaaaattagtgcctctgagtcccagatctttagctccaacacttaagtcttgggagcaaaaaccaagaaayttcaatatgatagacatatgaatctcttttaatttgccatgttatacaatacgttctctaaggagtatatccaytccatatga

SEQ ID NO: 44926 - DNA, 600 bp, Chicken  19866894284320_3
gattgtgatctgtgaaccaactcaattttctgtagcctgttgggaagatacaaagatgcttgtgataagatttgatgttactatcttagttgaattccaggcacagccatttccttttctgaggagcaatcaggtttatcctacataaaagtacaaaaacaggtacaaataacaagttyccaaacagtaggaaaaacaaaaaaggtaatttaaaatattttgtgtaacagttgatacttttgtgtcctaaatccccatctaattttagatgtctctaaattgttatttacatcttctttwgttgcaagttctgagaacagctattaaaaattagtgcctctgagtcccagatctttagctccaacacttaagtcttgggagcaaaaaccaagaaayttcaatatgatagacatatgaatctcttttaatttgccatgttatacaatacgttctctaaggagtatatccaytccatatgagaaagacaactgcagctctcagatatttgctctcaaaagatttgtttgtgtctgataactgtgtatgtcttaacaaatgcaaaactgcacgtaattggagaacatagctctgtctgatttg

SEQ ID NO: 44927 - DNA, 600 bp, Chicken  19866894284320_4
ccaggcacagccatttccttttctgaggagcaatcaggtttatcctacataaaagtacaaaaacaggtacaaataacaagttyccaaacagtaggaaaaacaaaaaaggtaatttaaaatattttgtgtaacagttgatacttttgtgtcctaaatccccatctaattttagatgtctctaaattgttatttacatcttctttwgttgcaagttctgagaacagctattaaaaattagtgcctctgagtcccagatctttagctccaacacttaagtcttgggagcaaaaaccaagaaayttcaatatgatagacatatgaatctcttttaatttgccatgttatacaatacgttctctaaggagtatatccaytccatatgagaaagacaactgcagctctcagatatttgctctcaaaagatttgtttgtgtctgataactgtgtatgtcttaacaaatgcaaaactgcacgtaattggagaacatagctctgtctgatttgtgtattggatgcccaaggggctttagttggattgatttttacttgttcctcaaataaacaattggagggggatataatgctaagaactctttatta

SEQ ID NO: 44928 - DNA, 600 bp, Chicken  19866894284320_5
aacaagttyccaaacagtaggaaaaacaaaaaaggtaatttaaaatattttgtgtaacagttgatacttttgtgtcctaaatccccatctaattttagatgtctctaaattgttatttacatcttctttwgttgcaagttctgagaacagctattaaaaattagtgcctctgagtcccagatctttagctccaacacttaagtcttgggagcaaaaaccaagaaayttcaatatgatagacatatgaatctcttttaatttgccatgttatacaatacgttctctaaggagtatatccaytccatatgagaaagacaactgcagctctcagatatttgctctcaaaagatttgtttgtgtctgataactgtgtatgtcttaacaaatgcaaaactgcacgtaattggagaacatagctctgtctgatttgtgtattggatgcccaaggggctttagttggattgatttttacttgttcctcaaataaacaattggagggggatataatgctaagaactctttattacaccccagtattgtgttcaagggcttggtgtttctcagagaggcagaggagaggttcccaaagaaagcagttga

SEQ ID NO: 44929 - DNA, 600 bp, Chicken  19866894284324_1
gtttttggagtgcggaccagtggttagagattcctgctgctctccactgttggaattattgctccttctgttacagccctagtgcagatggctgcagaagacaccggtatagaagcatttatgtgcagaaccacagcatcactcatgatccctaaggactgcctgtctgagtggctcttcagcttcattgggttcccagatagctggagtattgctggatggagaattcagagccaaaaagaatggagaaatgataagatttacaatgagtacagggaaggaagtgaggtaagagatgawgtatgaaggtagcgatacacatttttttatacttgagacagaataaaccaacaacacaaatgcatatgccttaactatactaaatcttttccataatttctgtaatcccttcctttccttattgcatcakctggtaatcaatatgtwtatgcaagataagaaaagcttgtgtgtaattgcagaaccatgtgattttcttcattttttacactttttactaattatggaaaatcacagtatttttttaagttcacatagcctacaatgttattatgtaaaatgtcagaatgaattccccta

SEQ ID NO: 44930 - DNA, 600 bp, Chicken  19866894284324_2
ccacagcatcactcatgatccctaaggactgcctgtctgagtggctcttcagcttcattgggttcccagatagctggagtattgctggatggagaattcagagccaaaaagaatggagaaatgataagatttacaatgagtacagggaaggaagtgaggtaagagatgawgtatgaaggtagcgatacacatttttttatacttgagacagaataaaccaacaacacaaatgcatatgccttaactatactaaatcttttccataatttctgtaatcccttcctttccttattgcatcakctggtaatcaatatgtwtatgcaagataagaaaagcttgtgtgtaattgcagaaccatgtgattttcttcattttttacactttttactaattatggaaaatcacagtatttttttaagttcacatagcctacaatgttattatgtaaaatgtcagaatgaattcccctaaatacatttttcaggaaatttatgtgcaatctgtaacatttacacctgtgtggcagcagataatggtgacctggtatctttctgaatgacagaaatattttggatctatggatgtaaagttggcctaatg

SEQ ID NO: 44931 - DNA, 600 bp, Chicken  19866894284324_3
atccctaaggactgcctgtctgagtggctcttcagcttcattgggttcccagatagctggagtattgctggatggagaattcagagccaaaaagaatggagaaatgataagatttacaatgagtacagggaaggaagtgaggtaagagatgawgtatgaaggtagcgatacacatttttttatacttgagacagaataaaccaacaacacaaatgcatatgccttaactatactaaatcttttccataatttctgtaatcccttcctttccttattgcatcakctggtaatcaatatgtwtatgcaagataagaaaagcttgtgtgtaattgcagaaccatgtgattttcttcattttttacactttttactaattatggaaaatcacagtatttttttaagttcacatagcctacaatgttattatgtaaaatgtcagaatgaattcccctaaatacatttttcaggaaatttatgtgcaatctgtaacatttacacctgtgtggcagcagataatggtgacctggtatctttctgaatgacagaaatattttggatctatggatgtaaagttggcctaatgttaagtgttgagcttga

SEQ ID NO: 44932 - DNA, 576 bp, Chicken  19866894284325_1
atttaatagtaatttaagaaactatgacaattctatcaatttcaaaccaatttctttatgattcaattatctactcatttcttctccatgcagcctgctctcagcaaagacagctgctaaattacttcttaaagacttattactgctcttaaagtctcttcctaatgtctccagaaaaagttaaggagatgattaaacacatgtgaccaatgcagagcatgttctacagacatactgaacatgtgcaactgtgaaatcaataggaaattgtatgactattgaagcattcttggaaaaggrggagtttgcttgatttgaacattatagacagaaatgtaaaaaaaatgaacaatttattttcatagttcaaagcaaacaactcaggcacacacacaaaaatatatttgcaatactgtcataaggaacattactaaatctttcacagttaaagaaatagagatttgtttgttgcagcaaatcagctagagttagcccagtgcataccgattcattcagctaaaagaaaataacgatactatattttaagaataaccatattgggtgatataataaaga

SEQ ID NO: 44933 - DNA, 600 bp, Chicken  19866894284328_1
gtgctcaactatgggcttgcttccctatgcagtggacatgcctagatgtttttcctctgattcatgaaaacagttggatcgtaagcaacctgcatactgatctgcaggcaaaccttatgtcaaaacattggtctgtccccaaaacactttcagcacacaaggaacagcacaaaacaaaacactgtggttgccccctcccctgtacctctcgagcattaataggtctgcatcatctttcactctcactggagggtgtgaacccttgtacagtcatgctttccattctatgctgaaaagaawaaaagtacattygaacactgtgtactgtctgaattattaggttattaaagagagaaagagacacgacagtggaaaaaggatgcgtgtttaacttcacattctaaaaagaaaggtttttaaggatgaggcatatgtctatagcggcagttcaggaaggatatgcacaagtcatctttttacataaatggtcatagccaggactatccagatgctgtctaacacacttctattctgaaaagttgtatttatagccaaaaccctttgaacataatgtgaacgagatcttacgctgttcttaga

SEQ ID NO: 44934 - DNA, 600 bp, Chicken  19866894284328_2
gggcttgcttccctatgcagtggacatgcctagatgtttttcctctgattcatgaaaacagttggatcgtaagcaacctgcatactgatctgcaggcaaaccttatgtcaaaacattggtctgtccccaaaacactttcagcacacaaggaacagcacaaaacaaaacactgtggttgccccctcccctgtacctctcgagcattaataggtctgcatcatctttcactctcactggagggtgtgaacccttgtacagtcatgctttccattctatgctgaaaagaawaaaagtacattygaacactgtgtactgtctgaattattaggttattaaagagagaaagagacacgacagtggaaaaaggatgcgtgtttaacttcacattctaaaaagaaaggtttttaaggatgaggcatatgtctatagcggcagttcaggaaggatatgcacaagtcatctttttacataaatggtcatagccaggactatccagatgctgtctaacacacttctattctgaaaagttgtatttatagccaaaaccctttgaacataatgtgaacgagatcttacgctgttcttagaaaaagggagtag

SEQ ID NO: 44935 - DNA, 600 bp, Chicken  19866894284328_3
gaagtcctaacacacgtgaacacattttctatgccagagattcaggccatacatccagcattttatatcaggaacatataatctttaactgcctaacatgcaacgatccaatggagtccgattaagcacaagtgacaaacactttttgtacaaaacagacttctttttacttcagctggggctcttaagaaaggttaggctgtggtgagttgttaaaatcctgccttttctctttcttcagctttgcacagaggtgcaaagtgggctgtcataaagaagactgtactgtcttcttaaaartacctcacgcaaataacacattacatagcaggaagaatcttttccctgggatgacatggaatagctgaggtgccctggcaatgtttggtgacacagtccctccagatctactactcttttcatcttgctgtgtagagccctgtgtaactccagcctgccctcgacccatgtacagcacatggatgagatgaaggcacgaaacttgctctaaaggcagactccagtccagagctggactccatgcagctcagggctgagccctgccaatgaaccctccaacatgcacttgtgcagcagcta

SEQ ID NO: 44936 - DNA, 600 bp, Chicken  19866894284332_1
atttaaaaagtagcagtatcaggagaatatgcatcacctttgaaccctgaattgcagtgcaaaagttaagaaatgaggtaggtgttttatcaaagagtttctcacatgctgttaccaactcctttgcttgaggcaacagggtagctatttttacactgtgaaaacactgacttcgcatcacgtttccgctccaaatgggaggctgacctgcttcccctcaacacacaagacaccttctccttcctttttctccttctcagccctgcccctccgtgcttttccccacacccttctctatgycctaactggctaaaacaggatgtgcagccagtaatgtcagacttgaactttctactttctgacaccagcggactcagaaagctagacaaaacaagctgtcccatttctagacattgcctgtgctctggttgtaagactgaaaccttttccagtcagagatgataaatgatgtgactttatgataaacaatgcaaacaaggcttagccaactgtgctgcacacagccyttctttcctgggtctgccttgtacatgcgtaacatgtagccatgaaactcatcgttgcttctgagggcaactg

SEQ ID NO: 44937 - DNA, 600 bp, Chicken  19866894284332_2
agacaccttctccttcctttttctccttctcagccctgcccctccgtgcttttccccacacccttctctatgycctaactggctaaaacaggatgtgcagccagtaatgtcagacttgaactttctactttctgacaccagcggactcagaaagctagacaaaacaagctgtcccatttctagacattgcctgtgctctggttgtaagactgaaaccttttccagtcagagatgataaatgatgtgactttatgataaacaatgcaaacaaggcttagccaactgtgctgcacacagccyttctttcctgggtctgccttgtacatgcgtaacatgtagccatgaaactcatcgttgcttctgagggcaactgtgggtccacatattacaatgataagcccagcagcccattccagactgacgcaacttcggacatctcctcactcctgtctcacttgtgacttgactttaaaatacttattaccttgaaaacataaatatcctacctgggattcccagaagactaccagttgcctagttttgttttatggctaacggccctgcctctcagttaatacaaaagcagttatgggccttaca

SEQ ID NO: 44938 - DNA, 488 bp, Chicken  19866894284339_1
ctcacatgagtagctgagagtgcagatttcattgggatggataggatggtgccaagcatgatggtgtaggacagaaagtgaacttgagaccccttgcaagaggatgcaactgttgcaagtgcatttgttgaaatgctcaaaagctatgacttccctgtttatcttgtgctctttcagtcttcagggactttcagtcttatctgacagcaaggatcagacatcactcatctgggaccaaccctattttggggtgtttaagataaaacatggatttgaatagtttctaatatgatgattccratgtgagatgaaaacacaaagctaaaatgtgtcatgggtttttgcccacaagtaggaagccatcaagttttgtattcaaatcgcaaatagtaggattattacagattaattttactgataaccagacactgtttctatgctcttggagtatgggaacattcagtgttggagtatggatttgtggacat

SEQ ID NO: 44939 - DNA, 600 bp, Chicken  19866894284340_1
tctgttcattataaacatttttcttatgagatgtgctccccaaatcccattgagtccaatggagaagatccagatgattttgttgatcatggatatataacaagtataaaatggaatttgattaaaattaatgccttctattaagacaggtaatagacactctgggaaaactgaatggaaaataccaatcacagccacaaggctactggctagagatgatcagaaaacagatcatcattggtactttcgcactctggaaattttcagtgaaaatgaaaaaacccaccaccaccaccaacraaaaaaacaatgacacactgcagaaatccagagaatattcaggctcttgcctgtggaaagggaggagatatcagcaagagcatgaaagtattttcaaagaaaataatgcatattagtattttctcaggagagctcacatttttagtaaagtaaaagcatattctgactgagagtatcattgtttcttgtgggaactggaatgtttcccttagtaagttaaccctcctggctgatggcctcttctctagtgaaccatgatcttcttgttaaggagtagaaaggatgcaaaggagaccraat

SEQ ID NO: 44940 - DNA, 600 bp, Chicken  19866894284340_2
acaaaaaaaacaatgacacactgcagaaatccagagaatattcaggctcttgcctgtggaaagggaggagatatcagcaagagcatgaaagtattttcaaagaaaataatgcatattagtattttctcaggagagctcacatttttagtaaagtaaaagcatattctgactgagagtatcattgtttcttgtgggaactggaatgtttcccttagtaagttaaccctcctggctgatggcctcttctctagtgaaccatgatcttcttgttaaggagtagaaaggatgcaaaggagaccraattgtgactcagtatggaagaaggtccaatatggacacattacatgcctgaggagcatgtataaaagaaggaggtgaagaaataagataagcatcagccagccagcacagtgcagtgtcttttctgatggagatatttcttgtgtcagtggtcttattttttataactaaggaagtatttccaagaaaaccatactttaaggaggaaaataaatgtttatttatatctaaaaaaaataattttcttcatttaaaatctgttcatcatcttttttctagtgcaagaatgttaagctagca

SEQ ID NO: 44941 - DNA, 600 bp, Chicken  19866894284340_3
aggagcatgtataaaagaaggaggtgaagaaataagataagcatcagccagccagcacagtgcagtgtcttttctgatggagatatttcttgtgtcagtggtcttattttttataactaaggaagtatttccaagaaaaccatactttaaggaggaaaataaatgtttatttatatctaaaaaaaataattttcttcatttaaaatctgttcatcatcttttttctagtgcaagaatgttaagctagcatactgctgacgttacttttccttttaatttgacagaacaagatcagaattmttcctttttccctagttaaaattcccagttttcacttttacattttgaagcatggtaaactgccagctggatttcaaggttccacagtagtgcctccaggggctataaacatactgtagcaaatgcagcttaaggagcataaaatgtctttttttttttttttttccccaattgaataggaggcagtgaccttcccagcccatccagaactaagaaacctgatagtagggctagagaaggaggcatgacattagtgacttgaatctagtgatgcatgaggatttggaaaggagattaaaa

SEQ ID NO: 44942 - DNA, 600 bp, Chicken  19866894284341_1
ttaaaccattaccctttgtgctatcactatctacccatgtaagaaggtgatttccctcatgtttataaacttcctttaaatactggaaggccacagtgagatctccccacaaccttctcctttccaggctgaataagcccagttccttcagcctacctctctatagggagggagctccagcctttgagtcatcttcatggtccccctctggaacccctccagcatcttcacatctttcctgtgtttgcggccccagacctggaaacaacactccagatgggacctcatgggggcaaaatrgagggggacaatcacctcctttgttcttctggctaccccacttctgatggaacccaggacaccatcggccttccaggctgcaagcacacactgctggctcatgttaagctttcctcaaccagaacccctaaatccttagtagggctatctcaaggagttttttccctactttgtatacatatctgagattacctcaacccaagtgcaaaaccttgcattttgctttgttgaacctcattagattcacaaggactcaccttttgagtttatcaaggaccctctgaatggcatcccttcctt

SEQ ID NO: 44943 - DNA, 600 bp, Chicken  19866894284359_1
ccacctcctgatatagccacagcatgctcaaccccattcttaatgataaaagagtatacatcctagatttaaagaagaacaagcaggcaataatatacaaagagcaattgcttcaaacacaacagccaatgaacatgtagatgcattcaatactttcacctgccaccaacagaacaagatgaaatgacaacaatctatattatctagacttcattattctaaaacagtgagtaggtgtaaagatttactcacgtttaggaggaagagaaatgtcaggctttagtccctcacaacagcaaygatgacatactcacattatgaaacttaaacattttgtgttctgaaaacttcccaaaaacggggtgaacagtgagctatattgtttctcaggtaggtaatgaaccttggtggccatctgacagcttatcgttagtacattgccatcagctgtgagggatttggcactggggtgaatgtaaactcacctgatactaaagactatcttttttttttcctctttttcttttttttctttcttttttgttttgtttccctatgctgtttttccccatatcagaatagcttgtataaattatggaa

SEQ ID NO: 44944 - DNA, 600 bp, Chicken  19866894284368_1
gcttccatccaatggagccccagttaatcaccgaacatcgtgggaaaggcacaagatgagggccgagaaacagcccattgtctgggcaagattaaagccccaaaagccgtattgtctactgaggggataaatcttcctgctgtcactcaagcactgaattaaattccccttcatttctaaaggggcttatctgtactgaataggctgttgcgccacaagcgtaagggaacgtattaagtgagctcctgtcttgggcaccttcacaaatagacgaaaaacaggagcagatctggaaggggygggcggggggtgtgagcaraagtgcttgggatgggggagaagagaagggatgcagtygttgcaggtcggggctgtaggaggaggagcacaaaatggccattttgctcagctctgctgtcctcgccattggaaccaacgtcgggtggagtgtcggcatgtcttggtgcgagggtggctctgagcatgtatcatgttctgaggagcccgtgggcatcaccaccrctgcttctgctctgagtgctccctctgggctctcgcaaagccgtggcactgtgaggatgcaggttgtgcagtcacggc

SEQ ID NO: 44945 - DNA, 600 bp, Chicken  19866894284368_2
ccagttaatcaccgaacatcgtgggaaaggcacaagatgagggccgagaaacagcccattgtctgggcaagattaaagccccaaaagccgtattgtctactgaggggataaatcttcctgctgtcactcaagcactgaattaaattccccttcatttctaaaggggcttatctgtactgaataggctgttgcgccacaagcgtaagggaacgtattaagtgagctcctgtcttgggcaccttcacaaatagacgaaaaacaggagcagatctggaaggggygggcggggggtgtgagcaraagtgcttgggatgggggagaagagaagggatgcagtygttgcaggtcggggctgtaggaggaggagcacaaaatggccattttgctcagctctgctgtcctcgccattggaaccaacgtcgggtggagtgtcggcatgtcttggtgcgagggtggctctgagcatgtatcatgttctgaggagcccgtgggcatcaccaccrctgcttctgctctgagtgctccctctgggctctcgcaaagccgtggcactgtgaggatgcaggttgtgcagtcacggctcacgccatcatgatcctc

SEQ ID NO: 44946 - DNA, 600 bp, Chicken  19866894284368_3
gagggccgagaaacagcccattgtctgggcaagattaaagccccaaaagccgtattgtctactgaggggataaatcttcctgctgtcactcaagcactgaattaaattccccttcatttctaaaggggcttatctgtactgaataggctgttgcgccacaagcgtaagggaacgtattaagtgagctcctgtcttgggcaccttcacaaatagacgaaaaacaggagcagatctggaaggggygggcggggggtgtgagcaraagtgcttgggatgggggagaagagaagggatgcagtygttgcaggtcggggctgtaggaggaggagcacaaaatggccattttgctcagctctgctgtcctcgccattggaaccaacgtcgggtggagtgtcggcatgtcttggtgcgagggtggctctgagcatgtatcatgttctgaggagcccgtgggcatcaccaccrctgcttctgctctgagtgctccctctgggctctcgcaaagccgtggcactgtgaggatgcaggttgtgcagtcacggctcacgccatcatgatcctcccttcttcctcccccacagctctcccacccaaacacga

SEQ ID NO: 44947 - DNA, 468 bp, Chicken  19866894284368_4
aagggaacgtattaagtgagctcctgtcttgggcaccttcacaaatagacgaaaaacaggagcagatctggaaggggygggcggggggtgtgagcaraagtgcttgggatgggggagaagagaagggatgcagtygttgcaggtcggggctgtaggaggaggagcacaaaatggccattttgctcagctctgctgtcctcgccattggaaccaacgtcgggtggagtgtcggcatgtcttggtgcgagggtggctctgagcatgtatcatgttctgaggagcccgtgggcatcaccaccrctgcttctgctctgagtgctccctctgggctctcgcaaagccgtggcactgtgaggatgcaggttgtgcagtcacggctcacgccatcatgatcctcccttcttcctcccccacagctctcccacccaaacacgagctgttctggtctctcacctgtatgcacctcgg

SEQ ID NO: 44948 - DNA, 600 bp, Chicken  19866894284369_1
tgaattctcaccaggagaaggagaatctgagggggaaaaaaaaaaaaaacaactgttttacaaatttttaactcacagaccactggcaaccaggttaaccaagcccaaaagatctggggctggactggtggacagggtcacattttaggactcttttgtcagctgagtagccaaagcacttaaaaaaacacagcaaaacaattgcatagcaatcacaacaataggtgggacaaaagctgaaatgactagagcatccatgaacatttaaacttacactaaaataaagtgacacacaatggyatctaatagtctttagattgtttttaatgtagggtctttraagctttaaaggatttaaagagaaagatataccatccaaattctgacacatacaaaaaccctactccagggctggtacaaaagactgcatggaggagctctcctagttgactaaattaagcatcttttcttcctatcaaagtaaatatctagttagatatgggaaatctcaacaacattacagcaatcccattttactccacatgaagatgatgtaagcactatttaactttgttgtgtaacatagcaatcttatgaatg

SEQ ID NO: 44949 - DNA, 600 bp, Chicken  19866894284369_2
aaaaaaaaacaactgttttacaaatttttaactcacagaccactggcaaccaggttaaccaagcccaaaagatctggggctggactggtggacagggtcacattttaggactcttttgtcagctgagtagccaaagcacttaaaaaaacacagcaaaacaattgcatagcaatcacaacaataggtgggacaaaagctgaaatgactagagcatccatgaacatttaaacttacactaaaataaagtgacacacaatggyatctaatagtctttagattgtttttaatgtagggtctttraagctttaaaggatttaaagagaaagatataccatccaaattctgacacatacaaaaaccctactccagggctggtacaaaagactgcatggaggagctctcctagttgactaaattaagcatcttttcttcctatcaaagtaaatatctagttagatatgggaaatctcaacaacattacagcaatcccattttactccacatgaagatgatgtaagcactatttaactttgttgtgtaacatagcaatcttatgaatggaggatagaatagcacccaaatctttgtccaaatcatgtt

SEQ ID NO: 44950 - DNA, 599 bp, Chicken  19866894284371_1
  misc_feature (1)..(74): n is any nucleotide
nnnnnnnnnnnnnnnnnnnnnnnnnnnnnnnnnnnnnnnnnnnnnnnnnnnnnnnnnnnnnnnnnnnnnnnnnnaaaaatagcctaactcatgcagaaatggtttttttcaggcttacagccagggctcagtggcagctggcagagctggtttgagcactggaataccttccctgcatgcctttcaatggaaaagccagggaggtcacacattaattggcaaactacacctgagcatttgtccataatgaatttagagcatcttattccatttgttcaatgacaattcacattcattgcwgtgataccattgaatcctcatgttgcttgtagagttacatgggactataccaaatgctggggctgatttcataaattgccttctttgagctgtcacaagtcgggacagtcttattactgagcctaagacagttctattactcagcctttagacagcttaaagacattctaatctaacaaattagcatattgtgaaggttattgtcacatcatgcaattagcagaacccaactacacaaaatagaggagctatttctctttcatcctttattttctgtcccaattcttgtatttttagtt

SEQ ID NO: 44951 - DNA, 600 bp, Chicken  19866894284371_2
gaatcctcatgttgcttgtagagttacatgggactataccaaatgctggggctgatttcataaattgccttctttgagctgtcacaagtcgggacagtcttattactgagcctaagacagttctattactcagcctttagacagcttaaagacattctaatctaacaaattagcatattgtgaaggttattgtcacatcatgcaattagcagaacccaactacacaaaatagaggagctatttctctttcatcctttattttctgtcccaattcttgtatttttagttaaattcatcctytttgctctattttaatgtcttcacttacaggcaaaataaactcacatatatgattascaagttaaatagaacttgttcttaatggtgagaagtacgatgaaagttgttttctccttagctcagaggccactgtgaggaattcagaggaattacactgatagcctttctgttttggggtgtgctctgatatcctctgttaacatcaggcagtgctgtgaaggcctgtgtgcttttgcaaatgatgatttaggttgcagggcttttgccaggtttgtgctagggagcagtaaagatggggca

SEQ ID NO: 44952 - DNA, 600 bp, Chicken  19866894284371_3
tcataaattgccttctttgagctgtcacaagtcgggacagtcttattactgagcctaagacagttctattactcagcctttagacagcttaaagacattctaatctaacaaattagcatattgtgaaggttattgtcacatcatgcaattagcagaacccaactacacaaaatagaggagctatttctctttcatcctttattttctgtcccaattcttgtatttttagttaaattcatcctytttgctctattttaatgtcttcacttacaggcaaaataaactcacatatatgattascaagttaaatagaacttgttcttaatggtgagaagtacgatgaaagttgttttctccttagctcagaggccactgtgaggaattcagaggaattacactgatagcctttctgttttggggtgtgctctgatatcctctgttaacatcaggcagtgctgtgaaggcctgtgtgcttttgcaaatgatgatttaggttgcagggcttttgccaggtttgtgctagggagcagtaaagatggggcacagagaaaagccaatataaggcatgcccaatagtttgaagcaagactgagagaatac

SEQ ID NO: 44953 - DNA, 600 bp, Chicken  19866894284387_1
tcattcatccacccacaaaaaaatttttagcatttattaccatcttttttgcactgtttccaaacatgttaatacctgctgaacaaaacaacactaaaaatcataataactgtctactgctgctagttccccaacataatgagttgttgagttttccttttagcatttcaacaacaatacctcatagccaaactgtctattaaaactaaaaaattgtcagaggaagtgtataacttggctgtaagaatgcactgaaacttggcataaaggatcttagaccagaagcaagtttgctttacmaaatataaaatactcctttcagattctttccacgattttaaaagcagatttcattgtttacaaagagatgttaccagccagtaacctatgatgtgtctaactgtggctgtgaaaagaaaacagagagaatgagaaaataaagtgtcatcaaaatttcatgaagaaacaagttatttttaaaaatagtgctttaaggaatttcagagacatctgattcacagtctcaaagttcattcataatatcacatgtgaaatacacttcattatacactgctttttgcttcttttttaaagccacat

SEQ ID NO: 44954 - DNA, 600 bp, Chicken  19866894284389_1
ctttctccctttgttgctgtttatgctactggtgtacccaaagctgcacctgctacactagagggttaccataagcactcactagagatgaataaaacttctcttgacctgctgctgatactgttgctaatgctgtttagcatgtggctcacaacaaaaaatctttttttttacaggttgaacaaacaaccctccttcaaaatgctcacctttgttgcagcaggaattgaagctgtaacagtcctgagtcagtgagcatttttgcatagctgcctcctccctcccaagaaaaacacaacrgcccctttaatgaggaaagtctcactacagactttgctttgcagtaatkcctcgtgccttcgccacagcacatatgattaactataattcctatataaatgtatatccayagtttacacgttcagctcttaatgttcaacttcctgtgcttgcaacgcagcactccaagatacttattgcacctctgtgatatagtttaccctgatttaccaatgtgaattttgaactttgacatcagaaggatggagtttggtctggaaacagagaaatcaaactgcttagcaagcaatgagcagtaat

SEQ ID NO: 44955 - DNA, 600 bp, Chicken  19866894284389_2
ctgctacactagagggttaccataagcactcactagagatgaataaaacttctcttgacctgctgctgatactgttgctaatgctgtttagcatgtggctcacaacaaaaaatctttttttttacaggttgaacaaacaaccctccttcaaaatgctcacctttgttgcagcaggaattgaagctgtaacagtcctgagtcagtgagcatttttgcatagctgcctcctccctcccaagaaaaacacaacrgcccctttaatgaggaaagtctcactacagactttgctttgcagtaatkcctcgtgccttcgccacagcacatatgattaactataattcctatataaatgtatatccayagtttacacgttcagctcttaatgttcaacttcctgtgcttgcaacgcagcactccaagatacttattgcacctctgtgatatagtttaccctgatttaccaatgtgaattttgaactttgacatcagaaggatggagtttggtctggaaacagagaaatcaaactgcttagcaagcaatgagcagtaataagaggaatatacgttcctcttcgtgttcagttcttagactacatcttc

SEQ ID NO: 44956 - DNA, 600 bp, Chicken  19866894284389_3
gctgctgatactgttgctaatgctgtttagcatgtggctcacaacaaaaaatctttttttttacaggttgaacaaacaaccctccttcaaaatgctcacctttgttgcagcaggaattgaagctgtaacagtcctgagtcagtgagcatttttgcatagctgcctcctccctcccaagaaaaacacaacrgcccctttaatgaggaaagtctcactacagactttgctttgcagtaatkcctcgtgccttcgccacagcacatatgattaactataattcctatataaatgtatatccayagtttacacgttcagctcttaatgttcaacttcctgtgcttgcaacgcagcactccaagatacttattgcacctctgtgatatagtttaccctgatttaccaatgtgaattttgaactttgacatcagaaggatggagtttggtctggaaacagagaaatcaaactgcttagcaagcaatgagcagtaataagaggaatatacgttcctcttcgtgttcagttcttagactacatcttcttaattagaactgctatggggttgtccatgtaggccataagcaaatctgatagcaatgaat

SEQ ID NO: 44957 - DNA, 460 bp, Chicken  19866894284396_1
gctatctttgagaatgtctgggaaacataaggaaaccactgacaattagtggccacataaaatagtttgctcttccgctttgtaatcataaaatacattcatctggcaatactggttttgaaagaattggtttaatgggtccatacgtggcagatgttacatttgctacagtaacagtaaattctttctgggaattcgcagcaccctctcagacaatgcatgtaagtgcacaactctttttcaaagagatccctgttaaagaaaaggaaaacaactgcaaaagtaaccaaggaaacaaaycagcaaccatcctcactgcaacacgcaacatcaaacctgccttgcagaggtctattgttcccacttactgacctatttaccagcgtccaaagaaagtataacaaaagttcattaactcatttcaaataaaggcatattctccaggtttattttcagggaa

SEQ ID NO: 44958 - DNA, 600 bp, Chicken  19866894284398_1
actgcctgtatgcagtcagtgttcccctgggataaagggtatcccattggtcttctttcactccatcacagtcaaagaattaaggtggaaagaacagtttttaaacaactgtaatccaaaagaaagtgtctaataggagacaatgaaggatcgtactgtaacaagaacaggtatttggtcttgttgaagttcatgtaattggccttagcccagtgatccagcctgtacagatctgtctgtgtgggtctttctacccctaggcagaacagtactgatgacaacatgatgtcatctgcaaayttactgagggtgcactcaatcccctcatctgggtcatcagtaaaggtattaaacagggctggccccaataccgacagctggggaacaccactcatgactggtaaccagctggatttaactccattaactcaatttttccacatccagtccatcaagagatggatcgtatcacggaactgacaccaagcactagggtgcacacaaaaagcaaagcatcagcacctgtgactggccacactcacctccaaaaccactaatctttggaggacagcaacattactctgcttctctcttccctta

SEQ ID NO: 44959 - DNA, 546 bp, Chicken  19866894284399_1
tgttttatttacctggatgtgtaaccaaggggttttgtggagtttcctgatccacctctcctaaatcctaagggaattactattgagagagacaactatattaaaaacttctgcccctactcctgtatttctccaatgtttccattgcatactcttagtctgtgtgatggacagaagcacatactgttcctgtgattccatggcaaacatggcttgtcacatgacaacagaaccactgttctggttatgggtattgggaactggtaagcacatgcatattgtacacattgtaggcaaaaygtgtaagctgagtcatgattacaaaatcatctagactatagaagaggatgacacatttgcactgtaatggcgttaatgtttctatactggaaatttaaacacatagtagtaccccctaccactatgcatcaatttaggcatgattttgccatcaatctgatcagcactcttcactggccatcatgctgctttagggcctcccggtgcatctcacatttcttatttcactctgttactctctttagg

SEQ ID NO: 44960 - DNA, 575 bp, Chicken  19866894284402_1
ggtgtccctggacgccccccccccccgccctccccaccatgccccacctctgtggcattgaacaccaggtaggagtagttgccccgctcgaaggtgtccaggctctcgccgtcatcccagaagaggtccccccaggcagtggcacgtggggacagggccacaatgaggcgcagcgggttccctcgggtggccttgctggtggtcccgggtttctggatttcaaaagaagctgtggagctgtgtgcccagtatggggcggggagggctacgacatgccggggactgaggagggacacatcrtggagcaggggactcctctgagactgtccccagcccagggaggtggcagcagggagctcacctgtgtgggcaggatagaaccctcccggagatgcaggttgaggtggtccaggggggctgacagcttcaacatctccccactgctgttcacagaggagccctgggagggggcaaaggacaaagggggatcagggacacggtgatgggctcaggcatggggccagggagcagctccttggatagcgagtcccacagctggtgatgctccaacactt

SEQ ID NO: 44961 - DNA, 600 bp, Chicken  19866894284409_1
gaaaaatagtctagatcctcttgaaaattttgaagaatatttgaaatttagtctaaaaagctttctgaagttgtaagcttccaaaaggagaaaaaaagaataccctttactgttatgttatgaggtctaagacctctggattactgtgatttgttagcattagatcatggaattggaccattattaatgtgctagacatacattagagtaataaatatgctaagtttcattgcatcattctagtctaaatattttttcaagtcataaaggatagaaatgtgttgcaggtgagaactatawtttttcatacaattcagtaactaaaagaactttgctagaagataggcttgcattgtatgcatcttattctagagctgtccatactcagtcctgacacaaataaaatcacttatgatacaacttcttactttctcttttccttccctttctcaatttttctctttgtaatctcctacttcactatcaaaaacagctatggaagaatgacctcagttctttggcttgtaagtagtactacctggcagtagtcaggcttcagtttgcagaatctttgttggtaataggcaagccacagcaaac

SEQ ID NO: 44962 - DNA, 600 bp, Chicken  19866894284411_1
atactgcagatgagaaacacttgtgtgacagcactgaaatacaataaaatgcagctgctactacagcagaatagatagtgctcttcaattactattctaaatattagcttaaaaaaaaaaaaaagttattcaggaagaaatggaaattctccctccaaaaatttcaactcttataataaggagtctggtatgctttgccaattgcattacttggctgtaacaaaactctctgagcaagttactggggaactgaaagaacaagacaacagtgttctcctaaatgccagaagggaagcaagyaatcatttaaaaactgatttatttcataagtaagttcttccatacaaaacacacagctagtacaaattcaaaggagcaaccgtgccaaggcgttgctggaaagcccctgtgctgcaacaagtgaagttttacacctgttaaacacgggagtcagtgcattctggaagttctgcatttagttccctagccatgcctgatgcagcctatgcagacatgttgtattttgtgctgcacagagaagtaggcaatcacttatgtagcactttatgttcggatgtcctaggaatatcactagatcaa

SEQ ID NO: 44963 - DNA, 600 bp, Chicken  19866894284418_1
ggtaagtccccggcggggccgggaaggtgggggtggtactgctgcagccgccggggctcggtcggtgttgaggggtctgcagccctttgtgagggctgcctcacaaagaccacccctttgtggggaaaagttttgttgaaagtttgcgcttgaacgtactttagagctggtgctcccgagtgctcggaaactgggaagtacctcggcaaggagctgcctcgtctgggaggatgggggctgtgaggggagaaatttaaaaagtcacttaatttctgtgtaaatttaggaactactagtcakaagtgtcatcaaattcaacacttttttttcttccgaaaatctgcaaattagaaataaaacaccawttgtgggatttctagggtgtrttgaagtaataagattgtattctaatttgctttttttgcacaacttctggcttattaatgtttgttgaatgagattgtatacactgtgctgttacagaggtcagaaaagcaggaaaagatttagaatgtgtttttggactctgatcaacttgtgccttccaggttgatattgcagctctgaatcgttaatctaaaacagcattaaatcttcatc

SEQ ID NO: 44964 - DNA, 600 bp, Chicken  19866894284418_2
tgttgaggggtctgcagccctttgtgagggctgcctcacaaagaccacccctttgtggggaaaagttttgttgaaagtttgcgcttgaacgtactttagagctggtgctcccgagtgctcggaaactgggaagtacctcggcaaggagctgcctcgtctgggaggatgggggctgtgaggggagaaatttaaaaagtcacttaatttctgtgtaaatttaggaactactagtcakaagtgtcatcaaattcaacacttttttttcttccgaaaatctgcaaattagaaataaaacaccawttgtgggatttctagggtgtrttgaagtaataagattgtattctaatttgctttttttgcacaacttctggcttattaatgtttgttgaatgagattgtatacactgtgctgttacagaggtcagaaaagcaggaaaagatttagaatgtgtttttggactctgatcaacttgtgccttccaggttgatattgcagctctgaatcgttaatctaaaacagcattaaatcttcatccggcactgcattgctcccagctggtagggcagagctggaggttaatccctctcattatgttttta

SEQ ID NO: 44965 - DNA, 600 bp, Chicken  19866894284418_3
ttgtgagggctgcctcacaaagaccacccctttgtggggaaaagttttgttgaaagtttgcgcttgaacgtactttagagctggtgctcccgagtgctcggaaactgggaagtacctcggcaaggagctgcctcgtctgggaggatgggggctgtgaggggagaaatttaaaaagtcacttaatttctgtgtaaatttaggaactactagtcakaagtgtcatcaaattcaacacttttttttcttccgaaaatctgcaaattagaaataaaacaccawttgtgggatttctagggtgtrttgaagtaataagattgtattctaatttgctttttttgcacaacttctggcttattaatgtttgttgaatgagattgtatacactgtgctgttacagaggtcagaaaagcaggaaaagatttagaatgtgtttttggactctgatcaacttgtgccttccaggttgatattgcagctctgaatcgttaatctaaaacagcattaaatcttcatccggcactgcattgctcccagctggtagggcagagctggaggttaatccctctcattatgtttttatgattaacagctgggcagtca

SEQ ID NO: 44966 - DNA, 600 bp, Chicken  19866894284419_1
atcgggtataaatgtgattgtgttctcaaatctccttaaaatggcactattattctcttcttagtgctccttatctctcaaacctctcacttgaggtcttttcaaaaagcattcatttaaaagtgtttttatcagccctttccatgtaaagtttaagccggagtacgaagatcatatcaatgttcaacaactgaaactggtttattgatagtacctagcacacaaaatacacttttcatgggactgtctttcaagtgaataaacataatgtgatcctctttatatactcagagaacattytttgcatatacagcgatgctgatttcctggaaagcacatgctcacaaaatgcaaggatygctcctttgctttggctcccagagatgcacctggtaaaaagcatatggttttactggaatcaggaagaaggtggatgtgcagacaagataaaaagctgcacaattctaccacccagaaccgtaggcactttgcttcaaaatcccacccagcagaaaggctaacgagcatagtccgtcacccggaggagcagaagttgttgaatgaaaagatgccatttttaacacagctgcttctctctta

SEQ ID NO: 44967 - DNA, 600 bp, Chicken  19866894284419_2
cttagtgctccttatctctcaaacctctcacttgaggtcttttcaaaaagcattcatttaaaagtgtttttatcagccctttccatgtaaagtttaagccggagtacgaagatcatatcaatgttcaacaactgaaactggtttattgatagtacctagcacacaaaatacacttttcatgggactgtctttcaagtgaataaacataatgtgatcctctttatatactcagagaacattytttgcatatacagcgatgctgatttcctggaaagcacatgctcacaaaatgcaaggatygctcctttgctttggctcccagagatgcacctggtaaaaagcatatggttttactggaatcaggaagaaggtggatgtgcagacaagataaaaagctgcacaattctaccacccagaaccgtaggcactttgcttcaaaatcccacccagcagaaaggctaacgagcatagtccgtcacccggaggagcagaagttgttgaatgaaaagatgccatttttaacacagctgcttctctcttaccttcttaacaactcttctttgtctgctagaaagtagctgatcaaacctagcaccacgt

SEQ ID NO: 44968 - DNA, 458 bp, Chicken  19866894284419_3
ggtgacacactggaacaggttgcccaaggaggttgtggatgccccatccctggaggcattcaaggccaggctggatgtggctctgggcagcctggtctggtggttggcgaccctgcacatagttggaactcaatggtcattgtggtccttttcaacccaggccattctacgattctttatgaaagttagtttttatgtttaccagggaagaactgagacttgaactgagagccaaaaggtttagttagagaaacacagtctctgccttgaagttttatataaatatatcgggacatatcrgaaaactttcttaaagaaaagcagtggaatctgacactacaaatgcaaacgccctcaattgcaaacacagccctcatttcagattaccaatttcaaaatgttatgtgaaaatccattgcaaacagtgacctcaaacaaaatttaacatctatagcaat

SEQ ID NO: 44969 - DNA, 599 bp, Chicken  19866894284420_1
  misc_feature (1)..(58): n is any nucleotide
nnnnnnnnnnnnnnnnnnnnnnnnnnnnnnnnnnnnnnnnnnnnnnnnnnnnnnnnnncaaggcatggtaattaccaaacccctttggttagtattatgcctgtgtgctgggtactgaaagcacagcatctctgctgctctggaagcctgttctttggtagcccttgttgttgtagctgtgctggcagaaatgtgtacagtgggccaggcaaaagagtctgcagaagatgaggacttgctgagctgtttgagctccagctctagcacacagatgtgtcccattgaaatatttgaccttcrtgctgtcacaagagggacaaatcaggcctaattttttaacccaaacttctggtatccttgtttgaaaggaagtcacgattggctaacccacaatgtatgctttgttagtcctggaaggaggtcactgaaggagcaaaatatttgcattgctcaaaacttttcagagctttaatattaaagacaaagctgtgatcagctgctttgttgaagtagggctcgtgtcatcacctggggctgcggccattttgctgagaagctggaagcaggcagaaggtgmacattaggtgctggcatagatc

SEQ ID NO: 44970 - DNA, 600 bp, Chicken  19866894284420_2
cccattgaaatatttgaccttcrtgctgtcacaagagggacaaatcaggcctaattttttaacccaaacttctggtatccttgtttgaaaggaagtcacgattggctaacccacaatgtatgctttgttagtcctggaaggaggtcactgaaggagcaaaatatttgcattgctcaaaacttttcagagctttaatattaaagacaaagctgtgatcagctgctttgttgaagtagggctcgtgtcatcacctggggctgcggccattttgctgagaagctggaagcaggcagaaggtgmacattaggtgctggcatagatctcagaactgctcctagttttgacgttgctcttcatgcacctctgaagcaaaatgtctcgatactaaatgctaagagtctgttctgcttctgcttgttctgcctgctaaactttgtctttgctttcaagaactgtgactgttggtgtctgtgcccaggtgataacattttatcagttgaaataaatttacaactcttgggcttggcctgtaaaagtctggggcttctggtaagctcaatcctcgtctggtactgatttgatgagggccttaaaacaaac

SEQ ID NO: 44971 - DNA, 600 bp, Chicken  19866894284424_1
cttgcagccaaagctagacagtaataaattattttttaaacttagcccgtgaagcggaggtgagaatttttggcaaagtattgatcagaccacagaaacacgagaaagagtgaatttattggtaggctgctactttattaattgaactttagggagtagtatgagctacctcaccacctgtcacacggccaggtaggcacagattcagggccacaggagacccaacaactaatgagcaactggactttgtgcttagcttatacacaagcactgagccttagctgtcacctttcctttcaragtcacagcctgaggttggacgtgtcaagaattgtgctgattttcttcttgcaaatcatatcaataagtaaaaacctctgtcaaaactccttcgatgggagtcctcaacaggytaaggacggcctgtagtgtcagcacacaccgtttggtacttatgatcttattttctgctcagtcacagtcaagggtcctgttaaacagccctgcaaggaactgtgtgggcccatttcatgttctggataagtagttactacaccgaggtcatatattagttgaaggatatcacttgcacgtacaagc

SEQ ID NO: 44972 - DNA, 600 bp, Chicken  19866894284424_2
atttattggtaggctgctactttattaattgaactttagggagtagtatgagctacctcaccacctgtcacacggccaggtaggcacagattcagggccacaggagacccaacaactaatgagcaactggactttgtgcttagcttatacacaagcactgagccttagctgtcacctttcctttcaragtcacagcctgaggttggacgtgtcaagaattgtgctgattttcttcttgcaaatcatatcaataagtaaaaacctctgtcaaaactccttcgatgggagtcctcaacaggytaaggacggcctgtagtgtcagcacacaccgtttggtacttatgatcttattttctgctcagtcacagtcaagggtcctgttaaacagccctgcaaggaactgtgtgggcccatttcatgttctggataagtagttactacaccgaggtcatatattagttgaaggatatcacttgcacgtacaagctgtaaaagtagaattttagaacagggtttgcatgtgtcatgaggtgggctataaagacttcttcaaatattctcaggacttcccaacagggaaccaagcctgccttctattaa

SEQ ID NO: 44973 - DNA, 600 bp, Chicken  19866894284424_3
agcctgccttctattaacattgctagcaaaacttacctcctttttttatacagtcagaatgaggttctaggtaataacaggattttgcttactggatgaaagttaaggtggggaaaaatacatccaggcacgggttttggcagagtggggtgctgctgtcaacagccacgagtgctgcgcttgcactacgcacttaacgctctaattacagctgcagatcctgagaggcaaagaatggttggattcgcttcggcttccctacagagctaagagtatcgatctctggtgggtggcttcagmcttcactaaacgggatgtggattttctactttgctgcttatttcctttcaggaaaattctataacataggagaccagaggggccatggagaagatcactgccaatttgtagactcgttcttagatggaaggacaggacagcaagacgatctaccagtcaaagacggtaattccttaagaatgtcactgcagcagtccttggcaattcctttgtttgtctgtttctttgtcctgccagtgaattgagggcccactgccagggtgggcaatgaacaagagctgccggctgtgtaggcagaag

SEQ ID NO: 44974 - DNA, 600 bp, Chicken  19866894284425_1
cagaaatcctaaatcttgaaccccatactgtgtagaagaaagagcacatcacctgttctcctgatatcttggaccttctcttccacatagtcacaaatcacaccagcatcttcactgtgccagcagctgtgaatcccagtgtcaggcctgatacactgccccagggagtgctctgtgcctctacactctacactgtccagatggatgggcccttggccttcaccgaaataagccattgccctggcttttgctgcaccactgcaatgagaaagagagtgactaatgtgcaataagcaagargcaggtgaaactgatgcaccagcatgtttgaaagagaaattacaagaaaaatgaatctcccagaaacagcttcagaaagaagtattcctcctgagagcgatttctatttgtaagatgcatgtaccagttatcttacctgaatcccagttgcctgcaaactactgtagcatctctgtctgtccagccgtcatcacagacgctgccccactgtccattcaggaatacttcaacccgtccctccttggtgctttctccatccaccagccgcacaggaggtcctacaggataaaaacacagggg

SEQ ID NO: 44975 - DNA, 599 bp, Chicken  19866894284431_1
  misc_feature (1)..(11): n is any nucleotide
nnnnnnnnnnntggcacttctgtagctcttgttgtaagagactatttcacatgcaatatagctgtgcttgttctccagcgttagagctgaaagccagatgctgggtgggccacgaaacattctgtgggaattctgaaagggaagcagtttacctggtgggtattaaaaggatgagcaacgacatttccaaataagcttgcctaaaagctaagtaattttacctgctagcaaatcttgcctactactggcaagcactttctacaggaagacaacatgaaaaccaaaatatcagagggttcrtggttgaagtaccatttgccttgtgagaagacaacacacagtgactgagaaacaraggaaaaaaagagaaaagtgagcctgtctcagggtttagggcattcacctggaaaaggacataactaaattctggccctgacactgcaagcctatgattattgctacaaggtacaacagagtcaacagkaggggggaggggggaaaaaaagtccttccacccaccttgtatctctcaggggacaaatggtgtcagccagcacggccacagcacacacaccacgctatcgggatgcctgaggtca

SEQ ID NO: 44976 - DNA, 600 bp, Chicken  19866894284431_2
atatagctgtgcttgttctccagcgttagagctgaaagccagatgctgggtgggccacgaaacattctgtgggaattctgaaagggaagcagtttacctggtgggtattaaaaggatgagcaacgacatttccaaataagcttgcctaaaagctaagtaattttacctgctagcaaatcttgcctactactggcaagcactttctacaggaagacaacatgaaaaccaaaatatcagagggttcrtggttgaagtaccatttgccttgtgagaagacaacacacagtgactgagaaacaraggaaaaaaagagaaaagtgagcctgtctcagggtttagggcattcacctggaaaaggacataactaaattctggccctgacactgcaagcctatgattattgctacaaggtacaacagagtcaacagkaggggggaggggggaaaaaaagtccttccacccaccttgtatctctcaggggacaaatggtgtcagccagcacggccacagcacacacaccacgctatcgggatgcctgaggtcaaactctcactggcgctgcctcacaaggcatgttccctggcataagagcagctatgt

SEQ ID NO: 44977 - DNA, 600 bp, Chicken  19866894284431_3
ttccaaataagcttgcctaaaagctaagtaattttacctgctagcaaatcttgcctactactggcaagcactttctacaggaagacaacatgaaaaccaaaatatcagagggttcrtggttgaagtaccatttgccttgtgagaagacaacacacagtgactgagaaacaraggaaaaaaagagaaaagtgagcctgtctcagggtttagggcattcacctggaaaaggacataactaaattctggccctgacactgcaagcctatgattattgctacaaggtacaacagagtcaacagkaggggggaggggggaaaaaaagtccttccacccaccttgtatctctcaggggacaaatggtgtcagccagcacggccacagcacacacaccacgctatcgggatgcctgaggtcaaactctcactggcgctgcctcacaaggcatgttccctggcataagagcagctatgtattaatggcacacatcacgtactactggtaactataggccatcccacacgcagcctcaccgtaggtcagattacttctgccggtgtcaacgcgctctgctgatgttcaacaggaaatagcagaaaagat

SEQ ID NO: 44978 - DNA, 600 bp, Chicken  19866894284436_1
ttcccttagtggttttatagaacacctgagtttctgtttatgtctgttactatcaactttatgtttggaacattatatgcctgtatatacaagatagctcctttctcaacatggcatttcctgtgttgtgcatttattttatgaaatccatgaaaaattaaccttaaggcttgttcacgagcttctgtttgaatgattttcctagtttaccctgtaaatgttttcagttccttgaaagtgttaccagactgacagaaggcctaaacatttatttaatctttatgtctgagtgtcctgagmtttttttccttccagtcygtacttgttataaaaggctgtattttatgcaaatttaaacacagcaactacgagcatttttatgaagaaacaatactgctgacagtatgtttggagcaggcaaccttagttgaggtctttgctttcagggaaggttttgtttctagagtgcccascagagagagaaacttcgttgttctgtctgtgctcccatcakcattcagtagtttttgtttccttagtgttcttgtccatgaagaagatgctgttttaaagttgtacaatctgactttgaagttctct

SEQ ID NO: 44979 - DNA, 600 bp, Chicken  19866894284436_2
agaacacctgagtttctgtttatgtctgttactatcaactttatgtttggaacattatatgcctgtatatacaagatagctcctttctcaacatggcatttcctgtgttgtgcatttattttatgaaatccatgaaaaattaaccttaaggcttgttcacgagcttctgtttgaatgattttcctagtttaccctgtaaatgttttcagttccttgaaagtgttaccagactgacagaaggcctaaacatttatttaatctttatgtctgagtgtcctgagmtttttttccttccagtcygtacttgttataaaaggctgtattttatgcaaatttaaacacagcaactacgagcatttttatgaagaaacaatactgctgacagtatgtttggagcaggcaaccttagttgaggtctttgctttcagggaaggttttgtttctagagtgcccascagagagagaaacttcgttgttctgtctgtgctcccatcakcattcagtagtttttgtttccttagtgttcttgtccatgaagaagatgctgttttaaagttgtacaatctgactttgaagttctctggtgagaagcccttgaaa

SEQ ID NO: 44980 - DNA, 600 bp, Chicken  19866894284436_3
ttcacgagcttctgtttgaatgattttcctagtttaccctgtaaatgttttcagttccttgaaagtgttaccagactgacagaaggcctaaacatttatttaatctttatgtctgagtgtcctgagmtttttttccttccagtcygtacttgttataaaaggctgtattttatgcaaatttaaacacagcaactacgagcatttttatgaagaaacaatactgctgacagtatgtttggagcaggcaaccttagttgaggtctttgctttcagggaaggttttgtttctagagtgcccascagagagagaaacttcgttgttctgtctgtgctcccatcakcattcagtagtttttgtttccttagtgttcttgtccatgaagaagatgctgttttaaagttgtacaatctgactttgaagttctctggtgagaagcccttgaaacctgactcttcctgagtgacttgtttgatgtgtatttatgtgcatacattttatatctatatgtatatccgtacgcgtataattttgacaacaaagctgctatttctttgtcatgttaaaaaaaacatgcagttatcctatccccaaagagatat

SEQ ID NO: 44981 - DNA, 600 bp, Chicken  19866894284436_4
taaatgttttcagttccttgaaagtgttaccagactgacagaaggcctaaacatttatttaatctttatgtctgagtgtcctgagmtttttttccttccagtcygtacttgttataaaaggctgtattttatgcaaatttaaacacagcaactacgagcatttttatgaagaaacaatactgctgacagtatgtttggagcaggcaaccttagttgaggtctttgctttcagggaaggttttgtttctagagtgcccascagagagagaaacttcgttgttctgtctgtgctcccatcakcattcagtagtttttgtttccttagtgttcttgtccatgaagaagatgctgttttaaagttgtacaatctgactttgaagttctctggtgagaagcccttgaaacctgactcttcctgagtgacttgtttgatgtgtatttatgtgcatacattttatatctatatgtatatccgtacgcgtataattttgacaacaaagctgctatttctttgtcatgttaaaaaaaacatgcagttatcctatccccaaagagatatttgatcttcaaaaatgaatcattagtttgacatatgtcttc

SEQ ID NO: 44982 - DNA, 599 bp, Chicken  19866894284440_1
  misc_feature (1)..(199): n is any nucleotide
nnnnnnnnnnnnnnnnnnnnnnnnnnnnnnnnnnnnnnnnnnnnnnnnnnnnnnnnnnnnnnnnnnnnnnnnnnnnnnnnnnnnnnnnnnnnnnnnnnnnnnnnnnnnnnnnnnnnnnnnnnnnnnnnnnnnnnnnnnnnnnnnnnnnnnnnnnnnnnnnnnnnnnnnnnnnnnnnnnnnnnnnnnnnnnnnnnnnnnnccctcgtcttgtagacagtatagttaacgtatatcaagtaacaaagcttattttaatttttaatgttctctattaaaatgtattaaaaagagggcaaaaamccccacaaaactagtaggatattgaaacaaacagatcacgctggttygatggcagtggttgtaattctcactgagctctcaaggtgctcatcagagatgtttgatgacattttgctcctcctgtgcttcatccttcaaaacagttgttcaccaacatacacactgccaaaagtgatgacatgaatgagctgtgacactgacgtgaggggtatttctctctggtaaaagatggctgataatggtctggtgaagtgacacagtcacatttttgtttccagctccaaacattccgtttgaaa

SEQ ID NO: 44983 - DNA, 599 bp, Chicken  19866894284440_2
  misc_feature (1)..(152): n is any nucleotide
nnnnnnnnnnnnnnnnnnnnnnnnnnnnnnnnnnnnnnnnnnnnnnnnnnnnnnnnnnnnnnnnnnnnnnnnnnnnnnnnnnnnnnnnnnnnnnnnnnnnnnnnnnnnnnnnnnnnnnnnnnnnnnnnnnnnnnnnnnnnnnnnnnnnnnnnccctcgtcttgtagacagtatagttaacgtatatcaagtaacaaagcttattttaatttttaatgttctctattaaaatgtattaaaaagagggcaaaaamccccacaaaactagtaggatattgaaacaaacagatcacgctggttygatggcagtggttgtaattctcactgagctctcaaggtgctcatcagagatgtttgatgacattttgctcctcctgtgcttcatccttcaaaacagttgttcaccaacatacacactgccaaaagtgatgacatgaatgagctgtgacactgacgtgaggggtatttctctctggtaaaagatggctgataatggtctggtgaagtgacacagtcacatttttgtttccagctccaaacattccgtttgaaactttgcagataatgtatttatgctgactgaaamtggagttgcaaata

SEQ ID NO: 44984 - DNA, 600 bp, Chicken  19866894284440_3
agatcacgctggttygatggcagtggttgtaattctcactgagctctcaaggtgctcatcagagatgtttgatgacattttgctcctcctgtgcttcatccttcaaaacagttgttcaccaacatacacactgccaaaagtgatgacatgaatgagctgtgacactgacgtgaggggtatttctctctggtaaaagatggctgataatggtctggtgaagtgacacagtcacatttttgtttccagctccaaacattccgtttgaaactttgcagataatgtatttatgctgactgaaamtggagttgcaaataaaacaaaacagtgrtgrttttttgggcaatcttgaaacctgttcccaaattcctttaccaaacaggaaggcatggctgcatatttttgctgtttgcaggatgatgtttagccagtgtatcagaacccatccagtcactgtccatcaggtgagctgtccctgccccacaccccatccctgggctcagcccagagaggctcacggcgcaatgcagtccagttggtgctgakgggcagagctgccatgattgtgtggggcagggatggcctcagggacagctgggccag

SEQ ID NO: 44985 - DNA, 600 bp, Chicken  19866894284440_4
gtaattctcactgagctctcaaggtgctcatcagagatgtttgatgacattttgctcctcctgtgcttcatccttcaaaacagttgttcaccaacatacacactgccaaaagtgatgacatgaatgagctgtgacactgacgtgaggggtatttctctctggtaaaagatggctgataatggtctggtgaagtgacacagtcacatttttgtttccagctccaaacattccgtttgaaactttgcagataatgtatttatgctgactgaaamtggagttgcaaataaaacaaaacagtgrtgrttttttgggcaatcttgaaacctgttcccaaattcctttaccaaacaggaaggcatggctgcatatttttgctgtttgcaggatgatgtttagccagtgtatcagaacccatccagtcactgtccatcaggtgagctgtccctgccccacaccccatccctgggctcagcccagagaggctcacggcgcaatgcagtccagttggtgctgakgggcagagctgccatgattgtgtggggcagggatggcctcagggacagctgggccaggctgtattgagaccataggccatgggtt

SEQ ID NO: 44986 - DNA, 600 bp, Chicken  19866894284440_5
attctcactgagctctcaaggtgctcatcagagatgtttgatgacattttgctcctcctgtgcttcatccttcaaaacagttgttcaccaacatacacactgccaaaagtgatgacatgaatgagctgtgacactgacgtgaggggtatttctctctggtaaaagatggctgataatggtctggtgaagtgacacagtcacatttttgtttccagctccaaacattccgtttgaaactttgcagataatgtatttatgctgactgaaamtggagttgcaaataaaacaaaacagtgrtgrttttttgggcaatcttgaaacctgttcccaaattcctttaccaaacaggaaggcatggctgcatatttttgctgtttgcaggatgatgtttagccagtgtatcagaacccatccagtcactgtccatcaggtgagctgtccctgccccacaccccatccctgggctcagcccagagaggctcacggcgcaatgcagtccagttggtgctgakgggcagagctgccatgattgtgtggggcagggatggcctcagggacagctgggccaggctgtattgagaccataggccatgggttaga

SEQ ID NO: 44987 - DNA, 600 bp, Chicken  19866894284440_6
cagctccaaacattccgtttgaaactttgcagataatgtatttatgctgactgaaamtggagttgcaaataaaacaaaacagtgrtgrttttttgggcaatcttgaaacctgttcccaaattcctttaccaaacaggaaggcatggctgcatatttttgctgtttgcaggatgatgtttagccagtgtatcagaacccatccagtcactgtccatcaggtgagctgtccctgccccacaccccatccctgggctcagcccagagaggctcacggcgcaatgcagtccagttggtgctgakgggcagagctgccatgattgtgtggggcagggatggcctcagggacagctgggccaggctgtattgagaccataggccatgggttagatatgcctgccttagcagatacacaatgcatcagggtccagcactgccaggatggctattcgttatttctagctgcactggtcttgcctggcaggcagttgcctttgtaagactcttattccctgtaaatgaagcaacgacatttctttacaagtgacccagattatagcgctctttgcttcagagtaaatcttctagtgaaatccaaaggtg

SEQ ID NO: 44988 - DNA, 600 bp, Chicken  19866894284446_1
agttaatcctataatctgtgaattaataaattagcctcactactcccagccttcccaaataattctaccacaggctaaaaactaagtcatttaaaacctcatagtatctcccagagtaatttctaactattaaagagcagaagttagacttaagaaggtttttagactactttgttttgcatttgttgtcttcctgagtggttactgtaataagtccctgtactaactcaaaaaacggaaaccatccacagaagtccatgtgacatgaaaaagatactgctatggcccctgcagctatamctccagagggaggaggagagtccagcactgcaatatgcttccaacagcatcaacatgtggctggttacagacatttagccaaaacaaacagccctcagacctggacagaagtcctctttttgcccctttacccatctgggggaaattgggcaatgcaaacaacatgtcccctggaggttttatgtcaaggactcaaagactcagttgtgcttggtgcttctgcatggatcaggagaagaatttctctccttcctttttgtactaattcacttttctcagcatctggggcactgggatgag

SEQ ID NO: 44989 - DNA, 600 bp, Chicken  19866894284449_1
atgtcattcaattttcttgtacttatttttttaatttcaccccctcctgcttctgtttacctttcttaaggagaagctgatctatggtcagcaatcgtcttttctacagcagggatttaagtggcaccttcatctgcaggtgcccctaagagcatgatgggtccacaatcctagcactgcagcctcactctgctttacgtcctgaactgcccaagacttcatggtcatctctgccagtttggtttgcagtgcagcagagcacttactttatgaatataaaatcatgtacagatttcctgmcagctctttttcacagactttcacttctgcttcatgttcctttttccataggcctggcaacaaatgtggggtgttcaactgctctggctcatgtttttacattgcgtgtcagagtgggacagggtcarggtctgttactaaacaggggatactttacatgtatgtgttcttaggatgagttttgcatttaggctcttgagaaaacycccaggcaaaaattatcatggatatatcatttggagtccctacattggcccttgcggtgttttccatgccattaatactgggccatttgcactt

SEQ ID NO: 44990 - DNA, 600 bp, Chicken  19866894284449_2
ttcatctgcaggtgcccctaagagcatgatgggtccacaatcctagcactgcagcctcactctgctttacgtcctgaactgcccaagacttcatggtcatctctgccagtttggtttgcagtgcagcagagcacttactttatgaatataaaatcatgtacagatttcctgmcagctctttttcacagactttcacttctgcttcatgttcctttttccataggcctggcaacaaatgtggggtgttcaactgctctggctcatgtttttacattgcgtgtcagagtgggacagggtcarggtctgttactaaacaggggatactttacatgtatgtgttcttaggatgagttttgcatttaggctcttgagaaaacycccaggcaaaaattatcatggatatatcatttggagtccctacattggcccttgcggtgttttccatgccattaatactgggccatttgcacttgctgcatgtcccaccagcactctgctgcaacatacatgctattttccagtcaaactgacttgccagaatgggcaacttcaaatctgtgggtgtggattgctaatagttcccctgtccaagcagccctc

SEQ ID NO: 44991 - DNA, 525 bp, Chicken  19866894284449_3
ctgcccaagacttcatggtcatctctgccagtttggtttgcagtgcagcagagcacttactttatgaatataaaatcatgtacagatttcctgmcagctctttttcacagactttcacttctgcttcatgttcctttttccataggcctggcaacaaatgtggggtgttcaactgctctggctcatgtttttacattgcgtgtcagagtgggacagggtcarggtctgttactaaacaggggatactttacatgtatgtgttcttaggatgagttttgcatttaggctcttgagaaaacycccaggcaaaaattatcatggatatatcatttggagtccctacattggcccttgcggtgttttccatgccattaatactgggccatttgcacttgctgcatgtcccaccagcactctgctgcaacatacatgctattttccagtcaaactgacttgccagaatgggcaacttcaaatctgtgggtgtggattgctaatagttcccctgtccaagcagccctccca

SEQ ID NO: 44992 - DNA, 600 bp, Chicken  19866894284451_1
tggtagctactcacactcctttgataggtttgcttcacaagttgctcttcatctccctgtggtgaaaaaaagataagtataatactacttgcaagagaaaatggaaaaacaataatcaaatatttttaagaaaggactaccattgacgaccgaacctcatagcatgaaaagtttagctctatgcttaaccaagtaatgttccatagaagacatggattctggcatatctgggcctacttctgtgctctcttaactctaacagaaggaccagagtagaagaaaacctaagtaacagcttcygtttgtgttgaatgcaggtgggattgagcccaggcagatgctaggaaatacaacaatgcattaattcagaagaaaaagcatgctgacctaaaaggtataatctgtaggaaggaggcataaactgttgggagttggatgctttgcagaggtccattccaacctcaaatatcctgtgaatgtggtataatttactaaatttaattctgcccaaaataaataggaacctgccttacctcaccaggaggtgaggtaagaacccacctgacaagtgggctcttagccaagatgaaaccttcttga

SEQ ID NO: 44993 - DNA, 600 bp, Chicken  19866894284454_1
gccccagcgctgccctgcccgctggggacaggccgtgggctcgggctcttcgctaaacgtgaccgggctgcacagcttcatggagtaaggctgcgtgtagaagcggcacgtgtgggagcccgctccggagtgtggtgcctcggcgcggtctgccggtgctgctctctaataccgtgaaccctccgagaggcctgcttcttccacggggagctctttggggctgcaacagctctgccctgcatcctgaggagactgtggtgtagggatgagcccacttgtctcccactggctttcctgctmattccgattgttttgtgccaagcacatagaaaccctggtttccttgtgtgtttgtttgtttgtttttcctctatttctaaagataaascttaatttctattaaaacactgaattatgcattttttgcagtacaattctcttgggtaaaacaattatttttaaatttgtttttgtttaatacaggagttgctcagggtgatgaggacgatcgatgacagaatcgtccatgaattaaacactacaattcctacagcctcctttgtagggaaagttgacgccasccaaacatgtaaagagctc

SEQ ID NO: 44994 - DNA, 600 bp, Chicken  19866894284454_2
ggctgcgtgtagaagcggcacgtgtgggagcccgctccggagtgtggtgcctcggcgcggtctgccggtgctgctctctaataccgtgaaccctccgagaggcctgcttcttccacggggagctctttggggctgcaacagctctgccctgcatcctgaggagactgtggtgtagggatgagcccacttgtctcccactggctttcctgctmattccgattgttttgtgccaagcacatagaaaccctggtttccttgtgtgtttgtttgtttgtttttcctctatttctaaagataaascttaatttctattaaaacactgaattatgcattttttgcagtacaattctcttgggtaaaacaattatttttaaatttgtttttgtttaatacaggagttgctcagggtgatgaggacgatcgatgacagaatcgtccatgaattaaacactacaattcctacagcctcctttgtagggaaagttgacgccasccaaacatgtaaagagctctaccagtctgtaagtgtctgttcctttaaytgctgctcactttcggagatgttacratgagcactggccactgaagtggagaacctca

SEQ ID NO: 44995 - DNA, 600 bp, Chicken  19866894284454_3
cccactggctttcctgctmattccgattgttttgtgccaagcacatagaaaccctggtttccttgtgtgtttgtttgtttgtttttcctctatttctaaagataaascttaatttctattaaaacactgaattatgcattttttgcagtacaattctcttgggtaaaacaattatttttaaatttgtttttgtttaatacaggagttgctcagggtgatgaggacgatcgatgacagaatcgtccatgaattaaacactacaattcctacagcctcctttgtagggaaagttgacgccasccaaacatgtaaagagctctaccagtctgtaagtgtctgttcctttaaytgctgctcactttcggagatgttacratgagcactggccactgaagtggagaacctcagtttctaaggaaaaggctgacctgatagattgtgctttaatgtgttcatagctggcgtgcttgacttgcctccacagctaaaccacrtgcatgtaaaggctgccttgctttaaagtcacattgtrgactggcttattctgcagtactgttcttttggggtgtacttccaggtggcttgcttctttctttgaaa

SEQ ID NO: 44996 - DNA, 600 bp, Chicken  19866894284454_4
aaccctggtttccttgtgtgtttgtttgtttgtttttcctctatttctaaagataaascttaatttctattaaaacactgaattatgcattttttgcagtacaattctcttgggtaaaacaattatttttaaatttgtttttgtttaatacaggagttgctcagggtgatgaggacgatcgatgacagaatcgtccatgaattaaacactacaattcctacagcctcctttgtagggaaagttgacgccasccaaacatgtaaagagctctaccagtctgtaagtgtctgttcctttaaytgctgctcactttcggagatgttacratgagcactggccactgaagtggagaacctcagtttctaaggaaaaggctgacctgatagattgtgctttaatgtgttcatagctggcgtgcttgacttgcctccacagctaaaccacrtgcatgtaaaggctgccttgctttaaagtcacattgtrgactggcttattctgcagtactgttcttttggggtgtacttccaggtggcttgcttctttctttgaaaaatgagtgctagcatggttctgtggtgctcaaaaacacttgttcatatg

SEQ ID NO: 44997 - DNA, 600 bp, Chicken  19866894284454_5
tgtttgtttttcctctatttctaaagataaascttaatttctattaaaacactgaattatgcattttttgcagtacaattctcttgggtaaaacaattatttttaaatttgtttttgtttaatacaggagttgctcagggtgatgaggacgatcgatgacagaatcgtccatgaattaaacactacaattcctacagcctcctttgtagggaaagttgacgccasccaaacatgtaaagagctctaccagtctgtaagtgtctgttcctttaaytgctgctcactttcggagatgttacratgagcactggccactgaagtggagaacctcagtttctaaggaaaaggctgacctgatagattgtgctttaatgtgttcatagctggcgtgcttgacttgcctccacagctaaaccacrtgcatgtaaaggctgccttgctttaaagtcacattgtrgactggcttattctgcagtactgttcttttggggtgtacttccaggtggcttgcttctttctttgaaaaatgagtgctagcatggttctgtggtgctcaaaaacacttgttcatatgtcatctgcatgcgtatctttgacttt

SEQ ID NO: 44998 - DNA, 600 bp, Chicken  19866894284454_6
taatacaggagttgctcagggtgatgaggacgatcgatgacagaatcgtccatgaattaaacactacaattcctacagcctcctttgtagggaaagttgacgccasccaaacatgtaaagagctctaccagtctgtaagtgtctgttcctttaaytgctgctcactttcggagatgttacratgagcactggccactgaagtggagaacctcagtttctaaggaaaaggctgacctgatagattgtgctttaatgtgttcatagctggcgtgcttgacttgcctccacagctaaaccacrtgcatgtaaaggctgccttgctttaaagtcacattgtrgactggcttattctgcagtactgttcttttggggtgtacttccaggtggcttgcttctttctttgaaaaatgagtgctagcatggttctgtggtgctcaaaaacacttgttcatatgtcatctgcatgcgtatctttgacttttaccatcagatcaagttggtagctactgcctaaagcagtgctgcttctaacatatggattgtagagacaaagggagttctgtaggcatagcaatactttgattctagaaagtctctctt

SEQ ID NO: 44999 - DNA, 600 bp, Chicken  19866894284454_7
gacagaatcgtccatgaattaaacactacaattcctacagcctcctttgtagggaaagttgacgccasccaaacatgtaaagagctctaccagtctgtaagtgtctgttcctttaaytgctgctcactttcggagatgttacratgagcactggccactgaagtggagaacctcagtttctaaggaaaaggctgacctgatagattgtgctttaatgtgttcatagctggcgtgcttgacttgcctccacagctaaaccacrtgcatgtaaaggctgccttgctttaaagtcacattgtrgactggcttattctgcagtactgttcttttggggtgtacttccaggtggcttgcttctttctttgaaaaatgagtgctagcatggttctgtggtgctcaaaaacacttgttcatatgtcatctgcatgcgtatctttgacttttaccatcagatcaagttggtagctactgcctaaagcagtgctgcttctaacatatggattgtagagacaaagggagttctgtaggcatagcaatactttgattctagaaagtctctcttaaacttgtaacacagttttttttaatttgatgtctgac

SEQ ID NO: 45000 - DNA, 600 bp, Chicken  19866894284457_1
cttagcaattgagttacttcctctggccaacttgaagtatacgagtgaactgcacatacacttagagacaattaaattcactgggtaaaaaataaacacacctagatttttctagttgccggtatttcaggcacattccctgctctttccagtcactgatgcagaccaaaatgtcctgcgacctgcgactctttttcaaattcatggcacccataccattcttccatatcagttcatcttgttgcttacacactgtcaacagtttacgggctggttcggcccagttccatgactagcagrgtggagagattttgcaaaatccgcgcctccagaaaagggaaacaggggaccccaaaataattaaaaacagcagcaacaatatgaggagaaacaaactaattcactaactacgttatcagaatgcaagataacacaccataatacaatataataagaattgaagcaaataaataaaatataatgagagagagtatctgaaaggccttacagtagtgctgagacaatgcatgcggtctagacgagagccgagggaagaagaaaaagggtatcagatgactttgccagaggttatatctcctc

SEQ ID NO: 45001 - DNA, 600 bp, Chicken  19866894284457_2
agcccactggggaatgggggaatgtcacttcttttcttctggacaggtgcccagaactggagcattaacactttaactcccagtgcactacgtgatgttatgatgtggaataccagtaaccaaaaatcataaagccatgacacacatacacatacagccctgtgattcatggccttttgtccattttctgcaacttaaatattgcagcatgtgccttggttcctctatgttctagcatctgtacctatctagggctcgtaggcatccctccgttgttcactctccacactcccattatayaaccccctctctatttgaaggcacctaaacctatggatgccatgactcacagatctttttctaattgctgacacttagtcatatgtagaaaaagtgagattacacagaaaatatgaaacaacaatttttagtaagaagattgcaatgatcaggcatttggcaaacacattgacagtttatttacacacgatctatcccttgtattcacccttccttctatttttctacagttctctgctctgacccacaccttttcccctttggtctcttcccaaaacatcttacaataagttttttcac

SEQ ID NO: 45002 - DNA, 600 bp, Chicken  19866894284457_3
atatgaaacaacaatttttagtaagaagattgcaatgatcaggcatttggcaaacacattgacagtttatttacacacgatctatcccttgtattcacccttccttctatttttctacagttctctgctctgacccacaccttttcccctttggtctcttcccaaaacatcttacaataagttttttcactggcccagtgtccctcctcaaggatcacataatattcatgttagtcttgattcaccctccttaccatttagaaatttcaagctgaccttcttcaaggctaggctatgccygagttgttttgttaatgatctatatgtcaatggatgaagagttcaggtcttcattactgcctctgtcatcacctgcttcttaggtttgtatatccacatgtttaatttatcactttttttttttactcattatttcatttaagctgagtagtccttaaatagagarattaatgaagcagaagctctcatattccacttaccgtaagttcagaatcctgaggtctagaacagccaggactaataacgtaaagccatgtttgccagactacagtagcacaccatsaagaactgcaagaactt

SEQ ID NO: 45003 - DNA, 600 bp, Chicken  19866894284457_4
acatcttacaataagttttttcactggcccagtgtccctcctcaaggatcacataatattcatgttagtcttgattcaccctccttaccatttagaaatttcaagctgaccttcttcaaggctaggctatgccygagttgttttgttaatgatctatatgtcaatggatgaagagttcaggtcttcattactgcctctgtcatcacctgcttcttaggtttgtatatccacatgtttaatttatcactttttttttttactcattatttcatttaagctgagtagtccttaaatagagarattaatgaagcagaagctctcatattccacttaccgtaagttcagaatcctgaggtctagaacagccaggactaataacgtaaagccatgtttgccagactacagtagcacaccatsaagaactgcaagaacttcttattaagggcaggaaaaccttgagccaaagttgaccctggcacctacagtattcttgctgatgaaacatggtcctgtgggctctgagcacagcagaggccccagagatagtaacgggggctacagacagcctgaacatagaaagcaataagactgggatgtcat

SEQ ID NO: 45004 - DNA, 600 bp, Chicken  19866894284457_5
aaggctaggctatgccygagttgttttgttaatgatctatatgtcaatggatgaagagttcaggtcttcattactgcctctgtcatcacctgcttcttaggtttgtatatccacatgtttaatttatcactttttttttttactcattatttcatttaagctgagtagtccttaaatagagarattaatgaagcagaagctctcatattccacttaccgtaagttcagaatcctgaggtctagaacagccaggactaataacgtaaagccatgtttgccagactacagtagcacaccatsaagaactgcaagaacttcttattaagggcaggaaaaccttgagccaaagttgaccctggcacctacagtattcttgctgatgaaacatggtcctgtgggctctgagcacagcagaggccccagagatagtaacgggggctacagacagcctgaacatagaaagcaataagactgggatgtcatagttccagaggatcagatgcaaaaggagacagggtcagaaaaaaaaacatgtagtcaaggctgcaccatgagtgctaagtccatccactagactgaaactgagacaaggtgcaacac

SEQ ID NO: 45005 - DNA, 600 bp, Chicken  19866894284459_1
taaattccccttaactgcaagatagaaggggattcgtcaccaatattgatttttcttgcacatatgtggagttgctttggcaattagccttggaattgctgtttctttcctgtaaatgaaattttagttgcagacttaaggaaaggaaattgggaaaagaaatattgagaaaggaaaaggcaatttgtagagaaagcatacactgtacaaaacacgtgcctctctccctctaaatgtaggctgggaggttggcagggctgggtagagtcctatgggggtttgtgagtacatttatcttarttgtgttcacgtggctgtggaatgatttgatctggagatgactgatatctgatttttatgtgcgtttctgacagatgtgaaggacacacagagcagggaatggattggatgtatgtacggagttgtggaagrgattcctaatgctgtaacatagtcaggtattaaatctccaaaagaaacaggcaaattatgcatctaactacttatcatgtaaacttggagtgaaagtggatgatactcatttcttggtttacgagcaccagagaggcatgtcataaaagggagaataatatgattaaa

SEQ ID NO: 45006 - DNA, 600 bp, Chicken  19866894284459_2
gacttaaggaaaggaaattgggaaaagaaatattgagaaaggaaaaggcaatttgtagagaaagcatacactgtacaaaacacgtgcctctctccctctaaatgtaggctgggaggttggcagggctgggtagagtcctatgggggtttgtgagtacatttatcttarttgtgttcacgtggctgtggaatgatttgatctggagatgactgatatctgatttttatgtgcgtttctgacagatgtgaaggacacacagagcagggaatggattggatgtatgtacggagttgtggaagrgattcctaatgctgtaacatagtcaggtattaaatctccaaaagaaacaggcaaattatgcatctaactacttatcatgtaaacttggagtgaaagtggatgatactcatttcttggtttacgagcaccagagaggcatgtcataaaagggagaataatatgattaaaattaatgtaaaatactatgggaagcataactttcaagtttcatttttgcaatgctgggacttctaagtctaactagaataaaataatctcagagcacatcgctttccgctgtaactacactcacagaaatta

SEQ ID NO: 45007 - DNA, 600 bp, Chicken  19866894284459_3
ctgtaactacactcacagaaattaatgctcctggaaatgagcagtttcttgaacaacagcactgtaactgatcactaactggctccagcaaacactcagcagaatcgctcagctgccccacattcgttatgtggtacactaagctcctatgcaataaacacaatgaataaaatacagaatttctctaaccataaaatcatgactaattggtaacccctggaatagcaaaattcaggaaagaagtcacacttcaggttgaatattaggaaaaaattgttctccaaaagagcagtggtgcaycggcacagctgcccagggagtggtgcggccaccrtccctgaggtgctccagaactgtggggatgtggtactgagggacrtggtgatgggcatggtggggtggrttggggttggactggatgatcttagtggtttttccaaccttaatgattctacagttccatgaatagccccagtaacgctaccccagccagccatccctcctacaggccatttgctcacttggcttgtcacacactgctcttccartccaccacagcacatcagccacgagttctattattctcatataagttttgta

SEQ ID NO: 45008 - DNA, 600 bp, Chicken  19866894284459_4
aaatgagcagtttcttgaacaacagcactgtaactgatcactaactggctccagcaaacactcagcagaatcgctcagctgccccacattcgttatgtggtacactaagctcctatgcaataaacacaatgaataaaatacagaatttctctaaccataaaatcatgactaattggtaacccctggaatagcaaaattcaggaaagaagtcacacttcaggttgaatattaggaaaaaattgttctccaaaagagcagtggtgcaycggcacagctgcccagggagtggtgcggccaccrtccctgaggtgctccagaactgtggggatgtggtactgagggacrtggtgatgggcatggtggggtggrttggggttggactggatgatcttagtggtttttccaaccttaatgattctacagttccatgaatagccccagtaacgctaccccagccagccatccctcctacaggccatttgctcacttggcttgtcacacactgctcttccartccaccacagcacatcagccacgagttctattattctcatataagttttgtaaacttacttccaaatttttatcttgattctgttc

SEQ ID NO: 45009 - DNA, 600 bp, Chicken  19866894284459_5
tggctccagcaaacactcagcagaatcgctcagctgccccacattcgttatgtggtacactaagctcctatgcaataaacacaatgaataaaatacagaatttctctaaccataaaatcatgactaattggtaacccctggaatagcaaaattcaggaaagaagtcacacttcaggttgaatattaggaaaaaattgttctccaaaagagcagtggtgcaycggcacagctgcccagggagtggtgcggccaccrtccctgaggtgctccagaactgtggggatgtggtactgagggacrtggtgatgggcatggtggggtggrttggggttggactggatgatcttagtggtttttccaaccttaatgattctacagttccatgaatagccccagtaacgctaccccagccagccatccctcctacaggccatttgctcacttggcttgtcacacactgctcttccartccaccacagcacatcagccacgagttctattattctcatataagttttgtaaacttacttccaaatttttatcttgattctgttctcctagagattatttatccttaatttccatgctgatctataaaga

SEQ ID NO: 45010 - DNA, 600 bp, Chicken  19866894284459_6
atcgctcagctgccccacattcgttatgtggtacactaagctcctatgcaataaacacaatgaataaaatacagaatttctctaaccataaaatcatgactaattggtaacccctggaatagcaaaattcaggaaagaagtcacacttcaggttgaatattaggaaaaaattgttctccaaaagagcagtggtgcaycggcacagctgcccagggagtggtgcggccaccrtccctgaggtgctccagaactgtggggatgtggtactgagggacrtggtgatgggcatggtggggtggrttggggttggactggatgatcttagtggtttttccaaccttaatgattctacagttccatgaatagccccagtaacgctaccccagccagccatccctcctacaggccatttgctcacttggcttgtcacacactgctcttccartccaccacagcacatcagccacgagttctattattctcatataagttttgtaaacttacttccaaatttttatcttgattctgttctcctagagattatttatccttaatttccatgctgatctataaagaaattcctaagacaacacgcagcaa

SEQ ID NO: 45011 - DNA, 554 bp, Chicken  19866894284459_7
cttcaggttgaatattaggaaaaaattgttctccaaaagagcagtggtgcaycggcacagctgcccagggagtggtgcggccaccrtccctgaggtgctccagaactgtggggatgtggtactgagggacrtggtgatgggcatggtggggtggrttggggttggactggatgatcttagtggtttttccaaccttaatgattctacagttccatgaatagccccagtaacgctaccccagccagccatccctcctacaggccatttgctcacttggcttgtcacacactgctcttccartccaccacagcacatcagccacgagttctattattctcatataagttttgtaaacttacttccaaatttttatcttgattctgttctcctagagattatttatccttaatttccatgctgatctataaagaaattcctaagacaacacgcagcaaaaattttcaactctacattagacaaaccatgcagattattacagaaagcatagcttggaaaatccctaagctactgtaattaacctatttacaccttaa

SEQ ID NO: 45012 - DNA, 600 bp, Chicken  19866894284461_1
tgggagagatgaaacacaaaacagggtttacagctatagcattagggaaggggtggtgtttcttcattgcaagacactactgagccttgcagttaaagtagaggcactttccccagggttcaaatgccactgtatgcttactgcacattaacactgaagcaagttaagtgaaccaatttaggtatgtcctacaggtaaaaggacattggagaaatcttgaatgctttagaatcatagaagcatggagtatcccaagttggaagggacccacaatgccttccaagcactattcttccttcyttgcaaatgttactttgaaagactactagcaaggtacattctgaattctaaagatatcaagttttgcttcaaactgacatattggtttcaaaattcaaataaaataacaggccatycacacatgcacaaagcagctgtctgcctttagtcatttagtcatgtacaatgacttaatagatatccctatggaaaaacacaggttctgttatctcaatttatactaatcacaataatttctctggcaatcatttataatagccattgccaatcagttattaaaagaagttaacactataaata

SEQ ID NO: 45013 - DNA, 600 bp, Chicken  19866894284461_2
ggttcaaatgccactgtatgcttactgcacattaacactgaagcaagttaagtgaaccaatttaggtatgtcctacaggtaaaaggacattggagaaatcttgaatgctttagaatcatagaagcatggagtatcccaagttggaagggacccacaatgccttccaagcactattcttccttcyttgcaaatgttactttgaaagactactagcaaggtacattctgaattctaaagatatcaagttttgcttcaaactgacatattggtttcaaaattcaaataaaataacaggccatycacacatgcacaaagcagctgtctgcctttagtcatttagtcatgtacaatgacttaatagatatccctatggaaaaacacaggttctgttatctcaatttatactaatcacaataatttctctggcaatcatttataatagccattgccaatcagttattaaaagaagttaacactataaatacggttctttattacttctggtattacccttctcatccctggtagcactgtacctgaaagaactgctgctttccaaaaactaacaacaataaaaaaatgcacacttaagtttaaaaa

SEQ ID NO: 45014 - DNA, 413 bp, Chicken  19866894284461_3
tttccaaaaactaacaacaataaaaaaatgcacacttaagtttaaaaacttacagaacagacagcaatgctttcatatgtactatcagactgccagcttggtttgagctcaacgtcttaccaacctcagtttgtcttctaccaattccctaaagaggtttacttggcttgcttaaatgcagttggacttcggataactagacagcctccttcagaatcaactgggggaagggtgtgagcactatacaaggaacacaggaccctgctggaatctaacatcatttacctttttggcctctcrttgaggcttgtactacgagccctgaaactgtccttctcaggtgtgtcatcaaaggagagcagcacattggagcgcaaaccctgtcaatcgagacaaacagatacaagttccaa

SEQ ID NO: 45015 - DNA, 600 bp, Chicken  19866894284462_1
tgaagctacagctgaattttaggagaggtgtattagttcataaatggggtactttgcctggcctgaatttaatagacttgctgttggatccaagaggaaatatgtaataacttttagtcaccagtgctgtccctcaaatatttgtattttgttgtcccagttgttcattttaccttgtaaagggtttagagaagtttggtccgatgcgtatcaaaggccttttctgatacgtgctcttattgctttccatttgagatcaaatgagtgacttcagatgacagccctggcatttgtatattkgaggtcttgacggagggtttcaatcctgggatttacttctttctttttacagaagctcttgagagtatattgcaaatcctgtttattcattgatgcatttaatgagatgaagtgtgagctgaaggagacttgcttcccacagattgagtggtttcttgcttttcattgggcagccttggatattttttatgctataatttttacaattttttttaacatcttcaacaaatgtgttgcataaactgcttagtacaccaacatcaactttggaaataagagagaagattaagagccggctgt

SEQ ID NO: 45016 - DNA, 600 bp, Chicken  19866894284465_1
ttccatctgcggcagtttacatacagggggcgattctagcaaggaagcattttaacttctgggaccagaaacatttcttggttgcatataactaattgttggggatggtggaaatacatgtaacaaagcccttagaaaaagctactgagcacacccttggaaacagacaaggcagaaagagagcattacacccaggaagctcacatctgcaagagcatgtttaatccaatggctcctcactaacacaggttaagtacttaagtgctgttagaagaaagaaacagacactgctcctactaygtgcctatctgctctctcacaggaatgcattagtctgttcacttcatttcaacaattctgaaatgcagatttctccggttatgattctaaagacagagaacagtcctctgtgtcacagtacgttacactggctacaattgctcagggctgttatgcttggaaatggagatgatgcaatgagccacagaactcattcctacaggctcactgacaaaatgttttccaagttaaattgtaagtcctaacaggtttccataaagagaagcaggactaaaacccccaccgctttatctcagtcca

SEQ ID NO: 45017 - DNA, 599 bp, Chicken  19866894284466_1
  misc_feature (1)..(45): n is any nucleotide
nnnnnnnnnnnnnnnnnnnnnnnnnnnnnnnnnnnnnnnnnnnnntttaatactcataagtccttttacagtttcaaaaggtacctttggttttattactttctgtcaagcataaaaattttttttgatctcactaagcaataataatttataacgcaaaacacatggcacaaatgtgtaaatggcacttttagaaaagaaattataaacaacttggttaagtttgcgtacttctaccaatttcttgtgtatgaaagatattacagctttgtagctataaagcaatctttcccctccccmaaaaataatgaagtaaacaacagcagttttcaggctaagccacgtgcaacraagctttaagactcatgtcagtacttgacttataactagatgtggaaagtactgtttgcttgtacacatctcaagtttacttgaaggcaaacacatttgtgcatagtagcaatgcgttgttttcctatttttgaaactctggctcttaaagaaaaaacaaaataaaatcataatctcagaatctacaaggaatagtrcagagaaaaccagttctcccctcgccccttacaaatgctttgagatctgaa

SEQ ID NO: 45018 - DNA, 600 bp, Chicken  19866894284466_2
actcataagtccttttacagtttcaaaaggtacctttggttttattactttctgtcaagcataaaaattttttttgatctcactaagcaataataatttataacgcaaaacacatggcacaaatgtgtaaatggcacttttagaaaagaaattataaacaacttggttaagtttgcgtacttctaccaatttcttgtgtatgaaagatattacagctttgtagctataaagcaatctttcccctccccmaaaaataatgaagtaaacaacagcagttttcaggctaagccacgtgcaacraagctttaagactcatgtcagtacttgacttataactagatgtggaaagtactgtttgcttgtacacatctcaagtttacttgaaggcaaacacatttgtgcatagtagcaatgcgttgttttcctatttttgaaactctggctcttaaagaaaaaacaaaataaaatcataatctcagaatctacaaggaatagtrcagagaaaaccagttctcccctcgccccttacaaatgctttgagatctgaagtacagctttaccttgtgttcgtagcgtaccaaaatctagcatttctgttga

SEQ ID NO: 45019 - DNA, 600 bp, Chicken  19866894284466_3
gtatgaaagatattacagctttgtagctataaagcaatctttcccctccccmaaaaataatgaagtaaacaacagcagttttcaggctaagccacgtgcaacraagctttaagactcatgtcagtacttgacttataactagatgtggaaagtactgtttgcttgtacacatctcaagtttacttgaaggcaaacacatttgtgcatagtagcaatgcgttgttttcctatttttgaaactctggctcttaaagaaaaaacaaaataaaatcataatctcagaatctacaaggaatagtrcagagaaaaccagttctcccctcgccccttacaaatgctttgagatctgaagtacagctttaccttgtgttcgtagcgtaccaaaatctagcatttctgttgatgaatagattcccggtgctttaagggaagaaaaagaaacatcacyattttctcactgcacaagttcattaagccaaataatgtcaaaaatgcttttctacaaacctgttgtaacttctacctcaacagggagaatgataaattctgtgttgtctgaggcatttgtttttattctaatgaatgctgtatgattatctg

SEQ ID NO: 45020 - DNA, 452 bp, Chicken  19866894284466_4
aaagtactgtttgcttgtacacatctcaagtttacttgaaggcaaacacatttgtgcatagtagcaatgcgttgttttcctatttttgaaactctggctcttaaagaaaaaacaaaataaaatcataatctcagaatctacaaggaatagtrcagagaaaaccagttctcccctcgccccttacaaatgctttgagatctgaagtacagctttaccttgtgttcgtagcgtaccaaaatctagcatttctgttgatgaatagattcccggtgctttaagggaagaaaaagaaacatcacyattttctcactgcacaagttcattaagccaaataatgtcaaaaatgcttttctacaaacctgttgtaacttctacctcaacagggagaatgataaattctgtgttgtctgaggcatttgtttttattctaatgaatgctgtatgattatctg

SEQ ID NO: 45021 - DNA, 600 bp, Chicken  19866894284467_1
atagtgagctgcacagtgagcagctatttgttccaaaacttgttctactctctgtacagatgaggatttggagcagttttctaccacaatataaatttattttgtaagtttaactgatcagtgcagtcctcttctagctgaggtctgtgttactaaacccagttaagaccagagcatcttcaaagtcagcgctatggtatttatagaaagtcttgctataaattcaggtttttaagtagatattcaagtttataagtattaactgccagctgtctgccaccctctttctcactttcgttmtggttattctgaggtagctggacacctctgagttcaggccatttccatatggtgatcagattgtgtggatttcaaaatgttgttaggctggcagaccagaaaactgggccattggtctgatagttctggccagagatacactttaatcttcctcttgatgtgatctgggctgaaattcagtgcttgtcatggggactctccttagcagcctcagaaagcagaagagctgtcaaatatgcgaccatgataccaaagctttgtgcatgccagtgtgtctgaagaagcaactggcagcagttg

SEQ ID NO: 45022 - DNA, 599 bp, Chicken  19866894284469_1
  misc_feature (1)..(150): n is any nucleotide
nnnnnnnnnnnnnnnnnnnnnnnnnnnnnnnnnnnnnnnnnnnnnnnnnnnnnnnnnnnnnnnnnnnnnnnnnnnnnnnnnnnnnnnnnnnnnnnnnnnnnnnnnnnnnnnnnnnnnnnnnnnnnnnnnnnnnnnnnnnnnnnnnnnnnngaaccattaagaaaacactggcatagtgtagcttgttaccacacttgaaatctgtagacggttatttaaatctttcatttcaaataacataaatacttatactccccattttctcacaaatgtagttgctattcatattcataatctatraagtagtttcaaagtagtattacaataaatttggtcaaaatttaacctgtatttaaatgtagaagcatcttctataagtcctgaatgggaagacacccaatgagacgatgagactttattttggctcactgatgaagcttcaggatgttccatataaagaaatcactatctataaatgtctcttatcaaaggtaacaatttaactgataagtatttgctccaatgaaaagttcatgtctgcccttacctctatggtccaacagcacagaaccagtggcagtagggggacactgagacaa

SEQ ID NO: 45023 - DNA, 600 bp, Chicken  19866894284469_2
atgaagcttcaggatgttccatataaagaaatcactatctataaatgtctcttatcaaaggtaacaatttaactgataagtatttgctccaatgaaaagttcatgtctgcccttacctctatggtccaacagcacagaaccagtggcagtagggggacactgagacaatcctgaagtttatctatctgggttccctgaaaggatccccattatctacagagctctgcataaatctgacaagattggcatgttttagcatggccaaaagtttcacgttctttcatacttgatgacattaartatggaggaaacagtgggaagggaacctctaaaatggcttatgccaacaccgccattccctcctctgggcacatttcatgatcaccacttctcattatttgtttacattcatgagttcatatattctggtcttatgaaaaagaaaatctcagtttacctccacataagtgcttaaacaaacacaataaagcaaagtacagaaaaacaaccaccagaaatgatctcacatttgcatttcgattagttttaaaattcttctctgtcttatgtttcagcatttgacattatcatgtagttatg

SEQ ID NO: 45024 - DNA, 600 bp, Chicken  19866894284472_1
cctcagcagacaaagaaaagaaactcaattagtggtgaaaatcttggattacattttggcatctatgttctgggaagaaaggaaatatatacacttaaaatcttttatacatataatcttcctactctaatttataacaagagtatcagcttggattttaattttcactgtgtatgtcccaactaatcgaggtttaaaattaaattctcaagagtatcttgggctgtaatgcaactatccatgcaccatattcacatctaaaaagcctgttctcctactgtcagctaagaccacaggcaytgtgtgagcaacttctcacatgtaagagaagaatgaggactgtgctgtcgaagccaaaccatggcacagtggaagaaaggtagctggttgcacaagcaatttgttatatgtctctgaggcttctaatgctaacaagaaagagctaacagaaaatatgagattattctgttggaagccagagggtgtaggaaaactttcaaagttcataagatacatgagctcaatggctaagcaggcaagtgcaggttctcttctgaagactaaaatatgatacattacgggcaagggaatagtctcaga

SEQ ID NO: 45025 - DNA, 600 bp, Chicken  19866894284472_2
gaaaggtgacttagaccactgaggtctttgaatgttaatgaaagctgtgcccagtcagcttttctaagtagtggtaatgacatccttagatctacaggacttattgaacataacttcgctggactttctgaaggatcaacatttcccatttctaactttcacaacaaatcagctggtcactacataaatccaaagggctggtcctgagcccactgctctgatctctgaaaccttacctttacagactatcagaaacgtttctacgttttttcactcgatgcaaattctctgtatacaacraaaatctgaacaagcagaagttcaatatattgtttgtttactttgtgattattttctagaagactcacctcaggtataactgtagtctacttctgattttaattggaaaaacagaatagtaagtcctttccaaagtcatctcttatgccaactgtttagttgtacgtgttagcaaatggaaaaagcctgaaatttaagccacaattaaatatatacttttccttcatatataattatattcattgcattacatactgctttcacttatccataaagattttttttaaaaagactgtttaa

SEQ ID NO: 45026 - DNA, 600 bp, Chicken  19866894284473_1
aaaacaaactgaataaagcaaacaaattttaaggaagaagcagctctcaccttcatcttgctctctaaattaatagttaagccccatatgacacaataattttatccatacagtaaccatgacagctggtaatacctctgtattttacagtcttctctgggagtcctggctctagaagactttactgaagagcagggggctcagtaagattgagccactccacagagcatcacagaataaatggttacatttattatttagacacaaaatattgccgtgctgttcaacatattcccaagmactacaggacattgcttgcactcagcaaattaaaacactgaaggcttacaaaggattacaaagattaggctttctgtagtactagataatttacttgataaggcctgatttatttcttcatataaagataatggctatcttagaaaaaatgatcttttgtaaacattttgggaggccaagagatgcatatctgacttaaaaacccagaagggtatttaaacaggtacaatacagaatctaaccagattccaatcackagataaatactcatcaatttaatcagttcaaaagaatgatcta

SEQ ID NO: 45027 - DNA, 600 bp, Chicken  19866894284473_2
ttagacacaaaatattgccgtgctgttcaacatattcccaagmactacaggacattgcttgcactcagcaaattaaaacactgaaggcttacaaaggattacaaagattaggctttctgtagtactagataatttacttgataaggcctgatttatttcttcatataaagataatggctatcttagaaaaaatgatcttttgtaaacattttgggaggccaagagatgcatatctgacttaaaaacccagaagggtatttaaacaggtacaatacagaatctaaccagattccaatcackagataaatactcatcaatttaatcagttcaaaagaatgatctatgttagttcacagcctcatggtgtccatgggactccttccagtgggcacatatctgtaagcaatctaagcattgcatctccaatgaggaaggaaaaaatgaatagttattgtcatttctgagtactaagtaagaaatttgtcctggcttgcgcatacaactaatggtgttaccagttattaaaccaggaaagtatctgttagcacttgcctaattgagtctcctaatgaaaaagtcttgaccaaaggcactaaaaaa

SEQ ID NO: 45028 - DNA, 600 bp, Chicken  19866894284477_1
cagccctatgattgagccagacctgaggctgctgccaaggcagaattgggactccacggatcagcagaggtggtgaaggcgtttgacacaacgatttgcgatggccctgtgtgttttccttctgtatctagcaaggttggtaagtgctgatacacagtcctaggggcaggggacgtttccagtcctccacaataggaggatgcattcaaggagatgcttacaactaagaatgtaattaagtctgtgtgctactcagatggggatttgcaggcactacagcaacacaagcagccaaatctmatctgtaacagagccacctcacctacaataaagggtaagggatgtccctgcctcacaagtaactccaaagttgcctccaacccackggggcatctactgcacctggcaacaacactcctcagcatgaagagatgagcaaatcctgatgccccaagccccacagatgtcatatctcaggagaaatggccattgagtatgtgactttcagcaaagggctcaagacagggaatgtggaggagaaatccctcctgtgagctatcaggacattagtttttatcatcctcccccaaaaggacaggc

SEQ ID NO: 45029 - DNA, 518 bp, Chicken  19866894284477_2
cacaacgatttgcgatggccctgtgtgttttccttctgtatctagcaaggttggtaagtgctgatacacagtcctaggggcaggggacgtttccagtcctccacaataggaggatgcattcaaggagatgcttacaactaagaatgtaattaagtctgtgtgctactcagatggggatttgcaggcactacagcaacacaagcagccaaatctmatctgtaacagagccacctcacctacaataaagggtaagggatgtccctgcctcacaagtaactccaaagttgcctccaacccackggggcatctactgcacctggcaacaacactcctcagcatgaagagatgagcaaatcctgatgccccaagccccacagatgtcatatctcaggagaaatggccattgagtatgtgactttcagcaaagggctcaagacagggaatgtggaggagaaatccctcctgtgagctatcaggacattagtttttatcatcctcccccaaaaggacaggcagtt

SEQ ID NO: 45030 - DNA, 599 bp, Chicken  19866894284484_1
  misc_feature (1)..(39): n is any nucleotide
nnnnnnnnnnnnnnnnnnnnnnnnnnnnnnnnnnnnnnnccgtggaagagcagtgtgtgactcaccactgcaggcttttactagcatcaatatgtaatatgctgtctgcattttcttaggagatgctgcttcatgcagtagatcagagctgacattttgcacttcggcttgctacaaatgtgttcccataatagagttcaaggttcgtctgctcatgtataggttccattttgcaactcttttgtgcaatccagttatcttacaaaagagagcaaacaggtagtctgtaagatgttgctrgagtgtcaggaatgatagaaagattggcttttgttcttctaacatgaaacagacttttggaataaagatgaggaagaatgagttttaattaaaatcctctcagcttatcttctcactcaagggaatgtgatttttcaaccattaaaagcaactgaagcactgcagtcctttttctggaaggaaaaataggttctaatagagctaggtttacactgtgcaatttggaaatatgcaaatgcgctacacttgcttggtccgtgtcacagtacggtgtgcaagatgcaatttctccaccttgt

SEQ ID NO: 45031 - DNA, 600 bp, Chicken  19866894284489_1
tttgttacattggtcttacatgtcaccaaagccaatggaggtaaagacagtggagttatacaggtgaagagccaggggcagagaatagagattcacactctacattagccttcgattcatattgtacattagccatctaaaactggtttcaaagatcagaggcagttagtctgtatcttatactagtgctgggcctgatccaaagctcactgtagtcaactggagttgttccatcaggccctagggggcatgtatgtctatgtgtgcagatatgcatatgtctctgtgtcaatctatctrtgtaatttatctatttttaccaagatcacctctggagtgactgagagcctcagtggttgatgttaagcaatatgtagaatccccgaagccttcatcttctttatacttgctgatcctgtaatataaaaataaatgtaggttagtagatgatctgtgagacatatacagtcaagcatgcagaacacacagaaggagcagggttgtttcccatccagttggacaggttgtgccattggcaggacacagcaagctgctgccagaaaggcatcactcatttttcaattctcagactctgttttt

SEQ ID NO: 45032 - DNA, 600 bp, Chicken  19866894284492_1
cctggcctctactggagctactctcttgtgattcatgtacaaagatagcacaataatacattctccagcttctaatgatgacagccctccttcacagaaaacctgtaaggttttttgccctccttccccctctagggataagtgatcactttctgttactgttgatacgtgaatacttacactacgtcatctataacagcaccttttggttgcctcattgatttccactctactaggtttgcagtgcatactgcttcactgttatttgattttccagtccttctataaaaaaaaaaaaamaacaactaaaaaggtacaaggcagcccctrtgtttccacccaggcaaagtcacttgtaagactcctgaagtaaagtggggcagaacaaagtccgcaggcactgtgmagttctcttgtcacccaatgaagcagtacctctaaaacggacagctattaaattccaaaaacaaaaagagaagccctgctgattcaatcaagagctactttacactttcctgtggttgcttctggtcacaagaaacacgagaggggaatcagcatcacagctgacattgctctttgcaagagatggctaccttc

SEQ ID NO: 45033 - DNA, 600 bp, Chicken  19866894284492_2
attcatgtacaaagatagcacaataatacattctccagcttctaatgatgacagccctccttcacagaaaacctgtaaggttttttgccctccttccccctctagggataagtgatcactttctgttactgttgatacgtgaatacttacactacgtcatctataacagcaccttttggttgcctcattgatttccactctactaggtttgcagtgcatactgcttcactgttatttgattttccagtccttctataaaaaaaaaaaaamaacaactaaaaaggtacaaggcagcccctrtgtttccacccaggcaaagtcacttgtaagactcctgaagtaaagtggggcagaacaaagtccgcaggcactgtgmagttctcttgtcacccaatgaagcagtacctctaaaacggacagctattaaattccaaaaacaaaaagagaagccctgctgattcaatcaagagctactttacactttcctgtggttgcttctggtcacaagaaacacgagaggggaatcagcatcacagctgacattgctctttgcaagagatggctaccttccccctggagctagcgccagcactggggttg

SEQ ID NO: 45034 - DNA, 600 bp, Chicken  19866894284492_3
aaggttttttgccctccttccccctctagggataagtgatcactttctgttactgttgatacgtgaatacttacactacgtcatctataacagcaccttttggttgcctcattgatttccactctactaggtttgcagtgcatactgcttcactgttatttgattttccagtccttctataaaaaaaaaaaaamaacaactaaaaaggtacaaggcagcccctrtgtttccacccaggcaaagtcacttgtaagactcctgaagtaaagtggggcagaacaaagtccgcaggcactgtgmagttctcttgtcacccaatgaagcagtacctctaaaacggacagctattaaattccaaaaacaaaaagagaagccctgctgattcaatcaagagctactttacactttcctgtggttgcttctggtcacaagaaacacgagaggggaatcagcatcacagctgacattgctctttgcaagagatggctaccttccccctggagctagcgccagcactggggttgcaccacagaaaagcatctggaagtggcacacaggtaaaacaaaccgaccgtgagagaaaagtaggcctgcacacat

SEQ ID NO: 45035 - DNA, 600 bp, Chicken  19866894284494_1
ccctgatgtgtggccccagaagctgcagggtgatgcctcaggttttcctatggagaagacctggcatgggctggcagctcctgcccaggtgtcatttcagcgctgcactgataagctcagtcagtcatcatttttcttgctttcagacacaatgctcctatcagcttttcttggggactctcagagtttgctaaatccccattaattccctcagggcctcaacagcacccaatggcgcctgtagaagcggtgggctgcctctcccaagcacatccatgccaccatggagtaacagccccrctgcagccatcccagcccaggcagcgccacagcagattccttcractccccttcccttcaatacaatgggacctaattcctgcaacacttctttttcyttttttctgggggggatgcggcgagttgtttacttgagtaataagcgcactgtatgcattgtaaaaatgtgttcttgttcttgcagtggattaatgaatatgtgaatcacagctgaagagtgccactctcactgacttcattatgcagaaggtagcaggaaacaaaaagacacgtgtgctagctcacgggcagaagtgcagc

SEQ ID NO: 45036 - DNA, 600 bp, Chicken  19866894284494_2
ttcctatggagaagacctggcatgggctggcagctcctgcccaggtgtcatttcagcgctgcactgataagctcagtcagtcatcatttttcttgctttcagacacaatgctcctatcagcttttcttggggactctcagagtttgctaaatccccattaattccctcagggcctcaacagcacccaatggcgcctgtagaagcggtgggctgcctctcccaagcacatccatgccaccatggagtaacagccccrctgcagccatcccagcccaggcagcgccacagcagattccttcractccccttcccttcaatacaatgggacctaattcctgcaacacttctttttcyttttttctgggggggatgcggcgagttgtttacttgagtaataagcgcactgtatgcattgtaaaaatgtgttcttgttcttgcagtggattaatgaatatgtgaatcacagctgaagagtgccactctcactgacttcattatgcagaaggtagcaggaaacaaaaagacacgtgtgctagctcacgggcagaagtgcagcaccaattccatgccgcaggctgtgctctggctgactttacacct

SEQ ID NO: 45037 - DNA, 600 bp, Chicken  19866894284494_3
agcgctgcactgataagctcagtcagtcatcatttttcttgctttcagacacaatgctcctatcagcttttcttggggactctcagagtttgctaaatccccattaattccctcagggcctcaacagcacccaatggcgcctgtagaagcggtgggctgcctctcccaagcacatccatgccaccatggagtaacagccccrctgcagccatcccagcccaggcagcgccacagcagattccttcractccccttcccttcaatacaatgggacctaattcctgcaacacttctttttcyttttttctgggggggatgcggcgagttgtttacttgagtaataagcgcactgtatgcattgtaaaaatgtgttcttgttcttgcagtggattaatgaatatgtgaatcacagctgaagagtgccactctcactgacttcattatgcagaaggtagcaggaaacaaaaagacacgtgtgctagctcacgggcagaagtgcagcaccaattccatgccgcaggctgtgctctggctgactttacacctgcttcccaaaaagggccgaggccaacacacatcatagaataatagaatggcctg

SEQ ID NO: 45038 - DNA, 600 bp, Chicken  19866894284495_1
gagactaaaaatacttcaaagagacgccacacacattatttgaataagagagaactacgttttaattggagcaaatgttcttaaatgatgattccttatctcacttagattggaatctcccttagagcccctcctccagtcatcccatcacgtaggccctgttgatttacatatttttttcacataagtttcagaaagaagaaaggaggagatgttccccctaatggaggccatctgttcttttcttgtttgggggggagggaacctacaattagtgtctcgttctttgatttcaacagraaaaaaaaagggggaaagaaagggaagtattatgcaaatagtctgcaatttggtttcaagtattctttgtactatgatgagccatttcctttagtacaaactctgcctacttgccaggactttttccccttaatacagggaagaaaaaaaagacttaaggggatgctatgttcctctgatgccaaatttttcttatcctttctttctktctgtctttctttggcactattatagctgttaaattgtcagaagaatgtcggataggttttctggagaaagagaaccaaaatagctttacga

SEQ ID NO: 45039 - DNA, 600 bp, Chicken  19866894284495_2
gagatgttccccctaatggaggccatctgttcttttcttgtttgggggggagggaacctacaattagtgtctcgttctttgatttcaacagraaaaaaaaagggggaaagaaagggaagtattatgcaaatagtctgcaatttggtttcaagtattctttgtactatgatgagccatttcctttagtacaaactctgcctacttgccaggactttttccccttaatacagggaagaaaaaaaagacttaaggggatgctatgttcctctgatgccaaatttttcttatcctttctttctktctgtctttctttggcactattatagctgttaaattgtcagaagaatgtcggataggttttctggagaaagagaaccaaaatagctttacgaagctgcagcttcatctcacttttcattgttccattgccatgatggagtggtgaaatgaaggactcagtgcagtgaatgagggtgaaaagctttctctttgcatttttttcmgtgccagttgcttgtgatgacagctttacctgtgcaaacagatgtgcagggttttttataaggagttctcgtgctgcttgtctgtggcaccttagga

SEQ ID NO: 45040 - DNA, 511 bp, Chicken  19866894284495_3
tgccaggactttttccccttaatacagggaagaaaaaaaagacttaaggggatgctatgttcctctgatgccaaatttttcttatcctttctttctktctgtctttctttggcactattatagctgttaaattgtcagaagaatgtcggataggttttctggagaaagagaaccaaaatagctttacgaagctgcagcttcatctcacttttcattgttccattgccatgatggagtggtgaaatgaaggactcagtgcagtgaatgagggtgaaaagctttctctttgcatttttttcmgtgccagttgcttgtgatgacagctttacctgtgcaaacagatgtgcagggttttttataaggagttctcgtgctgcttgtctgtggcaccttaggactgcagactgtagccaacattgagtatttctagttagatgtaatgcttaagcctgtaaaaaccaagcataagggttctgatccactaaaccatattagcacagcttgatcaaag

SEQ ID NO: 45041 - DNA, 599 bp, Chicken  19866894284498_1
  misc_feature (1)..(118): n is any nucleotide
nnnnnnnnnnnnnnnnnnnnnnnnnnnnnnnnnnnnnnnnnnnnnnnnnnnnnnnnnnnnnnnnnnnnnnnnnnnnnnnnnnnnnnnnnnnnnnnnnnnnnnnnnnnnnnnnnnnnnntttacatatcacagaactttttgtgcatgttatgttgagaaaattaaaaacacagtgtgcctggtttactttatattctctcacaacatgtgagagaatgtaaggacaatatttttaaaggagaaacaatgaaacatgagggaattttgcttcaggtatttgcaggtaccagtatttgcccrtaaagctagtcaataaacagcagagcagtaaagagcaaaaagtagtagcacatttccattttgctttaaaattatttcatagtttgtgtacccatgagaaacagatcaccttagtaataagacttctaatgttgactgggattatactaattttatattgtttcatcttcaaaggacacaattttccaaagatttcaaagtttgaaaatttgaaaatagaagcttgtcttttctaggatcatgtatagtgtggttcagtagttattctgaattgcagctatacagatacatagcagcag

SEQ ID NO: 45042 - DNA, 600 bp, Chicken  19866894284498_2
gtgtggttcagtagttattctgaattgcagctatacagatacatagcagcagaaattcttcatttgattgttggtcataatcaactaaattcctaatcaaatatgatatttttgtacaacaagataccagtgatactatttgggagacattattgtcagaaagccaatagtatttgtggtgtacccaagtggtttataatttggcacagaaattttaaaatggagaaaaatatttttgtttcacaattctttttttgtttcatctgcagtccattaactttttactttctcataatgagraagatatttgcctgcagattttggaagtttctatccacttggattcacaccatatgtaatttacgktgttttatagcctcagttataggacagagtgratgtttcagcctctctctcttacaagcttctttgtctgtttgcccttcttatagatatacaatgagtttgttccttttgtgtgtgacctcatgtatatgattattttcgaagttaaaagcaatgtgattatactgttttgtctgtcagaacataaatttattctatatttcagaggaaattctgtgtgctggctgatattat

SEQ ID NO: 45043 - DNA, 600 bp, Chicken  19866894284498_3
attgttggtcataatcaactaaattcctaatcaaatatgatatttttgtacaacaagataccagtgatactatttgggagacattattgtcagaaagccaatagtatttgtggtgtacccaagtggtttataatttggcacagaaattttaaaatggagaaaaatatttttgtttcacaattctttttttgtttcatctgcagtccattaactttttactttctcataatgagraagatatttgcctgcagattttggaagtttctatccacttggattcacaccatatgtaatttacgktgttttatagcctcagttataggacagagtgratgtttcagcctctctctcttacaagcttctttgtctgtttgcccttcttatagatatacaatgagtttgttccttttgtgtgtgacctcatgtatatgattattttcgaagttaaaagcaatgtgattatactgttttgtctgtcagaacataaatttattctatatttcagaggaaattctgtgtgctggctgatattatctctagctatactgacagtaacatcagttctgtaggacaaagacacacaattgcttgtcacttgtc

SEQ ID NO: 45044 - DNA, 600 bp, Chicken  19866894284498_4
aaatatgatatttttgtacaacaagataccagtgatactatttgggagacattattgtcagaaagccaatagtatttgtggtgtacccaagtggtttataatttggcacagaaattttaaaatggagaaaaatatttttgtttcacaattctttttttgtttcatctgcagtccattaactttttactttctcataatgagraagatatttgcctgcagattttggaagtttctatccacttggattcacaccatatgtaatttacgktgttttatagcctcagttataggacagagtgratgtttcagcctctctctcttacaagcttctttgtctgtttgcccttcttatagatatacaatgagtttgttccttttgtgtgtgacctcatgtatatgattattttcgaagttaaaagcaatgtgattatactgttttgtctgtcagaacataaatttattctatatttcagaggaaattctgtgtgctggctgatattatctctagctatactgacagtaacatcagttctgtaggacaaagacacacaattgcttgtcacttgtcttagttctggtatcccttgggagtattttgga

SEQ ID NO: 45045 - DNA, 600 bp, Chicken  19866894284498_5
ctctcttacaagcttctttgtctgtttgcccttcttatagatatacaatgagtttgttccttttgtgtgtgacctcatgtatatgattattttcgaagttaaaagcaatgtgattatactgttttgtctgtcagaacataaatttattctatatttcagaggaaattctgtgtgctggctgatattatctctagctatactgacagtaacatcagttctgtaggacaaagacacacaattgcttgtcacttgtcttagttctggtatcccttgggagtattttggatcatattgacattwatttcaggagctcattctgatcatctttaacagggtcacatataactcagttactcaaccacctttctcctgtttcaattggattctcttgcagcttaagttatctggttaaatgctttgcccctttctttttttaatgctctatctttgctttcttgtgttatatttttttgaatatatttctgacaaaactgagctgttatctattctcctatatttctctctaattatactttcgtactaaacaaatcagaaatgtacaaataatggatggaaactagctacataagtcccttgtgc

SEQ ID NO: 45046 - DNA, 599 bp, Chicken  19866894284500_1
  misc_feature (1)..(91): n is any nucleotide
nnnnnnnnnnnnnnnnnnnnnnnnnnnnnnnnnnnnnnnnnnnnnnnnnnnnnnnnnnnnnnnnnnnnnnnnnnnnnnnnnnnnnnnnnnntctgccctttacagatagattcattcagcctttcagatttgtgctctgcatgggatagcatctccattgtataagatgatgtatatataattactagataaatgcatgcacttgtgatgcatatctgatatagctacaggtgttttgctgtccggctgcaagagcaactctgcgttttaatgtattggatgtttttccatttaaaatcrgagcggcttagccaaacaggctgctggagaactcacttctgtatgctggaggccccagaacagctgtgctgacagctaggccaggcaggatggcagctgcttttaaggtagggaaaagagagagattctgaaacttaaaggtaacccatctattactcccatactagtgatggaattcatggagtctggattagctaacaaaacttctcatttcacaawcctgacacttcacacgtgtctcatatttgcagcgagcttatcttaaagtcatcatccaaaaaaagtgtttcctaaaccag

SEQ ID NO: 45047 - DNA, 600 bp, Chicken  19866894284500_2
tatagctacaggtgttttgctgtccggctgcaagagcaactctgcgttttaatgtattggatgtttttccatttaaaatcrgagcggcttagccaaacaggctgctggagaactcacttctgtatgctggaggccccagaacagctgtgctgacagctaggccaggcaggatggcagctgcttttaaggtagggaaaagagagagattctgaaacttaaaggtaacccatctattactcccatactagtgatggaattcatggagtctggattagctaacaaaacttctcatttcacaawcctgacacttcacacgtgtctcatatttgcagcgagcttatcttaaagtcatcatccaaaaaaagtgtttcctaaaccagaaagagcaagctctccctctcttagctattacagactgcttaattctctctcaaggagcggtgttgggaagttcctgtatatttatatcctattctgaaggaaatgagagggaaggactagagctgtatttgtctcatctgctttcatacaaaggcaccttttagtccagtgattacctctgccagaaacctcattctcaactacattttcccatgcaaa

SEQ ID NO: 45048 - DNA, 530 bp, Chicken  19866894284502_1
aaagccctgacttaggtacaaattgtctgtatctgatgagacataaaatcccattgaaacactttttctgcaggtagggcactcgggctgctctcccaggtctgtgatgactggttagagtcagatgcagtgagccttgccctcactggagacactcactgtatctcgcttcctatttctcaacatttgggctgcctactttcacacaacttcagctagcaaaatctttataccatttgcttaatttgcttgaaattcaaaagtgagtgctaaatttaaggtaatgacaaggcattctaraagtattttaatgtgcagtaatcatgtaacatgcttgtgtaaagctcgcgtatttgggaaagtctaaatagccctgactccatagatgggtgtctctcctagaacaggtgtcaccacctaagacagacattgtaggttttttgtggatatttatgtgagaaagtatagtagtaatcaggggcaaatagaaaaaggaattattggagaaggaactgtgaataaaaagatgt

SEQ ID NO: 45049 - DNA, 600 bp, Chicken  19866894284504_1
aaagatttaaggcattcctaagtttatttgcatgtaaacagatttagaatgctctaaacctcagagggattacctgagaagatgagataaaggctgttttacagtggttttgttttttaaacagaacgcttagatgatttttcatatactgtcttgtttgtcattcaagttcatacacagttccacctcaaatgccattctgtcagactgcccctctgctgccatctgtcacacaggaaagaaatataagggagtactggtgggaaggttcaacctctaccgccataccaccaacacccrcctctgatattgtgggccaacataacaaaataagaggcattacttttggagyagcctttgtacattttgattataaatgtgtacatgtaaaggagaaaaaacatggaaaaacagcagaatgaagacagaactgttgtagcaattgtacagatcaatacaatgggaaaggtgttacaacagaggtgtgatgatggaaggactggcacgatagcaagatgctataaaagaagggaagacgactgctcacccacatcagaagactccaggttcacaggggaaagctccaccaaggagggatct

SEQ ID NO: 45050 - DNA, 600 bp, Chicken  19866894284504_2
tctaaacctcagagggattacctgagaagatgagataaaggctgttttacagtggttttgttttttaaacagaacgcttagatgatttttcatatactgtcttgtttgtcattcaagttcatacacagttccacctcaaatgccattctgtcagactgcccctctgctgccatctgtcacacaggaaagaaatataagggagtactggtgggaaggttcaacctctaccgccataccaccaacacccrcctctgatattgtgggccaacataacaaaataagaggcattacttttggagyagcctttgtacattttgattataaatgtgtacatgtaaaggagaaaaaacatggaaaaacagcagaatgaagacagaactgttgtagcaattgtacagatcaatacaatgggaaaggtgttacaacagaggtgtgatgatggaaggactggcacgatagcaagatgctataaaagaagggaagacgactgctcacccacatcagaagactccaggttcacaggggaaagctccaccaaggagggatctccaaccagagatccttctccaggggcagtcagcccttaaatggggtctaaga

SEQ ID NO: 45051 - DNA, 600 bp, Chicken  19866894284506_1
catcaaatgaaaaacagctgccagctggcatccacgcattattcaccatctcttctacaaactacagggttcctgggcatctaactgaaaagttttgaaagcagagcctaacctctgccacacctgctccatctctcactcattctgaacatatttcaagtcaccttttctaattcactctgccaaagtccttcatctcagtagcaagaatttcttctttgtatacctaagggacttttaatttggccaactgttgcttggttaacagtttgtgttcagaaaaaaaaacaaaaaaaaacyaccaagaataactgcaggactgacagttctacaacttccagccatattcatttgcagcttggctatgcacatttggaagaggaaaaaagaaagaataagtaaaacacagctcagactgaaaaacgaaaagtattaaactgaacctcaggagtatttataaaagaaacaaatccatcagaaacaaacctttaacaactccctccttcatttgctaggacagagcctgataaagtacagaaatgctactgtagtccccgagggcttattttgactaaatcttaggaatgcaacatataaaca

SEQ ID NO: 45052 - DNA, 500 bp, Chicken  19866894284507_1
aggagcagcagacttctttgctttgttgataaattatctctcacaacaactattttaacagctttacccccagactacctcagcccactctgtccttgaagttcatgcttcattttttctctgctgtgtttcttccaactatttatacactcttccctctttcatgagaaaggcttggaatttgtttgtcttttcttgcacataatagacgaagaagctatttaaacttctgttgcactgttctgtaattctgaccatttagtcatgcttttcaaagttatttaaaatgaccaggtttaytgacacaaaataaaccttgcgttaaggtaatatggcctcctattgaacaaacattaatgacatttactcaccggcacagtgcagcattcattctcccattcttaaaaacaacaagggaggcacagtcccagcaccactactgatgagcacaagaactggaccattttattaccaggatcaagcattattattcagattaa

SEQ ID NO: 45053 - DNA, 600 bp, Chicken  19866894284511_1
gaggactaagaggttggctgctgaagctcagccccttcagcatccctttgggctgaaagaagtgtaacagatcccacagagtgtttcctgcctgtaggatgcattgctaggttttgtgcatggagaggaagagaacctaacaggtggtagcatcacttgtcaccagaagggccacagtgtatgcaaaatgacatcagggaatggggtgcagccactggttattaacagaagaggacatttctgatttctgccatggaaagcactgatatgtcatttagggactgtttgtgggtaaggagycacatcaacgcatctccgtgctgggagaaaggaggggttctggaacagaaggtgttaatccatttgttccaaacgactttcagttttgccgttgttttcattagcagagtggaggaagagaaaragtgtaaccatcatggtgatgatcactgggaataataatagtrtctttgaaaggtcccacatctgttgctaacagaagaaaagttgaatacgtgaaaagccttcagggcacaaaccctcttccctccsggtctccaacactttggccatctgagcagcttcgtgtctgtttggctc

SEQ ID NO: 45054 - DNA, 600 bp, Chicken  19866894284511_2
gaggaagagaacctaacaggtggtagcatcacttgtcaccagaagggccacagtgtatgcaaaatgacatcagggaatggggtgcagccactggttattaacagaagaggacatttctgatttctgccatggaaagcactgatatgtcatttagggactgtttgtgggtaaggagycacatcaacgcatctccgtgctgggagaaaggaggggttctggaacagaaggtgttaatccatttgttccaaacgactttcagttttgccgttgttttcattagcagagtggaggaagagaaaragtgtaaccatcatggtgatgatcactgggaataataatagtrtctttgaaaggtcccacatctgttgctaacagaagaaaagttgaatacgtgaaaagccttcagggcacaaaccctcttccctccsggtctccaacactttggccatctgagcagcttcgtgtctgtttggctccctgtgcagtggggaccacagcgggtcattgggatgtgctcartgcaggagcagtctgtgcaggatctcctcctgtttcattttgctgaggtttctacaaacccttcattcacttgcagttcag

SEQ ID NO: 45055 - DNA, 600 bp, Chicken  19866894284511_3
agggccacagtgtatgcaaaatgacatcagggaatggggtgcagccactggttattaacagaagaggacatttctgatttctgccatggaaagcactgatatgtcatttagggactgtttgtgggtaaggagycacatcaacgcatctccgtgctgggagaaaggaggggttctggaacagaaggtgttaatccatttgttccaaacgactttcagttttgccgttgttttcattagcagagtggaggaagagaaaragtgtaaccatcatggtgatgatcactgggaataataatagtrtctttgaaaggtcccacatctgttgctaacagaagaaaagttgaatacgtgaaaagccttcagggcacaaaccctcttccctccsggtctccaacactttggccatctgagcagcttcgtgtctgtttggctccctgtgcagtggggaccacagcgggtcattgggatgtgctcartgcaggagcagtctgtgcaggatctcctcctgtttcattttgctgaggtttctacaaacccttcattcacttgcagttcaggatgtttcatgttccataagctccgcttcgagatttgaggaag

SEQ ID NO: 45056 - DNA, 600 bp, Chicken  19866894284511_4
atggaaagcactgatatgtcatttagggactgtttgtgggtaaggagycacatcaacgcatctccgtgctgggagaaaggaggggttctggaacagaaggtgttaatccatttgttccaaacgactttcagttttgccgttgttttcattagcagagtggaggaagagaaaragtgtaaccatcatggtgatgatcactgggaataataatagtrtctttgaaaggtcccacatctgttgctaacagaagaaaagttgaatacgtgaaaagccttcagggcacaaaccctcttccctccsggtctccaacactttggccatctgagcagcttcgtgtctgtttggctccctgtgcagtggggaccacagcgggtcattgggatgtgctcartgcaggagcagtctgtgcaggatctcctcctgtttcattttgctgaggtttctacaaacccttcattcacttgcagttcaggatgtttcatgttccataagctccgcttcgagatttgaggaagaatgagaccagaatctcaagcagaagccaatgagactcacctgtgttcacgtcagccccataaatcagcccaggcactcaaacaa

SEQ ID NO: 45057 - DNA, 567 bp, Chicken  19866894284511_5
aacagaaggtgttaatccatttgttccaaacgactttcagttttgccgttgttttcattagcagagtggaggaagagaaaragtgtaaccatcatggtgatgatcactgggaataataatagtrtctttgaaaggtcccacatctgttgctaacagaagaaaagttgaatacgtgaaaagccttcagggcacaaaccctcttccctccsggtctccaacactttggccatctgagcagcttcgtgtctgtttggctccctgtgcagtggggaccacagcgggtcattgggatgtgctcartgcaggagcagtctgtgcaggatctcctcctgtttcattttgctgaggtttctacaaacccttcattcacttgcagttcaggatgtttcatgttccataagctccgcttcgagatttgaggaagaatgagaccagaatctcaagcagaagccaatgagactcacctgtgttcacgtcagccccataaatcagcccaggcactcaaacaagttcatgaacctttgggaaactcggaacaaacctgggctgaatctccaggctagatgt

SEQ ID NO: 45058 - DNA, 588 bp, Chicken  19866894284514_1
ctattatggaggatgggcctggagaatattgcaactgctaatctgtaagcagaaataactacagaggaataaaaagaactgctgtgagtgcccatatcttgactctgagaatcttcttgtcctgtattccctcatatgcaaagctttgttttcattttcatgtcttcaagtttttcaaattttactctgtgggagaacaatgaagtttctgacccaagtcatgctgaattctgtgtattttcagtaaacacactcttaactaagatttgcccaatgaaaagaatatatatatatatatawawaaaaagtatagaattattttcttctctytgttgatttactaagccaaaaaggcaagacacctgactttatcacagaggtgaaaatagagtgaacaactgcgaaaatctttgaaagcaacccacttaattcttgattctgcagtggaatacttcccctaccccttccctgggctgagcacaatcctaccttttatgtatgacgacttcatgtttattagcagctgttttctcctagctaagcttgacaaaagcttaagattagaacaactgtattattttgactttc

SEQ ID NO: 45059 - DNA, 586 bp, Chicken  19866894284514_2
attatggaggatgggcctggagaatattgcaactgctaatctgtaagcagaaataactacagaggaataaaaagaactgctgtgagtgcccatatcttgactctgagaatcttcttgtcctgtattccctcatatgcaaagctttgttttcattttcatgtcttcaagtttttcaaattttactctgtgggagaacaatgaagtttctgacccaagtcatgctgaattctgtgtattttcagtaaacacactcttaactaagatttgcccaatgaaaagaatatatatatatatatawawaaaaagtatagaattattttcttctctytgttgatttactaagccaaaaaggcaagacacctgactttatcacagaggtgaaaatagagtgaacaactgcgaaaatctttgaaagcaacccacttaattcttgattctgcagtggaatacttcccctaccccttccctgggctgagcacaatcctaccttttatgtatgacgacttcatgtttattagcagctgttttctcctagctaagcttgacaaaagcttaagattagaacaactgtattattttgactttc

SEQ ID NO: 45060 - DNA, 558 bp, Chicken  19866894284514_3
gcaactgctaatctgtaagcagaaataactacagaggaataaaaagaactgctgtgagtgcccatatcttgactctgagaatcttcttgtcctgtattccctcatatgcaaagctttgttttcattttcatgtcttcaagtttttcaaattttactctgtgggagaacaatgaagtttctgacccaagtcatgctgaattctgtgtattttcagtaaacacactcttaactaagatttgcccaatgaaaagaatatatatatatatatawawaaaaagtatagaattattttcttctctytgttgatttactaagccaaaaaggcaagacacctgactttatcacagaggtgaaaatagagtgaacaactgcgaaaatctttgaaagcaacccacttaattcttgattctgcagtggaatacttcccctaccccttccctgggctgagcacaatcctaccttttatgtatgacgacttcatgtttattagcagctgttttctcctagctaagcttgacaaaagcttaagattagaacaactgtattattttgactttc

SEQ ID NO: 45061 - DNA, 599 bp, Chicken  19866894284520_1
  misc_feature (1)..(176): n is any nucleotide
nnnnnnnnnnnnnnnnnnnnnnnnnnnnnnnnnnnnnnnnnnnnnnnnnnnnnnnnnnnnnnnnnnnnnnnnnnnnnnnnnnnnnnnnnnnnnnnnnnnnnnnnnnnnnnnnnnnnnnnnnnnnnnnnnnnnnnnnnnnnnnnnnnnnnnnnnnnnnnnnnnnnnnnnnnnnnnnntgactcattcagtctttggttccctacacatgaaaatggaagtcgtcattttggtgtaattatggaaagtgctgcttacaccagcttaagatatttctaaagattattggtggactcagctctrtaagaattacctcctgggaccctcctttcctaagctgctttgtacctaawgtgcagtaagaacagattacactggccagctggcctgttctaaggagtaccagaaggctttgttgctcaagctatgggtaggatgaatagttgtagagactgggccaccaggarctgctgtgacctttgcagaaccctggagcaacaggagcctgggttctgcccagcagtgcagtgtggcctgtttgggaaagwgagggggaattttagagctgatgttcagctcagacatagctttctggctgacag

SEQ ID NO: 45062 - DNA, 599 bp, Chicken  19866894284520_2
  misc_feature (1)..(126): n is any nucleotide
nnnnnnnnnnnnnnnnnnnnnnnnnnnnnnnnnnnnnnnnnnnnnnnnnnnnnnnnnnnnnnnnnnnnnnnnnnnnnnnnnnnnnnnnnnnnnnnnnnnnnnnnnnnnnnnnnnnnnnnnnnnnnntgactcattcagtctttggttccctacacatgaaaatggaagtcgtcattttggtgtaattatggaaagtgctgcttacaccagcttaagatatttctaaagattattggtggactcagctctrtaagaattacctcctgggaccctcctttcctaagctgctttgtacctaawgtgcagtaagaacagattacactggccagctggcctgttctaaggagtaccagaaggctttgttgctcaagctatgggtaggatgaatagttgtagagactgggccaccaggarctgctgtgacctttgcagaaccctggagcaacaggagcctgggttctgcccagcagtgcagtgtggcctgtttgggaaagwgagggggaattttagagctgatgttcagctcagacatagctttctggctgacagcatcatcccagagctactgaaagatgaaggttagctggacccagcactgt

SEQ ID NO: 45063 - DNA, 599 bp, Chicken  19866894284520_3
  misc_feature (1)..(12): n is any nucleotide
nnnnnnnnnnnntgactcattcagtctttggttccctacacatgaaaatggaagtcgtcattttggtgtaattatggaaagtgctgcttacaccagcttaagatatttctaaagattattggtggactcagctctrtaagaattacctcctgggaccctcctttcctaagctgctttgtacctaawgtgcagtaagaacagattacactggccagctggcctgttctaaggagtaccagaaggctttgttgctcaagctatgggtaggatgaatagttgtagagactgggccaccaggarctgctgtgacctttgcagaaccctggagcaacaggagcctgggttctgcccagcagtgcagtgtggcctgtttgggaaagwgagggggaattttagagctgatgttcagctcagacatagctttctggctgacagcatcatcccagagctactgaaagatgaaggttagctggacccagcactgttatgtsgttaacatcccygtctgtataatagatcctttctttttgaatgaagatgcacctagcccaatttgtcccttctcttgtggcagtcagcttagaatcatagaatcacaa

SEQ ID NO: 45064 - DNA, 600 bp, Chicken  19866894284520_4
tgctgcttacaccagcttaagatatttctaaagattattggtggactcagctctrtaagaattacctcctgggaccctcctttcctaagctgctttgtacctaawgtgcagtaagaacagattacactggccagctggcctgttctaaggagtaccagaaggctttgttgctcaagctatgggtaggatgaatagttgtagagactgggccaccaggarctgctgtgacctttgcagaaccctggagcaacaggagcctgggttctgcccagcagtgcagtgtggcctgtttgggaaagwgagggggaattttagagctgatgttcagctcagacatagctttctggctgacagcatcatcccagagctactgaaagatgaaggttagctggacccagcactgttatgtsgttaacatcccygtctgtataatagatcctttctttttgaatgaagatgcacctagcccaatttgtcccttctcttgtggcagtcagcttagaatcatagaatcacaaggttggaaaggacctacaagatcatctagtccaactgtcctcccattacccttgctaccacaagctactaaaccatctctct

SEQ ID NO: 45065 - DNA, 600 bp, Chicken  19866894284520_5
gtaagaacagattacactggccagctggcctgttctaaggagtaccagaaggctttgttgctcaagctatgggtaggatgaatagttgtagagactgggccaccaggarctgctgtgacctttgcagaaccctggagcaacaggagcctgggttctgcccagcagtgcagtgtggcctgtttgggaaagwgagggggaattttagagctgatgttcagctcagacatagctttctggctgacagcatcatcccagagctactgaaagatgaaggttagctggacccagcactgttatgtsgttaacatcccygtctgtataatagatcctttctttttgaatgaagatgcacctagcccaatttgtcccttctcttgtggcagtcagcttagaatcatagaatcacaaggttggaaaggacctacaagatcatctagtccaactgtcctcccattacccttgctaccacaagctactaaaccatctctcttatccagacacctcttgaacactgtcaggggtggtgactccaccacctccctgggcaggccattccagtgtctggccactctctgagagaaaaagtttttccttatgtct

SEQ ID NO: 45066 - DNA, 600 bp, Chicken  19866894284520_6
tacactggccagctggcctgttctaaggagtaccagaaggctttgttgctcaagctatgggtaggatgaatagttgtagagactgggccaccaggarctgctgtgacctttgcagaaccctggagcaacaggagcctgggttctgcccagcagtgcagtgtggcctgtttgggaaagwgagggggaattttagagctgatgttcagctcagacatagctttctggctgacagcatcatcccagagctactgaaagatgaaggttagctggacccagcactgttatgtsgttaacatcccygtctgtataatagatcctttctttttgaatgaagatgcacctagcccaatttgtcccttctcttgtggcagtcagcttagaatcatagaatcacaaggttggaaaggacctacaagatcatctagtccaactgtcctcccattacccttgctaccacaagctactaaaccatctctcttatccagacacctcttgaacactgtcaggggtggtgactccaccacctccctgggcaggccattccagtgtctggccactctctgagagaaaaagtttttccttatgtctaatctaagcctc

SEQ ID NO: 45067 - DNA, 600 bp, Chicken  19866894284528_1
gtggaagcagctgacataatttgaatatcagaagtaaattgctaagttaggtatgcagaagtgtaacgcttctcccagaatggaaggtaccaaattgcttggcctggagggtgaggagtggggctgtgcatcggcagaggcatagcatggccttcctccagtgggtttcatttctgttagctgaaatgattctgcaaatcagagtcaagaatgctcacgagctgagagcagaaatttgctggcagacatcttccagtgtagtttttctttcccttttcttgttcggctttgtgaaagtgrccataggtggttatagccccatccatacaaggcagggggttmtgccaggattcactggatgtggcagcagcagggttagctccatttacagtgcttctaaaccttggcataggttccaatcacacattcagcagatgaatgtatggctgtaacaycttcagattgggtgatggagtcgcatgtttctctaccgtagctttttgtttggagacacttaatttttttagggttaaatttacttggtattattcccaaccatcaccctgaaatgaatattccaaagtggggcagtgtctaagc

SEQ ID NO: 45068 - DNA, 600 bp, Chicken  19866894284528_2
taagttaggtatgcagaagtgtaacgcttctcccagaatggaaggtaccaaattgcttggcctggagggtgaggagtggggctgtgcatcggcagaggcatagcatggccttcctccagtgggtttcatttctgttagctgaaatgattctgcaaatcagagtcaagaatgctcacgagctgagagcagaaatttgctggcagacatcttccagtgtagtttttctttcccttttcttgttcggctttgtgaaagtgrccataggtggttatagccccatccatacaaggcagggggttmtgccaggattcactggatgtggcagcagcagggttagctccatttacagtgcttctaaaccttggcataggttccaatcacacattcagcagatgaatgtatggctgtaacaycttcagattgggtgatggagtcgcatgtttctctaccgtagctttttgtttggagacacttaatttttttagggttaaatttacttggtattattcccaaccatcaccctgaaatgaatattccaaagtggggcagtgtctaagctactgctcagccttctctgagccagaagaaggaattacattc

SEQ ID NO: 45069 - DNA, 600 bp, Chicken  19866894284528_3
ctccagtgggtttcatttctgttagctgaaatgattctgcaaatcagagtcaagaatgctcacgagctgagagcagaaatttgctggcagacatcttccagtgtagtttttctttcccttttcttgttcggctttgtgaaagtgrccataggtggttatagccccatccatacaaggcagggggttmtgccaggattcactggatgtggcagcagcagggttagctccatttacagtgcttctaaaccttggcataggttccaatcacacattcagcagatgaatgtatggctgtaacaycttcagattgggtgatggagtcgcatgtttctctaccgtagctttttgtttggagacacttaatttttttagggttaaatttacttggtattattcccaaccatcaccctgaaatgaatattccaaagtggggcagtgtctaagctactgctcagccttctctgagccagaagaaggaattacattcctgtctgtgtgctcaccaagtccagctattgcccttcttttcaaaaagactccaactaaatgtaaatctgtctccatctgtgacagcccacagtcatctgtttaccaaaataa

SEQ ID NO: 45070 - DNA, 600 bp, Chicken  19866894284528_4
aagctttggtatttaatgccttttttatggttaataatgcatcaaaagcatttctagtcttgagctgtcattatatcacatacgtgatgtgctggatgcatttaattgactaaaaaaacttccaggcagtttttattttaaaaaatactaatacgtgattaccaactcttacttctccccatctctgtcttttagcacattgtctgctggtatagagcagccggttgaaaatgcttatggagagcttagctttcaggagacgagcggtcatacataaacaataaaagctgcttgtttgckgagttctcctgaagcagagtttgctttttaatttttttttttagcataaaagcaagttaactcaggagactgttattagacctggcgcatgcttaagttagaaaagggctggcctgggacagaatacgtggctctgcccggtgggaattcttctctcccaccaccaaaatgagagttactgtgctgaaccatggggggcgaggggacaaaaaaaaaagcacatctgataggcactgttgaagtcaaaagcttcctatatgaatttgatactatgcactaataggtaaataacaaaacagt

SEQ ID NO: 45071 - DNA, 599 bp, Chicken  19866894284532_1
  misc_feature (1)..(129): n is any nucleotide
nnnnnnnnnnnnnnnnnnnnnnnnnnnnnnnnnnnnnnnnnnnnnnnnnnnnnnnnnnnnnnnnnnnnnnnnnnnnnnnnnnnnnnnnnnnnnnnnnnnnnnnnnnnnnnnnnnnnnnnnnnnnnnnnncaatttcagaaatactttttaaatggcattggtacttttttgcagcttttggtttggaaatccagtttgctccagtcctctcagtctacatgtgacgacagaagagaaactggcgaaaaaagatttaagaaatcctttcagaagtacagaaagtggctttactagaaacayagaaatgggattttcaacgcttgatatttcagtatctaccagcactaacatcttaaagacctgagtctcctctcatgttcactgacataattgagaattagttccacagtggatcccatcaatttacatcccagcacaaaaagcagaagccaaggccagatgtaaaaaatttcacataaactggaattcccagctgtgttttcrttcaaactgttcataaagtatcagactttggcacttggccaaaatggaacacttggaagattttctagagcagccctcatcaataaagttttgtg

SEQ ID NO: 45072 - DNA, 600 bp, Chicken  19866894284532_2
tcctctcagtctacatgtgacgacagaagagaaactggcgaaaaaagatttaagaaatcctttcagaagtacagaaagtggctttactagaaacayagaaatgggattttcaacgcttgatatttcagtatctaccagcactaacatcttaaagacctgagtctcctctcatgttcactgacataattgagaattagttccacagtggatcccatcaatttacatcccagcacaaaaagcagaagccaaggccagatgtaaaaaatttcacataaactggaattcccagctgtgttttcrttcaaactgttcataaagtatcagactttggcacttggccaaaatggaacacttggaagattttctagagcagccctcatcaataaagttttgtgccacagaaaggaagaaggaagataaacatgctgggggcaggctctttgtgygtgtgagtgaaaaacagctgaactttgtgagggctcagaaacctagaggaagagtgtagccccaagagagatgaatgagtagatgcaatataaatggggtgtccaatgcaaaattaccacgcagctgtacagaggggaacgtggactgacatgc

SEQ ID NO: 45073 - DNA, 547 bp, Chicken  19866894284532_3
tcttaaagacctgagtctcctctcatgttcactgacataattgagaattagttccacagtggatcccatcaatttacatcccagcacaaaaagcagaagccaaggccagatgtaaaaaatttcacataaactggaattcccagctgtgttttcrttcaaactgttcataaagtatcagactttggcacttggccaaaatggaacacttggaagattttctagagcagccctcatcaataaagttttgtgccacagaaaggaagaaggaagataaacatgctgggggcaggctctttgtgygtgtgagtgaaaaacagctgaactttgtgagggctcagaaacctagaggaagagtgtagccccaagagagatgaatgagtagatgcaatataaatggggtgtccaatgcaaaattaccacgcagctgtacagaggggaacgtggactgacatgcaggacggttcttcattatggcataactgttttgtgaaagctcgttcatcttggacaggtagacataaaacccatggagcctggggggtcagga

SEQ ID NO: 45074 - DNA, 600 bp, Chicken  19866894284533_1
tttcatcttagaagacagccattgaaaaggagtaagatattttaataacattctacaggaagaatactttggtttaagcttttgttgaacgtctccaatgcgtctatcttagaatgtggcaaatgaaatcctattctagtgaaggccaaatagtgctcccccagagataagttgagaataaattcagtgacctcagtggattatactattgtgtcatgaattgaaagtatagtttggctcttgctctgctaagcaagggaactgtcgactttataaatgaaaccagccatgtggcaacarcctagtttccctcatccaacacaaattctgttgttaattttcatttatattaagaaagctttatttgggtcattaagcatttctcttttagcacatcaacttttgagtgtagaaatcagtgatatggcttccaaaagtagcaggcttgtcagcaatgaaagaagaaagaagatccaggaagacaactttaagtcattttaaaacttgttagttgtaactaattattttaatccatgtattaactggctgaaaatacaagatgagttgtaagatcttataagtacatcaaagacttttggt

SEQ ID NO: 45075 - DNA, 600 bp, Chicken  19866894284533_2
tctcctcaataaaaagtaaaacagagggcaatgcccaaaagccaaggtctcggtctggaccttaggaaactctaggaagcaagaaatatgaaaattgtcagtgggcagtgcaggtgtccagaggtgttgtgggatctccctccatggaggatttaaatacatgatcggacaatatctgagctgatgattggtggtagccctgcttttagggctagatgactcaagaggctttctccaaacaacacttctacacacgtatattttggcaacagaagggcagtatttgctggtatcactgcrtattttcttggaatgcatcttmcttacagtatggcaatactttactcacggttaacatgaaagggattcgttggtgtacaggggtgcataagtgctcagtataaacctrccatgtttttggtataatttttttccaaartttgtgtagtagaaagctttcagtcaaattctgtgagcatcctttacatgagaatttggaattccaggagttgcttcaattgcaaatgagagctgatattatcagtctcactgattcctatctcttagtcacccacaacagtgaataccttacctactgca

SEQ ID NO: 45076 - DNA, 600 bp, Chicken  19866894284533_3
agagggcaatgcccaaaagccaaggtctcggtctggaccttaggaaactctaggaagcaagaaatatgaaaattgtcagtgggcagtgcaggtgtccagaggtgttgtgggatctccctccatggaggatttaaatacatgatcggacaatatctgagctgatgattggtggtagccctgcttttagggctagatgactcaagaggctttctccaaacaacacttctacacacgtatattttggcaacagaagggcagtatttgctggtatcactgcrtattttcttggaatgcatcttmcttacagtatggcaatactttactcacggttaacatgaaagggattcgttggtgtacaggggtgcataagtgctcagtataaacctrccatgtttttggtataatttttttccaaartttgtgtagtagaaagctttcagtcaaattctgtgagcatcctttacatgagaatttggaattccaggagttgcttcaattgcaaatgagagctgatattatcagtctcactgattcctatctcttagtcacccacaacagtgaataccttacctactgcattcagtactctaggaaatctcc

SEQ ID NO: 45077 - DNA, 600 bp, Chicken  19866894284533_4
gcaggtgtccagaggtgttgtgggatctccctccatggaggatttaaatacatgatcggacaatatctgagctgatgattggtggtagccctgcttttagggctagatgactcaagaggctttctccaaacaacacttctacacacgtatattttggcaacagaagggcagtatttgctggtatcactgcrtattttcttggaatgcatcttmcttacagtatggcaatactttactcacggttaacatgaaagggattcgttggtgtacaggggtgcataagtgctcagtataaacctrccatgtttttggtataatttttttccaaartttgtgtagtagaaagctttcagtcaaattctgtgagcatcctttacatgagaatttggaattccaggagttgcttcaattgcaaatgagagctgatattatcagtctcactgattcctatctcttagtcacccacaacagtgaataccttacctactgcattcagtactctaggaaatctcctaatcttartaggaaagactaattaacagcaagcatatctcatactctaagattctatgatgtgtgtataagttttgctatcatttt

SEQ ID NO: 45078 - DNA, 600 bp, Chicken  19866894284533_5
ctccatggaggatttaaatacatgatcggacaatatctgagctgatgattggtggtagccctgcttttagggctagatgactcaagaggctttctccaaacaacacttctacacacgtatattttggcaacagaagggcagtatttgctggtatcactgcrtattttcttggaatgcatcttmcttacagtatggcaatactttactcacggttaacatgaaagggattcgttggtgtacaggggtgcataagtgctcagtataaacctrccatgtttttggtataatttttttccaaartttgtgtagtagaaagctttcagtcaaattctgtgagcatcctttacatgagaatttggaattccaggagttgcttcaattgcaaatgagagctgatattatcagtctcactgattcctatctcttagtcacccacaacagtgaataccttacctactgcattcagtactctaggaaatctcctaatcttartaggaaagactaattaacagcaagcatatctcatactctaagattctatgatgtgtgtataagttttgctatcattttcagctctctgcaaaagtagttacctcattt

SEQ ID NO: 45079 - DNA, 469 bp, Chicken  19866894284533_6
tggcaatactttactcacggttaacatgaaagggattcgttggtgtacaggggtgcataagtgctcagtataaacctrccatgtttttggtataatttttttccaaartttgtgtagtagaaagctttcagtcaaattctgtgagcatcctttacatgagaatttggaattccaggagttgcttcaattgcaaatgagagctgatattatcagtctcactgattcctatctcttagtcacccacaacagtgaataccttacctactgcattcagtactctaggaaatctcctaatcttartaggaaagactaattaacagcaagcatatctcatactctaagattctatgatgtgtgtataagttttgctatcattttcagctctctgcaaaagtagttacctcattttttatagctccagcctaaaccagtttggataatcctacaatgcatccaataacattaaaga

SEQ ID NO: 45080 - DNA, 600 bp, Chicken  19866894284538_1
cagagttatttccttactgcaagccacccaactgatatgaacatcagatcacataattccagcctacattgctgcttagctggcagaagtcatgcctgagagcagaaagcatcactgcttctccagcaaacttcctgccacacgttaacgacatcgtcctttaattttctaccccacttccacagaacatacaacttcttactcctctgtgcagagcagagctgaaaatgggctgatggtgttcaccctctgaaaagtgcattaaaaaagcattagggttgtgacacagaatgacaaaarcaaaagagagatcagtttctggagaaaagtaccatgtgtcctctcgtacttatcctaccatcacacatgatttaactgggatgcttaattacgttgaggcactgaaaaatgtctacatgaagggatagactgagaagttcagaggttaaaatataggcatgtatttcttattaatgcatgtcagatacatgactaaagcaggataacctgccatctagttcaaataaaaatagaggtgggttgttgtttttctgtgtgtgtttttaaaaatgtgtagtgaaacaatgctttacccagcta

SEQ ID NO: 45081 - DNA, 600 bp, Chicken  19866894284547_1
aaataaaaagaacacaaaacctaagcttccaatgactccggactgtacagatttaagaaaaacactgaatattcccaggcttacaatagagttataataagtggcaataccaatcactgttaagaaacttaattcaaatgctgcctcagttgccaagaaagcactgcagatcgaatcagggtgagtagtgatgccaggaaaatgagcccttttacacctgcagtaatccacactgtttcctcattgccattgcatgggagtgagcagttgggatggaagaggctgattctggcttctttygtagaatcatagaatcacagaatggcctgggttgaaaaggaycacaatgatcatccagatccaaccccccygctatgtgcagggtcgccaaccagcagaccaggctgcccagagccacatccagcctggcctttgtttcagagaataaaaatgcaaaagctgcaaaaggttattttttaaatgacgaagtaatgctgattgtgaaggtctctgaattacaagaacgtcttacacaacaaaaaggtgctgaagaaatctataatgaacaaaaacttaatttaagactgttctccaaggaga

SEQ ID NO: 45082 - DNA, 600 bp, Chicken  19866894284547_2
ctgtacagatttaagaaaaacactgaatattcccaggcttacaatagagttataataagtggcaataccaatcactgttaagaaacttaattcaaatgctgcctcagttgccaagaaagcactgcagatcgaatcagggtgagtagtgatgccaggaaaatgagcccttttacacctgcagtaatccacactgtttcctcattgccattgcatgggagtgagcagttgggatggaagaggctgattctggcttctttygtagaatcatagaatcacagaatggcctgggttgaaaaggaycacaatgatcatccagatccaaccccccygctatgtgcagggtcgccaaccagcagaccaggctgcccagagccacatccagcctggcctttgtttcagagaataaaaatgcaaaagctgcaaaaggttattttttaaatgacgaagtaatgctgattgtgaaggtctctgaattacaagaacgtcttacacaacaaaaaggtgctgaagaaatctataatgaacaaaaacttaatttaagactgttctccaaggagaacaacccaaagcgtatctccccaaagcagcgaagaaattcac

SEQ ID NO: 45083 - DNA, 600 bp, Chicken  19866894284547_3
ttcccaggcttacaatagagttataataagtggcaataccaatcactgttaagaaacttaattcaaatgctgcctcagttgccaagaaagcactgcagatcgaatcagggtgagtagtgatgccaggaaaatgagcccttttacacctgcagtaatccacactgtttcctcattgccattgcatgggagtgagcagttgggatggaagaggctgattctggcttctttygtagaatcatagaatcacagaatggcctgggttgaaaaggaycacaatgatcatccagatccaaccccccygctatgtgcagggtcgccaaccagcagaccaggctgcccagagccacatccagcctggcctttgtttcagagaataaaaatgcaaaagctgcaaaaggttattttttaaatgacgaagtaatgctgattgtgaaggtctctgaattacaagaacgtcttacacaacaaaaaggtgctgaagaaatctataatgaacaaaaacttaatttaagactgttctccaaggagaacaacccaaagcgtatctccccaaagcagcgaagaaattcactgtaacaaaaacttgccttttttttgttc

SEQ ID NO: 45084 - DNA, 600 bp, Chicken  19866894284555_1
ttttgattatttactatcagtgaaattaccccatggaaaggggggaaggcaaacctggaggtcttaaattttcagaaaagttaagcctaggattttgctttgcattttggaaacaagatcctgttgtcatgttgctacatgtttataaactgcttacatttattttagtaagagaagttattctaagtattaattagaaaaaaagtatggctctgttaacaccaatggagcaatcaccttgccctgcgtgtgcttggttaaacgtacagtttttaatatgggccaataagatgtatattyttgtgctttctcaatggaattttaaacctggaaaacatttacattaacattcaacaaaatgtgtgtaagactaagctttctatctatgttcacagtcctcagcacaggtttgaattcacttactgtgaactggggcttcctgggtggcttcaggagctggattggctctcccgtggttgcagtggttgcactcagacccccttttgtaaaaagaggatattagtacagcttatcttccatccttttcttttttctcgttttttccttttgttaaattgctaattatgcctgttccttgct

SEQ ID NO: 45085 - DNA, 600 bp, Chicken  19866894284561_1
caagaccatattgccttagatgtgaccttctggtgtggaagttaaatgttctctgaaaatcttgcatataacatgtacttctctatatttactcttaatgtaatatcttcaaagaataccaaaaagtcagtgaaacatgaactttttctataacagcctcggagcccgatcctttatacatgacttcagtaggatttacacatgtgtaagggctgtggaccatgtgtgcaaatatggacacatgttgtatcatattaaggttcaataatagggctggccaggaaacaaggattctgtttygtgaaaaattctgaggttttggcatttggtttcattctgatgaagacttttcagaatgttttggaaacaagacggtccaagaaacagacacatcaaccacaggtctgggcagttacctgtcacggtgcartccttcttcaggcayggcttcagacctcaccgtgcctatgtaaacctgcacatgccctgggcaaggtggatttcctcactccacacaattgggtgtccgcaagcaaaagaatcgagcatctytcttatacctgaaattccactttcattttgaagtgggcagcctctgtc

SEQ ID NO: 45086 - DNA, 600 bp, Chicken  19866894284561_2
tgaaacatgaactttttctataacagcctcggagcccgatcctttatacatgacttcagtaggatttacacatgtgtaagggctgtggaccatgtgtgcaaatatggacacatgttgtatcatattaaggttcaataatagggctggccaggaaacaaggattctgtttygtgaaaaattctgaggttttggcatttggtttcattctgatgaagacttttcagaatgttttggaaacaagacggtccaagaaacagacacatcaaccacaggtctgggcagttacctgtcacggtgcartccttcttcaggcayggcttcagacctcaccgtgcctatgtaaacctgcacatgccctgggcaaggtggatttcctcactccacacaattgggtgtccgcaagcaaaagaatcgagcatctytcttatacctgaaattccactttcattttgaagtgggcagcctctgtccaggtctgagcaagaatcagtgctgcgctgtgttctggctcacagagcatcatttagcactggagggggtgtgctctgtcatagcacgggtgacagccacagcactgtgctctgctgtgtgccaaggcgt

SEQ ID NO: 45087 - DNA, 600 bp, Chicken  19866894284561_3
ttctataacagcctcggagcccgatcctttatacatgacttcagtaggatttacacatgtgtaagggctgtggaccatgtgtgcaaatatggacacatgttgtatcatattaaggttcaataatagggctggccaggaaacaaggattctgtttygtgaaaaattctgaggttttggcatttggtttcattctgatgaagacttttcagaatgttttggaaacaagacggtccaagaaacagacacatcaaccacaggtctgggcagttacctgtcacggtgcartccttcttcaggcayggcttcagacctcaccgtgcctatgtaaacctgcacatgccctgggcaaggtggatttcctcactccacacaattgggtgtccgcaagcaaaagaatcgagcatctytcttatacctgaaattccactttcattttgaagtgggcagcctctgtccaggtctgagcaagaatcagtgctgcgctgtgttctggctcacagagcatcatttagcactggagggggtgtgctctgtcatagcacgggtgacagccacagcactgtgctctgctgtgtgccaaggcgtcattccccaagcagc

SEQ ID NO: 45088 - DNA, 600 bp, Chicken  19866894284561_4
tattaaggttcaataatagggctggccaggaaacaaggattctgtttygtgaaaaattctgaggttttggcatttggtttcattctgatgaagacttttcagaatgttttggaaacaagacggtccaagaaacagacacatcaaccacaggtctgggcagttacctgtcacggtgcartccttcttcaggcayggcttcagacctcaccgtgcctatgtaaacctgcacatgccctgggcaaggtggatttcctcactccacacaattgggtgtccgcaagcaaaagaatcgagcatctytcttatacctgaaattccactttcattttgaagtgggcagcctctgtccaggtctgagcaagaatcagtgctgcgctgtgttctggctcacagagcatcatttagcactggagggggtgtgctctgtcatagcacgggtgacagccacagcactgtgctctgctgtgtgccaaggcgtcattccccaagcagccaccatctgctcagagtgctctcatgcagcagtgtttgggacagtgatgtaaggagaagggccaggggtgacagttttgtatctcaggtgtttacgatgtgccgcag

SEQ ID NO: 45089 - DNA, 592 bp, Chicken  19866894284564_1
tgtcttgtgataactcactaacacgctgcattgccaagtgcttttcagaattataaaactcttcccatttgcagctccccgtggacattttttaatcagctaatttctcccagggctccccaggaaaggccggagttcaggcaggattcccattagaaataggaaaggcctgtctgatcactgagtttatccagctgtgtaatttgcagtgaataatgaccaccggggctctagcaaattgtgggggcagtggggcaagggagggatgtggctgctatgaatcatcacagggtcactatragcttgctgtctgcacggacataatatggcactttttgttgacgtggtctgcctgtatgtgtttatgtttgtatttacttgtttatagcatctttgtgccagatgagcctttccttcaagtagcaaacccataagcagagatgatttggagaaagaaggcacctcctggggccagggcaggtgccactctttgttaggatacttgcataatatctaggggtaaaccacactcgtttctaggaggtcaagaaatgtggagatgtgacaccgagggacaggtttaatgggcaat

SEQ ID NO: 45090 - DNA, 600 bp, Chicken  19866894284577_1
agaaatcatctacctggacttgcacaaagtgtttgacactatcctgcacaacatcctggttggtaaattggagaaaaattgatttgatggataaggccacttgctggtaaggaattgcctgggtggtcacactcagagagttgtggtcaatgggtcaatatccaagtggagaccagtaaagagtagcattcctcagtgatccgtgctggaacaggttctatttaacatctttgtaggtgacgtgggcagcaggatcaagtgcatactcagcaagtttgcaggtcacacctgagctgagcrgtgcaggtgacatgctagaggtaagggatgccatccagaggaacctgaagagccaacctcatgaagttccataaggccaagtgcaaggtcccacacctgggttggggtaatctcaagcacaaacacagactgggtggagaactgcttcagagcagccccgaggaaaaggatttaggagtgctgattgatgaaagattcaacgtgagccagcagcatgcacttgcagcctagaaggccaactgcatcctgggttgcatcaagagaagtgtgaccagcaggtcaaaggttgtgatcccgcct

SEQ ID NO: 45091 - DNA, 600 bp, Chicken  19866894284587_1
tatattcaatacatcaagaagtgcatttttctcatagtttgtggttgcaaaacagtggatcatctagtctgacttaaagagttaagcagactaaaaatacaatccagttttgctaatactgagcttaacagccattctgaatatagcaaagcacacaaacaagaagggcctgctgtcttgacatgtaaaggtcaataaatagaggaaaggatgtttgtcttctgttgttgtatcagcgcttgatcatggtgattattgaaaatatgtccctggtatttgattgaatttacccagctgtarcgtctgtccattgttagggcgtcagagggcagtggagggattgttgttgcacctttttctgctattactcaagaacacaaagtaactgtagcatatctgagagaattagaataaaattgttttttgcttatgcaaagcattcgcttcttktggactatgctagtgatattctgagatraaatccactaagcccacctagaagcctgtcggacctctctctggaatgcatgatttgacttctgagcaggctcagaagtaccttaagattgggagcagcagtttcacagtttcagcgtgcac

SEQ ID NO: 45092 - DNA, 600 bp, Chicken  19866894284587_2
gcacacaaacaagaagggcctgctgtcttgacatgtaaaggtcaataaatagaggaaaggatgtttgtcttctgttgttgtatcagcgcttgatcatggtgattattgaaaatatgtccctggtatttgattgaatttacccagctgtarcgtctgtccattgttagggcgtcagagggcagtggagggattgttgttgcacctttttctgctattactcaagaacacaaagtaactgtagcatatctgagagaattagaataaaattgttttttgcttatgcaaagcattcgcttcttktggactatgctagtgatattctgagatraaatccactaagcccacctagaagcctgtcggacctctctctggaatgcatgatttgacttctgagcaggctcagaagtaccttaagattgggagcagcagtttcacagtttcagcgtgcacaggctgctgtactcttcatcccaccaccaggagtatctatgaggtgctgtatgaagaccctatatagatcagaggtggatggatttggagtaacactgtgcttctagcctctctgaaattcttctgatgtattcaagtctcactgttagg

SEQ ID NO: 45093 - DNA, 600 bp, Chicken  19866894284587_3
tgacatgtaaaggtcaataaatagaggaaaggatgtttgtcttctgttgttgtatcagcgcttgatcatggtgattattgaaaatatgtccctggtatttgattgaatttacccagctgtarcgtctgtccattgttagggcgtcagagggcagtggagggattgttgttgcacctttttctgctattactcaagaacacaaagtaactgtagcatatctgagagaattagaataaaattgttttttgcttatgcaaagcattcgcttcttktggactatgctagtgatattctgagatraaatccactaagcccacctagaagcctgtcggacctctctctggaatgcatgatttgacttctgagcaggctcagaagtaccttaagattgggagcagcagtttcacagtttcagcgtgcacaggctgctgtactcttcatcccaccaccaggagtatctatgaggtgctgtatgaagaccctatatagatcagaggtggatggatttggagtaacactgtgcttctagcctctctgaaattcttctgatgtattcaagtctcactgttaggctttacttggaagctttaacaatggcca

SEQ ID NO: 45094 - DNA, 505 bp, Chicken  19866894284594_1
acagcatccatgggcacaaaaacaaagggggaaaacaaacctgcttacccttaaaaagcctcaggtacacaaagatctccagagagatacctctatctccactgccagcccttaaatgaggtctgggaaggggtggatgctggctccattcctttcagtcattcaggtgccttgcatgcacctgagctgctctgggatggccctgccttcccaccaggtgctcagtcactggctcaagccgtgacttagcatttctgctacacatggtcattcaagggaaatgtaaccaactgcaacatycacagtcatttgcacaataatagagcacagattatatgaagcatttctgctatgaaaatgtgaattagtgaattcttttaacatacagttttaaaaaagaaaaaagaaacattatgaatgagaagcagtgaaaatggagacactcacagttctcaccctcacaaagaacttaggtgatatcctgatcaaaatgtaaggacaaggt

SEQ ID NO: 45095 - DNA, 599 bp, Chicken  19866894284596_1
  misc_feature (1)..(96): n is any nucleotide
nnnnnnnnnnnnnnnnnnnnnnnnnnnnnnnnnnnnnnnnnnnnnnnnnnnnnnnnnnnnnnnnnnnnnnnnnnnnnnnnnnnnnnnnnnnnnnnnattattgcagtaataacatgtcaatgtccaacttcagaaatgccttctatgcctcctggagattttgttttcagtattaattttggtcagtccatatctttgaactacccgaagccacaagcagtgtgattctgatacaggcagcctgttacaacatttaagatacattcacaaaatcaaaaagtacctgcagaaatgagtggytttgtcagacttcgacttctgtcgcatactattctactttctacgacattgytygcaccaaaaatctgttttaggagaaaacagagaaacatggaagaactgcagaaaaagttggttggttggttgattttttctgctctctctgtgcattgttcctggtgctgatcccagactgsgygttcaggtcctgtaggagctctggagaagtgctttcagataccacctgctgtcagaacagcagcttggggctccaccgctgcctcgtgctgcaggattgggttctgaagggaccgcagccg

SEQ ID NO: 45096 - DNA, 599 bp, Chicken  19866894284596_2
  misc_feature (1)..(44): n is any nucleotide
nnnnnnnnnnnnnnnnnnnnnnnnnnnnnnnnnnnnnnnnnnnnattattgcagtaataacatgtcaatgtccaacttcagaaatgccttctatgcctcctggagattttgttttcagtattaattttggtcagtccatatctttgaactacccgaagccacaagcagtgtgattctgatacaggcagcctgttacaacatttaagatacattcacaaaatcaaaaagtacctgcagaaatgagtggytttgtcagacttcgacttctgtcgcatactattctactttctacgacattgytygcaccaaaaatctgttttaggagaaaacagagaaacatggaagaactgcagaaaaagttggttggttggttgattttttctgctctctctgtgcattgttcctggtgctgatcccagactgsgygttcaggtcctgtaggagctctggagaagtgctttcagataccacctgctgtcagaacagcagcttggggctccaccgctgcctcgtgctgcaggattgggttctgaagggaccgcagccgtgagttctgcagccrcctttcctcctctcatactgagcagctcttgtttttt

SEQ ID NO: 45097 - DNA, 599 bp, Chicken  19866894284596_3
  misc_feature (1)..(42): n is any nucleotide
nnnnnnnnnnnnnnnnnnnnnnnnnnnnnnnnnnnnnnnnnnattattgcagtaataacatgtcaatgtccaacttcagaaatgccttctatgcctcctggagattttgttttcagtattaattttggtcagtccatatctttgaactacccgaagccacaagcagtgtgattctgatacaggcagcctgttacaacatttaagatacattcacaaaatcaaaaagtacctgcagaaatgagtggytttgtcagacttcgacttctgtcgcatactattctactttctacgacattgytygcaccaaaaatctgttttaggagaaaacagagaaacatggaagaactgcagaaaaagttggttggttggttgattttttctgctctctctgtgcattgttcctggtgctgatcccagactgsgygttcaggtcctgtaggagctctggagaagtgctttcagataccacctgctgtcagaacagcagcttggggctccaccgctgcctcgtgctgcaggattgggttctgaagggaccgcagccgtgagttctgcagccrcctttcctcctctcatactgagcagctcttgttttttcc

SEQ ID NO: 45098 - DNA, 600 bp, Chicken  19866894284596_4
ttttggtcagtccatatctttgaactacccgaagccacaagcagtgtgattctgatacaggcagcctgttacaacatttaagatacattcacaaaatcaaaaagtacctgcagaaatgagtggytttgtcagacttcgacttctgtcgcatactattctactttctacgacattgytygcaccaaaaatctgttttaggagaaaacagagaaacatggaagaactgcagaaaaagttggttggttggttgattttttctgctctctctgtgcattgttcctggtgctgatcccagactgsgygttcaggtcctgtaggagctctggagaagtgctttcagataccacctgctgtcagaacagcagcttggggctccaccgctgcctcgtgctgcaggattgggttctgaagggaccgcagccgtgagttctgcagccrcctttcctcctctcatactgagcagctcttgttttttccttctgtttcacgttggttttgccattttgaacgaggcagtgatagtgctctgctggtatagagtgctgagaattgcacatagaaagtccttgtgcatgctaaataatactgagcagttctggc

SEQ ID NO: 45099 - DNA, 600 bp, Chicken  19866894284596_5
ttggtcagtccatatctttgaactacccgaagccacaagcagtgtgattctgatacaggcagcctgttacaacatttaagatacattcacaaaatcaaaaagtacctgcagaaatgagtggytttgtcagacttcgacttctgtcgcatactattctactttctacgacattgytygcaccaaaaatctgttttaggagaaaacagagaaacatggaagaactgcagaaaaagttggttggttggttgattttttctgctctctctgtgcattgttcctggtgctgatcccagactgsgygttcaggtcctgtaggagctctggagaagtgctttcagataccacctgctgtcagaacagcagcttggggctccaccgctgcctcgtgctgcaggattgggttctgaagggaccgcagccgtgagttctgcagccrcctttcctcctctcatactgagcagctcttgttttttccttctgtttcacgttggttttgccattttgaacgaggcagtgatagtgctctgctggtatagagtgctgagaattgcacatagaaagtccttgtgcatgctaaataatactgagcagttctggcag

SEQ ID NO: 45100 - DNA, 600 bp, Chicken  19866894284596_6
acttctgtcgcatactattctactttctacgacattgytygcaccaaaaatctgttttaggagaaaacagagaaacatggaagaactgcagaaaaagttggttggttggttgattttttctgctctctctgtgcattgttcctggtgctgatcccagactgsgygttcaggtcctgtaggagctctggagaagtgctttcagataccacctgctgtcagaacagcagcttggggctccaccgctgcctcgtgctgcaggattgggttctgaagggaccgcagccgtgagttctgcagccrcctttcctcctctcatactgagcagctcttgttttttccttctgtttcacgttggttttgccattttgaacgaggcagtgatagtgctctgctggtatagagtgctgagaattgcacatagaaagtccttgtgcatgctaaataatactgagcagttctggcagcgagtgaatgtttaaaaggtacgggtgtgtgctgaaagaattaagaaactaccatttacaccaaatgtgatcttcaggtgactaagagctacagcaaattctaggcacaaaccagagatgtggtaaggagggccat

SEQ ID NO: 45101 - DNA, 600 bp, Chicken  19866894284605_1
tattcctttttaaggcagagatttactgaagccagttctgctgtgtttgcttaggtttatagcaagacaactgtccatctaaattgttaaggtgcttctaatgaatacttaaacaaaaacactataaataaactgcaaagctgcacctcactggctttatttccttgggaatgttttttcagtttaactcgcagaagatctcccataaggctgaggaagatgtggatgactcagataatgccagtgagttatctgatatgttcacctagacttcacctatttgattatatatgccattayggctcaggggttaccatttactaatgagtttgattaactctgaaaattagacttcagtatatatagttctcttcaaaatacctttccactctagtcctgacagtgatgtttgtgatgcatcagagagtctggagtgaatacgtgaaagcacactcaccatgtttcagtaactgcacctacaggtcaagagtatgggagacacaggtgacagatgctttgatgaatacagagctatgggataccctacagcaactttatctacatagaaatctgcaccatcacatttggtctaggagtttg

SEQ ID NO: 45102 - DNA, 599 bp, Chicken  19866894284606_1
  misc_feature (1)..(35): n is any nucleotide
nnnnnnnnnnnnnnnnnnnnnnnnnnnnnnnnnnntgcagaatctgagcatcaaattgtattgtttttactgcttttttttttttttttttttaaatagaaaagtctttgggacaaggaaagatgataatgttaatgttatgttaaacatctcgtctgattagctgaggaggaaattctatcagagctctcccagacaaatatagcaacatgaaagatatctgtggtttcacctgatctccaaacaggtcattaatagtaatgaaacttcaaagactctcaagttaattcagtaaacctktagctttagccatcaggattttttaaagaaaagtaatctttcaatttagctacataaaatattagcattgttttgaaaaatctataggaatattccatctttataactgtgattttagttccttcatctattcctgacttgactggcatcatgtctgttagaatgtcaagctgctagtatgattagattaaaatgaagagagaaatgtgtacagaacatgcaagaatattaccttgatgaacgaatgaaaatggtaatctatactcaaagactatctgatgggtcggcagaaaaataat

SEQ ID NO: 45103 - DNA, 600 bp, Chicken  19866894284606_2
catcaggattttttaaagaaaagtaatctttcaatttagctacataaaatattagcattgttttgaaaaatctataggaatattccatctttataactgtgattttagttccttcatctattcctgacttgactggcatcatgtctgttagaatgtcaagctgctagtatgattagattaaaatgaagagagaaatgtgtacagaacatgcaagaatattaccttgatgaacgaatgaaaatggtaatctatactcaaagactatctgatgggtcggcagaaaaataattgtctgaaatrtttatctctaatagtattttttagaattatttactgataggaaaacttgtaagaagccatttaataatggaactcagaaattatatttcagtatactaggaattgtatgcaccttgaaataagtttgaattaatgaatgcatggtttctttagccttgccattaatccataaggatgtggagtgtgaacacaaaggactcagtgaggtcccacatttatagttaagtccagacagaaacaagaataaaagtacttttaatcatatttgtaataccctagagctagtttaaaaaaaaaaaa

SEQ ID NO: 45104 - DNA, 600 bp, Chicken  19866894284608_1
tgttcattcttctggaggcactagcctccagaaagtcaatttctcttccctttttctctacctctcattattcttaggtactcctgccctcctcctataaataactaattcaatcaatcatgcaagaaattaccctaatgatatactgggcatgtttagattaataaagctctccagtgggagccctggaaagtttgtttgggcaactcagacaagaataattatttatttcttcctgttaatcattccacattaactatttattaatttcagaattccttacatattaaagtaagctaktcatgaagaatcgctttcccacagacttcagagtcatcrgtaattttcatctccatggtttagagaggatgccctatgacaattagggatcatatagcttggattgctcaagatttaaaaattgccacagaagagtgtatcaaaaaaaaaaaaaagactgcgtgaaagtgaatggtgcttatgaatcgtgcatacaaagttctctctctagaaactaaaaagccttgtcatatccatagggatgcttgcaagtatacttcagtatcatgtttggactcacaaccaacctttcaaatgaga

SEQ ID NO: 45105 - DNA, 600 bp, Chicken  19866894284608_2
tttctcttccctttttctctacctctcattattcttaggtactcctgccctcctcctataaataactaattcaatcaatcatgcaagaaattaccctaatgatatactgggcatgtttagattaataaagctctccagtgggagccctggaaagtttgtttgggcaactcagacaagaataattatttatttcttcctgttaatcattccacattaactatttattaatttcagaattccttacatattaaagtaagctaktcatgaagaatcgctttcccacagacttcagagtcatcrgtaattttcatctccatggtttagagaggatgccctatgacaattagggatcatatagcttggattgctcaagatttaaaaattgccacagaagagtgtatcaaaaaaaaaaaaaagactgcgtgaaagtgaatggtgcttatgaatcgtgcatacaaagttctctctctagaaactaaaaagccttgtcatatccatagggatgcttgcaagtatacttcagtatcatgtttggactcacaaccaacctttcaaatgagactgatcccatttatggcaagtacgatttgtaaagcttta

SEQ ID NO: 45106 - DNA, 600 bp, Chicken  19866894284610_1
tcatccactcttacttgaagtggtcaatattttgtcctaaaaataacacacacacgtaacaaagaactcacctatatctttggctcttgaagctaaaggtcttctccactgggtgacaaatttgtatgcatcaagcctaatttcaataatattgttaagtaaggccagaagtggtgccaatggaaaagctgccacaaaaatggttgtgaatccaaactgaagaactaggaaagaaagggaaaggtcacagtgtaactgttgagctctaattctaagggctaagagggtgaagtatttaaygtataaayatctcttactatgctgtaccatagaatagtctattgactgttgtgcaaatcttccttgccaaaagttcagagtgagaatgatcagaacaaatgcacatctatccctgagatgaagtgcaacatctagaatttttagctgggagagaagttcggaggtagacaaaacactttttttaaaagaaattgacattttttactccagtctcaattaggatatctgaatacttgtaaagattacagcttaaagtaccggtgggctgctgtctgagaccttatgtcagtttctagaggt

SEQ ID NO: 45107 - DNA, 600 bp, Chicken  19866894284610_2
tcttacttgaagtggtcaatattttgtcctaaaaataacacacacacgtaacaaagaactcacctatatctttggctcttgaagctaaaggtcttctccactgggtgacaaatttgtatgcatcaagcctaatttcaataatattgttaagtaaggccagaagtggtgccaatggaaaagctgccacaaaaatggttgtgaatccaaactgaagaactaggaaagaaagggaaaggtcacagtgtaactgttgagctctaattctaagggctaagagggtgaagtatttaaygtataaayatctcttactatgctgtaccatagaatagtctattgactgttgtgcaaatcttccttgccaaaagttcagagtgagaatgatcagaacaaatgcacatctatccctgagatgaagtgcaacatctagaatttttagctgggagagaagttcggaggtagacaaaacactttttttaaaagaaattgacattttttactccagtctcaattaggatatctgaatacttgtaaagattacagcttaaagtaccggtgggctgctgtctgagaccttatgtcagtttctagaggtaggtcttc

SEQ ID NO: 45108 - DNA, 600 bp, Chicken  19866894284640_1
agaggacaattaacagataccaaaactgagcaatggtagctcaatgggatcctaagaggtacgtgctcctaactgtagaggaaggaaagcccactaaatcctgtgttttgttcacacatacgtataggacttgggtaggatgacacactctcatttccagtacgagagcattaaaggcatttagaagaggagtagtttacaaagcaagagacaaaaaagaactgctttgctgggtgaatcattgagtaacgcactgtctgtactgagctctccaacccagcagaggaaacaagcagaacrtttctccccccaaacctcaatgcaccacatttatttacagcactgccacagacattaattaactttaaaaactgacaattaaaaaaagtgattttagtcgtttttaaaatcaacgcaaccaaaagacttgcctgcagccacgctgcccaccatcagttaattacagtactatgacaagtctctgtcagatgaccaagcactcagtacactcgtgctcatactgctcaaaacctcgcacagtaagagcaggcagaacaaactggctacatgagctaagtttatctttctaacagctgtcaa

SEQ ID NO: 45109 - DNA, 600 bp, Chicken  19866894284641_1
ttatacattttcctaaaagtctaaacacagaaaagaggtactataagtatctctgtggagattaattgttattatgactttactcagctctgtcatgaaatgcaaagattttctttgagctagaataaaaatagatcacaagcattacatttgatgtaatttcagtcaggattttgtgatatctctgaattgcatgcgggatatgaaagtgagatgttgtctgagagtaatttattgttgtaaagatccttttgtgcatctttgttttgtgtttctacacatttctttcttcttcttctrcttttttttttttttttcccagactgttaaataagggggtatcaagaacactgcagtcgagctttccaracaatgccactcctgggctcatgcacattcttttggaaatctgatttaaaacagaaaacacttctcgtccttttcccaagcaaactggcataattcagatcctatgtccagatcaaggttattttygctggtccgtgccagatatgctcaaatacatgctagtctacactgagtatatatagctcacagaaagcaatgaagaactgagctcctgcaagggaaccagcagta

SEQ ID NO: 45110 - DNA, 600 bp, Chicken  19866894284641_2
tatacattttcctaaaagtctaaacacagaaaagaggtactataagtatctctgtggagattaattgttattatgactttactcagctctgtcatgaaatgcaaagattttctttgagctagaataaaaatagatcacaagcattacatttgatgtaatttcagtcaggattttgtgatatctctgaattgcatgcgggatatgaaagtgagatgttgtctgagagtaatttattgttgtaaagatccttttgtgcatctttgttttgtgtttctacacatttctttcttcttcttcttrttttttttttttttttcccagactgttaaataagggggtatcaagaacactgcagtcgagctttccaracaatgccactcctgggctcatgcacattcttttggaaatctgatttaaaacagaaaacacttctcgtccttttcccaagcaaactggcataattcagatcctatgtccagatcaaggttattttygctggtccgtgccagatatgctcaaatacatgctagtctacactgagtatatatagctcacagaaagcaatgaagaactgagctcctgcaagggaaccagcagtag

SEQ ID NO: 45111 - DNA, 600 bp, Chicken  19866894284641_3
tattatgactttactcagctctgtcatgaaatgcaaagattttctttgagctagaataaaaatagatcacaagcattacatttgatgtaatttcagtcaggattttgtgatatctctgaattgcatgcgggatatgaaagtgagatgttgtctgagagtaatttattgttgtaaagatccttttgtgcatctttgttttgtgtttctacacatttctttcttcttcttcttcttttttttttttttttcccagactgttaaataagggggtatcaagaacactgcagtcgagctttccaracaatgccactcctgggctcatgcacattcttttggaaatctgatttaaaacagaaaacacttctcgtccttttcccaagcaaactggcataattcagatcctatgtccagatcaaggttattttygctggtccgtgccagatatgctcaaatacatgctagtctacactgagtatatatagctcacagaaagcaatgaagaactgagctcctgcaagggaaccagcagtagcctgctttcctaaggctatcatctcaaacaaatgatatttctccccatcaacattattaaagccattg

SEQ ID NO: 45112 - DNA, 600 bp, Chicken  19866894284641_4
gcgggatatgaaagtgagatgttgtctgagagtaatttattgttgtaaagatccttttgtgcatctttgttttgtgtttctacacatttctttcttcttcttcttcttttttttttttttttcccagactgttaaataagggggtatcaagaacactgcagtcgagctttccaracaatgccactcctgggctcatgcacattcttttggaaatctgatttaaaacagaaaacacttctcgtccttttcccaagcaaactggcataattcagatcctatgtccagatcaaggttattttygctggtccgtgccagatatgctcaaatacatgctagtctacactgagtatatatagctcacagaaagcaatgaagaactgagctcctgcaagggaaccagcagtagcctgctttcctaaggctatcatctcaaacaaatgatatttctccccatcaacattattaaagccattgtgtcttgtgatcaatttatcactgcctttctccctttcctcatatcacacatcttggtctaaccaaattccaaacatcaagcatctctcatgaggcagcggttactgccttcctgtcttttccagc

SEQ ID NO: 45113 - DNA, 600 bp, Chicken  19866894284642_1
ctgtcgggctgacgcacacgcctggccggagggtcggctttggagagggtgcaccgggagtggggtcctcagatgagctgcccccgtgcagctccgaggtgggaaggagggacacggtggggatcggggtagcagcatcacccacccccgtggggggcgagagctgatctcggagctgctccatcccaggccaggaggaaggatgctacgctgtctccccatcacacagactcacaggggatgatctcagtgggcgggagggaggggaatttttatttggtacagacgagggatgggaargggagagtcgttatttcgttctgtttcatttcggggtacttcaggacttagtctccaaggcaccgcgtgtcaggtgctggatttcttcctttctagagtggggcactgggctgagagagggaggaaggggtgggacacgctgcccccgagaagcagcacacgctgacggtttgaagagtcgttaacatacatatatatgtatataaatatatatatatacatagatatatatatattaaaatgccaaaaaaaaaaaacaaccaacacacacagtgatctcaaagaggccttgaaacgcct

SEQ ID NO: 45114 - DNA, 600 bp, Chicken  19866894284644_1
agaatggcatcgcatctttagtaggagtctcagcatactgcttccaatgccatattttgctctttttcctcacaagacatcttctttcccaaataaatgcaatgaattatgtatagcagctttcagccatgccgtattagggaattttgtctttgtactttagaccagtgtaatgaaaaattaaatattaatacaacctcagagttttttctcaaatgtttatgatatgagacagtatatttaagaggcattgagtggaggtagtgtttttgcaaatgtttttttgttgtcttgcaagcsgagagtaattaggattctgcaagcagtgtaaattaaacattaccaaatagcaaagttgttgctagaaagcaagcagggatcttttattctacagaaatctaggaaacgggagcgtctgacatttgctaagtttagaatgggagtggtatagatggctgatttttgtatactcagcgtttcaaatgtcactttcttgtttctctcagagcaatgagagaagtgacaattactttcggtggctcttactgcagagtggcctttgttactcgattcaaagggcttatgagaaatggtgtcact

SEQ ID NO: 45115 - DNA, 600 bp, Chicken  19866894284653_1
ctctctgtactgaaatatcataacaaatggcttcagggcacacagacagaggccaatccacagtattaattagcctgaaagtaattagcaaaatattgctaaaaaattgtaagcggcatgattgagagctggatgagtttttgaactcagcagtatgaaaacccatgtgtaatagctgtgaatttgatgcacgctgggaggtttcagtgactagaagaccagttttgattggaagagataaacatagtataaaatacaattgggtgtagaaattaaaggctctggatattatggtggtgktttttttttgttgttgttgttgttgttttttttccaatcacagaggcattactctttaatagaattagtcaagttaattgcagtaagcatttccctgaatttggctgtttttctaggtggaagatgttttggagtggatcattagtttttccagtaaaactttttttatacgaagttttggacaaatattttggactagatttcagcacatggattgttcatgaatagccttgaatagcctgtttgtagttttacttccttttgcttttacttcagtggaattaataaaataactaaaac

SEQ ID NO: 45116 - DNA, 599 bp, Chicken  19866894284656_1
  misc_feature (1)..(113): n is any nucleotide
nnnnnnnnnnnnnnnnnnnnnnnnnnnnnnnnnnnnnnnnnnnnnnnnnnnnnnnnnnnnnnnnnnnnnnnnnnnnnnnnnnnnnnnnnnnnnnnnnnnnnnnnnnnnnnnnnaattgttatagcctttgttgctactggtgtgtagtgtgacagtgttagagtaggatatatccatgaactaacgtgtttttttctttttttctttttgtggatctgaagcaccgtctgtagggatgaatctggatcttcagacggagcctgagcatacaagggaatgagctctgacatagcagtgctryatggtggggaggggattgtgcatgtgtatgcagtgatggaaaactggaggctgattgttcagaagatgttaagtgatgaatgaggcagggttcagcttagaaggctgctctttggacagggtgttttgggataagagtatacargggaggttgaactacttgtttctatcttstgagcwcagattctgtcacttcttyctwacaggcttgaaaacatacagactgctcaaactgatttatagctctacttctagtcataatatagtgaggcctgaactattcttgatgactcgccatg

SEQ ID NO: 45117 - DNA, 599 bp, Chicken  19866894284656_2
  misc_feature (1)..(112): n is any nucleotide
nnnnnnnnnnnnnnnnnnnnnnnnnnnnnnnnnnnnnnnnnnnnnnnnnnnnnnnnnnnnnnnnnnnnnnnnnnnnnnnnnnnnnnnnnnnnnnnnnnnnnnnnnnnnnnnnaattgttatagcctttgttgctactggtgtgtagtgtgacagtgttagagtaggatatatccatgaactaacgtgtttttttctttttttctttttgtggatctgaagcaccgtctgtagggatgaatctggatcttcagacggagcctgagcatacaagggaatgagctctgacatagcagtgctryatggtggggaggggattgtgcatgtgtatgcagtgatggaaaactggaggctgattgttcagaagatgttaagtgatgaatgaggcagggttcagcttagaaggctgctctttggacagggtgttttgggataagagtatacargggaggttgaactacttgtttctatcttstgagcwcagattctgtcacttcttyctwacaggcttgaaaacatacagactgctcaaactgatttatagctctacttctagtcataatatagtgaggcctgaactattcttgatgactcgccatgt

SEQ ID NO: 45118 - DNA, 600 bp, Chicken  19866894284656_3
agtgtgacagtgttagagtaggatatatccatgaactaacgtgtttttttctttttttctttttgtggatctgaagcaccgtctgtagggatgaatctggatcttcagacggagcctgagcatacaagggaatgagctctgacatagcagtgctryatggtggggaggggattgtgcatgtgtatgcagtgatggaaaactggaggctgattgttcagaagatgttaagtgatgaatgaggcagggttcagcttagaaggctgctctttggacagggtgttttgggataagagtatacargggaggttgaactacttgtttctatcttstgagcwcagattctgtcacttcttyctwacaggcttgaaaacatacagactgctcaaactgatttatagctctacttctagtcataatatagtgaggcctgaactattcttgatgactcgccatgtgatttgattccaacaaaagctgctgagacgcatcactctaacatattgatgggttggataacacagtccctcttgacagccttgtacccatttgaatttgggaaacagcttgaggcatattttctaacaaacaaaatgggaccat

SEQ ID NO: 45119 - DNA, 600 bp, Chicken  19866894284656_4
catgaactaacgtgtttttttctttttttctttttgtggatctgaagcaccgtctgtagggatgaatctggatcttcagacggagcctgagcatacaagggaatgagctctgacatagcagtgctryatggtggggaggggattgtgcatgtgtatgcagtgatggaaaactggaggctgattgttcagaagatgttaagtgatgaatgaggcagggttcagcttagaaggctgctctttggacagggtgttttgggataagagtatacargggaggttgaactacttgtttctatcttstgagcwcagattctgtcacttcttyctwacaggcttgaaaacatacagactgctcaaactgatttatagctctacttctagtcataatatagtgaggcctgaactattcttgatgactcgccatgtgatttgattccaacaaaagctgctgagacgcatcactctaacatattgatgggttggataacacagtccctcttgacagccttgtacccatttgaatttgggaaacagcttgaggcatattttctaacaaacaaaatgggaccataactaaccaaacaggaggcaataaaagga

SEQ ID NO: 45120 - DNA, 600 bp, Chicken  19866894284656_5
ctaacgtgtttttttctttttttctttttgtggatctgaagcaccgtctgtagggatgaatctggatcttcagacggagcctgagcatacaagggaatgagctctgacatagcagtgctryatggtggggaggggattgtgcatgtgtatgcagtgatggaaaactggaggctgattgttcagaagatgttaagtgatgaatgaggcagggttcagcttagaaggctgctctttggacagggtgttttgggataagagtatacargggaggttgaactacttgtttctatcttstgagcwcagattctgtcacttcttyctwacaggcttgaaaacatacagactgctcaaactgatttatagctctacttctagtcataatatagtgaggcctgaactattcttgatgactcgccatgtgatttgattccaacaaaagctgctgagacgcatcactctaacatattgatgggttggataacacagtccctcttgacagccttgtacccatttgaatttgggaaacagcttgaggcatattttctaacaaacaaaatgggaccataactaaccaaacaggaggcaataaaaggataaatc

SEQ ID NO: 45121 - DNA, 600 bp, Chicken  19866894284656_6
ttttctttttgtggatctgaagcaccgtctgtagggatgaatctggatcttcagacggagcctgagcatacaagggaatgagctctgacatagcagtgctryatggtggggaggggattgtgcatgtgtatgcagtgatggaaaactggaggctgattgttcagaagatgttaagtgatgaatgaggcagggttcagcttagaaggctgctctttggacagggtgttttgggataagagtatacargggaggttgaactacttgtttctatcttstgagcwcagattctgtcacttcttyctwacaggcttgaaaacatacagactgctcaaactgatttatagctctacttctagtcataatatagtgaggcctgaactattcttgatgactcgccatgtgatttgattccaacaaaagctgctgagacgcatcactctaacatattgatgggttggataacacagtccctcttgacagccttgtacccatttgaatttgggaaacagcttgaggcatattttctaacaaacaaaatgggaccataactaaccaaacaggaggcaataaaaggataaatcagctttagtagctcttttt

SEQ ID NO: 45122 - DNA, 600 bp, Chicken  19866894284656_7
tctttttgtggatctgaagcaccgtctgtagggatgaatctggatcttcagacggagcctgagcatacaagggaatgagctctgacatagcagtgctryatggtggggaggggattgtgcatgtgtatgcagtgatggaaaactggaggctgattgttcagaagatgttaagtgatgaatgaggcagggttcagcttagaaggctgctctttggacagggtgttttgggataagagtatacargggaggttgaactacttgtttctatcttstgagcwcagattctgtcacttcttyctwacaggcttgaaaacatacagactgctcaaactgatttatagctctacttctagtcataatatagtgaggcctgaactattcttgatgactcgccatgtgatttgattccaacaaaagctgctgagacgcatcactctaacatattgatgggttggataacacagtccctcttgacagccttgtacccatttgaatttgggaaacagcttgaggcatattttctaacaaacaaaatgggaccataactaaccaaacaggaggcaataaaaggataaatcagctttagtagctctttttttc

SEQ ID NO: 45123 - DNA, 600 bp, Chicken  19866894284657_1
acttagcagttgaaaggcatcagagatgatggagctttctaatgtcacactggtgaaggttagtatttataggaaattcacatgcatctaattactccaaactcagttcccaagtaaaatatgccatctggaagatattagaatcatttacaacttgctcacctccctgtttcactgcaaaatcctacctcttgccaactttccagtgttcttcacaaaataaaatgcagcctaagttttactggttctttcgtagctgctttatctattcaagggcttaagaaactggaaaaaaaaaawtttttttaaaggaactttcttatcactggctatgttcaagttttataccctttcatakggacatttcagatatgtcttggcttagttttgtataaagccacataattagatttgtaaagatattatagatgataaggagagaaaaaaagagggaccaatcagtcatcttgcataaaagcaggctcatgaaagccaaaaagataatttccccaactcaattacacagttttgtttttgtttttatgacctcccaagggacacccatccatcagaacacttcttgttagttgaggagcttca

SEQ ID NO: 45124 - DNA, 600 bp, Chicken  19866894284657_2
cttagcagttgaaaggcatcagagatgatggagctttctaatgtcacactggtgaaggttagtatttataggaaattcacatgcatctaattactccaaactcagttcccaagtaaaatatgccatctggaagatattagaatcatttacaacttgctcacctccctgtttcactgcaaaatcctacctcttgccaactttccagtgttcttcacaaaataaaatgcagcctaagttttactggttctttcgtagctgctttatctattcaagggcttaagaaactggaaaaaaaaaaawttttttaaaggaactttcttatcactggctatgttcaagttttataccctttcatakggacatttcagatatgtcttggcttagttttgtataaagccacataattagatttgtaaagatattatagatgataaggagagaaaaaaagagggaccaatcagtcatcttgcataaaagcaggctcatgaaagccaaaaagataatttccccaactcaattacacagttttgtttttgtttttatgacctcccaagggacacccatccatcagaacacttcttgttagttgaggagcttcac

SEQ ID NO: 45125 - DNA, 600 bp, Chicken  19866894284657_3
gttagtatttataggaaattcacatgcatctaattactccaaactcagttcccaagtaaaatatgccatctggaagatattagaatcatttacaacttgctcacctccctgtttcactgcaaaatcctacctcttgccaactttccagtgttcttcacaaaataaaatgcagcctaagttttactggttctttcgtagctgctttatctattcaagggcttaagaaactggaaaaaaaaaaatttttttaaaggaactttcttatcactggctatgttcaagttttataccctttcatakggacatttcagatatgtcttggcttagttttgtataaagccacataattagatttgtaaagatattatagatgataaggagagaaaaaaagagggaccaatcagtcatcttgcataaaagcaggctcatgaaagccaaaaagataatttccccaactcaattacacagttttgtttttgtttttatgacctcccaagggacacccatccatcagaacacttcttgttagttgaggagcttcacccaagtatgccaatctgtttatacgtaaagctttgcagcattcctctgaggtaaagt

SEQ ID NO: 45126 - DNA, 600 bp, Chicken  19866894284657_4
atcatttacaacttgctcacctccctgtttcactgcaaaatcctacctcttgccaactttccagtgttcttcacaaaataaaatgcagcctaagttttactggttctttcgtagctgctttatctattcaagggcttaagaaactggaaaaaaaaaaatttttttaaaggaactttcttatcactggctatgttcaagttttataccctttcatakggacatttcagatatgtcttggcttagttttgtataaagccacataattagatttgtaaagatattatagatgataaggagagkaaaaaagagggaccaatcagtcatcttgcataaaagcaggctcatgaaagccaaaaagataatttccccaactcaattacacagttttgtttttgtttttatgacctcccaagggacacccatccatcagaacacttcttgttagttgaggagcttcacccaagtatgccaatctgtttatacgtaaagctttgcagcattcctctgaggtaaagttgtcattctcattttacatatgtggagacagaagagagagacggagtgccaacaactttccagaaattttgcaaacagcaagga

SEQ ID NO: 45127 - DNA, 600 bp, Chicken  19866894284663_1
cttataatttggtttaaaataaaaattaaggtcttgcagcatgccctactgatgaccaaaacccttgatttgcttttggctcaggtgagagtaagcactaggaagaagccagtgtatgcaaccagctcctgttttcttgtatgcattgtggcagacctcagctgtgctctgcgatgggaggcagattgtctctcacttgagtcagctctgagtcatttggggaccaataggtgggaggtgaacttatgtttctcttgaaggctgaccacagagccattgcagagcttgaggtgtgactgsggcacgttaaaatagaaaggcaaatggattcttcacaagtttctgcttctgcttctcttccagattttgaatattcatatgatttaaataagtcttgaagtgacagaaaagcaaacagagcaactttcgttacccacacaatgaatatatgaggcttcgttggtggcgtatataaaaattctttgtgatctataaaaaatagttggtagggaggaaagatgctatacaagcgccaaccactgctgctataaatattgttccacrtacagtaaagagtaaataaatataataaacatttca

SEQ ID NO: 45128 - DNA, 600 bp, Chicken  19866894284663_2
accacagagccattgcagagcttgaggtgtgactgsggcacgttaaaatagaaaggcaaatggattcttcacaagtttctgcttctgcttctcttccagattttgaatattcatatgatttaaataagtcttgaagtgacagaaaagcaaacagagcaactttcgttacccacacaatgaatatatgaggcttcgttggtggcgtatataaaaattctttgtgatctataaaaaatagttggtagggaggaaagatgctatacaagcgccaaccactgctgctataaatattgttccacrtacagtaaagagtaaataaatataataaacatttcaggatgattgaaaaacctctcacagagacaaatacgcccctttcctggccgtagagatccctaatgcttctcctgtcattgtctcaacatgataagcttcgtgtcaacctgacacctctatgcacagcctgcttctgctctggggctcagcatacagtggggatggaagtgatggacagggcctgatctggcacaaagcctggctgttcagagctaatccgtcagaatgttttaaataaactggacctggcagggagacttcaga

SEQ ID NO: 45129 - DNA, 600 bp, Chicken  19866894284664_1
tgcttggcaggctggctgcacgagctgggcaagaggctggaggctccctacatcaacaactcagtgggggggccctccatccgcagcgcctacatcgcctccctctacttcaccctcagcagcctgaccagcgtgggcttcggcaacgtctgcgccaacactgatgccgagaagatcttctccatctgcaccatgctcattgggggtgaggcgggtacccgggcagggaggagatggggttgcaactacacagctgcatccttcagccccacagtgccaccgagcacagcccctcctgaycctggcccccctgtgggctgacactgccccctggtacccagcgctgatgcacgccgttgtctttggcaacgtcacggccatcatccagcgcatgtactcgcgccgctcgctctatcacacccgcatgaaggacctcaaggacttcatccgcgtgcaccgcctgccccagcagctcaagcagaggatgctggagtacttccagaccacctggtcggtgaacaacggcatagatgctaacgaggtaaggagggttcatagggctggacctgctgctctcctgcacccagggccagtgacagg

SEQ ID NO: 45130 - DNA, 573 bp, Chicken  19866894284665_1
tttgctcccctaataccgaatgaggaaaaacagtaggccctcagatttctgctgttagttcctgttcaggcttagaaccctcctgcatgcagaaaccagcatcagttggatttcctggcgctgtgtgtcttattgttgtgtgggaattccattcacaaaatttagttgaagctgttattgagtgatgggtgtttcttcattgcttttgtttagatgtgtagctattgttttagaagtaaatgtgtatacctgagctctggtgttgtgcagaaggcgttgcattgctgctctagaatcacwcataatagatctgctagtgtgtgctcgaacagcagttaggtgtagtggagaactctctagcagtatgttaatcagcaggctgatgaggaacacaaaagctgccagtatccagtcaccagaagaaatgctgccctaagggaaacttaaactttaggctgggaagtatggctgttccaaacctgggctctgaaatcatcccactgcaagctatggaggtattgctgaaaccaaccatgttacagtcatttgaggagggatgatgctgatgataaa

SEQ ID NO: 45131 - DNA, 600 bp, Chicken  19866894284666_1
actggtggaaaggtccataaatcaagactggaactccctgccgcatatatgaatcaattaaagcactcgatgaatcatttattttcaacacagacaatcagcagccatggtttgatgttcaattgatttctcatttgtcttgcttctctgagtaatgacacatggctcaacccttacacaccgcatgtcccagctcggctgctcctggagaaactcctccctgcaaggcagcagtgagcacctgctcctgacacatggtcactgtgctgcaatgcctgtggctctgctcatctcatcaayctctttgccccactgtgttctaatttggacccatttacaaactaaatgaataaaattaattctctgtgtaagataggagagccaaaatcctcattataaagcatcagagttctatttctaagcagccctacatcccaaaacagaagaaatgatacatgctgcccggaaaggctattgagtctcctccttggagatctcccaaagccacctrgatgtgggcctggggagctrctctgggtggccctgctggagctggggctggacctggttgacccaaagggtccttccaacctcagycgt

SEQ ID NO: 45132 - DNA, 600 bp, Chicken  19866894284666_2
aactcctccctgcaaggcagcagtgagcacctgctcctgacacatggtcactgtgctgcaatgcctgtggctctgctcatctcatcaayctctttgccccactgtgttctaatttggacccatttacaaactaaatgaataaaattaattctctgtgtaagataggagagccaaaatcctcattataaagcatcagagttctatttctaagcagccctacatcccaaaacagaagaaatgatacatgctgcccggaaaggctattgagtctcctccttggagatctcccaaagccacctrgatgtgggcctggggagctrctctgggtggccctgctggagctggggctggacctggttgacccaaagggtccttccaacctcagycgtttcactgaagtcatggtcattaggacaccaaatcaacagcgtggcttcctgtaaccaaacagttaactttagggtgtgcgacttatacagccccaaatatctgtcctgaaacaggaaggcctggctgctgctgctgggtgctcccagctgatatgaggcaccactgggatgaggccaagacatgcattagcataatccttttatgaagagt

SEQ ID NO: 45133 - DNA, 600 bp, Chicken  19866894284666_3
cagtgagcacctgctcctgacacatggtcactgtgctgcaatgcctgtggctctgctcatctcatcaayctctttgccccactgtgttctaatttggacccatttacaaactaaatgaataaaattaattctctgtgtaagataggagagccaaaatcctcattataaagcatcagagttctatttctaagcagccctacatcccaaaacagaagaaatgatacatgctgcccggaaaggctattgagtctcctccttggagatctcccaaagccacctrgatgtgggcctggggagctrctctgggtggccctgctggagctggggctggacctggttgacccaaagggtccttccaacctcagycgtttcactgaagtcatggtcattaggacaccaaatcaacagcgtggcttcctgtaaccaaacagttaactttagggtgtgcgacttatacagccccaaatatctgtcctgaaacaggaaggcctggctgctgctgctgggtgctcccagctgatatgaggcaccactgggatgaggccaagacatgcattagcataatccttttatgaagagtaaactgataaaagacaggtg

SEQ ID NO: 45134 - DNA, 600 bp, Chicken  19866894284666_4
aayctctttgccccactgtgttctaatttggacccatttacaaactaaatgaataaaattaattctctgtgtaagataggagagccaaaatcctcattataaagcatcagagttctatttctaagcagccctacatcccaaaacagaagaaatgatacatgctgcccggaaaggctattgagtctcctccttggagatctcccaaagccacctrgatgtgggcctggggagctrctctgggtggccctgctggagctggggctggacctggttgacccaaagggtccttccaacctcagycgtttcactgaagtcatggtcattaggacaccaaatcaacagcgtggcttcctgtaaccaaacagttaactttagggtgtgcgacttatacagccccaaatatctgtcctgaaacaggaaggcctggctgctgctgctgggtgctcccagctgatatgaggcaccactgggatgaggccaagacatgcattagcataatccttttatgaagagtaaactgataaaagacaggtggaaagaatggggcacactgagctcttccattcatgaaaacaagatgcacacagggccaaatgccta

SEQ ID NO: 45135 - DNA, 599 bp, Chicken  19866894284671_1
  misc_feature (1)..(19): n is any nucleotide
nnnnnnnnnnnnnnnnnnnatttccctttaaaaatgtgcctttttttttttttgcagttgtccattctttacttgtatgcacaacaacgaatgcacatgcttatgcatttattagttgtacaagatttttcataactactgaaaacaatcttgactttttaaaatgatttctagagcccttctgagtctcaacttttcgtttcatactctatggagaggaaatgaaatcataaattttgttctatcataaataaatatatgcatctctcataagtcttaccactgactcagttaagatasaagtttatcctagtcgttttcaggaaatatatttataatgctgcagattgttaaacatattttgtcagtaccacctatttcttctagttagagttcattaagatttctataatgctcacagtcccttaaccagtaagcatacaaacctatagctaaaaccttagctgtggaagtgrataacatgtttacaattactatatagagaatttatgaactgcctgtactgtaaatgttattcctagaaatatgttgcatatattttattcacagtactgttttctcctcccttactccagcat

SEQ ID NO: 45136 - DNA, 600 bp, Chicken  19866894284671_2
cccttctgagtctcaacttttcgtttcatactctatggagaggaaatgaaatcataaattttgttctatcataaataaatatatgcatctctcataagtcttaccactgactcagttaagatasaagtttatcctagtcgttttcaggaaatatatttataatgctgcagattgttaaacatattttgtcagtaccacctatttcttctagttagagttcattaagatttctataatgctcacagtcccttaaccagtaagcatacaaacctatagctaaaaccttagctgtggaagtgrataacatgtttacaattactatatagagaatttatgaactgcctgtactgtaaatgttattcctagaaatatgttgcatatattttattcacagtactgttttctcctcccttactccagcattaaaacccaccacagttttgggaggaaggaacagaaggtatgcatgaacatttgcccacatgagacatatgggtagacttgacattgaaatgtgccttgaggaacaaatactaatatcaagaaggtcttactttaagataactgcaacttccacatgatctttcaaggaatattgga

SEQ ID NO: 45137 - DNA, 531 bp, Chicken  19866894284672_1
atccccctgcacctgattgattgcgtaattatcaaataaatcatacctgctttataacctgcttgggttatagagtttgtttccgcaagtcagcctcggcatgaaagggaaaccccagtgtggttagcataaactccatcataaagaaccaggagtgctcttggatactcggatgcctgtacagccttgcctgctattaagacaagtgcaaaatagtaaatattccaaatttagccagagaaacaatatgcacacatcatttgaaagctaatatccataacaggtgcaatagcagctgcrgagaaatccacacaagacttataaccaatactttaaatgcactggtcaggtygacatcattattacaggtggagcatccaataaaactgccactccagttaatggaaaagaaggtgttttcttgtcgagcataatgggtaattaactgactctatagtgacttcagaaatagtttccacgcagcagaaatcatacatgatgattcagtaccacctcctgtgaactggttat

SEQ ID NO: 45138 - DNA, 479 bp, Chicken  19866894284672_2
tataacctgcttgggttatagagtttgtttccgcaagtcagcctcggcatgaaagggaaaccccagtgtggttagcataaactccatcataaagaaccaggagtgctcttggatactcggatgcctgtacagccttgcctgctattaagacaagtgcaaaatagtaaatattccaaatttagccagagaaacaatatgcacacatcatttgaaagctaatatccataacaggtgcaatagcagctgcrgagaaatccacacaagacttataaccaatactttaaatgcactggtcaggtygacatcattattacaggtggagcatccaataaaactgccactccagttaatggaaaagaaggtgttttcttgtcgagcataatgggtaattaactgactctatagtgacttcagaaatagtttccacgcagcagaaatcatacatgatgattcagtaccacctcctgtgaactggttat

SEQ ID NO: 45139 - DNA, 600 bp, Chicken  19866894284673_1
acacctacagtgcagtaatatacattactgaataataaatcacactttgatccaagtaacccaaagcattttacaaacactaattaaaacttgaaatttctctgtcaggtacttaaatagcaatgtacataatttgtaggtggaaaaagcaagccaaggggaaggtaaattgactcaggatcagaggaggaatctgaaaaaccagtaagattttatgacagtctgtatcccactttatgcaaactaagggaatgtgtccttcctgaatctaaagaacctgaatgttaacataactctgaraaggttttccagaaaattactagtcagagctcatttaattaatataaattctaagcatttgtttttaaactcttacataggctttattgctccaccatttcctgatatctcaggactcttgatggaaaaaggctcgtaataggaaccagctcagcaccacctcagtacagcagcacatgttctcccacagtgaccactaattggtcctccatggcaggtgctgctgcctgcaggaatttgcattgcattgcgaagaagcacagaaacgaaaaactaattacagagcagctaaggagagag

SEQ ID NO: 45140 - DNA, 600 bp, Chicken  19866894284676_1
tttgtgagaaacaaattccctttacaatgtctcctcaatggtgcatcacgtttctttgttatctattaatttaattctattcctattatgatttctaccaaactacctactacagaagtcagatttactgataatctcccttcatgaccccagaagcccttgctggatgggtatattattgttttatttaagtgacagagtacaaaccagaagcaaattcttattctcattcatttagagcccttgcacaaacagcatcaaactccaatgccctgttaccagaatattttatcccccccrttttttgtgtgtgtgtaaagccttttagaactgacatttcaaacacagccaggcgactatcagacagacatgtctggtctggtgaaggcaagtccctgcaattcagctgccttgaagataccaacagtggttttagcaaagttaatgatctgtagtctaaggggagcaaaggcatgagaaaggagggagtacaaggtagaaaggataggggatgagtcatactatttaaaataactgacatctaagttttcctcattgtgacatctaataacatgcatgtcctcagcccactcacattag

SEQ ID NO: 45141 - DNA, 600 bp, Chicken  19866894284676_2; identical to SEQ ID NO: 45140

SEQ ID NO: 45142 - DNA, 600 bp, Chicken  19866894284677_1
cagcatcttataattacctaaagctatgtgtggaactaagagctggacccaatgaccctagtgggtcccttctaacttgggatattctgtgattctttgaacatcaatgcagaactgaaactgaagtaattcctatcatcttattggtagtcatcatgggaagtgatcagaatttgttttagctgaattctgccacttgaaatccttcagaatgagcaagtgatctcctcgctctcatatatactatattgctaatgagagaagctgagactgagaagtggtcagtgaagtctttcttaytgacattctgtgcaaagaaagttcagatcacacaatcctttttcagctactgacaagcagtttacattttgagagaaagcagactaagcaagggtcataaaaacccatgttcagactgaaagggtgttaagattgaattccgatgtgctcttccagaacttgtccagtttattatttgaattcactttgttttgttttcaccaggtaagtgttttgcagggtctattgctacttactgagttttgaggaaaaaaataaataaacgttggagtgggttctgaagaaaactgtgctgaactg

SEQ ID NO: 45143 - DNA, 600 bp, Chicken  19866894284680_1
ttgtggaagaagtaatagtttattaaacataagggctgcaaaaatgaaatgatgtgaggtctggcaaatgttttcctttcaaagctatgcgtcccgctcatccaaaaatatgctagaagaacccagagctggttgaggaccggcagctgtgcgtgcctgctgagcacaacagtcagaaggaattagtgcagagctgccctcagcgcttccctgatgccgatcacagccatttttatctgtaacagcagtgataaggaaaacattttcagagagttactgtatatctttcaggatttcttytmgaagcagttaccagtgtttacttctctgcaaaaaaaagaaattgaaacaatgwtcttaaatgacaccagacaccaygccggtgctttgttttattactttgttccacggtaacaggctgtgcccaaacctatataagtacgtgttccattgtccattgaccttgtctgcgtaccactggggctggggctcaagagccaaggcaaaaccaggagctgatgccactgtgagcactggtgccctatatggcaggcctggagtacgagcctgcrggagcagtatgtaaagcatacctatagc

SEQ ID NO: 45144 - DNA, 600 bp, Chicken  19866894284680_2
gtggaagaagtaatagtttattaaacataagggctgcaaaaatgaaatgatgtgaggtctggcaaatgttttcctttcaaagctatgcgtcccgctcatccaaaaatatgctagaagaacccagagctggttgaggaccggcagctgtgcgtgcctgctgagcacaacagtcagaaggaattagtgcagagctgccctcagcgcttccctgatgccgatcacagccatttttatctgtaacagcagtgataaggaaaacattttcagagagttactgtatatctttcaggatttcttytmgaagcagttaccagtgtttacttctctgcaaaaaaaagaaattgaaacaatgwtcttaaatgacaccagacaccaygccggtgctttgttttattactttgttccacggtaacaggctgtgcccaaacctatataagtacgtgttccattgtccattgaccttgtctgcgtaccactggggctggggctcaagagccaaggcaaaaccaggagctgatgccactgtgagcactggtgccctatatggcaggcctggagtacgagcctgcrggagcagtatgtaaagcatacctatagctg

SEQ ID NO: 45145 - DNA, 600 bp, Chicken  19866894284680_3
gaggtctggcaaatgttttcctttcaaagctatgcgtcccgctcatccaaaaatatgctagaagaacccagagctggttgaggaccggcagctgtgcgtgcctgctgagcacaacagtcagaaggaattagtgcagagctgccctcagcgcttccctgatgccgatcacagccatttttatctgtaacagcagtgataaggaaaacattttcagagagttactgtatatctttcaggatttcttytmgaagcagttaccagtgtttacttctctgcaaaaaaaagaaattgaaacaatgwtcttaaatgacaccagacaccaygccggtgctttgttttattactttgttccacggtaacaggctgtgcccaaacctatataagtacgtgttccattgtccattgaccttgtctgcgtaccactggggctggggctcaagagccaaggcaaaaccaggagctgatgccactgtgagcactggtgccctatatggcaggcctggagtacgagcctgcrggagcagtatgtaaagcatacctatagctgtggtacagcagagctagcgtgcagctaatctgggagctaaycgattacagcag

SEQ ID NO: 45146 - DNA, 600 bp, Chicken  19866894284680_4
tcaaagctatgcgtcccgctcatccaaaaatatgctagaagaacccagagctggttgaggaccggcagctgtgcgtgcctgctgagcacaacagtcagaaggaattagtgcagagctgccctcagcgcttccctgatgccgatcacagccatttttatctgtaacagcagtgataaggaaaacattttcagagagttactgtatatctttcaggatttcttytmgaagcagttaccagtgtttacttctctgcaaaaaaaagaaattgaaacaatgwtcttaaatgacaccagacaccaygccggtgctttgttttattactttgttccacggtaacaggctgtgcccaaacctatataagtacgtgttccattgtccattgaccttgtctgcgtaccactggggctggggctcaagagccaaggcaaaaccaggagctgatgccactgtgagcactggtgccctatatggcaggcctggagtacgagcctgcrggagcagtatgtaaagcatacctatagctgtggtacagcagagctagcgtgcagctaatctgggagctaaycgattacagcagaaaaagcaggaaacattccctat

SEQ ID NO: 45147 - DNA, 600 bp, Chicken  19866894284680_5
gttactgtatatctttcaggatttcttytmgaagcagttaccagtgtttacttctctgcaaaaaaaagaaattgaaacaatgwtcttaaatgacaccagacaccaygccggtgctttgttttattactttgttccacggtaacaggctgtgcccaaacctatataagtacgtgttccattgtccattgaccttgtctgcgtaccactggggctggggctcaagagccaaggcaaaaccaggagctgatgccactgtgagcactggtgccctatatggcaggcctggagtacgagcctgcrggagcagtatgtaaagcatacctatagctgtggtacagcagagctagcgtgcagctaatctgggagctaaycgattacagcagaaaaagcaggaaacattccctattcctgtcatccttaatgaatctgcatgtcattggattgctctgcaagagcgattctcatttaaatactagttgctatgaattaacattggtttgttaaattgaaacattttgtgtaattctcagtttataattggatgaattttaccctaaaatcccataaagaagatagaatatgacttttttgttgttgttg

SEQ ID NO: 45148 - DNA, 600 bp, Chicken  19866894284680_6
ttgaaacaatgwtcttaaatgacaccagacaccaygccggtgctttgttttattactttgttccacggtaacaggctgtgcccaaacctatataagtacgtgttccattgtccattgaccttgtctgcgtaccactggggctggggctcaagagccaaggcaaaaccaggagctgatgccactgtgagcactggtgccctatatggcaggcctggagtacgagcctgcrggagcagtatgtaaagcatacctatagctgtggtacagcagagctagcgtgcagctaatctgggagctaaycgattacagcagaaaaagcaggaaacattccctattcctgtcatccttaatgaatctgcatgtcattggattgctctgcaagagcgattctcatttaaatactagttgctatgaattaacattggtttgttaaattgaaacattttgtgtaattctcagtttataattggatgaattttaccctaaaatcccataaagaagatagaatatgacttttttgttgttgttgtttggtttttagatcttgcaacaagtcaggcattgcttcacatggcgtggtaaggccaggcagtgggctgg

SEQ ID NO: 45149 - DNA, 600 bp, Chicken  19866894284680_7
tcacttagattaagaaacatggtagctgaactgcaaatgttagatgtttctccagaagtggaaactttgtaaaagaagtgcatgtttctggcatggctgctgtcaattgctgctgacaccagcttaggcctggcattgcgaaacatcctgaaggagcacagcattcctttatggattgctttggaagagggactgcctctgtaaggaaaacaaagagaggattcagcaatttccttctaggcttatttccctctgtatcacaataactaatgaagggagtcgaacaaaataatctccagmtgaagttttgagagtgaagaaagaatggcaaaagcytctctaaacaattgaatagcttcgttttgattaagtgatggttgaatagcatccatagagctccagagggtgaatatgccctctctattagccatggtgcttggtggtccctgaaggccgctctgactgcatgttggctgctctgcatgctcacacgggtacatgcagccagcactgtggtgccgctcccccaggcgtaggggtacctctgtgtgcaaaattatcagcaccacctgaacctgataccaccatagaattctgcac

SEQ ID NO: 45150 - DNA, 600 bp, Chicken  19866894284680_8
atgttagatgtttctccagaagtggaaactttgtaaaagaagtgcatgtttctggcatggctgctgtcaattgctgctgacaccagcttaggcctggcattgcgaaacatcctgaaggagcacagcattcctttatggattgctttggaagagggactgcctctgtaaggaaaacaaagagaggattcagcaatttccttctaggcttatttccctctgtatcacaataactaatgaagggagtcgaacaaaataatctccagmtgaagttttgagagtgaagaaagaatggcaaaagcytctctaaacaattgaatagcttcgttttgattaagtgatggttgaatagcatccatagagctccagagggtgaatatgccctctctattagccatggtgcttggtggtccctgaaggccgctctgactgcatgttggctgctctgcatgctcacacgggtacatgcagccagcactgtggtgccgctcccccaggcgtaggggtacctctgtgtgcaaaattatcagcaccacctgaacctgataccaccatagaattctgcacagcagtgatgtcactccaaaacatctctctgtggcc

SEQ ID NO: 45151 - DNA, 600 bp, Chicken  19866894284691_1
tcatattgcccatccactgaactgaggtacaggtgctgaagtgtgaaacttacctaagttatgtggcagacattatcagtgaaatgctactgctttttcagaaacaggactgtgtttctctaatgcatcttatgctagtatgagaaggtgaggaatgatgaaatggcagcttgggactgctgttgaattgtatgtagaaaagaatctctgtagtgtggcagttgcaaatattttaagcaggttttgcacacagtggtgagtaggagagatgataaaagtgtgcctgagtggatacatgartaaaattccttctccaactagaatctcttctccagctagatcaacagcatgatatttgcatatgtgagaggatgtacgttctgctcttctggtttcttattttaaggataatcatgtggtcgttaggaaattagcaggaagccagcagyagagaactgattttgcagtgatccccaggcatcttctttaagttgctgccaagtaccagtaggaagtgtggatttagctcttctaacatagttttggtttatgtttcctgctgagattgcatctttattaatgttcttagaatgttccagt

SEQ ID NO: 45152 - DNA, 551 bp, Chicken  19866894284691_2
gaggaatgatgaaatggcagcttgggactgctgttgaattgtatgtagaaaagaatctctgtagtgtggcagttgcaaatattttaagcaggttttgcacacagtggtgagtaggagagatgataaaagtgtgcctgagtggatacatgartaaaattccttctccaactagaatctcttctccagctagatcaacagcatgatatttgcatatgtgagaggatgtacgttctgctcttctggtttcttattttaaggataatcatgtggtcgttaggaaattagcaggaagccagcagyagagaactgattttgcagtgatccccaggcatcttctttaagttgctgccaagtaccagtaggaagtgtggatttagctcttctaacatagttttggtttatgtttcctgctgagattgcatctttattaatgttcttagaatgttccagtcagggcatactccatgttggcttgagaaatatgaaatgaatgccctgagaagtgctatgggggaatctgagaaccctggtgttttagtgcggtaggaaaa

SEQ ID NO: 45153 - DNA, 600 bp, Chicken  19866894284696_1
tgccaggcagctgcaaagctgataacagacatagaaagcccaaggaaagcagcacaaaacactagtcagcatgctcagtactgatcttagatcaggatcctaaacatgggactggcaagtgttctggagacctctctgccatagtgccaagaggtacaaacctggtaagcattgtaaaggctaagccatatttcttccacatgaaaagaatcttttatgaatttgctgacctctggtagcctctgcttatctgctaacactgagcagcaattgctcaatcctaagggatcaagaaataasagagcagttaagagggcattacactgattccaaggacacctacagatggaaaacaggactataaaataagcctcagaatctctaaatattttttgaaaaatatttacaacttgacagttctgatctgcagtttttcatcattttctttcaggctgacaagcagcacctttgaacttgagcagaagtataacactagagttctagccaagcacagaatgaatactctcccagcaaacacaaatgttggctttttttttttccttttaagtctctattttatcaaaagaaaacaagtatgca

SEQ ID NO: 45154 - DNA, 600 bp, Chicken  19866894284697_1
ggctttgaaggttacaagtggtaatgaaccagaaggcattgcaaaaccagctaaagagcaagtgttgtgataggagtgtaagagaggtgttggctgtctctccttagtaactcaggccaatatttacatctgctgtaagcacctcacagacctcactcttgcagctgctgctgagttcaaacaaacagcagttgcaggcattcaggtttgaaaactccagcctgcatgtttacaaagctggtccatcatcaggcttgtcgctcgccagcctttctggctgaaggaagagttttattgcaytgaagagcaatggcttccatttctgctggtagcccaggtgggagagcacctcaaagcagaaacytctactaacctgtactccctgatcactggagaaatgggtgtttctgccctgctttccatctcatctgcttgacacacttgccttaaaggttctgctttctccccattgaatctgagggaagcccaggcagcctggytccaacacagataccccctgagcaccaytaagtgcagtgtcataactcacrtctcaaggtcatcaggccatgactgtgcagagattaccttaggaaactg

SEQ ID NO: 45155 - DNA, 600 bp, Chicken  19866894284697_2
ttgtgataggagtgtaagagaggtgttggctgtctctccttagtaactcaggccaatatttacatctgctgtaagcacctcacagacctcactcttgcagctgctgctgagttcaaacaaacagcagttgcaggcattcaggtttgaaaactccagcctgcatgtttacaaagctggtccatcatcaggcttgtcgctcgccagcctttctggctgaaggaagagttttattgcaytgaagagcaatggcttccatttctgctggtagcccaggtgggagagcacctcaaagcagaaacytctactaacctgtactccctgatcactggagaaatgggtgtttctgccctgctttccatctcatctgcttgacacacttgccttaaaggttctgctttctccccattgaatctgagggaagcccaggcagcctggytccaacacagataccccctgagcaccaytaagtgcagtgtcataactcacrtctcaaggtcatcaggccatgactgtgcagagattaccttaggaaactgtcagaacaaagatgaagttatgagccatgatgrtatcaattagagaagatatttgttgtaagag

SEQ ID NO: 45156 - DNA, 600 bp, Chicken  19866894284697_3
ttcaggtttgaaaactccagcctgcatgtttacaaagctggtccatcatcaggcttgtcgctcgccagcctttctggctgaaggaagagttttattgcaytgaagagcaatggcttccatttctgctggtagcccaggtgggagagcacctcaaagcagaaacytctactaacctgtactccctgatcactggagaaatgggtgtttctgccctgctttccatctcatctgcttgacacacttgccttaaaggttctgctttctccccattgaatctgagggaagcccaggcagcctggytccaacacagataccccctgagcaccaytaagtgcagtgtcataactcacrtctcaaggtcatcaggccatgactgtgcagagattaccttaggaaactgtcagaacaaagatgaagttatgagccatgatgrtatcaattagagaagatatttgttgtaagagaagtgttaatgctggagcatatttagtttccctaaagattaaattacttggcaatgcaattggatattatgaacaaggactcgtttctcttggcaacagacagcaataaactgatgtaattatttagagtaattct

SEQ ID NO: 45157 - DNA, 600 bp, Chicken  19866894284697_4
tttacaaagctggtccatcatcaggcttgtcgctcgccagcctttctggctgaaggaagagttttattgcaytgaagagcaatggcttccatttctgctggtagcccaggtgggagagcacctcaaagcagaaacytctactaacctgtactccctgatcactggagaaatgggtgtttctgccctgctttccatctcatctgcttgacacacttgccttaaaggttctgctttctccccattgaatctgagggaagcccaggcagcctggytccaacacagataccccctgagcaccaytaagtgcagtgtcataactcacrtctcaaggtcatcaggccatgactgtgcagagattaccttaggaaactgtcagaacaaagatgaagttatgagccatgatgrtatcaattagagaagatatttgttgtaagagaagtgttaatgctggagcatatttagtttccctaaagattaaattacttggcaatgcaattggatattatgaacaaggactcgtttctcttggcaacagacagcaataaactgatgtaattatttagagtaattcttcctgactttctgtgtggtaacaggtcc

SEQ ID NO: 45158 - DNA, 600 bp, Chicken  19866894284697_5
ggcttgtcgctcgccagcctttctggctgaaggaagagttttattgcaytgaagagcaatggcttccatttctgctggtagcccaggtgggagagcacctcaaagcagaaacytctactaacctgtactccctgatcactggagaaatgggtgtttctgccctgctttccatctcatctgcttgacacacttgccttaaaggttctgctttctccccattgaatctgagggaagcccaggcagcctggytccaacacagataccccctgagcaccaytaagtgcagtgtcataactcacrtctcaaggtcatcaggccatgactgtgcagagattaccttaggaaactgtcagaacaaagatgaagttatgagccatgatgrtatcaattagagaagatatttgttgtaagagaagtgttaatgctggagcatatttagtttccctaaagattaaattacttggcaatgcaattggatattatgaacaaggactcgtttctcttggcaacagacagcaataaactgatgtaattatttagagtaattcttcctgactttctgtgtggtaacaggtcctcttagatgctgatttgaatatg

SEQ ID NO: 45159 - DNA, 600 bp, Chicken  19866894284697_6
ccaggtgggagagcacctcaaagcagaaacytctactaacctgtactccctgatcactggagaaatgggtgtttctgccctgctttccatctcatctgcttgacacacttgccttaaaggttctgctttctccccattgaatctgagggaagcccaggcagcctggytccaacacagataccccctgagcaccaytaagtgcagtgtcataactcacrtctcaaggtcatcaggccatgactgtgcagagattaccttaggaaactgtcagaacaaagatgaagttatgagccatgatgrtatcaattagagaagatatttgttgtaagagaagtgttaatgctggagcatatttagtttccctaaagattaaattacttggcaatgcaattggatattatgaacaaggactcgtttctcttggcaacagacagcaataaactgatgtaattatttagagtaattcttcctgactttctgtgtggtaacaggtcctcttagatgctgatttgaatatgaccacagaatttgcataaggataagccagtgctcagctctgaaggcagcttccattaaacttcatgtttaaaagccaaagca

SEQ ID NO: 45160 - DNA, 600 bp, Chicken  19866894284698_1
gaagtaaatgagaaacagcctgcttctgctaagcacaatattgatgctacaggaagacacagataattcaatttctttcttacttgtatgatctttatatagaatatattttgcttctacttcatttctagacagtgacaccaaaaattgaaaaaaattaattaaaatatcagaataaatgtaatgaacacagcagatggagagaacagcgatggtaccagcagccttggccttacctggttgcagtagaacatcatcagaaaggtgttctgtcttgtaatgcctagtccccaacacagycttcaagattacccctcatctccaagcagcacagtgaggtggtcagagtacatacatatacatgtagatatgtatagatagatatacacgttgtgttgagggacatggtttagcgagaaccattggtgaagggcgaatggttggactggatgatcctgtgggtcttttccaaccttggtgattctatgattctatggattctatatgttgaagtctcagtaacaaagagcagtaagctctggtacccaacccaatagaaacagttttcattcatgtgcccaacttcaggcaccctttcaa

SEQ ID NO: 45161 - DNA, 600 bp, Chicken  19866894284701_1
catagacaaaacccacagtgcaaaacatgcaggtggtaatagctattgctgtctcatttggaagcacgacctaataatcagctgtttttttttcagctttaagtatattttttcttagttacccctgtgagggaattataaacctggcgaaactctacctgaataatctgaacaatccatgaatcctgaataatcccattctactgtgagtgtggtaacattctgaccataacatacttcagacctgtggacagcctcttggctcaccctttgccctaaacggctcttgaaagccagacrgacaacagacgctttacagcccaagacagatgggtgcctcaattttagggaccttctctggagaacactcttccttttcttcacacatggctgaactctcatgcctggtaaatcactatttacagttctggctgtgccaaagggccttaagtgtactgtaggtaccagtaaaactctccaggtcaaacccaactctccattaacaacaggacaaatacttctctaaactataattaaaagacatgattaaatatgtgttgcaattgctatttttctgtggttttttttccccccaacttt

SEQ ID NO: 45162 - DNA, 600 bp, Chicken  19866894284708_1
gtatgcgtgaacttcacacagaaaatatcagttctgtccttatgtattcactgtgcagtacttaatgtgtgaaattctaccaatttttggcaactaccgttttgttattttttttcctttcttgcttgtctttgaaatacctcacattcctctctctctttatttttcctctttctcagcttctacagtaggtatttatatatttggaataagtaaaataactttgaagtgacacagatttttccactaagatgtataaacaatccctgttgtcatatacttcctttgtttgatctggcytttaagtggtaaaacgcaaatcaaataacttgccttatgacattttcaacctgcctgaaatcaataaaccctggaaattttacactgaggacagcatagacaaaaaaaggtttcaaacaaattctattaccaattttatgtgtatttattcagtccagttcaacctgttttctgatttgcattcagcaaatattttagtaaatatagtgaccaaagatcctaagaaatattccttctgttgctggtattaatttttatgctggtataatatttgcagaaaatatatatgtattttttttc

SEQ ID NO: 45163 - DNA, 600 bp, Chicken  19866894284709_1
tgtccattagggggattaggtctgtgggagtcaaggcagcagggttgtactggcaatcatcatggtaaatttggaggtttctagaatttgactcactatagagaacatttattttccaaaatattttacttctggtaacagaaactccatattttgcttgtatcttttttatctgtttgcttgaggcatttatctgatttacagaaaattgtatttgctttaagcactttttcctggaggatgtcatataaagatcagtgctttaagaataaatttgactaatctgacgcctttatcccrtgaattactgtccttctaggtcactactgctgtccttccctttcattaacatgtattgagattaactaaggtatgccaatataatatatgttctttgtaagtgaaacatttattttcattttggaagatcacttaagtttatatgatgctactctagtgaaataatttgttctgaggattgcttcatttttggaaatctcaaaaaaattgtaaataaacacaaccacatttgacagactgcaacttgacagaatcttttgtatatggcatatgaaaaatgtgttagctcaacatggtaca

SEQ ID NO: 45164 - DNA, 570 bp, Chicken  19866894284713_1
gcgatagtcataaaaatattctttaggaattgaagtgaaggaccttcttggatctgacaggctggttctgtgggatttaacttcagtggcaggtggtcctccctgttcttctggagtgctacaggaagacttgcctctgtatatatacaggtcatctgtgaaatacaattttttgtttcacaagtaatacccaggtgatatactgaggagaagctgtgggagggaattgccaaccagttaaggggagatgtctaacacttttttatttactctggtgaagcttgccttattcctgaaaamtatgaggtatttttatttttccgtctttcctcatttggaaacaattgtgagcaactatagttcttttgatagcagatgaaatagattyggaggagaattctcatgagtaatttgtcttatttttttacatgaattcttccttgtatggtacccctgcagtgcaggtgtactgaactgatctgtaaacaagatctgtgtttcttggggatggaggagagggattttttgctttttgtgggaaacaaaaagtgggaattttgaagtgcttat

SEQ ID NO: 45165 - DNA, 482 bp, Chicken  19866894284713_2
gcaggtggtcctccctgttcttctggagtgctacaggaagacttgcctctgtatatatacaggtcatctgtgaaatacaattttttgtttcacaagtaatacccaggtgatatactgaggagaagctgtgggagggaattgccaaccagttaaggggagatgtctaacacttttttatttactctggtgaagcttgccttattcctgaaaamtatgaggtatttttatttttccgtctttcctcatttggaaacaattgtgagcaactatagttcttttgatagcagatgaaatagattyggaggagaattctcatgagtaatttgtcttatttttttacatgaattcttccttgtatggtacccctgcagtgcaggtgtactgaactgatctgtaaacaagatctgtgtttcttggggatggaggagagggattttttgctttttgtgggaaacaaaaagtgggaattttgaagtgcttat

SEQ ID NO: 45166 - DNA, 600 bp, Chicken  19866894284714_1
actgcctatataaaaaacctgaaccttcaattacttaatgtatcagatgtgtatatatataggtataaattcatccctaatacagaaagtatgctaaataaatacactgactttttaaattttagttttcctgtgaaacagagatgtggcaaatgtataaatgttacttaatggctttttaaaccgattgtttattatattatatcatgtatgttttcttttatatctaaagcaaagcttttctggaattcatcagtaaccatttcctgtaagaatactttcaaagttgtgcttcaaaayttaatattttaatattcacctgaagccaccagcagacagttatggaaaatgcctaggaagaaactttctttatcagtagtctatctaaatagatttcatgcatcgatagaaaagtctttttctactcgattgtcttactgggaattattcactaggtcttgcttactaattgtctatccataaacaaaatgtttaaaatgtcaaacattatgaggaagagaaaggtcactgcatgttttagtgccttggggttgggcagtggcttctcaaagcttcagcaagttgcactaagctatatca

SEQ ID NO: 45167 - DNA, 600 bp, Chicken  19866894284731_1
cgacctgtttgttcatccacaactgtatacgcacatttaagcactcttctacttctcagcagttagttgcacagccagagcactaattcttatggaggcctctcaggctatgagttcagctctgtaagcaagccagtgcctgtactttcagttctgaactgcaggctagctggcagctgacaaagtcaggagcttcagaggaaagggagtgcagatgggaaaagtgttacagcttcatctttctccagttgtaagaatttgtcttcctatcaaaaggacaagaaaaatgagcacacgtgsggcgtgccatttcaatcctgattactgataacccattaatcttttcttgtctagaggaaaaaactaaacgtctcacctcattgtattagaacaagacattactcagatgtcttttgggtaatctcccaaacatttatctttcttctgctcattcttgacctttatgttagagttctagtggtctcaacagttaataacttagaaggaataccaccacagtagctctactggtagcacwatttttctaatggcttatttaagcttctttaagcaaattatgagctatcctaatgtttaatc

SEQ ID NO: 45168 - DNA, 600 bp, Chicken  19866894284731_2
ctttctccagttgtaagaatttgtcttcctatcaaaaggacaagaaaaatgagcacacgtgsggcgtgccatttcaatcctgattactgataacccattaatcttttcttgtctagaggaaaaaactaaacgtctcacctcattgtattagaacaagacattactcagatgtcttttgggtaatctcccaaacatttatctttcttctgctcattcttgacctttatgttagagttctagtggtctcaacagttaataacttagaaggaataccaccacagtagctctactggtagcacwatttttctaatggcttatttaagcttctttaagcaaattatgagctatcctaatgtttaatcatggcaagttttagaatgcattattctgcttcattttgaacacagaggaaataacacgctttcttactacgctctcccttagatagctaatgcagcagtaccccaaaacaagaccttcatcactgatgcagacaggctttgtaattagggtgaataacagaaccattaacagactcaattctgtgaaatatctacttcatattttatttccagatccaacatgaattcaggagtactt

SEQ ID NO: 45169 - DNA, 600 bp, Chicken  19866894284732_1
gaaaatgccaagattcattattcccagaataatgtgtctcatactcatctttctgtaatgaccaatatttggatcaagcagcactgcatattagcttttgatgggagttgattacgtactgcggaccatttcaaaaagcacaggtgtaattcagttactaaaagtctgatatagagaaaaacaataacaacaaaaaacactagaaaaacattttcttgatagactgcttgcgaggtagcgaaaggaaaggacccaagagcacagaaatatgggggcaaatggtcttgacagtgctggatktatatagtagcatttggagcattatggaactcctcacttttaatgtcagacacacaggaatatctcaagcaagtcataaatttctggtgtctctttctgtagagagtcgtgctttgcccttgcatctgtatgcttcttggggccatggggacaagtggggcatctttaagcctcacctgagccatccaagtcttccaaactgttggacaggatccactgaatcatttactcatttctcagtcaaccagtaaccatccttactgggtggccactgaaagcaagaaacatgttagaagaatt

SEQ ID NO: 45170 - DNA, 600 bp, Chicken  19866894284736_1
gttaccagtgcacctgaaatagtatctcttatacacctgcagctctgatgttttggattactgattgttcttttatttattgttatttttattttattgtttttaattgtttaatattgttattaattatttattgttaccacagtcagggtgttaaacccagctcttgataggagatgtcccaaatctgacacagcaacaaacggtgatacatgaggagaaaatcccccttctctctccagttctgctagctgcaaagagcagcgaagctcatacagagtgtctcccccaaacattgcrccaatgaagactccgtctggcttaagaacttggtgaatctacaacacagaaggagaaagaaaatattgtgctgttagtatcaattaaattcctgggtggytttttttattattgtgaacttaaaagcaattattataatggctwcaacagatttttcatgttgatgctattccacaaatggagctgcaaaaaatcttttggtaagatatgtaatctctttaagaaagagaccatctgttcttaaaaagagtaaattcctggagactacattcatgggaaacaaatgtgctgctaaaatct

SEQ ID NO: 45171 - DNA, 600 bp, Chicken  19866894284736_2
ttttaattgtttaatattgttattaattatttattgttaccacagtcagggtgttaaacccagctcttgataggagatgtcccaaatctgacacagcaacaaacggtgatacatgaggagaaaatcccccttctctctccagttctgctagctgcaaagagcagcgaagctcatacagagtgtctcccccaaacattgcrccaatgaagactccgtctggcttaagaacttggtgaatctacaacacagaaggagaaagaaaatattgtgctgttagtatcaattaaattcctgggtggytttttttattattgtgaacttaaaagcaattattataatggctwcaacagatttttcatgttgatgctattccacaaatggagctgcaaaaaatcttttggtaagatatgtaatctctttaagaaagagaccatctgttcttaaaaagagtaaattcctggagactacattcatgggaaacaaatgtgctgctaaaatctcgggtaaaaccacttctaccgggaaactcctaaaacgataacctcaactgactgatttccagaaaggcagagcttaacatagttcttttactttctcgga

SEQ ID NO: 45172 - DNA, 590 bp, Chicken  19866894284736_3
gtcagggtgttaaacccagctcttgataggagatgtcccaaatctgacacagcaacaaacggtgatacatgaggagaaaatcccccttctctctccagttctgctagctgcaaagagcagcgaagctcatacagagtgtctcccccaaacattgcrccaatgaagactccgtctggcttaagaacttggtgaatctacaacacagaaggagaaagaaaatattgtgctgttagtatcaattaaattcctgggtggytttttttattattgtgaacttaaaagcaattattataatggctwcaacagatttttcatgttgatgctattccacaaatggagctgcaaaaaatcttttggtaagatatgtaatctctttaagaaagagaccatctgttcttaaaaagagtaaattcctggagactacattcatgggaaacaaatgtgctgctaaaatctcgggtaaaaccacttctaccgggaaactcctaaaacgataacctcaactgactgatttccagaaaggcagagcttaacatagttcttttactttctcggaagaaggcagtgaaagtacttcatgaatggcttaa

SEQ ID NO: 45173 - DNA, 600 bp, Chicken  19866894284738_1
tttggagcccaggacaaaggatgaggtgtggttctcagaactgcttcgtgctcagagcacccaactttgggaggatctgcaaatgctccataagccttcagagcagaacctgccctggttgggctcttagggccatgttggggattcccatggcgaagcagagctaaacaacccctaaaaacccacaacttttcttttgctgttgaaccaacgagagaacaaacaacagacccgggttgaggtgagccacccaacgagcaaaagcaccaacgcactgctgcacagtgacacagaacacayggcctagagaagtaactccaaagccagtgagaccaacaggtacttacttcccattgatgtctccacaaaggcattcacctcctgtgtggttcctcctccccacatacccccccattctcctgctttctgctgttaaggcccctgaaggtctgcaagcaccaactggaactcctggtgggcagacagcacaaacccaccatcctcacttccacaggaaatcaggttgacacgggtctggatacacaaacataacactgctgctgacatttccctctggtattcagtgggatcaattcagtg

SEQ ID NO: 45174 - DNA, 600 bp, Chicken  19866894284743_1
acggagagccccccggcctccctcgcctccccgaatccctccgcctccgcaccaaatccctcgtttccgtgacgacggccggctcgcatcagtctttctatgatactgcactcactcggtgcaaaggacagcccatgtggctcatccatcctgggtggggttctgtggggccgccagccagagccctgctggttggggatcaccccctttgacccggctactgggaaaagctaccagaggtgatgctgagagcagctgggatggaggatgggcaaagcgacaaatcccagcagagcttgstgctgaggatacacctctgccaaggagtaaacccatgatggagcctggtctccaggtgtagccatgtccatgctatcagtctctctcatcctaagcagggttatcagtccttctcatcctaagccacctgctggggatggtccagcaccagagctgtgctagagatggtttgggtaatcctgtttgaccaggtctggratggcrctagggaagggcattggcaatgcaagsgtagagaggactaaattctgaactttgtgtcttgtttcatttacagttcacatcactcaatcatgcggc

SEQ ID NO: 45175 - DNA, 600 bp, Chicken  19866894284743_2
atcaccccctttgacccggctactgggaaaagctaccagaggtgatgctgagagcagctgggatggaggatgggcaaagcgacaaatcccagcagagcttgstgctgaggatacacctctgccaaggagtaaacccatgatggagcctggtctccaggtgtagccatgtccatgctatcagtctctctcatcctaagcagggttatcagtccttctcatcctaagccacctgctggggatggtccagcaccagagctgtgctagagatggtttgggtaatcctgtttgaccaggtctggratggcrctagggaagggcattggcaatgcaagsgtagagaggactaaattctgaactttgtgtcttgtttcatttacagttcacatcactcaatcatgcggccccagtaaggccagggccttgggagctgttgaagagggtccagaggaggccmcaaagatgaccagagggctgcagcacctcccctacaaagacaggctgagggasatgggcttgttcagcctggggaaaagaaggctgtggggtgaccttattgcagcctttcagtaactacagggaacctataaacaggaggggagt

SEQ ID NO: 45176 - DNA, 600 bp, Chicken  19866894284743_3
ccctttgacccggctactgggaaaagctaccagaggtgatgctgagagcagctgggatggaggatgggcaaagcgacaaatcccagcagagcttgstgctgaggatacacctctgccaaggagtaaacccatgatggagcctggtctccaggtgtagccatgtccatgctatcagtctctctcatcctaagcagggttatcagtccttctcatcctaagccacctgctggggatggtccagcaccagagctgtgctagagatggtttgggtaatcctgtttgaccaggtctggratggcrctagggaagggcattggcaatgcaagsgtagagaggactaaattctgaactttgtgtcttgtttcatttacagttcacatcactcaatcatgcggccccagtaaggccagggccttgggagctgttgaagagggtccagaggaggccmcaaagatgaccagagggctgcagcacctcccctacaaagacaggctgagggasatgggcttgttcagcctggggaaaagaaggctgtggggtgaccttattgcagcctttcagtaactacagggaacctataaacaggaggggagtcaactc

SEQ ID NO: 45177 - DNA, 600 bp, Chicken  19866894284743_4
taccagaggtgatgctgagagcagctgggatggaggatgggcaaagcgacaaatcccagcagagcttgstgctgaggatacacctctgccaaggagtaaacccatgatggagcctggtctccaggtgtagccatgtccatgctatcagtctctctcatcctaagcagggttatcagtccttctcatcctaagccacctgctggggatggtccagcaccagagctgtgctagagatggtttgggtaatcctgtttgaccaggtctggratggcrctagggaagggcattggcaatgcaagsgtagagaggactaaattctgaactttgtgtcttgtttcatttacagttcacatcactcaatcatgcggccccagtaaggccagggccttgggagctgttgaagagggtccagaggaggccmcaaagatgaccagagggctgcagcacctcccctacaaagacaggctgagggasatgggcttgttcagcctggggaaaagaaggctgtggggtgaccttattgcagcctttcagtaactacagggaacctataaacaggaggggagtcaactctttgaaagggtagataatagcaggaca

SEQ ID NO: 45178 - DNA, 502 bp, Chicken  19866894284743_5
caggtgtagccatgtccatgctatcagtctctctcatcctaagcagggttatcagtccttctcatcctaagccacctgctggggatggtccagcaccagagctgtgctagagatggtttgggtaatcctgtttgaccaggtctggratggcrctagggaagggcattggcaatgcaagsgtagagaggactaaattctgaactttgtgtcttgtttcatttacagttcacatcactcaatcatgcggccccagtaaggccagggccttgggagctgttgaagagggtccagaggaggccmcaaagatgaccagagggctgcagcacctcccctacaaagacaggctgagggasatgggcttgttcagcctggggaaaagaaggctgtggggtgaccttattgcagcctttcagtaactacagggaacctataaacaggaggggagtcaactctttgaaagggtagataatagcaggacaaggggaaatggtttaagttaagt

SEQ ID NO: 45179 - DNA, 449 bp, Chicken  19866894284743_6
agtccttctcatcctaagccacctgctggggatggtccagcaccagagctgtgctagagatggtttgggtaatcctgtttgaccaggtctggratggcrctagggaagggcattggcaatgcaagsgtagagaggactaaattctgaactttgtgtcttgtttcatttacagttcacatcactcaatcatgcggccccagtaaggccagggccttgggagctgttgaagagggtccagaggaggccmcaaagatgaccagagggctgcagcacctcccctacaaagacaggctgagggasatgggcttgttcagcctggggaaaagaaggctgtggggtgaccttattgcagcctttcagtaactacagggaacctataaacaggaggggagtcaactctttgaaagggtagataatagcaggacaaggggaaatggtttaagttaagt

SEQ ID NO: 45180 - DNA, 599 bp, Chicken  19866894284766_1
  misc_feature (1)..(84): n is any nucleotide
nnnnnnnnnnnnnnnnnnnnnnnnnnnnnnnnnnnnnnnnnnnnnnnnnnnnnnnnnnnnnnnnnnnnnnnnnnnnnnnnnnnnatgagtatttacctgaaggaatccacactgcactgcttcccatccctgatgggcttagttactttttctgaaaaaaaaatcttagtctatcttcacaagttataactcttctaagaagaagaagaagagtaaccttctcattttttattggaatacaatagagattatagctgttaccaaacatgaaatataataaacattaaattaacacacaaytgtcccatttttggggaactacagaggcaagctagttgccctaaatgcacataaaacacgcagctctgcctstgatctcacacttatttgtgatatcctcagcaaaagcattgggctgtgtttgcatttttctctcccacatccactccccatctcttctagacacatttttggctctgagcagaggactgcttctccacttccagtcagagacaggtaagaattctctcagggaactctgtaaccgtattcaacaaaatatagacacatataaggcaaaaaaggaagggagatgctct

SEQ ID NO: 45181 - DNA, 599 bp, Chicken  19866894284766_2
  misc_feature (1)..(12): n is any nucleotide
nnnnnnnnnnnnatgagtatttacctgaaggaatccacactgcactgcttcccatccctgatgggcttagttactttttctgaaaaaaaaatcttagtctatcttcacaagttataactcttctaagaagaagaagaagagtaaccttctcattttttattggaatacaatagagattatagctgttaccaaacatgaaatataataaacattaaattaacacacaaytgtcccatttttggggaactacagaggcaagctagttgccctaaatgcacataaaacacgcagctctgcctstgatctcacacttatttgtgatatcctcagcaaaagcattgggctgtgtttgcatttttctctcccacatccactccccatctcttctagacacatttttggctctgagcagaggactgcttctccacttccagtcagagacaggtaagaattctctcagggaactctgtaaccgtattcaacaaaatatagacacatataaggcaaaaaaggaagggagatgctcttgtgtagacagatatttcacttcataaatgtacactgttcaccattcctcagctgcaaactttgtttcaaaa

SEQ ID NO: 45182 - DNA, 599 bp, Chicken  19866894284767_1
  misc_feature (1)..(5): n is any nucleotide
nnnnnttaaacgagttgcacacataagtgatgttatatgcataggggtttgcattaagtttgctatgtcagatttgtttataaaaatcatattttgaaacacttgcccaggggctccgttctggggagctgcaagctgattccttttaaagaggcagctttcattttccatgaattttcaatagagattttggagctctgagcagggagctctgttttaaaattagcacttgcccaggtttacaattgggtttaattacgaagcaagagggagcttaatcttgttttacgtgtgtgccgygtgacccttcccataccttacagggattggaagggccccctgcctctcttggggaaaattgcttcccaacattttggagaccatttacaatgtttttgttcctatgcagcaatgttaacattgcccataaacctaatagtcacacagtagttaataagcggcagaaagttttatagtcttttccgcagttgttaaaagcctgctactgtaatttggtcctgaccatgcaaagcacattggttgttgtgaaaaataagaggccctattttggtgtattcctggaaaccaatggaaaggag

SEQ ID NO: 45183 - DNA, 600 bp, Chicken  19866894284767_2
gctgaatgtaatgaatttgaggattattggaattgcttggtttgtaatataaacactcgagggcttgccagcagtgtaccttcaggatgtatggctattctagaaaaagaaaatcattttttatttctgttaagaacccattgtaattagtggcactatctggcaatggatggtttatcaaattgcctttcagttacaggaaataggatccattaatgatcttgcaagcatatttttagtcagactcagcaagaatcattttctagctgtctttctatgttatgtaaactaagagcattwccaaggtctcagctgcrytgccctgtgtgccattcagaacagtttttaccttctccagctagaagtgaccacactagtggaaataaggtacttctcaaggtaagatttctagaatcaaacttgtactgaaggcatctcaaatgcagttatgtttggactctgggtatacagttcctcaacacatcagcaggatgtaggagagcttggaggtgggacaaagtggtggctgaaggattggcaggcaagacccaatttgaagaggaactgttctttacaratttctccaagggaagtttccac

SEQ ID NO: 45184 - DNA, 600 bp, Chicken  19866894284767_3
tgaggattattggaattgcttggtttgtaatataaacactcgagggcttgccagcagtgtaccttcaggatgtatggctattctagaaaaagaaaatcattttttatttctgttaagaacccattgtaattagtggcactatctggcaatggatggtttatcaaattgcctttcagttacaggaaataggatccattaatgatcttgcaagcatatttttagtcagactcagcaagaatcattttctagctgtctttctatgttatgtaaactaagagcattwccaaggtctcagctgcrytgccctgtgtgccattcagaacagtttttaccttctccagctagaagtgaccacactagtggaaataaggtacttctcaaggtaagatttctagaatcaaacttgtactgaaggcatctcaaatgcagttatgtttggactctgggtatacagttcctcaacacatcagcaggatgtaggagagcttggaggtgggacaaagtggtggctgaaggattggcaggcaagacccaatttgaagaggaactgttctttacaratttctccaagggaagtttccacaactcagcctctgctaa

SEQ ID NO: 45185 - DNA, 600 bp, Chicken  19866894284767_4
gaggattattggaattgcttggtttgtaatataaacactcgagggcttgccagcagtgtaccttcaggatgtatggctattctagaaaaagaaaatcattttttatttctgttaagaacccattgtaattagtggcactatctggcaatggatggtttatcaaattgcctttcagttacaggaaataggatccattaatgatcttgcaagcatatttttagtcagactcagcaagaatcattttctagctgtctttctatgttatgtaaactaagagcattwccaaggtctcagctgcrytgccctgtgtgccattcagaacagtttttaccttctccagctagaagtgaccacactagtggaaataaggtacttctcaaggtaagatttctagaatcaaacttgtactgaaggcatctcaaatgcagttatgtttggactctgggtatacagttcctcaacacatcagcaggatgtaggagagcttggaggtgggacaaagtggtggctgaaggattggcaggcaagacccaatttgaagaggaactgttctttacaratttctccaagggaagtttccacaactcagcctctgctaat

SEQ ID NO: 45186 - DNA, 600 bp, Chicken  19866894284767_5
tgttatgtaaactaagagcattwccaaggtctcagctgcrytgccctgtgtgccattcagaacagtttttaccttctccagctagaagtgaccacactagtggaaataaggtacttctcaaggtaagatttctagaatcaaacttgtactgaaggcatctcaaatgcagttatgtttggactctgggtatacagttcctcaacacatcagcaggatgtaggagagcttggaggtgggacaaagtggtggctgaaggattggcaggcaagacccaatttgaagaggaactgttctttacaratttctccaagggaagtttccacaactcagcctctgctaatagcagatcagtttctaattaaggatatttatctcagaaggtacctgttgtagtygtacrtgggaaactygtatagagattattacacagcagtgaagagtggtaggggaaaggagtaaggaaaagatcatttgcttctaaatcagaatattatgaacatcacaagctctcaartgcaacgatattacatgctatctgaaagggcagggttctaattatttggctggtataagtctgctgcagtgctttaagatgcccgt

SEQ ID NO: 45187 - DNA, 600 bp, Chicken  19866894284767_6
actagtggaaataaggtacttctcaaggtaagatttctagaatcaaacttgtactgaaggcatctcaaatgcagttatgtttggactctgggtatacagttcctcaacacatcagcaggatgtaggagagcttggaggtgggacaaagtggtggctgaaggattggcaggcaagacccaatttgaagaggaactgttctttacaratttctccaagggaagtttccacaactcagcctctgctaatagcagatcagtttctaattaaggatatttatctcagaaggtacctgttgtagtygtacrtgggaaactygtatagagattattacacagcagtgaagagtggtaggggaaaggagtaaggaaaagatcatttgcttctaaatcagaatattatgaacatcacaagctctcaartgcaacgatattacatgctatctgaaagggcagggttctaattatttggctggtataagtctgctgcagtgctttaagatgcccgtggtttcctttggatgcaatcttacacctgtgttgcctgggattacagtgatatgttttgagccatctgtaacgtttctaaaatgcctttttgcct

SEQ ID NO: 45188 - DNA, 600 bp, Chicken  19866894284767_7
tggaaataaggtacttctcaaggtaagatttctagaatcaaacttgtactgaaggcatctcaaatgcagttatgtttggactctgggtatacagttcctcaacacatcagcaggatgtaggagagcttggaggtgggacaaagtggtggctgaaggattggcaggcaagacccaatttgaagaggaactgttctttacaratttctccaagggaagtttccacaactcagcctctgctaatagcagatcagtttctaattaaggatatttatctcagaaggtacctgttgtagtygtacrtgggaaactygtatagagattattacacagcagtgaagagtggtaggggaaaggagtaaggaaaagatcatttgcttctaaatcagaatattatgaacatcacaagctctcaartgcaacgatattacatgctatctgaaagggcagggttctaattatttggctggtataagtctgctgcagtgctttaagatgcccgtggtttcctttggatgcaatcttacacctgtgttgcctgggattacagtgatatgttttgagccatctgtaacgtttctaaaatgcctttttgcctcagat

SEQ ID NO: 45189 - DNA, 590 bp, Chicken  19866894284767_8
gtacttctcaaggtaagatttctagaatcaaacttgtactgaaggcatctcaaatgcagttatgtttggactctgggtatacagttcctcaacacatcagcaggatgtaggagagcttggaggtgggacaaagtggtggctgaaggattggcaggcaagacccaatttgaagaggaactgttctttacaratttctccaagggaagtttccacaactcagcctctgctaatagcagatcagtttctaattaaggatatttatctcagaaggtacctgttgtagtygtacrtgggaaactygtatagagattattacacagcagtgaagagtggtaggggaaaggagtaaggaaaagatcatttgcttctaaatcagaatattatgaacatcacaagctctcaartgcaacgatattacatgctatctgaaagggcagggttctaattatttggctggtataagtctgctgcagtgctttaagatgcccgtggtttcctttggatgcaatcttacacctgtgttgcctgggattacagtgatatgttttgagccatctgtaacgtttctaaaatgcctttttgcctcagat

SEQ ID NO: 45190 - DNA, 486 bp, Chicken  19866894284767_9
atgtaggagagcttggaggtgggacaaagtggtggctgaaggattggcaggcaagacccaatttgaagaggaactgttctttacaratttctccaagggaagtttccacaactcagcctctgctaatagcagatcagtttctaattaaggatatttatctcagaaggtacctgttgtagtygtacrtgggaaactygtatagagattattacacagcagtgaagagtggtaggggaaaggagtaaggaaaagatcatttgcttctaaatcagaatattatgaacatcacaagctctcaartgcaacgatattacatgctatctgaaagggcagggttctaattatttggctggtataagtctgctgcagtgctttaagatgcccgtggtttcctttggatgcaatcttacacctgtgttgcctgggattacagtgatatgttttgagccatctgtaacgtttctaaaatgcctttttgcctcagat

SEQ ID NO: 45191 - DNA, 600 bp, Chicken  19866894284772_1
gacgtattgcttattaggcaagtcttcctttttaatcttctcccccatgtttggaatccattgatgaaattgcaagtatgtgatacaagagttgaaacctcaaagactagaaatagtaataatgaaagcaggtagcctggtggaagaggcaaatccctgttaatgctcacagagagaggtaatgtgtaggactcacccagtgcaacacaccacaggaaagtgagtggtaatgagtaggtgagccttagaaaagcttcactcatttttcaccttattaagcatcagaccatgtaaacaccrgacaactccacaggaagccaagcttcattaatttctgctgctgacagaactacttatcagtaggtttcttacattcagggtagaaactttacgtttctccggcatattcatgaccacagacttgcatccttaaaggctggtgtgtagaagccaaagaaagatttaaaataagatctctattagaggggtgatgctctatgtggcccttgtgactgcttttaataagcagaacccaaagacatggtgcagagaaatccgaagcgtgcaggctacgcttcaagttgtctgcatcatatattc

SEQ ID NO: 45192 - DNA, 600 bp, Chicken  19866894284777_1
ggcgccctacaggagcatccatacgtctgcgtgcctatagaggctggcactgcaatgcatgcagacagcagaccgttccttctccaatgcaggtacccaaaatgctgaagagaatgagcaacacagcgccgagctttaatcattcatctgcttccttcctccccagtacttcatctgactgattctaattaaactggattttgctcttccgagccaggagagcttttgttttatttgttcaaagactgtttccttgccacccgatttcctccaaatctccctcacagggactcaaaggcrgcgatttcaccacctctgccaagagcatcagctgctgcctggcgggcgagaagcagcacggagagacatcgctgcgtgccgggggatcgctgggagccaccacacgcccgatggaagggatgtgccatcccaatggaagggtctccatcagttctgcagggctggagtcaagcctggtgtggtttaatctccattgcttatcacacttctactacacagtgttttcagtctgacatcttttagaggaccggcacagcttgcccagagaggtggtggtgccccattcctgcacacacccaa

SEQ ID NO: 45193 - DNA, 600 bp, Chicken  19866894284806_1
cgcacagctgctgcctcccctgcaggcctgtccaggacagcaaacccaaggcagcacgggacaggggccagcagagcagaaataggacgatcaaactgtttacagttttgaagggcaggctttcttctgaggctgcaaataggagtaggaggaagcccaggtcagagactgtggtggaactgtggcgtgacagtagatcgctattaaaaagtgcaaggaccaataaaaataggcaataaagaaagtggtaagttttactactgattgcacaacaaacccactactttagtttttcatttrgactagcaaaaatactcctaataatccattaaaaccagcagagaattctactaacatggagttattccctcagtttctagatgattcttcaatcttctgctcaaatattccataacggaggtgacacgagagagagaggcaagcagatcacacgctctttggtgttccactcatggtgcttcgtgcctctccgcagaggctgccagcaaccagacagacgcagcctaagggtgggcagcttgggttccaatcaaagcaggaacaaaatcactcaatggcagccaccctgcaaccattaaa

SEQ ID NO: 45194 - DNA, 600 bp, Chicken  19866894284808_1
taaaatcacgtgtaaatatcgtgcgtgcaaaagtgtggttctaattagttttacatggctgtgtgggccgcttctctccctctctctcccccctctgtttctcgctttttcttttcatgtcctcccaacggtttagtcagaaatcgcgcggagatcccatttgaacgacgctctcccccccatccgggattacaaaggcccatcgtgaaactattatcccctattagagttagaaaattataagacacttacgggatccccgcaaacgcggagcccgttagtttcgagcaattcaaaagmtgcgcataaagatctccgctacgttttgcggccgttgcatagacgcgccgtaagagcgaaaaataattgtatttctttcctggaaagacggaactcgacgtcatttatatttattattaagagtcagctgtggtgaaatgtgattgtagaacttcctttttccattcagaaaaaataatcttagctgcgggagtcctggatgtttatattcgaatttgggttctcgacttgcggcgggtttcaatttttttggttcctcaccaaaaataatagcaaatgaataacaataacaataacgtt

SEQ ID NO: 45195 - DNA, 600 bp, Chicken  19866894284811_1
ctgagaggtgccaaggacttaaggaactacagaggccaaattctgttctgattctcccgtgaactgctgtgagcccatgggatgggtgtgctgggaggttggagagagcttgctgaaggttttctcaaaggcttttcctcagcacaaaatgcagatacttagatacaggggagaatttgccctctctgacttgttagtatgaagattccatcagccatttcacatacctaggctgcagaatgcacacattatttcagatatggggataagataatggggaacaataagtattgttccccrtttttcttctgtgtcttccagatttgctcttggctatcaggcttttgctgagaggcttagacttttagtgtgggaaaagttacctttaaccagcaacttcaagggaaggcactgtagatcatatccagaacatttttcagctttcgatttaagccttctcattgcatttgccctaagagtcgctcacctctggagctaccctagtccagaagcagagggaagtcataggtgggaaacaaaggtgaaattccagcctgggtttggagggtgctttttgaaagaagtggagtaagtgttctg

SEQ ID NO: 45196 - DNA, 600 bp, Chicken  19866894284814_1
acgagctcctgagcacacacacccccttctctgggtgctgtagtcctggagactgcagtgctggtggtgagagatcagcaagaaacctttagaggtggatctgggcaagggcttccatatccatatggaagtgtcaaaccaggatacagccacactgctgccacagcacaaaatccactatttgagcatttataaactccctagaataataatacagaagggcataagaaagaggagacgggtatttcttgccaagacagtgacctgcacagtggggccacagcaaggtgcaatgccagytctctttcattttctgttccttgtttgtggctctgtggctttgctcagcgagcttcactgatgcacgctctatgcacacatccactgctctgtgcacaccgtttctcactgcattcaattgctttcccagattgttcagaaggttgtgtggatctgggtgcagcgcaggagagaattgtgaacagctcactcagaggaaagaaacagaatggctcaagcattcacagtcctttccagagcagtcttagacaccagcacggtgaggtgccccagccctcagccccctcagcctgcacccst

SEQ ID NO: 45197 - DNA, 403 bp, Chicken  19866894284814_2
ytctctttcattttctgttccttgtttgtggctctgtggctttgctcagcgagcttcactgatgcacgctctatgcacacatccactgctctgtgcacaccgtttctcactgcattcaattgctttcccagattgttcagaaggttgtgtggatctgggtgcagcgcaggagagaattgtgaacagctcactcagaggaaagaaacagaatggctcaagcattcacagtcctttccagagcagtcttagacaccagcacggtgaggtgccccagccctcagccccctcagcctgcacccstgcatgcagtggctgcactcctatycctgctctcagggcagtaacagcataacgcaaaccagaaaccagccaacatatccaacaggggcacaggcaaatttaa

SEQ ID NO: 45198 - DNA, 378 bp, Chicken  19866894284814_3
ttgtggctctgtggctttgctcagcgagcttcactgatgcacgctctatgcacacatccactgctctgtgcacaccgtttctcactgcattcaattgctttcccagattgttcagaaggttgtgtggatctgggtgcagcgcaggagagaattgtgaacagctcactcagaggaaagaaacagaatggctcaagcattcacagtcctttccagagcagtcttagacaccagcacggtgaggtgccccagccctcagccccctcagcctgcacccstgcatgcagtggctgcactcctatycctgctctcagggcagtaacagcataacgcaaaccagaaaccagccaacatatccaacaggggcacaggcaaatttaa

SEQ ID NO: 45199 - DNA, 600 bp, Chicken  19866894284824_1
tttttaacagaagaaatgagggagctctgctgcaaagggtggaagtcctggctaggctgtgtgctgcggtgtttattactttgtttgatttgtgttcatcctccacagggaagagagagaccgtgcttcagggtacagaaaaagaggtcccaaaccaaagcgcctcctactgcaggtagcttcttgctcttcttttgtatatttctaattagttagcactgtgctgctactctgctcacaggaaggtggaaactgtccgttcgctgttgcatggacaaaactggaggtaaaatgctaacwcaggaacttgagctcagtgggtaggcaggtacttttaacctgttagctgaacagccactaacaaaacagcgaaaaaagacacaaaagcacaaaaaacagctcttgctctctgaactaggatcttgcctggttgacgtggtcttttcatttctcactgggcttggactttccagcatgtgaaaggtagtagctgtttggaagtggacttccaagcgtgctttgatggttgccatgcaaagcaaccaatcctaggcaaagtatgtaaggaagagcttagattgcaggtgaagagatgagaga

SEQ ID NO: 45200 - DNA, 600 bp, Chicken  19866894284824_2
aagccctgaggactgggaggctgtgcagcacaccagcaaagaaggtaaggccagacaccccttgacagagaagctgtggggcatgagaaggatgctctacgttctgcctccttacctgcctcatcctgggattgcggctgaggtcaggtcctcagagcatctcttgttgactcacgttgtggctttcatttctgcagatttctttcctggttggatgactagtttttgagtgccgtcacctctctgtagtcttaaatcagtgacactcaccatcagtgaggaaaacatgtagaagttacyagaagttwatgctgtgttccagtttccttctggcagaggagacaatgacctctgcctctgtccacacacccacatgtgttttgcctattgctcacgtaaaaggagcgtggctggtcttgggcaggctctcacattggcactcctctactggtgctgctctgagagcaaacaggaatgtccttaggaacccacattacattccttctgccccctccttccctttcctccccacgccccgcatcctctctaaagcccattgctgtagagcttatgtgagagggggggtgagagagagaagtg

SEQ ID NO: 45201 - DNA, 600 bp, Chicken  19866894284824_3
aggactgggaggctgtgcagcacaccagcaaagaaggtaaggccagacaccccttgacagagaagctgtggggcatgagaaggatgctctacgttctgcctccttacctgcctcatcctgggattgcggctgaggtcaggtcctcagagcatctcttgttgactcacgttgtggctttcatttctgcagatttctttcctggttggatgactagtttttgagtgccgtcacctctctgtagtcttaaatcagtgacactcaccatcagtgaggaaaacatgtagaagttacyagaagttwatgctgtgttccagtttccttctggcagaggagacaatgacctctgcctctgtccacacacccacatgtgttttgcctattgctcacgtaaaaggagcgtggctggtcttgggcaggctctcacattggcactcctctactggtgctgctctgagagcaaacaggaatgtccttaggaacccacattacattccttctgccccctccttccctttcctccccacgccccgcatcctctctaaagcccattgctgtagagcttatgtgagagggggggtgagagagagaagtgaggatggt

SEQ ID NO: 45202 - DNA, 600 bp, Chicken  19866894284826_1
cttcttgctagaagtatgtccagttaggtcaagttactcagatgcttacctaatcgttagagttcatgctccccagtgatctgccctttgctcactacctccagtagcttttccatttggctgctctaaatgtcagccagaggacgcctcacaggtgagaccaggtgagcggtctgaagcacttctagctgccctaaaaccagatgtctgcatctgaatctttgtctgagtgaaggccttaaaaatactgtatacagtgtatgatggtgtcattctggaccctctcagttttgtcaggtrygtatgtgttttagaagtattcaagtaaactctgttaattaaaagaagaggaggaaaaragccaaarcagctaactcctaatcatgggtaaaagtactgctgtgccactgtgactttttgttaatctggttgctatgcctcttgttgataattcctgtaagaattctgaatccctacaccattagcataatacgtggttttcagatcccagcatgttgggctaacctttcaataagctgaaagtagacacatgccaaaaaactagggagaacattatcagccattgaccccgaagggact

SEQ ID NO: 45203 - DNA, 600 bp, Chicken  19866894284826_2
ttcttgctagaagtatgtccagttaggtcaagttactcagatgcttacctaatcgttagagttcatgctccccagtgatctgccctttgctcactacctccagtagcttttccatttggctgctctaaatgtcagccagaggacgcctcacaggtgagaccaggtgagcggtctgaagcacttctagctgccctaaaaccagatgtctgcatctgaatctttgtctgagtgaaggccttaaaaatactgtatacagtgtatgatggtgtcattctggaccctctcagttttgtcaggtrygtatgtgttttagaagtattcaagtaaactctgttaattaaaagaagaggaggaaaaragccaaarcagctaactcctaatcatgggtaaaagtactgctgtgccactgtgactttttgttaatctggttgctatgcctcttgttgataattcctgtaagaattctgaatccctacaccattagcataatacgtggttttcagatcccagcatgttgggctaacctttcaataagctgaaagtagacacatgccaaaaaactagggagaacattatcagccattgaccccgaagggactt

SEQ ID NO: 45204 - DNA, 600 bp, Chicken  19866894284826_3
gagttcatgctccccagtgatctgccctttgctcactacctccagtagcttttccatttggctgctctaaatgtcagccagaggacgcctcacaggtgagaccaggtgagcggtctgaagcacttctagctgccctaaaaccagatgtctgcatctgaatctttgtctgagtgaaggccttaaaaatactgtatacagtgtatgatggtgtcattctggaccctctcagttttgtcaggtrygtatgtgttttagaagtattcaagtaaactctgttaattaaaagaagaggaggaaaaragccaaarcagctaactcctaatcatgggtaaaagtactgctgtgccactgtgactttttgttaatctggttgctatgcctcttgttgataattcctgtaagaattctgaatccctacaccattagcataatacgtggttttcagatcccagcatgttgggctaacctttcaataagctgaaagtagacacatgccaaaaaactagggagaacattatcagccattgaccccgaagggacttaagggcatagacttgtctgacatatggctcacagtttttctcatctgcattgctggag

SEQ ID NO: 45205 - DNA, 600 bp, Chicken  19866894284826_4
gctccccagtgatctgccctttgctcactacctccagtagcttttccatttggctgctctaaatgtcagccagaggacgcctcacaggtgagaccaggtgagcggtctgaagcacttctagctgccctaaaaccagatgtctgcatctgaatctttgtctgagtgaaggccttaaaaatactgtatacagtgtatgatggtgtcattctggaccctctcagttttgtcaggtrygtatgtgttttagaagtattcaagtaaactctgttaattaaaagaagaggaggaaaaragccaaarcagctaactcctaatcatgggtaaaagtactgctgtgccactgtgactttttgttaatctggttgctatgcctcttgttgataattcctgtaagaattctgaatccctacaccattagcataatacgtggttttcagatcccagcatgttgggctaacctttcaataagctgaaagtagacacatgccaaaaaactagggagaacattatcagccattgaccccgaagggacttaagggcatagacttgtctgacatatggctcacagtttttctcatctgcattgctggagcacctgag

SEQ ID NO: 45206 - DNA, 370 bp, Chicken  19866894284826_5
ggagaacattatcagccattgaccccgaagggacttaagggcatagacttgtctgacatatggctcacagtttttctcatctgcattgctggagcacctgagggctgacacacagcggctgtgagtgagtttctgtgggatggcctttgttgcaaacagtgcgatccaaataaaaaatattgaaagaatggaggaaagattgacaactaccagcattaagacactagaaatccttaacaatttgaagttctccaaataagtgaagagacctcatttgactactgtgataactgctccaawtagattgcattttttccccaaaaagttacggagcagaaagactctagtatcaagaatgtagaatgagatg

SEQ ID NO: 45207 - DNA, 600 bp, Chicken  19866894284829_1
ggcttgatctggtgtttccactgcactgttaagatgtataatctctcccacacagagactgacacctgctaggatcctctccgcaatttttaactgtttgcattttggggcttaagcagtgtttaggtgcacagtgtgtcataggtacgttttaaaaagtacagcaatggatctttaccattcagtggcactgcagtagtcttcaaagtaatgcaaagaccatttgttaactcagaaacaaaagtacagataatactctgcaaaaattctgttgtttcaagtctttcctttctggtcagrtcgtgtgagttcatgtaccagtgaccaggtacaaaagtctttcccactagcrcrgtgatgttctgagcattcactygggcctcttgagratgrcataatgccagcaagggaaaattcctttggctgtttgaattccacattactctccatttccacggtaagtatcttcctgctactacacacacatccctttggtttggccatagccccctccccggttctaacagctatgtttacatttacatagcaaactaaggactgtgttgctcatcatgacatccctttcaagagatggagtgg

SEQ ID NO: 45208 - DNA, 600 bp, Chicken  19866894284829_2
cagagactgacacctgctaggatcctctccgcaatttttaactgtttgcattttggggcttaagcagtgtttaggtgcacagtgtgtcataggtacgttttaaaaagtacagcaatggatctttaccattcagtggcactgcagtagtcttcaaagtaatgcaaagaccatttgttaactcagaaacaaaagtacagataatactctgcaaaaattctgttgtttcaagtctttcctttctggtcagrtcgtgtgagttcatgtaccagtgaccaggtacaaaagtctttcccactagcrcrgtgatgttctgagcattcactygggcctcttgagratgrcataatgccagcaagggaaaattcctttggctgtttgaattccacattactctccatttccacggtaagtatcttcctgctactacacacacatccctttggtttggccatagccccctccccggttctaacagctatgtttacatttacatagcaaactaaggactgtgttgctcatcatgacatccctttcaagagatggagtggtactatggcttcatcacgtttgacatcccatccatgctgcctacaagtctca

SEQ ID NO: 45209 - DNA, 600 bp, Chicken  19866894284829_3
gagactgacacctgctaggatcctctccgcaatttttaactgtttgcattttggggcttaagcagtgtttaggtgcacagtgtgtcataggtacgttttaaaaagtacagcaatggatctttaccattcagtggcactgcagtagtcttcaaagtaatgcaaagaccatttgttaactcagaaacaaaagtacagataatactctgcaaaaattctgttgtttcaagtctttcctttctggtcagrtcgtgtgagttcatgtaccagtgaccaggtacaaaagtctttcccactagcrcrgtgatgttctgagcattcactygggcctcttgagratgrcataatgccagcaagggaaaattcctttggctgtttgaattccacattactctccatttccacggtaagtatcttcctgctactacacacacatccctttggtttggccatagccccctccccggttctaacagctatgtttacatttacatagcaaactaaggactgtgttgctcatcatgacatccctttcaagagatggagtggtactatggcttcatcacgtttgacatcccatccatgctgcctacaagtctcata

SEQ ID NO: 45210 - DNA, 600 bp, Chicken  19866894284829_4
ctctccgcaatttttaactgtttgcattttggggcttaagcagtgtttaggtgcacagtgtgtcataggtacgttttaaaaagtacagcaatggatctttaccattcagtggcactgcagtagtcttcaaagtaatgcaaagaccatttgttaactcagaaacaaaagtacagataatactctgcaaaaattctgttgtttcaagtctttcctttctggtcagrtcgtgtgagttcatgtaccagtgaccaggtacaaaagtctttcccactagcrcrgtgatgttctgagcattcactygggcctcttgagratgrcataatgccagcaagggaaaattcctttggctgtttgaattccacattactctccatttccacggtaagtatcttcctgctactacacacacatccctttggtttggccatagccccctccccggttctaacagctatgtttacatttacatagcaaactaaggactgtgttgctcatcatgacatccctttcaagagatggagtggtactatggcttcatcacgtttgacatcccatccatgctgcctacaagtctcatatgatgggtggacagagattgca

SEQ ID NO: 45211 - DNA, 600 bp, Chicken  19866894284829_5
ttaactgtttgcattttggggcttaagcagtgtttaggtgcacagtgtgtcataggtacgttttaaaaagtacagcaatggatctttaccattcagtggcactgcagtagtcttcaaagtaatgcaaagaccatttgttaactcagaaacaaaagtacagataatactctgcaaaaattctgttgtttcaagtctttcctttctggtcagrtcgtgtgagttcatgtaccagtgaccaggtacaaaagtctttcccactagcrcrgtgatgttctgagcattcactygggcctcttgagratgrcataatgccagcaagggaaaattcctttggctgtttgaattccacattactctccatttccacggtaagtatcttcctgctactacacacacatccctttggtttggccatagccccctccccggttctaacagctatgtttacatttacatagcaaactaaggactgtgttgctcatcatgacatccctttcaagagatggagtggtactatggcttcatcacgtttgacatcccatccatgctgcctacaagtctcatatgatgggtggacagagattgcaacaattgtctgga

SEQ ID NO: 45212 - DNA, 600 bp, Chicken  19866894284829_6
ctgtttgcattttggggcttaagcagtgtttaggtgcacagtgtgtcataggtacgttttaaaaagtacagcaatggatctttaccattcagtggcactgcagtagtcttcaaagtaatgcaaagaccatttgttaactcagaaacaaaagtacagataatactctgcaaaaattctgttgtttcaagtctttcctttctggtcagrtcgtgtgagttcatgtaccagtgaccaggtacaaaagtctttcccactagcrcrgtgatgttctgagcattcactygggcctcttgagratgrcataatgccagcaagggaaaattcctttggctgtttgaattccacattactctccatttccacggtaagtatcttcctgctactacacacacatccctttggtttggccatagccccctccccggttctaacagctatgtttacatttacatagcaaactaaggactgtgttgctcatcatgacatccctttcaagagatggagtggtactatggcttcatcacgtttgacatcccatccatgctgcctacaagtctcatatgatgggtggacagagattgcaacaattgtctggaacac

SEQ ID NO: 45213 - DNA, 600 bp, Chicken  19866894284833_1
cgagccccaccagagcagcatatgatagtctgaccccatacgctcagctgagtgcttttaagtgaaaagaaccaaatacatggagaggcctgtgtatgggacgaggggtgcatgttaaggtctgaagcttttgatggtgttaggagaatatgaaaaggcacatggctgagcctcaccacatctgtctttcctgggcagaaagtgcccgtttctagccctgcagggatgtgtgctgttgggcaggaagtgagtgatgttcacacagacataaaagctgctgctgacatgggtatgtctttmtggctgccagggcctcagaagatgggtgggattctcacttagaggatgtggctccccagcaagcaggtttcgcttaaagcagccatcggattcaaaggctgtgggagtgctgggggctttatggcctaagagctctggatttgttctgggaactggagctgggaataaatggcaaaggggagctgaggaaggcagtgattgcaaccatatgatctggctgttgtgttgaacaactggtggctctggatttcagatgcttttctcaaagatgaggcaaaaaatagtgtagagaaggaagga

SEQ ID NO: 45214 - DNA, 600 bp, Chicken  19866894284851_1
tagacttgcttgcctgcaagagaagcttaactccattcatacacgagtattaaaccaaactcatgtgtttgcttaaccagaagtctcttagcaacaaaagaattctggaaaattgagttgagagtgatgctgagaggtcacagactcattcccttgtccaaaagggatcagttctacctaacctacctttagttgctctttgtctagcatgtgcttaacaaaatccagcaacgcataagctacagctcctctgtgcagtctaaacccttccacagatgcttgccaggatgtttgcatcascattcccaaggagggacatctttgcctgtacaggtagagaatttctgggacrcctcatcctacaagattctccagtcttgtttctgtctgctcacaaactccattacccttcttcttgccttcccagctccttcttttcctccctgcatccagaacttgactacggaactgccaggtgataccagaagagggatggtatgtccctacaaaatatgctgaaggatataaggtgccaccctccatcttacactcactcttcaccattcccacaaacagtgtttccgacaacataccaggata

SEQ ID NO: 45215 - DNA, 600 bp, Chicken  19866894284851_2
aaccaaactcatgtgtttgcttaaccagaagtctcttagcaacaaaagaattctggaaaattgagttgagagtgatgctgagaggtcacagactcattcccttgtccaaaagggatcagttctacctaacctacctttagttgctctttgtctagcatgtgcttaacaaaatccagcaacgcataagctacagctcctctgtgcagtctaaacccttccacagatgcttgccaggatgtttgcatcascattcccaaggagggacatctttgcctgtacaggtagagaatttctgggacrcctcatcctacaagattctccagtcttgtttctgtctgctcacaaactccattacccttcttcttgccttcccagctccttcttttcctccctgcatccagaacttgactacggaactgccaggtgataccagaagagggatggtatgtccctacaaaatatgctgaaggatataaggtgccaccctccatcttacactcactcttcaccattcccacaaacagtgtttccgacaacataccaggatatgtggcttcgtgaagaggaaagccacaaacatggttgaagcaaaaccaagac

SEQ ID NO: 45216 - DNA, 599 bp, Chicken  19866894284852_1
  misc_feature (1)..(6): n is any nucleotide
nnnnnncattttgtagaagacaccaggttatcaaccacgttcagatgagaattccaggacatcccatactgagtttagttatagacttcaggaacacgacatactaacattgagcaaagccatatataacaattactgctgccacaagggcatgcttgaaagtaagtacagctataccaaatgcaccgtaacgtgcattttactttcaaattgcaatcagagcttctgcaacatactatgtaggttaatacccatcaccccaaagggatgtcgtgaagttaaatacctgcttatatttgygaagaaaaaagatgaaaattatagcactacctgtgttatgcaaatagagaggtcagagactctatattcaggataaggtttggatgatatgcagtaaatgatacccagtgacttatgggtaaaccagatatcaaccagttacattattaaataaatattcagaaattccagtactctgcgtgcactgaatgatataggaatcctgtaaatgtgtttttataattaaaagatggtaacagcatagaggaaggcaaccctagtcctggcatatcctcatgtccgtgtgcttggttttaaac

SEQ ID NO: 45217 - DNA, 600 bp, Chicken  19866894284852_2
gaggtcagagactctatattcaggataaggtttggatgatatgcagtaaatgatacccagtgacttatgggtaaaccagatatcaaccagttacattattaaataaatattcagaaattccagtactctgcgtgcactgaatgatataggaatcctgtaaatgtgtttttataattaaaagatggtaacagcatagaggaaggcaaccctagtcctggcatatcctcatgtccgtgtgcttggttttaaacattaatttttacagttcaatattgcagaacattcatttgatttaaaaaraaaatggctgtgataaatgatgtttttcccctcacactccacaccataatttcccacatcgctatttttgtttatgagtatcataatcagaatctattggctttaaggagattaatgagtcaaggcaggactgacaaaaaaaaaaaatcacaacaaaagcagttatttataacagcagaaaaaaaggaaagaactcctcacattcctcagaagttcaataatgagtcattttaattatttgctgatttgaaagctctagggaacctgtgcagatgggcctgggctacaagtgaaacagta

SEQ ID NO: 45218 - DNA, 600 bp, Chicken  19866894284853_1
aggacctctgtatagaaggattttctttaaattaaaatgagggggaacgctgcacaacattaaggagtattttgaagtattttctttaccgtgtacagaagccaggttaaagcgtgtttctagtgctaatgatagaaatggaaatgtagcttgtgggttttgatggcaacacactcctggacagcaaaggccacctgatcataatgatgataaagcaaagcctctcgttctggttcccaaactggagtacacggacatttcctttggggggagatgatggcaaaatgggagaaaatgccycctctggaagaaaaggctatgatgcaatctctaaataaatgcacctatttgcgtggatgaacgctgcagtattacccgcatccaataacatcccttcctgaaactgttaagaacgtaacatctgctacaactcaggccgaccagaagtttatttcatcagcagcagtgttagctgcacacctctcagacctgagtgtgtacggtctccatcgcagttgcaggaaggcaaactctgaactgagctgctcccgtcgcctccctctctcttttcctttctcagcaggttaaatgaggaaaatg

SEQ ID NO: 45219 - DNA, 600 bp, Chicken  19866894284860_1
aagattggcttagtcttgaattaaacaaagcactcattctttgtactgttgtgggatgctttgtagttatcagtgatggcagctcggaacatcgttctcccgctccctactcttctaacagattgtttgattgaaagcattaatgatctgtcagaaatgttttcttttttaagattattgtaagtaggactcattgtcttggaaacaacctgacaagctgtaccctcctgttttatggaatgaaagattgaatacttttatatcaagttggtaccttccctctttgtttgaggaacttayttttccttgcctttggaacagtttatattgctactgacatggacttttcagtacaatattttagcaggtaatataatataaacacataattacttttgatgctatgtwtttatttactctggattttttcataaggcatttgcatttgaaactaacacctscagcagtactaytctcttctgaatttgtgtctataaataatatgaaccctcaaaaatatttgaggttttgatttttggttgcaatccacctgtctctcatcttcaggaactgcaaacaatcaaattgaaacttgtgaat

SEQ ID NO: 45220 - DNA, 600 bp, Chicken  19866894284860_2
actcttctaacagattgtttgattgaaagcattaatgatctgtcagaaatgttttcttttttaagattattgtaagtaggactcattgtcttggaaacaacctgacaagctgtaccctcctgttttatggaatgaaagattgaatacttttatatcaagttggtaccttccctctttgtttgaggaacttayttttccttgcctttggaacagtttatattgctactgacatggacttttcagtacaatattttagcaggtaatataatataaacacataattacttttgatgctatgtwtttatttactctggattttttcataaggcatttgcatttgaaactaacacctscagcagtactaytctcttctgaatttgtgtctataaataatatgaaccctcaaaaatatttgaggttttgatttttggttgcaatccacctgtctctcatcttcaggaactgcaaacaatcaaattgaaacttgtgaattttccagctcagtcaggatcattaaatcttgagaagaaactggcatgaacaggtgctgctgctttttctttcagcagtttctagagtataatatggtttcatcctgct

SEQ ID NO: 45221 - DNA, 594 bp, Chicken  19866894284860_3
ttcttttttaagattattgtaagtaggactcattgtcttggaaacaacctgacaagctgtaccctcctgttttatggaatgaaagattgaatacttttatatcaagttggtaccttccctctttgtttgaggaacttayttttccttgcctttggaacagtttatattgctactgacatggacttttcagtacaatattttagcaggtaatataatataaacacataattacttttgatgctatgtwtttatttactctggattttttcataaggcatttgcatttgaaactaacacctscagcagtactaytctcttctgaatttgtgtctataaataatatgaaccctcaaaaatatttgaggttttgatttttggttgcaatccacctgtctctcatcttcaggaactgcaaacaatcaaattgaaacttgtgaattttccagctcagtcaggatcattaaatcttgagaagaaactggcatgaacaggtgctgctgctttttctttcagcagtttctagagtataatatggtttcatcctgcttgcctgaacttaaagtcatgctattttctcaccagatactttttcat

SEQ ID NO: 45222 - DNA, 582 bp, Chicken  19866894284860_4
attattgtaagtaggactcattgtcttggaaacaacctgacaagctgtaccctcctgttttatggaatgaaagattgaatacttttatatcaagttggtaccttccctctttgtttgaggaacttayttttccttgcctttggaacagtttatattgctactgacatggacttttcagtacaatattttagcaggtaatataatataaacacataattacttttgatgctatgtwtttatttactctggattttttcataaggcatttgcatttgaaactaacacctscagcagtactaytctcttctgaatttgtgtctataaataatatgaaccctcaaaaatatttgaggttttgatttttggttgcaatccacctgtctctcatcttcaggaactgcaaacaatcaaattgaaacttgtgaattttccagctcagtcaggatcattaaatcttgagaagaaactggcatgaacaggtgctgctgctttttctttcagcagtttctagagtataatatggtttcatcctgcttgcctgaacttaaagtcatgctattttctcaccagatactttttcat

SEQ ID NO: 45223 - DNA, 599 bp, Chicken  19866894284861_1
  misc_feature (1)..(64): n is any nucleotide
nnnnnnnnnnnnnnnnnnnnnnnnnnnnnnnnnnnnnnnnnnnnnnnnnnnnnnnnnnnnnnnncagcgccagccaggcagcaatcatagaatcatagaatggcctcggttgaaaaggacctccaagataatctagtttcaaccccttgccatgggcagggtcaccaaccactagaccaggctgcctggagccacatccagacttgctttgagcaatatccagagcctgcctaatccctgaagagcgaggtctaacatcacccagaaacctgctattgtacattataacagcactcagtkactgtggtatcaaagtaagcagctgggtgagtaagtactgatgtattgctaatgtcctgaaaagatggtcgcttgttaccttgcccacagatgccacaaacactgacagatgtgaaaaccaagggtttggattacattaggcacatgcggaggttctgacaggaacagaacttgaacagacagagtgagatttattcatttaaagtgaaatttacttactcaaagggaaagtttttaattgataaatctactatatacaaaatcacgcatacataaaagttaaacattggcttgagaaa

SEQ ID NO: 45224 - DNA, 600 bp, Chicken  19866894284861_2
gagtaagtactgatgtattgctaatgtcctgaaaagatggtcgcttgttaccttgcccacagatgccacaaacactgacagatgtgaaaaccaagggtttggattacattaggcacatgcggaggttctgacaggaacagaacttgaacagacagagtgagatttattcatttaaagtgaaatttacttactcaaagggaaagtttttaattgataaatctactatatacaaaatcacgcatacataaaagttaaacattggcttgagaaactccaagaattatattggttttgcagttytgccctacctttatgaagagctaagtaaacacagcctattttagggcttgctataagcatggtgctggagaaagcaggcacatgtgctgcttcaccagtgccacaaatggctggcctggtttaaaaatacccatactgtttccctgttgtgaagttcaatgctcttttgtcttctgctaggatgacctctctcacactgtggataggctgctgagatacagaagtgatgtatctatcgcccttgaggagcttcagcraaacaagaatcagattgaggtttgtgcccaggtcacagctaat

SEQ ID NO: 45225 - DNA, 426 bp, Chicken  19866894284861_3
attggcttgagaaactccaagaattatattggttttgcagttytgccctacctttatgaagagctaagtaaacacagcctattttagggcttgctataagcatggtgctggagaaagcaggcacatgtgctgcttcaccagtgccacaaatggctggcctggtttaaaaatacccatactgtttccctgttgtgaagttcaatgctcttttgtcttctgctaggatgacctctctcacactgtggataggctgctgagatacagaagtgatgtatctatcgcccttgaggagcttcagcraaacaagaatcagattgaggtttgtgcccaggtcacagctaattcagagcttcttccctccatgttttctaagaaacaaatgatggcaataatactgggggtgtcaccttcagcaagttgttctgg

SEQ ID NO: 45226 - DNA, 600 bp, Chicken  19866894284865_1
tggcacaggaacgccctgttctgatgcaaatgagaaaagggcaccttggctgactcagttccctatagtctgccttcacctccagtagatctactcaccactgggttgtccaggctgagcgtgctcccaagccgatggctttcaggcctggaatccatctgagagggcaaggagaaaggaagcgagtgcctgtttgacagttctctcccaggccaatggtcaccggggctgtgagctacagacggggcttttggaattggccgggagggccaaagatccccctgacggttggagggcacrgggggtggtttgtcccttgcaggacagtctgttggtgtgcagggcaggggccgcctctgaggccgagcatcggccccgatggaatgcggtctatccggaggcggtggcggcgggagatctcggagcgtgggtgggatgggcagaggcttgtctttgtgaagggtaccaggagcagcctggaaggcagaggaatgcaaaaacattgcttagcaaaggtagttcagctacaaaaaaaaaaaaaacccagaaagaggtggggggcgggtagcagaaggtttggttctgtttctgtttttttgt

SEQ ID NO: 45227 - DNA, 412 bp, Chicken  19866894284865_2
cggagcgtgggtgggatgggcagaggcttgtctttgtgaagggtaccaggagcagcctggaaggcagaggaatgcaaaaacattgcttagcaaaggtagttcagctacaaaaaaaaaaaaaacccagaaagaggtggggggcgggtagcagaaggtttggttctgtttctgtttttttgtttacaagaaattatctcaatggatgtggaataatgccaagttaaccctccagagacacctcctctacaagcttgagaagagaacacagtataactgcatgcagctacaacagctaggcamtgaacacaccaggtcatccttctggaaggaaaaaacactcttgaggcagtattggattggattccaaacaaaggacactcatcatttcaaaaagcttcagctgcagcttatt

SEQ ID NO: 45228 - DNA, 599 bp, Chicken  19866894284868_1
  misc_feature (1)..(35): n is any nucleotide
nnnnnnnnnnnnnnnnnnnnnnnnnnnnnnnnnnnctcagaagctgtgtgttttgcctaaagaaaacctcatcgcagagtatttcaggggagggaagtgaaagggacaccctaactctttctgtcataacctgttcagtcattaagtggtaaaagcataacttaaccaagtcttcctctttcacagaagcttcctagggccgtgtgttagctcctggggaggagagcatctcaggcagcaggagccagaaaagaatccagacctcctggctgcgatagtaccaaaccctcggcaagttgrtggagggtggatgtaggctaaggaggagagatgttctgctcctgcctttgtttccytttctaatgccgasgtcatgctattcccgcggctgatcctggtgcaccgttgggtcgcaaagagttaaaacggagagcagagcagcatgtacacgttacaaattacatgaggcaaaatccagagcttgaagaccgagtcccttcatccccatcctcctgccaccaaccccaaaccccccctyccccggtccttccagcaatcatttattataaaggggttttatgatacaaatttgataatct

SEQ ID NO: 45229 - DNA, 600 bp, Chicken  19866894284868_2
ctaaagaaaacctcatcgcagagtatttcaggggagggaagtgaaagggacaccctaactctttctgtcataacctgttcagtcattaagtggtaaaagcataacttaaccaagtcttcctctttcacagaagcttcctagggccgtgtgttagctcctggggaggagagcatctcaggcagcaggagccagaaaagaatccagacctcctggctgcgatagtaccaaaccctcggcaagttgrtggagggtggatgtaggctaaggaggagagatgttctgctcctgcctttgtttccytttctaatgccgasgtcatgctattcccgcggctgatcctggtgcaccgttgggtcgcaaagagttaaaacggagagcagagcagcatgtacacgttacaaattacatgaggcaaaatccagagcttgaagaccgagtcccttcatccccatcctcctgccaccaaccccaaaccccccctyccccggtccttccagcaatcatttattataaaggggttttatgatacaaatttgataatctcccatacacattggcactgttctaattggagttgtaagcccataaaattcaaaccct

SEQ ID NO: 45230 - DNA, 600 bp, Chicken  19866894284868_3
atcgcagagtatttcaggggagggaagtgaaagggacaccctaactctttctgtcataacctgttcagtcattaagtggtaaaagcataacttaaccaagtcttcctctttcacagaagcttcctagggccgtgtgttagctcctggggaggagagcatctcaggcagcaggagccagaaaagaatccagacctcctggctgcgatagtaccaaaccctcggcaagttgrtggagggtggatgtaggctaaggaggagagatgttctgctcctgcctttgtttccytttctaatgccgasgtcatgctattcccgcggctgatcctggtgcaccgttgggtcgcaaagagttaaaacggagagcagagcagcatgtacacgttacaaattacatgaggcaaaatccagagcttgaagaccgagtcccttcatccccatcctcctgccaccaaccccaaaccccccctyccccggtccttccagcaatcatttattataaaggggttttatgatacaaatttgataatctcccatacacattggcactgttctaattggagttgtaagcccataaaattcaaaccctttgttttcatgaag

SEQ ID NO: 45231 - DNA, 600 bp, Chicken  19866894284868_4
caggagccagaaaagaatccagacctcctggctgcgatagtaccaaaccctcggcaagttgrtggagggtggatgtaggctaaggaggagagatgttctgctcctgcctttgtttccytttctaatgccgasgtcatgctattcccgcggctgatcctggtgcaccgttgggtcgcaaagagttaaaacggagagcagagcagcatgtacacgttacaaattacatgaggcaaaatccagagcttgaagaccgagtcccttcatccccatcctcctgccaccaaccccaaaccccccctyccccggtccttccagcaatcatttattataaaggggttttatgatacaaatttgataatctcccatacacattggcactgttctaattggagttgtaagcccataaaattcaaaccctttgttttcatgaaggccacaaggttttaaaagatactattgtaccgcctaaaacccataaaattgtcactagggactgattaaacagtcctgaattgaaacagtgcggattttgtctaggtccttttcaaccacaacaatgctcttttcaactcccaagacaaaaggaggtttaaggagcga

SEQ ID NO: 45232 - DNA, 600 bp, Chicken  19866894284871_1
tatttgaccacagcatcatacatataaagtatgctcagcacttctctagatcatccctacctattgcatacatttaaaagcaaaagcaggacaacaactagcatctgcaaataactgcagaagatccccaaatgagtctacagtgatttttgtctcatagggttttcatgtatgaactcaaactccttgcctgaaatcttggaaatgactggtcccacagtgacttccatatgagctcagtgcacactagtgtcaagaagggtgccatgcttctcctatccccaggctgttggtgtcttytggaaggatcttgaaaattagcatatctatctagcctgctaaaaaggagatcagtcccagcattaactagcataagatgcaaatgagagaggtggggaagagacctcaagaccactgcagatgtctctccaagcaygtaagcacattatacccaaatgtaaataagggatgtgccttcattctgtcagggtgcacaattaagaggaaagattccctcccacatccagtgccacattaaagaatgcctacttcttaataccacattggtcttacagagttttatttgagcaaggatttgtc

SEQ ID NO: 45233 - DNA, 600 bp, Chicken  19866894284871_2
tctacagtgatttttgtctcatagggttttcatgtatgaactcaaactccttgcctgaaatcttggaaatgactggtcccacagtgacttccatatgagctcagtgcacactagtgtcaagaagggtgccatgcttctcctatccccaggctgttggtgtcttytggaaggatcttgaaaattagcatatctatctagcctgctaaaaaggagatcagtcccagcattaactagcataagatgcaaatgagagaggtggggaagagacctcaagaccactgcagatgtctctccaagcaygtaagcacattatacccaaatgtaaataagggatgtgccttcattctgtcagggtgcacaattaagaggaaagattccctcccacatccagtgccacattaaagaatgcctacttcttaataccacattggtcttacagagttttatttgagcaaggatttgtctggcaacacccggcaacattcctgcccaaggtctacactgcaaggcaccaacagactgaggaagaggaccctacatttctgtccctgtgactcccaccatcagcctctgtaccaaccccagtaaatcttatgaatc

SEQ ID NO: 45234 - DNA, 599 bp, Chicken  19866894284872_1
  misc_feature (1)..(143): n is any nucleotide
nnnnnnnnnnnnnnnnnnnnnnnnnnnnnnnnnnnnnnnnnnnnnnnnnnnnnnnnnnnnnnnnnnnnnnnnnnnnnnnnnnnnnnnnnnnnnnnnnnnnnnnnnnnnnnnnnnnnnnnnnnnnnnnnnnnnnnnnnnnnnnnatttcaggcaaggagtttgagttcatacatgaaacccctatgagacaaaaatcactgtagactcatttggggatcttctgcagttatttgcagatgctagttgttgtcctgcttttgcttttaaatgtatgcaataggtagggatgatctagagaaktgctgagcatactttatatgtatgatgctgtggtcaaatatccctccatgcctaaaacaactgtctgttaattgaaaagatgaaaacagatagatttagtggctctacctgcaatatgaagttttattcattatctcagatttgctcttgccttctgtttgtgtagtctcagcacagctttcctctttaagacagattaatttgtaaggtcatcataggacacrtcagccactttcacttctgatgtctgtcacagctacccttgtgggaaagaattgtgggcagcaggtcccacagct

SEQ ID NO: 45235 - DNA, 600 bp, Chicken  19866894284872_2
agttatttgcagatgctagttgttgtcctgcttttgcttttaaatgtatgcaataggtagggatgatctagagaaktgctgagcatactttatatgtatgatgctgtggtcaaatatccctccatgcctaaaacaactgtctgttaattgaaaagatgaaaacagatagatttagtggctctacctgcaatatgaagttttattcattatctcagatttgctcttgccttctgtttgtgtagtctcagcacagctttcctctttaagacagattaatttgtaaggtcatcataggacacrtcagccactttcacttctgatgtctgtcacagctacccttgtgggaaagaattgtgggcagcaggtcccacagctaatcctcttgtgagtcagcactgtggactgagaagggtttaaatgtagatgcaatgtgctggcccttcagccacaccagattccccatgatcttaaccccaaccttcatgcttctctgctgtcattctgtttttgtgtgccactgctcagcttccctttaagaacgtctgattacttccttccaagcaagtcagaattaaggccaggaagaagcatatttttaga

SEQ ID NO: 45236 - DNA, 600 bp, Chicken  19866894284872_3
attatctcagatttgctcttgccttctgtttgtgtagtctcagcacagctttcctctttaagacagattaatttgtaaggtcatcataggacacrtcagccactttcacttctgatgtctgtcacagctacccttgtgggaaagaattgtgggcagcaggtcccacagctaatcctcttgtgagtcagcactgtggactgagaagggtttaaatgtagatgcaatgtgctggcccttcagccacaccagattccccatgatcttaaccccaaccttcatgcttctctgctgtcattctgrttttgtgtgccactgctcagcttccctttaagaacgtctgattacttccttccaagcaagtcagaattaaggccaggaagaagcatatttttagaattgcacaagagtttatgcccagtgccactgcagggactgtccaaaaccggtgtcacttggaagctaaggtgtttgttatttggacacacatctcaacactttcctatttggtgcctttcttggtcccttaaaatgcgaatgtaattatatgagactacgtgaacgtgagacttcacgattttctaaattgaaaattaatttaga

SEQ ID NO: 45237 - DNA, 599 bp, Chicken  19866894284879_1
  misc_feature (1)..(87): n is any nucleotide
nnnnnnnnnnnnnnnnnnnnnnnnnnnnnnnnnnnnnnnnnnnnnnnnnnnnnnnnnnnnnnnnnnnnnnnnnnnnnnnnnnnnnnntaagaacacaggacataaacatgggggtgaatgtcattgagcacttcaggcataaaatgtttagttaccagtgtatgaaaagattaattgttctttctgttagttctgaagatacttcaagcttaagagaaatgctaataactggatggaaacattaattttcttaagatatgttttatatcagattcatttttttttcatattcatcttaamaaaacatattattttcctaagctcccaacatcttcaaagaattccttgactcatttaacacacaagccttcaaagaaacatattaccatttctcagatgcatcttcaacctgtaccagctactgacagtacagtttcacctgttaacttccatgtggatagagtaattaaagtgtagaactgttagtcttgttagtcttgttagtcttgcacattaaatgtttttctttatccctgcctgcttttacatccaaccagttttgtgcctattaatattgcagctttttatgtaaacgaaga

SEQ ID NO: 45238 - DNA, 600 bp, Chicken  19866894284885_1
attgccttaagtgactaccaaatatcaaggaaataaacaaaaataaagatgatagctttggacttactggtaaagaatgaaagttctcctgaatggtaggcaacaagtcaagcagcgggaatgacaagtccccttttgcaccctcctgtactgcggcctgaacccttctgtgtccactgaacaagagagcagagggaacgcaaagaaaagaaggagtgtgtttcttttttttaatacatgcctgactgtgactcttcaatatgcaactgtttgcttgttttacatttacagagaagaacrgtctacactgatagtctttttcacagtagtgacagagcagagcaacctgctgtccctccataggatgggaacaccctgctattacgatcccagtaacacattccatagctaacgatgaataacaccccaaataaaagtcactgtgacactgaactcccagatatgtcaaattgtttcttgcaagtattttctctctatttatgtatatacgcatatacgtattctaagatttcaaaataagaatagtcagtggtgccatccggacatccccttcccttgtacccacaaattttaggacaa

SEQ ID NO: 45239 - DNA, 600 bp, Chicken  19866894284885_2
cttgttagagcaactgccgcatgtcgcacaccaggcgcggagtgcccagactacaaaggatgtgccccgtcgttatggcaaccaaattacaactttgttgcacacagtcatccccgtcaccttgggtacagcaatccagcttggcggggatccgcggccccacctgcctggccgcatcctgccgtgtgccatccagcctcctctgccctacggcacagccgggcttacccaggctccccggggttctcctgcctcccggggccccagaactggcaggagggcacgctgcagctgccagcmattaacagtctgctggaaaggacgtgagtgtgacgtctacaagtcaccatccgcacagatagccatggcccccacggctgttttggctgaagtggagggctagcttgaatccctcatttaaagcagaaatgaggaggcgtagtacttcttctctcaagcaaatgacaccatctactccatcaagtcttttgcctctttgcctgacttgacaaagagtcgatcccatccatcccccgccagcacaggggagaacgcactgttcccctttcctcctgcctcccagcctaagcctctttccct

SEQ ID NO: 45240 - DNA, 600 bp, Chicken  19866894284886_1
aggaagttgtagagtgcagtgaggtctcccctgagcctcctcttctccagactgaacaatcccagctccctcagctcataagactggtgctccagacccctcaccagttgtattgcccttctctgggttagtgcttattgcctgatatttgtggtgtgttaggcttgatttgcatagaaggtggttaaaaattgtccagagggagttgtgttattgctgagtatatgcatgcatgagcagcatgagaagaatggaaatgtgtattcattccttgacaaatacagttcaagttctgtaackctgtaatcatgcagatattgttagccaagcagtaacacaacattaaaatgtgattttctttggtcttttgcaccccagggaagtgtgagctcagwctgcttcttaatgccaggtymgggggaggggttctgtaaacatctgggggcactgagtttttcttccttgttattgttttttcctggagtcccagaggagttctgttactcaccttaagaaaaaggcctttttaaacatagatgaagattgtgacttcttccttatgtttctgaatcatacagggaaaaagtgttttgttcatag

SEQ ID NO: 45241 - DNA, 507 bp, Chicken  19866894284886_2
acccctcaccagttgtattgcccttctctgggttagtgcttattgcctgatatttgtggtgtgttaggcttgatttgcatagaaggtggttaaaaattgtccagagggagttgtgttattgctgagtatatgcatgcatgagcagcatgagaagaatggaaatgtgtattcattccttgacaaatacagttcaagttctgtaackctgtaatcatgcagatattgttagccaagcagtaacacaacattaaaatgtgattttctttggtcttttgcaccccagggaagtgtgagctcagwctgcttcttaatgccaggtymgggggaggggttctgtaaacatctgggggcactgagtttttcttccttgttattgttttttcctggagtcccagaggagttctgttactcaccttaagaaaaaggcctttttaaacatagatgaagattgtgacttcttccttatgtttctgaatcatacagggaaaaagtgttttgttcataggt

SEQ ID NO: 45242 - DNA, 487 bp, Chicken  19866894284886_3
cccttctctgggttagtgcttattgcctgatatttgtggtgtgttaggcttgatttgcatagaaggtggttaaaaattgtccagagggagttgtgttattgctgagtatatgcatgcatgagcagcatgagaagaatggaaatgtgtattcattccttgacaaatacagttcaagttctgtaackctgtaatcatgcagatattgttagccaagcagtaacacaacattaaaatgtgattttctttggtcttttgcaccccagggaagtgtgagctcagwctgcttcttaatgccaggtymgggggaggggttctgtaaacatctgggggcactgagtttttcttccttgttattgttttttcctggagtcccagaggagttctgttactcaccttaagaaaaaggcctttttaaacatagatgaagattgtgacttcttccttatgtttctgaatcatacagggaaaaagtgttttgttcataggt

SEQ ID NO: 45243 - DNA, 486 bp, Chicken  19866894284886_4
ccttctctgggttagtgcttattgcctgatatttgtggtgtgttaggcttgatttgcatagaaggtggttaaaaattgtccagagggagttgtgttattgctgagtatatgcatgcatgagcagcatgagaagaatggaaatgtgtattcattccttgacaaatacagttcaagttctgtaackctgtaatcatgcagatattgttagccaagcagtaacacaacattaaaatgtgattttctttggtcttttgcaccccagggaagtgtgagctcagwctgcttcttaatgccaggtymgggggaggggttctgtaaacatctgggggcactgagtttttcttccttgttattgttttttcctggagtcccagaggagttctgttactcaccttaagaaaaaggcctttttaaacatagatgaagattgtgacttcttccttatgtttctgaatcatacagggaaaaagtgttttgttcataggt

SEQ ID NO: 45244 - DNA, 600 bp, Chicken  19866894284889_1
ctttgtttcaggagggcgttctcattaattgattcccagaagtggttaaggattgcaagacgagcagacatgcctgctgcttcatgctcagtcaaaggtaaggacttacaatgcagtatttctaattgctatcagttctggttggccgatgtttcttaatactagataaattaaaccagaaactctgagatcacataaactgtgtgtataaatgaaaggtgctggtgtttttttctttgctctttttttgttgttgttttactttaggtacgaaacaaacctggatcgaatcaagttcaygtcatttgtatctgctgttccttggggctttcagcctgctctcagagttagctgataagacagctaggccaatatttcttttggaatccatttgccagcctgaacatcaaagcctgaagcggccgacgctgggaaagctgtgctgctaacagttaaaaagatgaagcgatccctgcacatacagaaacctgctgcttatcggccatgcttctctatggcacatgaatatccaaacaagtcattcagcctttttctggctacagatagtagtgccaggctggtcactcacacagttggtat

SEQ ID NO: 45245 - DNA, 600 bp, Chicken  19866894284892_1
aactccacttggaccctgaaccgccctactgacagagctgtgtccttgcaagggggatgtcggggtttttcccatcagtcatcaagttttccttcagcagatgacaagactggtgggaaagacatgtttgcagggtatgtaacatactcaattatgtgcttcaaatactcttaccaacagtttgtacaagtcgccttcctagctaattatgttagcatggcaagagatcctctggcaaaagctacccgtgcgcttatgcaaataccacagacttgaacagagcccggacttctcctctcytggttctttcttcaaagttgatgggaattgaaagcattagtcataacagatgctgagcagggcttgctatctgcattttctcctttcagcataagtgcattcactggaatgagaatgccagcccaatctttatatagtgatgcattaagctgggatctaaagtactgttaggttatgctgtttcagaaaaatgaaagagggtggaaaggcatgcttgcttccctttccctcccaattctttctacctcctcttaaataaagagatttctcaggaatgtgatttatttaggaaatatatac

SEQ ID NO: 45246 - DNA, 600 bp, Chicken  19866894284894_1
atgcataattttgattatctccttagtggcccctgatgcatctcaggaaaaagcgtaactgaaacactcagcgctggtttaaggccttgtagctgtgcaagcttccaccatctgctgtacacgtgtgctgccttgccatcactgcttaccactaaactcaggacagttctgttgacacttgctaagtgatgttccaggtcacaaatatccacaatttattttaggttggacccaatggtaatggagaatgagcttaagagaaaatcttcacttaggatgatagcttgcacttgagctatrgtgcaatatggctagtgttaagagcttgccatttctctgcatttgatctggtttccatagtactagcaaaagtgggagaagctgcccagtggcacagcttatcctttctaatttggcattcatcatccgctggatccagcaatggggatggtgggttctgtctcccctaggccccagggcagatttgccagaagcactttgaggagtgctgattctggagagtgtgcctaagacagcagcaggaaaacctaacaccaaagagggcatggtcatgtaaggaggccaggagcattttaatag

SEQ ID NO: 45247 - DNA, 600 bp, Chicken  19866894284894_2
tatctgacttttcagatgaaaacattatcatatacaatagtacattacagaactatcagtaacacctcaggtttgaacaacaaccaaatcccctcccttttacttgttaggcaaatgtaccctttcaagacagctaatttggtaatgtttctgatttttctatcaaaatgtactacaacacctgggaataaatccgtattaagtatgaactcaaatatgtcagtcaacgaatagcataggtacaagtgctcacaatttttacctgctatatgctaccagacacagtctttaccagtatayatacacttccttcttcaaagacatcacttcccccaaaacaaatatttaaagcagtagaaagcaggagaaagcatttcaacatcaacttcaggatgatggtgggcaatggcttagggctatgagtgtacacgatagcactgaagtgaatttgggcttgttgcccascatttgcagtaatttctggatgagttttcatgtcaagctgtgactcaagccagtgtggctgcaatgccatggcccatggctagcctgctgtcctagcatgggagtgcagggctgtactcgctgtagccagggcac

SEQ ID NO: 45248 - DNA, 600 bp, Chicken  19866894284894_3
aaatgtactacaacacctgggaataaatccgtattaagtatgaactcaaatatgtcagtcaacgaatagcataggtacaagtgctcacaatttttacctgctatatgctaccagacacagtctttaccagtatayatacacttccttcttcaaagacatcacttcccccaaaacaaatatttaaagcagtagaaagcaggagaaagcatttcaacatcaacttcaggatgatggtgggcaatggcttagggctatgagtgtacacgatagcactgaagtgaatttgggcttgttgcccascatttgcagtaatttctggatgagttttcatgtcaagctgtgactcaagccagtgtggctgcaatgccatggcccatggctagcctgctgtcctagcatgggagtgcagggctgtactcgctgtagccagggcactgggctgctatggatggaaaggctctgatgatgcttctccagcaggaatggctccaaacatgtaggcataggctgctttgaggacagggcccttcaaatgaacagttgttcactcattactgccttaaagcatcttctcccctcccatggggctggagaagggag

SEQ ID NO: 45249 - DNA, 477 bp, Chicken  19866894284894_4
tttcatgtcaagctgtgactcaagccagtgtggctgcaatgccatggcccatggctagcctgctgtcctagcatgggagtgcagggctgtactcgctgtagccagggcactgggctgctatggatggaaaggctctgatgatgcttctccagcaggaatggctccaaacatgtaggcataggctgctttgaggacagggcccttcaaatgaacagttgttcactcattactgccttaaagcatcttctcccctcccatggggctggagaagggagcctggtctccccaggaatcaccccsagaaccatyccacctccacagtgctttagcagcagctctgctcctcagtctgtccattgtactgagaagccctgaggaaattcaatgctgagatgagctgcagggacagagctgattgcacagctgctgaacccaaaagacattattttagaaaggcccggtcctgcgctctggtag

SEQ ID NO: 45250 - DNA, 468 bp, Chicken  19866894284894_5
aagctgtgactcaagccagtgtggctgcaatgccatggcccatggctagcctgctgtcctagcatgggagtgcagggctgtactcgctgtagccagggcactgggctgctatggatggaaaggctctgatgatgcttctccagcaggaatggctccaaacatgtaggcataggctgctttgaggacagggcccttcaaatgaacagttgttcactcattactgccttaaagcatcttctcccctcccatggggctggagaagggagcctggtctccccaggaatcaccccsagaaccatyccacctccacagtgctttagcagcagctctgctcctcagtctgtccattgtactgagaagccctgaggaaattcaatgctgagatgagctgcagggacagagctgattgcacagctgctgaacccaaaagacattattttagaaaggcccggtcctgcgctctggtag

SEQ ID NO: 45251 - DNA, 600 bp, Chicken  19866894284896_1
atcagttctacaaaacaagctacaagggtgaagttaagtgcctcaaggaggagatgtacaacagccatacacgtgaaaaataccttgggaccactccagctaatactgcacatgggttggaagagctctctctaacgatcccaagcagcattgctgcattcagttgtccctttgcttcctgcaagacctgaaatccttctgctggaggctggggagttcaggagagaaaccttgagacagacatcccatgtggccagcaaagaagctgagatcatcagcttttaactaactgaagttacyrcagtatcactaatacaagaaaggatagcaatgaatgtcaaactgctatgaaaatgcagctgaagagcattaaaggataaagtaatacaaaatggttaagggggtagtttacaagttatagactccccctggcctcaatcactcttcagccttcccaaaaactgaggttactgttccctctctctctaccagactcctcaaagcctgctagtctcatcccactgtgctgcaaactgaccttgtccccattttgatgatgacacttatttgggaactccttctcagttgcattcagtgaga

SEQ ID NO: 45252 - DNA, 600 bp, Chicken  19866894284896_2
tcagttctacaaaacaagctacaagggtgaagttaagtgcctcaaggaggagatgtacaacagccatacacgtgaaaaataccttgggaccactccagctaatactgcacatgggttggaagagctctctctaacgatcccaagcagcattgctgcattcagttgtccctttgcttcctgcaagacctgaaatccttctgctggaggctggggagttcaggagagaaaccttgagacagacatcccatgtggccagcaaagaagctgagatcatcagcttttaactaactgaagttacyrcagtatcactaatacaagaaaggatagcaatgaatgtcaaactgctatgaaaatgcagctgaagagcattaaaggataaagtaatacaaaatggttaagggggtagtttacaagttatagactccccctggcctcaatcactcttcagccttcccaaaaactgaggttactgttccctctctctctaccagactcctcaaagcctgctagtctcatcccactgtgctgcaaactgaccttgtccccattttgatgatgacacttatttgggaactccttctcagttgcattcagtgagat

SEQ ID NO: 45253 - DNA, 600 bp, Chicken  19866894284904_1
tcactgctttttggcaacttgttccaaaattcttgcaaataactactctgcgtgcccaaatatgcagtcatctaagtgctggctgtatgcttgcaaaaattgtctgtatggcaatgcataaaaaattaatcatttaagtatcttttgtgaaaagtatcatcatcgttattgaacacagagaaggcaaactgtaaggacatattttaaattggcaagtcattgatttctgtttaatgctttttgccactctcttatgaagtaaaggagttttatatgtttccagaaattgaaagatttatmcaataagcattaaaggaagataaatgtcagtttagagagtgatattcaaacatttgtcttttggagtattttccctaaaatgaacttttattaactcaggaaaaacagctagtgataggagaatgttgttgaacctttgaatatcttatactttatcacttctaatacgtcgttaatatttaacattcatcttattatagacaggaatcatgcgatgcatgcgcggtttccacacagttttaaagttcagtgcacagtcacaattctgaggggagatttcacacatttrtgaaaaataag

SEQ ID NO: 45254 - DNA, 600 bp, Chicken  19866894284904_2
aaagatttatmcaataagcattaaaggaagataaatgtcagtttagagagtgatattcaaacatttgtcttttggagtattttccctaaaatgaacttttattaactcaggaaaaacagctagtgataggagaatgttgttgaacctttgaatatcttatactttatcacttctaatacgtcgttaatatttaacattcatcttattatagacaggaatcatgcgatgcatgcgcggtttccacacagttttaaagttcagtgcacagtcacaattctgaggggagatttcacacatttrtgaaaaataaggcttttttgcagtaaagttgcaaagtgtgaaagaattcttgttttatctgccttacttatcatgtttatgagttattttgcctggaagtaaattgacaagttgtcaatgaacaatagacagtgcttcagctaggcttttcacaggttcggatgcctttgggtaaaaggactaaatctgtagtttgcaatctagcatatggagtactgaaaaaagtggcaatggggtgagagacatttactgagaaattcatgtggctgctgatctctaaccaatccatttggtctgggg

SEQ ID NO: 45255 - DNA, 599 bp, Chicken  19866894284915_1
  misc_feature (1)..(74): n is any nucleotide
nnnnnnnnnnnnnnnnnnnnnnnnnnnnnnnnnnnnnnnnnnnnnnnnnnnnnnnnnnnnnnnnnnnnnnnnnnttgcgttaggaaagtttaaaaagattttttatctatgcagtaagtccttttatagtgtttcttagaaaaagatcctaaacctagaactgatgaagaagaatcctggctttgtgagttacaatacaatgcaatagaccttgcattaaatatccaaagccatctgaactggggagttgggttgtattgcctttgtgaggaaagagctagactgacatacattaaatcytctccaatttcttctacttctctccctgggcctgccacaagaaggcaacttctataatggttgacatagaagaggattaatacctgaggaagaggattaataaaatttcctcacaaattcatcrttgccttaaggatgctttcacattatgtgtgcactggcaaaacatagagaaactgtggaatgctactttgatagtaactcactcgtgaatcattatgatgcattttactggttgagaagttgacagcatagccctgactactctagcatcactttcttaaaaacttggtraggag

SEQ ID NO: 45256 - DNA, 600 bp, Chicken  19866894284915_2
tatagtgtttcttagaaaaagatcctaaacctagaactgatgaagaagaatcctggctttgtgagttacaatacaatgcaatagaccttgcattaaatatccaaagccatctgaactggggagttgggttgtattgcctttgtgaggaaagagctagactgacatacattaaatcytctccaatttcttctacttctctccctgggcctgccacaagaaggcaacttctataatggttgacatagaagaggattaatacctgaggaagaggattaataaaatttcctcacaaattcatcrttgccttaaggatgctttcacattatgtgtgcactggcaaaacatagagaaactgtggaatgctactttgatagtaactcactcgtgaatcattatgatgcattttactggttgagaagttgacagcatagccctgactactctagcatcactttcttaaaaacttggtraggagtgagtagcctgtatttaatatatacttgacaagaagcagctccgagctatttttgatgagggagatgtattatggctatgaatgccctggtgactcctagagagaaatcccagctcctgttgtca

SEQ ID NO: 45257 - DNA, 600 bp, Chicken  19866894284915_3
aaatcytctccaatttcttctacttctctccctgggcctgccacaagaaggcaacttctataatggttgacatagaagaggattaatacctgaggaagaggattaataaaatttcctcacaaattcatcrttgccttaaggatgctttcacattatgtgtgcactggcaaaacatagagaaactgtggaatgctactttgatagtaactcactcgtgaatcattatgatgcattttactggttgagaagttgacagcatagccctgactactctagcatcactttcttaaaaacttggtraggagtgagtagcctgtatttaatatatacttgacaagaagcagctccgagctatttttgatgagggagatgtattatggctatgaatgccctggtgactcctagagagaaatcccagctcctgttgtcaccagctgagcctatggatgactggaaccacatgagatttattcccagaaggctgagaggtgttgctgctaaatgtaatggaactgaactaagtgcccagctataatggaataaggcagaaagcagtaaaccgggaaatgaaagttggagctaagcactgctttgggatac

SEQ ID NO: 45258 - DNA, 599 bp, Chicken  19866894284917_1
  misc_feature (1)..(96): n is any nucleotide
nnnnnnnnnnnnnnnnnnnnnnnnnnnnnnnnnnnnnnnnnnnnnnnnnnnnnnnnnnnnnnnnnnnnnnnnnnnnnnnnnnnnnnnnnnnnnnnnatgcttcttaagagtgatttaaaaccacaggacaatgctaacagacccaaacctgggaaatgccagagcccggtggatgcagatcctgcacaaagcccagccaacaaaggcatcacagcagctccagcttcaccccgaggcacatccctgctgcacagggatgggaccatgcaccgtcccctccccatagagcatcagcactcygagctgcacctatcagcacagatgtccccaggcttttgcagcctctccaaactccaggcaggggaagagcagcgtgccayagccatgtgcatgggctgcttcctctccctgatgtcgctttggttgcagatccttgggctgggttcctccagatccaccttctggtcacaytgatacacaaaagcgctcraatgcagatgagagctcaggaccactgcttcccctccttgtgctctcaggaccacaaaggtttatagggctggaatggctcatggatggatttagcaaagcctgggatg

SEQ ID NO: 45259 - DNA, 599 bp, Chicken  19866894284917_2
  misc_feature (1)..(16): n is any nucleotide
nnnnnnnnnnnnnnnnatgcttcttaagagtgatttaaaaccacaggacaatgctaacagacccaaacctgggaaatgccagagcccggtggatgcagatcctgcacaaagcccagccaacaaaggcatcacagcagctccagcttcaccccgaggcacatccctgctgcacagggatgggaccatgcaccgtcccctccccatagagcatcagcactcygagctgcacctatcagcacagatgtccccaggcttttgcagcctctccaaactccaggcaggggaagagcagcgtgccayagccatgtgcatgggctgcttcctctccctgatgtcgctttggttgcagatccttgggctgggttcctccagatccaccttctggtcacaytgatacacaaaagcgctcraatgcagatgagagctcaggaccactgcttcccctccttgtgctctcaggaccacaaaggtttatagggctggaatggctcatggatggatttagcaaagcctgggatggacgagcgggacccccagagcatgatgtgccagcactgcatggatgctggagtttgcatgagcagaatggcaggaggtga

SEQ ID NO: 45260 - DNA, 600 bp, Chicken  19866894284917_3
gatgcagatcctgcacaaagcccagccaacaaaggcatcacagcagctccagcttcaccccgaggcacatccctgctgcacagggatgggaccatgcaccgtcccctccccatagagcatcagcactcygagctgcacctatcagcacagatgtccccaggcttttgcagcctctccaaactccaggcaggggaagagcagcgtgccayagccatgtgcatgggctgcttcctctccctgatgtcgctttggttgcagatccttgggctgggttcctccagatccaccttctggtcacaytgatacacaaaagcgctcraatgcagatgagagctcaggaccactgcttcccctccttgtgctctcaggaccacaaaggtttatagggctggaatggctcatggatggatttagcaaagcctgggatggacgagcgggacccccagagcatgatgtgccagcactgcatggatgctggagtttgcatgagcagaatggcaggaggtgacctcagggatggcgtggggaggctggcgtggcctgccatgcacgggcattagcaaggcttacttgcatgtagagctgagccctaggggagga

SEQ ID NO: 45261 - DNA, 600 bp, Chicken  19866894284917_4
gcccagccaacaaaggcatcacagcagctccagcttcaccccgaggcacatccctgctgcacagggatgggaccatgcaccgtcccctccccatagagcatcagcactcygagctgcacctatcagcacagatgtccccaggcttttgcagcctctccaaactccaggcaggggaagagcagcgtgccayagccatgtgcatgggctgcttcctctccctgatgtcgctttggttgcagatccttgggctgggttcctccagatccaccttctggtcacaytgatacacaaaagcgctcraatgcagatgagagctcaggaccactgcttcccctccttgtgctctcaggaccacaaaggtttatagggctggaatggctcatggatggatttagcaaagcctgggatggacgagcgggacccccagagcatgatgtgccagcactgcatggatgctggagtttgcatgagcagaatggcaggaggtgacctcagggatggcgtggggaggctggcgtggcctgccatgcacgggcattagcaaggcttacttgcatgtagagctgagccctaggggaggagctctccaccatcctgttc

SEQ ID NO: 45262 - DNA, 517 bp, Chicken  19866894284922_1
tagttacaaaggcagaggtaagggataagcagaactcgcaaagctgagtctataaactcaagaggaaattagtgaccaagatctacaagaaggaagatcatctacagacaaccatcacaggaaatactaaaatcctcccattcattaggaggcagtgcactcaaggagaaaagggatcatctcaagatgaatgaagggtgcttttgggacaaagcactgacttaaaacctttgcccagtgcttcctttaggatgaacagtaccagaagtcctgcaagaatataatctgctcttaaagtcrgagtatcaatgatgygggggaaaacaaacaaacaaaaacaaacagaacaaacaaaaacccacaacaaatgtatcctcaaacttgactaattactcataaaaagttacagagccacatgcaaacaggatttactagtctttcataatggttaagattgtatacaaaaatcctttaatccacccatcaagaaaactttcctctgctgcttgctgtaaga

SEQ ID NO: 45263 - DNA, 502 bp, Chicken  19866894284922_2
aggtaagggataagcagaactcgcaaagctgagtctataaactcaagaggaaattagtgaccaagatctacaagaaggaagatcatctacagacaaccatcacaggaaatactaaaatcctcccattcattaggaggcagtgcactcaaggagaaaagggatcatctcaagatgaatgaagggtgcttttgggacaaagcactgacttaaaacctttgcccagtgcttcctttaggatgaacagtaccagaagtcctgcaagaatataatctgctcttaaagtcrgagtatcaatgatgygggggaaaacaaacaaacaaaaacaaacagaacaaacaaaaacccacaacaaatgtatcctcaaacttgactaattactcataaaaagttacagagccacatgcaaacaggatttactagtctttcataatggttaagattgtatacaaaaatcctttaatccacccatcaagaaaactttcctctgctgcttgctgtaaga

SEQ ID NO: 45264 - DNA, 600 bp, Chicken  19866894284929_1
gcctaatgaaatgctgttataatagatgaatggagaattaattaaaaaaaccccactaacatactttctgattagttaaaataagaagtctgtgacttctactttttcagggaccccaatactttttttttttttttttccaaagataaaaatacataatatagcagccagggacatatccctgaataaaaagcacaaagatggagtcagataaaatgacgtgctcaagagtcaaaatgcacaccaacagaatcgcttaagaaagggacccaggaaataagagtcttaaccttgcccagyaggtccataatttacctcatcaaaaaagaaatagaaattcccccacatttgaggcattttattcaggcttaaatttctaaccatartcttttcctttagaatgtgcagtcaacagatatcagggtaggaggctgcagtgtgaggtgactgcatgaaaagaaaatcaagagtcccatttatcttgaggattaacttcaataatcttgatttcttttattatttcccccagtagtagttacaaaaatgtttgaatgtgttggattgttaacaagaaaccataaaactgagaatagccacatg

SEQ ID NO: 45265 - DNA, 590 bp, Chicken  19866894284929_2
agtctgtgacttctactttttcagggaccccaatactttttttttttttttttccaaagataaaaatacataatatagcagccagggacatatccctgaataaaaagcacaaagatggagtcagataaaatgacgtgctcaagagtcaaaatgcacaccaacagaatcgcttaagaaagggacccaggaaataagagtcttaaccttgcccagyaggtccataatttacctcatcaaaaaagaaatagaaattcccccacatttgaggcattttattcaggcttaaatttctaaccatartcttttcctttagaatgtgcagtcaacagatatcagggtaggaggctgcagtgtgaggtgactgcatgaaaagaaaatcaagagtcccatttatcttgaggattaacttcaataatcttgatttcttttattatttcccccagtagtagttacaaaaatgtttgaatgtgttggattgttaacaagaaaccataaaactgagaatagccacatgcctttagcataagcataaaattacaggatttgcttcctctccccaatacaaatacaggccatattccctcatcagt

SEQ ID NO: 45266 - DNA, 599 bp, Chicken  19866894284932_1
  misc_feature (1)..(184): n is any nucleotide
nnnnnnnnnnnnnnnnnnnnnnnnnnnnnnnnnnnnnnnnnnnnnnnnnnnnnnnnnnnnnnnnnnnnnnnnnnnnnnnnnnnnnnnnnnnnnnnnnnnnnnnnnnnnnnnnnnnnnnnnnnnnnnnnnnnnnnnnnnnnnnnnnnnnnnnnnnnnnnnnnnnnnnnnnnnnnnnnnnnnnnnnccctgccctgtctcccatccattacacagcccaggactctttccaaaacttacagaagggatctgggtgcaaatcagacagaaaccaacagatcaggcacagctggaagtatgatyttttctccagacatgttcagctctgaacacaaacactgttaccaagcccttatctgcaagtgaggagctatgaatccatctactgcaagaaccaaatagctctcaggcagttgcacagaaacacctggagatttactttcagagaatacagctcattctgatgttactgcagataacttttcctccctcccttcctcagtgctctgcctccsctgctcggtgaggagcaggcagcagaggatgtgtcccagcacagagcccgctgccgtcccaccacatgcagcccaaatgctctcctc

SEQ ID NO: 45267 - DNA, 505 bp, Chicken  19866894284932_2
ccctgccctgtctcccatccattacacagcccaggactctttccaaaacttacagaagggatctgggtgcaaatcagacagaaaccaacagatcaggcacagctggaagtatgatyttttctccagacatgttcagctctgaacacaaacactgttaccaagcccttatctgcaagtgaggagctatgaatccatctactgcaagaaccaaatagctctcaggcagttgcacagaaacacctggagatttactttcagagaatacagctcattctgatgttactgcagataacttttccsctgctcggtgaggagcaggcagcagaggatgtgtcccagcacagagcccgctgccgtcccaccacatgcagcccaaatgctctcctcttgcaaaaagcactgtggtgtgaaacaaaggatggatgtgtgaggtggggggggttcacgttccctgggatcacagtgccatccttgcctttcatagcagcagcaccggccgacgggt

SEQ ID NO: 45268 - DNA, 600 bp, Chicken  19866894284941_1
ggtatttgccaccagaatgtttcgtggttgggaaagaacctccaaaagatttcaaataaagttgatgtctggtcagtaggggtcatcttctatcagtgtctctatggcagaaaggtaagagagcatgtaactcctttccaagcagtgattcccaaacctatgggaggcagccctggcttctgctcccttctccttgccagactagaaggtgcttctggcttgtctcctcgctaccagttccaagacagagtccatgttaattgagtgaggataatttgttaggttgtgttttgctctatrtggcaatactttcagaagcaacattcttcagaacatctttcctgttggttgtatatccactgagatgatgatgggcaagatggatgtgtcattcaggaccacgcacctgacactcttgctttggcattgttttatcatgctttcagtgctctgatgttattctttgagtgcaaagtctttgtcaggcctaatattgctcaacagctgcaagtgttttaaaataaaaagcagatataaagacctactctaaatgtttttagaatgccttttgaaagggaagagtctatttcaggaagaggt

SEQ ID NO: 45269 - DNA, 594 bp, Chicken  19866894284945_1
atggtgaaattcagactatttgcaagtaaatagaacattagttacacttattctttacagagattttcatggtggaaacctgacgaaaatgcgtgaagttggtaatctataatttcaaagttcaataaactttcaataatttggatatttttgttttctgaaaatatatctagattgaaaggaagttacagatgttatagtacaggtaaactttaaaatattcttaacctacataaactgtctttctgtctcaactgcccataagtacctaaaataagcactctgtaaaggtagagatarttttatttttataattgagttatcatgtatttttggttcrtctctctgctccacagtgcagttttcttcagtggctggaaatcgtgagatttaggaggaaaaaaatactaaaattatttcatcccttttgtttgtttaactgttatttaaagcaaatgccatcccttggtcttttcttctctgaattatacaaactcatttccttcagtctttcctcatagcccattttttaaaaaaacctctgatcttttttttttttttgtactttttttctagactggttatgttgaccta

SEQ ID NO: 45270 - DNA, 554 bp, Chicken  19866894284945_2
gttacacttattctttacagagattttcatggtggaaacctgacgaaaatgcgtgaagttggtaatctataatttcaaagttcaataaactttcaataatttggatatttttgttttctgaaaatatatctagattgaaaggaagttacagatgttatagtacaggtaaactttaaaatattcttaacctacataaactgtctttctgtctcaactgcccataagtacctaaaataagcactctgtaaaggtagagatarttttatttttataattgagttatcatgtatttttggttcrtctctctgctccacagtgcagttttcttcagtggctggaaatcgtgagatttaggaggaaaaaaatactaaaattatttcatcccttttgtttgtttaactgttatttaaagcaaatgccatcccttggtcttttcttctctgaattatacaaactcatttccttcagtctttcctcatagcccattttttaaaaaaacctctgatcttttttttttttttgtactttttttctagactggttatgttgaccta

SEQ ID NO: 45271 - DNA, 600 bp, Chicken  19866894284946_1
cgtcacaagtctctctgacagccactgtttacctcatgctcagatcaagcccacttgttgaagaccagcgatgaaagcctgagggtagatgtggcaagtagcggaatgacaagaagagcctctgctcatcattactaatgctgccactcacaggaggaaatgtggctgcaatttaagagccagtggcagcacttgctcagctgaaggctccagacactgtccacagaagctcttcctgggcaaggtgccagaggcctagcaatcgtcccataaacccacaccttcagcagctagaccccrtggtgcccccaaaagacctccaaacaacaaagctcaaaatacatgggatccgatggactctgtcaattcctcaactgtccccatgggccattgcccatcctatccttatggtagcccctctggccataaagccctatctttctcaattagcaggtttggcttatcagctatactrcaccacagctccagtcctgcactgtcgagacagacatcactgatagttgtacagatctttcagtgagtataaacacaagagaaccagaggacaagaagttaacctctgatcagtggagaaatgct

SEQ ID NO: 45272 - DNA, 600 bp, Chicken  19866894284946_2
agagccagtggcagcacttgctcagctgaaggctccagacactgtccacagaagctcttcctgggcaaggtgccagaggcctagcaatcgtcccataaacccacaccttcagcagctagaccccrtggtgcccccaaaagacctccaaacaacaaagctcaaaatacatgggatccgatggactctgtcaattcctcaactgtccccatgggccattgcccatcctatccttatggtagcccctctggccataaagccctatctttctcaattagcaggtttggcttatcagctatactrcaccacagctccagtcctgcactgtcgagacagacatcactgatagttgtacagatctttcagtgagtataaacacaagagaaccagaggacaagaagttaacctctgatcagtggagaaatgctacaaatatctaagtagrtagaaaatgttgaagagaaagtcaaattccagtagtgctgctgttcatgcaagaatcagaacattrtatcccagatggaaagctaaaacaaaaacctgcagaaagggagtttttgtacttgtttttggagcctgagggctccttgttttgtgtacrga

SEQ ID NO: 45273 - DNA, 600 bp, Chicken  19866894284946_3
ctccaaacaacaaagctcaaaatacatgggatccgatggactctgtcaattcctcaactgtccccatgggccattgcccatcctatccttatggtagcccctctggccataaagccctatctttctcaattagcaggtttggcttatcagctatactrcaccacagctccagtcctgcactgtcgagacagacatcactgatagttgtacagatctttcagtgagtataaacacaagagaaccagaggacaagaagttaacctctgatcagtggagaaatgctacaaatatctaagtagrtagaaaatgttgaagagaaagtcaaattccagtagtgctgctgttcatgcaagaatcagaacattrtatcccagatggaaagctaaaacaaaaacctgcagaaagggagtttttgtacttgtttttggagcctgagggctccttgttttgtgtacrgaaaggcaatattgactttggcaatacagtgtacaccctgcagggctctgagcttgttcctgctgcccctagtttgcttcttccataaattcctcttagcaatgacggacctttattaaaaaaaaaagatctacttaatgagtt

SEQ ID NO: 45274 - DNA, 600 bp, Chicken  19866894284946_4
tgggccattgcccatcctatccttatggtagcccctctggccataaagccctatctttctcaattagcaggtttggcttatcagctatactrcaccacagctccagtcctgcactgtcgagacagacatcactgatagttgtacagatctttcagtgagtataaacacaagagaaccagaggacaagaagttaacctctgatcagtggagaaatgctacaaatatctaagtagrtagaaaatgttgaagagaaagtcaaattccagtagtgctgctgttcatgcaagaatcagaacattrtatcccagatggaaagctaaaacaaaaacctgcagaaagggagtttttgtacttgtttttggagcctgagggctccttgttttgtgtacrgaaaggcaatattgactttggcaatacagtgtacaccctgcagggctctgagcttgttcctgctgcccctagtttgcttcttccataaattcctcttagcaatgacggacctttattaaaaaaaaaagatctacttaatgagttttctcacatatgttgaagagcaaaaagcaaatgcttaacctctgacatcaaggctgaattaccaca

SEQ ID NO: 45275 - DNA, 600 bp, Chicken  19866894284946_5
trcaccacagctccagtcctgcactgtcgagacagacatcactgatagttgtacagatctttcagtgagtataaacacaagagaaccagaggacaagaagttaacctctgatcagtggagaaatgctacaaatatctaagtagrtagaaaatgttgaagagaaagtcaaattccagtagtgctgctgttcatgcaagaatcagaacattrtatcccagatggaaagctaaaacaaaaacctgcagaaagggagtttttgtacttgtttttggagcctgagggctccttgttttgtgtacrgaaaggcaatattgactttggcaatacagtgtacaccctgcagggctctgagcttgttcctgctgcccctagtttgcttcttccataaattcctcttagcaatgacggacctttattaaaaaaaaaagatctacttaatgagttttctcacatatgttgaagagcaaaaagcaaatgcttaacctctgacatcaaggctgaattaccacatggtaagtaatgaggagccactgcttactgtttgctttcagaaaagtaaccaagtcaacatttcagagaacaattagcactccagctggt

SEQ ID NO: 45276 - DNA, 600 bp, Chicken  19866894284947_1
tctgggcgtggggagatggagctgcttggtgctaatgggagatgttagttgtgcggataacccacagcttgcagctgatttagctgcaattggaccagcagcatcactcccagcctggttttgtacctccttccccctcccccttcaactgctttatggattatgcagctcctgccaaaggttttaagtttgcaactgtaccacagctcggcgtgtaaagatgttgaatgaacgacttaaaactcggagtcattaaaactgtccaggagaacctaatggatgttatttactgtgcttccsagctcagccgaaatctcaccttttctcctcctgctttctatgctctccttttaaaaacagcagccagaattgtctggaaagcgttccttgtgagagacaaactggatctgtaagtggaaacgtcagtttttaagaatctctgcctctgctttgaagtaacttcactttttgtttgattgccctgcctcaaaagctttatcttctgggctatctcttaccraaaagaaraagaaaagaagcaaaaaaagcaatctagtggctgcaaccgggattaaaataaaaggaaagccaaccaaatca

SEQ ID NO: 45277 - DNA, 568 bp, Chicken  19866894284947_2
atgttgaatgaacgacttaaaactcggagtcattaaaactgtccaggagaacctaatggatgttatttactgtgcttccsagctcagccgaaatctcaccttttctcctcctgctttctatgctctccttttaaaaacagcagccagaattgtctggaaagcgttccttgtgagagacaaactggatctgtaagtggaaacgtcagtttttaagaatctctgcctctgctttgaagtaacttcactttttgtttgattgccctgcctcaaaagctttatcttctgggctatctcttaccraaaagaaraagaaaagaagcaaaaaaagcaatctagtggctgcaaccgggattaaaataaaaggaaagccaaccaaatcatgctctcttttgatggttgctcttcagagggctgcctaggtgggctggctcctgggctgcgctctccgggcagcgccgctggttgcagcgcggctccccccactcctgccatgcagtggaggtgggatagggccccgctttcatttctgtttgtgttgctgagcttcgccttggaaatggaaatccga

SEQ ID NO: 45278 - DNA, 560 bp, Chicken  19866894284947_3
tgaacgacttaaaactcggagtcattaaaactgtccaggagaacctaatggatgttatttactgtgcttccsagctcagccgaaatctcaccttttctcctcctgctttctatgctctccttttaaaaacagcagccagaattgtctggaaagcgttccttgtgagagacaaactggatctgtaagtggaaacgtcagtttttaagaatctctgcctctgctttgaagtaacttcactttttgtttgattgccctgcctcaaaagctttatcttctgggctatctcttaccraaaagaaraagaaaagaagcaaaaaaagcaatctagtggctgcaaccgggattaaaataaaaggaaagccaaccaaatcatgctctcttttgatggttgctcttcagagggctgcctaggtgggctggctcctgggctgcgctctccgggcagcgccgctggttgcagcgcggctccccccactcctgccatgcagtggaggtgggatagggccccgctttcatttctgtttgtgttgctgagcttcgccttggaaatggaaatccga

SEQ ID NO: 45279 - DNA, 600 bp, Chicken  19866894284956_1
gaagaattttactcagtataaatcattggagtcagtgttcttgccaactttattccactgaagctaacataaaattcaagaagtgcaaagctttagagctcatgttttctagctctgacactaaatcacatcaatgggttgtatatgcctgatttttaagaatatcgacatcaccctccaccttctgcaaaagatcatgaggaacagagagatctattccttcatcactgaaccacgcaatcacagaatcacagaattgtaggggttgaaagggacctctagagatcgagtccaaccctyctaccaaagcaggctccgtacagccatgaaactggcttttaaattgtgcgcatatatatatattcttattttcagtcactttcttaatgagacttttgcttggtgagccgttattttataactacaatatgcttgaagcacacactgtaacattaaatatacaaagggatctgatatcgagtcagcacatttacaagcaaacagaattttaaagctggctcctgtgtgaaagcattaaatctacatgtctrtttctcaattcccactactggatttttagcctcttagctaattggaacc

SEQ ID NO: 45280 - DNA, 600 bp, Chicken  19866894284956_2
cagaattgtaggggttgaaagggacctctagagatcgagtccaaccctyctaccaaagcaggctccgtacagccatgaaactggcttttaaattgtgcgcatatatatatattcttattttcagtcactttcttaatgagacttttgcttggtgagccgttattttataactacaatatgcttgaagcacacactgtaacattaaatatacaaagggatctgatatcgagtcagcacatttacaagcaaacagaattttaaagctggctcctgtgtgaaagcattaaatctacatgtctrtttctcaattcccactactggatttttagcctcttagctaattggaaccagtgtgataaagagggagaggttttaagatgttgcatttctacaaattaaaaacaggacagtcggaagaagagactctgaaaatgtccaaaaaaaggtcgtagaactggagcaccctgatctggcatcacagaatccatattggttctcatcataaagatgaaaaacaattaagaaaccatgctctgtttgtccattgctcacaaaacaacttagtgtcactttgaaaagtattttaataacttaagaata

SEQ ID NO: 45281 - DNA, 600 bp, Chicken  19866894284970_1
tccgcgctggggagggatgaggaagacgggagggatgttccaaattggtccaggagggcagagccggtcctccatcgccacctggtgctctgccccggcacggcacgcacctcctgcggccttcagtactgttctttttcaaacgcacacgtctgggtgcggggtagctctgatggtggagcgtggagaaaaatgagggacaaagagaacaattaacggtgagttaataacacacgtgggtgtacgttagtaatatgttgattgtatgctagaagaaaaagactttcaaccctaagtttmactctatgcacatgggaagaaaaggcacagttccctggtgcactcctcgctcaggtttgtgcctrgaagtgcccaagactgtgtgcagcctcatacctaatttcttacagccttcagagagctgggatggctgagcaggagcctttggcaaccacctacctctgtgctgacatgggtgcggtgagcaaacactgtgcctctgctgagagctgctccatctccagtgacatcatttcatagaatcctagagttgagttggaagggacacgtgaaggccacctggtcccactccctgcagtg

SEQ ID NO: 45282 - DNA, 600 bp, Chicken  19866894284970_2
ggtcctccatcgccacctggtgctctgccccggcacggcacgcacctcctgcggccttcagtactgttctttttcaaacgcacacgtctgggtgcggggtagctctgatggtggagcgtggagaaaaatgagggacaaagagaacaattaacggtgagttaataacacacgtgggtgtacgttagtaatatgttgattgtatgctagaagaaaaagactttcaaccctaagtttmactctatgcacatgggaagaaaaggcacagttccctggtgcactcctcgctcaggtttgtgcctrgaagtgcccaagactgtgtgcagcctcatacctaatttcttacagccttcagagagctgggatggctgagcaggagcctttggcaaccacctacctctgtgctgacatgggtgcggtgagcaaacactgtgcctctgctgagagctgctccatctccagtgacatcatttcatagaatcctagagttgagttggaagggacacgtgaaggccacctggtcccactccctgcagtgaacagggacacctaacaccaccatcaggtgttcagagccccgtccagcctgaccttgggtgtctc

SEQ ID NO: 45283 - DNA, 600 bp, Chicken  19866894284972_1
agcgttgcggtgatccgtagggtctgggcgctcgctgggtgccagcgggcagcgcttggtggagggaaggtggcaggtccgtgtctggtctgtgcaatagggatggacctcacacgctttcttgctaccacccactttctgtttttctgccattttcgtgctggggagagctgggtgtgggtgcatgcactgcctgtgtgtacccagccatagaatcacagcttggaaaagagctctcggatccccaaggcaaccccagcccggcacactgtgcccactgaccatgtccccaggtgccaygtctccgtgcttcgtggacgcctctgggggcggtgactccaccgctccatgggcagctgtgccactgctgttggtgtgaaacagcgcacggaggaaggaaggaagaacatttagactgattatgattataagaaaaaaaaagtagcagcgaaaaaaaatagttggcaagagtggcaggagctgatggaagtggtacaggagccaaagcagcgggcacaggctgaaacgtgggaaattccatctgaatgtcagaaaaaagccttttcattcggggggggggggcggggtgaggcagtcgct

SEQ ID NO: 45284 - DNA, 600 bp, Chicken  19866894284976_1
tgtaacactggcccttccttaagtcaaatctgtaatcatcagtctactcagtacagaacacaatggctatccagaggcagcctgagacttgatgtgtatcccactcatcagttttgcaatttaggtatagttcttgaaatatttaacatttgcattcattatatttctttctgcttgagaaagcaaattacatcctacttctaaaatgacttctataagtgtatcacgggactttagtcatgttattcttaaaaaccaattgttattacacaacacttcaaggaagtctgagcatgttgmagcttgtttgtacaggcaaaamataatttacagagattatccttcatgtcatatctctctagggaattgctccagtttcagcacttatgctttttcatcttcctttcatctgttatttttttagtatgtatttcagcaaagcagatgtgaggagaccaagcacacaaggaackaggctaattttctacagctgaatactctcaccagtgttacaaatacaggtgccttcctcygggctcattgagccttgctttcagctctgtggccaattctacakggtgaggtgtgtgcaggcctctt

SEQ ID NO: 45285 - DNA, 600 bp, Chicken  19866894284976_2
gtcaaatctgtaatcatcagtctactcagtacagaacacaatggctatccagaggcagcctgagacttgatgtgtatcccactcatcagttttgcaatttaggtatagttcttgaaatatttaacatttgcattcattatatttctttctgcttgagaaagcaaattacatcctacttctaaaatgacttctataagtgtatcacgggactttagtcatgttattcttaaaaaccaattgttattacacaacacttcaaggaagtctgagcatgttgmagcttgtttgtacaggcaaaamataatttacagagattatccttcatgtcatatctctctagggaattgctccagtttcagcacttatgctttttcatcttcctttcatctgttatttttttagtatgtatttcagcaaagcagatgtgaggagaccaagcacacaaggaackaggctaattttctacagctgaatactctcaccagtgttacaaatacaggtgccttcctcygggctcattgagccttgctttcagctctgtggccaattctacakggtgaggtgtgtgcaggcctcttacaggtgagctcagcaggtgta

SEQ ID NO: 45286 - DNA, 600 bp, Chicken  19866894284976_3
cttgagaaagcaaattacatcctacttctaaaatgacttctataagtgtatcacgggactttagtcatgttattcttaaaaaccaattgttattacacaacacttcaaggaagtctgagcatgttgmagcttgtttgtacaggcaaaamataatttacagagattatccttcatgtcatatctctctagggaattgctccagtttcagcacttatgctttttcatcttcctttcatctgttatttttttagtatgtatttcagcaaagcagatgtgaggagaccaagcacacaaggaackaggctaattttctacagctgaatactctcaccagtgttacaaatacaggtgccttcctcygggctcattgagccttgctttcagctctgtggccaattctacakggtgaggtgtgtgcaggcctcttacaggtgagctcagcaggtgtaggagtccctctgagtggatgctacccccatttacccaccttccagtgaagagcacttgttcagaaaacccagcagatgcaagcaggacttatgctctctcacagagaagggacagaagagcaaagaggcctgtcctggagcagctcttctg

SEQ ID NO: 45287 - DNA, 600 bp, Chicken  19866894284976_4
ttagtcatgttattcttaaaaaccaattgttattacacaacacttcaaggaagtctgagcatgttgmagcttgtttgtacaggcaaaamataatttacagagattatccttcatgtcatatctctctagggaattgctccagtttcagcacttatgctttttcatcttcctttcatctgttatttttttagtatgtatttcagcaaagcagatgtgaggagaccaagcacacaaggaackaggctaattttctacagctgaatactctcaccagtgttacaaatacaggtgccttcctcygggctcattgagccttgctttcagctctgtggccaattctacakggtgaggtgtgtgcaggcctcttacaggtgagctcagcaggtgtaggagtccctctgagtggatgctacccccatttacccaccttccagtgaagagcacttgttcagaaaacccagcagatgcaagcaggacttatgctctctcacagagaagggacagaagagcaaagaggcctgtcctggagcagctcttctgtaagcagcaatatttctcctttctctctttccaagacgtcttgctcaagaatggcggaaa

SEQ ID NO: 45288 - DNA, 586 bp, Chicken  19866894284976_5
tcaaggaagtctgagcatgttgmagcttgtttgtacaggcaaaamataatttacagagattatccttcatgtcatatctctctagggaattgctccagtttcagcacttatgctttttcatcttcctttcatctgttatttttttagtatgtatttcagcaaagcagatgtgaggagaccaagcacacaaggaackaggctaattttctacagctgaatactctcaccagtgttacaaatacaggtgccttcctcygggctcattgagccttgctttcagctctgtggccaattctacakggtgaggtgtgtgcaggcctcttacaggtgagctcagcaggtgtaggagtccctctgagtggatgctacccccatttacccaccttccagtgaagagcacttgttcagaaaacccagcagatgcaagcaggacttatgctctctcacagagaagggacagaagagcaaagaggcctgtcctggagcagctcttctgtaagcagcaatatttctcctttctctctttccaagacgtcttgctcaagaatggcggaaagaaaactccattggtcttcacacatctcac

SEQ ID NO: 45289 - DNA, 599 bp, Chicken  19866894284978_1
  misc_feature (1)..(49): n is any nucleotide
nnnnnnnnnnnnnnnnnnnnnnnnnnnnnnnnnnnnnnnnnnnnnnnnnaggaaagcagcatacatttagaatgaagaatggtacccagcaagagctcaatgcggtcttatggaagcatatatagtttatttttataaaatgaaaacaatggggaaaattcaatataaagaattttgatagctaactttctccgaggcaaacccctaagattcaagacagtagcagggagataaaaggcatacaattgtaaatgcatttgcagatgaaagagtgggctaagagcagcactgtacttttayacaaggaaaggaaaggctgaaagcaacctctcagtgtgtcagtcagtgaaggaaggagacaatagtggcaccaacagaatcattttatagaggtttcatcagcataactcactttacctgtactgtttttaattgctgggtctgcaaaacagaaggctgggcagcagtatttatcagctgacttccttgtgttaaagctgagacaccaacaacaggtttcacttctgaccgacctccaataacaactttgatctgctggccttgtactttggagtctccaccttgggtytgggacacag

SEQ ID NO: 45290 - DNA, 600 bp, Chicken  19866894284978_2
tgtacttttayacaaggaaaggaaaggctgaaagcaacctctcagtgtgtcagtcagtgaaggaaggagacaatagtggcaccaacagaatcattttatagaggtttcatcagcataactcactttacctgtactgtttttaattgctgggtctgcaaaacagaaggctgggcagcagtatttatcagctgacttccttgtgttaaagctgagacaccaacaacaggtttcacttctgaccgacctccaataacaactttgatctgctggccttgtactttggagtctccaccttgggtytgggacacagtcttctgtgyctgcgggagctggcagcggggtaatgctaaaacaatgggttggccagtcttgcccaaagttgttacaatcagcttttgcccatctggtttaatactctgattgcctattttaaggtcagtggtcttgttcagaataatctgattggctgatatagtgaccggagtctgagcaccgagtttatggagaccactttgaaaggcaggctttactaccgaatttccttcagtttttatagttgtggcgtttgcagtcacatcgcccgagtgattactgggtgca

SEQ ID NO: 45291 - DNA, 600 bp, Chicken  19866894284978_3
ggaaaggctgaaagcaacctctcagtgtgtcagtcagtgaaggaaggagacaatagtggcaccaacagaatcattttatagaggtttcatcagcataactcactttacctgtactgtttttaattgctgggtctgcaaaacagaaggctgggcagcagtatttatcagctgacttccttgtgttaaagctgagacaccaacaacaggtttcacttctgaccgacctccaataacaactttgatctgctggccttgtactttggagtctccaccttgggtytgggacacagtcttctgtgyctgcgggagctggcagcggggtaatgctaaaacaatgggttggccagtcttgcccaaagttgttacaatcagcttttgcccatctggtttaatactctgattgcctattttaaggtcagtggtcttgttcagaataatctgattggctgatatagtgaccggagtctgagcaccgagtttatggagaccactttgaaaggcaggctttactaccgaatttccttcagtttttatagttgtggcgtttgcagtcacatcgcccgagtgattactgggtgcagtaactggttctgcagtgac

SEQ ID NO: 45292 - DNA, 600 bp, Chicken  19866894284978_4
ctttgaaaggcaggctttactaccgaatttccttcagtttttatagttgtggcgtttgcagtcacatcgcccgagtgattactgggtgcagtaactggttctgcagtgaccgtggctgtagttgtaactgaagcgtcactggtggagcttatgttcactatttcttccagttctgtttccatgggaatagaatctcccatcggtgaagacacaataaccgcttcaatgctgtcatcttccaccagagttataccagtgtccattatttcctcagggagcaagctgtttacttctgctgamaccacctccattttagcagttgtggcagtgatggccgtagcaggtactgcaacaatagtaaaaataataagttagtggcttccaaaaaatccacattttgcaaagctttatgaataatgttatcataagaaaatgtacaacagcagaaaagacaaagtaytgtgcgtatgcaaaggaggaatatcatggaaaaagaaaaagctatcaaatcctaacacatttggctgaatttacaaarctcttcaataccatctattcaagtaaaatacgggcactgactttctcctgattaccagtcca

SEQ ID NO: 45293 - DNA, 600 bp, Chicken  19866894284978_5
tttcttccagttctgtttccatgggaatagaatctcccatcggtgaagacacaataaccgcttcaatgctgtcatcttccaccagagttataccagtgtccattatttcctcagggagcaagctgtttacttctgctgamaccacctccattttagcagttgtggcagtgatggccgtagcaggtactgcaacaatagtaaaaataataagttagtggcttccaaaaaatccacattttgcaaagctttatgaataatgttatcataagaaaatgtacaacagcagaaaagacaaagtaytgtgcgtatgcaaaggaggaatatcatggaaaaagaaaaagctatcaaatcctaacacatttggctgaatttacaaarctcttcaataccatctattcaagtaaaatacgggcactgactttctcctgattaccagtccacttttggcaatttagtatgcctaaagcagcattcctcccaagatgagtaccttgctcacacagatatttaggcttactgagatacagagcaagaagcaaaaagctacacaaatccaaaagatgatgatccattttgtcatgtgcatcaacacctactagc

SEQ ID NO: 45294 - DNA, 600 bp, Chicken  19866894284978_6
ccaccagagttataccagtgtccattatttcctcagggagcaagctgtttacttctgctgamaccacctccattttagcagttgtggcagtgatggccgtagcaggtactgcaacaatagtaaaaataataagttagtggcttccaaaaaatccacattttgcaaagctttatgaataatgttatcataagaaaatgtacaacagcagaaaagacaaagtaytgtgcgtatgcaaaggaggaatatcatggaaaaagaaaaagctatcaaatcctaacacatttggctgaatttacaaarctcttcaataccatctattcaagtaaaatacgggcactgactttctcctgattaccagtccacttttggcaatttagtatgcctaaagcagcattcctcccaagatgagtaccttgctcacacagatatttaggcttactgagatacagagcaagaagcaaaaagctacacaaatccaaaagatgatgatccattttgtcatgtgcatcaacacctactagcaagacgccttgcctcagagacttgctttccattccagatgcaacaggggttcattgttgtcttctcatttcagaagtc

SEQ ID NO: 45295 - DNA, 600 bp, Chicken  19866894284983_1
aaggggatcctgaatatcatctagttctaaccctcctgctgggggtagagttgtcaaccactacatcaggctgcacagggccctatccagtctgaccttgaatacttccagggatggagaaataaaacttctgtgggcagcctgtttttgtgcctcaccacctctaaataaagatttcctatgaatcatagaaccaccaagattggaaaagaccaaaatcatccagtccaactgtccacctaccaccattatttccccactaaaccatgttccttagtacaatatctaagtgtttcttgrgcacctccagggacggtgtctcaaccacctccctgggcagcccattccagtacttgaccactctttcagagaataaatttttcctaatatcctacctgaaactaacctctacttgcagtttgtttggggggatggagtttatcccatccttttgatttatgttttaagatcctcaattttatttttgtcttgtatttaactgtttgcattatgttctcccattagacaacatgcctcttaatgaggcatgatctgctttgcttactgatagcctggggcctaatctctttcttcatttcc

SEQ ID NO: 45296 - DNA, 600 bp, Chicken  19866894284988_1
cacagtagcactgtttgcccttaatccacatttctcatttgtctgcttgacttgatttttgttttcccttctccccaactttatttctttagtccttaagctctgtgttagcatcagccagaaaagagattgaactaatgtcagacaagatgagggatttaatatcagaaaaagagactctggcacaggagaggaatactctaaaattagagaaagagtcattgttatcacagcatctagagatggagtcaaagattttgttagttcagcaagaccgagaagagctttggacaaaaaatraagaacttaattcagagaataaaaaaattctaaagcagaaagaagcagctgaggccaaaagtcgtcaggagagcacagaaaaggtagcactgatttctgagaaaagcaaattgctctctgaaatagagacagcccaggcagatcttctgaagrtaactcaagaaaatgatgctctccggtcttcagagtcaaccttgctccaacagttgaaagaacttcaggccaacaaagatgctgtggatgtggcatgtcagaaacacatcaaggaacgggaagaactggagcattatcagaagcttt

SEQ ID NO: 45297 - DNA, 600 bp, Chicken  19866894284988_2
gggatttaatatcagaaaaagagactctggcacaggagaggaatactctaaaattagagaaagagtcattgttatcacagcatctagagatggagtcaaagattttgttagttcagcaagaccgagaagagctttggacaaaaaatraagaacttaattcagagaataaaaaaattctaaagcagaaagaagcagctgaggccaaaagtcgtcaggagagcacagaaaaggtagcactgatttctgagaaaagcaaattgctctctgaaatagagacagcccaggcagatcttctgaagrtaactcaagaaaatgatgctctccggtcttcagagtcaaccttgctccaacagttgaaagaacttcaggccaacaaagatgctgtggatgtggcatgtcagaaacacatcaaggaacgggaagaactggagcattatcagaagcttttggaagagaatgatagagtcattaaagacaaagatgatgtcattcagagactgcaaagttcttatgatgacttggctagaaatcaaagagagctactacaagaagtgtcaattctgactgcagagagagattcagcccaagaaaaagacttgg

SEQ ID NO: 45298 - DNA, 600 bp, Chicken  19866894284992_1
aggacttgtgtttcccggggcacacatgctctttcctgatgtgactccacaggactttcttctagaggactgaaagtatgctccaggagagagaggctctggagggccagagctttgtatacataacagtgtatcactacagtcattaatcactgaccaatggtccacactagtcagcaagatgaatgctagctgcccatgcattttgctgaccaaagaatagttctggaagaaacaacataagcaagtgaatataatatttgttcacggatgtatgtgcatgcgctagaataccataayataaaaaccagtgtttcgtcctctgctggattactctagtctgaaaaacagatgagtgataaaaatggttagaggtaaaggaaacgtacagttgaagacagattggtgtgatgagcagtagacttggtaaatggtgagttctcacattatgatgttacagttcgtttatatccaattggtaactataggctgtcctgagggacactggattttagcaaaacaagcataggagacaccaggttctagcagggatctgaatgctaagaggataaattggtgtggggcactgtttccatgcaa

SEQ ID NO: 45299 - DNA, 600 bp, Chicken  19866894284996_1
ataacatccacgtttcatataaagggtcaaaatggtcctaaactgaatgttgggtgatgataggtatattgcacatgttaaaacaattcagcatctcatgctatttctgtgcatgccaagatgactgacttcttgaagcacaaaacaacatccagtaagttgcctgtgatcttaatttgtgtatttgtgaatccatatttctccagcagctgcttatattctgagccacttctctgcttgccttcagtcatactcagagactgcagtaccactctaggagggtgtatcttctgctcatcragcacagtttctgccactagcaaggcacttcctgcatttccagaacaaccagaagcactttastaaagtatttctagcttcacatttttagtgttttgttcagagacatttacatataggtcccccatcagaacagtgttttaatgggcttcagtggtaatcagtaactgaagtttactttcaatcatctcttcctggaagaaaccgttagttgttagggggagggggagagctttgaacactgcttctatttcagtgaagtttagaccacttcctgaacctgatttttaaactcagtct

SEQ ID NO: 45300 - DNA, 600 bp, Chicken  19866894284996_2
gtatattgcacatgttaaaacaattcagcatctcatgctatttctgtgcatgccaagatgactgacttcttgaagcacaaaacaacatccagtaagttgcctgtgatcttaatttgtgtatttgtgaatccatatttctccagcagctgcttatattctgagccacttctctgcttgccttcagtcatactcagagactgcagtaccactctaggagggtgtatcttctgctcatcragcacagtttctgccactagcaaggcacttcctgcatttccagaacaaccagaagcactttastaaagtatttctagcttcacatttttagtgttttgttcagagacatttacatataggtcccccatcagaacagtgttttaatgggcttcagtggtaatcagtaactgaagtttactttcaatcatctcttcctggaagaaaccgttagttgttagggggagggggagagctttgaacactgcttctatttcagtgaagtttagaccacttcctgaacctgatttttaaactcagtcttgttaccacttgaaccgagcaactccttcttgtcatatcccagtcctcaaataaggaaagaca

SEQ ID NO: 45301 - DNA, 600 bp, Chicken  19866894285004_1
tcctgtgatctggagagtttatgtcctactgatgctcctggtcaccttctgcgtatctttttttacagaggtgagtgcattcatttactgtctgttcccagcagtgagctgcatctgttcaggactttcttccttctctctttgcagccacgctcttcctgcagaagcacaaaccctcaggctttttttttcattttttcctccctttttctatattagtcactgtgtgtcaatcaaatccacctgatggagcaccagagataacagcccacacgccttaagcttgtagagtgtgagcartgccacgcagctgacacaaatgatgctttgtgggtcagagatgactgtgccactctgggtaggagyatggggtttcatccagaggcaggtattgttgcctgcaaggcaggaagcatgcaggtgcccctcaccacaagaggaaagtgcgatacctgtactactgaaaaggattgctgtggatcacatagcgagttgcatgtatatggactggcacgtgtcaccggggttggctttggtctccccccactaatgccatgctgtgtcactccacaggatgttctcctgcagaacaagcacctc

SEQ ID NO: 45302 - DNA, 600 bp, Chicken  19866894285004_2
agaggtgagtgcattcatttactgtctgttcccagcagtgagctgcatctgttcaggactttcttccttctctctttgcagccacgctcttcctgcagaagcacaaaccctcaggctttttttttcattttttcctccctttttctatattagtcactgtgtgtcaatcaaatccacctgatggagcaccagagataacagcccacacgccttaagcttgtagagtgtgagcartgccacgcagctgacacaaatgatgctttgtgggtcagagatgactgtgccactctgggtaggagyatggggtttcatccagaggcaggtattgttgcctgcaaggcaggaagcatgcaggtgcccctcaccacaagaggaaagtgcgatacctgtactactgaaaaggattgctgtggatcacatagcgagttgcatgtatatggactggcacgtgtcaccggggttggctttggtctccccccactaatgccatgctgtgtcactccacaggatgttctcctgcagaacaagcacctctggatgctgattaaagcctgcgttgggtatcagtcaaaaagccagtaccgaaagtggcaacggatg

SEQ ID NO: 45303 - DNA, 599 bp, Chicken  19866894285005_1
  misc_feature (1)..(109): n is any nucleotide
nnnnnnnnnnnnnnnnnnnnnnnnnnnnnnnnnnnnnnnnnnnnnnnnnnnnnnnnnnnnnnnnnnnnnnnnnnnnnnnnnnnnnnnnnnnnnnnnnnnnnnnnnnnnnttggactgattctattttaaacatattttcgctttctagatatggtcgcttcaacttttttagctgatttcccatgcttaatttaactgaggaggtaactagtttgagttgctgtgttttataatactaataactgaagcttgttgggctcttcagatacgttggatgcctttaataatctgtgcagattygaaggttgacagaagaaaatttatgttcatttgatacttatagcatagggatatagacactaatatcataggcagagggaaaagggaaagcaaaatgtttcaatattactgatgtagacatttcatgttgtatatcttagtattgtacaggtcatctatttctraagaacagtaaacttattttgcattttccttttgggtgatagccacttctatgtggatgctgctctttttcagatatgatttttataagaaattaaaaacaaaatctagatggctttttttagtataatgctctg

SEQ ID NO: 45304 - DNA, 600 bp, Chicken  19866894285005_2
ttttttagctgatttcccatgcttaatttaactgaggaggtaactagtttgagttgctgtgttttataatactaataactgaagcttgttgggctcttcagatacgttggatgcctttaataatctgtgcagattygaaggttgacagaagaaaatttatgttcatttgatacttatagcatagggatatagacactaatatcataggcagagggaaaagggaaagcaaaatgtttcaatattactgatgtagacatttcatgttgtatatcttagtattgtacaggtcatctatttctraagaacagtaaacttattttgcattttccttttgggtgatagccacttctatgtggatgctgctctttttcagatatgatttttataagaaattaaaaacaaaatctagatggctttttttagtataatgctctggataaaatgtcactgagattttaaagtggaaggtaacaattttttgatggacagatgacttaataaataatcttaatgaacaaatctgtttaaaattcaaattccatgkcttagtgttttaaatgcctgtgacttgcagtcatttctctgatctttattctgtga

SEQ ID NO: 45305 - DNA, 576 bp, Chicken  19866894285005_3
ctgatgtagacatttcatgttgtatatcttagtattgtacaggtcatctatttctraagaacagtaaacttattttgcattttccttttgggtgatagccacttctatgtggatgctgctctttttcagatatgatttttataagaaattaaaaacaaaatctagatggctttttttagtataatgctctggataaaatgtcactgagattttaaagtggaaggtaacaattttttgatggacagatgacttaataaataatcttaatgaacaaatctgtttaaaattcaaattccatgkcttagtgttttaaatgcctgtgacttgcagtcatttctctgatctttattctgtgatccttaacatcaggcatcctacttgcaggtaggtcttgaattctagccacctaacaattctattttttctaagaggattcacttttgtgatggaaatgcagataataaaagctgtttgatttttaagataaatcctgaaaatgaaatgaatagatgggcagatgttatgtctacctacacattctatttcttagctctgttacttttccacagagagcat

SEQ ID NO: 45306 - DNA, 481 bp, Chicken  19866894285009_1
gcccccaggaggcgattcagtcccagcatccccggctgtcagagctcagttttaggactctcccatttatggctccacctccaggcatcagcaggaggcacatgagcacgcacaaagaggtacccagccccagctgcttttcctccccgtgggggacatggggtgcaggcacacaggtggtacagatctggtgtttagcttttggaacacacaaaggcttttgcccccagcagttctcccttcttcccactgaggagagcagctgggccacgcagcacgtcccctgctcagctctccccrgcagcagcagctcgggctgtgctccctcagaccactgagacacaaaccagtacggatgggatgcaggagaacatcctcccatcccacagatgggcacaaagctttgaagaaggtcatgcaggaagcacccagaaaactgaaggaacaaagcaatctaccaaaacagctggctgagcctcaa

SEQ ID NO: 45307 - DNA, 600 bp, Chicken  19866894285012_1
catttgcaagtgctgacttcagaatctcataacctccctcaaaaccctcagtgagctcagaaaatccagcattcagcttcagccatttcatcatccaatcttttttcttcctccctgtctccaacttttatcttcttccatgcttcttcatgtcataggacacagccatctgcctgaacagtggcaaagactctcctgataaccaggatttcatcccagcttctccctcccttttttcacattgatatcagcatagcactgagtaaatagaaggagagtcagggtacccattgtgttaarcactgcatacataacggaagagagaaaagtcttcttgatcacacagcctaaacaaataaggccaaaagaaatgttattccaattttacagatggaaaaccaggaccaaagatattaaatgtctggccctaggaaatgtgcagccaaggcaggaactgaccccctgtttcctgagagccagcgatcagtgtctaatcacacatgatcagtcttcctctctacctccctgtaggcactaggaattcgtactcaacatctccacatgtttctcctgcactgtattgcacacagccatacacac

SEQ ID NO: 45308 - DNA, 600 bp, Chicken  19866894285012_2
gcagccaaggcaggaactgaccccctgtttcctgagagccagcgatcagtgtctaatcacacatgatcagtcttcctctctacctccctgtaggcactaggaattcgtactcaacatctccacatgtttctcctgcactgtattgcacacagccatacacacctagatggaactccttaataaataattctacatagattcatgcagttctcctttacttgtcaacccgtgcctcccttacagcacaggaattagtctttccttcctgtattcccagtgtaattaccaaacaaactttcyttctggtgtagtcttccaacaccatggacactttaaatctcacacataaatctcttcaatttcagcaggtctctcttcttgagaatgacatttaattgtgatctttttttaatcagagtcagtcctctgtttcccatccccatctgctggaagcaagtttccacctcgagaggaagtcagtctttgatttcatagatgattataagaagatttaacattctcaggagcacaactacttctatcagaacatttttgctccaactccttttccagctgcctcacttttgatacaaatcccaa

SEQ ID NO: 45309 - DNA, 600 bp, Chicken  19866894285019_1
tagagcactatttgcaatagcgacaaatccctgtaagatgaaatttaccatttgcatcacttctcctaaacacggtttgccagctaatgcatcactccgtatctcatggattatgtgataataactttggcttaagtttccattatcttcttctgacaaatagtatcctctcacatagcttacgtaagccaatgcaaaaatgtgaatgaactgtaatgacacacagaaccatttttgtgccaaatacaaattgtactttctcagctaaacatttacacatcattatcactgtctcctccygcttaaattcacacttacgcatttttactgtaaattcagaagtataaaaggctttcactatccttttctctacagaacatcctcagaaagaaatcttatctgaacataaaaacaatcatccattctctattaatgaaactcctctccaatcaacatttaattttatattgctcaagtggaatacagagaaaattatttccttggaatgtaattcctctgaaaacaaacaaacaaacaaacaaacaaaacaaaaaaaaacccttagttagagatgaactcattttcatcatggaatataca

SEQ ID NO: 45310 - DNA, 600 bp, Chicken  19866894285020_1
aatacactatttactatattatatctcaccagatggttggacaaaaaacagtactatactcaggagcccttcctcctccccagagccatttttaagttatcctttcacattatctaagttatcatgcaaatgaaagctatggtttgcatactcatcagatattagacaaaaagcataatgatttaaaaaaacatttcttcagtgagttatctgaaaatacaggatcattaaagtaaaacatttccaactgaagtggaaaagtataaaaataacaagatgcaaacaattctactacctaakaaataatgtcccatgaaacagataaaataggaatattttctaaaattactaaattaacatgtggacaattatgatcttgctgaatatcagacaaaacaataataaagcagagcatacaaaaaggggtatacataacagggaaatgcttacttaccaagccaactatcaataagaagtatctcgcttcgggttcagtgtatcctgtaaaatctggcacttcacatgattggatatgatgttgtggaaatacttcccgccatatcactaactgaccaatcttctgttctgctgccaagggta

SEQ ID NO: 45311 - DNA, 599 bp, Chicken  19866894285025_1
  misc_feature (1)..(105): n is any nucleotide
nnnnnnnnnnnnnnnnnnnnnnnnnnnnnnnnnnnnnnnnnnnnnnnnnnnnnnnnnnnnnnnnnnnnnnnnnnnnnnnnnnnnnnnnnnnnnnnnnnnnnnnnntttcctgtgctttgttaatagaattttgccagcttcattaagttggtgaaatttcaagatgcttaatgaaataatgcttcatcccctggtttctgatataaatcctaatggaatgtgcgattccgattcatcaccaacaaactgctctgctcagagggcacttctcacactgccgaggtttttattttcctgacrttaygatcttagcaattttattttaacagttagaatgggaatgcctaataagttaaacggcagaataaagaattcctccagaaggataaagaagtgtgtgtttaggtggaagagacttcagagcagattatgggttgctttatgttctaaatatgacacattaatatctactcacttaatactgtaatttttttgtaaagttcctttctcgaagagatgatctttatttctctgagaattgcctggtggaatccccacttgtgcaaatgatgagtgactgctgcacaccacgagccgag

SEQ ID NO: 45312 - DNA, 599 bp, Chicken  19866894285025_2
  misc_feature (1)..(101): n is any nucleotide
nnnnnnnnnnnnnnnnnnnnnnnnnnnnnnnnnnnnnnnnnnnnnnnnnnnnnnnnnnnnnnnnnnnnnnnnnnnnnnnnnnnnnnnnnnnnnnnnnnnnntttcctgtgctttgttaatagaattttgccagcttcattaagttggtgaaatttcaagatgcttaatgaaataatgcttcatcccctggtttctgatataaatcctaatggaatgtgcgattccgattcatcaccaacaaactgctctgctcagagggcacttctcacactgccgaggtttttattttcctgacrttaygatcttagcaattttattttaacagttagaatgggaatgcctaataagttaaacggcagaataaagaattcctccagaaggataaagaagtgtgtgtttaggtggaagagacttcagagcagattatgggttgctttatgttctaaatatgacacattaatatctactcacttaatactgtaatttttttgtaaagttcctttctcgaagagatgatctttatttctctgagaattgcctggtggaatccccacttgtgcaaatgatgagtgactgctgcacaccacgagccgagcgct

SEQ ID NO: 45313 - DNA, 600 bp, Chicken  19866894285035_1
agcaatatttgtatatgaatatttgtattcacatttttatggtaatctagcttacatgtcttattaagtatgtaggatagcaacagcacacttctctgtggcaagtcagtaaatgtctaaatgcactccctttacacacttgcagtgcttcaacttccaggctcaccttgcatcatgtctaaggcattatgaagctggaaacaacatcagccaaggcagattgaagtatctgcctgtgactgttggtacattctctgggatgcagcagagcagattattgggataacatctgaatctcartaggcaaagggaagaggatgttgtttcttttgtttgtttttacagttgaagtcattcatcttgattacattttattttcagttttacactggctttatagtttgacagaacaaggtgacacagaatagcaaattgatgatgatcttcaaatatgttaaaacttgtcacatagatttccttgtatctgctgggggtagggctagaacaactgtgtataaactgctgcaagatcaatttaagcaagacagtaggaaaaagctttcaagtttgcaaaacctcataataaactgttttagatgc

SEQ ID NO: 45314 - DNA, 599 bp, Chicken  19866894285036_1
  misc_feature (1)..(145): n is any nucleotide
nnnnnnnnnnnnnnnnnnnnnnnnnnnnnnnnnnnnnnnnnnnnnnnnnnnnnnnnnnnnnnnnnnnnnnnnnnnnnnnnnnnnnnnnnnnnnnnnnnnnnnnnnnnnnnnnnnnnnnnnnnnnnnnnnnnnnnnnnnnnnnnnncctcttggtgcagagaagattcattccctaaccggagcagtagagaacaaatagaacatacaacagctatttttctgatgccaacattacctcattgtcattttctaatatccaattctctaaattacccaaagaaatttccttcttctgagaargaaaaaaaaaaaaaagcaacaatattcaacgtctgagagaagaaaattcatcttctgacttttttactgcagttttaggcttttaaatcttcactgcatattagaaggggggaaaaaagtagctagtaagattgatttctggacctgttatttaattctctaggagttttgcagcacttaatacaacatagccagtagggaacagtaccactttgcgcccattcatttgatgaagagggaaaagtcacttccaagtgccatgcgctcagcaggggattggctgaatttctgtggygtga

SEQ ID NO: 45315 - DNA, 599 bp, Chicken  19866894285036_2
  misc_feature (1)..(144): n is any nucleotide
nnnnnnnnnnnnnnnnnnnnnnnnnnnnnnnnnnnnnnnnnnnnnnnnnnnnnnnnnnnnnnnnnnnnnnnnnnnnnnnnnnnnnnnnnnnnnnnnnnnnnnnnnnnnnnnnnnnnnnnnnnnnnnnnnnnnnnnnnnnnnnnncctcttggtgcagagaagattcattccctaaccggagcagtagagaacaaatagaacatacaacagctatttttctgatgccaacattacctcattgtcattttctaatatccaattctctaaattacccaaagaaatttccttcttctgagaarraaaaaaaaaaaaaagcaacaatattcaacgtctgagagaagaaaattcatcttctgacttttttactgcagttttaggcttttaaatcttcactgcatattagaaggggggaaaaaagtagctagtaagattgatttctggacctgttatttaattctctaggagttttgcagcacttaatacaacatagccagtagggaacagtaccactttgcgcccattcatttgatgaagagggaaaagtcacttccaagtgccatgcgctcagcaggggattggctgaatttctgtggygtgag

SEQ ID NO: 45316 - DNA, 600 bp, Chicken  19866894285036_3
agaargaaaaaaaaaaaaaagcaacaatattcaacgtctgagagaagaaaattcatcttctgacttttttactgcagttttaggcttttaaatcttcactgcatattagaaggggggaaaaaagtagctagtaagattgatttctggacctgttatttaattctctaggagttttgcagcacttaatacaacatagccagtagggaacagtaccactttgcgcccattcatttgatgaagagggaaaagtcacttccaagtgccatgcgctcagcaggggattggctgaatttctgtggygtgagccaccagggctgtgccctgtcccctgcaggaccatgcagacaaggggaacacagcctggcctttctccagcagcaccagcagggcagcacccagmagggccaggagacagaaagcagacaggacaagaggtaatggttttaagcggcaccaagagagattcyggttggatattaggaaaaatttcttctcagaaacagtggtgcattattggaacaggctgcacagagaggtggtggaaccactgtcctggaggggttcaagaaatgtgcagggtgacactgggtgatatggttg

SEQ ID NO: 45317 - DNA, 600 bp, Chicken  19866894285036_4
gcatattagaaggggggaaaaaagtagctagtaagattgatttctggacctgttatttaattctctaggagttttgcagcacttaatacaacatagccagtagggaacagtaccactttgcgcccattcatttgatgaagagggaaaagtcacttccaagtgccatgcgctcagcaggggattggctgaatttctgtggygtgagccaccagggctgtgccctgtcccctgcaggaccatgcagacaaggggaacacagcctggcctttctccagcagcaccagcagggcagcacccagmagggccaggagacagaaagcagacaggacaagaggtaatggttttaagcggcaccaagagagattcyggttggatattaggaaaaatttcttctcagaaacagtggtgcattattggaacaggctgcacagagaggtggtggaaccactgtcctggaggggttcaagaaatgtgcagggtgacactgggtgatatggttgagtgatatggtgttgatgggtcagtggttggacaaggtgctcttaatggtctttccaaccttaatgagtctatgaagttgctgacaagtccaccttgcca

SEQ ID NO: 45318 - DNA, 600 bp, Chicken  19866894285036_5
ggagttttgcagcacttaatacaacatagccagtagggaacagtaccactttgcgcccattcatttgatgaagagggaaaagtcacttccaagtgccatgcgctcagcaggggattggctgaatttctgtggygtgagccaccagggctgtgccctgtcccctgcaggaccatgcagacaaggggaacacagcctggcctttctccagcagcaccagcagggcagcacccagmagggccaggagacagaaagcagacaggacaagaggtaatggttttaagcggcaccaagagagattcyggttggatattaggaaaaatttcttctcagaaacagtggtgcattattggaacaggctgcacagagaggtggtggaaccactgtcctggaggggttcaagaaatgtgcagggtgacactgggtgatatggttgagtgatatggtgttgatgggtcagtggttggacaaggtgctcttaatggtctttccaaccttaatgagtctatgaagttgctgacaagtccaccttgccaccgccactatggaaacctcatcacacagcaagctaagaggaaaatgatgtacatctgcagctatttg

SEQ ID NO: 45319 - DNA, 599 bp, Chicken  19866894285038_1
  misc_feature (1)..(162): n is any nucleotide
nnnnnnnnnnnnnnnnnnnnnnnnnnnnnnnnnnnnnnnnnnnnnnnnnnnnnnnnnnnnnnnnnnnnnnnnnnnnnnnnnnnnnnnnnnnnnnnnnnnnnnnnnnnnnnnnnnnnnnnnnnnnnnnnnnnnnnnnnnnnnnnnnnnnnnnnnnnnnnnnnnttgctgaacacttctggagaccaatattggctgtgagcatagagaagtggtgggtggtatgtttcagcagcaatgctgtcacagcagctgtgaaacagttagtcatgtcggcgagtgcaaatttaaaaaaaaaaaaayggagagagagaacagcatgcaggcttttgttcatcacaggtgaaaatacatagctaatggtggcaactgtgttgaaaaatagcgtattgtagctgagaatttgctctgtcaaatagaattactgcgctctttgtatctgctgtattttccatgaaaataaacaggaggcatcactttcagagtgacctaaatacatacattcctaatccatttcyctaggtcaaaacacttacagaatcataagtaaaaataagcatttggtagaatactagcattgaatttgaagtgctgctacaatc

SEQ ID NO: 45320 - DNA, 599 bp, Chicken  19866894285038_2
  misc_feature (1)..(161): n is any nucleotide
nnnnnnnnnnnnnnnnnnnnnnnnnnnnnnnnnnnnnnnnnnnnnnnnnnnnnnnnnnnnnnnnnnnnnnnnnnnnnnnnnnnnnnnnnnnnnnnnnnnnnnnnnnnnnnnnnnnnnnnnnnnnnnnnnnnnnnnnnnnnnnnnnnnnnnnnnnnnnnnnnttgctgaacacttctggagaccaatattggctgtgagcatagagaagtggtgggtggtatgtttcagcagcaatgctgtcacagcagctgtgaaacagttagtcatgtcggcgagtgcaaatttaaaaaaaaaaaaagygagagagagaacagcatgcaggcttttgttcatcacaggtgaaaatacatagctaatggtggcaactgtgttgaaaaatagcgtattgtagctgagaatttgctctgtcaaatagaattactgcgctctttgtatctgctgtattttccatgaaaataaacaggaggcatcactttcagagtgacctaaatacatacattcctaatccatttcyctaggtcaaaacacttacagaatcataagtaaaaataagcatttggtagaatactagcattgaatttgaagtgctgctacaatca

SEQ ID NO: 45321 - DNA, 600 bp, Chicken  19866894285038_3
gtggtatgtttcagcagcaatgctgtcacagcagctgtgaaacagttagtcatgtcggcgagtgcaaatttaaaaaaaaaaaaagggagagagagaacagcatgcaggcttttgttcatcacaggtgaaaatacatagctaatggtggcaactgtgttgaaaaatagcgtattgtagctgagaatttgctctgtcaaatagaattactgcgctctttgtatctgctgtattttccatgaaaataaacaggaggcatcactttcagagtgacctaaatacatacattcctaatccatttcyctaggtcaaaacacttacagaatcataagtaaaaataagcatttggtagaatactagcattgaatttgaagtgctgctacaatcattcagcwtctgtattcttatgcataagtactaaggacctaatttattttcagattgatactcaagaggcaggagacaaatttgaaccaatgttatcatttccccattttgaggggaagaacagaaagcaagtgaagctgtttgtaactgatacaaagaaagcagacaaaygtgcatttctactgccagtcatgccaggggaagcaagaacctcct

SEQ ID NO: 45322 - DNA, 600 bp, Chicken  19866894285038_4
gagaacagcatgcaggcttttgttcatcacaggtgaaaatacatagctaatggtggcaactgtgttgaaaaatagcgtattgtagctgagaatttgctctgtcaaatagaattactgcgctctttgtatctgctgtattttccatgaaaataaacaggaggcatcactttcagagtgacctaaatacatacattcctaatccatttcyctaggtcaaaacacttacagaatcataagtaaaaataagcatttggtagaatactagcattgaatttgaagtgctgctacaatcattcagcwtctgtattcttatgcataagtactaaggacctaatttattttcagattgatactcaagaggcaggagacaaatttgaaccaatgttatcatttccccattttgaggggaagaacagaaagcaagtgaagctgtttgtaactgatacaaagaaagcagacaaaygtgcatttctactgccagtcatgccaggggaagcaagaacctcctccctgccagcccacctcagctgctcatcagcacctagcataggaatttctgccttcctcgaactcccttccatcaagacaaatggcatgaag

SEQ ID NO: 45323 - DNA, 489 bp, Chicken  19866894285038_5
tcactttcagagtgacctaaatacatacattcctaatccatttcyctaggtcaaaacacttacagaatcataagtaaaaataagcatttggtagaatactagcattgaatttgaagtgctgctacaatcattcagcwtctgtattcttatgcataagtactaaggacctaatttattttcagattgatactcaagaggcaggagacaaatttgaaccaatgttatcatttccccattttgaggggaagaacagaaagcaagtgaagctgtttgtaactgatacaaagaaagcagacaaaygtgcatttctactgccagtcatgccaggggaagcaagaacctcctccctgccagcccacctcagctgctcatcagcacctagcataggaatttctgccttcctcgaactcccttccatcaagacaaatggcatgaagcagcccacctcattctacctaaacggaaggactgctcactgtcactgttcag

SEQ ID NO: 45324 - DNA, 599 bp, Chicken  19866894285041_1
  misc_feature (1)..(7): n is any nucleotide
nnnnnnnaaaactacaatgttcatctcagtaggggtggatattacttttttttctccttcaagtctcaagagaactcacaagacattttaaacttgttttacttgtagcaggaggcagagctattgctgacaggctggcagcagcgcctgtgtacgtgcagtcacacttgtgagctgaaagtgactggagggtctgggtctgtttgatccattcagataccctacgtgttccccccatgaccatgagtgcatgggctacaaaagtacagcattacccgatgctacatgtaggaatgcacrcgggaccctcccgtggtgtaacggtgcatctccagagggactgaacgagtccctggtgtgacatccctccgcattcgccttcagaagttcctggcgaactattccgtgagtgtggagaggaaygctgctctttattcagtcacttattacatggggctctggtactgtttgaatcacaaattgcatgctaatggcctaattcataaaccattgacattttttatgagtccttaacattcaaaaatgaagaatttgtgctcaaaaaataatttgcattgcaaaattcaataatttagttt

SEQ ID NO: 45325 - DNA, 600 bp, Chicken  19866894285041_2
ttgctgacaggctggcagcagcgcctgtgtacgtgcagtcacacttgtgagctgaaagtgactggagggtctgggtctgtttgatccattcagataccctacgtgttccccccatgaccatgagtgcatgggctacaaaagtacagcattacccgatgctacatgtaggaatgcacrcgggaccctcccgtggtgtaacggtgcatctccagagggactgaacgagtccctggtgtgacatccctccgcattcgccttcagaagttcctggcgaactattccgtgagtgtggagaggaaygctgctctttattcagtcacttattacatggggctctggtactgtttgaatcacaaattgcatgctaatggcctaattcataaaccattgacattttttatgagtccttaacattcaaaaatgaagaatttgtgctcaaaaaataatttgcattgcaaaattcaataatttagtttctcatattcattaatgcctaagcccacaccacataacttatcccactctaactacacttcccagcacactgataaaaacaggatacacagtagttcacataaagtgcttctatttgcagctaag

SEQ ID NO: 45326 - DNA, 599 bp, Chicken  19866894285047_1
  misc_feature (1)..(220): n is any nucleotide
nnnnnnnnnnnnnnnnnnnnnnnnnnnnnnnnnnnnnnnnnnnnnnnnnnnnnnnnnnnnnnnnnnnnnnnnnnnnnnnnnnnnnnnnnnnnnnnnnnnnnnnnnnnnnnnnnnnnnnnnnnnnnnnnnnnnnnnnnnnnnnnnnnnnnnnnnnnnnnnnnnnnnnnnnnnnnnnnnnnnnnnnnnnnnnnnnnnnnnnnnnnnnnnnnnnnnnnnnnnnactcaagctttgagaactgccttcagggtaatacagttagctatgtaatctggtctcacacgtaggatatatgagcgccsaaagtggatatttttggcagggaattcataatttatgttctctgtgacagtttgagaataacattgtctggtttgtattttgaaggttcatgccaaaatctgtatgagaggcaccatatacttatgtattatccagtcttctttaaaggcaaatgtattcttgaatgacttttctttactaytgtagcgatatcacactccacctcgatcacggtcgtgttctgagtctgatgatgatgagagcagtgagactcctcctcactggaaagaggaaatgcagagattacgaacatatagac

SEQ ID NO: 45327 - DNA, 599 bp, Chicken  19866894285047_2
  misc_feature (1)..(38): n is any nucleotide
nnnnnnnnnnnnnnnnnnnnnnnnnnnnnnnnnnnnnnactcaagctttgagaactgccttcagggtaatacagttagctatgtaatctggtctcacacgtaggatatatgagcgccsaaagtggatatttttggcagggaattcataatttatgttctctgtgacagtttgagaataacattgtctggtttgtattttgaaggttcatgccaaaatctgtatgagaggcaccatatacttatgtattatccagtcttctttaaaggcaaatgtattcttgaatgacttttctttactaytgtagcgatatcacactccacctcgatcacggtcgtgttctgagtctgatgatgatgagagcagtgagactcctcctcactggaaagaggaaatgcagagattacgaacatatagaccacctagtggagaaaagtggagtaaaggcgataagtaagatcataacataaatatataatgtcgtctttttttttttttttttaaacacaaattgattatatagatgttccatgtctttcttttttgactaaataaaatttgcaaaaatatacttgtatttggcatctttccatttctaatg

SEQ ID NO: 45328 - DNA, 600 bp, Chicken  19866894285049_1
agctccaaccacatcctccatccagcccctcctgaagattgctctttttcctcttatgttcacagatggtggctcgctttgatcctcttctctcttctccattattatcttggtggaaaagaagagaaaaaaaataataagcctaatgcagaatatatatatatatatagtgaagtgttttaatgctgcctctgagtgctctgcattatctgttgtgtataatacacttaaaattataacagtctgctgggagtaaaccaaaggatgttgtccttttgtgtgcccagcactgatctcttrtttcttttctcctttctggagtttaattagcattgctcctctgcctaagttgggcagtcaatggagcatggaagcccgtgccaggtgacatgcaaaacattagttccccacttggagtatttgccatccaactcggagcaggtgccaggaggcagcgcagcagcagtgagtttgggcagcgtggcaggagagcagtgggtttctgacggcccagaactcccagggtgtgcaaggggaggtgactgcgatgctgcaaccgtggctgaggtacagctcggtccccggggtggccgctgagcg

SEQ ID NO: 45329 - DNA, 600 bp, Chicken  19866894285055_1
atctcatgcagaaataaccctcaaatagctctgggctggcacccagcacggcagagccaaagccagaccagggccattccctgctgcccgctgcttttacactgtctgccctcctcttcccctctttacctactccttgtccattggcagctgcactcaatccttgaggagttttgcactgatcccctctgcagaggagtcgagttaagtgagccgcttctgcactgccccggtgtttgcccagcactgatttacgcccttctcagtgagcacagctcatacatcagggccacgctcacrctgctcacagcagcagtatttctcccatattcctgaacccattttggagctaataaatcccccatgcagcctgccagcctcctcctgtccaaccccaaagagtgggaaaaggagggaaagggaaaaaaactggcatcaccatggcaacttgctccttcccagagctgcacagccttcaagttcccactccccatctatcagctgcacttgattaggcagtggtggcagtcggtaccactcagtgtcagggtgttggatgctcgggatagcatgcttgctgccctgctggagagactcact

SEQ ID NO: 45330 - DNA, 600 bp, Chicken  19866894285055_2
aagacttatgagcatgccatgggctgctccctgcccagccctgcagctggtgagcaaggcctgtctgcactgcgctgtcaagggcacgccaagcctcgttatgtctcatttatagcttattattggccttactgtgcagagaaaagccatcagtggggaggggctgtgctggcagcgtggcagggagctggattgctgctaagcatcctggggtgcaaaagggagcaggatggggagctgctgggtgggcacaaccatccacctggcacagtcctggaacaccacttgggcagtgccacyctctttctataaggactgtgctctggacatgtggcagatgggctcgtgatgaaggaaaattgcttttgcttcccagctctggcagccacgctttatgtactgattttctcccctatccgtgcagatctatttctcctttttgcatggcaggaaggcagatggacaccatcactttggtcaacagatgggcactgactgcgccctggcacgctgctgcccatcacggctgtaatgcagagctctggggcactcgcctgcctccctgctctcatttagacagatgagatgccagccatgcag

SEQ ID NO: 45331 - DNA, 600 bp, Chicken  19866894285055_3
ccccacatgttccacttaagcatttccgaagtgttaatttgctgcatgagctgtttgagcaaacaaccaacccccaggtaaaaaacaaccgaatattgctctccatcccagtgctgcccttcagcagggctttgctcttctgcagcagcacgggacatcatcagctgtcagtgcattctctcattagacagttgagctgttctccaccaggaggaaaatagaggcatgggtgcttgcactgagccaccagggcagctcatctccacgccagactccatgcattgcactccacctctccayggcactcactgacacagcctaaagaagcgttgctgcaaacacgtcagtcttaagacaacgtaaaataataaaagaaatacaactccaccgcgatcatcccaagcgaaggtctcaattagcaaacagatcaatcaccagtgacatcttaagtagcgtttacacggagagcgttgtcagaatgatgtgcggttatagcgtggctgtggctttgctgggattcccttcatgcccactcactgcccacagcccggggctcctgggcaaagccccagcacggctgggacatggggacatggactc

SEQ ID NO: 45332 - DNA, 599 bp, Chicken  19866894285058_1
  misc_feature (1)..(179): n is any nucleotide
nnnnnnnnnnnnnnnnnnnnnnnnnnnnnnnnnnnnnnnnnnnnnnnnnnnnnnnnnnnnnnnnnnnnnnnnnnnnnnnnnnnnnnnnnnnnnnnnnnnnnnnnnnnnnnnnnnnnnnnnnnnnnnnnnnnnnnnnnnnnnnnnnnnnnnnnnnnnnnnnnnnnnnnnnnnnnnnnnnnttgcaatgaaatgattctcttgtatctaatttttgtttctgctttttcttttcttttttaacatctgttataaaaagagaaagagaattgtggaattttaaaccagaatgtctgtagaaaytgcattcaattttgctgcagcaatattccttccaagatgtttgttaagactagttacaaaaagcaggctcatatagatatattatacacacacacatacacacacaaaagagtttcccagmttttttttccccaaatattcctaaggaaatggtgtagaaagaatcaatcaccttactgttgtttcacatcttttgagtagactgccccgtgctgttcaagatttcttatctgttgctgtattgcactgcaagcacaaataatttgctgttggttttcatttgctttattgttttttcc

SEQ ID NO: 45333 - DNA, 599 bp, Chicken  19866894285058_2
  misc_feature (1)..(58): n is any nucleotide
nnnnnnnnnnnnnnnnnnnnnnnnnnnnnnnnnnnnnnnnnnnnnnnnnnnnnnnnnnttgcaatgaaatgattctcttgtatctaatttttgtttctgctttttcttttcttttttaacatctgttataaaaagagaaagagaattgtggaattttaaaccagaatgtctgtagaaaytgcattcaattttgctgcagcaatattccttccaagatgtttgttaagactagttacaaaaagcaggctcatatagatatattatacacacacacatacacacacaaaagagtttcccagmttttttttccccaaatattcctaaggaaatggtgtagaaagaatcaatcaccttactgttgtttcacatcttttgagtagactgccccgtgctgttcaagatttcttatctgttgctgtattgcactgcaagcacaaataatttgctgttggttttcatttgctttattgttttttccaagcatctcatttctacagtttgttattttgctcaaattctgtatataaatacaaaatgagctacacagtccatttaaaattggctggctgatttcattcataggtgagaatgatccaaat

SEQ ID NO: 45334 - DNA, 600 bp, Chicken  19866894285058_3
tttccaagcatctcatttctacagtttgttattttgctcaaattctgtatataaatacaaaatgagctacacagtccatttaaaattggctggctgatttcattcataggtgagaatgatccaaatcttgcatactaggagtgacagtgataacagtaatactcatctttctttgctgaatgactacgagggctaccacagcagtatttgccactccctgaattttttcccaaaattatttatttgtggaatatgacctgttttggctatttaaaaatacacctagctgtatttatcctkctttacagatgtatctacagctagactttgcagctgtctcttttatctctggtttccagctctgtaagtttacttttcgaggcttatttagtggtgtccccactgccttactatatctgtcagtatattcctcagctcatccaacacctgctgcactggagttacttactgtaaaacagattggcaattcaggtatatcaaggcgcagccatataggttagtgtgcttgcacagcgcrttatgaaaagctacctagttattagcaataaaaacattacttcctggcctatttctattgct

SEQ ID NO: 45335 - DNA, 600 bp, Chicken  19866894285058_4
tttatttgtggaatatgacctgttttggctatttaaaaatacacctagctgtatttatcctkctttacagatgtatctacagctagactttgcagctgtctcttttatctctggtttccagctctgtaagtttacttttcgaggcttatttagtggtgtccccactgccttactatatctgtcagtatattcctcagctcatccaacacctgctgcactggagttacttactgtaaaacagattggcaattcaggtatatcaaggcgcagccatataggttagtgtgcttgcacagcgcrttatgaaaagctacctagttattagcaataaaaacattacttcctggcctatttctattgctaatatctctgtcatttgttctatagtgaaacaatcagtcttactgggatttattctgtatttaaagttactgttatgcctttttgtttttctagtatttctccattaatttacattaatgaattaagatacaaaagcaagttagccaaagcaatcatatctttcattaaagttattacagattgttattgctagattattccattatatgccacagcaaatttctaattatttttctt

SEQ ID NO: 45336 - DNA, 600 bp, Chicken  19866894285067_1
gtagaggtcagattgcagtgcagaggcatagtggtcacaatgggcaaagatgggcaaagatgcacctggaaggctctggacatcaggtctctaagcaacgtttattgatctcatggtctccttaggactctagtgctttcttctgatggcctcctatcacccagtaacattcagctccttgtcctttctgttcattcgtaggctttgtttttccattatgtgacccatttctgtcagaatgagggaaagcttgtaggaacttccccagataactcttggagcacagacagactttccagkaaacagtaaaaggcctgcaattgccatcccatggtgtgccaaaatttcagcccaagacttttgtaggtatttttgtccccttacagcccttcagctgccagaggagcttgttctcagagaagttctyccccggctggatgcagggcctgtagagcctatttatcctgttccattcctttcatctggcacacagtacctgcaggagggcaggaatctgaaaacaggctttgttatgacagagatctccagatcttgtagcagatgttgctggtgagaagcaatcttgttccagccaaacct

SEQ ID NO: 45337 - DNA, 600 bp, Chicken  19866894285067_2
ctctagtgctttcttctgatggcctcctatcacccagtaacattcagctccttgtcctttctgttcattcgtaggctttgtttttccattatgtgacccatttctgtcagaatgagggaaagcttgtaggaacttccccagataactcttggagcacagacagactttccagkaaacagtaaaaggcctgcaattgccatcccatggtgtgccaaaatttcagcccaagacttttgtaggtatttttgtccccttacagcccttcagctgccagaggagcttgttctcagagaagttctyccccggctggatgcagggcctgtagagcctatttatcctgttccattcctttcatctggcacacagtacctgcaggagggcaggaatctgaaaacaggctttgttatgacagagatctccagatcttgtagcagatgttgctggtgagaagcaatcttgttccagccaaaccttcttcagctccgctgaggagatgcatagagaatctcataaggctacaggctttggcaagcaatctcagcatttaccagtgccagcgactctctatatttcttttctgaaggctatatagagcaaatg

SEQ ID NO: 45338 - DNA, 600 bp, Chicken  19866894285071_1
taggaggctgcagaggaaaagctggtggaagctctcactgctgtctcgtatataaccaaatcttaaagcatatattacttctaccgatgtaccgatgctgctttattttgggcttcaggctgtgagtacatgtgaatgtctcagtgtgttggccagaagcatgattttacaggcatttcaggaccacagtgcatactttctgacccactgaggttatcgtttccaacaaatagccatggttcaaaggctgccacggcactcttgtgagcagagcagtccaagcagtactcttgctacgtmataggaaaacaccagaaagtacagtgagtcacagcttgattttaataacagaagaccagggagaagaagctaattttaatttaaataaattagatcactgagaaggctgattggggattatttagaaaaagtagtcatagaaaatggcatattaaatttttctaggtcacatttcgggaatgaagttttaaaagagacattagggtttttattcatactatttgtgaacatttccatggggatataaaaacaaagcatctaggaatacctagcttcttatttaggcacttaggggaaaaa

SEQ ID NO: 45339 - DNA, 600 bp, Chicken  19866894285081_1
cagtagaacctgatatcttgcaaacagaagagaagattgaattagaaactcattgtctgtagctactgaggaaaagacgaatttgtaaggaatccagcttccttacaaaatgcccaaaatacattcctaaaagttttattctcttgtctattggaggcacatctcactgggcattacattaactacagaagtgtaagttcaaatatatattgcaatttgtttaaatgaagactgtttctctgttttggaaagtgtgtagtttgttcttcttggagtgtttggtcagtggaaaacactgtmatttctggacttttcagtgtaagtcaaaatcctgttatatccttagacttgaaaaaatgggagcaaagttctagagatgttatgtaaccctcctgattgggcttctgatacctatgaacttctgccttcttaattgtaaagtcttgacaatgctaggtataaggagagtatattctaaatggattgcaatcaatgataaagaaagagaattttaatttcttaaatgctcaggaaaaaaattctcacttattttgcactgtaagtatataaaatgagtaacatccaaatacttaacatatt

SEQ ID NO: 45340 - DNA, 600 bp, Chicken  19866894285082_1
tctacactaaatgctattagaaatatgctggacactctgagaaaaatgccttataatggagtaaccagcaactagattcagggtggcaaatcctaccataccctcctctgttcttcagaaatagcttccaattcttacaaagaaatttaaaatgtaagggagatatgagatccagatccctgagattcaaagcaaagtgaccagcagccaacacattccaaggtgagaaacaagcatgcattgcaggcaggatcccataaaactcaaaggtaatttgtggtgatgttggttatatatttsagcatgtttttttattctggcccctgcttgggatgtttaactgagagagcaccaggtgcactctagccatgggtaacgtattcccaaactattacgtcaaagcagcagctcgttacagctttcattacattgcttttattgttatttgcagtgaaagaagaaaagtcagtgaaactgcacgagtcactgctagaaggcttctttgtgcctgaagtcctacacgggttaggaggacctataaagaaggacaaaggctgggatcacacattcccactgagattacaatttccaatacagtta

SEQ ID NO: 45341 - DNA, 599 bp, Chicken  19866894285087_1
  misc_feature (1)..(176): n is any nucleotide
nnnnnnnnnnnnnnnnnnnnnnnnnnnnnnnnnnnnnnnnnnnnnnnnnnnnnnnnnnnnnnnnnnnnnnnnnnnnnnnnnnnnnnnnnnnnnnnnnnnnnnnnnnnnnnnnnnnnnnnnnnnnnnnnnnnnnnnnnnnnnnnnnnnnnnnnnnnnnnnnnnnnnnnnnnnnnnnncccaagactggaggcttgcctggagctgtgcccaaaatgcaggacccaacacttggccctactgaaacgcaaacagtttactgtggcccatcgatccagggtccctctggagtgccttaccccsccaggcagatcagcactcccttcccaaattggtgtcrtctgcaaacttactgagggtgtgctcaattcccttgtcaagatcattaataaagacattaaatagaagcaattgcagcactgagccctggaggacaccactcttgactggccgccaactggatttaactccactgaccgcaactattwgggtccggccatccttggtcactgcattaccctctgtgttgtccaacaggggatggagattctaccaaacccctctcttgctgytggtgtatttatagaaatatttactgtcgt

SEQ ID NO: 45342 - DNA, 599 bp, Chicken  19866894285087_2
  misc_feature (1)..(139): n is any nucleotide
nnnnnnnnnnnnnnnnnnnnnnnnnnnnnnnnnnnnnnnnnnnnnnnnnnnnnnnnnnnnnnnnnnnnnnnnnnnnnnnnnnnnnnnnnnnnnnnnnnnnnnnnnnnnnnnnnnnnnnnnnnnnnnnnnnnnnnnnnnncccaagactggaggcttgcctggagctgtgcccaaaatgcaggacccaacacttggccctactgaaacgcaaacagtttactgtggcccatcgatccagggtccctctggagtgccttaccccsccaggcagatcagcactcccttcccaaattggtgtcrtctgcaaacttactgagggtgtgctcaattcccttgtcaagatcattaataaagacattaaatagaagcaattgcagcactgagccctggaggacaccactcttgactggccgccaactggatttaactccactgaccgcaactattwgggtccggccatccttggtcactgcattaccctctgtgttgtccaacaggggatggagattctaccaaacccctctcttgctgytggtgtatttatagaaatatttactgtcgtctttcaccttagtgaccaaggtcagttctagctgggc

SEQ ID NO: 45343 - DNA, 600 bp, Chicken  19866894285087_3
ggaggcttgcctggagctgtgcccaaaatgcaggacccaacacttggccctactgaaacgcaaacagtttactgtggcccatcgatccagggtccctctggagtgccttaccccsccaggcagatcagcactcccttcccaaattggtgtcrtctgcaaacttactgagggtgtgctcaattcccttgtcaagatcattaataaagacattaaatagaagcaattgcagcactgagccctggaggacaccactcttgactggccgccaactggatttaactccactgaccgcaactattwgggtccggccatccttggtcactgcattaccctctgtgttgtccaacaggggatggagattctaccaaacccctctcttgctgytggtgtatttatagaaatatttactgtcgtctttcaccttagtgaccaaggtcagttctagctgggctttggcttttttaattttctccctgcacagttcactacatacttgtaatcgtcataagttgcttgcccactctcccaaagaccataagcattctttttgttcctgagttccagccaaaggtctctgttcagccagaccagcctccttgc

SEQ ID NO: 45344 - DNA, 600 bp, Chicken  19866894285087_4
atccagggtccctctggagtgccttaccccsccaggcagatcagcactcccttcccaaattggtgtcrtctgcaaacttactgagggtgtgctcaattcccttgtcaagatcattaataaagacattaaatagaagcaattgcagcactgagccctggaggacaccactcttgactggccgccaactggatttaactccactgaccgcaactattwgggtccggccatccttggtcactgcattaccctctgtgttgtccaacaggggatggagattctaccaaacccctctcttgctgytggtgtatttatagaaatatttactgtcgtctttcaccttagtgaccaaggtcagttctagctgggctttggcttttttaattttctccctgcacagttcactacatacttgtaatcgtcataagttgcttgcccactctcccaaagaccataagcattctttttgttcctgagttccagccaaaggtctctgttcagccagaccagcctccttgcccgtcggctcatcttccatgacttgggagggtcagctaaggctgttggttaagggttctatgtccaggtggaggctggtaatga

SEQ ID NO: 45345 - DNA, 600 bp, Chicken  19866894285088_1
ggttatttcacgccctcaaatagtcctccatttctgtgcatataattttggggcaaagcctctgtatttatgacattcgctaagagaagcagaaggagccatgacctgaaatgagggatctcaagctgcaagtctcagtcccatgggggtcagccctccaggagttttgttccaagacctttcaaggtctggagacacctgcagccagcacagtgcctctcttacacgcagtttttacttggaaatagggatgcggtgtctcacaagggcacaatccacctaattattatctttcctccrccttttttcatccttaaattatgctttaatgcatcctgtgaattcagatcccagttyagcaaggtgctaagtctttgaacaccgagagccctcctgaagagyctcaacattaagccccatcccacaggacagatactaattacctctcacagcttccatgaaagatgcagcattttacctccgatccagagcatgtccataaatatcagcccagctcgcagacaagcgatgggaaatctaaatcacagagctggccagggctcacccatggttcatctttgtacaggagagagctgggcc

SEQ ID NO: 45346 - DNA, 600 bp, Chicken  19866894285088_2
gcctctgtatttatgacattcgctaagagaagcagaaggagccatgacctgaaatgagggatctcaagctgcaagtctcagtcccatgggggtcagccctccaggagttttgttccaagacctttcaaggtctggagacacctgcagccagcacagtgcctctcttacacgcagtttttacttggaaatagggatgcggtgtctcacaagggcacaatccacctaattattatctttcctccrccttttttcatccttaaattatgctttaatgcatcctgtgaattcagatcccagttyagcaaggtgctaagtctttgaacaccgagagccctcctgaagagyctcaacattaagccccatcccacaggacagatactaattacctctcacagcttccatgaaagatgcagcattttacctccgatccagagcatgtccataaatatcagcccagctcgcagacaagcgatgggaaatctaaatcacagagctggccagggctcacccatggttcatctttgtacaggagagagctgggccgaaatctctgcagggcaggaggtccagaggacattatcgcgtggtgcaaacagcagg

SEQ ID NO: 45347 - DNA, 600 bp, Chicken  19866894285088_3
gacctgaaatgagggatctcaagctgcaagtctcagtcccatgggggtcagccctccaggagttttgttccaagacctttcaaggtctggagacacctgcagccagcacagtgcctctcttacacgcagtttttacttggaaatagggatgcggtgtctcacaagggcacaatccacctaattattatctttcctccrccttttttcatccttaaattatgctttaatgcatcctgtgaattcagatcccagttyagcaaggtgctaagtctttgaacaccgagagccctcctgaagagyctcaacattaagccccatcccacaggacagatactaattacctctcacagcttccatgaaagatgcagcattttacctccgatccagagcatgtccataaatatcagcccagctcgcagacaagcgatgggaaatctaaatcacagagctggccagggctcacccatggttcatctttgtacaggagagagctgggccgaaatctctgcagggcaggaggtccagaggacattatcgcgtggtgcaaacagcagggaaaaatatcccaccaagatgctcaggataatcccatctcctctg

SEQ ID NO: 45348 - DNA, 600 bp, Chicken  19866894285088_4
gcgatgggaaatctaaatcacagagctggccagggctcacccatggttcatctttgtacaggagagagctgggccgaaatctctgcagggcaggaggtccagaggacattatcgcgtggtgcaaacagcagggaaaaatatcccaccaagatgctcaggataatcccatctcctctggattcccagggaagctcatagagagctcctgagtgcatcggtaaatttaactgcaaaacctaggaggatttccaacccttcaatgtttttccagcgttttgtttgccttttattatctcaaayagatattttttttatggcactgctcctttagagagagccatcctgtacaacacccagaaaagccctttgtgagccaggtgggctstgtgctggaagagaagacatctccccacctctacaaccccacggcaggcgctcacctgagggctccttagtgaaaagcggcgaagttatcaaacaccaaccaagtgtggtgtcttcagtgcatgtctacagatcccaaaggtcccagctcccagccgtgctgccttaccacttagtgtgatgggctcttggtcaaacctcggagagatgacacct

SEQ ID NO: 45349 - DNA, 600 bp, Chicken  19866894285088_5
cagggcaggaggtccagaggacattatcgcgtggtgcaaacagcagggaaaaatatcccaccaagatgctcaggataatcccatctcctctggattcccagggaagctcatagagagctcctgagtgcatcggtaaatttaactgcaaaacctaggaggatttccaacccttcaatgtttttccagcgttttgtttgccttttattatctcaaayagatattttttttatggcactgctcctttagagagagccatcctgtacaacacccagaaaagccctttgtgagccaggtgggctstgtgctggaagagaagacatctccccacctctacaaccccacggcaggcgctcacctgagggctccttagtgaaaagcggcgaagttatcaaacaccaaccaagtgtggtgtcttcagtgcatgtctacagatcccaaaggtcccagctcccagccgtgctgccttaccacttagtgtgatgggctcttggtcaaacctcggagagatgacacctggaggaaagggaaaggtgctgggagtgggcatacatgggtgtccccgaggaagagtgggatgatacggagtggcaaagcttcaac

SEQ ID NO: 45350 - DNA, 599 bp, Chicken  19866894285099_1
  misc_feature (1)..(137): n is any nucleotide
nnnnnnnnnnnnnnnnnnnnnnnnnnnnnnnnnnnnnnnnnnnnnnnnnnnnnnnnnnnnnnnnnnnnnnnnnnnnnnnnnnnnnnnnnnnnnnnnnnnnnnnnnnnnnnnnnnnnnnnnnnnnnnnnnnnnnnnnnagcaggtccaggttcatcataaggtgacggtggagctgagttttctggcacttacccctgctgtgtctgttcaggtataaaccccacgggtgaagtcggggcgttttatgaaaatccttcccgactacgagcacatggagtacagagatgtttacacctgccrtacgtaccctgctggttgatgcttcctgcwctgagcacacacgagatgctgcatggagtgtgacgttgctttgagcaaattgttttggggtggatgttgggacagcgtggagggcttcatgagcagttcatagaatcmtagaatggcctgggwtgaaaaggaccacagtgctcatccagttccaaccccctgctatgtgcagggtcgccaaccagcagcccaggctgcccagagccacatccagcctggccttgaatgcctgcagggatggggcagcctctttgggcaacctgttccag

SEQ ID NO: 45351 - DNA, 599 bp, Chicken  19866894285099_2
  misc_feature (1)..(107): n is any nucleotide
nnnnnnnnnnnnnnnnnnnnnnnnnnnnnnnnnnnnnnnnnnnnnnnnnnnnnnnnnnnnnnnnnnnnnnnnnnnnnnnnnnnnnnnnnnnnnnnnnnnnnnnnnnnagcaggtccaggttcatcataaggtgacggtggagctgagttttctggcacttacccctgctgtgtctgttcaggtataaaccccacgggtgaagtcggggcgttttatgaaaatccttcccgactacgagcacatggagtacagagatgtttacacctgccrtacgtaccctgctggttgatgcttcctgcwctgagcacacacgagatgctgcatggagtgtgacgttgctttgagcaaattgttttggggtggatgttgggacagcgtggagggcttcatgagcagttcatagaatcmtagaatggcctgggwtgaaaaggaccacagtgctcatccagttccaaccccctgctatgtgcagggtcgccaaccagcagcccaggctgcccagagccacatccagcctggccttgaatgcctgcagggatggggcagcctctttgggcaacctgttccagttcttgtggagcagtctgacccttcagagt

SEQ ID NO: 45352 - DNA, 600 bp, Chicken  19866894285099_3
gcaggtccaggttcatcataaggtgacggtggagctgagttttctggcacttacccctgctgtgtctgttcaggtataaaccccacgggtgaagtcggggcgttttatgaaaatccttcccgactacgagcacatggagtacagagatgtttacacctgccrtacgtaccctgctggttgatgcttcctgcwctgagcacacacgagatgctgcatggagtgtgacgttgctttgagcaaattgttttggggtggatgttgggacagcgtggagggcttcatgagcagttcatagaatcmtagaatggcctgggwtgaaaaggaccacagtgctcatccagttccaaccccctgctatgtgcagggtcgccaaccagcagcccaggctgcccagagccacatccagcctggccttgaatgcctgcagggatggggcagcctctttgggcaacctgttccagttcttgtggagcagtctgacccttcagagtgacaatgccaggaggtatatgggctggtctttctttgaagtgctttgaaatgttgagggaagagcagcaaaacacttcagtctgatgctcagccttctgcaggtgttga

SEQ ID NO: 45353 - DNA, 600 bp, Chicken  19866894285099_4
tcataaggtgacggtggagctgagttttctggcacttacccctgctgtgtctgttcaggtataaaccccacgggtgaagtcggggcgttttatgaaaatccttcccgactacgagcacatggagtacagagatgtttacacctgccrtacgtaccctgctggttgatgcttcctgcwctgagcacacacgagatgctgcatggagtgtgacgttgctttgagcaaattgttttggggtggatgttgggacagcgtggagggcttcatgagcagttcatagaatcmtagaatggcctgggwtgaaaaggaccacagtgctcatccagttccaaccccctgctatgtgcagggtcgccaaccagcagcccaggctgcccagagccacatccagcctggccttgaatgcctgcagggatggggcagcctctttgggcaacctgttccagttcttgtggagcagtctgacccttcagagtgacaatgccaggaggtatatgggctggtctttctttgaagtgctttgaaatgttgagggaagagcagcaaaacacttcagtctgatgctcagccttctgcaggtgttgaggggagcgctgatca

SEQ ID NO: 45354 - DNA, 600 bp, Chicken  19866894285103_1
ccagattttgttgcaactgatagctgatgggctgatagcacagccctgccaaaggtgatctaagcaccgctggggctgtgcacaggaatgcagtaaataactagcaggtagctgggaaagtgatgctgttaattgcactaaaatctgggagattggttgttccctcggtagcatgaatcaggataatcacacagaaggagaagaaaacatttcagcagccatccaggctgagcgcagcccctgtgctgagctgaagtgctctgagctgagctcatttcatttgcagcctcccagctcctrtgtctgtaccgagctgcttgtgcacggttaattggagcatcttcaggaggtgttgctgcagtgtgactgaggtgtcccacatgcaggctggcacttccctgaaagctgagcagctgaaagcactttggagcgctggtgtctctgcaatctgttgctcctgatctctgctgagaagcagacctgttgagcagcggggcggccctatgggaggaaatgcatggtgtcggcacctggagaaggggtcccctcacctgcaagagctgctggtagggatgggcagcgctgctggggcctcctggc

SEQ ID NO: 45355 - DNA, 600 bp, Chicken  19866894285105_1
ttttgtctaagttgcaaaggaattaggcagccctccttattttggatcgctattagttctgtatttctaattcagcgagtctttaacacctttttaagcttgaggagcactaagccagatcggttcttctctaatcacgtcagcttatttctgatttccagaaattacaaggaacacagccagagaaaagggcagggtctggtgtaaacatgcaacgctgtgctgtccctgacccagtcaccccactctcacctccctctttgcacagccgggaagtcctttcctccagtgggagccagmagggaagsaaaggcagcacctggcccaaaagccatacccagtgtgcttgatactcaaggcacctgagaatatctgctcccaacccaatccctgcaagcagatgagctgctcagactgacagatagctcgctaaccccagcctcctcctcctcttttttttttggttttagagcaatacagattaaaggaagcgtgattccatttggtatccacttgcaaattagccatagttccataacgttactgttagtgagtatttttctcccgcctcttcctttttccttcttaccctattcaacc

SEQ ID NO: 45356 - DNA, 600 bp, Chicken  19866894285105_2
aagttgcaaaggaattaggcagccctccttattttggatcgctattagttctgtatttctaattcagcgagtctttaacacctttttaagcttgaggagcactaagccagatcggttcttctctaatcacgtcagcttatttctgatttccagaaattacaaggaacacagccagagaaaagggcagggtctggtgtaaacatgcaacgctgtgctgtccctgacccagtcaccccactctcacctccctctttgcacagccgggaagtcctttcctccagtgggagccagmagggaagsaaaggcagcacctggcccaaaagccatacccagtgtgcttgatactcaaggcacctgagaatatctgctcccaacccaatccctgcaagcagatgagctgctcagactgacagatagctcgctaaccccagcctcctcctcctcttttttttttggttttagagcaatacagattaaaggaagcgtgattccatttggtatccacttgcaaattagccatagttccataacgttactgttagtgagtatttttctcccgcctcttcctttttccttcttaccctattcaacccagctatt

SEQ ID NO: 45357 - DNA, 419 bp, Chicken  19866894285105_3
ggcacctgagaatatctgctcccaacccaatccctgcaagcagatgagctgctcagactgacagatagctcgctaaccccagcctcctcctcctcttttttttttggttttagagcaatacagattaaaggaagcgtgattccatttggtatccacttgcaaattagccatagttccataacgttactgttagtgagtatttttctcccgcctcttcctttttccttcttaccctattcaacccagctatttaaaacagaataataatacatacatatgcatggtaaccgtatatacacrtctatgtaacaattaaaaccaatcccaaactatgcccaaatgtatatttctccctgtctcataagtcctttaatatctgattaatgtctatttactccttcccccagagtatttagcgt

SEQ ID NO: 45358 - DNA, 600 bp, Chicken  19866894285110_1
acagttgtacagggatcatgacttcagctgtgctctgctctctcctttgtggttgactgtgtcccctgcagcacttgtctgataagagatgatttcttgcatactgaacacttgtgcacagtaggattctgttatatacttctgactctttgacaccatctgcccactaaagtggttttaatgggtttctactgagccaggctgtactacagccctgacagcatgctccctgttcttaaaaaataaacaaaatctctttagaaaatctatctgtgaacattggcttctgcaggaaaaatratgattacataccacttgatattctggaatcagaaatatctcttctcgatgagcgttaaaataggaaaatgactgatagtgctaggttggattgttgttgtttttaatgatcttattaagcattattccatgtcccatttttttgtcagatactactgtccatttacagaaatgcaataatttcacctcattggcattctttttttatgaaagctgaggaatgcagcagttggctatggtgatttaggtggcagggtacccgctggctttctgtaacctttggaaaattacttcaattct

SEQ ID NO: 45359 - DNA, 600 bp, Chicken  19866894285111_1
attaaaaatcctttaccataaaaacggaatacatgacaaaaggagatagtcctttaaactcaaaaacttgaatgatatcttaagaatatatggaaaaaaaaatcttctacccagcatacatagatggatcacgactctgttcagagcaagtcaaaagaaaagcacagagagaatagatagaggagcatgtacttgaagtacagatgcagtgactcataagtatttcttaaagagagaaccagcagagttccaagctagtagcaacagcctgtaagaatataatagagacatcctgccacrgagatggagattttcatctactctgcatatgaggaaaatggagaacagaggaacatggggaagtagcctgtcaaaaattgtagagcacaagtaaagaggagaaaaaaatgcaaagcactaaacagtagcagtttaagtataggtcatgtgcagttcctactcatacatatcatataccaaacctttcactcaaagaagtcactgattttagcaaaccaaaggcttgtatcattgtgacatggggrctcatyccttaataaaagaacccaagaatctacccatgccaaagaaaataagata

SEQ ID NO: 45360 - DNA, 600 bp, Chicken  19866894285111_2
agttccaagctagtagcaacagcctgtaagaatataatagagacatcctgccacrgagatggagattttcatctactctgcatatgaggaaaatggagaacagaggaacatggggaagtagcctgtcaaaaattgtagagcacaagtaaagaggagaaaaaaatgcaaagcactaaacagtagcagtttaagtataggtcatgtgcagttcctactcatacatatcatataccaaacctttcactcaaagaagtcactgattttagcaaaccaaaggcttgtatcattgtgacatggggrctcatyccttaataaaagaacccaagaatctacccatgccaaagaaaataagataaacattttaagactgacagctaaataatggatgacatgctgggatgcatcatacataaaaagcaggttcaagctcagatccctgctacgcamtatggcagggactggggagcaagaaggaagctgcacacttggactaagtatgaaaacacagtgtaccagttgtgagcctttatctgatcaaggttgtcagacagaagagtgtactctctataaacaaaaacaaattgatggtatttcatcttc

SEQ ID NO: 45361 - DNA, 600 bp, Chicken  19866894285111_3
aagctagtagcaacagcctgtaagaatataatagagacatcctgccacrgagatggagattttcatctactctgcatatgaggaaaatggagaacagaggaacatggggaagtagcctgtcaaaaattgtagagcacaagtaaagaggagaaaaaaatgcaaagcactaaacagtagcagtttaagtataggtcatgtgcagttcctactcatacatatcatataccaaacctttcactcaaagaagtcactgattttagcaaaccaaaggcttgtatcattgtgacatggggrctcatyccttaataaaagaacccaagaatctacccatgccaaagaaaataagataaacattttaagactgacagctaaataatggatgacatgctgggatgcatcatacataaaaagcaggttcaagctcagatccctgctacgcamtatggcagggactggggagcaagaaggaagctgcacacttggactaagtatgaaaacacagtgtaccagttgtgagcctttatctgatcaaggttgtcagacagaagagtgtactctctataaacaaaaacaaattgatggtatttcatcttctactgc

SEQ ID NO: 45362 - DNA, 600 bp, Chicken  19866894285111_4
aaagaggagaaaaaaatgcaaagcactaaacagtagcagtttaagtataggtcatgtgcagttcctactcatacatatcatataccaaacctttcactcaaagaagtcactgattttagcaaaccaaaggcttgtatcattgtgacatggggrctcatyccttaataaaagaacccaagaatctacccatgccaaagaaaataagataaacattttaagactgacagctaaataatggatgacatgctgggatgcatcatacataaaaagcaggttcaagctcagatccctgctacgcamtatggcagggactggggagcaagaaggaagctgcacacttggactaagtatgaaaacacagtgtaccagttgtgagcctttatctgatcaaggttgtcagacagaagagtgtactctctataaacaaaaacaaattgatggtatttcatcttctactgccaaaatcctatataagcttaataggtctacataaagcaaattgtgtcttacctctgggagtcttcccctgaaaagcacgtaggaccaacactactaatcaaacaaggtttcaaaaacactgagacattgacttgacaaact

SEQ ID NO: 45363 - DNA, 600 bp, Chicken  19866894285112_1
aaaaaaacactgttgtcatcaaacagaaagattttgagaacttctgcctttcctcggctgtaatggtaattagaaattaagcacagtgcattaagaaagtaacaaaaaaacccaaaacatcattaacctccatccataagcttcagctctagagagctgaaactatgatttctttagcatcccattatctatttatccattttcattgaataccgtaaatgcagtcatcataaaatctttgtttcaaaacttgctaggtagaatacatgaatgctgtacaatatgataccacaatggggrcttgactgccacattagccagtagaatgtcaatatatcttttatttctgtcttttcacccttgagaagtctgcataaaagtctgcataggttgcagacacgtaactctgatgctacagaaaagcccctctgcatttttaggctgactgggatattcagcccatattagaaaatgcaaacactagaacaccaccagctccatctgagttagtaacaggcatgatgctactagtttcttaggcaggggaaagacttgtttctcttaggttctgtcagtcttcttggaaagaccaacctaaaa

SEQ ID NO: 45364 - DNA, 599 bp, Chicken  19866894285113_1
  misc_feature (1)..(126): n is any nucleotide
nnnnnnnnnnnnnnnnnnnnnnnnnnnnnnnnnnnnnnnnnnnnnnnnnnnnnnnnnnnnnnnnnnnnnnnnnnnnnnnnnnnnnnnnnnnnnnnnnnnnnnnnnnnnnnnnnnnnnnnnnnnnnntatccttctttaggctctgaatttggcttataaaagcagaaataggtatttagatgcatgataatttaaacagacatttaagcttaagtgctatgatttgacttttgtgctcagtaagctctgtgacttttctgttatcctgaacactaggctgttgtgtactatatgtcttgygtgttaccataattggattagaagattattattataagaaatgtttctgcccatcactccttgcaacttgtagagcaacttccatttcatacaggagcatagcataccttccagatatttctgtctctctgagacgcagaaccaaagaaggcattctcttccctgactggtttgtagcagaacaattgctcagcttgataaagatgcttcatacaagaactacatacgaccaaactgtgatgtacaaggatggttgccaagaagttgatttgcatccagcatttaaattttatttttat

SEQ ID NO: 45365 - DNA, 600 bp, Chicken  19866894285123_1
aaattagcaagtcatcatacaatccaaatacagaatgggtttgtttggttttataacagttttagttacatttgttgattattatgctcatattttatagcataaaaaaagaactacaaaaacatgataataatatctaacctttaagaatggaagtattatattgttttccaattgaatttaaatgcctaaatcaaatgaatctactttgcacaatgagcttgactgtaacaaagcaggatgctttcaggaataatgtttttttgtgtgtgcgtgattttttttatctccctatttggratgcaactataatgtcacagcattccttgaactacttgtttttcgttttttggttttttttctgtgacgaagttcaaaatgctaaatgctactttaccaatttttatgatgacataggtttacaatcagcagcatagtgttttcttcaaataataatcttagatctttctgggctgaaatattggaaataaacatctgatctcattaaatttctggggaaaaaaaacaaaatcagatctccatcagagagaatcagattaaaagaacaacctgtaccctgatttctatgataaatatcag

SEQ ID NO: 45366 - DNA, 600 bp, Chicken  19866894285124_1
ccaacgagtgcccctagccagggttttaaccttggctgtgcatggcatacgtgaccacccagcattcgcagggactctgcaccaaaacaatacccaatttgaggtcctgctcagctgaagcgtttgttcccagggtgatgcgaggtcagcggcacgtaaagtttgcccaaggacatcagcccacacagatgagctcaaggttccctcaccagccacagcacagcatgctcagcacccctcctctgcccaaggatggccagcagagccccagacatgctgcagtctgccggcctggcgagsagacaagcagatgccagaaggcatggcttcgtgctccgcagcagaggtgccagtggctgctgccttcaccttttgctcagcgctggatcccacagcagtgcaagccccagcctgcagtgcaggatcagaggtgcacagcagcccactcagcagcacccaacgctcacctcagcrgggctgcgggctccgcttgagcatcacccactacaaacagtggctgaggacagagactgcagggatctgaagatgatctcccacacggcagccaccacgcctggctcgtgggctgcaaggaggttg

SEQ ID NO: 45367 - DNA, 600 bp, Chicken  19866894285124_2
atcagcccacacagatgagctcaaggttccctcaccagccacagcacagcatgctcagcacccctcctctgcccaaggatggccagcagagccccagacatgctgcagtctgccggcctggcgagsagacaagcagatgccagaaggcatggcttcgtgctccgcagcagaggtgccagtggctgctgccttcaccttttgctcagcgctggatcccacagcagtgcaagccccagcctgcagtgcaggatcagaggtgcacagcagcccactcagcagcacccaacgctcacctcagcrgggctgcgggctccgcttgagcatcacccactacaaacagtggctgaggacagagactgcagggatctgaagatgatctcccacacggcagccaccacgcctggctcgtgggctgcaaggaggttgyaccgctgtgcattgaccccatccaggcagctcctcaccgcctgcagccatcagcactgcccccctgcctgcagggagctgatgcaacaggacaccgaaattatttgtcagaagcacaaagcggggcaggaaggagaaacaaaacaaacaagaaagcaggtaccaatttctccc

SEQ ID NO: 45368 - DNA, 600 bp, Chicken  19866894285124_3
gacaagcagatgccagaaggcatggcttcgtgctccgcagcagaggtgccagtggctgctgccttcaccttttgctcagcgctggatcccacagcagtgcaagccccagcctgcagtgcaggatcagaggtgcacagcagcccactcagcagcacccaacgctcacctcagcrgggctgcgggctccgcttgagcatcacccactacaaacagtggctgaggacagagactgcagggatctgaagatgatctcccacacggcagccaccacgcctggctcgtgggctgcaaggaggttgyaccgctgtgcattgaccccatccaggcagctcctcaccgcctgcagccatcagcactgcccccctgcctgcagggagctgatgcaacaggacaccgaaattatttgtcagaagcacaaagcggggcaggaaggagaaacaaaacaaacaagaaagcaggtaccaatttctcccaccaaaacaggtccattacaagcacccattccaggctgctgtctccaggtgttaccaccagtgatctcagcctgtctgagcaaggaccaggagccttactagtatgagaaagcacgaagcaagctta

SEQ ID NO: 45369 - DNA, 600 bp, Chicken  19866894285126_1
agctggcagggaaagaacatttgctcacacagacagctttgatatttagccaaaatggcaagaaattgtatgaaagacaagacaaacaaacagttttgggaatgtcatgtattttgaaattgtcggcagtagctgaatgttaattcaaaatatactttcctgaaatcatttctatgaagtatagaagcgttttgtttatcaattctggattgaaaagaaaaacttttggttgataatctggatgagcaataatctaatgaatcactatgtctgtctatcacagaccaagtcaacaggtgygtgtgmtcgataggaaaagctgtactctttgcagaggactgggagccactctagcagttgtggagwtgtagtgagagaattaactggaggagcatgatgctatacagcaattcctaccacaatgcactctgcagctgagtatcttagagggaactgcacattctaacaaattaaatgatacagtcatcaccctcttttttatggatggagaaaggagcaaacagaaagctgaaatggcttgcccagggggtgctcagtcaatgcacagcagagaaggggagagaaatccaatctgattat

SEQ ID NO: 45370 - DNA, 600 bp, Chicken  19866894285126_2
cagggaaagaacatttgctcacacagacagctttgatatttagccaaaatggcaagaaattgtatgaaagacaagacaaacaaacagttttgggaatgtcatgtattttgaaattgtcggcagtagctgaatgttaattcaaaatatactttcctgaaatcatttctatgaagtatagaagcgttttgtttatcaattctggattgaaaagaaaaacttttggttgataatctggatgagcaataatctaatgaatcactatgtctgtctatcacagaccaagtcaacaggtgygtgtgmtcgataggaaaagctgtactctttgcagaggactgggagccactctagcagttgtggagwtgtagtgagagaattaactggaggagcatgatgctatacagcaattcctaccacaatgcactctgcagctgagtatcttagagggaactgcacattctaacaaattaaatgatacagtcatcaccctcttttttatggatggagaaaggagcaaacagaaagctgaaatggcttgcccagggggtgctcagtcaatgcacagcagagaaggggagagaaatccaatctgattatgaatcc

SEQ ID NO: 45371 - DNA, 600 bp, Chicken  19866894285126_3
tgtatgaaagacaagacaaacaaacagttttgggaatgtcatgtattttgaaattgtcggcagtagctgaatgttaattcaaaatatactttcctgaaatcatttctatgaagtatagaagcgttttgtttatcaattctggattgaaaagaaaaacttttggttgataatctggatgagcaataatctaatgaatcactatgtctgtctatcacagaccaagtcaacaggtgygtgtgmtcgataggaaaagctgtactctttgcagaggactgggagccactctagcagttgtggagwtgtagtgagagaattaactggaggagcatgatgctatacagcaattcctaccacaatgcactctgcagctgagtatcttagagggaactgcacattctaacaaattaaatgatacagtcatcaccctcttttttatggatggagaaaggagcaaacagaaagctgaaatggcttgcccagggggtgctcagtcaatgcacagcagagaaggggagagaaatccaatctgattatgaatccagtactatagccacgagatcattcttctcatcctgacacaaatgctgtttaacaagaaaa

SEQ ID NO: 45372 - DNA, 600 bp, Chicken  19866894285126_4
gtacagaatggcaatatcttaagactccaaatgggaatgagggccgcagattctaacgcacagattcagttatgatagcaatagagtccaactggcatgtagtaaggtggtgttttctttgggcaatgagatatcaagcccagaaaattgtctggttttagaaaatattgttttgtgtttgttatgggataccaacagaagatcagatctgaaataagattgtaattttggggctgtgtctgatactgaggatgtgttctattgggacagctttttatggaggacaaatgattcctcccwaaacctcatgaaacccatctctgttgtgtcatctcactgaggaaaatgctggctttccaaagggatacaatgcacagctgaagtgctcaactcmcagatcatgcctggccacccagtagtggtaaatccccggtgtgcatctccaggggctcttccttcctcggacagtgctaatgttcgtgctttggttaatgtcacagctggagagtttcactattgctctgagaatcattaaccaccttgttgtgatttttagctctcattcccaggaggccatgttgtattgaacagctgctcctg

SEQ ID NO: 45373 - DNA, 600 bp, Chicken  19866894285126_5
gcatgtagtaaggtggtgttttctttgggcaatgagatatcaagcccagaaaattgtctggttttagaaaatattgttttgtgtttgttatgggataccaacagaagatcagatctgaaataagattgtaattttggggctgtgtctgatactgaggatgtgttctattgggacagctttttatggaggacaaatgattcctcccaaaacctcatgaaacccatctctgttgtgtcatctcactgaggaaaatgctggctttccaaagggatacaatgcacagctgaagtgctcaactcmcagatcatgcctggccacccagtagtggtaaatccccggtgtgcatctccaggggctcttccttcctcggacagtgctaatgttcgtgctttggttaatgtcacagctggagagtttcactattgctctgagaatcattaaccaccttgttgtgatttttagctctcattcccaggaggccatgttgtattgaacagctgctcctggctcctgcacccctcaggagggccatattccaatttttggtagggccataactgtattttgtttctgcagagggttttttttttttgctagacc

SEQ ID NO: 45374 - DNA, 599 bp, Chicken  19866894285128_1
  misc_feature (1)..(203): n is any nucleotide
nnnnnnnnnnnnnnnnnnnnnnnnnnnnnnnnnnnnnnnnnnnnnnnnnnnnnnnnnnnnnnnnnnnnnnnnnnnnnnnnnnnnnnnnnnnnnnnnnnnnnnnnnnnnnnnnnnnnnnnnnnnnnnnnnnnnnnnnnnnnnnnnnnnnnnnnnnnnnnnnnnnnnnnnnnnnnnnnnnnnnnnnnnnnnnnnnnnnnnnnnnngtgtgtgaggagtggctgaggaccctgggtttgctcagcccagagcggaggagctgaggggaggcctcatggcggctgcagctcctcacagggagcsgaggggcagcgctgagctctgctctgtgtgacagcgacagggcccgagggaacggcatggagctgtgtcaggggaggggcagctggggttagggacaggggctgctcccgagggcggtgggcatggaacagcctgcccagggcagtgggcacggccccaagtgctggagttcaaggagcattggaacattgctctcagacacagggtttggattttgggtgttgctgtgtggagtcaggggttgtgcycaatgatccttatgagtcctttccaacttgagagattctacaactctatga

SEQ ID NO: 45375 - DNA, 600 bp, Chicken  19866894285128_2
cggaggagctgaggggaggcctcatggcggctgcagctcctcacagggagcsgaggggcagcgctgagctctgctctgtgtgacagcgacagggcccgagggaacggcatggagctgtgtcaggggaggggcagctggggttagggacaggggctgctcccgagggcggtgggcatggaacagcctgcccagggcagtgggcacggccccaagtgctggagttcaaggagcattggaacattgctctcagacacagggtttggattttgggtgttgctgtgtggagtcaggggttgtgcycaatgatccttatgagtcctttccaacttgagagattctacaactctatgaaatgtgctgctgatrtcaaagggaagagtaggggccccttggcacgaaggcagatggggacgcaaaggcctgggcatttacagagcaatcaatgcttcacactgtggtctggtttcttttctgtacttgaatgacagaaaatacgccttctgccaaaacctgcttgctttgctgtgcacattcactaaaaactgtcttttcatatgcaagtgtctttctctgcctgaggacctgatatatccagagggt

SEQ ID NO: 45376 - DNA, 600 bp, Chicken  19866894285128_3
agctctgctctgtgtgacagcgacagggcccgagggaacggcatggagctgtgtcaggggaggggcagctggggttagggacaggggctgctcccgagggcggtgggcatggaacagcctgcccagggcagtgggcacggccccaagtgctggagttcaaggagcattggaacattgctctcagacacagggtttggattttgggtgttgctgtgtggagtcaggggttgtgcycaatgatccttatgagtcctttccaacttgagagattctacaactctatgaaatgtgctgctgatrtcaaagggaagagtaggggccccttggcacgaaggcagatggggacgcaaaggcctgggcatttacagagcaatcaatgcttcacactgtggtctggtttcttttctgtacttgaatgacagaaaatacgccttctgccaaaacctgcttgctttgctgtgcacattcactaaaaactgtcttttcatatgcaagtgtctttctctgcctgaggacctgatatatccagagggttagcatttaggaaatgatttcatttgcattaggcaacttgcagaagcaaatgagacacagtgataa

SEQ ID NO: 45377 - DNA, 600 bp, Chicken  19866894285130_1
tgagtatagaatagttaatccatgaaaaccctgacaagactaaatcaagaaacctatgtacaaagaatatccaaataataatatatgcagtacatccacagaaccataagaactagctacagatttaatacaaatataacaggaataaagaagaatatttacagttaactggaaatcttttgcaaaagtgagtctattaagtccttctcattctctaaaataaagaagtactgcacacttagacctttccgtttatatagtaatccttcttgctgtaggtagcaattgaagagcaacacyagagaatcagaaccccattactgtgccaaagtcagttcatggtataagttttcactcatggacacaagaacagttcaaactcatgagtatgctggctacacccagctctctagaggatacggtatgtatggaaggttattgacctagtaagcaggagagtattcaggcactcatctacatcataattttcctgtagtccacttagctcactgctgagtacaggccagagccagtacatgctgcaagaatgcagagaataaacaataggacagacttgatttactctgttcttgcaagcca

SEQ ID NO: 45378 - DNA, 599 bp, Chicken  19866894285133_1
  misc_feature (1)..(18): n is any nucleotide
nnnnnnnnnnnnnnnnnnaaaaagctggacaggatgctagaataaaacttaatttcatgtaaacatgggcaacagctatagaaatatcaatgcaggaactaacaattctttttgaagcacttggcatcaggaactctttcatttgctggaaatctgttcagacagtacatacaggattaggtcttctataaccctcttccatgtccaccagagagcaggaattttcatactgttccaagggaaggaaatgttaaatacttgctgtctggtttacatggtgcaaaccaaaaagtactcttrcarttgcagactagctcttcttattttcataagaagtttatgaacctgaatctgatttcaatttctgatttcaatttctgtacactgcttgctagactctcaccggttgctcaaaattgtaaccactgtattgaataaaagctgctgcttccatttgcccaggtaaaacacacacacctttacccatctagcaatctcgccacagtagctgttcataggtgaaaatcaggtcacttgctatccttgccattgctttcatcatctgctttggtacatgcttttctctgtacaaatagcac

SEQ ID NO: 45379 - DNA, 599 bp, Chicken  19866894285133_2
  misc_feature (1)..(15): n is any nucleotide
nnnnnnnnnnnnnnnaaaaagctggacaggatgctagaataaaacttaatttcatgtaaacatgggcaacagctatagaaatatcaatgcaggaactaacaattctttttgaagcacttggcatcaggaactctttcatttgctggaaatctgttcagacagtacatacaggattaggtcttctataaccctcttccatgtccaccagagagcaggaattttcatactgttccaagggaaggaaatgttaaatacttgctgtctggtttacatggtgcaaaccaaaaagtactcttrcarttgcagactagctcttcttattttcataagaagtttatgaacctgaatctgatttcaatttctgatttcaatttctgtacactgcttgctagactctcaccggttgctcaaaattgtaaccactgtattgaataaaagctgctgcttccatttgcccaggtaaaacacacacacctttacccatctagcaatctcgccacagtagctgttcataggtgaaaatcaggtcacttgctatccttgccattgctttcatcatctgctttggtacatgcttttctctgtacaaatagcacaat

SEQ ID NO: 45380 - DNA, 372 bp, Chicken  19866894285133_3
attgctttcatcatctgctttggtacatgcttttctctgtacaaatagcacaatggaaacagaaaacattatagagaatgtagtttttgtgcactcagtaatatgattaaaaaaataaaaaaggagaatgatgacaagataggcagttaaataaagaaaaaagtcagtggaattttctgctgcatgcaaggaaattgttgaaaagtcttccattttgtaaaggtaaaaatatctgaaattaatttctacaaaaaatcctaaaagttttttcttttcaccctttaggacctacatattttwaaagktttttttttttttttaatgtaagcataactttttaaaacatctttattttttttctctttctacagt

SEQ ID NO: 45381 - DNA, 367 bp, Chicken  19866894285133_4
tttcatcatctgctttggtacatgcttttctctgtacaaatagcacaatggaaacagaaaacattatagagaatgtagtttttgtgcactcagtaatatgattaaaaaaataaaaaaggagaatgatgacaagataggcagttaaataaagaaaaaagtcagtggaattttctgctgcatgcaaggaaattgttgaaaagtcttccattttgtaaaggtaaaaatatctgaaattaatttctacaaaaaatcctaaaagttttttcttttcaccctttaggacctacatattttwaaagktttttttttttttttaatgtaagcataactttttaaaacatctttattttttttctctttctacagt

SEQ ID NO: 45382 - DNA, 600 bp, Chicken  19866894285134_1
aagctgttagcagaaaaataattctgccctgactgtctggccagggaggcagaggcccaggatagggtgggaagctgtttgaagtctcggaaagcctcagggtaactccagcattacctgttgcgtgcaagcgagtgtatcagctacacatctttgtcagactcatcagactacgcgtccacccaactgggactgctcccgacaagctgtgctgactttcctaaatacccaattcaacagttcaccactttgtcagctatattcccagttccctttcgaaacctggtcgtcttctccccrccctcagctcccttcactgcctcagagcagggaaacttaagatcctgggccctttccagttcaaacacatttgcaaaagccacagagcgctcactacactgctattccacaggctggccatttccagcaacttctgtgctgtcctgaaagaacagaagagggcagagaggagccactagaaacaagtacagaacacgcctgaaatccatagactcaaattccagagtgggaaaagcctgttgtatatgaaatactcctgtccccgcacacatggggatgacctaacagcacacaaaatgc

SEQ ID NO: 45383 - DNA, 600 bp, Chicken  19866894285139_1
caaagcctttctctttaagaagatcctgatgggacgcatcacatacatcactgtacctgcctgatcctgctttgttacaacctcctctggtgtgtctttggaaataataattccgatccaggtggacttcagctaattgtagtatttcagaagctttcaatctatatccttaagatcattagacatgcaaacaccaacactcggtcatatttagtgcttcacactgctagcattgcaggaactgtttaagaaagcaatgaccctgacaaggagctctaccttcaccttgagtgcccactycacctccagaaaatgccactcattagtatacagtccctctcaaacatgcaacattgtaattacaggacatgataaaaagccacaaatattcaagcaggccagcaaggaggaaggtacctgcttggagtgaagaatagaacttgaaaacaatctgaaactgttaaatcagatcttgaaacagaaggctgtatttaataaaagccagagctttggcaacttgcaagtaaataaataaatacaatcagtgttagatccaggactttaggtgcgtgatttttagaaacacaagatttgattcag

SEQ ID NO: 45384 - DNA, 600 bp, Chicken  19866894285150_1
aaaggaatctatttcacctttgattttgaataggtgaactagaagatccttgtttgtacatcattaccattaaatcatagtcttaatatcttgggtctgaaaaaaaattctcaaaataataaagtaagaatataactaactgtctgaaagaagtttaggaagtaagagatctgaatgtaaagaatttaaaagatcccaggcaacctcaatttacaccattattctgtacactaaaatgcaaaaaatgtgttaatatcagcacctgtacaaatgttcgattatataaattatttctctttscatttggatgraaaagataactccttatcactgctaccatattaatcatatttgtattctgtgactagttattctatttctctcccagctttaagtatctccattggaacagtgatccttttaaataagaaaaacattcttttgcctgcccttcaaagcatggagtattctttgtaatttctaatgcaggtcatggggggttctctaacttagaagtaacatctttttatatttgtatatctcaaacattgctcagtatactatggatgacatactcagattatatataaagtgacatcc

SEQ ID NO: 45385 - DNA, 600 bp, Chicken  19866894285150_2
tttcacctttgattttgaataggtgaactagaagatccttgtttgtacatcattaccattaaatcatagtcttaatatcttgggtctgaaaaaaaattctcaaaataataaagtaagaatataactaactgtctgaaagaagtttaggaagtaagagatctgaatgtaaagaatttaaaagatcccaggcaacctcaatttacaccattattctgtacactaaaatgcaaaaaatgtgttaatatcagcacctgtacaaatgttcgattatataaattatttctctttscatttggatgraaaagataactccttatcactgctaccatattaatcatatttgtattctgtgactagttattctatttctctcccagctttaagtatctccattggaacagtgatccttttaaataagaaaaacattcttttgcctgcccttcaaagcatggagtattctttgtaatttctaatgcaggtcatggggggttctctaacttagaagtaacatctttttatatttgtatatctcaaacattgctcagtatactatggatgacatactcagattatatataaagtgacatccggaataaggaa

SEQ ID NO: 45386 - DNA, 599 bp, Chicken  19866894285153_1
  misc_feature (1)..(100): n is any nucleotide
nnnnnnnnnnnnnnnnnnnnnnnnnnnnnnnnnnnnnnnnnnnnnnnnnnnnnnnnnnnnnnnnnnnnnnnnnnnnnnnnnnnnnnnnnnnnnnnnnnnnccacatacatttcatataggaagatataaaattgcagaacactccaacaaccatagaaacagaacattttggcgttacaaaaatgttttgctttgtaaaaactgggctttctttgcttttcttttctttttttccaaactacattcaagacaggtaatttctaacgtttgcctgaaaaataacatgtcttgtttaaaaaygttctgatgaaaaacgtccagtaggtcctacagttgggttcattccatggtcacaatccctattgatggcggtgagattagttacactcggtaagagatacaatgaagaactaacaaacatgcttgctgttctgtgcttgtcccagctttcctctgctgcaggcagcctgctgtgctctgatctcttggtaggggggaacgcagtatttgttattggtttagcaccaaccatggagcctcatttcttacgcagcctcccaggacaatcctgggttcttttgcacagatgaaatatggct

SEQ ID NO: 45387 - DNA, 600 bp, Chicken  19866894285158_1
gttcacctcttctcgtctgtagggctggcagggggtacgtcatgctctgccactccttctggcatctgtccttcatatggcagtcatgaaaacctgccacagcacttacgcaacttccattaacgcaattaagctaaataccgaaagactagcagccagactctgagtctgcagagatcctcccgaggcacagaagtatctcagctttctgagctgctgagtgttatctctcagcagcaatgcaccagcgtttagctgggtcatgggcacccccaaccagctgggcacggggaaggacgycggtgtctggatgtcctacttaagagcagtaggatgggaggtgacggcctcaagttgtgccaggaggggttcaggttggatattaggaaacgtttcttgttagaaagagtggtgatgcattggaacaggctgcccagggaggcagtggagtcactgagaaaagggtagatgtgacactaacatggtctagagcagtcacaggcatgggctcatgggtgcactcgatggtttttagtgctctttccaaccttcatgtgtctaaaggtgccccagcggtgcctgcagtgcttgggtgaggct

SEQ ID NO: 45388 - DNA, 600 bp, Chicken  19866894285161_1
atatgggatattctctgcacatatagtatttgaaatggttgataaactctactgtatttaaaacacattaatctgccataaggttaattttgtctgtgatctatatatgtttggacaggaaaggtactccttttagttctgcatcttttacaagttttaggttttcttgcatgctttctgatagaagcaaagagccttgtcaaaatgctttgctgaaacgcatactaccatgagcaggcaacagttcccaagcaaagacataaagtatctatcctcgtaataaaacttttgttgcaaaayttttctgatgtatcagttctagaccagtttagtgttaccccttcgttacctcagtgttaccccaaatacacccctttcattgatactgattttagcattttaatactaattacttagcaagagctgatggtttaagctgggcatcactactctcatgcccacacagctgcgtggcaccaacttaatctacaatgatttttttttttcccccaggggtgtcaaactgcttacatattgtgggtcaagcacctaataaaggctgcttcatgcacaaatatctcctgcaattttgcataaagg

SEQ ID NO: 45389 - DNA, 600 bp, Chicken  19866894285163_1
acatccttggtacaggctggaaatcacattatgggttgctgctttatgtgggattagctagccaagaggaagatcttatagtcagaagaaaaaaagggaaagctggtgctctgtgatgtccagacaaacttttctggcctggcattactgcttagtgttataaatgttgagagaatgctgtgtatgtctagcctactttaggcatggaaggcttttcatttcttttaatccacctgcttactaaagaaagagtaaagttgcataaaacatgtgcagccagtgaaggaactttggaatagrtctcttgaatctgggtgtgtgttcatttcattactagactaatatctgctgaagtgatcatagcacaagatttagggacctatggctcattttcttgatcttccactttagtaggtgatttatgttgtcttggttttatagcttaaaaatttaattaatttcttaataaatgggattgtcttgacaattgataccagaattgtatggagaaaaataatgtttcttcacatgttactgggcatttttcactttattttattccttaagacaggtgcaaatcaagagtttttgcatgctcaa

SEQ ID NO: 45390 - DNA, 600 bp, Chicken  19866894285165_1
cagctgcagctgtacaccccacaggcaccttatggcagcacggccccatgctcagagcttccctgtcatgtctgcttccagcaggaaagcggagagcattacttctgcaattttgcatcctactgtaacactgtgcagtgtgggcacgcagaacatggagcacacatccctccttccctcagcacttcagcacacagcagctgcaatgcacagagtgctttggtagcatcaaatgtagcagggagctacagagctaaggaggacgatagccgaggtagtgaagacaggtgagacggggtsaactctgatctctagagcttgttaatgctacactttttgctttggtgggtttctgcacgctgagtttatgagactgaagcacagtggcagaataaatcgaggctgtgtgcacaactatatgtcaggattgctgagtgcattcatcagtggattgtaatgaaaaggaaattacaatagaattgaatttgtgcagtggagtgccactgtaccttagccacaactccccgactccaggagggatctgggatgaatttggcctcccagctgaaacgtgcagtaggtaagctttaatagcagcca

SEQ ID NO: 45391 - DNA, 600 bp, Chicken  19866894285169_1
attgtgtcaacacgtatgtaatttactggtacacagctcagctttccatcctttgcagcaatgatctcattgttactactgctgctggttggatcacagtgcaataatgcaactaaaaagttcccagcaagctgatgcatgtagatatagaccaagataaactggtgatatttgccaaaaagtgcattttctttggcagtagcccctagttgaagccctccacagatatgagctagaatcctagcttcatagaagtgcaaacattttattctgttttaagctagtttcccttatggcagrattgcagagcaggcctgtgtctggagaaatgaaggctgaaaatctatcatgagggctcataggatggtgcacacataacctaaatggattatccttttgcaaaatatactgccatgtgtactccccagcggtgctattctgcagataatgttttcactgatgttattcccactgcgtaggcactgtttttcctttaggctcacctcctgcttgaataagctccaaggacctttgtcagttgtaaagtctaagactgttctgtgggaaaattctggcactggtgttgctgagtatggaggg

SEQ ID NO: 45392 - DNA, 600 bp, Chicken  19866894285169_2
tgttattcccactgcgtaggcactgtttttcctttaggctcacctcctgcttgaataagctccaaggacctttgtcagttgtaaagtctaagactgttctgtgggaaaattctggcactggtgttgctgagtatggaggggtagaaacccatggatgtcatctttctatttccatcactccaaatcaatcactggatatcctggtatagggaggtttctgtgcagctgtaaaatatttggagtgagccacacaataacactagcaactcctttttccttcctgtcccttttgtagtaatrattctctcaattttgtagtctgtccttatctagattcacttcttgaggtacctttgattcttttgtgactgtggtctattgagtagcatacaggtatctcctttctcagttttagctacaatgaaaatttaatctatgaaagcttataacttttctgaaatctttcttgcagactgtggtctctctttttgaggaaaggtgcagattctttagtttaaattgaatttaaaactttaactgtaaattttaatctattcccccatagattttaaaggttttacttccccaggctctgtggct

SEQ ID NO: 45393 - DNA, 547 bp, Chicken  19866894285169_3
tttgattcttttgtgactgtggtctattgagtagcatacaggtatctcctttctcagttttagctacaatgaaaatttaatctatgaaagcttataacttttctgaaatctttcttgcagactgtggtctctctttttgaggaaaggtgcagattctttagtttaaattgaatttaaaactttaactgtaaattttaatctattcccccatagattttaaaggttttacttccccaggctctgtggctgtggtaattctgtggaagctgtagttataactctttataaatggtgaaaatrtatcactgtagcaaaaagcattgtgtgctataaaatatcttcacatcttggttttgagtgtcctgctaaaatgttctttattagtagtagcattattatacagctgtaaaagcttttttaaaggctgctttaaaaaatcttttccttgagcagtcatttctggggttatgtgcctctgataaaaataactcataaccctccaactatttcagaacccattttctgttttagatcagcagcccaggca

SEQ ID NO: 45394 - DNA, 600 bp, Chicken  19866894285172_1
cagtgttatgtgctgcaactgtcaagtttattcttgaccttcttgaaggtggacaccagtcattttcgtgtagctcaccatcaggcaaggagaaggcagacaggaattctgagccaaatggtttggctgttgcaaaggattcagattactgtttataaaatactgtgactaattgtactggaaatagtggttgcctttggctggaggcattatcaacatagttatatggatactggaagatatggagagggggggaaaaagctcatgttgaaatacctgcaattgtttccctttttaatycttaaataagatttcttttttgcgaatgtgatcttgatsttaaattaaaattcattacactttttttccygtctctgaccttaaatacccttcagagaaggcactctgtatgtctgtcgctcatcgtgtaacctctaacagcatttctgaattatatgctgcattggtaacaaatgtattcatttgtacataattatgaaagtcaatttataaactcaacatagaatattaattaccctcaaggttagctacaaatttcagcactaggtgtgttttggtatttttgttaggaatttttga

SEQ ID NO: 45395 - DNA, 565 bp, Chicken  19866894285172_2
ttcttgaaggtggacaccagtcattttcgtgtagctcaccatcaggcaaggagaaggcagacaggaattctgagccaaatggtttggctgttgcaaaggattcagattactgtttataaaatactgtgactaattgtactggaaatagtggttgcctttggctggaggcattatcaacatagttatatggatactggaagatatggagagggggggaaaaagctcatgttgaaatacctgcaattgtttccctttttaatycttaaataagatttcttttttgcgaatgtgatcttgatsttaaattaaaattcattacactttttttccygtctctgaccttaaatacccttcagagaaggcactctgtatgtctgtcgctcatcgtgtaacctctaacagcatttctgaattatatgctgcattggtaacaaatgtattcatttgtacataattatgaaagtcaatttataaactcaacatagaatattaattaccctcaaggttagctacaaatttcagcactaggtgtgttttggtatttttgttaggaatttttgatgag

SEQ ID NO: 45396 - DNA, 534 bp, Chicken  19866894285172_3
tagctcaccatcaggcaaggagaaggcagacaggaattctgagccaaatggtttggctgttgcaaaggattcagattactgtttataaaatactgtgactaattgtactggaaatagtggttgcctttggctggaggcattatcaacatagttatatggatactggaagatatggagagggggggaaaaagctcatgttgaaatacctgcaattgtttccctttttaatycttaaataagatttcttttttgcgaatgtgatcttgatsttaaattaaaattcattacactttttttccygtctctgaccttaaatacccttcagagaaggcactctgtatgtctgtcgctcatcgtgtaacctctaacagcatttctgaattatatgctgcattggtaacaaatgtattcatttgtacataattatgaaagtcaatttataaactcaacatagaatattaattaccctcaaggttagctacaaatttcagcactaggtgtgttttggtatttttgttaggaatttttgatgag

SEQ ID NO: 45397 - DNA, 536 bp, Chicken  19866894285176_1
cttgaagaagctgggcccaaagcagggactttataaagcacttgttccctttgctgcaggcagaaagctgagagcagcactgtatgagtcccattttctccaaggccaaaacaccacaccagcagcagtgacgaccatgctctcaatgtccccacgcatcacttccccatcaaaactactgccatcaccaaagagaaattctgcagcaaggctgctggtgttcacactgcttgggcatcacagcacgacctcttcatcccaaggaacaccaattcatggtagtcatttcctatgagatgrcagcagctcccaaatccctctcagcatttcccccagcacctcgaagccccatacaaacactgcaccactccctggcctcctgcatgacccatgttttgtgtacacacacctcccagagactgactccatcagcagatccagctcagctctgcaccttgctgtaagtcccccgacttcccaccaattgcagatcattcctcacgttaaggctgcgtgaagggttttgcagggtagta

SEQ ID NO: 45398 - DNA, 600 bp, Chicken  19866894285178_1
agctcattctacatgactgatatgaatgaaaacataattctgattgaattatgcctttgtttttatatacatcaggaagttcacacctactgtcattcataccatccataagctatttgtgattgtaagccaatcgttctgctgcgttgtgtgctgtacataagctgaccctgcctgtaaataatcctccatatgtagaaaaccttcttatgaagaaatattgcctgaagatgtgagtgaaatctcagacttgtggaaatcagcagcaacagctccttcagttctgtggaaacccagatwtcaccctctccagcctgttttttcacagataatggctatggttggattggagagttgctggtggggctgtgctgagctgagtgtcacctcttctcttttggtccactttgtgttgtaccagagtgtttgatttgtagtttctttgatgtagagctgagcattcgggatattttggctttgtgagaggcttctattttttcaataaaagtcagactaattttaaagctggcggtatgtctttccctcttaacaccccagcaagtgcagggtaagcagatataaataaataaatacatgttc

SEQ ID NO: 45399 - DNA, 600 bp, Chicken  19866894285183_1
ttctacttaaaagtgcttgtactcattttagtatagacttctttctgtctctatgcttaaattattccattaaacataggagcacagtgacaatcttctatagttgcaaattctgcatagtgctattctaccgtggactggtcagactaacggagtatggaactcatcttctccaaaacatttaccattaactttgtgaaaaatgtcaaacaaagaagaggcagccacctctatatatctacttgacatgcagatttcagttataattatacttggccaggtctacatggtctggaaagygtgtaaagatccaagggaattacctttgaatactaacatattgcctttgaaaagttcacaatctatttttgcagaaggaattatgagtcaatttcttccttctccccacaatattttgaaatctaatcaaggactacaatcatttcttttaattagtaatgtaaaattaggaggaatttacaacagtcgtttactgtttttgtgttttgctttgttttttttttttcagtcattttggaaaatgacattaaaggaaatatcatgttggataaaatgcatatttaaaaaacctatgacatc

SEQ ID NO: 45400 - DNA, 557 bp, Chicken  19866894285185_1
aacaatatgagtgttcagcactaaaggtacccaatatgacatacagaaattcttactgcttttcttccagaggttaacttctgttctgaaaatctttagtccacttgttcgtttgtttaatcagtttcacagtgcagcatttgatgcagttattacacatgggatgtagaaaaagcataaaataagaagtttgaagttttttatgtgtgacaagattgagtcttcatggaaagaaaaaaaaagtagagcatggaactccatttttttgtgtcacttcagaacaccacaaagcattttccktctctaaagccagtgctttgacaactgaaatgttgctaattccatctgtccaaataccagcattagcaacccagcattttaacaaagagagctgacatgctgatctgcgcagggaacaaagaacacctacatttgttcctccaaaggttgcctttttggcattcaggatgaatcttgcagcactgtaagcttttcattgcccattaagtgagattgcctatctcttttcacaggcactgtccggttttaggcagatc

SEQ ID NO: 45401 - DNA, 600 bp, Chicken  19866894285189_1
tattcatgttaaatgctccaagttacttagaaaaaaaaaagtatctgcagcattgagaagttttgcagtgagctgaggaacttgcaggcccttttcaagcccatcttctgtaattcttaagtaccagcagttttaagccccattaagacttgagagtgcctgatttcttatactgaagactaggctgaattaaaatttattcctaatctgatcaaatgtactagttcaaatgctggctgctccgttagtgttgagcaatgctatcctgattcatgtatgattctttttgaacataactgycttcagtacagtagcttctctgtcatattgaaaactcaattctctgctgtctttgtatatgatttttctcatatgaatttgcataatgcaaaaacattaaagcacataacattaaaagctcagctggctaaagtcacgctgaggttcactgtcatgttattaaatgcaatttgttacaatcttgcaccctcaaataattgtaataataaactgaactaatgagatagaaattgtattttgtccagaagaaatattttaataggtacataacacattacttttaaaggcagaatgcctttt

SEQ ID NO: 45402 - DNA, 600 bp, Chicken  19866894285197_1
tctattaaaaactttcatgaagatggagtgtgcttttggtatctctgcagaatactgcatgctctgctgagacctacaccagctgtgctttgtgtcttgtgcagcacctaggaaggctggaatataaatccaacagctgcactcccctgtgcacaatgccagtgcatgcgcagcaccgtacatcagtgcagctgtgggtcactgtgggatgacgtgacgatgagagacgtgtatagaaaatgagtgaagataagcagtcactgagtgccggtctatgtccacagtgtgtctcagacttcytgcaatcatgcagctcagacagctcaggctcccagtatgccatgtgctgcctgcagcagttcgggtgagaaccagtttggatgagaactggagcaggaaaaaatcccatagctggtgaggggaggttggtattctgctcctgctgatatatcctgtaggcagctggggtagcttcatctccagaggacctacagtgattgtttgtgaatgcctggtgctccattatgtgccacatgaagcattccaacctgcaccagaacatccactagcttacaaccaggagtgagttccccggtcatg

SEQ ID NO: 45403 - DNA, 600 bp, Chicken  19866894285197_2
aacatccactagcttacaaccaggagtgagttccccggtcatgctggcagctggaaaatggctgcagtaagggagcactgacaaagagcacggataacctgtgtgtttgtgctgatttctgcctgagcctgttgtgttcgcagggaaatactgagagtggctgtgttttttgctataatctcacagaccagcttctgattctcaagacagactcaaaaagaaagggaaggcgaggcccccagaactgtgttctcttctgcatacactcagcttactttaactgctgaatgatcccaaaaygttatagcaaagccatacacctcaccttgctggttgcccaggttctgctcactgccctcagtgctcattcatttattgttctctcaggtccttcctctgtttgacagcacacaggagcaatgactttcctaccacatgctcagcactggaagtgaccacagcagcactgacatacgtcrtttttaccctcattgatggaggcagtgcccaccaaactcagtgcaggtctctgattttcatgggtgtacaatcggtacaatgggtgtaaaatacaatcagtattttaatgttttcctacca

SEQ ID NO: 45404 - DNA, 600 bp, Chicken  19866894285197_3
ctcacagaccagcttctgattctcaagacagactcaaaaagaaagggaaggcgaggcccccagaactgtgttctcttctgcatacactcagcttactttaactgctgaatgatcccaaaaygttatagcaaagccatacacctcaccttgctggttgcccaggttctgctcactgccctcagtgctcattcatttattgttctctcaggtccttcctctgtttgacagcacacaggagcaatgactttcctaccacatgctcagcactggaagtgaccacagcagcactgacatacgtcrtttttaccctcattgatggaggcagtgcccaccaaactcagtgcaggtctctgattttcatgggtgtacaatcggtacaatgggtgtaaaatacaatcagtattttaatgttttcctaccaaaatggtgactcaatgcagctggatgggggaactgaactctcagtgcttctgccacgatggcacaaaaactgagtattttgtcattatttgaagatgcttttgttctctttgaagcagaggatgggagggctttctccagagcatcctaaaaagagttcatttcattagcactctgttg

SEQ ID NO: 45405 - DNA, 600 bp, Chicken  19866894285198_1
tacggtcaggcttatgcactgttttcttatatatcaccctccaacagttcaagaattaattagtatttcacccatattaaaggtatcatctatatcctgaaggcaaagtatggtgtttggcagcctcttcaatcacttcaaattcttctctgcatactgtataaataacctgtggaaaaagtgctcttttctctgagtagctgcagatacaaatggcacattgtctacaacttcacaatcttcattcttcacagattaccccatttgaacattatgtgaaggttaataaatattttttaygtgtcctataatcttacaacaaaactgacatcagattagcattcattctgttatttcagtgctttatgtatttcttagtttgcctggtttgcagagtgatcactctggatacaggaaggtttggtttgtcctgctggaagtaaatatttttaagcatacatattaaaaatgggaggacaaattataagcagttgcagtgatgctgtttggatgcattacgtatatgatgattagctcttcagatcattaactgttgtaagcagatgtaataactttcttgtttacttccttaagttcctg

SEQ ID NO: 45406 - DNA, 600 bp, Chicken  19866894285212_1
cctccaccgcgaggctgagcgctccgtctaaaggtgctcttcccagctctgaccctttctccgctgccgggccgtgtgaggtgcatgagaggggaacctgtggcagcagtgagcagcagcagagtgagccggtgcgcgtcctggacatggtggccaagctggagtcggagtgcctgcggcggcagagcgagcgggatggaggcagcctctcacgcaacaacagcttccgcaggaacgtggggcgggtgcttctggccagcagcacgcagcctggtgctgagcctggcagagcctctgcgrgcagcgtgggccggggtgaggagctgggggcagcgggggctggctgcggagcgaggtgtggggatgccgggctgtgggatggcgctgcctctgctcccgcagccgttccctccagggttggaggctcacgtggggaacgccggttcaggacttgctcatgctgtgttggccattgcggctggaaggggtgatgctgaaaggcgggttgagcctcccagagctctgccagccctgtgtccggctgtagctggggtgccagtggattccttgccgagcaagagcgcgactgctgattgtaca

SEQ ID NO: 45407 - DNA, 600 bp, Chicken  19866894285214_1
ctcatgggtggaacagaaacagatcccacttctctagaggaggagaacccgttgcagttatacggtatggagtgggtggatgaaaaagaggcacagtaaacactattagtaggtataaggggaaggcttagcacactgaaataaaatcctctttatctggaggcagcaaagaatggattaatctgctgtggtaccaaagacgggataataacacaaaagagtttgaaagagggatctcttgggctacctgaggcaagaggaaatttaactggtgacctcagcaagggtattttcacttgrggaagggaacctgaagctgaatttcaaggtgtccagggagtgtttaaggaaatattatctggtaggaaggaagttccaaggaaaatgcaaaaaasagttgtgctaatatttttggggaagagagtgtacaatgtgtgtctgtgtgwgtgcttatgttggagtctagaggaagggtcagcaagagacagacgaaaaccaagggtagagaaagcagggagttaaggggcaggaaggagctagaaaatgcatgagagatacttttaacttggcagattggggcaaagatgaggaaggtgggat

SEQ ID NO: 45408 - DNA, 600 bp, Chicken  19866894285214_2
gtaaacactattagtaggtataaggggaaggcttagcacactgaaataaaatcctctttatctggaggcagcaaagaatggattaatctgctgtggtaccaaagacgggataataacacaaaagagtttgaaagagggatctcttgggctacctgaggcaagaggaaatttaactggtgacctcagcaagggtattttcacttgrggaagggaacctgaagctgaatttcaaggtgtccagggagtgtttaaggaaatattatctggtaggaaggaagttccaaggaaaatgcaaaaaasagttgtgctaatatttttggggaagagagtgtacaatgtgtgtctgtgtgwgtgcttatgttggagtctagaggaagggtcagcaagagacagacgaaaaccaagggtagagaaagcagggagttaaggggcaggaaggagctagaaaatgcatgagagatacttttaacttggcagattggggcaaagatgaggaaggtgggatagaagagaaggaaaatattctagcttgtattatctccttaaataaatattggctggagaattgagagtttaagatcagcaagggcaggacaaggc

SEQ ID NO: 45409 - DNA, 600 bp, Chicken  19866894285214_3
tcctctttatctggaggcagcaaagaatggattaatctgctgtggtaccaaagacgggataataacacaaaagagtttgaaagagggatctcttgggctacctgaggcaagaggaaatttaactggtgacctcagcaagggtattttcacttgrggaagggaacctgaagctgaatttcaaggtgtccagggagtgtttaaggaaatattatctggtaggaaggaagttccaaggaaaatgcaaaaaasagttgtgctaatatttttggggaagagagtgtacaatgtgtgtctgtgtgwgtgcttatgttggagtctagaggaagggtcagcaagagacagacgaaaaccaagggtagagaaagcagggagttaaggggcaggaaggagctagaaaatgcatgagagatacttttaacttggcagattggggcaaagatgaggaaggtgggatagaagagaaggaaaatattctagcttgtattatctccttaaataaatattggctggagaattgagagtttaagatcagcaagggcaggacaaggctgatgtgtactgggtttgaaggcctatcttgcaatgatgttagctgctggc

SEQ ID NO: 45410 - DNA, 600 bp, Chicken  19866894285214_4
aaccaagggtagagaaagcagggagttaaggggcaggaaggagctagaaaatgcatgagagatacttttaacttggcagattggggcaaagatgaggaaggtgggatagaagagaaggaaaatattctagcttgtattatctccttaaataaatattggctggagaattgagagtttaagatcagcaagggcaggacaaggctgatgtgtactgggtttgaaggcctatcttgcaatgatgttagctgctggccaaacagatactaaatcattttgttggaagagaaatttcaggaagtrttttccacatatttttgacattatgttctgttytaggttcgctcttctggtgagattgttcaagtgaaggtcttgggtgttttagctcttctcgatgagggagagacagattggaagataattgccattggtgtggatgacccagaagcccagaaaatccatggtaagcatttttacctttcttaatgcaagttatatcagcaacttgaatggttgtacctgagcttaagaagatacagacagccaagagacaaaagtcttcttttctcattgtttaaattcaaatgcttccttcaaagc

SEQ ID NO: 45411 - DNA, 600 bp, Chicken  19866894285214_5
caggaaggagctagaaaatgcatgagagatacttttaacttggcagattggggcaaagatgaggaaggtgggatagaagagaaggaaaatattctagcttgtattatctccttaaataaatattggctggagaattgagagtttaagatcagcaagggcaggacaaggctgatgtgtactgggtttgaaggcctatcttgcaatgatgttagctgctggccaaacagatactaaatcattttgttggaagagaaatttcaggaagtrttttccacatatttttgacattatgttctgttytaggttcgctcttctggtgagattgttcaagtgaaggtcttgggtgttttagctcttctcgatgagggagagacagattggaagataattgccattggtgtggatgacccagaagcccagaaaatccatggtaagcatttttacctttcttaatgcaagttatatcagcaacttgaatggttgtacctgagcttaagaagatacagacagccaagagacaaaagtcttcttttctcattgtttaaattcaaatgcttccttcaaagcaggcatgcatgttttcttactgaactttcggaa

SEQ ID NO: 45412 - DNA, 600 bp, Chicken  19866894285217_1
tttatattgtaagtattagggcggatctacctcatgttcatgaggcttaaggaatgtagcatctctacattagccatcagagaacaagttggcagacacgcacataaaaaaaaaaagaagtcttctctaaaatgaattccaagtctctagcaaataaatcaactcatgcatgttaattgacatgggactttagaggtgcttatgttgatgcaagtgtacaatgatgcaccctgttctaaattaccttttttaagttcccaaattacggaaaatactactgtgcatccagaaatgcgaacraagttctaacataccttcatttgcaatacaaagtccaagaaagcctttacctttatatgtgaagcattgatgtagcctgtgttattttctttggtcggcaccagctccactcggttctcctcataaggaacaacttccctgatgcggttgcgctcagtgttttcaggcaaggcagcagtggtgaagatcccatctgcctttttctttggaatctgctcatattctgtaaacaccatcccctcttccaacttcctcttcaagattttgcacttggatttaacagaaagtaacaccaattga

SEQ ID NO: 45413 - DNA, 600 bp, Chicken  19866894285219_1
tgtcagatgctccctgctgaaggcaaagggaatcacccacactgggactggaaggtactgagattgttttactccaataggtatttcccttcaaagagaattcctcttttagtcaaagttatgacctttgtgagaaatatttacccatcccgaaatgcaaacaaaaacaacagaggaaaaaaaaaaaaaaaaaacaagccaccaagaactctaagcggttcaccttgaaaacaaatagctcattcattgttacctaaagacaacaaaagagttgcactacagaagctatttatagagcayrcttcacctcttcccttcagcagcagcagtttgagatttgagttttattgttttcacagcagcacatgaccagtaattcaagctctactgatattttcaatattccgaatatttgcattccagaaaaaaaaaagtgtgtacaaatcaaaatcaatgggagcactaagacaacataccaaatgaagctctttcacaaacgaattttccttctgttgagcattcaccacaacgatgatttaacagccaaaaaccagcgctttcagctgctgtacttttggaaggggactgtgccaaagtgcc

SEQ ID NO: 45414 - DNA, 600 bp, Chicken  19866894285219_2
gtcagatgctccctgctgaaggcaaagggaatcacccacactgggactggaaggtactgagattgttttactccaataggtatttcccttcaaagagaattcctcttttagtcaaagttatgacctttgtgagaaatatttacccatcccgaaatgcaaacaaaaacaacagaggaaaaaaaaaaaaaaaaaacaagccaccaagaactctaagcggttcaccttgaaaacaaatagctcattcattgttacctaaagacaacaaaagagttgcactacagaagctatttatagagcayrcttcacctcttcccttcagcagcagcagtttgagatttgagttttattgttttcacagcagcacatgaccagtaattcaagctctactgatattttcaatattccgaatatttgcattccagaaaaaaaaaagtgtgtacaaatcaaaatcaatgggagcactaagacaacataccaaatgaagctctttcacaaacgaattttccttctgttgagcattcaccacaacgatgatttaacagccaaaaaccagcgctttcagctgctgtacttttggaaggggactgtgccaaagtgcca

SEQ ID NO: 45415 - DNA, 600 bp, Chicken  19866894285220_1
aatgcgcaagtgagtcaaagacctgctttgcctgtgtgtacattcatgaacttatttgttaatttcagagttcctgagcacttcccaaaggagtatttatgactacacatctgccatgtaccaatcgctgtcttcttctcttccaagggagcagcacatctgcagcaatacaaagtgggaacttttaatttacaagagttttagcctttctttcttcattattttccaagaatacatcttatgatgcatttgttagagagggcaagatgaaaggaatgcactctgcactggggcagcagyagataaaatttgtgctggcacatttttccggaagatgtgggtagagggtagggagagtagagagtacagtcctgggtcagtccctaagaaatgtatgttacgtgcatagatgagctttactgttgcagtgaaaaatctgttatgctggaagaccagagctgtcattaatatttttcatctatgagctgaagatttttgttctcctgctatcctggatttaggcaattaaaaagacctgtagggacaagatcctkctcttcattaggtatttcataggatgagcacaaaaccacaagtttc

SEQ ID NO: 45416 - DNA, 440 bp, Chicken  19866894285220_2
agagagggcaagatgaaaggaatgcactctgcactggggcagcagyagataaaatttgtgctggcacatttttccggaagatgtgggtagagggtagggagagtagagagtacagtcctgggtcagtccctaagaaatgtatgttacgtgcatagatgagctttactgttgcagtgaaaaatctgttatgctggaagaccagagctgtcattaatatttttcatctatgagctgaagatttttgttctcctgctatcctggatttaggcaattaaaaagacctgtagggacaagatcctkctcttcattaggtatttcataggatgagcacaaaaccacaagtttcctgagggactaaatccgacaatatgtcatttggtgtaattctccatttggcacacacagatactgtaaaggcattggtacttccatttacttta

SEQ ID NO: 45417 - DNA, 600 bp, Chicken  19866894285222_1
aactgtcaggtgtccttggataaggtcttctgagcatatgtgtgcaggctgctgctagtcctggaagtatatggctgggcttgggaaagttggtcttgtggaaattgctcaggtctaatatctttctggaacaaagagaacattggaagatatgacttataatgagaaatggctttaaagaagatgtgaagaattgttgaaaatgtgtaagagtgtttcagtatggaaatagagaggctcaatctaattgtgttgagcatcaacttttctccattaaaaagtaaagcacatcatatattwttttttttgttagtttgttttacaacatattgatatgccttttgttcaagggaacaaatggaagttcttttgtaggcagtgagctttgggtcagaatttattgtctgagattggtaaggaatgtgctgtctcaaattaacatgagacagttggaaacactttgtggactgttttacattcaaaagtatttatacattcaaaagtatttatctggacagagccaaaagctatttgctcttgaatggaaaggctcaggaatgttttctggctgaagacttggcctaggagcaagtattttca

SEQ ID NO: 45418 - DNA, 510 bp, Chicken  19866894285229_1
ctccatccagaaacttgcgtttggacaccttctcctcttcagtgctgtttgcatcgatctcctccggcagaggggttctcagatagtcatccagcttcttcagagccttcaccagacctctttcaagggctgtgccaaaaagtaaagagtaaagccagagagaattatttagaaacattcactgtcaacggttattaagcaaaagcaatataacaaaatctaaatacaaagctagttaaaacaggtgagatattcagccacctttaagattcttcttacttcaggttcatttaggtgcasattctcattctgatatgtctcagatgggagtgccgcagtggagataagtctttggccttcaactgcgaaagaccttgtcccacactgctgctggtttcaaggaactgaagatttaacattccactcagacatgatgcaaagcaaagagcacagtttttacttgaaagcatcaacctggggcacagactttgcgttcttacactttacctg

SEQ ID NO: 45419 - DNA, 595 bp, Chicken  19866894285230_1
ctcactaacagatgcagtccccaaaattttgccattaggataaacagaacacatccgggaaatttaaggtgatggtgcctcacaaacaagggaaagagcatttccaaagcattcagtctctctatccactagttaacagatgccattagaaatcccaagagaaccagaatcaacggctggaacaaaacacactgtgctttattttcctcatctcccctgttaaaattcctgcctgcgttttatgtcagtagcatctttcgtgtttctaccatcatctgattcaaagtggcttgaaacacrattatatttttttatagaagttattcaaattattccacctaagagggaattcttatatacctcagaggatgtttttctaccttaagacagaaggagcttacaatgctgttttattaatggcaattagtatttgctgaccacaacattttctccttttttttttccctccccaaactgatattttggagatacacgcaccatcaccacttccagtgctgagggaagtctatacgaaagccaaagaaagtttcacagaaaatacggattacaagttattcctagacaacaggcatag

SEQ ID NO: 45420 - DNA, 600 bp, Chicken  19866894285235_1
cattttatttttttttaaccattatattttacattatggacttggtctgtaatgctgatgggacagttacagtcagtattactatttactcctagtaactagatacaaggccattttctaaacgaactgttgtttttttttccatagagatacctttgtctagttactcaagattaggcagtatgtaaaaaagcaatgatttttttattattgcttccaaattagtgttgtgattttcttgaatcaatgccaaaagttaaaactgtcgttatttcaattattattatttgaaagctgttktggggaggataaaagagaaaaataaaaggcataaaagtcagtcacccttttagatgatgatcattttacctgtcaggccccagggactggtgcagctggaaagttcacccacggaaacattgcagagatttcactactctctggcattctgtcatcttgtctaaacagacataggtgctgagcaccttattcattaatgatgtggaaaaagtggagcagtaaatggaaaagaaaataattttgtagttgtgaggtcattattcttaagtatgaatgaaatggcgttgtaagtggaagagg

SEQ ID NO: 45421 - DNA, 600 bp, Chicken  19866894285239_1
ggtcatgagttggaaagaatgaaacttttgcatgagtttattggaagagctgaggttctgttgtatttaatcattttatatcatgatgggtggtaataaatttatcactgaggtgtgcaatgttgaaattcatcaggaccccaaacataaaatcataaaatcaccaaggttggaaaagacctccaaggtcatctaatccaaccatcatcctatcaccaatatttcccactgaaccatgtctctccatgtgctttttaagggtgaccccataagaatgcgagactctgaagtatttgtttytgacagttattcagtcccaaagttacagttatcccaaagacagttattcagaatctagaaaaacagagtggtttcaaacttctgctacagaagattgttgttaaggcttcaagtagcatgccactttttagtatttaaattgttggaataaatgtggaaagggcaagcaagatttagagagcagttttctggtgaaacttcagattaataatggcatcctgtctgaatccagccgtattagtgatgttcttgtcagtgttagagctttctagattggtggacaaagcattatctgcagaa

SEQ ID NO: 45422 - DNA, 580 bp, Chicken  19866894285240_1
acatataacaggaactcctgcagctccaacaggatgttagttaatctgttttgtggcaatattttatttttcaggacttaattctcactgcatgcatagccaagtattggatgcaagttacaattttctgagtacgtttttggggtttaagactgctatattactctgccaaaagagaaacagttacagctatctgagaaagtcagcgtacattcattatacaaagattttatttgcattcatctgggcttaagaacaaaattaccatggcttctggttaagggttatggaaagtacacwttttaatcataagcctactgaggaaatctaaacttgtttgtcctgatctgactatatagctcattaatacaaaaaggtctgtggctttgtgttggtttatgcttctttaaataactcgtcatgtctgtgtattataggtagcctgaattgtctatgcaatactatttgaaatttgtgtgaattttttttttcattatctaccttcccgagaagttatgcccgttttgccagtgactatcattaaaaaggctgtattgtgatatactcattcaaagacggg

SEQ ID NO: 45423 - DNA, 599 bp, Chicken  19866894285255_1
  misc_feature (1)..(157): n is any nucleotide
nnnnnnnnnnnnnnnnnnnnnnnnnnnnnnnnnnnnnnnnnnnnnnnnnnnnnnnnnnnnnnnnnnnnnnnnnnnnnnnnnnnnnnnnnnnnnnnnnnnnnnnnnnnnnnnnnnnnnnnnnnnnnnnnnnnnnnnnnnnnnnnnnnnnnnnnnnnnncttaagtgcagaatgaaaactgtattgcaaaaacttataatgccttgacacactcttactagaaagtgtttcactaaggagaagagaatgacaaattctgtttaacctacattagccaagtggcagaactctgcgaagaaacraggttttatttacagagccaatgtgttcaacaacgggacaaaagaagggaagtgaaaaggactttccttgacgttcctgaaatcacgaggccatgcagcaaattcttaaaacacttctattactcaaagaaccaacttgcagaatttgccttaatatgtacctttatctacaaactgtctctgttctcttctgttctcctagtttatacccatcttgaaaacacttcatacacaattccatcttacgcatatctcactcattcttgtgtttggttttatgtgctaaacaagtaccttat

SEQ ID NO: 45424 - DNA, 600 bp, Chicken  19866894285255_2
caaagagatttaaatttattattacctctcgataaaatacaaaatgaaatcctaaaaagccctaatgcttccataaatgtccaggttgttaacaaatacaaggttgtgttgataacaacaacaaataaggttgttgttaacaatagcccatgtatggtgataaaagacactgcctatcttacatgccctaagttcatacttaaagcaaactttccttaattccaggtaagtttaggttgttgcaaatcacaacatttgcaagttttccacatcattcaatgcaatccaattctccaatcrattttatttattataaatggtatwaaaaaaatctcattctgtcctaagcaagccagtaatgtaacatgcataaccaaaacttgcaaagttctcactttaaattgagacagtctctataataatctgatataaaacaaaaatctacagtgtaagcacttaaaaccaagacaaacgtgatgacccagaagcaatcagactacagagtgcagtaatgaccagcaaaggctatgcctgagaggtctgtttttataccggctttagtaatgctgaaataaatacactcaagatctcaaagcctgt

SEQ ID NO: 45425 - DNA, 600 bp, Chicken  19866894285255_3
cctctcgataaaatacaaaatgaaatcctaaaaagccctaatgcttccataaatgtccaggttgttaacaaatacaaggttgtgttgataacaacaacaaataaggttgttgttaacaatagcccatgtatggtgataaaagacactgcctatcttacatgccctaagttcatacttaaagcaaactttccttaattccaggtaagtttaggttgttgcaaatcacaacatttgcaagttttccacatcattcaatgcaatccaattctccaatcrattttatttattataaatggtatwaaaaaaatctcattctgtcctaagcaagccagtaatgtaacatgcataaccaaaacttgcaaagttctcactttaaattgagacagtctctataataatctgatataaaacaaaaatctacagtgtaagcacttaaaaccaagacaaacgtgatgacccagaagcaatcagactacagagtgcagtaatgaccagcaaaggctatgcctgagaggtctgtttttataccggctttagtaatgctgaaataaatacactcaagatctcaaagcctgtcataagcagaacagcaaagacaaa

SEQ ID NO: 45426 - DNA, 600 bp, Chicken  19866894285262_1
gcaaatgtacttttacaattgttaagctgctcttatggcctgtgaaggttcctggtctggtaacaatggaaactggagtcttatgtttatcttcaggccaggacggatggaggcagcaatagtatatgctttcctaaactgacctgctaatgacctgaatgctgccctgggggttagtatctctcggagtaagaggatatttagctctgatgccagttcagcatacaactcatttagaagaaatcacttcatccaggttaaaagtcttagatcttattttccaaaataaatcattcatayggtgtgygttcagaagatttgcttagaaacatagatgctagttatgaaaaatagcaatatcagaacacaagtggtcttgtactgcaaaaattgggacagacagtgccaaatgtataagaaaacctaagtctcacaagatttcagaacctgtttgattgcttatcgcattcagttgtctaatttactttagcacatctacttcgtgtatcagtccagacatatcttgcgcctctgaggaaccaaggccttacagaaatattaagttctttactgactagacttcttccttaaaaggatcat

SEQ ID NO: 45427 - DNA, 600 bp, Chicken  19866894285262_2
tacttttacaattgttaagctgctcttatggcctgtgaaggttcctggtctggtaacaatggaaactggagtcttatgtttatcttcaggccaggacggatggaggcagcaatagtatatgctttcctaaactgacctgctaatgacctgaatgctgccctgggggttagtatctctcggagtaagaggatatttagctctgatgccagttcagcatacaactcatttagaagaaatcacttcatccaggttaaaagtcttagatcttattttccaaaataaatcattcatayggtgtgygttcagaagatttgcttagaaacatagatgctagttatgaaaaatagcaatatcagaacacaagtggtcttgtactgcaaaaattgggacagacagtgccaaatgtataagaaaacctaagtctcacaagatttcagaacctgtttgattgcttatcgcattcagttgtctaatttactttagcacatctacttcgtgtatcagtccagacatatcttgcgcctctgaggaaccaaggccttacagaaatattaagttctttactgactagacttcttccttaaaaggatcatggaagag

SEQ ID NO: 45428 - DNA, 600 bp, Chicken  19866894285268_1
atgaggcagctgcagtggaacagtgttggagagatttctgtcagcatttacgataggcgaaattataagggtagttcttctcagccagttcaatgagccaactggctgcacatgttgcaaatgcttctttatactatcatgaactgcgaaaagaatacactggatttttttcttcctttttgaaaagtaaaagaatggtgcaaacacaggaaacaattaccatattcagctcttgcattgtgcttctcctccagagctttccaggactctgatccagcaaagcccttccatgctggtacracttgaagcacctacgcagtccttttgaagtcactgtgactctttgaaaatgcagttaaacacatacctcacttgaacctctgtttgatttgaatgtcagggttttctgaaagaaaacgttttgttggacaactactgcagtttgtgcaccttcagtacacagggaaaacagaataggagtgatgacctttgaaaatcagccaatggcaatcaatcacgggaaccacatttcttatacttgctttatagtagaataaaacttcagactgcattacttttttcggggttctttagtgcaat

SEQ ID NO: 45429 - DNA, 600 bp, Chicken  19866894285271_1
tgcaaaatgagttaatgcacagtggggttttacatcacaactgtcatagcagctgcccaaggtcccaggcaggtcagaagcctgaccaaatgaggagcagcacaaatgagagagcacatccaaacagagtaatagggcagaaagcatgaagatgaacaaagcaatgaaatgaatcacagcaagctgattgcagaggcaggaacacagcccccaaaagggcagcccacacctcccttcccactggtttgcacaactgtaaatgatcagacactccaaattcactcactgtacagggaaacrtggctttagggcacattgatccaaaggtayrtgccagaggcctcctccttacagcccatctgcactcttgcttcagcagcaaacaaggtccaaatgtctctattgatagatggtgacatcrtttaatactgtygcttgcttattgaacctggccaagaaactctgcagctatttggtgcagmtttgggatgtcggggaagagtccagccctctcaggatttagctgtaccacagaatgagaagaatggggaggactatggtgggatagaggaaaagtaatatccaagaggagaaggaaaa

SEQ ID NO: 45430 - DNA, 600 bp, Chicken  19866894285271_2
tacatcacaactgtcatagcagctgcccaaggtcccaggcaggtcagaagcctgaccaaatgaggagcagcacaaatgagagagcacatccaaacagagtaatagggcagaaagcatgaagatgaacaaagcaatgaaatgaatcacagcaagctgattgcagaggcaggaacacagcccccaaaagggcagcccacacctcccttcccactggtttgcacaactgtaaatgatcagacactccaaattcactcactgtacagggaaacrtggctttagggcacattgatccaaaggtayrtgccagaggcctcctccttacagcccatctgcactcttgcttcagcagcaaacaaggtccaaatgtctctattgatagatggtgacatcrtttaatactgtygcttgcttattgaacctggccaagaaactctgcagctatttggtgcagmtttgggatgtcggggaagagtccagccctctcaggatttagctgtaccacagaatgagaagaatggggaggactatggtgggatagaggaaaagtaatatccaagaggagaaggaaaaaaaagaaatcgcctgggtgataaaacccaa

SEQ ID NO: 45431 - DNA, 600 bp, Chicken  19866894285271_3
acatcacaactgtcatagcagctgcccaaggtcccaggcaggtcagaagcctgaccaaatgaggagcagcacaaatgagagagcacatccaaacagagtaatagggcagaaagcatgaagatgaacaaagcaatgaaatgaatcacagcaagctgattgcagaggcaggaacacagcccccaaaagggcagcccacacctcccttcccactggtttgcacaactgtaaatgatcagacactccaaattcactcactgtacagggaaacrtggctttagggcacattgatccaaaggtayrtgccagaggcctcctccttacagcccatctgcactcttgcttcagcagcaaacaaggtccaaatgtctctattgatagatggtgacatcrtttaatactgtygcttgcttattgaacctggccaagaaactctgcagctatttggtgcagmtttgggatgtcggggaagagtccagccctctcaggatttagctgtaccacagaatgagaagaatggggaggactatggtgggatagaggaaaagtaatatccaagaggagaaggaaaaaaaagaaatcgcctgggtgataaaacccaag

SEQ ID NO: 45432 - DNA, 600 bp, Chicken  19866894285271_4
aaacagagtaatagggcagaaagcatgaagatgaacaaagcaatgaaatgaatcacagcaagctgattgcagaggcaggaacacagcccccaaaagggcagcccacacctcccttcccactggtttgcacaactgtaaatgatcagacactccaaattcactcactgtacagggaaacrtggctttagggcacattgatccaaaggtayrtgccagaggcctcctccttacagcccatctgcactcttgcttcagcagcaaacaaggtccaaatgtctctattgatagatggtgacatcrtttaatactgtygcttgcttattgaacctggccaagaaactctgcagctatttggtgcagmtttgggatgtcggggaagagtccagccctctcaggatttagctgtaccacagaatgagaagaatggggaggactatggtgggatagaggaaaagtaatatccaagaggagaaggaaaaaaaagaaatcgcctgggtgataaaacccaaggtcaaaatgcaagcaggttttaacatccagaagcaactcaaaaaaacccacagggacgtggacagacatttatgccatccttgtgtgaac

SEQ ID NO: 45433 - DNA, 600 bp, Chicken  19866894285271_5
agggcagaaagcatgaagatgaacaaagcaatgaaatgaatcacagcaagctgattgcagaggcaggaacacagcccccaaaagggcagcccacacctcccttcccactggtttgcacaactgtaaatgatcagacactccaaattcactcactgtacagggaaacrtggctttagggcacattgatccaaaggtayrtgccagaggcctcctccttacagcccatctgcactcttgcttcagcagcaaacaaggtccaaatgtctctattgatagatggtgacatcrtttaatactgtygcttgcttattgaacctggccaagaaactctgcagctatttggtgcagmtttgggatgtcggggaagagtccagccctctcaggatttagctgtaccacagaatgagaagaatggggaggactatggtgggatagaggaaaagtaatatccaagaggagaaggaaaaaaaagaaatcgcctgggtgataaaacccaaggtcaaaatgcaagcaggttttaacatccagaagcaactcaaaaaaacccacagggacgtggacagacatttatgccatccttgtgtgaacactgggcagctc

SEQ ID NO: 45434 - DNA, 587 bp, Chicken  19866894285271_6
gctgattgcagaggcaggaacacagcccccaaaagggcagcccacacctcccttcccactggtttgcacaactgtaaatgatcagacactccaaattcactcactgtacagggaaacrtggctttagggcacattgatccaaaggtayrtgccagaggcctcctccttacagcccatctgcactcttgcttcagcagcaaacaaggtccaaatgtctctattgatagatggtgacatcrtttaatactgtygcttgcttattgaacctggccaagaaactctgcagctatttggtgcagmtttgggatgtcggggaagagtccagccctctcaggatttagctgtaccacagaatgagaagaatggggaggactatggtgggatagaggaaaagtaatatccaagaggagaaggaaaaaaaagaaatcgcctgggtgataaaacccaaggtcaaaatgcaagcaggttttaacatccagaagcaactcaaaaaaacccacagggacgtggacagacatttatgccatccttgtgtgaacactgggcagctctatgcatctactatgaaagctgtaaacacgtgaagg

SEQ ID NO: 45435 - DNA, 600 bp, Chicken  19866894285273_1
tctggttgcttctgctgccaagttggaaacctcctcccacatcacagccttccaccagtagtccaccacgtcttatattcgtaaggtataattgtcgcctctaattttttaacagttagcattttagggcagagcaaacactccacgcagttaatgcagactgaagaaacgctgtttataagcaaacccaagaacgaattgttagtgtcgttaaactgttaggaaggcagaacaaagaggtccgggtgcaacgctaactttcctcgttcaaaccgttcggctcttgctgctctctcccaktggtgctgcagctgccgagcgatgttgcagagagctggaacacagggagctgaaactcccgagttcccagctcttccctgcgagggaagcgttgctaaatatggtgctttcctcccgcggagtagctgctggattcgcattggcagcagcctgcatcatgtaactcttccgcgtttcgttctgttcggaggagctgctcccgaccctgacgtcctctctctcctgactccctggctctgttctcagcctctcctgctggcacaccacaacgccacgcgctctgcaccttgggcttcgctc

SEQ ID NO: 45436 - DNA, 599 bp, Chicken  19866894285298_1
  misc_feature (1)..(99): n is any nucleotide
nnnnnnnnnnnnnnnnnnnnnnnnnnnnnnnnnnnnnnnnnnnnnnnnnnnnnnnnnnnnnnnnnnnnnnnnnnnnnnnnnnnnnnnnnnnnnnnnnnnaactgtgttgtaagaatagtcactgcctttggacttgccaatgcattatgctactcctggctgttagtacaaattcagaagctggagtgctgtccgaattgattttttgtgtgtatctcttctctgtacagtgagaggtctggttttaagcaccccccccccccgccccccagccaaatttaattgttctttggttcttcrtattttgtagtaagtcataccagaacagctgattcycagcaagacgcagaactggttactagaatcagtgatctgcacccatcttccttgctaacacctgcttcctttcctggtgcaccactacaaccgaaaaataatgtaagatagcaaattccagagccattctgagttgtttggcttccgtccactgaccttggtccacaggttgaagaccagctgaatgcctgtaaatcggttcattgccagtttatcctggaaatccttggtagatttctcatccgcttggggatcctccaaca

SEQ ID NO: 45437 - DNA, 599 bp, Chicken  19866894285298_2
  misc_feature (1)..(63): n is any nucleotide
nnnnnnnnnnnnnnnnnnnnnnnnnnnnnnnnnnnnnnnnnnnnnnnnnnnnnnnnnnnnnnnaactgtgttgtaagaatagtcactgcctttggacttgccaatgcattatgctactcctggctgttagtacaaattcagaagctggagtgctgtccgaattgattttttgtgtgtatctcttctctgtacagtgagaggtctggttttaagcaccccccccccccgccccccagccaaatttaattgttctttggttcttcrtattttgtagtaagtcataccagaacagctgattcycagcaagacgcagaactggttactagaatcagtgatctgcacccatcttccttgctaacacctgcttcctttcctggtgcaccactacaaccgaaaaataatgtaagatagcaaattccagagccattctgagttgtttggcttccgtccactgaccttggtccacaggttgaagaccagctgaatgcctgtaaatcggttcattgccagtttatcctggaaatccttggtagatttctcatccgcttggggatcctccaacagttcagctagagtcatctgtttccctcccaacccaa

SEQ ID NO: 45438 - DNA, 600 bp, Chicken  19866894285302_1
cttcccaaattagttttcaaatgttaattttcaatgtaagaaactatgtttaaataggtcactctgttcctctcgcaatttcagtcttacacccccaagtaatctgaattggtcaatatcatagctttgaattctgtgagacagacttgagccatgcacgcagggtcggaaactacgctaccaacagagatgaaaaaagcaggttgggtttccttgtacaacagaaataaattatgtgatcccatgaaagaaatttagacagacagccatccaaagaaacctcaaaataaaaccacatasttcctgtttatcttttatcaaggtataaagatttcctatccttcaggctgaagtaacagtcatagacctttagctsaaagatgaaagaaagagatattcaccacctcaagcagttttctgttaaaggacctggtgaataagtttaagtatcactaacagattaattaactgttaaaagattccagacagagagaaatattatggaagacccgcagaatgttccccttcacccaagcaatacagagccttttcactcccagcatacaatggaggacatatggcaaagtggcctcaataaag

SEQ ID NO: 45439 - DNA, 600 bp, Chicken  19866894285302_2
aatttcagtcttacacccccaagtaatctgaattggtcaatatcatagctttgaattctgtgagacagacttgagccatgcacgcagggtcggaaactacgctaccaacagagatgaaaaaagcaggttgggtttccttgtacaacagaaataaattatgtgatcccatgaaagaaatttagacagacagccatccaaagaaacctcaaaataaaaccacatasttcctgtttatcttttatcaaggtataaagatttcctatccttcaggctgaagtaacagtcatagacctttagctsaaagatgaaagaaagagatattcaccacctcaagcagttttctgttaaaggacctggtgaataagtttaagtatcactaacagattaattaactgttaaaagattccagacagagagaaatattatggaagacccgcagaatgttccccttcacccaagcaatacagagccttttcactcccagcatacaatggaggacatatggcaaagtggcctcaataaagagatgctaaatttgctgtatacctcacttggccacatgaatccacaatgctgggtaatggcagtagctgaaaagca

SEQ ID NO: 45440 - DNA, 600 bp, Chicken  19866894285302_3
cacctcaagcagttttctgttaaaggacctggtgaataagtttaagtatcactaacagattaattaactgttaaaagattccagacagagagaaatattatggaagacccgcagaatgttccccttcacccaagcaatacagagccttttcactcccagcatacaatggaggacatatggcaaagtggcctcaataaagagatgctaaatttgctgtatacctcacttggccacatgaatccacaatgctgggtaatggcagtagctgaaaagcatctcatcattgtgacaactcaaagyctcacacttcccagtcacaatccatcagtttcagtgacactgacttatctactaacaggagtgaagtctcagacagataaacaagacagatttgatgttcaatgcatccattccaaaaaatgatagttttctattatgggagatgcagcacattggcaagaaccatgcaagttttaatcatggtagtgttattttctaagactaggtgaacacagtggccatgaaatcacatgcaaaaggcccagtgatgtcttaattgacataaattaaatactgatctaaaggcggtacttcaagaaa

SEQ ID NO: 45441 - DNA, 600 bp, Chicken  19866894285314_1
ttttatccaaagaataaaaagcaaccttgactacttcacagagaaaacaccccatatctatgggcttttcaacatagtaaagtgaagtcttaaaagaagcattagctacaaccatttggctgtgctgctcagggacgtgatttagcagagggttgttagagttagggtagtatggttaggttgtggttggactcagtgatttctaaggtcttttccagcctgaaaaattatatgtgattctatgatttaagccctgctcccacagtgtaaatacagccatgctgaggaatacaatgttcytcagcatttttaaatatgttgggttcttctgttgtgtgcagccaaagcttagcatattcccaaacaaaagcaagactgagaacatgaatgctttgtcacacacargaaacctgtggcttaggcaaaactgcagtactcctacccagctacctaaagcacacatactgaacaatgagcttgctcttttactgacgagtcttgcaatttgcaagggatgtttctaggaaatattgttattccaaagtataaatatacttatyatttgaatgaagaatagccccwgttcctcgtttcctgctg

SEQ ID NO: 45442 - DNA, 600 bp, Chicken  19866894285314_2
ctacaaccatttggctgtgctgctcagggacgtgatttagcagagggttgttagagttagggtagtatggttaggttgtggttggactcagtgatttctaaggtcttttccagcctgaaaaattatatgtgattctatgatttaagccctgctcccacagtgtaaatacagccatgctgaggaatacaatgttcytcagcatttttaaatatgttgggttcttctgttgtgtgcagccaaagcttagcatattcccaaacaaaagcaagactgagaacatgaatgctttgtcacacacargaaacctgtggcttaggcaaaactgcagtactcctacccagctacctaaagcacacatactgaacaatgagcttgctcttttactgacgagtcttgcaatttgcaagggatgtttctaggaaatattgttattccaaagtataaatatacttatyatttgaatgaagaatagccccwgttcctcgtttcctgctgtctccaatctcccaagttgcctagcagttcatacttgtaagtaataagcatttcaggcttatcaaggtttctaaatatatgcacacgatgaccccaacattccac

SEQ ID NO: 45443 - DNA, 600 bp, Chicken  19866894285314_3
cacagtgtaaatacagccatgctgaggaatacaatgttcytcagcatttttaaatatgttgggttcttctgttgtgtgcagccaaagcttagcatattcccaaacaaaagcaagactgagaacatgaatgctttgtcacacacargaaacctgtggcttaggcaaaactgcagtactcctacccagctacctaaagcacacatactgaacaatgagcttgctcttttactgacgagtcttgcaatttgcaagggatgtttctaggaaatattgttattccaaagtataaatatacttatyatttgaatgaagaatagccccwgttcctcgtttcctgctgtctccaatctcccaagttgcctagcagttcatacttgtaagtaataagcatttcaggcttatcaaggtttctaaatatatgcacacgatgaccccaacattccactttcggcttatcaggacacgacatgcttagcttctagataaatacaactgacctctaacgttcagagatgaatcctttcattgtgcagctgactagcagcagagtatgtccaagtttcatattttcaaactcctgactactcagcctctctcctt

SEQ ID NO: 45444 - DNA, 598 bp, Chicken  19866894285314_4
tgaggaatacaatgttcytcagcatttttaaatatgttgggttcttctgttgtgtgcagccaaagcttagcatattcccaaacaaaagcaagactgagaacatgaatgctttgtcacacacargaaacctgtggcttaggcaaaactgcagtactcctacccagctacctaaagcacacatactgaacaatgagcttgctcttttactgacgagtcttgcaatttgcaagggatgtttctaggaaatattgttattccaaagtataaatatacttatyatttgaatgaagaatagccccwgttcctcgtttcctgctgtctccaatctcccaagttgcctagcagttcatacttgtaagtaataagcatttcaggcttatcaaggtttctaaatatatgcacacgatgaccccaacattccactttcggcttatcaggacacgacatgcttagcttctagataaatacaactgacctctaacgttcagagatgaatcctttcattgtgcagctgactagcagcagagtatgtccaagtttcatattttcaaactcctgactactcagcctctctccttggggcagatatgatgtactt

SEQ ID NO: 45445 - DNA, 600 bp, Chicken  19866894285315_1
accatagcttacagaaattattctgctgacagatgggtcacagaatcatgtaacccaaaggcccaagtgtggggtggtgaaaaggagttatatatcaaaatcaactacttgagcagtaaaatgtgctagctttttaaaaatcttttccatttctaggacaagagctccttatcactaatacatcttaactgacttcagagcactattcctgacatttttttttttttttttaaatcagcaactcattactatttcctccctcggtattttgtggcacttcagtttgttttgtttttattyacactgtctataaattctaatgtgatgattaaggcaactccactgtgagtcaaagcactgaactgaagggtcaatctattttcctagttttaaaccaacagttttcacttgtcctatgcctccatttttccagtagctgctcttgtgtttcacttaattttttcacagggagtgtggtggtagtgataacctgtgaattctccactatgaatcagttatcttttgcagtatagaaaaatactcgcttgcactgcactacagatgagaatgtttgcaaattgttgcttttataccccctta

SEQ ID NO: 45446 - DNA, 600 bp, Chicken  19866894285315_2
gcctgatatttcaggcacaaagaggaccaaacacagcccaccccacctctgcaagtggagctgctgaaacaaggaagccagataatcctaacagtctaaaaattaatccatgtaaacacattcaatgcaaaagcatagccaggaataaatcattttctacaacatcacttctttcaccatgtagttcttaacttcaaacagtgaataagctttttttctcaagacactggcaacaaggcttgaacacagttaagagaactcataccattaatccccaccataagagaacagtaggccttyctgtgcaaatgcctcatatctttcatcttttgatgttgggagaacaacactgtagctcttcagagaggacagactattcttcaaaactctaaaggcctgaagaatacacaacactctaaaaatacacaatacaactatgattacagacttgtcactgacaagtcaaataagctcctgtcaagctaacttttcattctttgaaaataaaaatttgacaagcaaactgtataaacataagaaagtcaatcattaaaataagcattaaaaatacaatggtttatgcactgttaagactgatca

SEQ ID NO: 45447 - DNA, 600 bp, Chicken  19866894285315_3
aacactctaaaaatacacaatacaactatgattacagacttgtcactgacaagtcaaataagctcctgtcaagctaacttttcattctttgaaaataaaaatttgacaagcaaactgtataaacataagaaagtcaatcattaaaataagcattaaaaatacaatggtttatgcactgttaagactgatcaactgcttcaaaaaaaactaacaattaacaaatcactggtgattatatttctctccttttcaatgaataatattgaaaggaaaaaagttgctctatcacagaaaaaaaawatatatatatatacaccacttatacaatagctaatttaaaagaaagtgtagcatttgtttgcttttgtaagaaaaatgaattcaatactaagttgagttcttgttcttttgagaaattacttccacgaaatcacagttcagagctgcactacaggttagatactctgagctatcagtagagttacaaaagcagcctgcagacaggataagatttcaaagtctgggaaagaggttctgcctcttcaggtgagaatatagatcaccgttttcctactttgtaaatccctctctctccttctg

SEQ ID NO: 45448 - DNA, 600 bp, Chicken  19866894285321_1
cagctgttatcaaagctacaaccaagtgagtcatcaaggcagcaaaactacacagagaacgatgagaaatactatagcaaataaatataggttaaataagtaaggagagaattttgactagttttataagttttagactgtagcatgtggcaacaagtataggggcccacagtgagaagacgtggtattaatgagaagagaattgaatacaaaggataatgaatacagaagggttttttgtcttaactgtgtttaaaactgattaatattttatcttgggttccatcttactaacctcartgctggtatccagtataatcagttactactggaaaggattcagctctacagatacttatagactgcagtatgaagatgatcagactaccttcttattaagatatgtcagtgtaggggatctgtaagggatctcccaatccggtgattgtgcatctggtaaaggagtgtggttggcctagggagcacaggcaaattctttacatctctcctccccatgtgaccagaaggygtggacctagagtggagccattctgggctcatacaagtgccagccactgaaaggagagcatctcttggacc

SEQ ID NO: 45449 - DNA, 600 bp, Chicken  19866894285321_2
agggttttttgtcttaactgtgtttaaaactgattaatattttatcttgggttccatcttactaacctcartgctggtatccagtataatcagttactactggaaaggattcagctctacagatacttatagactgcagtatgaagatgatcagactaccttcttattaagatatgtcagtgtaggggatctgtaagggatctcccaatccggtgattgtgcatctggtaaaggagtgtggttggcctagggagcacaggcaaattctttacatctctcctccccatgtgaccagaaggygtggacctagagtggagccattctgggctcatacaagtgccagccactgaaaggagagcatctcttggaccaaggctgctttctgaggaggagtgctgtatagtcagaaggccccttcaccagttaggtgaattcaactcttctttctgtatatgactatcagcctatcagcagtttccctggtactgccaagaacctgtcagaagtaattttgcttctttatgagacgaaaagtcagtaataaaataaatccctcatggtttcttgtctcagcttcctatcttcctcatgaaagtccca

SEQ ID NO: 45450 - DNA, 600 bp, Chicken  19866894285331_1
gcacagctcattttgcactgaagtgtcgaagcaaagcgatggagagtcattttgctttcttccacctctcacaccttcgcagactgtgctttcagtgatttctttttgttagcgtgcaaggctccctttagttacttgttggcatatgaaagggcacatgttgaagactcacagtcccactgaagcctgttctgctgtctttaaggatgctgaaccagctgcggtggcgtatgaggtcctcctcattccccatagcaagaaatccccattttcccctaaatatagtttgacttctgaagytgagaattgacatgtaattttctaacctgcctttgaaagtaaactttgtgaactgatggtttcccagatgagccttaaaggtcccttctagccaagccattcaaaccaggagtttctgatctggaaagccaagtttgtcccaagtcaggctgtgctaatggtgcttcccaaagagatcccatcctcactttattttactcctttttttaacccttctgaatttaatgcaactgcctgtaaccactccacagcgctgcctacatcaaagtgccaacaagaacagcctggaaagagcagaca

SEQ ID NO: 45451 - DNA, 599 bp, Chicken  19866894285343_1
  misc_feature (1)..(43): n is any nucleotide
nnnnnnnnnnnnnnnnnnnnnnnnnnnnnnnnnnnnnnnnnnnctggccccactaacccatctttcagaagcctctctcactgaggcagcagctcctgcatgtgtgtgtgatgcagcccgcacagccccggggcactcaccccaaaagaagtgtacccagggcacggttggtgggacctgcatgtggctggaggtacctagggcacagtgctttggggcgggcagagacatgcccagagggctgggagccccggtgctgtgctgggagttgtgtaaggacacagggcatgattccttttsgtgcycctctcctggctctcagctgatgaggtctgagtgctaggggatggcaaaaagcagcacacygagacacagggagctgcctgccacctgctcccctctctctgctgcctggctatggtttgccctcggatggaaggggtgatggtatttggggacatcctcacccagctccaggtgctcgcactaacccaccacctgctttggcatgggcttgctgggtggcaccgtccctccctccatccctccttcctcccatcctgctgcctgggggcgaattcacacactctgtatctcca

SEQ ID NO: 45452 - DNA, 599 bp, Chicken  19866894285343_2
  misc_feature (1)..(38): n is any nucleotide
nnnnnnnnnnnnnnnnnnnnnnnnnnnnnnnnnnnnnnctggccccactaacccatctttcagaagcctctctcactgaggcagcagctcctgcatgtgtgtgtgatgcagcccgcacagccccggggcactcaccccaaaagaagtgtacccagggcacggttggtgggacctgcatgtggctggaggtacctagggcacagtgctttggggcgggcagagacatgcccagagggctgggagccccggtgctgtgctgggagttgtgtaaggacacagggcatgattccttttsgtgcycctctcctggctctcagctgatgaggtctgagtgctaggggatggcaaaaagcagcacacygagacacagggagctgcctgccacctgctcccctctctctgctgcctggctatggtttgccctcggatggaaggggtgatggtatttggggacatcctcacccagctccaggtgctcgcactaacccaccacctgctttggcatgggcttgctgggtggcaccgtccctccctccatccctccttcctcccatcctgctgcctgggggcgaattcacacactctgtatctccacagct

SEQ ID NO: 45453 - DNA, 577 bp, Chicken  19866894285343_3
ctggccccactaacccatctttcagaagcctctctcactgaggcagcagctcctgcatgtgtgtgtgatgcagcccgcacagccccggggcactcaccccaaaagaagtgtacccagggcacggttggtgggacctgcatgtggctggaggtacctagggcacagtgctttggggcgggcagagacatgcccagagggctgggagccccggtgctgtgctgggagttgtgtaaggacacagggcatgattccttttsgtgcycctctcctggctctcagctgatgaggtctgagtgctaygagacacagggagctgcctgccacctgctcccctctctctgctgcctggctatggtttgccctcggatggaaggggtgatggtatttggggacatcctcacccagctccaggtgctcgcactaacccaccacctgctttggcatgggcttgctgggtggcaccgtccctccctccatccctccttcctcccatcctgctgcctgggggcgaattcacacactctgtatctccacagctgcgaggaaccgtgcagcctgcaagcaacttcaatgatga

SEQ ID NO: 45454 - DNA, 599 bp, Chicken  19866894285346_1
  misc_feature (1)..(111): n is any nucleotide
nnnnnnnnnnnnnnnnnnnnnnnnnnnnnnnnnnnnnnnnnnnnnnnnnnnnnnnnnnnnnnnnnnnnnnnnnnnnnnnnnnnnnnnnnnnnnnnnnnnnnnnnnnnnnnngtcagcttatgtaaaaatgcatgttttcattttcaagtattgtctgtttacagagaaaagagccagagggtatgacgttctcttgtcagacagaaccagagaacatcatccaagggctctagaaccctacacatgttctacatggcagcaaagcctgaatcagtggcagcatgaaccacataaagccaygtggtcaggagcagaagtgaaattcgatccaattttattgataccagccttacacactctgtattcaactgaaatctttctatgacaccagaaaggacaggagcacaaacgtttactccttttccacctctcttcgagagctgtgaaagaatacagcagtcagcctcttytgtctgaatatgttattgggctgagcaagaagggcatgttgccaccttcaacatcggacaatcaagattgatgtcagcatagttctcttatggtattatttatatctgggctgtcaaatacagaggcct

SEQ ID NO: 45455 - DNA, 600 bp, Chicken  19866894285346_2
gagccagagggtatgacgttctcttgtcagacagaaccagagaacatcatccaagggctctagaaccctacacatgttctacatggcagcaaagcctgaatcagtggcagcatgaaccacataaagccaygtggtcaggagcagaagtgaaattcgatccaattttattgataccagccttacacactctgtattcaactgaaatctttctatgacaccagaaaggacaggagcacaaacgtttactccttttccacctctcttcgagagctgtgaaagaatacagcagtcagcctcttytgtctgaatatgttattgggctgagcaagaagggcatgttgccaccttcaacatcggacaatcaagattgatgtcagcatagttctcttatggtattatttatatctgggctgtcaaatacagaggcctgtgtcagggaactgatgaacttcccttctacacaaaaaagagagctgccttagggcagcatgacactttttccagttctagtagctttcctccttagggaagtggtgactcaagaagtgggttccacattyaaataacaggttaagaaaacattttttccctttcagtttt

SEQ ID NO: 45456 - DNA, 600 bp, Chicken  19866894285346_3
tcttcgagagctgtgaaagaatacagcagtcagcctcttytgtctgaatatgttattgggctgagcaagaagggcatgttgccaccttcaacatcggacaatcaagattgatgtcagcatagttctcttatggtattatttatatctgggctgtcaaatacagaggcctgtgtcagggaactgatgaacttcccttctacacaaaaaagagagctgccttagggcagcatgacactttttccagttctagtagctttcctccttagggaagtggtgactcaagaagtgggttccacattyaaataacaggttaagaaaacattttttccctttcagttttcagtttcagggaacagtcaagattcccatcaaagagcttttggggtttcacacagaatacagtaaatacacttctatttagtagaatatacaagacagaattccaagtcttcaaaacttctcttttcctactacgcacattcatatatccatgtatacatagacacatatgagcaccagttttacagcccttgtctccaaaatgcttaagcaatactatgacaaatatcacaggtatggtctaggttgccttgctgtgat

SEQ ID NO: 45457 - DNA, 485 bp, Chicken  19866894285354_1
gatagtgccaagccatcccctaagcacactgcttaccctcagcccacggagctctaacaatgggagtgacgctgtgcatagattttatggtatttagagctcctcagcaggacactagattgagcataaactggccgttttaataaaaatcgcttggcaaccagggttttgtataatacaaacatttctacataaaaacccaaggtagctttctccatgtgattgcagccgggccgcagtaacgaagaccagatgtgcattctgcattccagcgcatttgttaatctggaggctctgcgytgtgaggggggttagaacagttcacagagtgattcactttaaccaggtctgaatgcttcagaacagcatttattcaaatgtttcagacatttctctctaagtttttgttgctgttacaatgccctgcacctcgttctgcctgcccaccgatcctgcagcgggcgtagcagcacacattcacgcag

SEQ ID NO: 45458 - DNA, 599 bp, Chicken  19866894285358_1
  misc_feature (1)..(166): n is any nucleotide
nnnnnnnnnnnnnnnnnnnnnnnnnnnnnnnnnnnnnnnnnnnnnnnnnnnnnnnnnnnnnnnnnnnnnnnnnnnnnnnnnnnnnnnnnnnnnnnnnnnnnnnnnnnnnnnnnnnnnnnnnnnnnnnnnnnnnnnnnnnnnnnnnnnnnnnnnnnnnnnnnnnnnntgtaattcaaaatgatcagctttgtgccaaagctggaacagaaaagataaaccgggctgctgctggcccttgttccactcccagggtttgcacaggtgggaagctgccatcagctgtgttctgcttgagcctgyggacagctgagcttcctccctcccttctcttttctcagttccttctcactcatttttgttccaccaagaaaaagctttccttgtcacagcaggaatatactgggtaacagttgccaaattttcaccctatgtatctccttcagtaagcgctgcagaagctgtgcttgaagccctttaatggtacataatattaagccagcatttttttaagagtttctgtacataatttttccctctttgtctctgaacatgatccagtaaggctcagaaacagatgaaccacttggcttcagcttttg

SEQ ID NO: 45459 - DNA, 599 bp, Chicken  19866894285360_1
  misc_feature (1)..(52): n is any nucleotide
nnnnnnnnnnnnnnnnnnnnnnnnnnnnnnnnnnnnnnnnnnnnnnnnnnnnttctttcaacagtgcgtgggaatgtttaagttataaaactcactttcatttaattaaggggtgaaaaaaccaccaaaaaataatcattcatgttagatagtctaagatccttaatttcctttaaaggaaaatgttgctgtcagtctaggttcagtctagaaagatgaacaatttgcttaatcacttgtgaaacagagaatcatgttgcccagtagtttgttattatatttcagccattgaatcgcagyatttttaccaaagagaggtcttcagggggcatttgtagctttctgttcacagaaaaatagaatctctccagtaaaaagaacatttcttcctctcctttgcttactgtgcagtgcaggctagcctacatccccatccctcagcaggatgatgctgaaattaaagaaagattgcagctaatggctctcagagttcctcaggtttgtggagaagcagtggatgtacgagtgtggaagatgtgtcagagctgtgggacatcacyaaggcagtgcagctgttggggacagcactgcaagagcag

SEQ ID NO: 45460 - DNA, 600 bp, Chicken  19866894285360_2
ccagtagtttgttattatatttcagccattgaatcgcagyatttttaccaaagagaggtcttcagggggcatttgtagctttctgttcacagaaaaatagaatctctccagtaaaaagaacatttcttcctctcctttgcttactgtgcagtgcaggctagcctacatccccatccctcagcaggatgatgctgaaattaaagaaagattgcagctaatggctctcagagttcctcaggtttgtggagaagcagtggatgtacgagtgtggaagatgtgtcagagctgtgggacatcacyaaggcagtgcagctgttggggacagcactgcaagagcaggtggtggcaaggcacactgctgatgccaatggatggggctactctcttcttgtacctgccctaagaaggatttgtccatagctccctctgtatttgtcaaaaatgcaattgtaggctgtgggtcttcccatcctaaggtaaccatctaaatacactcggacccatccacacacaaagagcagcctgactcccaggagagctaggggtgccacccagtgccctgtttgccagcagggagctcagaagaaaagagaacactgg

SEQ ID NO: 45461 - DNA, 600 bp, Chicken  19866894285362_1
atgaaaggctctaatcatgagcaagagataaatggttgtgcaaaggggctgctttcagaaacctgtagaagacagccagggaaggctcagctctgcttcatgcgtggctttacaaactctgctctgcctcagcaaatttttggcttcagtttctgaacaagttggttgaattccctgcagcctgaggtgatgtggtcgtgtgctgaggtgctcatactgcataccccgtgttcccaagctgcaaccatctgtggagcattcgagcagctcttgcatggctgctcgtttgcacacctcagwctcagctctcatagctatgagagctggagactttctggttcactgccttctccagatgttgggacacactcaacattggatctgtgtcaccacagaggtgctatgaagtcatttcaggttgtgaaggaaggaaaagggragccgtaagcagtaatcaagacctgattgttttccagagctgatcatcacagcaggaggtgagaacgttcctcccgttccaattgaggatgctgtaaaagaggcctgtcccatcatcagcaacgccatgctggttggagacaaagcaaaattccttgccat

SEQ ID NO: 45462 - DNA, 600 bp, Chicken  19866894285362_2
ttggcttcagtttctgaacaagttggttgaattccctgcagcctgaggtgatgtggtcgtgtgctgaggtgctcatactgcataccccgtgttcccaagctgcaaccatctgtggagcattcgagcagctcttgcatggctgctcgtttgcacacctcagwctcagctctcatagctatgagagctggagactttctggttcactgccttctccagatgttgggacacactcaacattggatctgtgtcaccacagaggtgctatgaagtcatttcaggttgtgaaggaaggaaaagggragccgtaagcagtaatcaagacctgattgttttccagagctgatcatcacagcaggaggtgagaacgttcctcccgttccaattgaggatgctgtaaaagaggcctgtcccatcatcagcaacgccatgctggttggagacaaagcaaaattccttgccatgcttctaacgctcaaggtgggattgatggtgcctgctgagtggaaaatgggatggggctgaaaggacacagactattttgcatctgtttaatacagtgaggtgactttttccagtacctcctggagcccgggggtgctg

SEQ ID NO: 45463 - DNA, 600 bp, Chicken  19866894285366_1
atgctgtgatgctcactcagttgggtttcttcagcctcccctttgctttgtcccgaactcggaacacaagagcttccctttttgctcctattccttctccttttacttctttagagagagggaatggaaggcctcgaacaaaaggaactggatctgtgattttgtcccacttcaccagtcagtgccctctcctaaacctgtcgttttactttctcactaacacagatctgccttcttcctgcagatatgcatcaacaggacgtgtgtcagtgcagctttcctcaacagcgactgtacagygaaacagtgccatggcagaggggtaggtagaaaacctccaactgtcctttgaagagcagaggatgtgaaatgtaaatttgcctttcagagcaacgtagaggtccagaatggttcctggctcagcagcacaaacattgttttggttcccacacatgacttccccccggatcctgctctgacagcttgcagccctccatctcggtgttcattgccttcttctgccatttttcttctccattcccacaaacactgcaaaaggtgacttctgcatcgtaacacttcgtccttcagtgcagctgt

SEQ ID NO: 45464 - DNA, 600 bp, Chicken  19866894285366_2
cgtagaggtccagaatggttcctggctcagcagcacaaacattgttttggttcccacacatgacttccccccggatcctgctctgacagcttgcagccctccatctcggtgttcattgccttcttctgccatttttcttctccattcccacaaacactgcaaaaggtgacttctgcatcgtaacacttcgtccttcagtgcagctgtcagtgctactgaatctaaatcagccagagtcggagcgatcttctgaaaaatgcatgctctgtatttgctctccttgcaaatgccacagaaacrgcagatyttgcacagcgtttcgatgcagccgtacataaaacccacgtttcaggcagcaacactggcagaatttcttcacacgggggtttattggtgatgccacccatacctgcccctctttccagacagatatccctgcagaggagcaggtctgtctgcgtgtcagagaggatgctaaaggagagctttgccatcacctttgcctgtctttatcttcatttcgaatcacacgaaggtgacaaattcatctgggacacgtttgtgaaatgctgcgttgtcgtggcagaaacagttacagcc

SEQ ID NO: 45465 - DNA, 600 bp, Chicken  19866894285366_3
gtccagaatggttcctggctcagcagcacaaacattgttttggttcccacacatgacttccccccggatcctgctctgacagcttgcagccctccatctcggtgttcattgccttcttctgccatttttcttctccattcccacaaacactgcaaaaggtgacttctgcatcgtaacacttcgtccttcagtgcagctgtcagtgctactgaatctaaatcagccagagtcggagcgatcttctgaaaaatgcatgctctgtatttgctctccttgcaaatgccacagaaacrgcagatyttgcacagcgtttcgatgcagccgtacataaaacccacgtttcaggcagcaacactggcagaatttcttcacacgggggtttattggtgatgccacccatacctgcccctctttccagacagatatccctgcagaggagcaggtctgtctgcgtgtcagagaggatgctaaaggagagctttgccatcacctttgcctgtctttatcttcatttcgaatcacacgaaggtgacaaattcatctgggacacgtttgtgaaatgctgcgttgtcgtggcagaaacagttacagcctccacaa

SEQ ID NO: 45466 - DNA, 600 bp, Chicken  19866894285373_1
ggtgatatttagtcattctagcaccgcttagcatcttatcttagaacctccttttcttccgtccacatattgtgctcttaagcaatgcagttaataatgttcagtagtttggagatcacatttaccagatctcctataacactattcaaacactcaagatccctacctccagaatcaccctgttacaaaaaccacctacacattcattttcagcttttcaaaagatggaagtctgccatcacaaagattcaaaattcagactctgtctcctgtgtagaatcttgaagagctcaccttgcyaaatggtgcttgaaaagttgtatcacagcatttcacaagtgagaaattaatcaggtctttcagctagcagaggtactttcatttggacaagagtcttcatttcaataaggaaagttgtatcactattttttttttaaagcagaagatactatggcatagtttagaaggaaacgatgyattatcctgcctgactacagagttcaattacagataatcctgtaatctgagactgatattaaaagcctatttgtttggtttttttttttaatgtgcaacaccactgtttttgtgctacaaakg

SEQ ID NO: 45467 - DNA, 600 bp, Chicken  19866894285373_2
ccctgttacaaaaaccacctacacattcattttcagcttttcaaaagatggaagtctgccatcacaaagattcaaaattcagactctgtctcctgtgtagaatcttgaagagctcaccttgcyaaatggtgcttgaaaagttgtatcacagcatttcacaagtgagaaattaatcaggtctttcagctagcagaggtactttcatttggacaagagtcttcatttcaataaggaaagttgtatcactattttttttttaaagcagaagatactatggcatagtttagaaggaaacgatgyattatcctgcctgactacagagttcaattacagataatcctgtaatctgagactgatattaaaagcctatttgtttggtttttttttttaatgtgcaacaccactgtttttgtgctacaaakgctgtaacagcataatctgattaacttyccgcatttgatgattctacagggtgttcataccaaaccagacaagttcagtaatcattacctgaacagcgtaacagagggcagagaagaacaggatggcagtcagactagttctggtgagagtctttatttctgtcactgtgatataaat

SEQ ID NO: 45468 - DNA, 600 bp, Chicken  19866894285373_3
yaaatggtgcttgaaaagttgtatcacagcatttcacaagtgagaaattaatcaggtctttcagctagcagaggtactttcatttggacaagagtcttcatttcaataaggaaagttgtatcactattttttttttaaagcagaagatactatggcatagtttagaaggaaacgatgyattatcctgcctgactacagagttcaattacagataatcctgtaatctgagactgatattaaaagcctatttgtttggtttttttttttaatgtgcaacaccactgtttttgtgctacaaakgctgtaacagcataatctgattaacttyccgcatttgatgattctacagggtgttcataccaaaccagacaagttcagtaatcattacctgaacagcgtaacagagggcagagaagaacaggatggcagtcagactagttctggtgagagtctttatttctgtcactgtgatataaatatagcagtcaagaataaggaactactgcttagaaggttagacactgggacaggcaaacgtatactggcacattctgcaccttaagttcatctttaagtgtcaaattctgtttgagttgtgat

SEQ ID NO: 45469 - DNA, 600 bp, Chicken  19866894285373_4
gcatttcacaagtgagaaattaatcaggtctttcagctagcagaggtactttcatttggacaagagtcttcatttcaataaggaaagttgtatcactattttttttttaaagcagaagatactatggcatagtttagaaggaaacgatgyattatcctgcctgactacagagttcaattacagataatcctgtaatctgagactgatattaaaagcctatttgtttggtttttttttttaatgtgcaacaccactgtttttgtgctacaaakgctgtaacagcataatctgattaacttyccgcatttgatgattctacagggtgttcataccaaaccagacaagttcagtaatcattacctgaacagcgtaacagagggcagagaagaacaggatggcagtcagactagttctggtgagagtctttatttctgtcactgtgatataaatatagcagtcaagaataaggaactactgcttagaaggttagacactgggacaggcaaacgtatactggcacattctgcaccttaagttcatctttaagtgtcaaattctgtttgagttgtgatttcagcaatgtatggaccatcaaaagct

SEQ ID NO: 45470 - DNA, 600 bp, Chicken  19866894285373_5
acaggatggcagtcagactagttctggtgagagtctttatttctgtcactgtgatataaatatagcagtcaagaataaggaactactgcttagaaggttagacactgggacaggcaaacgtatactggcacattctgcaccttaagttcatctttaagtgtcaaattctgtttgagttgtgatttcagcaatgtatggaccatcaaaagctcacaggtctgcttcatacccagagaacagctggaaaggccaatgaactgtggctacaggaacgttcttattctagcaatgaaaatttcrgatrctttrcatattgttttccagtaggagccaatattatctctacatttgagctctgccagggacttcaccattgctatgtttggcaaacataagaaatgatgaaatacattaattatagacctcattttcagagacacttaacttacatctcccagtgccctcttgcacagtggtatattgcttgttttaaaaatactggacatacgtatatattcaatgtcctctcgtcttcttctcaagtatttgggaactaaaaagcaccaaaagaattgtaaggtttttagtcaaaccaattaa

SEQ ID NO: 45471 - DNA, 600 bp, Chicken  19866894285373_6
gatggcagtcagactagttctggtgagagtctttatttctgtcactgtgatataaatatagcagtcaagaataaggaactactgcttagaaggttagacactgggacaggcaaacgtatactggcacattctgcaccttaagttcatctttaagtgtcaaattctgtttgagttgtgatttcagcaatgtatggaccatcaaaagctcacaggtctgcttcatacccagagaacagctggaaaggccaatgaactgtggctacaggaacgttcttattctagcaatgaaaatttcrgatrctttrcatattgttttccagtaggagccaatattatctctacatttgagctctgccagggacttcaccattgctatgtttggcaaacataagaaatgatgaaatacattaattatagacctcattttcagagacacttaacttacatctcccagtgccctcttgcacagtggtatattgcttgttttaaaaatactggacatacgtatatattcaatgtcctctcgtcttcttctcaagtatttgggaactaaaaagcaccaaaagaattgtaaggtttttagtcaaaccaattaatgaa

SEQ ID NO: 45472 - DNA, 600 bp, Chicken  19866894285373_7
cagtcagactagttctggtgagagtctttatttctgtcactgtgatataaatatagcagtcaagaataaggaactactgcttagaaggttagacactgggacaggcaaacgtatactggcacattctgcaccttaagttcatctttaagtgtcaaattctgtttgagttgtgatttcagcaatgtatggaccatcaaaagctcacaggtctgcttcatacccagagaacagctggaaaggccaatgaactgtggctacaggaacgttcttattctagcaatgaaaatttcrgatrctttrcatattgttttccagtaggagccaatattatctctacatttgagctctgccagggacttcaccattgctatgtttggcaaacataagaaatgatgaaatacattaattatagacctcattttcagagacacttaacttacatctcccagtgccctcttgcacagtggtatattgcttgttttaaaaatactggacatacgtatatattcaatgtcctctcgtcttcttctcaagtatttgggaactaaaaagcaccaaaagaattgtaaggtttttagtcaaaccaattaatgaatccga

SEQ ID NO: 45473 - DNA, 600 bp, Chicken  19866894285375_1
gagatattttaggaatccaagaaagagttctagatatattaccaatgcttgagaacaattcagctttgctttgttgagtgtcacgatgccacaaagatatagaagtgatgacttgacacttggcatctttttgtgccagaggtgtaatcttcctttctacataagaactcatccaaattttgtgatcttcaaaaaagagaaggaacaataacagaatggtgtcacgttatgtatggacactgagcaaagacattttgccatgctttttgtaccaaaaatacctctttctaaagcagctgyggctccccaggaccttcacaagaagcagtttcccttacagtaaacagagaccacattggttttactgataaagaatacagaaagattggttcttccagagtctctgctcaggggcactgataaccagagctgtgacatttcatagtatgtgagcacttgactttgcaaattwcctgatattttatcatcattttggggagcataatccacggaagctgtatgaaatccaatcttctgggcaccccattgagccttagcgcgcatctttttccccatgctcccctacgcttttgatagatg

SEQ ID NO: 45474 - DNA, 600 bp, Chicken  19866894285375_2
caatgcttgagaacaattcagctttgctttgttgagtgtcacgatgccacaaagatatagaagtgatgacttgacacttggcatctttttgtgccagaggtgtaatcttcctttctacataagaactcatccaaattttgtgatcttcaaaaaagagaaggaacaataacagaatggtgtcacgttatgtatggacactgagcaaagacattttgccatgctttttgtaccaaaaatacctctttctaaagcagctgyggctccccaggaccttcacaagaagcagtttcccttacagtyaacagagaccacattggttttactgataaagaatacagaaagattggttcttccagagtctctgctcaggggcactgataaccagagctgtgacatttcatagtatgtgagcacttgactttgcaaattwcctgatattttatcatcattttggggagcataatccacggaagctgtatgaaatccaatcttctgggcaccccattgagccttagcgcgcatctttttccccatgctcccctacgcttttgatagatgttgacttccaggctgaatgtttcggcttccagtttcatgtgt

SEQ ID NO: 45475 - DNA, 600 bp, Chicken  19866894285375_3
ccaaattttgtgatcttcaaaaaagagaaggaacaataacagaatggtgtcacgttatgtatggacactgagcaaagacattttgccatgctttttgtaccaaaaatacctctttctaaagcagctgyggctccccaggaccttcacaagaagcagtttcccttacagtaaacagagaccacattggttttactgataaagaatacagaaagattggttcttccagagtctctgctcaggggcactgataaccagagctgtgacatttcatagtatgtgagcacttgactttgcaaattwcctgatattttatcatcattttggggagcataatccacggaagctgtatgaaatccaatcttctgggcaccccattgagccttagcgcgcatctttttccccatgctcccctacgcttttgatagatgttgacttccaggctgaatgtttcggcttccagtttcatgtgttcctctctctgcgtgtaaaggcagattttaaagactttgaatgaataatttctcctttcatggcggaaaggcactgagagaaaatgttgaagcggggagaaatgtaataatttaaaccttgctgatgctt

SEQ ID NO: 45476 - DNA, 600 bp, Chicken  19866894285382_1
aattgctcagtagcaatacgctgctcgcttttcagtgtgtacgggcgggcatctgcatttccttctgcccagtgcctctacaaattgctctccctgtaaatcaaagtgaaatctgagcagagatttttctgattctgtttacagccctgaggtttgtggccctttctggatgtcacactcgcaatgtctttcccgtgaagaatgcaaaagtgcttgtctgtagccacggggagctgccaacaatatgtgcacgtatatagatatgtgtatatgtatatttacatatgtattctctctccyatcacaaraaataaagaagtgtactgctaggctctaaaagtagcctaatttgtaatttccttagttctccttgctatttctttatgcactcatctgagtttggtagaaattagttaagtcttcagatgattttggcaagttttagaaccagaagcttttctgaagggttgcaggataaccattaaatgtacagttatggggtgaggtcaagcagagaaaatgcagtgaggagagcatggggcagagggatgggaaggagggatccccatggtgtcataaatagaaataggaaagtaggtg

SEQ ID NO: 45477 - DNA, 600 bp, Chicken  19866894285382_2
agtagcaatacgctgctcgcttttcagtgtgtacgggcgggcatctgcatttccttctgcccagtgcctctacaaattgctctccctgtaaatcaaagtgaaatctgagcagagatttttctgattctgtttacagccctgaggtttgtggccctttctggatgtcacactcgcaatgtctttcccgtgaagaatgcaaaagtgcttgtctgtagccacggggagctgccaacaatatgtgcacgtatatagatatgtgtatatgtatatttacatatgtattctctctccyatcacaaraaataaagaagtgtactgctaggctctaaaagtagcctaatttgtaatttccttagttctccttgctatttctttatgcactcatctgagtttggtagaaattagttaagtcttcagatgattttggcaagttttagaaccagaagcttttctgaagggttgcaggataaccattaaatgtacagttatggggtgaggtcaagcagagaaaatgcagtgaggagagcatggggcagagggatgggaaggagggatccccatggtgtcataaatagaaataggaaagtaggtgtcagtgct

SEQ ID NO: 45478 - DNA, 600 bp, Chicken  19866894285386_1
tttgttagaatctgtgactattcctaaaaacattccagcaccaacagttaaattaaaaaatagaaggcacattttgataatgtacagaagttgcatatgtaaaattgtatattaacaacaatgccatttttatgtattttcccacgtacttacaaaaatattcacttggtgcatcatatacacaagtgtgtaaatgtttctctgatgtaggtagaacaacaactcatgaagctaaagacaaagaattgcagtgaagaagcacctttaggtgtgtctttacttcttttctactggcctccygagtatttatacttactgtgtatttttacttgtgcattgaagcccttgaagttgcttagtgattgctgttgtttttgtataatagtgcatattaaaatatgcagatttgtattttcctgtctgtctgaagacctcatgcaggaaaatacagaagggtaaaacctaccatccttgtcacattaatggagattctagagcatattttatcttatctgagtaaagttgtctaaaattgcacacattaattccttcagaaagtttccttgagttactggtaattgaaactccatagaccaacta

SEQ ID NO: 45479 - DNA, 600 bp, Chicken  19866894285390_1
tggttgacaagaatttctctgtttataacaaccctatcacaatgatagctgcatcatgctgggatgacaaaaggacattttgctagtaaactttaggaagtggggaaaacatttcactgcaaatgagaaaggaaagagaagagaccaacagaactatacttcattgagcaaagaaagactgtaaagaggacaacagttccccttctgccacagtggtgacaagaaaacttgagtagcaatgcctagaaggaaggaaaacagcagcaaagccaaagaaatgggcacaccatgggtacacartgcacaagaaccaagttgcaccctttctgtgtatgcctgtttgtttctattgtgcagacctgtttttgctttgctcgataattctctgtgctgaccttctaaggacagacacrttagggaatttcagatggtgctgtaatgtcttggccattgaaaactcttccttattatgtcggaaatgttctgttgatgctttctttagcaactttattggctctgttgcaaactgttatttaatttatattcagtttatgagctggctggcaggaacatcaagcaatttcagggggagatggattt

SEQ ID NO: 45480 - DNA, 600 bp, Chicken  19866894285390_2
tcactgcaaatgagaaaggaaagagaagagaccaacagaactatacttcattgagcaaagaaagactgtaaagaggacaacagttccccttctgccacagtggtgacaagaaaacttgagtagcaatgcctagaaggaaggaaaacagcagcaaagccaaagaaatgggcacaccatgggtacacartgcacaagaaccaagttgcaccctttctgtgtatgcctgtttgtttctattgtgcagacctgtttttgctttgctcgataattctctgtgctgaccttctaaggacagacacrttagggaatttcagatggtgctgtaatgtcttggccattgaaaactcttccttattatgtcggaaatgttctgttgatgctttctttagcaactttattggctctgttgcaaactgttatttaatttatattcagtttatgagctggctggcaggaacatcaagcaatttcagggggagatggatttttttttttttttaatagttactgctttggtaactaactaatttgtcatcgagctgttatattcctaatgaaccccattctcctattttcttattctgcacgtgcatgctgtca

SEQ ID NO: 45481 - DNA, 600 bp, Chicken  19866894285394_1
acattttcctctgcacctattaaactatttgatgatgctttttattttgcactataattgggaaagcaatcatgtgataaaatgtaagtttgttgtgaaataaaatacgcgatgtcgaaaacatccaaattatattgtccgagaaagtttctcagatgttctattcatttagaaaaattatgctattattatttttaagggttttttcacttttgggaataaatttttgagtattaatatatgcttgtaacagatacaataataatgggagattctgacattacttctatattaaaaagrgaggttgaaagtgttaaaatagctttgctctgtaatgggacttttatcttgtttcttgcttgagaaactgtcttgtatatgtgaaattttgatccatttgtgattgaggtagtaaagaaaatctgccaggactatgtattggcttacactagcaggactgaaaactttgtgtaggcttaaagagaaacacgcagaacaacatttgatgcaatttggtattatgcagtaaagaactacagaacacccacatggatttctttaataaaacactctccttttaattaaaaacagaggcataat

SEQ ID NO: 45482 - DNA, 600 bp, Chicken  19866894285395_1
ctgagctatttgaagtttcacctgaaaattttagcagtaagtggttattgaaatacacgtataacacaaaagagaattttattaactccattaaaatggaaaaacagatgtcaagcacaaagaattccacaaattattaaatgttcttttaacatcatcctccctcctccccaaaaggtagctgaataaatggattacctgtttgttggagaaaatactgagccaaatgctgttacttcagcctctcattttttaaaaaaagttgcacagtaccaaaatactttattcctataatgtgayatatttttttttcagtatgcctttttatttgtttcatgaaatgaatgaaaaaggggtaataggaataaaaagtggaagtcagggctaaaataaacgatttatagtcatgcatctctctgtagaaatgctaagtatccttgtcctaaggataattgcagcccttcggtggcaaagggtttaaagagacagctttcgttggtaattctcgggcttataggctacttgcagaggaagtccacctgttcagtccacatctacatcccctgaactggtcactcgtgtcacgtgacatcttggagg

SEQ ID NO: 45483 - DNA, 600 bp, Chicken  19866894285411_1
cgtgtctgcaggaggaacccgtgcactggattgctgctgctccctgtgcagtgcccacccttccttcttgtggctgcagcatggtggttgtttattatccctcccgcctccagcaaaaagcatttcaaatttcacagaacaactctctcaaacagctctctttatgtatgccaaaggtatagagagtcatgaaacacgcttactgggataaaactcttagctaatatgctggtatgatagtctttcctttgatgcgattctgccagtgtgcattacctgatagacacctgtggtgcctcyttttcagcagggtaattgcagtaatacatatcttagctgaagtagttttctggaagcataacatataaagcagtcatccaaaaacagagagaaaacaagagaaccattgtaaaacttcattttctagcaaacaaaagcatggattatgtccactggacaacacctaattgtacagtcctaccaggtttgttccttgctttcctatctgcaagtaattactccttagaaaataaatatatatttcttgaaatatcaaaatacaaaatagagttatttactttctttccacctccatttcag

SEQ ID NO: 45484 - DNA, 600 bp, Chicken  19866894285411_2
ataaaaacatagatgactgcagaatcaagtgaaaattcaacacaattcttttagataagatgatgaagaaccctgacacgagactttcagtgataattttctattgcgtattgaataaaattgcttagagtcatattccaatttttaattccaggcagctgtgtggatcatcaacattcctaaaggatctggggtaaattcaattactgaagaatgtttcacctggtagagaaaagttgagtggcagacattacattattggatgtttgtttattgatttctgaggagttatcctattayagttcttttatcccgctaaagactgcctcacacgtttttatataactcttcaggtctgagcagccatactgaaggagcgactcacgtggtctaaatccgtgtgagaaaaaaacgacgacaccaaacctttttaaaatytgtcaccagtttggaaataaagtttaaatttggccagggtcaaaactggattaagtatcgtaaatattyttctcaatagaaaaaggtgaataagcagaaaacttctgtgagacagtttgaatctaggaaagaagcaaacaaaaaactgccatgagaatgtta

SEQ ID NO: 45485 - DNA, 600 bp, Chicken  19866894285411_3
caatttttaattccaggcagctgtgtggatcatcaacattcctaaaggatctggggtaaattcaattactgaagaatgtttcacctggtagagaaaagttgagtggcagacattacattattggatgtttgtttattgatttctgaggagttatcctattayagttcttttatcccgctaaagactgcctcacacgtttttatataactcttcaggtctgagcagccatactgaaggagcgactcacgtggtctaaatccgtgtgagaaaaaaacgacgacaccaaacctttttaaaatytgtcaccagtttggaaataaagtttaaatttggccagggtcaaaactggattaagtatcgtaaatattyttctcaatagaaaaaggtgaataagcagaaaacttctgtgagacagtttgaatctaggaaagaagcaaacaaaaaactgccatgagaatgttaagggagaaattttcttgaaactgagatggaatctttccaaaatttgatacgtaccacagcacaaacgggctcttagtgacgtcttccattaactgttgcccgtatcacaattctgtgtgaatcagtcaactgagcata

SEQ ID NO: 45486 - DNA, 600 bp, Chicken  19866894285411_4
tgaagaatgtttcacctggtagagaaaagttgagtggcagacattacattattggatgtttgtttattgatttctgaggagttatcctattayagttcttttatcccgctaaagactgcctcacacgtttttatataactcttcaggtctgagcagccatactgaaggagcgactcacgtggtctaaatccgtgtgagaaaaaaacgacgacaccaaacctttttaaaatytgtcaccagtttggaaataaagtttaaatttggccagggtcaaaactggattaagtatcgtaaatattyttctcaatagaaaaaggtgaataagcagaaaacttctgtgagacagtttgaatctaggaaagaagcaaacaaaaaactgccatgagaatgttaagggagaaattttcttgaaactgagatggaatctttccaaaatttgatacgtaccacagcacaaacgggctcttagtgacgtcttccattaactgttgcccgtatcacaattctgtgtgaatcagtcaactgagcatagcataatatgaggtctgcatatgcattagctgtgatgctggataagtaattttattamggattatagag

SEQ ID NO: 45487 - DNA, 382 bp, Chicken  19866894285411_5
cgtaaatattyttctcaatagaaaaaggtgaataagcagaaaacttctgtgagacagtttgaatctaggaaagaagcaaacaaaaaactgccatgagaatgttaagggagaaattttcttgaaactgagatggaatctttccaaaatttgatacgtaccacagcacaaacgggctcttagtgacgtcttccattaactgttgcccgtatcacaattctgtgtgaatcagtcaactgagcatagcataatatgaggtctgcatatgcattagctgtgatgctggataagtaattttattamggattatagagtgatttgaaagcccccagtggaaatgtcagctactgttgtgagacaggcactctatgtatacacatgtata

SEQ ID NO: 45488 - DNA, 600 bp, Chicken  19866894285420_1
atgataagcaatttatccagctcacatcgctaggaagacctctgctctgtgcagagtggtcaaacagaaaatcatgtttatctttcaggactcaggttgaagtgcaaggctgcaagcaagtctattgggtgcttctacagcagtaatcgtagaatcatagactcataagggctgctgtgactcattcccttggagggctgtttttatgattcctctccaggaattctaccttaaaacactcagttaatgcctttaaataattccacggctttctgctgagccatctcagcacagcagtgyttccctctgtggtaagaatcttacccaggttcttggagattaaccgccctctctcactgcagtacatgaagccatactattgtctgaatatccctttcttttttcatttacctacaagtcagtgccatttaaaatgcaagcaatattgtcctaacatgatatatttcttgcatttcaacccatcatctcaaaccactgaattcagctgcaataactgctttatggcagagcctctgtctcacagacctcttaatgagctgtcgttatcacaaattgccctgaatgtctgacatcccccat

SEQ ID NO: 45489 - DNA, 599 bp, Chicken  19866894285427_1
  misc_feature (1)..(147): n is any nucleotide
nnnnnnnnnnnnnnnnnnnnnnnnnnnnnnnnnnnnnnnnnnnnnnnnnnnnnnnnnnnnnnnnnnnnnnnnnnnnnnnnnnnnnnnnnnnnnnnnnnnnnnnnnnnnnnnnnnnnnnnnnnnnnnnnnnnnnnnnnnnnnnnnnnngaaattaagttgctctacttttcactgtaaacacattttaatgacgcttcaggctataacccattactgtaagaatgcagaaaacctagaatcttgcagctaaaaagttctgcttagaaatgctgacccttttgataggattgctgtatcgtytagagtagcagctgctgttcttaaaataggaaaaattggaacaatttatacaatcccagtgtaataaagaaatgtctgggggaagggaataagctgaagtgcaggtaaagctagcagaggaggaatgttgggagcagctgtaytgctgcaggtaactctgtgtgctgtgcagtaccattgctccatgctgtgcagttttacaaggtaaasggaatttggtgtatcgtgcccatcagtcttctgccagcacactgccttgccagagtgttttatattttcatatggcataagtagaagcc

SEQ ID NO: 45490 - DNA, 599 bp, Chicken  19866894285427_2
  misc_feature (1)..(4): n is any nucleotide
nnnngaaattaagttgctctacttttcactgtaaacacattttaatgacgcttcaggctataacccattactgtaagaatgcagaaaacctagaatcttgcagctaaaaagttctgcttagaaatgctgacccttttgataggattgctgtatcgtytagagtagcagctgctgttcttaaaataggaaaaattggaacaatttatacaatcccagtgtaataaagaaatgtctgggggaagggaataagctgaagtgcaggtaaagctagcagaggaggaatgttgggagcagctgtaytgctgcaggtaactctgtgtgctgtgcagtaccattgctccatgctgtgcagttttacaaggtaaasggaatttggtgtatcgtgcccatcagtcttctgccagcacactgccttgccagagtgttttatattttcatatggcataagtagaagccttaatggttgtgcgggtcagattttgtattccacaaaagcagcatagaactgaagaagctgtatttgctatgtttttgtaccctcttccccttgtggctcctagcagctcctgcttacctctatccccatcaggcagcaggca

SEQ ID NO: 45491 - DNA, 600 bp, Chicken  19866894285427_3
ttactgtaagaatgcagaaaacctagaatcttgcagctaaaaagttctgcttagaaatgctgacccttttgataggattgctgtatcgtytagagtagcagctgctgttcttaaaataggaaaaattggaacaatttatacaatcccagtgtaataaagaaatgtctgggggaagggaataagctgaagtgcaggtaaagctagcagaggaggaatgttgggagcagctgtaytgctgcaggtaactctgtgtgctgtgcagtaccattgctccatgctgtgcagttttacaaggtaaasggaatttggtgtatcgtgcccatcagtcttctgccagcacactgccttgccagagtgttttatattttcatatggcataagtagaagccttaatggttgtgcgggtcagattttgtattccacaaaagcagcatagaactgaagaagctgtatttgctatgtttttgtaccctcttccccttgtggctcctagcagctcctgcttacctctatccccatcaggcagcaggcagcacacactgcaactgaaaatttgtcacttagtccaagctaatttaattatttttttaatttgtctta

SEQ ID NO: 45492 - DNA, 599 bp, Chicken  19866894285432_1
  misc_feature (1)..(113): n is any nucleotide
nnnnnnnnnnnnnnnnnnnnnnnnnnnnnnnnnnnnnnnnnnnnnnnnnnnnnnnnnnnnnnnnnnnnnnnnnnnnnnnnnnnnnnnnnnnnnnnnnnnnnnnnnnnnnnnnngagcacagcgaggtcgtgtcatcagcatggtctggtgggaaagtctgtgttcaggcataaagtgatatttcagagcctcgtttaggagatgtttacaggtatggtcatcacgaatgagatggtttgcttcgtacagcctcgtaaggaacttcacactcagcagcggcagtcggacgcagtgcagcarctgtgctaaatacttttgtcgctcctgaacatcatatttgatccaggactccagtgcataaaaaaccgtttcttctgtcacgacattcaagcagtcattggaaacaatttcatccaattcagaatgcgtaagctcaaagaattcttcagtctgacaaacatcttcaaagttctgacagatgtacttgttagcagccaagtagaggtcgtggcagccataggtctctgcaaaacgagaaatcccaatgcagttgccaggatcaagctggctctccaggaaggcgcagcactccttcacca

SEQ ID NO: 45493 - DNA, 600 bp, Chicken  19866894285435_1
tactggtgctgaagctcatttgcatgtatctcctttgtcaggttgttttctatgcttacttgaaaggcaacaccatgaacagctgtaacaatatacaaggacgcacgggagtatcagagcagcaagacctctgcatgctcagagcatccatggaaatcacctcatctaacagcagctgtccaaaaagtgaggtaatgaggtacctaagttctcttatgccaatggaaggagatgagcaccatccaaagggacatcattcccagtccaaaattggcacctgagatggaaactgaatggcaygggtgtgtgtttcttccttgtcacacagtcattaaggttggaaaagaccactaagattaatacagtccaaccatcagcccatcccaccgtgcccactgcccacgtccctcagtgccacatccacayggatcttgaacaccttgtagggacggtgactccaccacctccccgtgcagcctgtgccactgcctcactgctctctgtgagaagaaatgtttcctaatatccaccctaaccatacagagagcctaaagcaaacagcctaagtgaaccttcgggaggtaaatacgtgaggtcaga

SEQ ID NO: 45494 - DNA, 600 bp, Chicken  19866894285435_2
acctctgcatgctcagagcatccatggaaatcacctcatctaacagcagctgtccaaaaagtgaggtaatgaggtacctaagttctcttatgccaatggaaggagatgagcaccatccaaagggacatcattcccagtccaaaattggcacctgagatggaaactgaatggcaygggtgtgtgtttcttccttgtcacacagtcattaaggttggaaaagaccactaagattaatacagtccaaccatcagcccatcccaccgtgcccactgcccacgtccctcagtgccacatccacayggatcttgaacaccttgtagggacggtgactccaccacctccccgtgcagcctgtgccactgcctcactgctctctgtgagaagaaatgtttcctaatatccaccctaaccatacagagagcctaaagcaaacagcctaagtgaaccttcgggaggtaaatacgtgaggtcagagatatctactgagagcagaagtctgctgctgtggatggagatagacaagggctgcgtcagggagaatatgataagagaaaagaaaaaaaaaaaccaccatcaacataaactgggtcaagaagctgc

SEQ ID NO: 45495 - DNA, 600 bp, Chicken  19866894285438_1
ccacccgatgcacatcccttgttcacagcaaaggcttgcatgaaggaaacacgactggtatcacactgagatgcatttttcctccttgggattgcacacccacattcccaaaggaacggcctggagtagagaggagggagtgcccgaagggttaattcccaccccagaagcgagctgcggcagctgacattgctgccctgcaatccgagtccctggcatgattgcagccacatttccagctgcaatttcacgaggcagcgtgaccaagaagtaattcaatgcagctgccgaagtccatgsgtattgacaccaagtgattgctgaggctgctgtgcaacagttgcatttctcaaatgataggacacaagaagagccagaagggcgagagcagcccctgatttggggcagccatttgggggctctcctgtagacaaacagcttgccctgcctgcttagtgatcagtggccaacatcccccagccaattaaacacacatacacgggatagagctgctttcctgccctgtgtcagctatacctgttccactaccagcaattaagacctaagaaagacctaaaaatgtgggtaggcagaaggtct

SEQ ID NO: 45496 - DNA, 600 bp, Chicken  19866894285441_1
atgcagttgggcccgtgtgatgaaagctgtattagggctccaaatagaaaccctctttttctccagagtttgcaatttagctgtgaaaattcagcccgagtcaaatttcaacaccaaaatatgttgggagaaaatgtggggagaaaatgcatttgcttgttttacctccaaaattagtttggctttttatccctttgatgctgtttaagtgtgaaaaatgagaacatcagtaacgggtttcaatatatattgggaatcaatgcattgaaaggcaaacaagatggtcacagtggaggaaaraaaggatgatctattttgcttctgtggttttcycactcagggaccactacctcagcatcctttcccttatttctggggcagccagaagggcgctcttgcagactgctctgcatatgaccagtatcagcatctgcctgtctccttttctccagtgtttaagtaatggcttatttctaatgtctctggaaattcaaacggtatttccccctccagattttgatgttgtttttttttttattcctcaggatgcagcttttattttaggtctgtaggttttgggctgctctcccagtacaaagt

SEQ ID NO: 45497 - DNA, 600 bp, Chicken  19866894285441_2
agggctccaaatagaaaccctctttttctccagagtttgcaatttagctgtgaaaattcagcccgagtcaaatttcaacaccaaaatatgttgggagaaaatgtggggagaaaatgcatttgcttgttttacctccaaaattagtttggctttttatccctttgatgctgtttaagtgtgaaaaatgagaacatcagtaacgggtttcaatatatattgggaatcaatgcattgaaaggcaaacaagatggtcacagtggaggaaaraaaggatgatctattttgcttctgtggttttcycactcagggaccactacctcagcatcctttcccttatttctggggcagccagaagggcgctcttgcagactgctctgcatatgaccagtatcagcatctgcctgtctccttttctccagtgtttaagtaatggcttatttctaatgtctctggaaattcaaacggtatttccccctccagattttgatgttgtttttttttttattcctcaggatgcagcttttattttaggtctgtaggttttgggctgctctcccagtacaaagtatgcagcgtctcactgcaaccccttacaaaggc

SEQ ID NO: 45498 - DNA, 599 bp, Chicken  19866894285443_1
  misc_feature (1)..(98): n is any nucleotide
nnnnnnnnnnnnnnnnnnnnnnnnnnnnnnnnnnnnnnnnnnnnnnnnnnnnnnnnnnnnnnnnnnnnnnnnnnnnnnnnnnnnnnnnnnnnnnnnnntgttaatggtaataattatgttaactaggaaggaaaagaattgaacagggaattagaggttcctttcacatatatgaacgtgtcttccagaacactgattgtaacacagacatgtttagaatgcaaaacactggggggcaggaacaatatagtgctgggccacaggattcgccaaatgaggaaaggacccatttgttatgckcagttgttgcaaaaaagatggtgcacaagtgtcagagacccagacaaacttggtctgaattcagagggaagctctggtgctacactgaatattgatggactacttgcggcatggctggcaaactgcacatgcctggtaaaccctacacagtctcatttgtaaaacaatgccraacttctgcattaaaggctgagcactctctgactcatgaattttggagaactgtaatttaactgatgagataacgttgacctttctggtggaattttcgtcgtatctggtgcggccatttctatgcc

SEQ ID NO: 45499 - DNA, 600 bp, Chicken  19866894285443_2
tgaacgtgtcttccagaacactgattgtaacacagacatgtttagaatgcaaaacactggggggcaggaacaatatagtgctgggccacaggattcgccaaatgaggaaaggacccatttgttatgckcagttgttgcaaaaaagatggtgcacaagtgtcagagacccagacaaacttggtctgaattcagagggaagctctggtgctacactgaatattgatggactacttgcggcatggctggcaaactgcacatgcctggtaaaccctacacagtctcatttgtaaaacaatgccraacttctgcattaaaggctgagcactctctgactcatgaattttggagaactgtaatttaactgatgagataacgttgacctttctggtggaattttcgtcgtatctggtgcggccatttctatgcctgcccttccacaacaatcactgacaatttttgcatagcagaaacaagtgacctcctgagtattctgctcagggaaaaagaattgcccagggctataagtgtacactctctgacttgttccttcagttgtagaagctcactgccctcttgtagcctcttttcattgtacagctc

SEQ ID NO: 45500 - DNA, 600 bp, Chicken  19866894285444_1
gatcaattgtctccacgtttcacagagtagatgcctgggggagtctgaaagaggccgttctttcttttagatggtttaaagtagtgggttgatgtcggtggctccaggtgtgcagtggttgggtgcccaccagcttgggcacagtgggtagggcgcccatgggcttggcatggccaaggggatgctgcttgatcctagtgctagggcagctgtgcagcctgggactcttgggggaaaaagatgtggaaaaaggggttgaaaggcagcgctgcatctacggctgcccagtaggtgggaackgggggcaaaaccccgagctgggagccccaggcaccgcatccatcccgcccgggggcgatgctcgagctcgccgtttctgggatctaatttccgagaagccgagcgcatcgctcacgccgcgtcattaaaacaagcatcattcatccccatgtcacggcgcgagcagccttagccccgcggggaggaaaaacctgtccagcgaggaagaaaagggcccataagcacaaaaagcgcgtgctgaccccatcccgctgcgcgccgggcactgagcgagccgctcctcggcgtgtttttgccagc

SEQ ID NO: 45501 - DNA, 600 bp, Chicken  19866894285451_1
ctgattagtttagtccccaagcaaggagcagagggtgcagggtgctcccgagttaggatgatgggatgctcagagggtgcagggtgctcccctgccccactgtgtgcacccattggggtgcagtgctcagccctgtgccaccaccaatgcttttgtgccagtcctgagctgcagactgtgctcagggcttcctttacactttctattgcagattggctgaattttttattattactattattttttaccctgtgcttcaagaataatctgaattctagggaagagtttttttaaatgccygtctcctctgtaatttttctgtcatgccatagagaggagctgcttgagagatttcagcamagaaawtacctacttcagtcctaggtgttttttgttgttgttgttgttactgttggttctttaaatgcctttaaaaaaattgctctttgatgtgaaaattatatgcacttagagatatgctaatatggatctgactggaggagtgctgagcatggagagcagctcgtttccaggctccctccttcaccacctgcatctcagtcagccgcagcctcatccttccctgtgccagtctctctc

SEQ ID NO: 45502 - DNA, 600 bp, Chicken  19866894285451_2
atgggatgctcagagggtgcagggtgctcccctgccccactgtgtgcacccattggggtgcagtgctcagccctgtgccaccaccaatgcttttgtgccagtcctgagctgcagactgtgctcagggcttcctttacactttctattgcagattggctgaattttttattattactattattttttaccctgtgcttcaagaataatctgaattctagggaagagtttttttaaatgccygtctcctctgtaatttttctgtcatgccatagagaggagctgcttgagagatttcagcamagaaawtacctacttcagtcctaggtgttttttgttgttgttgttgttactgttggttctttaaatgcctttaaaaaaattgctctttgatgtgaaaattatatgcacttagagatatgctaatatggatctgactggaggagtgctgagcatggagagcagctcgtttccaggctccctccttcaccacctgcatctcagtcagccgcagcctcatccttccctgtgccagtctctctctatagccgtgctatttacatggctactcctcatttaaattaggtttaaaagcagattctt

SEQ ID NO: 45503 - DNA, 600 bp, Chicken  19866894285451_3
tgctcagagggtgcagggtgctcccctgccccactgtgtgcacccattggggtgcagtgctcagccctgtgccaccaccaatgcttttgtgccagtcctgagctgcagactgtgctcagggcttcctttacactttctattgcagattggctgaattttttattattactattattttttaccctgtgcttcaagaataatctgaattctagggaagagtttttttaaatgccygtctcctctgtaatttttctgtcatgccatagagaggagctgcttgagagatttcagcamagaaawtacctacttcagtcctaggtgttttttgttgttgttgttgttactgttggttctttaaatgcctttaaaaaaattgctctttgatgtgaaaattatatgcacttagagatatgctaatatggatctgactggaggagtgctgagcatggagagcagctcgtttccaggctccctccttcaccacctgcatctcagtcagccgcagcctcatccttccctgtgccagtctctctctatagccgtgctatttacatggctactcctcatttaaattaggtttaaaagcagattctttgtgtt

SEQ ID NO: 45504 - DNA, 599 bp, Chicken  19866894285454_1
  misc_feature (1)..(103): n is any nucleotide
nnnnnnnnnnnnnnnnnnnnnnnnnnnnnnnnnnnnnnnnnnnnnnnnnnnnnnnnnnnnnnnnnnnnnnnnnnnnnnnnnnnnnnnnnnnnnnnnnnnnnnntgtagcttctgaaggtaaggagctgccttgcctatttgtctaaaaacgtctggtatgatctctaacgtgttgtcttttgcaagtagaagaaaataacttcttaaaactgtaacttaaaactataacatcttttaccttgatcagatggcaaaatagtaggtgtttatgagttttctattgtctattaaaaagaaatwacatgctactgctctgaaaatgtaaatttacatttgtaattaaatttttctaaaarctgaatttgttcacatagtatcacacatcccagaagctttggctagagttccctggcagttgcgggaaaagattttcaagcttcttgcaaaacaagagaatgattttcttaaagcacatgagagagwttgactttcagttgcttgaattccaagtcctgtaaaaagaatcatatttgttgatctgaaaagtactgtaacattttaaacacttcaggtgtttgaagtcaaatgggcagtgtctt

SEQ ID NO: 45505 - DNA, 599 bp, Chicken  19866894285454_2
  misc_feature (1)..(47): n is any nucleotide
nnnnnnnnnnnnnnnnnnnnnnnnnnnnnnnnnnnnnnnnnnnnnnntgtagcttctgaaggtaaggagctgccttgcctatttgtctaaaaacgtctggtatgatctctaacgtgttgtcttttgcaagtagaagaaaataacttcttaaaactgtaacttaaaactataacatcttttaccttgatcagatggcaaaatagtaggtgtttatgagttttctattgtctattaaaaagaaatwacatgctactgctctgaaaatgtaaatttacatttgtaattaaatttttctaaaarctgaatttgttcacatagtatcacacatcccagaagctttggctagagttccctggcagttgcgggaaaagattttcaagcttcttgcaaaacaagagaatgattttcttaaagcacatgagagagwttgactttcagttgcttgaattccaagtcctgtaaaaagaatcatatttgttgatctgaaaagtactgtaacattttaaacacttcaggtgtttgaagtcaaatgggcagtgtctttgagtatggatactcagggactctaaatgagcaaaatttgtttggagcttactgtc

SEQ ID NO: 45506 - DNA, 600 bp, Chicken  19866894285454_3
aagtagaagaaaataacttcttaaaactgtaacttaaaactataacatcttttaccttgatcagatggcaaaatagtaggtgtttatgagttttctattgtctattaaaaagaaatwacatgctactgctctgaaaatgtaaatttacatttgtaattaaatttttctaaaarctgaatttgttcacatagtatcacacatcccagaagctttggctagagttccctggcagttgcgggaaaagattttcaagcttcttgcaaaacaagagaatgattttcttaaagcacatgagagagwttgactttcagttgcttgaattccaagtcctgtaaaaagaatcatatttgttgatctgaaaagtactgtaacattttaaacacttcaggtgtttgaagtcaaatgggcagtgtctttgagtatggatactcagggactctaaatgagcaaaatttgtttggagcttactgtctgctgctgttagtaaatggatagtaaaatggatattctgctggaaaggaacataaaggtagcttcactcgtcttctttaaaacaattccttggaggttgtgaatgcagccctgggatttgaaggtaaa

SEQ ID NO: 45507 - DNA, 600 bp, Chicken  19866894285455_1
tttatcacccggagcatgaaatctgcaagtaacaaatgcatgactgctcccaactactggcttcttcttcttggcaccaccagctcctgtcagcctgaacaaatgtcttcacaactgcaagatccttgaccttccacaaacagttttcaagtctggtatgtgaaaacagactgtccgcaaactatgcactctgctgagattacaaggattgcacattcagaaagggccccattatgaccattattctgctcaacagaaatacgaatgcagaacccacagtccctgagacttgggattcgyggggcaaataatatttgccattaacggggctcacaaaaactactgtcttttaaaatgtactgtcaaaaatgagtcaaaagatttcaggtgtcaatccaagttccatttaaattaacaccttcatttaagtaattttaaactcatactagtaatgacatttcactgtcttttcatcaaatgttccagaggaacagatactgagcagctgacatgcactgctccaggctctggtggaaagctgtgaggtggttttgactgcggggctcaatggggtttctggcatcaagtacttcagaggaa

SEQ ID NO: 45508 - DNA, 600 bp, Chicken  19866894285459_1
agtgtgtagatgctgttggtgtaaccatcacagttgcagctgtcgtgttcacggcccccgtttccagatgcccagacgaagatggagcccagccccccgcgtccctgacaacaaaggcagagtgagcaccggtgcccgtgcagcatgcagctcatggcacaccaagcaccacagggcatggcaggcagctgggacccagtgaaagacacagcgctcccagccgatgcagcaggatgtggacacagcggccacaggagctgccctggatggcaccggtggcagaggcactgcagaattgtwttttccaagaacagatgtccttctctgcccagaaatcacccaggctggctgcagggttgtgcacaactcccagcagccccacggcagccctgcagggtgttactgagcgccatggctctgctcagtgtgtggggcagagctggcaccatgtggggatctgccagcagcgtgcccacattttcatgtggggaatcccaggcaaaatgcagcacagggctgcaccgcagccatgctgaggctgagctcacagctggggtcagtggggaaggacaggtggtggcagggctgaggtgagtggca

SEQ ID NO: 45509 - DNA, 600 bp, Chicken  19866894285462_1
gccctaagcacatgcttgatggcttttctgaactgtgtcccaaatcctgctttacctattaatgtgaatagccctattgaattcagtcaggcggctcatgggaattcagatagaaaaccttggctctactttggtaaactaaaattcaagaacagcctgagtataccataacaaagaccctaaagccagcgaggaccatgaaaggagctcatttcattactaaatcaatttataagtataaacacggagttatctgactaaaatatgggttttccctatttgaaatactgcacctccaaygtacttgatgtcaccaataggcaccccttaaggaagcaggcrgcatgctgcctttggatacccaaccataaatcaagagatttcctgaagtctgcctggaatagtggagagtagccaaaattacatgaagtgctatttgtgtgctattagttgtggggtgtgtgggggggagtgtggggaaggaaaaaggggaagaaggaaaaccactttcttaatagttcctacgatatttggaaaacattcattcattgcatccatttatcaggcttccatgtaataactccgggtcagaaaagaaaa

SEQ ID NO: 45510 - DNA, 600 bp, Chicken  19866894285462_2
aatcctgctttacctattaatgtgaatagccctattgaattcagtcaggcggctcatgggaattcagatagaaaaccttggctctactttggtaaactaaaattcaagaacagcctgagtataccataacaaagaccctaaagccagcgaggaccatgaaaggagctcatttcattactaaatcaatttataagtataaacacggagttatctgactaaaatatgggttttccctatttgaaatactgcacctccaaygtacttgatgtcaccaataggcaccccttaaggaagcaggcrgcatgctgcctttggatacccaaccataaatcaagagatttcctgaagtctgcctggaatagtggagagtagccaaaattacatgaagtgctatttgtgtgctattagttgtggggtgtgtgggggggagtgtggggaaggaaaaaggggaagaaggaaaaccactttcttaatagttcctacgatatttggaaaacattcattcattgcatccatttatcaggcttccatgtaataactccgggtcagaaaagaaaaccctgaaggggcggtggggtgaggaaaccagggatactgggt

SEQ ID NO: 45511 - DNA, 600 bp, Chicken  19866894285462_3
agttcctacgatatttggaaaacattcattcattgcatccatttatcaggcttccatgtaataactccgggtcagaaaagaaaaccctgaaggggcggtggggtgaggaaaccagggatactgggttctgactgggaaaaactggaatgttgtcaatgtttccatttaaaagaaatagtgtaattacaaagcgatgtttgtgtctaggtgccacgcagtggtagcagatgaggtcaatttgttctgctcagcagtttcacatctgaacaacagctcagtcttagaacttctaagattgcrtgttcagacagtgcagcactcccacatatccactgcaacgcccccaatagctggaagagcctggctgaggggagggccaggtcccacagcaaagccctgaacctcgtgccccccagccgtgctgcagtgctcagggctgggttctgcaccgctgcagggctgcgatgctgtgacatattaaagaagggatccctacgagagaacacaccatgactgcagacacgagcggggctcctctctgccggagctccagagccattccctgctttcactggtgaccaaaacatcacagagtcatct

SEQ ID NO: 45512 - DNA, 599 bp, Chicken  19866894285464_1
  misc_feature (1)..(208): n is any nucleotide
nnnnnnnnnnnnnnnnnnnnnnnnnnnnnnnnnnnnnnnnnnnnnnnnnnnnnnnnnnnnnnnnnnnnnnnnnnnnnnnnnnnnnnnnnnnnnnnnnnnnnnnnnnnnnnnnnnnnnnnnnnnnnnnnnnnnnnnnnnnnnnnnnnnnnnnnnnnnnnnnnnnnnnnnnnnnnnnnnnnnnnnnnnnnnnnnnnnnnnnnnnnnnnnncatgaattaccaaagtgctctgaagtagctcggtagcacagtccctgagtgctgactgtctgcctgagaacaaactaagaaccacgtctcayrtggcaggaaaatgctgcttctcaggtagattaccttctacctctactacagttgtactcacaaccactttaaaagaatgatgcttcccaattgagatggtagcttcattcgaagaagaaagagaaccaaatcccatcaccgcagcacctcagctgaacgaacaacgaaataacttcrctgcaaacaatgtcctcaggggacagaactcctaagcgtgaccctcaccttcacagcagcactcacacacagcagtgggacttccarccactcacatttgaggccgcataggccaaaycaa

SEQ ID NO: 45513 - DNA, 599 bp, Chicken  19866894285464_2
  misc_feature (1)..(207): n is any nucleotide
nnnnnnnnnnnnnnnnnnnnnnnnnnnnnnnnnnnnnnnnnnnnnnnnnnnnnnnnnnnnnnnnnnnnnnnnnnnnnnnnnnnnnnnnnnnnnnnnnnnnnnnnnnnnnnnnnnnnnnnnnnnnnnnnnnnnnnnnnnnnnnnnnnnnnnnnnnnnnnnnnnnnnnnnnnnnnnnnnnnnnnnnnnnnnnnnnnnnnnnnnnnnnnncatgaattaccaaagtgctctgaagtagctcggtagcacagtccctgagtgctgactgtctgcctgagaacaaactaagaaccacgtctcayrtggcaggaaaatgctgcttctcaggtagattaccttctacctctactacagttgtactcacaaccactttaaaagaatgatgcttcccaattgagatggtagcttcattcgaagaagaaagagaaccaaatcccatcaccgcagcacctcagctgaacgaacaacgaaataacttcrctgcaaacaatgtcctcaggggacagaactcctaagcgtgaccctcaccttcacagcagcactcacacacagcagtgggacttccarccactcacatttgaggccgcataggccaaaycaac

SEQ ID NO: 45514 - DNA, 599 bp, Chicken  19866894285464_3
  misc_feature (1)..(30): n is any nucleotide
nnnnnnnnnnnnnnnnnnnnnnnnnnnnnncatgaattaccaaagtgctctgaagtagctcggtagcacagtccctgagtgctgactgtctgcctgagaacaaactaagaaccacgtctcayrtggcaggaaaatgctgcttctcaggtagattaccttctacctctactacagttgtactcacaaccactttaaaagaatgatgcttcccaattgagatggtagcttcattcgaagaagaaagagaaccaaatcccatcaccgcagcacctcagctgaacgaacaacgaaataacttcrctgcaaacaatgtcctcaggggacagaactcctaagcgtgaccctcaccttcacagcagcactcacacacagcagtgggacttccarccactcacatttgaggccgcataggccaaaycaacggccggctgagcactgccctgaagaagagatcagcagccttccgtcctcctcccgccacgcacagtcactgtatcacacaccatccttctcctcccccacctcagcagtctcaggcgctgcttaatgaggctttggyggtggtggtggcggcaggatgcttccaagcaccccgtgga

SEQ ID NO: 45515 - DNA, 600 bp, Chicken  19866894285464_4
gtctgcctgagaacaaactaagaaccacgtctcayrtggcaggaaaatgctgcttctcaggtagattaccttctacctctactacagttgtactcacaaccactttaaaagaatgatgcttcccaattgagatggtagcttcattcgaagaagaaagagaaccaaatcccatcaccgcagcacctcagctgaacgaacaacgaaataacttcrctgcaaacaatgtcctcaggggacagaactcctaagcgtgaccctcaccttcacagcagcactcacacacagcagtgggacttccarccactcacatttgaggccgcataggccaaaycaacggccggctgagcactgccctgaagaagagatcagcagccttccgtcctcctcccgccacgcacagtcactgtatcacacaccatccttctcctcccccacctcagcagtctcaggcgctgcttaatgaggctttggyggtggtggtggcggcaggatgcttccaagcaccccgtggacatcggtgcccttcggacccatagagcagcccgtgtgatctgtggctgcagccaacacgcggccggatcgcagagcgcgttttcagcg

SEQ ID NO: 45516 - DNA, 600 bp, Chicken  19866894285464_5
tcayrtggcaggaaaatgctgcttctcaggtagattaccttctacctctactacagttgtactcacaaccactttaaaagaatgatgcttcccaattgagatggtagcttcattcgaagaagaaagagaaccaaatcccatcaccgcagcacctcagctgaacgaacaacgaaataacttcrctgcaaacaatgtcctcaggggacagaactcctaagcgtgaccctcaccttcacagcagcactcacacacagcagtgggacttccarccactcacatttgaggccgcataggccaaaycaacggccggctgagcactgccctgaagaagagatcagcagccttccgtcctcctcccgccacgcacagtcactgtatcacacaccatccttctcctcccccacctcagcagtctcaggcgctgcttaatgaggctttggyggtggtggtggcggcaggatgcttccaagcaccccgtggacatcggtgcccttcggacccatagagcagcccgtgtgatctgtggctgcagccaacacgcggccggatcgcagagcgcgttttcagcgcgtcgctcccaagtgggagcgctgcggaagg

SEQ ID NO: 45517 - DNA, 600 bp, Chicken  19866894285464_6
caccgcagcacctcagctgaacgaacaacgaaataacttcrctgcaaacaatgtcctcaggggacagaactcctaagcgtgaccctcaccttcacagcagcactcacacacagcagtgggacttccarccactcacatttgaggccgcataggccaaaycaacggccggctgagcactgccctgaagaagagatcagcagccttccgtcctcctcccgccacgcacagtcactgtatcacacaccatccttctcctcccccacctcagcagtctcaggcgctgcttaatgaggctttggyggtggtggtggcggcaggatgcttccaagcaccccgtggacatcggtgcccttcggacccatagagcagcccgtgtgatctgtggctgcagccaacacgcggccggatcgcagagcgcgttttcagcgcgtcgctcccaagtgggagcgctgcggaaggcgccctgctcgcttcagcaacggggaagaacagaagaggacaccaacctctctcaccagtcccagcagctcagcttcgtaagccagcacgtcgcccatcgctgagcggcaccgccaggctcagcggcgatgcagctggaaa

SEQ ID NO: 45518 - DNA, 600 bp, Chicken  19866894285468_1
aagacctttacagaggccttgagtaagggttggcaagatcagtctttgaagtgagtagtaactcaattttagctctgtatccctgtttcaaaaccacaattcctaatgtatttatttacaaatactattcagttaaaaataactttttcatctttatttaaaaataaagttttttatttaccttggctgatgatgacatctttgtgcctagggaaaaattcaaagttattgttaggactttacgaaactcatatcatctaattttatattttattccattaggcactatacacagactckgagtctgtgtataatrtaactgtaccacaggatgccatataattaactttggtcaacattgcaaacttttacacacattatttcaatcaggtctctatatttttatttttaagttaaagtgcttgacagcatggcaagggttcctaagaactactttgacarcaagaagtaaaatgatgtttaaaataaattatcaaggttatattttttgtgcactgaaaattccattttaagagcaaayrtgtaacaataaaatgttttaagcttccaaacaccctcaggtctgcatgtgaagaattt

SEQ ID NO: 45519 - DNA, 600 bp, Chicken  19866894285468_2
ccttgagtaagggttggcaagatcagtctttgaagtgagtagtaactcaattttagctctgtatccctgtttcaaaaccacaattcctaatgtatttatttacaaatactattcagttaaaaataactttttcatctttatttaaaaataaagttttttatttaccttggctgatgatgacatctttgtgcctagggaaaaattcaaagttattgttaggactttacgaaactcatatcatctaattttatattttattccattaggcactatacacagactckgagtctgtgtataatrtaactgtaccacaggatgccatataattaactttggtcaacattgcaaacttttacacacattatttcaatcaggtctctatatttttatttttaagttaaagtgcttgacagcatggcaagggttcctaagaactactttgacarcaagaagtaaaatgatgtttaaaataaattatcaaggttatattttttgtgcactgaaaattccattttaagagcaaayrtgtaacaataaaatgttttaagcttccaaacaccctcaggtctgcatgtgaagaatttaccacctgtcaaaaca

SEQ ID NO: 45520 - DNA, 600 bp, Chicken  19866894285468_3
aataaagttttttatttaccttggctgatgatgacatctttgtgcctagggaaaaattcaaagttattgttaggactttacgaaactcatatcatctaattttatattttattccattaggcactatacacagactckgagtctgtgtataatrtaactgtaccacaggatgccatataattaactttggtcaacattgcaaacttttacacacattatttcaatcaggtctctatatttttatttttaagttaaagtgcttgacagcatggcaagggttcctaagaactactttgacarcaagaagtaaaatgatgtttaaaataaattatcaaggttatattttttgtgcactgaaaattccattttaagagcaaayrtgtaacaataaaatgttttaagcttccaaacaccctcaggtctgcatgtgaagaatttaccacctgtcaaaacaagctgtctgcacacaacaacatgaaattctctaggaattaaccctgttagacatgtgggttaaatgtaagcaagtcaaagtttcatttataatggatccacacagcattactggatatacacacaaagccttcttaaggaatgcag

SEQ ID NO: 45521 - DNA, 600 bp, Chicken  19866894285468_4
acgaaactcatatcatctaattttatattttattccattaggcactatacacagactckgagtctgtgtataatrtaactgtaccacaggatgccatataattaactttggtcaacattgcaaacttttacacacattatttcaatcaggtctctatatttttatttttaagttaaagtgcttgacagcatggcaagggttcctaagaactactttgacarcaagaagtaaaatgatgtttaaaataaattatcaaggttatattttttgtgcactgaaaattccattttaagagcaaayrtgtaacaataaaatgttttaagcttccaaacaccctcaggtctgcatgtgaagaatttaccacctgtcaaaacaagctgtctgcacacaacaacatgaaattctctaggaattaaccctgttagacatgtgggttaaatgtaagcaagtcaaagtttcatttataatggatccacacagcattactggatatacacacaaagccttcttaaggaatgcagttcagatgtctttccttgccagaaccaagaatgaactttcacaaaaattctgtttcgggggagggaaggaatactgatt

SEQ ID NO: 45522 - DNA, 600 bp, Chicken  19866894285468_5
cgaaactcatatcatctaattttatattttattccattaggcactatacacagactckgagtctgtgtataatrtaactgtaccacaggatgccatataattaactttggtcaacattgcaaacttttacacacattatttcaatcaggtctctatatttttatttttaagttaaagtgcttgacagcatggcaagggttcctaagaactactttgacarcaagaagtaaaatgatgtttaaaataaattatcaaggttatattttttgtgcactgaaaattccattttaagagcaaayrtgtaacaataaaatgttttaagcttccaaacaccctcaggtctgcatgtgaagaatttaccacctgtcaaaacaagctgtctgcacacaacaacatgaaattctctaggaattaaccctgttagacatgtgggttaaatgtaagcaagtcaaagtttcatttataatggatccacacagcattactggatatacacacaaagccttcttaaggaatgcagttcagatgtctttccttgccagaaccaagaatgaactttcacaaaaattctgtttcgggggagggaaggaatactgattt

SEQ ID NO: 45523 - DNA, 600 bp, Chicken  19866894285477_1
aggcgcagcacaacacagcgagaatcgctctggggagagcagggcaggatttctgccaggtggtggtcagtgccacttccagcacaagctgtgtcagctgcaggacttctcccgagccctttgtcccatcgcaacaaaccagagccatctggcagctcggaacagtaacactgccatgcacctgtgtgcatcacaaccccactgaccctgcccatgggctgctcagcatcccatctggatccctaccctgcagcccccaggaggccagacccccaaacatctccctccaacctgggatgkggcagcagccccgcagggatgctctctgtttcctgctccccattaaggatttcagtgctttcccaagatcgttgccctgtcccaaaccagccctacccagcactaaaacaatccgtgtctgggaggaataaaaacactttaaatgtgaaagagggggtgtggtgagagcacagacagctgaacctctcaagtgtagatctgctcccagtgcacctcccacatgggagatgccttttgccaatccagatctttgcttgcagaacaaattctcccggtgaccacatcaaaacaaagcaacct

SEQ ID NO: 45524 - DNA, 600 bp, Chicken  19866894285488_1
aactgcaaatctttcaggttctcaagaaaaactttacaacctaacttctgaagatgtaacctcctccagcagatgctcaaggaagatgtatggaaatgttacagatttccataaaaccctggatctaaaagaccacagcagagctgatatgcttgggtaagctaaattcctcaagtatatttttatggtactgtaaaattttaatatgccaaacatcttcccagaaccgaaaaacatccttaactttctgattttacttcgtatgcttattactaatgtcggcatgacttattttgtatygtgtttttctaagtcggtacttgcatctcagattaagaataaatcaacatcttttttttttgagactccaagttagaagagttgaggttaaaaaaaaaaaaaagattttgttaatatgcagcactgagatttaaaataaacctgttacaagtcatctgagctccctgcttgaaagatacctttaaaaagagttgtgagcaagtgagtcaataacacttaacgtaaatgacacatcacaaattagttgttttggagactgaggaggtaattagaaaaaaggatgttccccaaagttctatt

SEQ ID NO: 45525 - DNA, 600 bp, Chicken  19866894285492_1
cttcaaggcagaaattccttcgcctgccacatttaccttttgcaaagcagtatacactttgaggtgaacacagggcattcagttttgatgcaggttcaaacaaagacttcacattcactaaatacaacacaactaagggacagaaggagacttgcaagatcagtggggtgggtgatacacaactgtagattagcacctcacagaccatggtaaccccagtacatggtatcttcactgaaaggtttcatttgtacaaaatacacaagtaatgaagttcatctacagtgacagaagtttcayttcattctttactatttaaaatagatttggactctaggtgtgattttacaagaggcaatgtttaaaaattagcctatttaccataaccattttagaacaatttacatccatcattacctcttacaggttacatatacactaatgtccacccacgtcaacacatcacagtactaaagaaagaaaaactgcatgtgtctgaagagtagtaggcagttttgatggacatatgctgcaaggacaatgtgactacttagtaaaacatagctaaaaagactggagctgatagaagctgctggacca

SEQ ID NO: 45526 - DNA, 600 bp, Chicken  19866894285492_2
taggtgtgattttacaagaggcaatgtttaaaaattagcctatttaccataaccattttagaacaatttacatccatcattacctcttacaggttacatatacactaatgtccacccacgtcaacacatcacagtactaaagaaagaaaaactgcatgtgtctgaagagtagtaggcagttttgatggacatatgctgcaaggacaatgtgactacttagtaaaacatagctaaaaagactggagctgatagaagctgctggaccatagccatgcgtgttagcaccatttgacctttttyctcccattaaagaagaaacagctctcaagtaactagaaatagagcctgggaaacagatccacggctttgctttttgcctttgctgagtgccatgttccacttctcggaagagaaatcaagcaagataacagaagtttcaagaagcggcacaagtgcattttttttgataaatttattcataagctgaaatagtacattttaaaatgttttcccttacttaatttaggggaaaagtattcatctttttgataggtgataattaaccattattctgtcataaacataaaagtacctacgtag

SEQ ID NO: 45527 - DNA, 600 bp, Chicken  19866894285499_1
gtgccttgactgtccccttacaaactgctcctcagcatcagtgaaggaaagtgaaacagcagatgctaacaatccttgcttctaattgttctcagagaccacctgggaaaacaccttgaccatctcattaaatatgtaaataagaggaaatgtacattcaccacacagctgagatgacaatacaagtccttggagttacctttttcttgcttcggctgctttcttcctggcagagctggcagatctgagcatttccaggtcctgatggctgttcctaaactcacaataaaagccaagacrttctgctttacttgcctgctttccatggctttggtagcaaagctctgtggctgatccttattttataacagggatgaagatttcacactgtcgtgaaatcgagggggaggacaaaatatcttttttcaccaggaataatcggtgatggaggtagaaattcctggtagatgggactaaatgtgcattgcagcatcctgttgagagttggtggctctagccaggctttgccaggcacccagcagagaaagaacacacttgggtcaatttgacatacgcagaagcaaccaaccaaacacaaac

SEQ ID NO: 45528 - DNA, 600 bp, Chicken  19866894285502_1
atctagtttcaaagacaagtccccagggtaatacccatttaagcacatgtgtaacttcagctgttggattagtcatctgaagttgttgatgctttcactgcagccaatttgactgattatcatcctgctcattagctgctcatgtaatgaaaagaaatgtgaatttcgaaaggttaacaaaagtcttttgtcctcgtttctcctctgttacttactctatatgttggacagatgaattgatttttgcaattgatattatctccgtatctctatattcctgcaaagtcttgctcaacatcrtattttgatcagattttgaaatctactagagttctgtgtctgggtayatcacctgcttaattgcagcagattgttttgattatttttaatttaagaaaaaaatcataattctttttgaccaacagcgatgagaagacgtgagtagagtttgacaatggaggcaagatccatagtcattggtgtggagggaatgacatgccactcctgtgttcagaccattgaacagcatgttgggaagatgaatggtatccataacgtcaaagtaagtaacgatacccacttgttagaaggttttgttct

SEQ ID NO: 45529 - DNA, 600 bp, Chicken  19866894285502_2
tgtgtaacttcagctgttggattagtcatctgaagttgttgatgctttcactgcagccaatttgactgattatcatcctgctcattagctgctcatgtaatgaaaagaaatgtgaatttcgaaaggttaacaaaagtcttttgtcctcgtttctcctctgttacttactctatatgttggacagatgaattgatttttgcaattgatattatctccgtatctctatattcctgcaaagtcttgctcaacatcrtattttgatcagattttgaaatctactagagttctgtgtctgggtayatcacctgcttaattgcagcagattgttttgattatttttaatttaagaaaaaaatcataattctttttgaccaacagcgatgagaagacgtgagtagagtttgacaatggaggcaagatccatagtcattggtgtggagggaatgacatgccactcctgtgttcagaccattgaacagcatgttgggaagatgaatggtatccataacgtcaaagtaagtaacgatacccacttgttagaaggttttgttcttatctggtataagcaagagaaaagctaatgcttactgtactgcacag

SEQ ID NO: 45530 - DNA, 600 bp, Chicken  19866894285502_3
actgcagccaatttgactgattatcatcctgctcattagctgctcatgtaatgaaaagaaatgtgaatttcgaaaggttaacaaaagtcttttgtcctcgtttctcctctgttacttactctatatgttggacagatgaattgatttttgcaattgatattatctccgtatctctatattcctgcaaagtcttgctcaacatcrtattttgatcagattttgaaatctactagagttctgtgtctgggtayatcacctgcttaattgcagcagattgttttgattatttttaatttaagyaaaaaatcataattctttttgaccaacagcgatgagaagacgtgagtagagtttgacaatggaggcaagatccatagtcattggtgtggagggaatgacatgccactcctgtgttcagaccattgaacagcatgttgggaagatgaatggtatccataacgtcaaagtaagtaacgatacccacttgttagaaggttttgttcttatctggtataagcaagagaaaagctaatgcttactgtactgcacagtactgagttgtgcagagagctgagttgtcatctgttattattactcaag

SEQ ID NO: 45531 - DNA, 565 bp, Chicken  19866894285520_1
tttttggttgtgagaagcaaatcacaaatacctgcgtgagcttagaagcaggggaaaactcacctttggtgtgggatggtgtttgcaacaagaggaaaggcaaaatgcaacctgttacttaaatacaggtatgtgattgctttctgctttgcactggttttgtatggtgtgaattcaccaactttaatacagtaactattgatttgtactagtgaaagggagaggagaagctaactccatctgttaccagtaagcaaggttcttcatggctgtgtaacaaagatttcactttggtgcaaytacagaatacatttttttccacactccccttgaagatcttctggtcagggcctgggagctgtgcagaccatgagcagtggtgcttctggcaccaagggagctggaaaacctctaccaagctatggcacagctccaactcatattcctcatggcttttgcagtgaccataagacaatgtccaagccagactgtgagctctgttttttgcctcaagcccatgggctatgctggcagctctcaggccacagctcataggcattgactg

SEQ ID NO: 45532 - DNA, 600 bp, Chicken  19866894285524_1
ccctgcagctgcttcctgcctcatgctactgtggtgggggctctgccctgccgagcggcccagcctggccccatgtccattcccatcacttagggacaaccacacagcgttgtgctattaatgccatctggattgaaactgggagacagagagggtgcagtacagtgccaactcaagttatggcaaataattttatgcattttgataaacacagtcctgtgaacagtaaaaaatatgcagttgtgttttccattttgataaaggaatttgaaaataggtttcaagatgggttaaaattcsagttttttgctatacttatgattccatttcatttaagacaaatacactaccttcaaattttcaaattcaatgtgtakactcacaatcaggtactcaactcaaagaaatatctgatcacctctttactagacttttacaagacctctcttaccagagaaagaaattttacagtcatatttcattcatgtcaccacttttgggtagtacagttcgtacatttttgaacaactgttttcaaggataaagtataggaagagtaaaatttcatcaaaaatctctgacaagcaccttgagaattac

SEQ ID NO: 45533 - DNA, 600 bp, Chicken  19866894285524_2
cattcccatcacttagggacaaccacacagcgttgtgctattaatgccatctggattgaaactgggagacagagagggtgcagtacagtgccaactcaagttatggcaaataattttatgcattttgataaacacagtcctgtgaacagtaaaaaatatgcagttgtgttttccattttgataaaggaatttgaaaataggtttcaagatgggttaaaattcsagttttttgctatacttatgattccatttcatttaagacaaatacactaccttcaaattttcaaattcaatgtgtakactcacaatcaggtactcaactcaaagaaatatctgatcacctctttactagacttttacaagacctctcttaccagagaaagaaattttacagtcatatttcattcatgtcaccacttttgggtagtacagttcgtacatttttgaacaactgttttcaaggataaagtataggaagagtaaaatttcatcaaaaatctctgacaagcaccttgagaattacaaccacttccactgaaccagactgatgcattaatttcacaaaaatgaggtcaaatatcccattcattttgtggtttt

SEQ ID NO: 45534 - DNA, 599 bp, Chicken  19866894285531_1
  misc_feature (1)..(37): n is any nucleotide
nnnnnnnnnnnnnnnnnnnnnnnnnnnnnnnnnnnnntcctctgtgaatgatattgacttgaagctaatgtccccgaaatgtttttttactgttgggtttaacatccattatgagaatgtttgtagttttcaggaaaggtgtgaagttctaatttactcataactgctttacacagtagtaagtattgtatttagttagcataaggtaattttggatatgatacttgataaataatggagacagaataagatagatacaaatctagcataacacaagcctcagtatgctgcgcaagcagmttaaattagactacttttagttaaatgtctaggaagttagtcaagaggtaaacatgggtgattctcaatacaagtgaaggtgaggagcagagagacctttccataggcaaagataaggcaaatgagattgttcactatgaagtctacgcttacaagtctaacttaatagaatcatagaacgtcttgggttggaagggaccccaaggataatcaagttccaatctccctgccacaggcagggtcaccaacctccagatctgataatagaccagatggggcctcacaagggcagagtagag

SEQ ID NO: 45535 - DNA, 473 bp, Chicken  19866894285549_1
tagagcagaataacttccagttgtgtctttgaagttttttttagtgtgatatcatggacttttaatccgtactgcggctgctcttaaaaatagtgagaaattgcaaagtgaagcagtaaccaaaaggagctgttggaacgtttcatcggtctcagttcatgatgtatgctgtcttgattgtggtgtgacagtaaacctagtgatgactgcaatttcaagtctgatgcttccaaaatgactcagtttaggtgcagatgatgtatgtaggtataaaaactgctacagcaatgactgcaacayatgctttcatgtaattccaaggmtgagagcgtgtgtgtgtggctggggccaatggagacccagtgtgtgtcctgcagagccctcagatctcagcagtgtgcttttcagtcactcttgaaagtcagtgtattgtgaagtaatttgttttgcccgtgtatagttgctttttgggg

SEQ ID NO: 45536 - DNA, 450 bp, Chicken  19866894285549_2
tgtctttgaagttttttttagtgtgatatcatggacttttaatccgtactgcggctgctcttaaaaatagtgagaaattgcaaagtgaagcagtaaccaaaaggagctgttggaacgtttcatcggtctcagttcatgatgtatgctgtcttgattgtggtgtgacagtaaacctagtgatgactgcaatttcaagtctgatgcttccaaaatgactcagtttaggtgcagatgatgtatgtaggtataaaaactgctacagcaatgactgcaacayatgctttcatgtaattccaaggmtgagagcgtgtgtgtgtggctggggccaatggagacccagtgtgtgtcctgcagagccctcagatctcagcagtgtgcttttcagtcactcttgaaagtcagtgtattgtgaagtaatttgttttgcccgtgtatagttgctttttgggg

SEQ ID NO: 45537 - DNA, 600 bp, Chicken  19866894285550_1
cggggagggcataagacgaggctgagagcagctgatctgagtaaaatgatagtttgatgcattggtcagggaaaaaaagaaacttcaataaaacaaattgaatttaaatcctccggtaaagccagttcccagcacaaggaatgcagggttgtgttactcgtgcagccacacggcccggagctgctgcttgctaagtggggtgcagagtgggcacggctgtgggcagccaggggctctcctctcatagacacctcccagatgaggccccaaaacactgcattgctcccctgctttgcttcrccccactccctgtccccagggctgtttcccaagcagcccatgcagaggcccagctctggcagagcgtctcaccgtgccatgtgctcaggaacagcctcctatcagcacagcagcctcccattgcagggctgtcctggaggttccatcctgtctggggtttctgcacacccctctctatgcatgcatggaggtcagtgggcaaagagaaggaagcaccaggcttgctttctctcgacataaatagggtttgatgtcaggtctctggggaggtgaaagccttctgcattaactccactgctg

SEQ ID NO: 45538 - DNA, 600 bp, Chicken  19866894285550_2
ctggggacaagcaggcatttcctggggctagcagtgattcattgaaggatggcttctaactggtctgggcctgtgcagtactaaataatctctggcactttatgcagggaaatatttccctgggcagctcaggctgctggtggggaggatgaaggcagggctgggcagagtcgtagcgaaggcaatgtgtaggcagggtgagccagcagagcgcttggtggcttctgatcatgattcctccaggatattgaaaacacggggcccagcatcaacttctctttgcccccggctcgtgtgctygagcatctctgcccctgctgctgtctgagcatcagcctctctcctgcatccatggggtccggcatgctgggaagtgcccacatttcagggttgcttattggggtagaagacatcatccagaaactgggctgagcagctcccggggcctctggaggtgcagcrcccctctccctcctccctcacaaagccagtgcagcctcactgctggatggtcgtggcatggggagaaatctggaagctattgcgctggtgcttttctcaagagggaatgccatgcccagttcatttcctttaaggaaa

SEQ ID NO: 45539 - DNA, 600 bp, Chicken  19866894285550_3
gggcagagtcgtagcgaaggcaatgtgtaggcagggtgagccagcagagcgcttggtggcttctgatcatgattcctccaggatattgaaaacacggggcccagcatcaacttctctttgcccccggctcgtgtgctygagcatctctgcccctgctgctgtctgagcatcagcctctctcctgcatccatggggtccggcatgctgggaagtgcccacatttcagggttgcttattggggtagaagacatcatccagaaactgggctgagcagctcccggggcctctggaggtgcagcrcccctctccctcctccctcacaaagccagtgcagcctcactgctggatggtcgtggcatggggagaaatctggaagctattgcgctggtgcttttctcaagagggaatgccatgcccagttcatttcctttaaggaaacacaacctgaggggataattagagcttctttgcgtacacaatcccgtactgtttatccaacacaaattaaaaaacgtggtcctcaggaaaacggagctggggagataaagaagcgatcggctcccagacgggtttcattactgcctgacacaccgggcccct

SEQ ID NO: 45540 - DNA, 599 bp, Chicken  19866894285559_1
  misc_feature (1)..(53): n is any nucleotide
nnnnnnnnnnnnnnnnnnnnnnnnnnnnnnnnnnnnnnnnnnnnnnnnnnnnncttctggaatgtgactgatgggaggtatttagcagtctttcatatggagtcctgctagtgctcgatgacattaatactttcctatcattattgcaaacatttactctgacataccaggatttacacctcattgtttagatgtctgcttcgttatatagatagctcatgacaacactgccagaagcaaatttattcaatctttctcttcctaaactgtatcaagaattatccttattttacagtgagmgattttactggtcatagcttcagtcatgcacattatgctattatatatcacttaaattcatttccttatttaaactccccagtacatttcataaacaataatacctttcattgtaacactgttaatgaaagcattaaacaatacacacattccatcttgacagttccttctcagctgcagttatctccttttggctaggscctttgcattaacatataagttaatcacgatcttgctcggttttatttacactatgcaaaaaaaacataccaaatttccttcataaatgaaaccaaaga

SEQ ID NO: 45541 - DNA, 600 bp, Chicken  19866894285559_2
tcgttatatagatagctcatgacaacactgccagaagcaaatttattcaatctttctcttcctaaactgtatcaagaattatccttattttacagtgagmgattttactggtcatagcttcagtcatgcacattatgctattatatatcacttaaattcatttccttatttaaactccccagtacatttcataaacaataatacctttcattgtaacactgttaatgaaagcattaaacaatacacacattccatcttgacagttccttctcagctgcagttatctccttttggctaggscctttgcattaacatataagttaatcacgatcttgctcggttttatttacactatgcaaaaaaaacataccaaatttccttcataaatgaaaccaaagaaagacatgctaaagttactgaaaatacattaagctgtgatataataaatttttgtttaaatctagtctcattataarcagataaatcatgaaagatgtaatagaagatatcaaggaagtggctattgatggagcaagtggttctcctatgtagtaatggtaagttatgaaaacacaaaatatgtttgtatatacatagtag

SEQ ID NO: 45542 - DNA, 600 bp, Chicken  19866894285559_3
ccccagtacatttcataaacaataatacctttcattgtaacactgttaatgaaagcattaaacaatacacacattccatcttgacagttccttctcagctgcagttatctccttttggctaggscctttgcattaacatataagttaatcacgatcttgctcggttttatttacactatgcaaaaaaaacataccaaatttccttcataaatgaaaccaaagaaagacatgctaaagttactgaaaatacattaagctgtgatataataaatttttgtttaaatctagtctcattataarcagataaatcatgaaagatgtaatagaagatatcaaggaagtggctattgatggagcaagtggttctcctatgtagtaatggtaagttatgaaaacacaaaatatgtttgtatatacatagtagttggggaaacagaccaacaagcttgtatgtgtgaggaacagcaagaataatgaatcttaagtgatgcaactcagaagtgtgacagcttcttaggaaggaaatagtgttaaaaccaagagaattatcataaggataaaaatcttctttggtattgctaataatgttcacttgacaca

SEQ ID NO: 45543 - DNA, 600 bp, Chicken  19866894285562_1
actctgtgtccaagcagagcttcggtcactgcagcacaaatatctcaagtgttttaaccataactaagcaccttaatgttgataaactgcatttaaaatactcttcagttttctacattttaagataatcatatagacattcagtcggcaaaatagcttactatgtagcagcaataaaatagaaggccttgaaacatatttggtattagatatatctgactgtagcttagtacatggaagtacatggaagtacatagaagataactttgcaggatcaagagctgctgtcccagtggtatrttccatattcagtaaatatacacagtgccatagctaagtattttctatagcttccagcataactccaaattcaacaagaaataatactgcaattttgctgcttaacaatatacattttttcagcctgcaacttacatcttacaaaatgacagagccttcatgatcaccaactaaattcttttgartactttctcagaactgcatgttgaatgctatgagrgccaaattctggtctgatttaaatcctgtaaacccaagagtgtagccttccaatgtgtagtgtacacagtgctcaggcaa

SEQ ID NO: 45544 - DNA, 600 bp, Chicken  19866894285562_2
gccttgaaacatatttggtattagatatatctgactgtagcttagtacatggaagtacatggaagtacatagaagataactttgcaggatcaagagctgctgtcccagtggtatrttccatattcagtaaatatacacagtgccatagctaagtattttctatagcttccagcataactccaaattcaacaagaaataatactgcaattttgctgcttaacaatatacattttttcagcctgcaacttacatcttacaaaatgacagagccttcatgatcaccaactaaattcttttgartactttctcagaactgcatgttgaatgctatgagrgccaaattctggtctgatttaaatcctgtaaacccaagagtgtagccttccaatgtgtagtgtacacagtgctcaggcaagcaggattttccatgtgtttctacttaccttggataatctgccatcactctattttcttctactctawgtaaactgccagaaactcactggttttcatttctgaatgcagctaagacacagtgttttagatttcccaaatggggatggtgtataccttatttctaatatgaagtcactttacact

SEQ ID NO: 45545 - DNA, 600 bp, Chicken  19866894285562_3
tgtagcttagtacatggaagtacatggaagtacatagaagataactttgcaggatcaagagctgctgtcccagtggtatrttccatattcagtaaatatacacagtgccatagctaagtattttctatagcttccagcataactccaaattcaacaagaaataatactgcaattttgctgcttaacaatatacattttttcagcctgcaacttacatcttacaaaatgacagagccttcatgatcaccaactaaattcttttgartactttctcagaactgcatgttgaatgctatgagrgccaaattctggtctgatttaaatcctgtaaacccaagagtgtagccttccaatgtgtagtgtacacagtgctcaggcaagcaggattttccatgtgtttctacttaccttggataatctgccatcactctattttcttctactctawgtaaactgccagaaactcactggttttcatttctgaatgcagctaagacacagtgttttagatttcccaaatggggatggtgtataccttatttctaatatgaagtcactttacactgatttgagaattcattttgttgtgaaattatatta

SEQ ID NO: 45546 - DNA, 600 bp, Chicken  19866894285562_4
attcaacaagaaataatactgcaattttgctgcttaacaatatacattttttcagcctgcaacttacatcttacaaaatgacagagccttcatgatcaccaactaaattcttttgartactttctcagaactgcatgttgaatgctatgagrgccaaattctggtctgatttaaatcctgtaaacccaagagtgtagccttccaatgtgtagtgtacacagtgctcaggcaagcaggattttccatgtgtttctacttaccttggataatctgccatcactctattttcttctactctawgtaaactgccagaaactcactggttttcatttctgaatgcagctaagacacagtgttttagatttcccaaatggggatggtgtataccttatttctaatatgaagtcactttacactgatttgagaattcattttgttgtgaaattatattagcttatatcagatgtgaatatgaatggctgaaaggtgatccagaatgatagttcctcctccatcattttttatcccatgagggtgtgtaatatttgttagctacagattcagttgttctgaactgtaaaatatataaagaaaaaaaaa

SEQ ID NO: 45547 - DNA, 600 bp, Chicken  19866894285564_1
aacaattgcaatacccagctccggatatggagcctttttttcctgtagttacagactattagcatggtttgggttggtagggacttcagggcccactcagttccaactccctgctgtgggcagggctgctgcccattagctcaggttgcccagggccccatccaacctggccttgagcgcctctgaggatgaagcatccacagctactctgggcagctgtgccagtgtattacctctctctcagtgaaaaattttcccctgacatctaatctaaatctcccctctgagattaaaactgtycccccttttcctatcactttctacccctgtaaaaagttgatttccctcctgtttctaagctccctttaagtattggaaggctgctatcaggtcttccctgagccttctcttgtccaggctgaacaagcccarctccctcaatctgtcttcataggggaggtgctgcagccctttgataattttcatggccctcctctggaccagctctaaaagctccacaactggaggagcgagaaacagttcagtgctcagatattacttttgagagcatttctggtacatagaagcatagatgtgtat

SEQ ID NO: 45548 - DNA, 600 bp, Chicken  19866894285564_2
ccattagctcaggttgcccagggccccatccaacctggccttgagcgcctctgaggatgaagcatccacagctactctgggcagctgtgccagtgtattacctctctctcagtgaaaaattttcccctgacatctaatctaaatctcccctctgagattaaaactgtycccccttttcctatcactttctacccctgtaaaaagttgatttccctcctgtttctaagctccctttaagtattggaaggctgctatcaggtcttccctgagccttctcttgtccaggctgaacaagcccarctccctcaatctgtcttcataggggaggtgctgcagccctttgataattttcatggccctcctctggaccagctctaaaagctccacaactggaggagcgagaaacagttcagtgctcagatattacttttgagagcatttctggtacatagaagcatagatgtgtatatatttatgtcatttctagtggggattgtgtatgttctcttcccctgaagtcttagtttatgctcttaccaaacagcttgtttgcattgtcagcccatagaggaaccgggaattcagtttaaatgtacaggt

SEQ ID NO: 45549 - DNA, 600 bp, Chicken  19866894285567_1
cagctcataatccttcttgtgctgggagcccaggcctggacacagtatttcagatggggcctcatgagggcagaataaaaggacaatcacacctccatcaccttgaaaatgccagaaagcaagtgaaaaaacatctctgtgtgcattgcagcatgaagcaggtttttcctcagtaaggaatctgccacagtcaactctgtagaagttcaaaatatatcaccatgtcttgtcctagggttttaccaaagcgatcatttcatcattgcaagagctttaaataaaatcactatagaaaaagayagataaaagwtttctgtaccaatttttctattattctcccaacttttaagyctgcaaagtgggttacacagtcagtgagctgttagaaatgctgtaacaccaccaagtgtccttagcgagtgagaattcccactggagtgaaacttgcctagagagcaagcagcaaaacgccatgaatttcagtatgaaaactgatagctgtgcaataaaatacttgaatttgttacctgaatttgaaattgaaatttatataaaaacccaatttttattaaactctgatcacagaaggaaatagctcag

SEQ ID NO: 45550 - DNA, 600 bp, Chicken  19866894285567_2
tccttcttgtgctgggagcccaggcctggacacagtatttcagatggggcctcatgagggcagaataaaaggacaatcacacctccatcaccttgaaaatgccagaaagcaagtgaaaaaacatctctgtgtgcattgcagcatgaagcaggtttttcctcagtaaggaatctgccacagtcaactctgtagaagttcaaaatatatcaccatgtcttgtcctagggttttaccaaagcgatcatttcatcattgcaagagctttaaataaaatcactatagaaaaagayagataaaagwtttctgtaccaatttttctattattctcccaacttttaagyctgcaaagtgggttacacagtcagtgagctgttagaaatgctgtaacaccaccaagtgtccttagcgagtgagaattcccactggagtgaaacttgcctagagagcaagcagcaaaacgccatgaatttcagtatgaaaactgatagctgtgcaataaaatacttgaatttgttacctgaatttgaaattgaaatttatataaaaacccaatttttattaaactctgatcacagaaggaaatagctcagtatgaagtct

SEQ ID NO: 45551 - DNA, 600 bp, Chicken  19866894285567_3
agatggggcctcatgagggcagaataaaaggacaatcacacctccatcaccttgaaaatgccagaaagcaagtgaaaaaacatctctgtgtgcattgcagcatgaagcaggtttttcctcagtaaggaatctgccacagtcaactctgtagaagttcaaaatatatcaccatgtcttgtcctagggttttaccaaagcgatcatttcatcattgcaagagctttaaataaaatcactatagaaaaagayagataaaagwtttctgtaccaatttttctattattctcccaacttttaagyctgcaaagtgggttacacagtcagtgagctgttagaaatgctgtaacaccaccaagtgtccttagcgagtgagaattcccactggagtgaaacttgcctagagagcaagcagcaaaacgccatgaatttcagtatgaaaactgatagctgtgcaataaaatacttgaatttgttacctgaatttgaaattgaaatttatataaaaacccaatttttattaaactctgatcacagaaggaaatagctcagtatgaagtctctaaccaagtggcattataatgcagggttctctccatctcc

SEQ ID NO: 45552 - DNA, 599 bp, Chicken  19866894285571_1
  misc_feature (1)..(73): n is any nucleotide
nnnnnnnnnnnnnnnnnnnnnnnnnnnnnnnnnnnnnnnnnnnnnnnnnnnnnnnnnnnnnnnnnnnnnnnnntggttgaaattcattagctttacgttgtagttcttaagttttaccaatcaaaaacaactgagatcatgcatacataaccaaatggtttttgaacagaactgctaaagttactcagaacgtctattgctgaggaaatgtagcccagctaattttctttctgtagaaggcagctctctacctggtgagatctttttggtaccgtggaataaacagaaattcaagagctwcatcaatagaagtaatagrcaacaaatgacatcctaaaaaagtttctgactctataagaggtctacaaggtattgcatattaccagttttaacagctggcygtgaagacaaatgtatattctttagaattctatttcagcatctgttgagaaaaatgttaatggaaaacacacagtggtacattagtctaaatataattaaattggaaacgtgagtcaaaattctcataagtttttcagcattatgtcaacataaacagagtccaatttttgtgcaactctgccaatatgatgaaaaac

SEQ ID NO: 45553 - DNA, 599 bp, Chicken  19866894285571_2
  misc_feature (1)..(54): n is any nucleotide
nnnnnnnnnnnnnnnnnnnnnnnnnnnnnnnnnnnnnnnnnnnnnnnnnnnnnntggttgaaattcattagctttacgttgtagttcttaagttttaccaatcaaaaacaactgagatcatgcatacataaccaaatggtttttgaacagaactgctaaagttactcagaacgtctattgctgaggaaatgtagcccagctaattttctttctgtagaaggcagctctctacctggtgagatctttttggtaccgtggaataaacagaaattcaagagctwcatcaatagaagtaatagrcaacaaatgacatcctaaaaaagtttctgactctataagaggtctacaaggtattgcatattaccagttttaacagctggcygtgaagacaaatgtatattctttagaattctatttcagcatctgttgagaaaaatgttaatggaaaacacacagtggtacattagtctaaatataattaaattggaaacgtgagtcaaaattctcataagtttttcagcattatgtcaacataaacagagtccaatttttgtgcaactctgccaatatgatgaaaaacaacattgatatatggggag

SEQ ID NO: 45554 - DNA, 600 bp, Chicken  19866894285571_3
agttcttaagttttaccaatcaaaaacaactgagatcatgcatacataaccaaatggtttttgaacagaactgctaaagttactcagaacgtctattgctgaggaaatgtagcccagctaattttctttctgtagaaggcagctctctacctggtgagatctttttggtaccgtggaataaacagaaattcaagagctwcatcaatagaagtaatagrcaacaaatgacatcctaaaaaagtttctgactctataagaggtctacaaggtattgcatattaccagttttaacagctggcygtgaagacaaatgtatattctttagaattctatttcagcatctgttgagaaaaatgttaatggaaaacacacagtggtacattagtctaaatataattaaattggaaacgtgagtcaaaattctcataagtttttcagcattatgtcaacataaacagagtccaatttttgtgcaactctgccaatatgatgaaaaacaacattgatatatggggagtcaygtctgtacataagaatctggcatgccaggagcttaaacaggaagtaaacaagtaaactaataacagagttgttcaattc

SEQ ID NO: 45555 - DNA, 600 bp, Chicken  19866894285571_4
caaatgacatcctaaaaaagtttctgactctataagaggtctacaaggtattgcatattaccagttttaacagctggcygtgaagacaaatgtatattctttagaattctatttcagcatctgttgagaaaaatgttaatggaaaacacacagtggtacattagtctaaatataattaaattggaaacgtgagtcaaaattctcataagtttttcagcattatgtcaacataaacagagtccaatttttgtgcaactctgccaatatgatgaaaaacaacattgatatatggggagtcaygtctgtacataagaatctggcatgccaggagcttaaacaggaagtaaacaagtaaactaataacagagttgttcaattcatactatacatgcttcctaacaagagaaaatagtgtattaggataactttgtaagtacagcatataaccgtttatgtgagcactgagcaactgggacacttctctgctttgagccagtgctggtcagctattacaagtgcaactgtttcactaaggagtaaattgagttcctgatgccttttgattattgagtgctggtattttgcacaggtctaattgcc

SEQ ID NO: 45556 - DNA, 600 bp, Chicken  19866894285575_1
tggttctgttcgaagttctatgacttgctcccagcaagttgccagtctcttgccaactgtaactttatctatagccatctgcagagtagcactaactgaaagttaagagagtattttttgagatgttggagtattgctaagagcacagagcttatacaatagagctatgctaaaatactttgatgtacccttaatatgcaaattcgtctgctgaataccttagttcaagatactcgatctgtctttaaagccagcttccttctgtgtatgtgtggctggaagagtaggagtaggtgcacrgagaaagaaaagagagcggcttttaaagatttcagtgattcatctccagggcacaatgggttagaagcagacaggttgcaacctgaaactaggcagcagcagtgtttgtagattccttgtttccaaggaattttactttaccttcatactcattgcaagatgtgatttgtcataacctatcttcagctgtttaaaaatgatctgcctgggctaagacaattggttggtctcctcctgtagtcagcagagataaatttgcttttgacaccggtgtttaggtaagatgaattgcctccattg

SEQ ID NO: 45557 - DNA, 600 bp, Chicken  19866894285581_1
gcctgaatcagagcagaaagtttcctgctttttattttgctatgcaaaattaattcaataattaatcattccctttcactagcataacaccagcttattctgcactgccactgccaaacatttcctttacattctttgctaaatttagcacatttgtgtctgcctgcatctctgctctatttttcccatctgcctttattctctttgctctagctaaccaaatcacccttgaaaccagtttcaacaaagatctcccatgcttaccttcaggacaagccatgagattggttacacatgctyctggacagcactggatcctatcgcaaccaagggaccacaaacaactgaagtgcctctgtatttaatggcactaagatctttatcaggatggcacagtggtagatgaaatactgcatgaaatatgttgtgaaatgtatttctacaccaacctgtaggaaccagacttagaaactttattaataagttaacttagattttccaacaagataaaattgataaaattaaaaaaattgtgccagttattgacttatttactatatgactaagcatcagctctcatactgtgctacctgggcctgg

SEQ ID NO: 45558 - DNA, 553 bp, Chicken  19866894285586_1
agttgctatctggccaaactaagggctaaaggctaagcactggcaaagtcaccagtagtcaggggccagaaagacaggaagccagcagaaaaatgatcctgtggagatgtatcttgaacattatttccaacttcagatgcacaagctctttgtccttctaactctaagacacgtggcaaatgacctagttcagcctggtagattctgttacaaataatgtaaagacgaagagaattttgaggagttatttagttataattacttagtagtaaatgctcaggtgatacctttctgacaaaktgagctgtttttttaatttaaaaacaacatttaaaataataacaataagaaaaacggtgtctccttttcactcattctggtctgtataaaaacattcagaacagaaccctgaagtcttagagagatgttttcttaatacttctctcacattaatttgtaggagatgcaaatgagagaggaaaaagagcaagtagaacctattagaatcttcttggatattcgagactcacagggggatctataaaatgccatt

SEQ ID NO: 45559 - DNA, 600 bp, Chicken  19866894285588_1
ttatgggaccattcatatggtcttctgccacgaggtaggctggaggtgaaagaagccatgccacatcctatcaatccggcagcgagcacacagaacctgtctctttgcatctgttacacgcagagaagctgtgcctgctgtgcctcctccctatgtggtcctgctctggcttcttctgcactaccaaaaaaaacccaaaccaccacactctgagaagcttttgaataagcggagtgtgcccctagctaaaggaaaagtttcatcagcaatgctaaccatttaatttcctccccatcaccygactaacagcagtgagcaaatcagatggatttaggctgtttctaatggtatttgtttttaagtggctacactgccagctgtgacagcaacaccacttcggtaattgggacttagcagcttttgcacctgagcctttcagcaaaatcctttcaccgtggctccgctgacatccccccagcaaagcagtggctcatgaggagatacccagggtaattcacaacaagttaattcaggtaccagtcacacagtttgattaatgcaaccttcagactcaatcaaaacctgtttctccacaatgcc

SEQ ID NO: 45560 - DNA, 599 bp, Chicken  19866894285589_1
  misc_feature (1)..(74): n is any nucleotide
nnnnnnnnnnnnnnnnnnnnnnnnnnnnnnnnnnnnnnnnnnnnnnnnnnnnnnnnnnnnnnnnnnnnnnnnnnttgttctaaaaagaccccaaacacctaattgaggaaataacttgtccagcctcctaaacttaatgaatcattcacaggcatgtgcacatagaaaattatgtagtcttagaaaacaaatatattctggtgaacactttatagccactgaattgcagataagtgttatttcatagtatttctgtattcctatatggaaggctttttccttgttatatttgttgatagrttattagcaagattaacaaatttggcatagaaagaaactattctgtctctgtatactttattcaaatatctaatctacttatgcctgtggacctacattaaaagctagagttttacgatagtaaattaagctttcctatatcttttaatatgcaataatgaaaataattcagtatcatggcaccagtgaggaagctgctcattggaatttcattgtcatttaratttccttaatgatagttaccaaaaactagtctatgatacttagagtttcagttttagcagaagctttggtacact

SEQ ID NO: 45561 - DNA, 600 bp, Chicken  19866894285589_2
ttgcagataagtgttatttcatagtatttctgtattcctatatggaaggctttttccttgttatatttgttgatagrttattagcaagattaacaaatttggcatagaaagaaactattctgtctctgtatactttattcaaatatctaatctacttatgcctgtggacctacattaaaagctagagttttacgatagtaaattaagctttcctatatcttttaatatgcaataatgaaaataattcagtatcatggcaccagtgaggaagctgctcattggaatttcattgtcatttaratttccttaatgatagttaccaaaaactagtctatgatacttagagtttcagttttagcagaagctttggtacactcagtccatacttattcgttgttgaaaaaatagactgtatagtgaaggtaataaaggaagaaatagatatcagacagacaaaatagcctggtttgtgttttggttcttaaagaattgagaatttaaaattacctctcccagtttgcacgagtccatgtgcagtgcagggagcgatgtgctttcttttatgcacgtgcaagcacattcccattacttcatatcagc

SEQ ID NO: 45562 - DNA, 600 bp, Chicken  19866894285602_1
acagaaaagtcagggcagggttagttctggcaagatatgggatgggggttggtaatggtgaatcagttagagcagtgatggaaaacatttgggtcagaaaggaaagatgagaaacaaaggattggttgaggtgaggtctgagactgctaagaaaacttaattattttagatatcaaaaataacatttctggcaaaaggcttcacactaggaatatcttttcagagcactccatatatttcctctgaggtgctgagtacttcaactttcagtgttcctcagtatgttatgtggtaaagagwtcacctaagattcagtatctggaggagtatagtaagttttgttgagaaaagcaacttgaaactgggttggtaggcttgtacaggtccattttagtcaacaagaaaaactgagaaaatgactgaagatttcaaagaaatagtagtgggagaagatctaatggagagaggaaaggtcaagcttgtgaagaacaggcagaagagtgaccccaggtgaccactgccttagaatatcctcaagggttcctgaatgcagtggttcttctgatagttataaatgtttctaaaaaccatctgcagttt

SEQ ID NO: 45563 - DNA, 600 bp, Chicken  19866894285603_1
cagtgccagagccacaggtcgcagtgtgtcccctcacattccactgctgggatcgtaggtcccagtgtgtcccagtgcaggagctctgcatctcagtacatccaagtgctgagaccatgggtcccaacatgtcccagtgccaggaacatgggtcccagtgtgtcacagtatctctcaatataggagctgtgtactccagtacatcctcctgctggagccatgggtccaagcatgtcccagtacagaagatgggcatcccaccatgtcccagtgcttagctgcagatctcagcatgtcccrcttctggggtcatggatcccagcacatcccagtgccaaacccatgggtcccagtgccaagcctgtaggtctcagtgcattccaaaccctcccaacactgccagagggaaatgttgactcagaggcaccggagctgggctgctgggagccaggtggccctctgctccacgcagggtgtgcaccacgggaccaccagagccggtcacccgcggacgctgccrgccccgtgccgcgccgtgccgcgctgcctcccgcgctcccctcccatcctctccccttcctgtgcgcggacacccttgga

SEQ ID NO: 45564 - DNA, 600 bp, Chicken  19866894285603_2
tgggtccaagcatgtcccagtacagaagatgggcatcccaccatgtcccagtgcttagctgcagatctcagcatgtcccrcttctggggtcatggatcccagcacatcccagtgccaaacccatgggtcccagtgccaagcctgtaggtctcagtgcattccaaaccctcccaacactgccagagggaaatgttgactcagaggcaccggagctgggctgctgggagccaggtggccctctgctccacgcagggtgtgcaccacgggaccaccagagccggtcacccgcggacgctgccrgccccgtgccgcgccgtgccgcgctgcctcccgcgctcccctcccatcctctccccttcctgtgcgcggacacccttggaatggcttttggctgctttctctgagacagggaaggtgtccccgagtctcaggaaggaaaaacactcagtgctgaacccacaaagaccgtctccgaggggccggggctggagacgctccaggcctgacatcacctgggaactggaaccagaaccgcagctgcactccgcgcctggtatttttttctctaacttgtgtttttaaacgttctttttatagata

SEQ ID NO: 45565 - DNA, 551 bp, Chicken  19866894285604_1
cctcttaccagaaactagctgctgctgctttaaagcaactcaagccttccacgtgctggcaaagtcccgtgcatgcctcaggctgcgcagcagctgcctctgctcaacactatgagcctccttcagtaaaaggtctctgtgttttaaatatcagcccagaaagagaaggtggtgctgtcggagctggagcaacagacccttgtcccaccactgtcacagtgggtcctgccctgtctctctggggccagagctcagctgggttgctccagtccccacctctgcagggctctatctggagaycacraccctggcagagcatgaggtagcccagagctcagccctgagcagagggagcacacccagcccccatctgcatgcaggcagagtttggcaacgctggactgaatcacagaagggtgatgtaagggcacaactgcagctgtccttttgcagacattagaaagtataagggaaacagatgacatctctgtatgaaataaagctttgccattgattgcttacctgagtctctcccagcacatcacggttct

SEQ ID NO: 45566 - DNA, 547 bp, Chicken  19866894285604_2
ttaccagaaactagctgctgctgctttaaagcaactcaagccttccacgtgctggcaaagtcccgtgcatgcctcaggctgcgcagcagctgcctctgctcaacactatgagcctccttcagtaaaaggtctctgtgttttaaatatcagcccagaaagagaaggtggtgctgtcggagctggagcaacagacccttgtcccaccactgtcacagtgggtcctgccctgtctctctggggccagagctcagctgggttgctccagtccccacctctgcagggctctatctggagaycacraccctggcagagcatgaggtagcccagagctcagccctgagcagagggagcacacccagcccccatctgcatgcaggcagagtttggcaacgctggactgaatcacagaagggtgatgtaagggcacaactgcagctgtccttttgcagacattagaaagtataagggaaacagatgacatctctgtatgaaataaagctttgccattgattgcttacctgagtctctcccagcacatcacggttct

SEQ ID NO: 45567 - DNA, 600 bp, Chicken  19866894285607_1
gtatttacacaggcagtttagtaaaactgcattaaaaagaaccattgcacctcacactttcaccattcctttatgtctgcaatagtttaaccagggtaataacattttttaaattacttgcagcaaatgtggtaagtgcttaaacaatagactccatccgttccagagaagttgttttattctactaagtcaattatcagtggtttcaaaagtccctaaataagtagttgtctgacagatcatcataatggctccttctgttgctctatgccgactcatatactgatgcaaaataatttrtcttattcttttgtttaagatttgaaaaacaatcctgttgacagaaaacagaagaaaaattatgtttataggaataatggagtaacaaaacaaaagcaattctgggaaaaataaactttctactctaaatttttctgggatcttttagcagtgcattttgctgtacgagcaatggatttaccatttatccattccctaacaatcatgttagtgttcctcagttgcactggctgaaataatccacccctcacccccaccaggctgatattcactgccaacccctctcataactgatgttga

SEQ ID NO: 45568 - DNA, 600 bp, Chicken  19866894285622_1
agacaggaacatgggtgggttgtttctttttaagcaggatttgagctggaaatcaattttaaaaagccataaagaagggggaaaaatgtttgcagtttcactgtaagaaacagctggagatcagtacacttgtttgaaatttatctcactattttaacattctagttcactaaattaagctatcaatttttgtcagcaatttaaaataaaattaattttcttacaggttttatcacaggacatttttaaaccaaaaaacctactatatgtaaaataaagccatgatgttatggtttacaktaattaaaaaataataataaagtggcaaaaaaaaaaatagtagcactgtcctgaaattttcatgatcctgtattaaaatattgtactggttcatgagaatgaaatggtggatgaccaaaagtagaaacttcgttcccctgatcacaaagtagggagaactgtctgttgcccccagagtttgatagctctaagcagtgctgcataataagattatctctattttttactgctctaaaaaaaataaaatcacatttatagaaactacccaaactgtctcattagaatgccactgacaagttg

SEQ ID NO: 45569 - DNA, 494 bp, Chicken  19866894285623_1
ggtgggcaggagcgaagaggtggctctcctggagccccacctggagatgcctttcaacaaacggtcctttcgcaacggtgtgggatcgggaattaaaaaaacttcctttcgaagagcaaagtcgtaaacaagtgttccaaaccacgcgctcggttttagcatcccatgcctaactttgtgcttaaaatcaccttaatgcttctctctgataaagccgtcagagacaaatgtacccgtgtcttcatcttgtaaacagatgtttatttcaaagagcacaagccaagtggagcagatggaggygctcagaacgggctttgtttccggagttacagtgtcataaagttttgtatggaaatgaatgttttcatttggttaattccccttctttctaaagctacggattcaatcagccggctcctggttagcacaaaggcagccgtcctgtcccgacccctctcattgctgccagctgctgatctgcagggcgtttaatt

SEQ ID NO: 45570 - DNA, 600 bp, Chicken  19866894285631_1
catttctgctcagctgaaatcaggcttagatgcagcatgatgtttcctgctgtcgtggatgactactgtcctgttcgatgccctgctcttcatatctcattctgctccctcatctcttacagcccacattcccttggcctcctctccctgctgccctccccttgcagcaaaccttcttatattttgaggtgtatgagtagaaaaaagggggccctttcactgccatcgtgtccaactaccacctgcatattacaattcacgtacggagttccatgccactaagcagtagtcaaagccctwygcagccargyttgggctcaaccaaaccccatgactccactaggagaaacactgagaaggtggctcattttgctgaagaacgaacctttggcaccagccgaggacttggcaatccacacattgccttctctgccttcccgacgcctgttgtaagctgccaagaagacttccctctcatctgtcctcgtgttgtttatgagatggcgaattccattctgtgccggagccacaggggtcttcaagtttgttggataaatcacatatgactcgggaaaccacgtgcaagactctgatagctca

SEQ ID NO: 45571 - DNA, 600 bp, Chicken  19866894285631_2
atttctgctcagctgaaatcaggcttagatgcagcatgatgtttcctgctgtcgtggatgactactgtcctgttcgatgccctgctcttcatatctcattctgctccctcatctcttacagcccacattcccttggcctcctctccctgctgccctccccttgcagcaaaccttcttatattttgaggtgtatgagtagaaaaaagggggccctttcactgccatcgtgtccaactaccacctgcatattacaattcacgtacggagttccatgccactaagcagtagtcaaagccctwygcagccargyttgggctcaaccaaaccccatgactccactaggagaaacactgagaaggtggctcattttgctgaagaacgaacctttggcaccagccgaggacttggcaatccacacattgccttctctgccttcccgacgcctgttgtaagctgccaagaagacttccctctcatctgtcctcgtgttgtttatgagatggcgaattccattctgtgccggagccacaggggtcttcaagtttgttggataaatcacatatgactcgggaaaccacgtgcaagactctgatagctcag

SEQ ID NO: 45572 - DNA, 600 bp, Chicken  19866894285631_3
tcagctgaaatcaggcttagatgcagcatgatgtttcctgctgtcgtggatgactactgtcctgttcgatgccctgctcttcatatctcattctgctccctcatctcttacagcccacattcccttggcctcctctccctgctgccctccccttgcagcaaaccttcttatattttgaggtgtatgagtagaaaaaagggggccctttcactgccatcgtgtccaactaccacctgcatattacaattcacgtacggagttccatgccactaagcagtagtcaaagccctwygcagccargyttgggctcaaccaaaccccatgactccactaggagaaacactgagaaggtggctcattttgctgaagaacgaacctttggcaccagccgaggacttggcaatccacacattgccttctctgccttcccgacgcctgttgtaagctgccaagaagacttccctctcatctgtcctcgtgttgtttatgagatggcgaattccattctgtgccggagccacaggggtcttcaagtttgttggataaatcacatatgactcgggaaaccacgtgcaagactctgatagctcagggcttgtc

SEQ ID NO: 45573 - DNA, 600 bp, Chicken  19866894285631_4
agctgaaatcaggcttagatgcagcatgatgtttcctgctgtcgtggatgactactgtcctgttcgatgccctgctcttcatatctcattctgctccctcatctcttacagcccacattcccttggcctcctctccctgctgccctccccttgcagcaaaccttcttatattttgaggtgtatgagtagaaaaaagggggccctttcactgccatcgtgtccaactaccacctgcatattacaattcacgtacggagttccatgccactaagcagtagtcaaagccctwygcagccargyttgggctcaaccaaaccccatgactccactaggagaaacactgagaaggtggctcattttgctgaagaacgaacctttggcaccagccgaggacttggcaatccacacattgccttctctgccttcccgacgcctgttgtaagctgccaagaagacttccctctcatctgtcctcgtgttgtttatgagatggcgaattccattctgtgccggagccacaggggtcttcaagtttgttggataaatcacatatgactcgggaaaccacgtgcaagactctgatagctcagggcttgtctt

SEQ ID NO: 45574 - DNA, 600 bp, Chicken  19866894285631_5
tgttgtaagctgccaagaagacttccctctcatctgtcctcgtgttgtttatgagatggcgaattccattctgtgccggagccacaggggtcttcaagtttgttggataaatcacatatgactcgggaaaccacgtgcaagactctgatagctcagggcttgtcttgattagcctagatgaagagatacaggctgataatttccgaattgttaatctccagagtgagctgtgaggacatcatttaataagtacaaatcaccactaactgggctcttttgcttggtgaagaatagcatctyacaatctggattcagttattgtgttctctttctatctttgaaaacagggtcttcctgtacagatwaaggcaacccaaagctgcagctctttgagccagacytacacacttctgttaaatattttctagatactatggatgtcatgaaacaaccagtagagtaagaaaccactctaattagagcttgcagtgacctccctgcaccatctctgcacaaggccactgaggaggcatgattgctgatacacatcagatcagacaccctagctgtgacggaaggccactggggatgcaggaaagc

SEQ ID NO: 45575 - DNA, 542 bp, Chicken  19866894285631_6
ccattctgtgccggagccacaggggtcttcaagtttgttggataaatcacatatgactcgggaaaccacgtgcaagactctgatagctcagggcttgtcttgattagcctagatgaagagatacaggctgataatttccgaattgttaatctccagagtgagctgtgaggacatcatttaataagtacaaatcaccactaactgggctcttttgcttggtgaagaatagcatctyacaatctggattcagttattgtgttctctttctatctttgaaaacagggtcttcctgtacagatwaaggcaacccaaagctgcagctctttgagccagacytacacacttctgttaaatattttctagatactatggatgtcatgaaacaaccagtagagtaagaaaccactctaattagagcttgcagtgacctccctgcaccatctctgcacaaggccactgaggaggcatgattgctgatacacatcagatcagacaccctagctgtgacggaaggccactggggatgcaggaaagcaaggata

SEQ ID NO: 45576 - DNA, 506 bp, Chicken  19866894285631_7
gttggataaatcacatatgactcgggaaaccacgtgcaagactctgatagctcagggcttgtcttgattagcctagatgaagagatacaggctgataatttccgaattgttaatctccagagtgagctgtgaggacatcatttaataagtacaaatcaccactaactgggctcttttgcttggtgaagaatagcatctyacaatctggattcagttattgtgttctctttctatctttgaaaacagggtcttcctgtacagatwaaggcaacccaaagctgcagctctttgagccagacytacacacttctgttaaatattttctagatactatggatgtcatgaaacaaccagtagagtaagaaaccactctaattagagcttgcagtgacctccctgcaccatctctgcacaaggccactgaggaggcatgattgctgatacacatcagatcagacaccctagctgtgacggaaggccactggggatgcaggaaagcaaggata

SEQ ID NO: 45577 - DNA, 600 bp, Chicken  19866894285633_1
agcattattaatatctttctactggagataccttttcagctcagtcaccttgttttctgctaaatgacttcagtattttatgaccctgctgatatgtaaaacagtcaagcatatttccaccttagttttttgcaaacttctgtcttataataggagtttgataccagtaccagagtttagggaaaaactgagcattacagcaaaagtacctttttttcctctaggtatatctcatcaagttctgggagaaagatctttctcaaacagatgtgacactgatttctttgtgtttaatagcayttcagagatctctgttcttatcaatacagctccttggttcttgggatcttttataacttagcaaccacaacatcctggaataagctacaaaatttaatgatgtattacataaatacattctttttaacaaaaaaaamaccttcattcatttatgtcctctagctactattaaaggaaattaagtaactttctattactctccaccttaaattttgtgattctttcctgtatctcttctatcctgaaaaccctcatttaagtaatacagaacttccatgatgcctttccatgaatttgatc

SEQ ID NO: 45578 - DNA, 552 bp, Chicken  19866894285633_2
ttctgtcttataataggagtttgataccagtaccagagtttagggaaaaactgagcattacagcaaaagtacctttttttcctctaggtatatctcatcaagttctgggagaaagatctttctcaaacagatgtgacactgatttctttgtgtttaatagcayttcagagatctctgttcttatcaatacagctccttggttcttgggatcttttataacttagcaaccacaacatcctggaataagctacaaaatttaatgatgtattacataaatacattctttttaacaaaaaaaamaccttcattcatttatgtcctctagctactattaaaggaaattaagtaactttctattactctccaccttaaattttgtgattctttcctgtatctcttctatcctgaaaaccctcatttaagtaatacagaacttccatgatgcctttccatgaatttgatcattgctgtaatctttccctatacctttttgaattttgcctggagttagcctggacagtatccagcatagtaaaatgtcttgctccagcc

SEQ ID NO: 45579 - DNA, 600 bp, Chicken  19866894285635_1
gcagaggaggcaaggagcagctactgtcctctaaaatcaacaatacacaacaattcctgccaagatttggactagaaggaaaggttttgtggagctgtagttctcagataggagtacccaacccccccttgtgcttaggataatacgtttttgaggcaggccacgtatcacaaaccgcttccttgctgacatttgccatcaccctgtgtccaggtcaagacagcctcaaagcaggaagcctcatcagttaacactaaaatgaaaggtgtagttgtggttatgcagatccccggggagggractggctgtgatcatatggagaaaccagcacaaactcacaggagatttggtcayaagctctgtggaggagctatcagaatggctgtaaagcgctatgtgagcctgtcctgagcatctgatcagtgctcactgcagagatctccatgagctcrcatggcctgatatcatacmctgttttttgaagggattttattaactcatactaagatttccagagatccagactcagaattcttgccctgtatcttttggaataacacactttgtgactgcaccaatgcagcaacacagggaacaaat

SEQ ID NO: 45580 - DNA, 600 bp, Chicken  19866894285635_2
tcctgccaagatttggactagaaggaaaggttttgtggagctgtagttctcagataggagtacccaacccccccttgtgcttaggataatacgtttttgaggcaggccacgtatcacaaaccgcttccttgctgacatttgccatcaccctgtgtccaggtcaagacagcctcaaagcaggaagcctcatcagttaacactaaaatgaaaggtgtagttgtggttatgcagatccccggggagggractggctgtgatcatatggagaaaccagcacaaactcacaggagatttggtcayaagctctgtggaggagctatcagaatggctgtaaagcgctatgtgagcctgtcctgagcatctgatcagtgctcactgcagagatctccatgagctcrcatggcctgatatcatacmctgttttttgaagggattttattaactcatactaagatttccagagatccagactcagaattcttgccctgtatcttttggaataacacactttgtgactgcaccaatgcagcaacacagggaacaaataacttaaggaartacagtgaaatggcatttcaactctccttcctcctccctgca

SEQ ID NO: 45581 - DNA, 600 bp, Chicken  19866894285635_3
gaggcaggccacgtatcacaaaccgcttccttgctgacatttgccatcaccctgtgtccaggtcaagacagcctcaaagcaggaagcctcatcagttaacactaaaatgaaaggtgtagttgtggttatgcagatccccggggagggractggctgtgatcatatggagaaaccagcacaaactcacaggagatttggtcayaagctctgtggaggagctatcagaatggctgtaaagcgctatgtgagcctgtcctgagcatctgatcagtgctcactgcagagatctccatgagctcrcatggcctgatatcatacmctgttttttgaagggattttattaactcatactaagatttccagagatccagactcagaattcttgccctgtatcttttggaataacacactttgtgactgcaccaatgcagcaacacagggaacaaataacttaaggaartacagtgaaatggcatttcaactctccttcctcctccctgcatgctgagcagcttggtgttgctcttggtgggggtttctgacatctcctgttgttacagcacggccacaccagagttccacgtgtaggaagaggaagga

SEQ ID NO: 45582 - DNA, 600 bp, Chicken  19866894285635_4
aaaccgcttccttgctgacatttgccatcaccctgtgtccaggtcaagacagcctcaaagcaggaagcctcatcagttaacactaaaatgaaaggtgtagttgtggttatgcagatccccggggagggractggctgtgatcatatggagaaaccagcacaaactcacaggagatttggtcayaagctctgtggaggagctatcagaatggctgtaaagcgctatgtgagcctgtcctgagcatctgatcagtgctcactgcagagatctccatgagctcrcatggcctgatatcatacmctgttttttgaagggattttattaactcatactaagatttccagagatccagactcagaattcttgccctgtatcttttggaataacacactttgtgactgcaccaatgcagcaacacagggaacaaataacttaaggaartacagtgaaatggcatttcaactctccttcctcctccctgcatgctgagcagcttggtgttgctcttggtgggggtttctgacatctcctgttgttacagcacggccacaccagagttccacgtgtaggaagaggaaggatttctccccttgccataag

SEQ ID NO: 45583 - DNA, 600 bp, Chicken  19866894285635_5
catatggagaaaccagcacaaactcacaggagatttggtcayaagctctgtggaggagctatcagaatggctgtaaagcgctatgtgagcctgtcctgagcatctgatcagtgctcactgcagagatctccatgagctcrcatggcctgatatcatacmctgttttttgaagggattttattaactcatactaagatttccagagatccagactcagaattcttgccctgtatcttttggaataacacactttgtgactgcaccaatgcagcaacacagggaacaaataacttaaggaartacagtgaaatggcatttcaactctccttcctcctccctgcatgctgagcagcttggtgttgctcttggtgggggtttctgacatctcctgttgttacagcacggccacaccagagttccacgtgtaggaagaggaaggatttctccccttgccataagaaagtgatatgttacaaaggcagctgtcttaatacagctacagtaaatgcaatatctatattctgggcagcgacaaagaaacacaatccaaacaagcagtggaataatcacaccatgctattatttacttattttgcattt

SEQ ID NO: 45584 - DNA, 600 bp, Chicken  19866894285657_1
gctttagcaagttgggtatccaagtcttccatcagtgcggagggctatagagggttaaaatgcatgtttaatgaaggcacagagcaatcaatagtgtgaaaatgattgatgtagtatgagtatagtctactgttaaaactcagtagtaaaggtttctatcacagctctgtgatagaaactatgagcttgtgttccaactattaaatttgtcattaaaagaacaaaactgctgttatcaacatttgctccccaatatgctagtaaaaaacgagataactattataactattatataacttwgcttrttattcatcttttttatagttccaagtgtttgtttttagaatactagagaaagctagtatttttgtaacaaaacattgtcctaacttccagctatgaaacattaaaatctggaaagtatatattcagttgcaagtygtcctcataatagcatgkcagagtggattgtaacctacagactatggatattttcattagaatagagtttttgtacatctcttttatttctagtttgggttctattctcagtcaaattacttctgtttcctctgcttatgtcagtcactgtaggtcact

SEQ ID NO: 45585 - DNA, 600 bp, Chicken  19866894285657_2
agcaagttgggtatccaagtcttccatcagtgcggagggctatagagggttaaaatgcatgtttaatgaaggcacagagcaatcaatagtgtgaaaatgattgatgtagtatgagtatagtctactgttaaaactcagtagtaaaggtttctatcacagctctgtgatagaaactatgagcttgtgttccaactattaaatttgtcattaaaagaacaaaactgctgttatcaacatttgctccccaatatgctagtaaaaaacgagataactattataactattatataacttwgcttrttattcatcttttttatagttccaagtgtttgtttttagaatactagagaaagctagtatttttgtaacaaaacattgtcctaacttccagctatgaaacattaaaatctggaaagtatatattcagttgcaagtygtcctcataatagcatgkcagagtggattgtaacctacagactatggatattttcattagaatagagtttttgtacatctcttttatttctagtttgggttctattctcagtcaaattacttctgtttcctctgcttatgtcagtcactgtaggtcacttatgt

SEQ ID NO: 45586 - DNA, 600 bp, Chicken  19866894285657_3
agtagtaaaggtttctatcacagctctgtgatagaaactatgagcttgtgttccaactattaaatttgtcattaaaagaacaaaactgctgttatcaacatttgctccccaatatgctagtaaaaaacgagataactattataactattatataacttwgcttrttattcatcttttttatagttccaagtgtttgtttttagaatactagagaaagctagtatttttgtaacaaaacattgtcctaacttccagctatgaaacattaaaatctggaaagtatatattcagttgcaagtygtcctcataatagcatgkcagagtggattgtaacctacagactatggatattttcattagaatagagtttttgtacatctcttttatttctagtttgggttctattctcagtcaaattacttctgtttcctctgcttatgtcagtcactgtaggtcacttatgtctgttaagtattatgatatttaattcactgcatcacttccaggttttattagaataaagagtagtatttaggattctgtgccttctggctatagcagtaacagcctaatggtggatgacaggagcgctgataaagg

SEQ ID NO: 45587 - DNA, 600 bp, Chicken  19866894285657_4
cacagctctgtgatagaaactatgagcttgtgttccaactattaaatttgtcattaaaagaacaaaactgctgttatcaacatttgctccccaatatgctagtaaaaaacgagataactattataactattatataacttwgcttrttattcatcttttttatagttccaagtgtttgtttttagaatactagagaaagctagtatttttgtaacaaaacattgtcctaacttccagctatgaaacattaaaatctggaaagtatatattcagttgcaagtygtcctcataatagcatgkcagagtggattgtaacctacagactatggatattttcattagaatagagtttttgtacatctcttttatttctagtttgggttctattctcagtcaaattacttctgtttcctctgcttatgtcagtcactgtaggtcacttatgtctgttaagtattatgatatttaattcactgcatcacttccaggttttattagaataaagagtagtatttaggattctgtgccttctggctatagcagtaacagcctaatggtggatgacaggagcgctgataaaggctcgtgtctggtctgact

SEQ ID NO: 45588 - DNA, 600 bp, Chicken  19866894285657_5
tgtttcctctgcttatgtcagtcactgtaggtcacttatgtctgttaagtattatgatatttaattcactgcatcacttccaggttttattagaataaagagtagtatttaggattctgtgccttctggctatagcagtaacagcctaatggtggatgacaggagcgctgataaaggctcgtgtctggtctgacttggtacaaatttttaatccacagctgcatcttactgacagctccttcctggtggccactgctttgttgtttctacagctaaatgatttgtgctctgtactccaaytgggggggaaaaaaaaacacagaaaataatgtggcacatatattgccaatttgtttgtctagctgaagaaattatgtgtcaacagggtgaaaccttatccccacatactcctttcaaatgaatttgtttagtataggagactggaagatgaaaatcatgattcttttttcagaactctgcatatcctttttacttcttaattaatggacacatcaaacacacaaagattcaaagcagaggaaaaaaaaagaaacatcctgctcatgtgcttctttttactgttaatccccataattaatg

SEQ ID NO: 45589 - DNA, 600 bp, Chicken  19866894285657_6
tgcttatgtcagtcactgtaggtcacttatgtctgttaagtattatgatatttaattcactgcatcacttccaggttttattagaataaagagtagtatttaggattctgtgccttctggctatagcagtaacagcctaatggtggatgacaggagcgctgataaaggctcgtgtctggtctgacttggtacaaatttttaatccacagctgcatcttactgacagctccttcctggtggccactgctttgttgtttctacagctaaatgatttgtgctctgtactccaaytgggggggyaaaaaaaacacagaaaataatgtggcacatatattgccaatttgtttgtctagctgaagaaattatgtgtcaacagggtgaaaccttatccccacatactcctttcaaatgaatttgtttagtataggagactggaagatgaaaatcatgattcttttttcagaactctgcatatcctttttacttcttaattaatggacacatcaaacacacaaagattcaaagcagaggaaaaaaaaagaaacatcctgctcatgtgcttctttttactgttaatccccataattaatgccctatgat

SEQ ID NO: 45590 - DNA, 600 bp, Chicken  19866894285659_1
cagtccttagcacatttatttaacacacatgtaaccttttcactagaaaagcatcaaagcagacaactgatcatttcttcccacttaactgcacaccggtgcttagagtaggcaaagtaaatctgaagaagcaacacagacaagacagcgttgtactctgctacctatgaaataaaggaaggatgaaaataacattaaagtagcagctaggtcagtgttaaagatagaaaagctactgttattacatatccatcagcgtttctaggtgaagcacatgcaagaagaaggctatggacatawcagagagtaccttcacttcttgctgttacatgacagaacatatccttttccttaagtagaaaaaacagcacagagagaaggcagcatacaccatgcaacaccactctgcaaaacacacctaagaacatgcttaagagttgaaaattgaactggtggttgttttgcttgaccaactgttacctaaagtagtagtgttatactactgagtttagtttctgtaatataaaacacagcactacacacccatcctactgctgctatgatatttgaatatgcattaatatgccacacagcagctga

SEQ ID NO: 45591 - DNA, 600 bp, Chicken  19866894285659_2
tagtttctgtaatataaaacacagcactacacacccatcctactgctgctatgatatttgaatatgcattaatatgccacacagcagctgaaaaccttcctactgctctacttggcaagtgtttttgtttacacctgggaagaatggcaggaataaagagtagggaagcacaggtggagatggatcaaagctgaacataagaggcacctcttgtcatgtgaacgaccaacaaggcggctgcagcagtaccaggtcacctccacctagtcacatgcttagcttttacagtggtgcatcatmcaaagctgctaattgttatatgcacaaaagcaaactacagtcatgatgtttaaagtctctcctgttcccacattaaacatcatgcaaatgcttgcacactactaacatctccaaaaagtcagtgcccctagccatttacagaagtacacatttacagccttggaaggactggaaagactatagaccattgcagaagttaaggttttcccaccaagaatcatcactaacctccaaaatgaggatatataccaaatcaaataggaaaacaagaaaagacaggaaaggtgaaagcacattaaa

SEQ ID NO: 45592 - DNA, 600 bp, Chicken  19866894285660_1
aaggggctgcacgagtcccactcacaggctctccatgcacacatctacatgtaatactgctgcttgcctgcacggctcacgtgtggctctgagggctgcaaatccaccaagggctgccttatgccacagttcaggctgtgaagcaacagcaatctggccagatgcatgactgcttgcagcctagccgtggtgcattgcagcaacaggaggacagcagcagtgcaaggggcagcctgaaaccctggggcatgctggaaacaccccagcactaagggcggagcaaatgggagcaaccagcaygcaacgtgcttgctggtgcctcaccattaaccccgggcaagctctgtacccgaggtgcaatgtgcccagtgcagtaccgtggactctgagcctctggggaccaagagatgtccccagaaggtggccagaagcggtgctgcctgcaaaccactgccccacaggctccaacatgcccagatccatttctccacaatgcactgttttgcaatcctgtacatcaagctcaacgctagggtaattttgtcccgaaaatacataacaagtgatggcaaagggtgaaatgcgctgttcaggaatgat

SEQ ID NO: 45593 - DNA, 600 bp, Chicken  19866894285660_2
agcaacaggaggacagcagcagtgcaaggggcagcctgaaaccctggggcatgctggaaacaccccagcactaagggcggagcaaatgggagcaaccagcaygcaacgtgcttgctggtgcctcaccattaaccccgggcaagctctgtacccgaggtgcaatgtgcccagtgcagtaccgtggactctgagcctctggggaccaagagatgtccccagaaggtggccagaagcggtgctgcctgcaaaccactgccccacaggctccaacatgcccagatccatttctccacaatgcaytgttttgcaatcctgtacatcaagctcaacgctagggtaattttgtcccgaaaatacataacaagtgatggcaaagggtgaaatgcgctgttcaggaatgattttgcttcgagcatgcaagcgcatgcaagctgccagcccgagctgctgcacargcaggcagcagtgagcagtgccatgcagcaggctgctgccagctcgtgctgccctccaagcaagtccatctccccaccgccgtcctgctgccggtgcccktgtttgctggctgtggtcctggctggtggctcagccttgtggcat

SEQ ID NO: 45594 - DNA, 600 bp, Chicken  19866894285660_3
gcaacaggaggacagcagcagtgcaaggggcagcctgaaaccctggggcatgctggaaacaccccagcactaagggcggagcaaatgggagcaaccagcaygcaacgtgcttgctggtgcctcaccattaaccccgggcaagctctgtacccgaggtgcaatgtgcccagtgcagtaccgtggactctgagcctctggggaccaagagatgtccccagaaggtggccagaagcggtgctgcctgcaaaccactgccccacaggctccaacatgcccagatccatttctccacaatgcacygttttgcaatcctgtacatcaagctcaacgctagggtaattttgtcccgaaaatacataacaagtgatggcaaagggtgaaatgcgctgttcaggaatgattttgcttcgagcatgcaagcgcatgcaagctgccagcccgagctgctgcacargcaggcagcagtgagcagtgccatgcagcaggctgctgccagctcgtgctgccctccaagcaagtccatctccccaccgccgtcctgctgccggtgcccktgtttgctggctgtggtcctggctggtggctcagccttgtggcatt

SEQ ID NO: 45595 - DNA, 600 bp, Chicken  19866894285660_4
ggtgcaatgtgcccagtgcagtaccgtggactctgagcctctggggaccaagagatgtccccagaaggtggccagaagcggtgctgcctgcaaaccactgccccacaggctccaacatgcccagatccatttctccacaatgcactgttttgcaatcctgtacatcaagctcaacgctagggtaattttgtcccgaaaatacataacaagtgatggcaaagggtgaaatgcgctgttcaggaatgattttgcttcgagcatgcaagcgcatgcaagctgccagcccgagctgctgcacargcaggcagcagtgagcagtgccatgcagcaggctgctgccagctcgtgctgccctccaagcaagtccatctccccaccgccgtcctgctgccggtgcccktgtttgctggctgtggtcctggctggtggctcagccttgtggcattgcagctttcctgcagtgggatgtgggtgtgggacgttggaatttggatggtctcgtgggaaaagcgccgctgtragcaagactacaccttgagttctgagagactcattgtaatggcagggtgtcaacgcatgaaaacacagctgctccccccc

SEQ ID NO: 45596 - DNA, 600 bp, Chicken  19866894285660_5
ccccacaggctccaacatgcccagatccatttctccacaatgcactgttttgcaatcctgtacatcaagctcaacgctagggtaattttgtcccgaaaatacataacaagtgatggcaaagggtgaaatgcgctgttcaggaatgattttgcttcgagcatgcaagcgcatgcaagctgccagcccgagctgctgcacargcaggcagcagtgagcagtgccatgcagcaggctgctgccagctcgtgctgccctccaagcaagtccatctccccaccgccgtcctgctgccggtgcccktgtttgctggctgtggtcctggctggtggctcagccttgtggcattgcagctttcctgcagtgggatgtgggtgtgggacgttggaatttggatggtctcgtgggaaaagcgccgctgtragcaagactacaccttgagttctgagagactcattgtaatggcagggtgtcaacgcatgaaaacacagctgctcccccccagcagcatgggagagccttccccaaggctgggattttccttttggagccctaaagcagcccagcagggcattaacaatgaacacagccacgcgtctcctc

SEQ ID NO: 45597 - DNA, 600 bp, Chicken  19866894285660_6
gggtgaaatgcgctgttcaggaatgattttgcttcgagcatgcaagcgcatgcaagctgccagcccgagctgctgcacargcaggcagcagtgagcagtgccatgcagcaggctgctgccagctcgtgctgccctccaagcaagtccatctccccaccgccgtcctgctgccggtgcccktgtttgctggctgtggtcctggctggtggctcagccttgtggcattgcagctttcctgcagtgggatgtgggtgtgggacgttggaatttggatggtctcgtgggaaaagcgccgctgtragcaagactacaccttgagttctgagagactcattgtaatggcagggtgtcaacgcatgaaaacacagctgctcccccccagcagcatgggagagccttccccaaggctgggattttccttttggagccctaaagcagcccagcagggcattaacaatgaacacagccacgcgtctcctcttggccatacacccaaagagccccaggaggacgcatgggctcagcccagacaatgaatgctgtgccagcagcacgcagtgcaccctgagctctgcagcagcaggatctgctgcgcccctg

SEQ ID NO: 45598 - DNA, 599 bp, Chicken  19866894285665_1
  misc_feature (1)..(128): n is any nucleotide
nnnnnnnnnnnnnnnnnnnnnnnnnnnnnnnnnnnnnnnnnnnnnnnnnnnnnnnnnnnnnnnnnnnnnnnnnnnnnnnnnnnnnnnnnnnnnnnnnnnnnnnnnnnnnnnnnnnnnnnnnnnnnnnnagaagtcccggagaggtgagggctgtgcacagctttctcccttgtgctggcatggatttgtcaaagtaaaatttctgggaccctttctttgcagctcaccaaccggttcctgtttctgttcctccgacctaccagcagctcagcagatgctcaaagatgtcacccagctcaygctgagtttccttttcatgtctggtatttgctaactcttctaatgagatgtccccacttggaatttatacaggcaaaacgatgtgctctctgcaaatcagagtattgttgtttcttaaagtcacttttagatgagaattctttcatgctccctctcatgggccctctgtgagctcggtgggttctgctcgcaggtccccatgaccagcaccactgctggtcagcgatgggttgtgtgttctatcaaagctcagaggacttctaacacaatcttcactctgatttgcaaagaggatttga

SEQ ID NO: 45599 - DNA, 434 bp, Chicken  19866894285665_2
tggtatttgctaactcttctaatgagatgtccccacttggaatttatacaggcaaaacgatgtgctctctgcaaatcagagtattgttgtttcttaaagtcacttttagatgagaattctttcatgctccctctcatgggccctctgtgagctcggtgggttctgctcgcaggtccccatgaccagcaccactgctggtcagcgatgggttgtgtgttctatcaaagctcagaggacttctaacacaatcttcactctgatttgcaaagaggatttgatttgattttgatttgcaaccargatttctcyaagttatccctgctgtttttcagcaccagctgcccgaaatttgtagttgaaatctgtagagactaagccaaactctgttacatcagtaaaacaaagagttgattctctgtcacatctggcaatta

SEQ ID NO: 45600 - DNA, 425 bp, Chicken  19866894285665_3
ctaactcttctaatgagatgtccccacttggaatttatacaggcaaaacgatgtgctctctgcaaatcagagtattgttgtttcttaaagtcacttttagatgagaattctttcatgctccctctcatgggccctctgtgagctcggtgggttctgctcgcaggtccccatgaccagcaccactgctggtcagcgatgggttgtgtgttctatcaaagctcagaggacttctaacacaatcttcactctgatttgcaaagaggatttgatttgattttgatttgcaaccargatttctcyaagttatccctgctgtttttcagcaccagctgcccgaaatttgtagttgaaatctgtagagactaagccaaactctgttacatcagtaaaacaaagagttgattctctgtcacatctggcaatta

SEQ ID NO: 45601 - DNA, 600 bp, Chicken  19866894285666_1
ttcccttaatctacacatattcccttttagcttttttttatgacaacctctgatatcatttattctgagaattcagtgaagccccacagccatggttgccaaaatactaaagaattttagtcagagtgagcaaacagctcagccttattttgatgaatacgctattccaatgccaggcatccatctaaagcttgtagtccaggcagactccgttccagtttaccccttttagtgtgaatctgggactattctgcaagtaggcagaatagttcttcagggatgtatctgcaaaaaaacagratttctccaataaataaataaataagagtattgtaaactcattggacaacaacattgctttttagaaaacctacacaaatcctccactttgttctaccagtgtaaaaggccttgttactattgttttggagtaactgagrgataagtttggcatatggtaagcttttggtgagttacatttctactggagcaaataataagtcaatggaaattaagctatctctagaactaaataaagctggttcaaataaaactactcccttccttttcagttgtccttccagataacgaattgtaaca

SEQ ID NO: 45602 - DNA, 600 bp, Chicken  19866894285666_2
agccttattttgatgaatacgctattccaatgccaggcatccatctaaagcttgtagtccaggcagactccgttccagtttaccccttttagtgtgaatctgggactattctgcaagtaggcagaatagttcttcagggatgtatctgcaaaaaaacagratttctccaataaataaataaataagagtattgtaaactcattggacaacaacattgctttttagaaaacctacacaaatcctccactttgttctaccagtgtaaaaggccttgttactattgttttggagtaactgagrgataagtttggcatatggtaagcttttggtgagttacatttctactggagcaaataataagtcaatggaaattaagctatctctagaactaaataaagctggttcaaataaaactactcccttccttttcagttgtccttccagataacgaattgtaacatttctttattcaaatcagtccagttttggtgagatacatgggatattgaggaagctgtagaactgaaaatattcttaaaagaatattcctacttgcatcctacattttcaattcaaaccaaaagggctgttttcaaaacc

SEQ ID NO: 45603 - DNA, 600 bp, Chicken  19866894285668_1
ttcagactacccaaaactcaagaagacctactcacctcgagttctgccagtagagaaaatattgggtatctcctggagcattcctgcctgcctgccaagtgcagttcatgagggaaatgtcataaatcacacaggagaagttctcaatggctgacccattaatgcctgcaaacatagcaatgtccattatgaggaaaaaatacgtgtactactccaagctggacaatcatggcaacagacgtaatcttcctggatttcagtacggctttttttgtccctcatgacatcattctggactasttgtccaaccatgaggtaaacaagttcatactacactggargatgtactggctgagcagcagaggtcaaatggttgtagtgaatgcggctacatctggctaacagccattcattagcagtggtccctcaattctacagacagttctgttgaacatttttatcagtattctggaagctggtgtggaaagtctcctcagcagrttttctcacaatactgaactgggaggtgctgctgactccgtggaggacaagacgtcatgcagagggatccagatatgttggagtgttggccagtcatca

SEQ ID NO: 45604 - DNA, 600 bp, Chicken  19866894285668_2
ttctgccagtagagaaaatattgggtatctcctggagcattcctgcctgcctgccaagtgcagttcatgagggaaatgtcataaatcacacaggagaagttctcaatggctgacccattaatgcctgcaaacatagcaatgtccattatgaggaaaaaatacgtgtactactccaagctggacaatcatggcaacagacgtaatcttcctggatttcagtacggctttttttgtccctcatgacatcattctggactasttgtccaaccatgaggtaaacaagttcatactacactggargatgtactggctgagcagcagaggtcaaatggttgtagtgaatgcggctacatctggctaacagccattcattagcagtggtccctcaattctacagacagttctgttgaacatttttatcagtattctggaagctggtgtggaaagtctcctcagcagrttttctcacaatactgaactgggaggtgctgctgactccgtggaggacaagacgtcatgcagagggatccagatatgttggagtgttggccagtcatcagtggcatgaagttcagcaaaggtaaatgctgtgtgctgcat

SEQ ID NO: 45605 - DNA, 600 bp, Chicken  19866894285668_3
acgtgtactactccaagctggacaatcatggcaacagacgtaatcttcctggatttcagtacggctttttttgtccctcatgacatcattctggactasttgtccaaccatgaggtaaacaagttcatactacactggargatgtactggctgagcagcagaggtcaaatggttgtagtgaatgcggctacatctggctaacagccattcattagcagtggtccctcaattctacagacagttctgttgaacatttttatcagtattctggaagctggtgtggaaagtctcctcagcagrttttctcacaatactgaactgggaggtgctgctgactccgtggaggacaagacgtcatgcagagggatccagatatgttggagtgttggccagtcatcagtggcatgaagttcagcaaaggtaaatgctgtgtgctgcatctgatagagtgcagtgctggacacaggcacagaatgggagaggagaggctggagagcagcttggcaggaagggacctgtgggcactggtgacagcagatcagcatgagccagcagtacgccctggcagccaagagggcaaactacatcgtgaggtgcatt

SEQ ID NO: 45606 - DNA, 495 bp, Chicken  19866894285670_1
ttcccaaccagtcccatttccagctaaactgcaccccaaactccatctcttcgtttctggggattctttggtgaattcctgctcccaggtgtgctctggccatatggattggtagctggaatggagatgtatctcttctgcttatgtagtaaagagtaaaacaaaaactaatgggtattttcagatagcctgacagtgattaattgctgttccagcagatgctccaaataaaaaatgctccggctccctgatttataccgggtgcagagagatgaagaggaaacacactgcagagccagrgaggggacggtgcctgcccccgactgggtgctgggggggtgagccctcagtcaggctgaaattgggggcacagggtgtctgagtgcagcacggcccttggaggggcagggggtggcgggggctgcggagctgagggtgtctcagtcctactgatggcaatgcagaaaggaaaaggagctgaggagggcatgggag

SEQ ID NO: 45607 - DNA, 599 bp, Chicken  19866894285678_1
  misc_feature (1)..(164): n is any nucleotide
nnnnnnnnnnnnnnnnnnnnnnnnnnnnnnnnnnnnnnnnnnnnnnnnnnnnnnnnnnnnnnnnnnnnnnnnnnnnnnnnnnnnnnnnnnnnnnnnnnnnnnnnnnnnnnnnnnnnnnnnnnnnnnnnnnnnnnnnnnnnnnnnnnnnnnnnnnnnnnnnnnnntgtgtcagtccctgccctgatgtgctgtgctgccttcctgctttcctcatcagcacctgacgagcagtgcgagggaagggtgctgttggcttggaaaccaaaggagatttctaagggcaatttgcagctgggcctrggaagggcttttctgtgcttaacttgtgccagtctaaattttaataaatgcgagccgtgaatttaattaagctgctgaaagagctgctgatcaggaataaytgttgtttgtagagcacagctactttctgtaaagcttttcggaggggtgagaccaaacagtccctgccccaattcaaatgcaattcagtttcttgttgagagctgacgctgtttctttcaaagcagagggtgcagagcatatcgtgcagtcagaccctgccatggctgctctggttttgtttgaggaggtgctggggg

SEQ ID NO: 45608 - DNA, 599 bp, Chicken  19866894285678_2
  misc_feature (1)..(63): n is any nucleotide
nnnnnnnnnnnnnnnnnnnnnnnnnnnnnnnnnnnnnnnnnnnnnnnnnnnnnnnnnnnnnnntgtgtcagtccctgccctgatgtgctgtgctgccttcctgctttcctcatcagcacctgacgagcagtgcgagggaagggtgctgttggcttggaaaccaaaggagatttctaagggcaatttgcagctgggcctrggaagggcttttctgtgcttaacttgtgccagtctaaattttaataaatgcgagccgtgaatttaattaagctgctgaaagagctgctgatcaggaataaytgttgtttgtagagcacagctactttctgtaaagcttttcggaggggtgagaccaaacagtccctgccccaattcaaatgcaattcagtttcttgttgagagctgacgctgtttctttcaaagcagagggtgcagagcatatcgtgcagtcagaccctgccatggctgctctggttttgtttgaggaggtgctgggggtggcagtgctgcgagagaaggtgtttgaaaggkacaggacaactgtgcagccccttctgaagccaaacagggcaggctggggggggtttgcaggaggatgt

SEQ ID NO: 45609 - DNA, 600 bp, Chicken  19866894285678_3
tctaaattttaataaatgcgagccgtgaatttaattaagctgctgaaagagctgctgatcaggaataaytgttgtttgtagagcacagctactttctgtaaagcttttcggaggggtgagaccaaacagtccctgccccaattcaaatgcaattcagtttcttgttgagagctgacgctgtttctttcaaagcagagggtgcagagcatatcgtgcagtcagaccctgccatggctgctctggttttgtttgaggaggtgctgggggtggcagtgctgcgagagaaggtgtttgaaaggkacaggacaactgtgcagccccttctgaagccaaacagggcaggctggggggggtttgcaggaggatgtgtctctgctccatgtccctcctgatgctgagctgcaaaagacgaagagttcctgctgcatccagccctgacgtgtaaatgcacgctgcatttctggatgtgaacccttgcaaaacaggaagctcatctcccagcaaagttgctgtgtaacagaagcctggcagtgcctgcctgtactccattaatctgtgtctgctgcagcgcctggctatcgccaaggagtttggggacaa

SEQ ID NO: 45610 - DNA, 600 bp, Chicken  19866894285678_4
aagagctgctgatcaggaataaytgttgtttgtagagcacagctactttctgtaaagcttttcggaggggtgagaccaaacagtccctgccccaattcaaatgcaattcagtttcttgttgagagctgacgctgtttctttcaaagcagagggtgcagagcatatcgtgcagtcagaccctgccatggctgctctggttttgtttgaggaggtgctgggggtggcagtgctgcgagagaaggtgtttgaaaggkacaggacaactgtgcagccccttctgaagccaaacagggcaggctkgggggggtttgcaggaggatgtgtctctgctccatgtccctcctgatgctgagctgcaaaagacgaagagttcctgctgcatccagccctgacgtgtaaatgcacgctgcatttctggatgtgaacccttgcaaaacaggaagctcatctcccagcaaagttgctgtgtaacagaagcctggcagtgcctgcctgtactccattaatctgtgtctgctgcagcgcctggctatcgccaaggagtttggggacaaagcagccgagaggagagcatacagcaacctgggcaatgcacacatc

SEQ ID NO: 45611 - DNA, 600 bp, Chicken  19866894285681_1
aatgcatcccctcagtctacttgcatgtaaaaacataagatatcctgtttcttttaacagtattttgatggtgcgagtgtaactgctgttatgatattgtactagcttaatctgtgcacaacagagagcacaaagcatattgtttacaaagttaacatttgtttgatttagcttcagctgaagaactatgggttagttttgctgctgtgaaatggtagatataaatgcaaagaggaaaaagattttctttcgcctgaaagagataaaatataatttcagtatcgtcatttcaggcagacrtttatttcataccttcttagattaatggcatgtttggtttttttccgatgtgattattttctcctgtaaggaagagtaattgttaattatttcagtgggaatcacaatacattcaagtgatgaggactcaagttatcttctccatgaagtttgatgcattaattatatgctaccaaatatgtattagttgtgttaaaatgtaacactacttgatctggactatgaaataacatgaaaataaaaaacacagtttttgagagaagtatcagagttgaagactcaaggagcacttcatagctt

SEQ ID NO: 45612 - DNA, 599 bp, Chicken  19866894285685_1
  misc_feature (1)..(25): n is any nucleotide
nnnnnnnnnnnnnnnnnnnnnnnnnctgaatttttttcccctaactggaattgatcctccaaaacgatatgtaaaggaaaaatcctacatcacctaaagagataaaccatggtaagtactgcttgctgttcaaggctggtgggttattaaatcagaaggaccagggcacaagagttcagcactgaaatcaaatactttctacactgttcaattagatttccaaaaagaaaaaataaaataaaattaaaatatttaaaattacaagtattttaagctcccctgatattgatgctaaggtargaataagtagcatgttttaacgagtcaaagattctctactctagaaatcctaggatagttctatttgtatggccactgcacagcatctgcacggagcctgtacagtataaagaaaggatttctattttactgagaaaaatccaggcattttcccagttgtccaaaaacaggaacggaggcagcattctgtgaaaygcatggtcacaaaactaaggtattttaagtgaataaaaggagaaatatttctgactatgcaagagcaaactgttctttcttaaggccaaaagacacaataggct

SEQ ID NO: 45613 - DNA, 600 bp, Chicken  19866894285685_2
tttctacactgttcaattagatttccaaaaagaaaaaataaaataaaattaaaatatttaaaattacaagtattttaagctcccctgatattgatgctaaggtargaataagtagcatgttttaacgagtcaaagattctctactctagaaatcctaggatagttctatttgtatggccactgcacagcatctgcacggagcctgtacagtataaagaaaggatttctattttactgagaaaaatccaggcattttcccagttgtccaaaaacaggaacggaggcagcattctgtgaaaygcatggtcacaaaactaaggtattttaagtgaataaaaggagaaatatttctgactatgcaagagcaaactgttctttcttaaggccaaaagacacaataggctacaagacagcattttaaagttgcatatagaaaaaaataagcatcatgtcaaccactataacatttgaattaaaaagttttgaagttgagaggacttggaggttaagtagtaatcacgtgaaacagaaatagcacttgtccttgaatagaggcagaattgttaaatgtctgaatctagcaaggattttcaagtagac

SEQ ID NO: 45614 - DNA, 600 bp, Chicken  19866894285688_1
tgctgcagtgatcagcactactttcagaagtgaggaatccctgtaactcaacagaagtatttgaagttcaatagttccagagggcgttctgtttctttctgcccagacagagggtggagttttgccttggtgtgaggctatgtataaccacttacctagaaagagaaccaggaatggacaaattcctagatagttcagtggtcttattaggaaacaagctttcatgtaagtattaaaaatgtaccacagtattaataaatcatcagaaaaagtgcatctcaaaaacaggaatgggaatgyatcatcatcatacaaccgtatgcagcgaaaagaagcaaacgttctgtagccagagcgcatggtcaagagagtggggtttggccttggtttccctctgagctgctgtgttagcttggagtaatttagtttcactttgtctcagcttccccagctgtgcaaaaaatacctcacaagggtgctgtggggctggaggtgttcttagagcaagtcctggtgctgcaggaggactgaaaatggttataaaaatgtccttacgttagctttcgttgtagtatttcatgctattctggagagaactta

SEQ ID NO: 45615 - DNA, 599 bp, Chicken  19866894285689_1
  misc_feature (1)..(237): n is any nucleotide
nnnnnnnnnnnnnnnnnnnnnnnnnnnnnnnnnnnnnnnnnnnnnnnnnnnnnnnnnnnnnnnnnnnnnnnnnnnnnnnnnnnnnnnnnnnnnnnnnnnnnnnnnnnnnnnnnnnnnnnnnnnnnnnnnnnnnnnnnnnnnnnnnnnnnnnnnnnnnnnnnnnnnnnnnnnnnnnnnnnnnnnnnnnnnnnnnnnnnnnnnnnnnnnnnnnnnnnnnnnnnnnnnnnnnnnnnnnnntctttgtccctaatccccagctaatgtcactgccctgtactcacctgcaacctgctctgtttkatttcttcttctgggagtgttcccrtcttaaaaggcaatggtacatgcatcttcctctgtgaatctctctggctggaagcattcaaagcacacaaactgcccataaaatgacagcaatrttatttatatattatgtcatatatacagcaaagtattttagacgtcagtactgcaacactcatagtcagacccttgttgattactgtacggatatgtagctctgccacatttacagggcatccaaactgttccaatatttcctgatgagtctgatctgaagtgacttccactcttcatct

SEQ ID NO: 45616 - DNA, 599 bp, Chicken  19866894285689_2
  misc_feature (1)..(212): n is any nucleotide
nnnnnnnnnnnnnnnnnnnnnnnnnnnnnnnnnnnnnnnnnnnnnnnnnnnnnnnnnnnnnnnnnnnnnnnnnnnnnnnnnnnnnnnnnnnnnnnnnnnnnnnnnnnnnnnnnnnnnnnnnnnnnnnnnnnnnnnnnnnnnnnnnnnnnnnnnnnnnnnnnnnnnnnnnnnnnnnnnnnnnnnnnnnnnnnnnnnnnnnnnnnnnnnnnnnntctttgtccctaatccccagctaatgtcactgccctgtactcacctgcaacctgctctgtttkatttcttcttctgggagtgttcccrtcttaaaaggcaatggtacatgcatcttcctctgtgaatctctctggctggaagcattcaaagcacacaaactgcccataaaatgacagcaatrttatttatatattatgtcatatatacagcaaagtattttagacgtcagtactgcaacactcatagtcagacccttgttgattactgtacggatatgtagctctgccacatttacagggcatccaaactgttccaatatttcctgatgagtctgatctgaagtgacttccactcttcatcttttcttacataatgcttccctctgg

SEQ ID NO: 45617 - DNA, 599 bp, Chicken  19866894285689_3
  misc_feature (1)..(118): n is any nucleotide
nnnnnnnnnnnnnnnnnnnnnnnnnnnnnnnnnnnnnnnnnnnnnnnnnnnnnnnnnnnnnnnnnnnnnnnnnnnnnnnnnnnnnnnnnnnnnnnnnnnnnnnnnnnnnnnnnnnnnntctttgtccctaatccccagctaatgtcactgccctgtactcacctgcaacctgctctgtttkatttcttcttctgggagtgttcccrtcttaaaaggcaatggtacatgcatcttcctctgtgaatctctctggctggaagcattcaaagcacacaaactgcccataaaatgacagcaatrttatttatatattatgtcatatatacagcaaagtattttagacgtcagtactgcaacactcatagtcagacccttgttgattactgtacggatatgtagctctgccacatttacagggcatccaaactgttccaatatttcctgatgagtctgatctgaagtgacttccactcttcatcttttcttacataatgcttccctctggggaacttaatggctcaagtgttttaaaaccgaaaaaaatccttataaacttcagtttgaacaggaaagccaaaataatttttaaaagggcagtg

SEQ ID NO: 45618 - DNA, 600 bp, Chicken  19866894285689_4
agtctgatctgaagtgacttccactcttcatcttttcttacataatgcttccctctggggaacttaatggctcaagtgttttaaaaccgaaaaaaatccttataaacttcagtttgaacaggaaagccaaaataatttttaaaagggcagtgcattttaatcagttacaaagattcatcacaaattacttagctggtgggttattggtttttggtaacaaaaattataggagaaggttaatatttagaagcctccattagccttataataacgtagtacaaaacgacaccttaattccaytgaaaacattttgcaagtgcaataaagcaatgaacaggagaatatggtaatcattaatgctacatgctgaacgttgtctctgaagcaaagtgccccaaaggtactattatcccatgacagtcattctgtgtttcacctagttgcttaacgagtgctttattttttgatcatcctaaatcgtagcatcataagcacatagcaccaacaggggaaaagcaccaaagaaaagaggttgttaggacattgagctttttgatccaatctgattaagtttaattaattgcactgttttgacttgaa

SEQ ID NO: 45619 - DNA, 599 bp, Chicken  19866894285709_1
  misc_feature (1)..(181): n is any nucleotide
nnnnnnnnnnnnnnnnnnnnnnnnnnnnnnnnnnnnnnnnnnnnnnnnnnnnnnnnnnnnnnnnnnnnnnnnnnnnnnnnnnnnnnnnnnnnnnnnnnnnnnnnnnnnnnnnnnnnnnnnnnnnnnnnnnnnnnnnnnnnnnnnnnnnnnnnnnnnnnnnnnnnnnnnnnnnnnnnnnnnntcctcgtttaggactttgtagagtttttaactgcttaactgacaagttttcctactgcattaacatcagtgttttacacactttttgctaagaatgacttttaggggtctaaagtcttytgacagctacagtcatttatgggaaaaaaaaagaaaaagtaattaagcagagttctttccctggggaacaaatacattttctatccatatatctgagcattatcgcaatgtgatatttgtcatcctaatcaacacagtgggaactgatcttggaccactctagccccattcatggttaattaaagcagttttctagataaaaacaraagtactatcatgctgcactaggtatcttgaactcctgagtatagttttttgtggtttgacatttttcctaattgatatttaaacagattggt

SEQ ID NO: 45620 - DNA, 600 bp, Chicken  19866894285709_2
tttaactgcttaactgacaagttttcctactgcattaacatcagtgttttacacactttttgctaagaatgacttttaggggtctaaagtcttytgacagctacagtcatttatgggaaaaaaaaagaaaaagtaattaagcagagttctttccctggggaacaaatacattttctatccatatatctgagcattatcgcaatgtgatatttgtcatcctaatcaacacagtgggaactgatcttggaccactctagccccattcatggttaattaaagcagttttctagataaaaacaraagtactatcatgctgcactaggtatcttgaactcctgagtatagttttttgtggtttgacatttttcctaattgatatttaaacagattggttacaagttctttgaactgcaagtgagatacccaaataaagatggatacctgcagagcacataacattttagagtcggtctttatttagtagctgccatgctcgacaagctcaagcagagagatttcctgttcacaagctgctatgaatgtgaaacatgacatttgacagcatttttcccaccacttctaaatcacagccatttccat

SEQ ID NO: 45621 - DNA, 599 bp, Chicken  19866894285710_1
  misc_feature (1)..(264): n is any nucleotide
nnnnnnnnnnnnnnnnnnnnnnnnnnnnnnnnnnnnnnnnnnnnnnnnnnnnnnnnnnnnnnnnnnnnnnnnnnnnnnnnnnnnnnnnnnnnnnnnnnnnnnnnnnnnnnnnnnnnnnnnnnnnnnnnnnnnnnnnnnnnnnnnnnnnnnnnnnnnnnnnnnnnnnnnnnnnnnnnnnnnnnnnnnnnnnnnnnnnnnnnnnnnnnnnnnnnnnnnnnnnnnnnnnnnnnnnnnnnnnnnnnnnnnnnnnnnnnnnnnnnnnnnctaacgtcatacactgctgaatatttggatatataytattgacagatatgtgaagaggattaaggctaaagtggtaatcaggtagaatttaccctgtaatcacactatttctagcaacagtcatccagaaaagaaattaaggaaactaccgaagtctcctcctggtcctttccattgcagtatcccctctttgctaacgaaatgcacataagcgtcaatagtaaggtctgttttctacagctttgcaccaaaatcttccatgtcaatattctcctgtagctgaccaaatttccaacaaatcaccaataaaaccaattaatataaagtcacttcat

SEQ ID NO: 45622 - DNA, 600 bp, Chicken  19866894285710_2
cccctctttgctaacgaaatgcacataagcgtcaatagtaaggtctgttttctacagctttgcaccaaaatcttccatgtcaatattctcctgtagctgaccaaatttccaacaaatcaccaataaaaccaattaatataaagtcacttcatgtgacatcccattggccaccagaggcaattaggacccacctatacctattctttatttcaacatattacagggaaatgtcctttcagtgagtatttgatgaggagcgtgatggttttttgaggcctttataagacagtcaaaagttarctggccccatcttactgatctacatcaggtaatttatctgaacactgtaatgtagtcatatacaaaatggcaattccttcacttctcaaacaatgtagcarttacctttatttgctattatttcaacatgccagagatgtcactcatggagctgtgcttaaaaactgtaccaccaattcccttttccaggtaattgtattttagaaagctttaattttgttgtacttagatgtaatcataagaggaaatatctctttaacaacgaatgaaaatggtttggacatattacagtcatataaa

SEQ ID NO: 45623 - DNA, 600 bp, Chicken  19866894285710_3
caaatttccaacaaatcaccaataaaaccaattaatataaagtcacttcatgtgacatcccattggccaccagaggcaattaggacccacctatacctattctttatttcaacatattacagggaaatgtcctttcagtgagtatttgatgaggagcgtgatggttttttgaggcctttataagacagtcaaaagttarctggccccatcttactgatctacatcaggtaatttatctgaacactgtaatgtagtcatatacaaaatggcaattccttcacttctcaaacaatgtagcarttacctttatttgctattatttcaacatgccagagatgtcactcatggagctgtgcttaaaaactgtaccaccaattcccttttccaggtaattgtattttagaaagctttaattttgttgtacttagatgtaatcataagaggaaatatctctttaacaacgaatgaaaatggtttggacatattacagtcatataaaagaacaaaagtaaaatgcaaactattatcaggagaggattttaatacaaaatatccataagcagctttctattcaaatatttttatgtgggcatacaagtg

SEQ ID NO: 45624 - DNA, 600 bp, Chicken  19866894285715_1
agtgtttttagtgtaaaagagttgaaatttagtttggttctggaattgagctgctgggtgtcccattggtttgctttgcttctttagatgctggttctctttcaggcagccagtaatgtggtgtaatgtaggaaagtgagttagaattgtgcttacaagctttctgatttggctgcaagggatgttatttgcagtggataaaaaaaagtttacttttcccaagcacaaccactgccatttttgtacagcttacattaaagtgatagagtttaatggggaagtaaatattttctttttttktttttccctacgttttagaaactttctctaaatgatgacctgtttgaagcagaatctgacaatgatgggcaaagcgaaataaaagaggatgtttcaccaaagaagaaaaagaaaaagtcaaaagagggagaggatagaagtgcggatgacctgaagaagaaaaagtcaaagtctgcaaaagtcaaagagaaacccaggacagaatgtgaaagttcctcaggtactttgggtttggattcaaaacccaaaaaaaggacttcggaaacaaaggaggattcaaaggatccaaagaagcaaagg

SEQ ID NO: 45625 - DNA, 599 bp, Chicken  19866894285716_1
  misc_feature (1)..(96): n is any nucleotide
nnnnnnnnnnnnnnnnnnnnnnnnnnnnnnnnnnnnnnnnnnnnnnnnnnnnnnnnnnnnnnnnnnnnnnnnnnnnnnnnnnnnnnnnnnnnnnnnttaaaggaatgaagttgcaaaagagagcactcctaacaggcacacagggaaatccaccctgttattaccaggaaggtgacatgcaactgtaagcagcttgtgctaaaaatactaagcagggaattgagtaggatatgtgttatgctgcagagtgagatttcagctacagtgacaaagcattaagcatttccaggctccagactytaaayaacaggtcactgcaagctctggtagagcaagcgggctcttagagggaggcagccactttggctaccagaaccagagcagtaatacatacctccagctttggatttcagaaggaaggagcaccaggaaggcagcagccttactacagattactgctgagcgctccatgctgcaacacaccgaccaaratgtaaatgtgcatcccttatcacttctgtcaccagcagaggatgacaaggacgccaaagactgcaagacataatcagcatgttctccacggtacaaactacatcccg

SEQ ID NO: 45626 - DNA, 599 bp, Chicken  19866894285716_2
  misc_feature (1)..(91): n is any nucleotide
nnnnnnnnnnnnnnnnnnnnnnnnnnnnnnnnnnnnnnnnnnnnnnnnnnnnnnnnnnnnnnnnnnnnnnnnnnnnnnnnnnnnnnnnnnnttaaaggaatgaagttgcaaaagagagcactcctaacaggcacacagggaaatccaccctgttattaccaggaaggtgacatgcaactgtaagcagcttgtgctaaaaatactaagcagggaattgagtaggatatgtgttatgctgcagagtgagatttcagctacagtgacaaagcattaagcatttccaggctccagactytaaayaacaggtcactgcaagctctggtagagcaagcgggctcttagagggaggcagccactttggctaccagaaccagagcagtaatacatacctccagctttggatttcagaaggaaggagcaccaggaaggcagcagccttactacagattactgctgagcgctccatgctgcaacacaccgaccaaratgtaaatgtgcatcccttatcacttctgtcaccagcagaggatgacaaggacgccaaagactgcaagacataatcagcatgttctccacggtacaaactacatcccgtcact

SEQ ID NO: 45627 - DNA, 553 bp, Chicken  19866894285716_3
gcttgtgctaaaaatactaagcagggaattgagtaggatatgtgttatgctgcagagtgagatttcagctacagtgacaaagcattaagcatttccaggctccagactytaaayaacaggtcactgcaagctctggtagagcaagcgggctcttagagggaggcagccactttggctaccagaaccagagcagtaatacatacctccagctttggatttcagaaggaaggagcaccaggaaggcagcagccttactacagattactgctgagcgctccatgctgcaacacaccgaccaaratgtaaatgtgcatcccttatcacttctgtcaccagcagaggatgacaaggacgccaaagactgcaagacataatcagcatgttctccacggtacaaactacatcccgtcactgacatgaaacaacaacaagacgtggaacaacaagaagcctaaaatgagctcatacagattctaatacatgcagctacaatgaatggactcacacaaattgttcctgctcttccttgcactgaaagaccagccaacaaagt

SEQ ID NO: 45628 - DNA, 600 bp, Chicken  19866894285730_1
acctttcacttctatgaacacaggaatttcttatgtttctctgtgtcaacagtttacaggctgattcagcctggttccgtgactagtggggcggagggatttcacaaaatctgtgcctccggaaaaggaaaacaggggaccccaatatcattaaaaaacagcagcaatgatctgaggagaaacaaactaattaactaaatacgctaccggaatgcaagataacacactataatacaatataattagaattaaagcaaataaatcaaacataatgagagagtatctgaaagctgtaggccytatagtagtgctgagccaatgcgtgcagtcgggacaagcaagagggaggagagctgagggaaagagggacatcaggtgactttgtcggaggttatatctcctctctgaccgcaaagccccctggcatttgtaggtcttctcctctggacaggtgtccagaactgaagcattaacactttaactcccagtgcagtacatgatgttaagatgtggaataccagtaaccaaaaatcataaaaccgtgacactctgttagagttattcagtggtaaaacaggtcatagctgagagagattattt

SEQ ID NO: 45629 - DNA, 600 bp, Chicken  19866894285737_1
gtcttgtaggacaagggaaaataattcccagatatttttgtttgatttgccaataataaactgaaaatatttacccaagggataaaactgtaaaacagttaatttggcactgaaaaaaaatgttttcatttcaataatcctgcctgaaaaatctcttctttaggatgagactgtaaatatttcagaaggaacattccacatgacagcccccgtgatatacattaatggttcaaggttagcacttggatacccaagaacctgttattacatgtgtgaagccaaaacaaaaagtgtctctawctatttacagacatrtttagactgggattggcactgttgggttcccactattcctcgagcaaggacaactgaaaacacgctcacagcaacactacctttcagctgcgggaggctgctcccagcycatctgatgtttcaaatagcagaaattcagggaagaaaaaaagcaaaaatcaatgtaaaggtaactgcctgtatcaattcgttattgttaccaaatataatcatacaaatatawcctggccctctgtaactcactgaacaaaacagaatcagtctcttctgacagtgtgtacaaag

SEQ ID NO: 45630 - DNA, 600 bp, Chicken  19866894285737_2
ggaaaataattcccagatatttttgtttgatttgccaataataaactgaaaatatttacccaagggataaaactgtaaaacagttaatttggcactgaaaaaaaatgttttcatttcaataatcctgcctgaaaaatctcttctttaggatgagactgtaaatatttcagaaggaacattccacatgacagcccccgtgatatacattaatggttcaaggttagcacttggatacccaagaacctgttattacatgtgtgaagccaaaacaaaaagtgtctctawctatttacagacatrtttagactgggattggcactgttgggttcccactattcctcgagcaaggacaactgaaaacacgctcacagcaacactacctttcagctgcgggaggctgctcccagcycatctgatgtttcaaatagcagaaattcagggaagaaaaaaagcaaaaatcaatgtaaaggtaactgcctgtatcaattcgttattgttaccaaatataatcatacaaatatawcctggccctctgtaactcactgaacaaaacagaatcagtctcttctgacagtgtgtacaaagatgacaagcccggtc

SEQ ID NO: 45631 - DNA, 600 bp, Chicken  19866894285737_3
ttcatttcaataatcctgcctgaaaaatctcttctttaggatgagactgtaaatatttcagaaggaacattccacatgacagcccccgtgatatacattaatggttcaaggttagcacttggatacccaagaacctgttattacatgtgtgaagccaaaacaaaaagtgtctctawctatttacagacatrtttagactgggattggcactgttgggttcccactattcctcgagcaaggacaactgaaaacacgctcacagcaacactacctttcagctgcgggaggctgctcccagcycatctgatgtttcaaatagcagaaattcagggaagaaaaaaagcaaaaatcaatgtaaaggtaactgcctgtatcaattcgttattgttaccaaatataatcatacaaatatawcctggccctctgtaactcactgaacaaaacagaatcagtctcttctgacagtgtgtacaaagatgacaagcccggtccctgctgcaggctgagcacaactgcttgccagagtgctcagtcttttatattgcagagatgaaatgagatgcctgtcagcctctcagtaccagtggcaaaatcctggtc

SEQ ID NO: 45632 - DNA, 600 bp, Chicken  19866894285737_4
gcacttggatacccaagaacctgttattacatgtgtgaagccaaaacaaaaagtgtctctawctatttacagacatrtttagactgggattggcactgttgggttcccactattcctcgagcaaggacaactgaaaacacgctcacagcaacactacctttcagctgcgggaggctgctcccagcycatctgatgtttcaaatagcagaaattcagggaagaaaaaaagcaaaaatcaatgtaaaggtaactgcctgtatcaattcgttattgttaccaaatataatcatacaaatatawcctggccctctgtaactcactgaacaaaacagaatcagtctcttctgacagtgtgtacaaagatgacaagcccggtccctgctgcaggctgagcacaactgcttgccagagtgctcagtcttttatattgcagagatgaaatgagatgcctgtcagcctctcagtaccagtggcaaaatcctggtccacataatggtctgaggtagacagcagagtatgtaaatggtcattcacaggtgtgcggaaaacacgctgtatggctttaactttgcaagtgacccttggcctttggtttctata

SEQ ID NO: 45633 - DNA, 600 bp, Chicken  19866894285738_1
acaaagaaaatatttgagtatgctaattgttacagacaaaaggagcaccagaacacatgtaagcattttatcgatatatgcattctcatttcaaaaccagggatatgattttgagtgtggacacaatcatagtacccaacctcaaccaaatagcttcagtggccacaagcaaatctggttcattttcaaggttcttgccaagttactgtattttccatcaatgaagaaatgagctgacagaccactgtcagtgattaacagaggaaaaactgggtaaacaatacaactcattttacagcraagtttggtaaatctaactgaacttaraaaaaaaaaaaaaaaagctcaaagtagtaagtgaaggataacaatagttaacactatatccagcagtatgaaaaggcatcttttttgtattgccaaagagcagtgaatggaaggcattattctgcagctgactttttcctgcgtaagagcaaagtacaatattcagccgcatgatcaaaatctgaaatggcattttgatcattgttctaaacttggtgtaactatctcactatagacagggttttaagcgtaggtggcagaagatgcttttag

SEQ ID NO: 45634 - DNA, 600 bp, Chicken  19866894285738_2
tgttacagacaaaaggagcaccagaacacatgtaagcattttatcgatatatgcattctcatttcaaaaccagggatatgattttgagtgtggacacaatcatagtacccaacctcaaccaaatagcttcagtggccacaagcaaatctggttcattttcaaggttcttgccaagttactgtattttccatcaatgaagaaatgagctgacagaccactgtcagtgattaacagaggaaaaactgggtaaacaatacaactcattttacagcraagtttggtaaatctaactgaacttaraaaaaaaaaaaaaaaagctcaaagtagtaagtgaaggataacaatagttaacactatatccagcagtatgaaaaggcatcttttttgtattgccaaagagcagtgaatggaaggcattattctgcagctgactttttcctgcgtaagagcaaagtacaatattcagccgcatgatcaaaatctgaaatggcattttgatcattgttctaaacttggtgtaactatctcactatagacagggttttaagcgtaggtggcagaagatgcttttagctatcaggcagactaaaccaaaagtta

SEQ ID NO: 45635 - DNA, 600 bp, Chicken  19866894285746_1
gcttctgccatcagctgctgctgataggtaagtagctaaatgtgcatgactgataaatgcaaactctaaagacagctgtgttttggcgagctgcacaatgcaaagcataatcaaaaaacaaaggggaagaacataactgaagtcaggtgattatttataattcctgaaaaaaagaattacaaagaggtgataacttctgaaaggcagttcagcttatgtgaacaccagatatttctagttacttactggagagtattctgatgagttccatcttccacaagacgaatactgtctacaaarctgggcatgtcaacaacctttaaggaagaagcaatactggtgttacttgcatcttgttcagcattaattgaaatgcttatatcttccttggaaatctctgcatcctctttctttccctgtggtacagtgtcatcctgtttttctggggatgtattccaaaataagcttgcacctagaagagaagagagatttacccatttaggaaagccactggtatcttttgagaccctttggcattgtaaagctagaggaattatttgcttgcattcatttttttccaacactttataagtgatttaa

SEQ ID NO: 45636 - DNA, 599 bp, Chicken  19866894285748_1
  misc_feature (1)..(55): n is any nucleotide
nnnnnnnnnnnnnnnnnnnnnnnnnnnnnnnnnnnnnnnnnnnnnnnnnnnnnnntgtccctgatgtggttgatgttattgtaaaatggacagctgagaataaccctttcaactcttccttgctcataaatgtttctggcagacagctcctttgttgcgtctctctcaaacaacttccttgacctaaagtcatgctttgataacacccacatctgcagtttaaccatcgtatctgcctttgtcctgaaggcaacgtgttgttcctttgtaagtcctgtttgcattcaagctcctgacacragataatgactctctgtggctgtaatcacaaaaagcattcagtgcatgggacagttggaactgatctgtagttccccacttctgatctcttcacttgcagactgctgaatagcayacagagcgtttgcttggtgttacaaggcacaggtggtttgatttgtgaatgtatgaccaggttcactgctgctgggagagatgagtgtgtgtgtgacacagggagagcttatggaatctgcagaggaacaaatgcataattggagaatgtgggaatatatacaggttgctctgaaagtaatacc

SEQ ID NO: 45637 - DNA, 600 bp, Chicken  19866894285748_2
ttccttgctcataaatgtttctggcagacagctcctttgttgcgtctctctcaaacaacttccttgacctaaagtcatgctttgataacacccacatctgcagtttaaccatcgtatctgcctttgtcctgaaggcaacgtgttgttcctttgtaagtcctgtttgcattcaagctcctgacacragataatgactctctgtggctgtaatcacaaaaagcattcagtgcatgggacagttggaactgatctgtagttccccacttctgatctcttcacttgcagactgctgaatagcayacagagcgtttgcttggtgttacaaggcacaggtggtttgatttgtgaatgtatgaccaggttcactgctgctgggagagatgagtgtgtgtgtgacacagggagagcttatggaatctgcagaggaacaaatgcataattggagaatgtgggaatatatacaggttgctctgaaagtaatacctcctatttatatccatagaaactacgacagccacaaagagcacaataacactgtttgatagtgttttgtagctgggaatttgctgttttccagcagtcaccactgctagctctgca

SEQ ID NO: 45638 - DNA, 600 bp, Chicken  19866894285751_1
agacagctttctacagaatgttacaggcaaaggaaattcaaagatcgggactctaaaacagtctttttgcacttggaataaacctcagggtacagcctccatttgttatcctctttctacttgaagataagtcagtattatacatcaagaataacattcataggaaagcattaaaaaattgtattcttcattaaaaagtccattatacaaagtgctgaatgtttttgaccttttcctcataaaaactctgtttatagtaaaaagtaaatctaattttacagcatcttaaaatgaaaaaartgttgtttttttaattagtggtttatttaacacataaaataaaatgctgcagtgttactgctttcacagaaacaactttgagcatctagacaaactaccagcctacctcaacactgccttaatctacatctgaagcccttcatgctcatccacgcagcaaaaacagttataatgattcctgaaaccacagagccatagaatatcagcagctattcttcttcttcttatcatcatcattttcttcctaaaaagaatctggaacatctaattaaatgtcagccttgatttttttcaccacgt

SEQ ID NO: 45639 - DNA, 599 bp, Chicken  19866894285753_1
  misc_feature (1)..(17): n is any nucleotide
nnnnnnnnnnnnnnnnnacttgaaggacagggatacagggaagctctctggataaccaaagtctccctctcacaaattaaagtctccctccgacagcccagagtaagttttcataaagtaaaacaaagctgtgttgcacaccaagtacttgctattccatcaataggcaattgtaacaggatacacctccttagtctctaaatgagttttatttccagcactacattatggacaaatccccagtcacacacacacacacacacacacacacacacacaaaacaataaacaacactacaayaaataaatcccatttcacaatcaaatatgctctaagccagtcaaacagggccacgcgtgcacaatgaatccacaattcttttcccaattccccatctttttttcaaggaggggagaaagacggaaggaaatgagagaagagctgatagacgaaatgaagtggcaatttccccgttcagctggggatcaatacgtgggctcatcatggttcctgattcaaagggctcagctctcagtgcccaagcccagattgatacagctccagtgcttgacttagaagcacttcatctcggcaagata

SEQ ID NO: 45640 - DNA, 599 bp, Chicken  19866894285760_1
  misc_feature (1)..(22): n is any nucleotide
nnnnnnnnnnnnnnnnnnnnnntctatctaattccctcccagttttcttttggtgttcctttacaagatgaataaaggtcctttgaaattaaaggccagtacatttagaacaaataacaggaaatgccctattgtacaataggtagtctcccttacaggcaaggctcagcccatttcccactgtaacatggtgttttcagttgcttgtaattctgctgaactttaagcagtaagactgaacattgccatgtcagcagtctgtctcaggtccaaactggaatttttatgcaaaatgttcarctttttccaaggctgacactgggacagacctttattcccttattcaaaattccagacgcttttttttccttgaactcctctgttgtcttagtgtttagggctgaccagtcaaagattactgagacagaataaagtcttttgtgtatgaygcgtgtatgaatttcagctggctgtactactggcacgtccaacccatgggccacatgcagcctggcctgccctgcagccatccctgccctgagccgtcatggtggccgctctgccctgctgagtggcccagctctggaagcacactcatg

SEQ ID NO: 45641 - DNA, 481 bp, Chicken  19866894285760_2
cccttacaggcaaggctcagcccatttcccactgtaacatggtgttttcagttgcttgtaattctgctgaactttaagcagtaagactgaacattgccatgtcagcagtctgtctcaggtccaaactggaatttttatgcaaaatgttcarctttttccaaggctgacactgggacagacctttattcccttattcaaaattccagacgcttttttttccttgaactcctctgttgtcttagtgtttagggctgaccagtcaaagattactgagacagaataaagtcttttgtgtatgaygcgtgtatgaatttcagctggctgtactactggcacgtccaacccatgggccacatgcagcctggcctgccctgcagccatccctgccctgagccgtcatggtggccgctctgccctgctgagtggcccagctctggaagcacactcatggccagcagccacacgttgtgtgtgattggca

SEQ ID NO: 45642 - DNA, 600 bp, Chicken  19866894285762_1
gctacttatcctaccctaatagaactccgaaacatgtttgtctcttaaatgggattcttggattataactacttaatatcattaaagaaaccctaaagaccgaaggtgaaaccttcagatgaaagattctgccttacctttatgattaacttcataatgcatctatagccatatgacagtccctatgcactttggactaataactgtggcatatatgaatattctgtaacttcagcagcttaaactattccttctcctgagaaatgcacctgattgtctgaggttggtacaagttacaasatgcagaggtcagattacctgattaccctgtgaaggagtggagtgaaaaataactctgtctatctatcagccttactgcaacgatctgagaaatactgcaaattattttctcattgtaaactggttttcccatgggaaaaggaaaatctagcctaaaagctaagggaaagcttttttcattaacttcagtggttttcattatctagtaattgttaataaacacctaataaaagtttttcacattccttcacaatctttgcaaaagcaaagcgaacagaaaatgaaatggtgggggggaaa

SEQ ID NO: 45643 - DNA, 600 bp, Chicken  19866894285767_1
tctggagagacggaggtggaaaggatagaccaggaagggaaaaggagaggatgaagctgaactcttaggatgatctcacctctcaggctaaatgcagatttccccaggggggtggcggagtcaccaaccctggaggtgttcaaggaacatttggacattgtgttgagggacgtggtttaatgagaaccgttgctgatgggtggatgggtggactggatgatcctgtgggtcttctccacccttggtgattctgtgattctatgattctagataatccatctcactggcagaatgtagtaratctgcacactccctgtctgccaggaaagatgtgaagacatcaggagggctgtcttatgagctccctacctggtgtgcatttcccaccatgaaagccttcctcttagtaaatatttctaaaaagagatgctctggttaaggtaaacatgcttgcagaagaaaacctctgaggatctgatggaaggaacacacaagtactttggaccaaaatagcacctacgttctggctaattttttttgtgagggatgttgtgagggatgttgtcaccakcagttaaagctcagaaaatatcttctaga

SEQ ID NO: 45644 - DNA, 600 bp, Chicken  19866894285767_2
taatccatctcactggcagaatgtagtaratctgcacactccctgtctgccaggaaagatgtgaagacatcaggagggctgtcttatgagctccctacctggtgtgcatttcccaccatgaaagccttcctcttagtaaatatttctaaaaagagatgctctggttaaggtaaacatgcttgcagaagaaaacctctgaggatctgatggaaggaacacacaagtactttggaccaaaatagcacctacgttctggctaattttttttgtgagggatgttgtgagggatgttgtcaccakcagttaaagctcagaaaatatcttctagacagttctctgaaagtgaattaatcatacagcttttgttgaaaatgaaattaaacaccaacttttctttgagatctattagcatggtttttatctgatttatgaaagcaagcatttagttctaagaggataaccaaaataatcccaactatgacattatagataagatcctaaactcatctgaaatcaggatagatgttctcatttagttaagatggcagagggttttgtagaaagtggcattatcacagcattgtagactttacccttgta

SEQ ID NO: 45645 - DNA, 599 bp, Chicken  19866894285770_1
  misc_feature (1)..(116): n is any nucleotide
nnnnnnnnnnnnnnnnnnnnnnnnnnnnnnnnnnnnnnnnnnnnnnnnnnnnnnnnnnnnnnnnnnnnnnnnnnnnnnnnnnnnnnnnnnnnnnnnnnnnnnnnnnnnnnnnnnnngagctgattaagtgcacacaaagcacagccgtgacttggagccgtaccgcagggctggcagctgcattgcatgccgttcactccctgggatgcagccccgtgcttgttggttgccagcagccccaagctggaaacatgggtgagtgagctgctgctgaatggggctggggggaagcaggcagarcatgatcaggaacagtatcaaggggcacaactcctttctgtctaattgcattctttttatattgccatgcccaacactgaagcctctgggtatcttaaaggatatgagctgatgcctgctggagtagatactggcaggggtttatggttcacaccccatttgtacaaggaactgacaggtagctgttgctgatagttgcaatagaaagcggaaaggcaactaaaagaggggagatttaggttagattttaggaggaaatgtttcactcagagaggagtgaggcattggcacagctgccc

SEQ ID NO: 45646 - DNA, 600 bp, Chicken  19866894285776_1
gcacagttcttgctggagaatgcaggttatagatgctggtacctgtagtttgcagtcaagaacaaacacaccatatcagttagcaccacaaagggtctatatagctcatgaaaaatcttgttacttgatgtgtctgaattctgttgcatattttatatgcatatttatatgcaaatacacagaaaaagaaaggagaaagggggggggaggtagaatagagaaaggcattggaatataaggagtatagcatattcctacaggcatactatctctttctcagtacaaatgatgacttaagtkttgtctttttaatacctgcatgtggcatgagtcatgtcgaaaacagcgagcagacattccctctcccaggagagatattatccttagttgatacaagtcttaatccatgtatggctacaatctgaactcagctaaaaaatttgcaccacaatcagaaataactcttccatataagctaatgaggagaaactcttaaggtagtcatggacttttgaatcttctaaaatgattctcacctgtgtttttaaatcagtaggatgcattaaatgaatttcaagtgggacaaagacagatttgaaa

SEQ ID NO: 45647 - DNA, 599 bp, Chicken  19866894285779_1
  misc_feature (1)..(148): n is any nucleotide
nnnnnnnnnnnnnnnnnnnnnnnnnnnnnnnnnnnnnnnnnnnnnnnnnnnnnnnnnnnnnnnnnnnnnnnnnnnnnnnnnnnnnnnnnnnnnnnnnnnnnnnnnnnnnnnnnnnnnnnnnnnnnnnnnnnnnnnnnnnnnnnnnnnntaatgaacgcagttaaataacaaccaatttcctcagccctccggaattcaggaagccgtattttagcacaagtcagcagataccgtgtgggaggaatgggaaacgaatccaaaacgctgcagttgggatactgactcagttcacctaccctyggaagattacttaattccagtcttcctggatgctcgcagcataacctcttcacgcagccatctatttattccaggctaattaagaactgtgtctcgttctgcgagaagaaaacaatcacagcagaaccatctctgtgttgaagyacgaagaacacaaggcaaagcagcctgccttcagacagctcgctgtgcccacgcgctgcaggagaggagtgggatctccttcaggagggaatctctttctgagcacccgctgtccccacaagaactgcaggagaagcttctgacccccttcagtg

SEQ ID NO: 45648 - DNA, 599 bp, Chicken  19866894285779_2
  misc_feature (1)..(4): n is any nucleotide
nnnntaatgaacgcagttaaataacaaccaatttcctcagccctccggaattcaggaagccgtattttagcacaagtcagcagataccgtgtgggaggaatgggaaacgaatccaaaacgctgcagttgggatactgactcagttcacctaccctyggaagattacttaattccagtcttcctggatgctcgcagcataacctcttcacgcagccatctatttattccaggctaattaagaactgtgtctcgttctgcgagaagaaaacaatcacagcagaaccatctctgtgttgaagyacgaagaacacaaggcaaagcagcctgccttcagacagctcgctgtgcccacgcgctgcaggagaggagtgggatctccttcaggagggaatctctttctgagcacccgctgtccccacaagaactgcaggagaagcttctgacccccttcagtgtcctgcaggagatgcttcactgcttgaggccggtctgtgcaccacaaggaggaaagctgcttgggaatatcaggtcaccaaatgcataaccaagatgctgtgttttacagtacccccctgtgggtctgtgcacggcgttctgcc

SEQ ID NO: 45649 - DNA, 600 bp, Chicken  19866894285779_3
ctgacccccttcagtgtcctgcaggagatgcttcactgcttgaggccggtctgtgcaccacaaggaggaaagctgcttgggaatatcaggtcaccaaatgcataaccaagatgctgtgttttacagtacccccctgtgggtctgtgcacggcgttctgccatcctgggaacaaactcagcacccggagggcctgatttcagacacaccgtctttccagataagagatcttggttctatacaaacaaggttatgactttcaggtctgttgcaaaatgtcgcatttaattttagcagctcgrttgtactttttttatgcagctgattatgttgaaatgtctctgtcgctcagtccccattttcattaaatgtgcaaacatctcttgctttccttctgctgggctgaaatctgagcttctggggctgcctcctgcctgacctttagcgaatacgcagcttttgcagcttctgcacttttcagaagctcctcttacacagactatgaaacaattggaacagaaaagcgaagaactcttcttttgtccattaacttgccattccatggaaagtccatttggagttgtaactcagaattgttttga

SEQ ID NO: 45650 - DNA, 600 bp, Chicken  19866894285781_1
ggcagtgcccaacatcccactggtacctgatgaggaactggatgccatgaagatcaagatatcacaaatcaagaatgatatccagcgtgaaaaggtaaaaaagggttgagcattgcatcccacatacagaacagtctcggtatctctgctgagatgagatgctgatagaagcaacattcccagagctgcacagcatggagaatcctgataaaacaggctgatcagcagagatttgtggtacagctcagctgtcagtgatatctagactgctgcacagcccatcgttgctcatcctggtgygctgcttgtatgatggcctcctctgagggaggcagaaacaacaaaagatgaagtactgctcctctgcttacatggatctgcctgtgattatttccaggcatttrtgttgaaaatggagctcttatgctatagacatgagaagggctgggagtgtaacataccaatatttggaaagtcttgcttctgactgtcagagtatgatcctcatttcatttagagggaagggactgtgggtctgaaaatgcgtgttggtgtaaatgggagcaagtgtaggaaaatgatgtgcatgtcctctgtctc

SEQ ID NO: 45651 - DNA, 600 bp, Chicken  19866894285781_2
gttgagcattgcatcccacatacagaacagtctcggtatctctgctgagatgagatgctgatagaagcaacattcccagagctgcacagcatggagaatcctgataaaacaggctgatcagcagagatttgtggtacagctcagctgtcagtgatatctagactgctgcacagcccatcgttgctcatcctggtgygctgcttgtatgatggcctcctctgagggaggcagaaacaacaaaagatgaagtactgctcctctgcttacatggatctgcctgtgattatttccaggcatttrtgttgaaaatggagctcttatgctatagacatgagaagggctgggagtgtaacataccaatatttggaaagtcttgcttctgactgtcagagtatgatcctcatttcatttagagggaagggactgtgggtctgaaaatgcgtgttggtgtaaatgggagcaagtgtaggaaaatgatgtgcatgtcctctgtctccctctctccctcaccattcagagggccaataagggcagcaaggtcattgagaggttgaaaaagaagctctcagaacaggaatcactcctgctgctgatgtctcc

SEQ ID NO: 45652 - DNA, 600 bp, Chicken  19866894285782_1
tttaaacctggcattttatactggtaagcttaagtatggaatatgtatgctttatggcatatactttaagctttgcctttgctctcattagagttcttagtcactgatgcctgtgtttttgagtcttttcatgctgggcatttcaattcgtattccaatttgcaaagaaaagatctcattttctgaagcactgagagacctgctgacaaacagctgttcaaggatcaaatggttggtgtgttggcatgattgcatgccaataaatgtgatctctgctgcaaaaggagttgtccatagagrggccagttttgttccagactccattccagaaactgcataggtgcactgatgcagtgctgagcagaagtggtgaagatgtttgccctacatgtctttagagaggtgtcctaacatgacattgagacctgtctacactgcggtatttgcactggagaatctagctttgtttcacacatttaaaaacataaatctcagtcctgaattaactgtggtgtccygagaagtaaaatgaatgcaagtctcccaagcatcactaaaacctaattgctgttgctcagtagcagcagcctattagatcga

SEQ ID NO: 45653 - DNA, 600 bp, Chicken  19866894285782_2
caaggatcaaatggttggtgtgttggcatgattgcatgccaataaatgtgatctctgctgcaaaaggagttgtccatagagrggccagttttgttccagactccattccagaaactgcataggtgcactgatgcagtgctgagcagaagtggtgaagatgtttgccctacatgtctttagagaggtgtcctaacatgacattgagacctgtctacactgcggtatttgcactggagaatctagctttgtttcacacatttaaaaacataaatctcagtcctgaattaactgtggtgtccygagaagtaaaatgaatgcaagtctcccaagcatcactaaaacctaattgctgttgctcagtagcagcagcctattagatcgacacttggatcaaaacagaaggcatagaaactgttttctgcaaattcttagcttatgacattttatattttttctagctgcagttatacctactaaatagcgaagtatttaacagcatattttatgtcactgcctttatttggactgtagtgccacggagtaaattcaagagactacacaagtttatcctgtcttggtagttgactgatggcagtaatt

SEQ ID NO: 45654 - DNA, 565 bp, Chicken  19866894285790_1
aatgtctacattagcaactagaatcaaagcatgaaaagaaaaccacacacaaaaaacaggacaaacaactaatcattttacagtcaccacatactgcaggcaagtaggaatcaaaacaataacataaattgtgcattggttctctgaaaataaagtgttactagtcgacacaagcaatctgacaagatgtgaaagcaggcagtgaaaacatcagggattgaatttcttttcatcagaattcatctgtttctactgcaaggcaggcaacaagtggaattcagaaaaaccgaattcctcttygcagcttaaatgcatactgtgaggcttaggttttattgtgtcttctattaagagaaatgtgaactattgaatcaaaaattacattttaaaaatgaaagccaaaacaaatccgaatgaatgtacattttagacagaatcaatgttagatcaaatctacagcgggtgatagctgatgtccgcaaatgttatttaactacgctgcttatgtcaatagcacatctgacactgtttccatattctagcagcctcttttaatcacttccaa

SEQ ID NO: 45655 - DNA, 600 bp, Chicken  19866894285794_1
agcacacaaggctgtggttttggtacacgtgagaaactgcagctaacaactgcagcataagcaaaagggcaaataagcaagaacatacagcatgggaagtaaggagaaggcaaagttatgaagaagtccctaaggggcctgggaactcagcaagcaacacccaaatccagtacagaagtgggctgggaacatttcaagacgatggcatcccacagcctctctgaaagcaaaaggcagccagccctgccaatagaaggctggatggagttgtcagcaagtactacaactgcaagaaggagygcacccatcaggagkcaaaacagttttctgaagataacggcacatgcagggcagcactcccagtgtcctgcgcagcactttcaccacaagtcgtaaatacagctcagcatgaaatagctgccctccattctcacacagtgcctgagctatcagcaygtgcatctctattcaaggctactggaagacttaaggtgagaccccccttatgaaagtcatgcttgccctcagcatgtgatttttaagatgtcagccgaagggaaggacgagaagaggaacaggcaatagaaaacaaggccaagc

SEQ ID NO: 45656 - DNA, 600 bp, Chicken  19866894285794_2
ggttttggtacacgtgagaaactgcagctaacaactgcagcataagcaaaagggcaaataagcaagaacatacagcatgggaagtaaggagaaggcaaagttatgaagaagtccctaaggggcctgggaactcagcaagcaacacccaaatccagtacagaagtgggctgggaacatttcaagacgatggcatcccacagcctctctgaaagcaaaaggcagccagccctgccaatagaaggctggatggagttgtcagcaagtactacaactgcaagaaggagygcacccatcaggagkcaaaacagttttctgaagataacggcacatgcagggcagcactcccagtgtcctgcgcagcactttcaccacaagtcgtaaatacagctcagcatgaaatagctgccctccattctcacacagtgcctgagctatcagcaygtgcatctctattcaaggctactggaagacttaaggtgagaccccccttatgaaagtcatgcttgccctcagcatgtgatttttaagatgtcagccgaagggaaggacgagaagaggaacaggcaatagaaaacaaggccaagcgtgtttagttttagc

SEQ ID NO: 45657 - DNA, 600 bp, Chicken  19866894285794_3
acacccaaatccagtacagaagtgggctgggaacatttcaagacgatggcatcccacagcctctctgaaagcaaaaggcagccagccctgccaatagaaggctggatggagttgtcagcaagtactacaactgcaagaaggagygcacccatcaggagkcaaaacagttttctgaagataacggcacatgcagggcagcactcccagtgtcctgcgcagcactttcaccacaagtcgtaaatacagctcagcatgaaatagctgccctccattctcacacagtgcctgagctatcagcaygtgcatctctattcaaggctactggaagacttaaggtgagaccccccttatgaaagtcatgcttgccctcagcatgtgatttttaagatgtcagccgaagggaaggacgagaagaggaacaggcaatagaaaacaaggccaagcgtgtttagttttagcatgtttaatagacttcgtgatgcacacatgctacaagacaatgctcagctgatggtgtgggaacagtacaaaaattcttttgctgaaagatgagaggtgatagtgaaaagaagcatcagcaaaggtgattttcagaagaat

SEQ ID NO: 45658 - DNA, 600 bp, Chicken  19866894285797_1
ttgacaaccggtttcagaaatgatggaaataatagaagctgcagctctcataaaagcatacagagaacagcaggcatgagtacagcaggcacgagggatttctggaaaggacaaatgtaacaatatttattaggtgtgaaagaagttggaaggaatactttagaggcagagagtgcagacaataattgtaatacacgtggataagatatgagtataaagaatggtggagcattcagaggataatttagaggaacagaggcattagcagatccagttctgcctaccaggcagtttaggaakgcccatgcaaagctgatgagcattcggtgcagttttcttccagactccctgaagctgcaggcctctcctgagcaccagccggcctctgcctgtcagatgcactgctcagagattgggcccaaaaagtcaaggaaaaacttctctgattttaatccgatttacccagtgtgtatagcacacaaatcctctctcttcacagtttctttggataacgtgcttaactatttccatgacaaagcattcttttccatagacacggcacaattttccctttttgcatcctgtgtgcattttccctcc

SEQ ID NO: 45659 - DNA, 600 bp, Chicken  19866894285800_1
ataggcaaaatcccaaggaaatatgaacatttgttccagtaaaatatccagcatacttcttagaatttgcagactgaatttgaagcctgaaagatgctaaggaagattgcgtctattgatataatgtcaatctacccttaaaaaagagtaacagaagcgaaagtggaaatcacaaagaggaaaagaatgtatttgccctgtgcattagagggagccttgtagatacttaaagggatctctcttggggtgctttcttttctctctaagcagaagaaaaagtttagagtagtattttttttwaaatgtaactttaagcttgtttatcagcaatttagtctcttctgaacttcctgcatggattctgattcctttgaatgctatgaaagaaaatcacagggaagtgtgtgaacttcactttcgataccctttcttcttagttttgcaagtgtgaaacgtttaatttgagcaggttgatgacaataagaactacctggccaaacaattttwatggagacttgttccaggtaaacrcttaacagcctcacagtgtcctagtgttaatgttaactttctgaaagtaattgttcttggctatactct

SEQ ID NO: 45660 - DNA, 394 bp, Chicken  19866894285800_2
gagggagccttgtagatacttaaagggatctctcttggggtgctttcttttctctctaagcagaagaaaaagtttagagtagtattttttttwaaatgtaactttaagcttgtttatcagcaatttagtctcttctgaacttcctgcatggattctgattcctttgaatgctatgaaagaaaatcacagggaagtgtgtgaacttcactttcgataccctttcttcttagttttgcaagtgtgaaacgtttaatttgagcaggttgatgacaataagaactacctggccaaacaattttwatggagacttgttccaggtaaacrcttaacagcctcacagtgtcctagtgttaatgttaactttctgaaagtaattgttcttggctatactctc

SEQ ID NO: 45661 - DNA, 370 bp, Chicken  19866894285800_3
gggatctctcttggggtgctttcttttctctctaagcagaagaaaaagtttagagtagtattttttttwaaatgtaactttaagcttgtttatcagcaatttagtctcttctgaacttcctgcatggattctgattcctttgaatgctatgaaagaaaatcacagggaagtgtgtgaacttcactttcgataccctttcttcttagttttgcaagtgtgaaacgtttaatttgagcaggttgatgacaataagaactacctggccaaacaattttwatggagacttgttccaggtaaacrcttaacagcctcacagtgtcctagtgttaatgttaactttctgaaagtaattgttcttggctatactctc

SEQ ID NO: 45662 - DNA, 600 bp, Chicken  19866894285802_1
actggaaagacacgccattgcttctggagctgtattagctcacagctggaaaggagtccaatgtcaactagcatttctcttgcttgccttccatatggaggtcctgccatctccccgctgccagaaagccctccctacacacaacaggacaaatcagcccttccctgtgtttctgggagctggtaggaccacagcagcgcattccagagctggaaacagctggtggcagcacgaccaacagtgggaaaggtcagacaggaaggtacaccacaagcactaccatcacccagcagcactctytagatacatgttcccagtcccagcagcaggcacctcactcacacctcctgctttcagggccctgagctgaggaagcaagcaggaaaacccttgcacaacgtgcaagacctaagcagctcagcccagcrccaaggaaatctcagtggagttgaagcaggcactccctagccatctagagagcatcacatcctatgctgtaagcatgtagaagatgataggatccactcccattgctcagaaggaggrcttcaggaagcatccagtgccttgaaccactcggctttgaggcagctcatggaa

SEQ ID NO: 45663 - DNA, 600 bp, Chicken  19866894285802_2
ccctccctacacacaacaggacaaatcagcccttccctgtgtttctgggagctggtaggaccacagcagcgcattccagagctggaaacagctggtggcagcacgaccaacagtgggaaaggtcagacaggaaggtacaccacaagcactaccatcacccagcagcactctytagatacatgttcccagtcccagcagcaggcacctcactcacacctcctgctttcagggccctgagctgaggaagcaagcaggaaaacccttgcacaacgtgcaagacctaagcagctcagcccagcrccaaggaaatctcagtggagttgaagcaggcactccctagccatctagagagcatcacatcctatgctgtaagcatgtagaagatgataggatccactcccattgctcagaaggaggrcttcaggaagcatccagtgccttgaaccactcggctttgaggcagctcatggaaatgctcagcacacagacctcagcttgcaggttgggaagtcattgctgatggcatctcagtccaggtcactcgtccagcgatgctaggagaatgggtgctcccaaggagcacagagaacctcacatctg

SEQ ID NO: 45664 - DNA, 600 bp, Chicken  19866894285802_3
aaggtcagacaggaaggtacaccacaagcactaccatcacccagcagcactctytagatacatgttcccagtcccagcagcaggcacctcactcacacctcctgctttcagggccctgagctgaggaagcaagcaggaaaacccttgcacaacgtgcaagacctaagcagctcagcccagcrccaaggaaatctcagtggagttgaagcaggcactccctagccatctagagagcatcacatcctatgctgtaagcatgtagaagatgataggatccactcccattgctcagaaggaggrcttcaggaagcatccagtgccttgaaccactcggctttgaggcagctcatggaaatgctcagcacacagacctcagcttgcaggttgggaagtcattgctgatggcatctcagtccaggtcactcgtccagcgatgctaggagaatgggtgctcccaaggagcacagagaacctcacatctgcttttttttcctgctaaaaagaaacagctcacttggagagagcctgccttggtcagcctgtgccagcgctaagccactggagctttggcaaacaccacagccatggaagtcttggaga

SEQ ID NO: 45665 - DNA, 600 bp, Chicken  19866894285821_1
ggaacagaaaacccagctggcctaatttggcttaactccatggatttcattgctgtgaacacgctaaagatttcatcctttgcagtaagattcctccacacaagatttattttcttttggttatgtaaataattcgtgaaatataaaaaataattgtattgattcagcctctgttaactcatgggagaaatcctgcacaaggcatgcagggtgctggctgtggctggctgcaagtggcagagcagcaccatgctgcttggctgcaagctaagaccagctcctgcttcaggaatgcacagrcacrgggctctgccccgagctcctggccatgacagtggagccagtcccacaggctgagcatggtggggacctgtgagatgactgccgtggtgatagtgcctggatctgtccaaagtgtgctggtgcagcagcagaagggtcacatcctgcatggccacaaaggcaaggcagctcgctcctaggaactctctgctaggaaagtctgctgatttatttataacattatatccatcagccatgcagtgatggctaaaaataaccaaagagccagccttgcaggctggtagcagccaccctttt

SEQ ID NO: 45666 - DNA, 600 bp, Chicken  19866894285821_2
cagaaaacccagctggcctaatttggcttaactccatggatttcattgctgtgaacacgctaaagatttcatcctttgcagtaagattcctccacacaagatttattttcttttggttatgtaaataattcgtgaaatataaaaaataattgtattgattcagcctctgttaactcatgggagaaatcctgcacaaggcatgcagggtgctggctgtggctggctgcaagtggcagagcagcaccatgctgcttggctgcaagctaagaccagctcctgcttcaggaatgcacagrcacrgggctctgccccgagctcctggccatgacagtggagccagtcccacaggctgagcatggtggggacctgtgagatgactgccgtggtgatagtgcctggatctgtccaaagtgtgctggtgcagcagcagaagggtcacatcctgcatggccacaaaggcaaggcagctcgctcctaggaactctctgctaggaaagtctgctgatttatttataacattatatccatcagccatgcagtgatggctaaaaataaccaaagagccagccttgcaggctggtagcagccacccttttcatc

SEQ ID NO: 45667 - DNA, 599 bp, Chicken  19866894285831_1
  misc_feature (1)..(154): n is any nucleotide
nnnnnnnnnnnnnnnnnnnnnnnnnnnnnnnnnnnnnnnnnnnnnnnnnnnnnnnnnnnnnnnnnnnnnnnnnnnnnnnnnnnnnnnnnnnnnnnnnnnnnnnnnnnnnnnnnnnnnnnnnnnnnnnnnnnnnnnnnnnnnnnnnnnnnnnnnntcccgagcagcctctgtttacagctggcattttaagcaaaccagagactgtgtcatttgagaagtgataaacagtggctgttcgggagaaatttggcctctagaatgagagtacgcagaggctgcaaatttgcatgcccttctgamataactcttccatatttgtcagctggaggctttggctgagggcatacaggtatggctttgaacacagcactccagcagtgaaaagctcatctcttggacccttccattctctttaaatgatgggctttgctttcaggagagatcttactgttctgctagcaatcytgtgartgttttctttccccttaaatcaccaaggacatttacacagaacaggaaggctggtttttgaatgttcctctatcccagtagcacattcccaagctgagaacataattgcgccaggtcatctcaaccag

SEQ ID NO: 45668 - DNA, 600 bp, Chicken  19866894285831_2
ctctgtttacagctggcattttaagcaaaccagagactgtgtcatttgagaagtgataaacagtggctgttcgggagaaatttggcctctagaatgagagtacgcagaggctgcaaatttgcatgcccttctgamataactcttccatatttgtcagctggaggctttggctgagggcatacaggtatggctttgaacacagcactccagcagtgaaaagctcatctcttggacccttccattctctttaaatgatgggctttgctttcaggagagatcttactgttctgctagcaatcytgtgartgttttctttccccttaaatcaccaaggacatttacacagaacaggaaggctggtttttgaatgttcctctatcccagtagcacattcccaagctgagaacataattgcgccaggtcatctcaaccagttgcccaagtgattaaatgtcagaaaaatatatgttgattcctgtgaagagagacagctttaacygatggaagtcccatgaaatgaagctttaggatttctgtggtaatgatgctgaaggaaaaaaaaaagcagtgggggggctccaagcaggaatagaggcagta

SEQ ID NO: 45669 - DNA, 600 bp, Chicken  19866894285831_3
ttacagctggcattttaagcaaaccagagactgtgtcatttgagaagtgataaacagtggctgttcgggagaaatttggcctctagaatgagagtacgcagaggctgcaaatttgcatgcccttctgamataactcttccatatttgtcagctggaggctttggctgagggcatacaggtatggctttgaacacagcactccagcagtgaaaagctcatctcttggacccttccattctctttaaatgatgggctttgctttcaggagagatcttactgttctgctagcaatcytgtgartgttttctttccccttaaatcaccaaggacatttacacagaacaggaaggctggtttttgaatgttcctctatcccagtagcacattcccaagctgagaacataattgcgccaggtcatctcaaccagttgcccaagtgattaaatgtcagaaaaatatatgttgattcctgtgaagagagacagctttaacygatggaagtcccatgaaatgaagctttaggatttctgtggtaatgatgctgaaggaaaaaaaaaagcagtgggggggctccaagcaggaatagaggcagtacagaga

SEQ ID NO: 45670 - DNA, 560 bp, Chicken  19866894285831_4
cagcactccagcagtgaaaagctcatctcttggacccttccattctctttaaatgatgggctttgctttcaggagagatcttactgttctgctagcaatcytgtgartgttttctttccccttaaatcaccaaggacatttacacagaacaggaaggctggtttttgaatgttcctctatcccagtagcacattcccaagctgagaacataattgcgccaggtcatctcaaccagttgcccaagtgattaaatgtcagaaaaatatatgttgattcctgtgaagagagacagctttaacygatggaagtcccatgaaatgaagctttaggatttctgtggtaatgatgctgaaggaaaaaaaaaagcagtgggggggctccaagcaggaatagaggcagtacagagagaccagagaactgcttctgcagttactgaaatgaatggagtaaagcaaaaccaaataaataactctgagaggcttttttttcctttgcagggggggagggacaccgttaaccggtagatgaacattttattgcgggtaacagcaattcaacac

SEQ ID NO: 45671 - DNA, 406 bp, Chicken  19866894285842_1
tagaacagtcagcgtttaccagctgtacaagaacaggtccctttttccttgctaaagtgcccaaaaatcatgactgaattggtaggttcaagtaagcctcaagtacatggaacagccttcagcttacattttgctcccaataatggtgctttttaacacgagatagggaaatctacctcgagggcaaaactggacagcaaactgaagttgtgcattcatatctcaggcccacttaggcatgtcagcactaagctcatagaataacacagccccccccaacacactgcttccccataacarcaacatgaagtgctcatggtgtaggaatacatggaacaagaagccatctgccttggggcatacctgcagggagtcacgagaaggagggagcctgccgctctgaaat

SEQ ID NO: 45672 - DNA, 600 bp, Chicken  19866894285851_1
gctgtaaaatcatgttttgcaggtttctgaagatagaagtttgttttggctggagaaactcagcagaaaggtaggacaagactaatgattctgctcactgctgggcatcaaacttcactgtccagtcctttccacaatatctgtctttagaatttgcaaatgttcatctatggcatttgaaataggtagatgctgagaagttctaaagtattgggcttattactgatctacacgagtgaaatagaaatgagcattgaatgaatgtgtcaggttggttcaacttcatttgtaatctcatakttcaccagaacagagaatgtatcttccatgacgttgacagttttattcatgggggcatttaataaaaattatgactgattaagatttagttcagacttcaagactcagacctaacagtcgacagtctgcaatgactatgaccattttttaatctccatctttctctagtggaattcacatcttctaatatataatgctcctttaaggaaggtactgatccgctctatgtgtgcatggtgaataagagaaagcagtgggcctgaagagcatcccttggaaacattttctagcagtgggaat

SEQ ID NO: 45673 - DNA, 599 bp, Chicken  19866894285870_1
  misc_feature (1)..(102): n is any nucleotide
nnnnnnnnnnnnnnnnnnnnnnnnnnnnnnnnnnnnnnnnnnnnnnnnnnnnnnnnnnnnnnnnnnnnnnnnnnnnnnnnnnnnnnnnnnnnnnnnnnnnnnctttctctgttttagcagatgtttgagtctttaaagccctctgggaacaatgtgttttaagcttgttcaatttagagaattatagaatgtcttggggttggaagggactttagagatcaccttcttccaaccccctgctatgggctgggctaccacacagaaaaactacaggggagagtgtgaatgcagtcccccacsgtatcaggtgtaggtgaagaagtaacaaagaaactgaagccacagaattttttgcagaaaatgaaagaaagaaaaagtagtttaggaagactgaaaaaaaaagaaagagaagatgggttcatgaaaaactgtcctcgtatttgaaatacttgaattaaaatatcctctgcacatgagcataaactgtacactgtcctctctagattttagggaattgagagcataaggagttaattttttttctgtatttttcaatstttttcttccccaccacggcttatttttttttaatgtcagat

SEQ ID NO: 45674 - DNA, 600 bp, Chicken  19866894285870_2
cacagaaaaactacaggggagagtgtgaatgcagtcccccacsgtatcaggtgtaggtgaagaagtaacaaagaaactgaagccacagaattttttgcagaaaatgaaagaaagaaaaagtagtttaggaagactgaaaaaaaaagaaagagaagatgggttcatgaaaaactgtcctcgtatttgaaatacttgaattaaaatatcctctgcacatgagcataaactgtacactgtcctctctagattttagggaattgagagcataaggagttaattttttttctgtatttttcaatstttttcttccccaccacggcttatttttttttaatgtcagatctaccttgatgctcatattaaaaaaactgtgatttaacttgatagatcagctactgtgagggggcagggagggaactgaccctactattgagatatatgatacttatttagagaaatgacatatattctttatgagatgcacaggtgtaatgcatacttctcattcaaggttacttacaaagaaggagttaaagaagctgagtctgttctcctgccttaaaatagaaaatacagtattttctgcattaaaaatactat

SEQ ID NO: 45675 - DNA, 599 bp, Chicken  19866894285877_1
  misc_feature (1)..(40): n is any nucleotide
nnnnnnnnnnnnnnnnnnnnnnnnnnnnnnnnnnnnnnnnttttctcagcagagcctggttcaacatggtggcctatccgagagcagggctgcaaggagctgctgtataagggtggtagaccagagcccagcaggggaatttctcaatgctggtgactgaattcagcttagaaaaagcttaaggaggcactttgccacgttatacctggcattcttcaactaatagcagtcctcccctgtatcctccgaagagcattttgaaaatccagtattacttctatacaccaccaagacagtgcyggaataaaggtctcaaaactttcattaaacccttcaaaactaaatggcttcaccacgccattaggaacgtgccaygacccagggccaccttgtcaccccatcccattgcattaccgctgcactgtgatgtgctgctgcggagcaccgcagagcatcagagcattcggctgcagctcctgccaacagaaggcagcgtgactttgctgtcaggactgtggggtgaacactttsagtatctaaagggggactgcaaataataagggaacagactcctcagcaggagctgttgtgacaggaca

SEQ ID NO: 45676 - DNA, 600 bp, Chicken  19866894285877_2
atccgagagcagggctgcaaggagctgctgtataagggtggtagaccagagcccagcaggggaatttctcaatgctggtgactgaattcagcttagaaaaagcttaaggaggcactttgccacgttatacctggcattcttcaactaatagcagtcctcccctgtatcctccgaagagcattttgaaaatccagtattacttctatacaccaccaagacagtgcyggaataaaggtctcaaaactttcattaaacccttcaaaactaaatggcttcaccacgccattaggaacgtgccaygacccagggccaccttgtcaccccatcccattgcattaccgctgcactgtgatgtgctgctgcggagcaccgcagagcatcagagcattcggctgcagctcctgccaacagaaggcagcgtgactttgctgtcaggactgtggggtgaacactttsagtatctaaagggggactgcaaataataagggaacagactcctcagcaggagctgttgtgacaggacaaggcaaaatggtttccaactaaaagaggggagatttaaatgggatataaggaagaagttgcttgtaataagggtgg

SEQ ID NO: 45677 - DNA, 600 bp, Chicken  19866894285877_3
ctcccctgtatcctccgaagagcattttgaaaatccagtattacttctatacaccaccaagacagtgcyggaataaaggtctcaaaactttcattaaacccttcaaaactaaatggcttcaccacgccattaggaacgtgccaygacccagggccaccttgtcaccccatcccattgcattaccgctgcactgtgatgtgctgctgcggagcaccgcagagcatcagagcattcggctgcagctcctgccaacagaaggcagcgtgactttgctgtcaggactgtggggtgaacactttsagtatctaaagggggactgcaaataataagggaacagactcctcagcaggagctgttgtgacaggacaaggcaaaatggtttccaactaaaagaggggagatttaaatgggatataaggaagaagttgcttgtaataagggtggtgaggcactggcacasgttgcccagagaggttgctgtgcaccrtccctgcagacacccaaggtgaggctggatgggctctgaacacctgatggagctgtgggtgtgccctgttcactgcagagggcttgatcagaaataaacactatatgatttac

SEQ ID NO: 45678 - DNA, 576 bp, Chicken  19866894285877_4
gtcaccccatcccattgcattaccgctgcactgtgatgtgctgctgcggagcaccgcagagcatcagagcattcggctgcagctcctgccaacagaaggcagcgtgactttgctgtcaggactgtggggtgaacactttsagtatctaaagggggactgcaaataataagggaacagactcctcagcaggagctgttgtgacaggacaaggcaaaatggtttccaactaaaagaggggagatttaaatgggatataaggaagaagttgcttgtaataagggtggtgaggcactggcacasgttgcccagagaggttgctgtgcaccrtccctgcagacacccaaggtgaggctggatgggctctgaacacctgatggagctgtgggtgtgccctgttcactgcagagggcttgatcagaaataaacactatatgatttacacaacagcccagcacttcctatgctcccaaaggtgggaaatctgctcggttcaacttgccccttcccaaggtgttggttcacaccaagaacgaaacatctcagtgtcttgtgggaacgtgacagggacatcgagga

SEQ ID NO: 45679 - DNA, 549 bp, Chicken  19866894285877_5
gcactgtgatgtgctgctgcggagcaccgcagagcatcagagcattcggctgcagctcctgccaacagaaggcagcgtgactttgctgtcaggactgtggggtgaacactttsagtatctaaagggggactgcaaataataagggaacagactcctcagcaggagctgttgtgacaggacaaggcaaaatggtttccaactaaaagaggggagatttaaatgggatataaggaagaagttgcttgtaataagggtggtgaggcactggcacasgttgcccagagaggttgctgtgcaccrtccctgcagacacccaaggtgaggctggatgggctctgaacacctgatggagctgtgggtgtgccctgttcactgcagagggcttgatcagaaataaacactatatgatttacacaacagcccagcacttcctatgctcccaaaggtgggaaatctgctcggttcaacttgccccttcccaaggtgttggttcacaccaagaacgaaacatctcagtgtcttgtgggaacgtgacagggacatcgagga

SEQ ID NO: 45680 - DNA, 600 bp, Chicken  19866894285878_1
cacggcagctgtgtttggcctcatcaggctgcagaaactcagtctgctctcagtgatggaggatggagccccaccgcactgctggatgtcagtgatcgccaaaggaaaaccaagcaggaggtatgagggcactacaagcagaacaacgatccccagggcgctggctgtgctgctcagtcacatccaagtggagaaaggaacaaagcgatgcttctaacccaaatttagctgaagtgacacatactgacattgatggggcttggatgggaacactgaatggtttgaccagaaccaggaaamaaaagtacttccagttctctcttacctgcatgttttggttgcagacagccttcttttccacatccttcttatgtccagcacgagttctttctctcctttcccggtacacaaaggcccagtcgctcaccccttctgtctgaatgatccttctcatgagctccctttggtccattggcgcacggatgattttcaggttgttggtgtagatgatgatctgaccaaagtcgataaccggggaagcctgtgagaggatcttgtcagtgtcccacccatttaatgcactctgcaaacacgttttgg

SEQ ID NO: 45681 - DNA, 600 bp, Chicken  19866894285881_1
ttttctagaagtgaaaagtgaaattttaataaataatttttgacctgacaaacataattatatgaagaaaattaaaaataattatggctgtttatgtaattatttcttgttcttagttaactatatacaatgataaaagactatgttttcatgaatgtccatactgtttgtcacaagagaccttttatccaaatctgatccactgagcactaagtattaatatatgaaggctgctccagaagcagtgtttcctattttattatgttagcccaggatattagaggtgaatgttggtggtaygaccacagaagctgaaccttcccaccaatattctgttatattttgttgccctgagacaggtggcagcacaggggcagtctgacaaaatggtatctaacatggaagtatatatgaagcaaaggtgtagaactgaattcctccatgcagaaaaaatggcactcactgacattcattgatgcttgctgaacatttatggagaccaaacagtggatatgagcacagtgaggtggtgggtggtacatttcagcagtgacaacagcagcatgaaagacaagccacattccagatggccatacagat

SEQ ID NO: 45682 - DNA, 600 bp, Chicken  19866894285882_1
acttcctgcagaaaggtggacggggagaattaagagctcaaataaatccaccaaaccacatgtctgggtgctaaactagatccagttcaggataagagaatcctagctgcttaattttaatattctgccttgtgctgtgaagcacccatggaagttataatgcgcatatttcttcatggaaggcaaagctggcgtgtatgtttattaacttacttcattggtacctgcaacaggctgctcaaggcatgaatctcatcctccaattcacttttattctttggatactggttctggagaatwtaatcagcaggaatcatgcagctagctggttggtgaatctctctctccatctgtccttccttccttgttagagctgagattttaattaccaacatctgtgcactatctctgtctcttcattaaaaataagagctgaagttgccctattgctgctgctgtagacagaacagagcaaacaccatgataaaagtgttcatacagctgacggagaatcctccctccctcttaggggtctaaatttgaaggatgtgtgagcgagcagattatatttatgaggaggagctgccaacagagaatata

SEQ ID NO: 45683 - DNA, 600 bp, Chicken  19866894285888_1
tcagtgctactgaattgattttataggtattaatacatatattcttgtgtaactgactatatgacccttcagatgccatatgtacgtatgcatgagcataaattagctcttcctataaagtgaaaacgtatacagacagcctgcgtggcaaaaaataatctgagaaagcaagcacaggaagcttactaatgtgagagtttatttagctaataatgatttctgtaaaaaggcatgcagtgaatacatttctcatctatatattacctcagatatctcctcgggaacatcccttaaaggaaytgtgcaagtattttaagcccagcagctttggacaacagcacactaaattagatgaagttttagaggaaggtttgagaattaagaagccgtgaacagctcccattttgcctactggtaggaagcactgagggatccaacacttatacaggtaaaaaatacaactgatgcacattttattgatatatttgtgtgtttgagatcttaaatcctaaaccggcaagcattacatgtgtaggaacacaccatgtaagtctcccctagggcaaggctgtcttttaaggctcactaagaggatccatc

SEQ ID NO: 45684 - DNA, 600 bp, Chicken  19866894285896_1
catggtgttggttacttttggctggtctcttgatgtaccttctctctctcggtgaaacctcagaaggaagcaagagcagaattaaaactagttctgctgtcgaggaagagaaggaaaaaagggaagagattcaccgtgctacttactgcctacttggaggcacaggaggaggtgggggttcccggcgagagcctgcttggtggttttgcatgtttcttttcttctctaggctcagagcattgaagtcatcctcaaaccccagagctcctataaagaaaaagccaagcacaataccatgaraaacaatttaatacagctcagaacaagaaaaggaaggaatgtagctccaygggaagtgaaagagcaaacgataacagcaatataccagctctggtaagagaatgagtgatagggtcaacgcaaaacagaacttaactcatgcaarccaaggcattgagaggagacagcactcaagaagaaacgaagagtccagggcaatagaatcagaggacaaagatgttttgttttgcatgggatatggtgaggcaaggaaatgggatagtaggcagggtgccgaatgcacgcatctagtcactagct

SEQ ID NO: 45685 - DNA, 600 bp, Chicken  19866894285896_2
ggtgaaacctcagaaggaagcaagagcagaattaaaactagttctgctgtcgaggaagagaaggaaaaaagggaagagattcaccgtgctacttactgcctacttggaggcacaggaggaggtgggggttcccggcgagagcctgcttggtggttttgcatgtttcttttcttctctaggctcagagcattgaagtcatcctcaaaccccagagctcctataaagaaaaagccaagcacaataccatgaraaacaatttaatacagctcagaacaagaaaaggaaggaatgtagctccaygggaagtgaaagagcaaacgataacagcaatataccagctctggtaagagaatgagtgatagggtcaacgcaaaacagaacttaactcatgcaarccaaggcattgagaggagacagcactcaagaagaaacgaagagtccagggcaatagaatcagaggacaaagatgttttgttttgcatgggatatggtgaggcaaggaaatgggatagtaggcagggtgccgaatgcacgcatctagtcactagctccctgccaccaagggccccgtcctgcacacaccacagagcatgcaaaggt

SEQ ID NO: 45686 - DNA, 600 bp, Chicken  19866894285896_3
ctgcctacttggaggcacaggaggaggtgggggttcccggcgagagcctgcttggtggttttgcatgtttcttttcttctctaggctcagagcattgaagtcatcctcaaaccccagagctcctataaagaaaaagccaagcacaataccatgaraaacaatttaatacagctcagaacaagaaaaggaaggaatgtagctccaygggaagtgaaagagcaaacgataacagcaatataccagctctggtaagagaatgagtgatagggtcaacgcaaaacagaacttaactcatgcaarccaaggcattgagaggagacagcactcaagaagaaacgaagagtccagggcaatagaatcagaggacaaagatgttttgttttgcatgggatatggtgaggcaaggaaatgggatagtaggcagggtgccgaatgcacgcatctagtcactagctccctgccaccaagggccccgtcctgcacacaccacagagcatgcaaaggtgacagccacttcaatacctggagaagaggcctgcaatagacctgggaggtttttctccatctgatgccagctggctgagtccttatgttcaggca

SEQ ID NO: 45687 - DNA, 600 bp, Chicken  19866894285900_1
gtcaaagccaattctaaattaaaacgagaaatagagtgttgccttccactgcaaggaagatatgggctgaaagtactgctgaattgcatgatgacttctaaaaataccagaatgcaatggattaagtgcaagtgagttaataaggtgttacactgcattctgaaggctgcttaaaattagctgtgaatgttccttcgcttgtcctaaatacactgcactaagacaccattttttcacctcttttagtcttactttgagctgttgcactgagaagtctggctctggaggcactagagagaragacagctttgctgttgctcgtctttccagtcatactttcaagcctgaagaaaacaattccaatatgtgacatataraggtgcagctcagccacttccccaaattatttattcagtgtgtagtacagygccrttatacaagggcttctattttcttttgagaatctctaaacaactaccaagccaggtgctgcctgatgtcacagaatatgatgcatatccctctggcagaacaggcagtcattagtttgatataataagtctgtgtttcctggagaactgggattcttacactgagatg

SEQ ID NO: 45688 - DNA, 600 bp, Chicken  19866894285900_2
gctgaattgcatgatgacttctaaaaataccagaatgcaatggattaagtgcaagtgagttaataaggtgttacactgcattctgaaggctgcttaaaattagctgtgaatgttccttcgcttgtcctaaatacactgcactaagacaccattttttcacctcttttagtcttactttgagctgttgcactgagaagtctggctctggaggcactagagagaragacagctttgctgttgctcgtctttccagtcatactttcaagcctgaagaaaacaattccaatatgtgacatataraggtgcagctcagccacttccccaaattatttattcagtgtgtagtacagygccrttatacaagggcttctattttcttttgagaatctctaaacaactaccaagccaggtgctgcctgatgtcacagaatatgatgcatatccctctggcagaacaggcagtcattagtttgatataataagtctgtgtttcctggagaactgggattcttacactgagatgtaagagcgtgccctcaacttatattatcttcccaaactgacactggttggaattgctgcctgtgtgctcttacggct

SEQ ID NO: 45689 - DNA, 600 bp, Chicken  19866894285900_3
caagtgagttaataaggtgttacactgcattctgaaggctgcttaaaattagctgtgaatgttccttcgcttgtcctaaatacactgcactaagacaccattttttcacctcttttagtcttactttgagctgttgcactgagaagtctggctctggaggcactagagagaragacagctttgctgttgctcgtctttccagtcatactttcaagcctgaagaaaacaattccaatatgtgacatataraggtgcagctcagccacttccccaaattatttattcagtgtgtagtacagygccrttatacaagggcttctattttcttttgagaatctctaaacaactaccaagccaggtgctgcctgatgtcacagaatatgatgcatatccctctggcagaacaggcagtcattagtttgatataataagtctgtgtttcctggagaactgggattcttacactgagatgtaagagcgtgccctcaacttatattatcttcccaaactgacactggttggaattgctgcctgtgtgctcttacggctgcagaragcaaccttctcctctcacacagaagtaaaatatactataatctt

SEQ ID NO: 45690 - DNA, 600 bp, Chicken  19866894285900_4
tgagttaataaggtgttacactgcattctgaaggctgcttaaaattagctgtgaatgttccttcgcttgtcctaaatacactgcactaagacaccattttttcacctcttttagtcttactttgagctgttgcactgagaagtctggctctggaggcactagagagaragacagctttgctgttgctcgtctttccagtcatactttcaagcctgaagaaaacaattccaatatgtgacatataraggtgcagctcagccacttccccaaattatttattcagtgtgtagtacagygccrttatacaagggcttctattttcttttgagaatctctaaacaactaccaagccaggtgctgcctgatgtcacagaatatgatgcatatccctctggcagaacaggcagtcattagtttgatataataagtctgtgtttcctggagaactgggattcttacactgagatgtaagagcgtgccctcaacttatattatcttcccaaactgacactggttggaattgctgcctgtgtgctcttacggctgcagaragcaaccttctcctctcacacagaagtaaaatatactataatcttccac

SEQ ID NO: 45691 - DNA, 600 bp, Chicken  19866894285900_5
agctcagccacttccccaaattatttattcagtgtgtagtacagygccrttatacaagggcttctattttcttttgagaatctctaaacaactaccaagccaggtgctgcctgatgtcacagaatatgatgcatatccctctggcagaacaggcagtcattagtttgatataataagtctgtgtttcctggagaactgggattcttacactgagatgtaagagcgtgccctcaacttatattatcttcccaaactgacactggttggaattgctgcctgtgtgctcttacggctgcagaragcaaccttctcctctcacacagaagtaaaatatactataatcttccaccagatcagtatttctgcagtgctccaaatgtaatattctgcattttcactgcacttttctttcagctctaacagatctctcactgaagagtattcagaattcactggcagtccaccatgtttgcaactaaacatgtagccagctctttggtttctggagtcaaacacatcctcacattccttttgccaaagctgacatcatggacagagttcaaaagttcagataactctctgctaacttctagaaaagtg

SEQ ID NO: 45692 - DNA, 600 bp, Chicken  19866894285903_1
cttgcaccaagagagggtcacactaagcatttggaaatatttctgtactctgagggtggttatacaccagaccagaattcctagagaggtggttgatgtcccatgcctgtcagtgttcaagaggcatttggacaatgccctagatagtaagcttcaactttccagttgccccagtgtggtcagataattggacttgatgatcttcgaaggtcctgtccaactgaactattctataatttcctgctggctaatgacactcccatctcttctcttaatgagtactgacatcacctgggagaraagtctgtaagacctactcaaaaaaaatgaaggaggctggaatttttattcatcgtattcttttctcttaggcatgtgtttaccagaatgttagatgaaagtcactcctatccgtgtgtctcagatacagacactcctgatgatacaagagataggcatctccctgttgtttttccaacagtcttctttgggaattagggcagaaagagtatattcactcatgtccaagcattcatttcttacccttttcagtgactaactaatcccatgtttatccctgctactcataaatctcttatt

SEQ ID NO: 45693 - DNA, 599 bp, Chicken  19866894285906_1
  misc_feature (1)..(164): n is any nucleotide
nnnnnnnnnnnnnnnnnnnnnnnnnnnnnnnnnnnnnnnnnnnnnnnnnnnnnnnnnnnnnnnnnnnnnnnnnnnnnnnnnnnnnnnnnnnnnnnnnnnnnnnnnnnnnnnnnnnnnnnnnnnnnnnnnnnnnnnnnnnnnnnnnnnnnnnnnnnnnnnnnnnnatcgcacataagatttgcttccccaatgaaacagagcaggtgagaacttacttgtttttttcaggcaacatgtattcttgcaggagcatatttgaagatattcagtgctctcacttattcctctcctctgtgtaasaaaagtcttgttgtcttatagacatttgatgtgggaacaaacaccaaaaaccggactctatgtcagaacatcgcttccaaactgcagctgagctcttgggaaggtttcagcctctttgtcaagattgcagacaaggtaacgtctcaactacagcagggttgccagactgcctctctgccttccttcccataccacctaagcaacaatatttgaaaacaggcaacaaagcaggtcattactgctgctgttttctgaggggctacagcctagactaggagtcttctgaagaagctggaggg

SEQ ID NO: 45694 - DNA, 600 bp, Chicken  19866894285908_1
aaaaggtgggatttaggtatatagctttcctaggagctgcaggaaatcccattttcatatctgctcactctgaagttatgagaagaaggacttagatcttctcacaggcaagaggaatcctaaggcaaagtaattagattctaagtcacatcttctggaagggtggatttataggcgagaagggagggcaggggaaacagagtgaaggcagcattcccctctcttcacttttttccctcctgctgcctcccactgagggggatgctgtcacatgctgggtcccctcagctgctgcagagrcagtggataaatgtactgacttcaataccgctattttatgccaatcaaagatctcagtctgcttataaagcacatgaagtattttcagaagtcttattttctatttgttgttgccaaaaatccttctgcctttagcacagtaagcagctgtcattgaagcttctcttcgtctgttagtgcttctttcctagaggtggtcataatattgtgatgaaagtattttttgaccaaatagcagagatgttacaaaattgcaggctttcttcggtgagtttagaagtaaaagcaaagtgtggcttt

SEQ ID NO: 45695 - DNA, 599 bp, Chicken  19866894285910_1
  misc_feature (1)..(55): n is any nucleotide
nnnnnnnnnnnnnnnnnnnnnnnnnnnnnnnnnnnnnnnnnnnnnnnnnnnnnnntgaaactgaattagggttggttggttgttgttttttttaagctcctgttacatgttttctaatcactgtgctccaaagcagagcacagtgtgggaactggagcatttatgtgaacagtgctgtgctattagctcaggatgataccattctagaagtcgtcagtgtggaagaaggcctgtaaatcgagtgctttgtgtgactgggattttgcactttctgtccgttctcagcaaatagcaatcgcragggaaggcgacttgctgaccaaggaacgcctctgctgcggcctgtccatgtttgaggttatcttgacaaggatccgatccttcctggacgatcccatctggcgtgggcccctacccagcaatggagtgatgcacgtggacgagtgtgtagaattccaccgcctctggagcgcgatgcagttcgtctactgcatccccgtgggaacgcacgagttcactgtggagtacgtatgggcagctgccggcggtgcacctgcgccaacagcgcttcctttgttccttctgcactgggggggctg

SEQ ID NO: 45696 - DNA, 505 bp, Chicken  19866894285938_1
atctccaatccaacttgcaaacttaaaaaattctgcaaactgagcagttttaaagtttcttcaaggaagattacagtaaaagtgactctcattagaggtgactcatctgtatgctggacttgcatcacactgaagaacaaaaaggaaggtaaagaagtttagaaaactggcatgtttccattggtaatttgagttttcagtcatggtgcttacagaaggacaagagaccttttgcaactcagcatttgattggttgtttaagcctctgtaagagctaaaaaagcaaagtctgaacagttraaagatagggtgaaagatgcaggagtcactcagcgtgtgaaaaaactaagtaatttagttgtcattgttgttgacttttgtgagaagattacctgagccattgttattcaattagaggtttggaggggaggagataaaattcccggtctttcattgcccaaagctttgcattcataatcatagaaggggtgaaggacaaagacaa

SEQ ID NO: 45697 - DNA, 600 bp, Chicken  19866894285943_1
atcaaaggcacttagaggtgttttgttgttgtttttgattatttcctttatttccataagtgtacttctttcctcatgcccagagtcttgctagtatgaacactgcaagcaaatgggtgtttggtgttgaagctatggctggtctattccccacaaatgttgctccatccatagcctctgctgctttttgtattcttctgtatgtatatgtgtatatatatatatatagaggagagatgtattaatttgtttactagccttcccacagcagatagggccatctcagaactgatctctgcwttgagtctgcaaactgaggtgttgtggcagcctaacaaaccaaacaacccgaaacctgtgttgtgcaataataccatgtcacgtcccagcagacagaaataatcaccaatctcacttctatttatgtgyaagcttcccaccagcttcttggaagctgggtttgatccctggtccaggtggtcagaaggtggaagctatgggcagcacaagcttatctgtccccttcttctgtgtcactgcaaacactatcctgcactcgagcttagctgggtatggtcctctaactcatagcaaggacct

SEQ ID NO: 45698 - DNA, 600 bp, Chicken  19866894285943_2
aagctatggctggtctattccccacaaatgttgctccatccatagcctctgctgctttttgtattcttctgtatgtatatgtgtatatatatatatatagaggagagatgtattaatttgtttactagccttcccacagcagatagggccatctcagaactgatctctgcwttgagtctgcaaactgaggtgttgtggcagcctaacaaaccaaacaacccgaaacctgtgttgtgcaataataccatgtcacgtcccagcagacagaaataatcaccaatctcacttctatttatgtgyaagcttcccaccagcttcttggaagctgggtttgatccctggtccaggtggtcagaaggtggaagctatgggcagcacaagcttatctgtccccttcttctgtgtcactgcaaacactatcctgcactcgagcttagctgggtatggtcctctaactcatagcaaggacctgagtttaaaagttacatgttgtaaccatcctaattaacaactgtacctgaatattttgggtagtccttcactagtctgctatctttcttcccacagtagtaaaatttaatcaatctgacgtatatgggc

SEQ ID NO: 45699 - DNA, 600 bp, Chicken  19866894285943_3
tttacagaaatgtggaagtttgcaagcacctaggatagatggcacagcagcagtcaggtattcatatcagctgtgaatgcatggtgagcataaccctgctgtcagctgacataagggatggggaggggacaaactggcggagtcttgagataggagaggaaaaaagtcctcgctgaatccttgtaagaaaaagtaaggcacaatttaaaaagatgaaagggaaataaatgtatgtaaagcagtcaggagaataatagataagacttggcagaggattaaatgaaaactgtacacagcctmgcgtttaaagcaagaggatttatcaagacttcagcacagactagcagcaggtacaggttaaaaataaaaagtttaagtgatgtgaagaagtgttgtgtgtgcaggaagctgatgttgaaatcacgttggcttttgctatagggttaaaaaaagaaagaaagaaaagcaaccatttcatagtacctttgagaaggaaaagataccctcagacaaattctttgtacacagaggtgaaaaatcaaccatttctcttagatttcttttcttttgggcttcatgaaaattgaaaataactagaaa

SEQ ID NO: 45700 - DNA, 600 bp, Chicken  19866894285947_1
acatggagatgctcaaaaatgtgtcagaagtgacttgctttatttcctctgtacctgcaatgccaaagtctcaatttaaatttctccttccagaaacagaacaggaatgtcttcaggacaacaagatattcttttcacttagatgacaagacatatgaatatactcttatatccattaagcagagattgctttttcactgattgtttgagatggcaaagagagggctagagttttgagccagaaactcccctttgccacagagaagaaaatactgcattggatgttacagaaaacatcaygtgtgaccatttggacatgaggtgataattcaaacagctttccccattaggcaaaaaacaaaagctacgtgtccytgaaaatacacaccctgagactgccctgcataagaccaagtatgaagtacctcacctggacacaggtctgtttcgtaagtagatctgtgaacctggatgccacaggaagctgtgtgaacatgtttagtaaggcaacactcccaaaaatgcagaaaaatatcccctgtattcagcacagtgaaggtgcatttgggcattctcattctgtttttgtcagaagagaaa

SEQ ID NO: 45701 - DNA, 600 bp, Chicken  19866894285947_2
ttaaatttctccttccagaaacagaacaggaatgtcttcaggacaacaagatattcttttcacttagatgacaagacatatgaatatactcttatatccattaagcagagattgctttttcactgattgtttgagatggcaaagagagggctagagttttgagccagaaactcccctttgccacagagaagaaaatactgcattggatgttacagaaaacatcaygtgtgaccatttggacatgaggtgataattcaaacagctttccccattaggcaaaaaacaaaagctacgtgtccytgaaaatacacaccctgagactgccctgcataagaccaagtatgaagtacctcacctggacacaggtctgtttcgtaagtagatctgtgaacctggatgccacaggaagctgtgtgaacatgtttagtaaggcaacactcccaaaaatgcagaaaaatatcccctgtattcagcacagtgaaggtgcatttgggcattctcattctgtttttgtcagaagagaaaatttaagcaggtagcacaagcaaaggcatgtgggagcacagagtacacatataccactgtgctaccaaagtaaca

SEQ ID NO: 45702 - DNA, 600 bp, Chicken  19866894285950_1
ctcacagccgtcttcatgggggttgtaagctgtgccatgagggttctgtgcaatacagtgcctgggtttctgcacagggctgtgatggagcagggaggctcagcttcaccttcaaatatttgattcatttgaaaaaggcagactatggggtttgtgcagcagttctagcaggtgtttgtaggggggttctcatgctgggtcccctcctggctccctttgcctcacatccagccactgatcaggctctgagcagctaatggagctgcaggcgtctccgttcattgcagggagttgcaccasatggcctttaagggtccctctcaactccaacgtgtctgcgactctatgggagaacagcttatgagtgatctcagtaatatcagaagttctggtgcagggatattaggcaacctggtgcacgttaaaaccagctctaggcttgttccagcagatagttacagtctgactattttattgtgaggtttgcaagtgcagagcaaattttttgcactgcaaagctcagagtgaagtgctggctcgaaccaatcgcaatatttggggccctttgaatatcttatttacagtattttttggccatta

SEQ ID NO: 45703 - DNA, 549 bp, Chicken  19866894285955_1
agcaaatcatctttctacttatttttgtttattcactcaattgcataaaagctacctatgtataaaacaacatcctagagagcagctcaggtgtctcacgtgcaagaattgctggtctctaccagcagtactgccaatctcacatacacacacgcgctgagctggagctcaaccatgggctgggctgtatatcacaacaggatgccctttgagcctcccttaggaaatcctcagtgtatgcagcatatcgttactgccatggccgaacactgccagagaacgtgaacatcagaaaccacrttagataagagtgaaagccatcaggggaaggggcctgggagggggatcccaatacagacaatgcttgtactaaatcaggcttcagcttgcattagttcaggcttccaggctgtgattgaggcttatagcaaatggaactgcgcaaatctctatctttcattgcctctgctgatcaggatggaggaatagaatcacagtttgtttgttttttttaatgaattgggttttatctagcttcattttcaaaca

SEQ ID NO: 45704 - DNA, 599 bp, Chicken  19866894285959_1
  misc_feature (1)..(71): n is any nucleotide
nnnnnnnnnnnnnnnnnnnnnnnnnnnnnnnnnnnnnnnnnnnnnnnnnnnnnnnnnnnnnnnnnnnnnnncaaaagaagggcctatgtgtgcaggggaatgcatcttgtggcaatatctgaggttactgtgaaatcctcccatggaaagagcttgtaaaatatacgccacctgttctattgctctccagagcaagggaccacgttcattttcctgcattgagctggggtgattttcctgccagacaggtaaggatataacccatctcatttcatgcagctccagaggctgcaagagaasgaaaccgctctggaggtgtgctaaggaacccctcctgctaatcccactttgtgatcttaccacatgctgccccattcatcattaaaggataattaccaagaggagtctccrtcaacctcaaagatgttttctggggcttatagrtgcacagtgagcaatgttaccctaaggagcatgcaggccaagtaagcagcagtgactccttccttgcaccaagaagagcaggatttttaaagggtacctaaattgacatgacttttagagacttgtgttgacagcactgacacactgcctttaaa

SEQ ID NO: 45705 - DNA, 600 bp, Chicken  19866894285959_2
gcaatatctgaggttactgtgaaatcctcccatggaaagagcttgtaaaatatacgccacctgttctattgctctccagagcaagggaccacgttcattttcctgcattgagctggggtgattttcctgccagacaggtaaggatataacccatctcatttcatgcagctccagaggctgcaagagaasgaaaccgctctggaggtgtgctaaggaacccctcctgctaatcccactttgtgatcttaccacatgctgccccattcatcattaaaggataattaccaagaggagtctccrtcaacctcaaagatgttttctggggcttatagrtgcacagtgagcaatgttaccctaaggagcatgcaggccaagtaagcagcagtgactccttccttgcaccaagaagagcaggatttttaaagggtacctaaattgacatgacttttagagacttgtgttgacagcactgacacactgcctttaaatcctgaccttgacccagtacaagtactgcactgytttagaccayagtcaatccttgtagtcttgacctaccagcaaaggaggaacatagaaatagtcaagcaatggctacca

SEQ ID NO: 45706 - DNA, 600 bp, Chicken  19866894285959_3
atggaaagagcttgtaaaatatacgccacctgttctattgctctccagagcaagggaccacgttcattttcctgcattgagctggggtgattttcctgccagacaggtaaggatataacccatctcatttcatgcagctccagaggctgcaagagaasgaaaccgctctggaggtgtgctaaggaacccctcctgctaatcccactttgtgatcttaccacatgctgccccattcatcattaaaggataattaccaagaggagtctccrtcaacctcaaagatgttttctggggcttatrgrtgcacagtgagcaatgttaccctaaggagcatgcaggccaagtaagcagcagtgactccttccttgcaccaagaagagcaggatttttaaagggtacctaaattgacatgacttttagagacttgtgttgacagcactgacacactgcctttaaatcctgaccttgacccagtacaagtactgcactgytttagaccayagtcaatccttgtagtcttgacctaccagcaaaggaggaacatagaaatagtcaagcaatggctaccagaagtggtctcatccatcatcaaaatctctc

SEQ ID NO: 45707 - DNA, 600 bp, Chicken  19866894285959_4
ggaaagagcttgtaaaatatacgccacctgttctattgctctccagagcaagggaccacgttcattttcctgcattgagctggggtgattttcctgccagacaggtaaggatataacccatctcatttcatgcagctccagaggctgcaagagaasgaaaccgctctggaggtgtgctaaggaacccctcctgctaatcccactttgtgatcttaccacatgctgccccattcatcattaaaggataattaccaagaggagtctccrtcaacctcaaagatgttttctggggcttatagrtgcacagtgagcaatgttaccctaaggagcatgcaggccaagtaagcagcagtgactccttccttgcaccaagaagagcaggatttttaaagggtacctaaattgacatgacttttagagacttgtgttgacagcactgacacactgcctttaaatcctgaccttgacccagtacaagtactgcactgytttagaccayagtcaatccttgtagtcttgacctaccagcaaaggaggaacatagaaatagtcaagcaatggctaccagaagtggtctcatccatcatcaaaatctctctt

SEQ ID NO: 45708 - DNA, 600 bp, Chicken  19866894285959_5
cctgctaatcccactttgtgatcttaccacatgctgccccattcatcattaaaggataattaccaagaggagtctccrtcaacctcaaagatgttttctggggcttatagrtgcacagtgagcaatgttaccctaaggagcatgcaggccaagtaagcagcagtgactccttccttgcaccaagaagagcaggatttttaaagggtacctaaattgacatgacttttagagacttgtgttgacagcactgacacactgcctttaaatcctgaccttgacccagtacaagtactgcactgytttagaccayagtcaatccttgtagtcttgacctaccagcaaaggaggaacatagaaatagtcaagcaatggctaccagaagtggtctcatccatcatcaaaatctctcttcctggatggctgcagagtttaaatccaaccccctgagcaatgcctgtcrcagcatttcaaggtctgccccaggaacatctgcaactctgacagagagctagagaaggaatttttgctaacagatcacagtagcattgctgatccaatttaggctgtggagcaaggggttgtgatgaggtccccttgagg

SEQ ID NO: 45709 - DNA, 600 bp, Chicken  19866894285959_6
ccactttgtgatcttaccacatgctgccccattcatcattaaaggataattaccaagaggagtctccrtcaacctcaaagatgttttctggggcttatagrtgcacagtgagcaatgttaccctaaggagcatgcaggccaagtaagcagcagtgactccttccttgcaccaagaagagcaggatttttaaagggtacctaaattgacatgacttttagagacttgtgttgacagcactgacacactgcctttaaatcctgaccttgacccagtacaagtactgcactgytttagaccayagtcaatccttgtagtcttgacctaccagcaaaggaggaacatagaaatagtcaagcaatggctaccagaagtggtctcatccatcatcaaaatctctcttcctggatggctgcagagtttaaatccaaccccctgagcaatgcctgtcrcagcatttcaaggtctgccccaggaacatctgcaactctgacagagagctagagaaggaatttttgctaacagatcacagtagcattgctgatccaatttaggctgtggagcaaggggttgtgatgaggtccccttgaggaaaatatatt

SEQ ID NO: 45710 - DNA, 556 bp, Chicken  19866894285959_7
cagtgactccttccttgcaccaagaagagcaggatttttaaagggtacctaaattgacatgacttttagagacttgtgttgacagcactgacacactgcctttaaatcctgaccttgacccagtacaagtactgcactgytttagaccayagtcaatccttgtagtcttgacctaccagcaaaggaggaacatagaaatagtcaagcaatggctaccagaagtggtctcatccatcatcaaaatctctcttcctggatggctgcagagtttaaatccaaccccctgagcaatgcctgtcrcagcatttcaaggtctgccccaggaacatctgcaactctgacagagagctagagaaggaatttttgctaacagatcacagtagcattgctgatccaatttaggctgtggagcaaggggttgtgatgaggtccccttgaggaaaatatatttagaataagcgtagagtgttctataaataggtggggacagtcaaattcaggattcagcaaggcttttggggtttgcagtatgttcagcctgactccattacttaca

SEQ ID NO: 45711 - DNA, 599 bp, Chicken  19866894285963_1
  misc_feature (1)..(68): n is any nucleotide
nnnnnnnnnnnnnnnnnnnnnnnnnnnnnnnnnnnnnnnnnnnnnnnnnnnnnnnnnnnnnnnnnnnncaaggagatggtagagtcactgttcctagaggttttcaagaaaagggtagatgtggcactgagagacattattagtggacatggtggtggtttgatgattggactgatgatcttggaggtcttttccagccttagttattctgtgattctgtgattccactgttggctctgcagagtcatatcttgcagatgtacagtaaaagtaaaatcaaccattccttgcatagtcggrgaggtgccaatgtcagtgtctttatggagttatctcagtaaataaatctctttagcaatcatatcctcataactacccttctgaggacataccgggtgtggctgaccggactgtagtggaagatgggattcaagtattctgaggtggttttagttcaaaaaacttcatgaaaaataccaaagtgagaggtctgtgcctcccaccaggctgagtccagccagtactgctaagcctgccacatgactgggacactttctgagcaacagccaaggagctataacccatcatttgtcagctct

SEQ ID NO: 45712 - DNA, 600 bp, Chicken  19866894285965_1
aatattctgaatatcttttatctactttttgcaaacacaagttccacgcacaaatgtacaccactgttatcaagtcatcaggtcaacctttctacttcacacctattagatttaaaacaacaaccaaaatacatatttagaatacttgcatggaaaatctagtgaaaaagaaacgagtctaaaaagtctaaaagtctaaatctcaacccaagcctcagtctacatatgtagaactgcgtctgcgttgattaccatggcatgagccacttctaccaagctgctttaaaaatagatgggcaractgcttcttgtgtaggaaagaagttttctgcctattgaaacggcacgtttttactagggcctgaaagtacagccttagcatgtgtttgcacataaggcctgctaagaccagaaagacattcagatgtaaccccaagcagccacaccatagaaataggttttctgacatccttggatcacaccctgtaacatgcacttgtcccactcccataagcrcacgttccaaaatacatttcaacatcacaaccagaagtgttaacagctggcattctggagcaacaaccagcaggaaatgcactg

SEQ ID NO: 45713 - DNA, 600 bp, Chicken  19866894285965_2
agtctacatatgtagaactgcgtctgcgttgattaccatggcatgagccacttctaccaagctgctttaaaaatagatgggcaractgcttcttgtgtaggaaagaagttttctgcctattgaaacggcacgtttttactagggcctgaaagtacagccttagcatgtgtttgcacataaggcctgctaagaccagaaagacattcagatgtaaccccaagcagccacaccatagaaataggttttctgacatccttggatcacaccctgtaacatgcacttgtcccactcccataagcrcacgttccaaaatacatttcaacatcacaaccagaagtgttaacagctggcattctggagcaacaaccagcaggaaatgcactgggagcagcacagggaatcccattaggcacagtacttgaaaatacagttgaaagcaaggcagcttagcagctgcgagccccatctacaacctgctgctaacctctcaccccaggactgctgctgaagctcagactgcccagagaagatccaggccctgaattagccagaaagaaaagcaagggaaagcgaacaaacaaaccaaaaaaacctcaggct

SEQ ID NO: 45714 - DNA, 600 bp, Chicken  19866894285967_1
tcccctgtcctttgtctgtttataacttcatgctacaagtctagctcttgctatgactgcatttaaatgtcccttacagattattattttttttgacaaatcccatgtggtagatacgttcaattgtcttacagctgtcttaagtgaaagccacttttagaggagaaagctctaacaaaacactgagcattaatgaaagaagacaactgggaaacaaccccccaaaaaaactaagagagtggcaaataacataactttaaaaaccatcaagtttactctatctagaatattaccttctgkttttttgagtgtttgttttgcactattttgtaagtacttacctcttaaaacaaaagaggttatgagggattcataggttttcttggcttaatttaaaatgaaaaaataaagcttcatgaaattctcaaattttgtgacattatccacatctctctcattttataaatgcttattctatgcacttatgcatatgtatactatagccttttcccctagtaaagaaagacagacctcagatggcaatgggcctggaacamgctctgcagagcagtgggcactgccctgagtgctagagctcag

SEQ ID NO: 45715 - DNA, 600 bp, Chicken  19866894285967_2
taaaaaccatcaagtttactctatctagaatattaccttctgkttttttgagtgtttgttttgcactattttgtaagtacttacctcttaaaacaaaagaggttatgagggattcataggttttcttggcttaatttaaaatgaaaaaataaagcttcatgaaattctcaaattttgtgacattatccacatctctctcattttataaatgcttattctatgcacttatgcatatgtatactatagccttttcccctagtaaagaaagacagacctcagatggcaatgggcctggaacamgctctgcagagcagtgggcactgccctgagtgctagagctcagggagcattgagacagcaccatcagacaaagggtttgggtggtgctacatgcacccatgttgagttgggctctatgatccctatttgtccctaccaactcgtgatattctgttactctactaaaccaacccttcctgatcccctacatgctgcatctcttggcaccaatgagcttcacctgctctggaaccagaagttcatcaaatccctacaggtgtagtggggaggtttgaagcctctgctagtttttttcctttt

SEQ ID NO: 45716 - DNA, 600 bp, Chicken  19866894285971_1
gaagagagagaagagtgaacatatgataaggcagaacttgtgtgcaacaaattagcaatctggtacacaaagttaactattaataggatttatttagggacactaagggagaattaagataagcattaagggaaaagggaatgcttcatattctaaaaaatgctcagattttcagactggacaatgtagcaactgatagttaaagctgatgtagcagcagattgaggggggaagttgacatttgatgtcaaatgccacaacgcaatgagcagaaaagctcattaaatgcagagctgatgrtatggggaggccacgagagcagtagaaagaagcaccggtaaatgggcctgctaggaagatgaattttgcagcagcattctgaaaacatatctgtatgtacatagtttcatttatttatttattttctggtcatgccagcacaggtaagagttttcatttctaattctaagggatattcatgggaagtgttgggactgagatttatatctagatgtgtttatctagtgtcattgagaaaacagattattctggaaggtccatggcatttttgactttacccttataacaaaaaaatctcag

SEQ ID NO: 45717 - DNA, 600 bp, Chicken  19866894285972_1
tgctacactgggaaaaaaacaatcacttaatagcacatttgaaagttttttttttaaaaaaatcactatgaggaaagtaaataactaacacttcagcctggctcatcatcattcagcaaattagcaatgcagttcaaggactccagctcacattgctcctggttggtggcacaccgttggcctgccataaattctcagctaggtgaagtgccacaggctgtggagtcttagtctctgttcctgggacaaactctgagatattaggagactgccttgctatcatacagagaaatagatctkctttgacattctccttgagttgcgtttccatcttgtgccattctccattgtgtgatctccccagagctcattcaagcaaactgaagccttatgttctgacaaggcgactacaagctttacagatacaaacttaaactacagcagccttaaattcagagaaccgcttagtagaagattttacataattgttttcttacatgtgtcagatgagaccccaaaatcttggggagcactggctgtgaatgaggagttttcataacttcatctcttctgatgtatgaaagcattgggtacaagtga

SEQ ID NO: 45718 - DNA, 600 bp, Chicken  19866894285976_1
attagatttgattaactcatgattcctcttgcctaccctaagccattgtgctgtgttcttgtcatggttttatgatttttggttatcagtattccacatcacaacatcatgtagtgtattgggagttaaagagcaaatgctttagttccgggtacctgtctggaagagaagaagaactacggtccccaagagccttttcgagtactgctatcattcctgctcaagggaacaaatataagggcgcaggtcatctgactcggccctcttctcgtctcgccgtgttccctgtcggatcagctygctactgctgatcccgactgcacgcaaggcttcagtattagtgtaaggcctttggctcttggacaatctttctctcaattattgttgatttatattgtattatagtgtgttatcttacattccgatactatatttagtaaattagtttgtttctcctcagatcgttgccgctgtttttaattattttggggtcccctgtttcccttcctgaaggtgtggattttgcaaaatccctccaccccactagtcgcggaaccgggccagaccagcccttaaaccgttgacagttttacaccgcat

SEQ ID NO: 45719 - DNA, 600 bp, Chicken  19866894285989_1
agagggattttcaaatcctctcaggtttgcaaaatgtgatctcactctattcctttcatctcctgatactgaaagatggagcttgttctgttctggctggatgtgcttctatactccagcagcaaaccatgaaagggaatcaggtttaaaggaagaaaaaaacaataaagagtttggagtgttaacatttacttgggcttgtctggactttgtcagcactgaattccagcacgattgaccaggctgaacattgcacagaagagatgagcaacataacaagctttgtatacaaagaaaggstgccgggcagaggaagagatcacagtcctccgtatggcagtggcagacagggtaagaagttggagatatcaagggcagtgagggagagacgtaggctggctgggaaaaggcttcctgtagtcctccagcaccagcactggtttgggatatgctgcaggatagcagcatgaagaacaaggtgggcaaacaaggcagtggtgaagctgatccttccccagatgaagaaaatctggggtctcactgacacttaagtctggtttctagaaaaaaaaacatgcaaagaaaaaactgcacagctac

SEQ ID NO: 45720 - DNA, 600 bp, Chicken  19866894285989_2
agtggtgaagctgatccttccccagatgaagaaaatctggggtctcactgacacttaagtctggtttctagaaaaaaaaacatgcaaagaaaaaactgcacagctacagtaaaaggcagcagtttgcctaaacaattcctcctgaaccgcagcgaaagcacaattcatagcctgctttttcatttccatgaatcttaattgctcacataataatcgcagaagtatttaataatacaaagcatatgggccagatgttcaactggtgtaaatcaatagcaatggggaagctgcagcggtgcygcgccggcgcaacctgaagggctggagatgcctttttaaggtggctctcaggacttcagcaccttcttattgccgccactaaaagcaagctgcagtttattgcctgcatacaaatcgccacccgcgccaagtgcctggaatctcaaataaagcagctaaagctaaaaacagatggacttaaggtcacttaagatcacctctttggccatgccaaagctttaacgcggccacttaccttcatactcgatcataacctaacttgagaggggacagccagcagtccctgaccaggtgcccctc

SEQ ID NO: 45721 - DNA, 600 bp, Chicken  19866894285989_3
gtacttcacaaacgctaatggatctagtgagattcgccactaatctgcttctgcaacttggcaccaagctgctcacttctgatggtttctctttttacagttgtttttctttgctacctgtttcagagtcactccaggcctcattaattgttcatcccttgtccctagaaaattttccttttaatctttccagtaacatgtcggatactgatgtgaaatagactttaatttgcagcctttcacacttgcaaagatactatttgaaccgatcgtggcgttatcagttgcacatagatacaygtaattgaactgaaaagctttgcaagacatgtattcattggacttctgatctcatttgttagagtgcctcagggaatgggcaatttcacctcctcaaattatgaaaactggccatagttacttaaatggaataaaataaatcctggggcacgtgtcccccctggaaacatgggttggcaattgtgcccataagggaattaagctgctcagagacaggatggtatcaagtgaaaaatatatacagcaggaaggccaggtgaagttttttgtagaggttcccaggttaatatccatgcacta

SEQ ID NO: 45722 - DNA, 600 bp, Chicken  19866894285989_4
tctcgcagcttccaataaattacatggagactatgcaaatacaactgcctgctgtagttgaaaataacctacccttgtgctaattatatctagggccaagcagtgacctgctctacttccataactagattttcagctgccatcaacagctggatgttgaggagagctgcacgtgagcacagctgggctcttctggcagcacagagcaggagaaaggctactcatgacctgacccttgacatgctggtcctgaagctcatccacatagcaagaaacttacttgtaatttttccttttttyttttcccttgggtagaaattccaatatccgtaaataaaagtagttgtctctggacctatgcagactctttagcagggtcttttgtgatacaacgaggggaaatcgtttgaagataaaagaggagagatttagactgggtataaggaaaacattttttatgataagggtggtgaggaagtgacacaggttgctcaaaaaggtggtggttctccatccttggagacattcaaggtcaggctgggtagggttctgagcactgatggagctatgggtgtccctgtgtgctgcagggcattggac

SEQ ID NO: 45723 - DNA, 600 bp, Chicken  19866894285998_1
agtggactacacaaccaatttttagaagggtaaagttagggcagcaagaatccagctcacactacctagtgacctgattatggaccagcctcaaattgataaaatcctaacagtgatgagctacttattgccaccctcagatgaagacagtctgaggagagctcactcacacttcaggttttatctcatacttgctggtgtcagtttgcacactagtcctgaaatatatatcgtctatcagtcatggtgtatcctatccccatattcactgagaagctattcatttcagtggcagcaacrcattgttagtgtgtattgtaaaacagtgaattaacacaaatcaaaagagttacacttcccattcctacctcccaccaccttcaaaagagaaattatgatactcacagcctttttaagcttatgtctgagtcccatgagggcataaactgcaggctcttttcckaggttattcatgccagtccagagtaggtattgccaaaatgaagtgttaagtgctgcagcaaacataggcctaagcagcattacccaactactttgcttttggagcattgaaccaaactgtaggaatgtttgtctact

SEQ ID NO: 45724 - DNA, 600 bp, Chicken  19866894285998_2
cactcacacttcaggttttatctcatacttgctggtgtcagtttgcacactagtcctgaaatatatatcgtctatcagtcatggtgtatcctatccccatattcactgagaagctattcatttcagtggcagcaacrcattgttagtgtgtattgtaaaacagtgaattaacacaaatcaaaagagttacacttcccattcctacctcccaccaccttcaaaagagaaattatgatactcacagcctttttaagcttatgtctgagtcccatgagggcataaactgcaggctcttttcckaggttattcatgccagtccagagtaggtattgccaaaatgaagtgttaagtgctgcagcaaacataggcctaagcagcattacccaactactttgcttttggagcattgaaccaaactgtaggaatgtttgtctacttgagggtaaatkaaagccttgcctcccaagagaagagcatctcactctcatggattcttctattacatcaaatggtttctttcatccagtttgcatagaatgtggacagatggaaagaaaatagagatttttgtctttgtgatgtagcacagcctagaaactg

SEQ ID NO: 45725 - DNA, 600 bp, Chicken  19866894285998_3
gtattgtaaaacagtgaattaacacaaatcaaaagagttacacttcccattcctacctcccaccaccttcaaaagagaaattatgatactcacagcctttttaagcttatgtctgagtcccatgagggcataaactgcaggctcttttcckaggttattcatgccagtccagagtaggtattgccaaaatgaagtgttaagtgctgcagcaaacataggcctaagcagcattacccaactactttgcttttggagcattgaaccaaactgtaggaatgtttgtctacttgagggtaaatkaaagccttgcctcccaagagaagagcatctcactctcatggattcttctattacatcaaatggtttctttcatccagtttgcatagaatgtggacagatggaaagaaaatagagatttttgtctttgtgatgtagcacagcctagaaactggaactgggacacttttacttctagccaaccaaatactaaatgcttacartgtaatatgtgaagtaggacagttttagaatcttttggaaagagttcatgtctgtgaattcaaaattaagcctayactttggcctctrtctgccagagag

SEQ ID NO: 45726 - DNA, 600 bp, Chicken  19866894285998_4
gtgctgcagcaaacataggcctaagcagcattacccaactactttgcttttggagcattgaaccaaactgtaggaatgtttgtctacttgagggtaaatkaaagccttgcctcccaagagaagagcatctcactctcatggattcttctattacatcaaatggtttctttcatccagtttgcatagaatgtggacagatggaaagaaaatagagatttttgtctttgtgatgtagcacagcctagaaactggaactgggacacttttacttctagccaaccaaatactaaatgcttacartgtaatatgtgaagtaggacagttttagaatcttttggaaagagttcatgtctgtgaattcaaaattaagcctayactttggcctctrtctgccagagagaggtttcttttaaaatatacttctcaactatcctactgagtagcttgggtagctcttggcaggcagtattacacagatcccattcagggatgcctgtctccacagagactccatatgcctaacctaggactccaaattgctcagggaacaaaagacctgactatcactgtggtgcaagtgctatagcacctgatgtgttt

SEQ ID NO: 45727 - DNA, 600 bp, Chicken  19866894285998_5
atgtttgtctacttgagggtaaatkaaagccttgcctcccaagagaagagcatctcactctcatggattcttctattacatcaaatggtttctttcatccagtttgcatagaatgtggacagatggaaagaaaatagagatttttgtctttgtgatgtagcacagcctagaaactggaactgggacacttttacttctagccaaccaaatactaaatgcttacartgtaatatgtgaagtaggacagttttagaatcttttggaaagagttcatgtctgtgaattcaaaattaagcctayactttggcctctrtctgccagagagaggtttcttttaaaatatacttctcaactatcctactgagtagcttgggtagctcttggcaggcagtattacacagatcccattcagggatgcctgtctccacagagactccatatgcctaacctaggactccaaattgctcagggaacaaaagacctgactatcactgtggtgcaagtgctatagcacctgatgtgttttatgggtgtagtctctctgggtacaattattttgctgtgtgaaacccactaagctccaggggcaaaccacctcct

SEQ ID NO: 45728 - DNA, 600 bp, Chicken  19866894285998_6
tgagggtaaatkaaagccttgcctcccaagagaagagcatctcactctcatggattcttctattacatcaaatggtttctttcatccagtttgcatagaatgtggacagatggaaagaaaatagagatttttgtctttgtgatgtagcacagcctagaaactggaactgggacacttttacttctagccaaccaaatactaaatgcttacartgtaatatgtgaagtaggacagttttagaatcttttggaaagagttcatgtctgtgaattcaaaattaagcctayactttggcctctrtctgccagagagaggtttcttttaaaatatacttctcaactatcctactgagtagcttgggtagctcttggcaggcagtattacacagatcccattcagggatgcctgtctccacagagactccatatgcctaacctaggactccaaattgctcagggaacaaaagacctgactatcactgtggtgcaagtgctatagcacctgatgtgttttatgggtgtagtctctctgggtacaattattttgctgtgtgaaacccactaagctccaggggcaaaccacctcctccttgactgtttg

SEQ ID NO: 45729 - DNA, 600 bp, Chicken  19866894286000_1
agctaacaagcacagcctaacttcaaatacctcttggcttttcacatacatgcctaattaaatgatgaggatgaatttctttcaggttgtaataaaataaaattgtataaataattatctaaacaaagtagtcacacgtccagaataaattagcatcatattttctgattattaatgtaagttttgttaggagtgaatttataatattaaaatatttaattagtgaattcagagaggggttatttgtagcactaatgtcaacaaaagtacatctaacattcttagtgatcaaaagagccyactacagcactaacatctaacataattagggatcaaagtttactaggcaagcaagaccctgcttgyagaagatgtggtctctcagtctttatttctggcatttttttccttcaagtttctttcctaagtactttcttttcatctagaacactagaatgttggtaattaagtaagttttgtaaggaagcaaatgaactgcagcagyagattgttakttctgtgatggctgctgaacactgacttcacagtacacacactaattttaaaatgtttcccaagatgtataaaaggtccttctgg

SEQ ID NO: 45730 - DNA, 600 bp, Chicken  19866894286000_2
gaggatgaatttctttcaggttgtaataaaataaaattgtataaataattatctaaacaaagtagtcacacgtccagaataaattagcatcatattttctgattattaatgtaagttttgttaggagtgaatttataatattaaaatatttaattagtgaattcagagaggggttatttgtagcactaatgtcaacaaaagtacatctaacattcttagtgatcaaaagagccyactacagcactaacatctaacataattagggatcaaagtttactaggcaagcaagaccctgcttgyagaagatgtggtctctcagtctttatttctggcatttttttccttcaagtttctttcctaagtactttcttttcatctagaacactagaatgttggtaattaagtaagttttgtaaggaagcaaatgaactgcagcagyagattgttakttctgtgatggctgctgaacactgacttcacagtacacacactaattttaaaatgtttcccaagatgtataaaaggtccttctgggtaatttcagcagagctttggtatggtaggtctgccctataaccagaggttatacattcaccttgt

SEQ ID NO: 45731 - DNA, 600 bp, Chicken  19866894286000_3
attaaaatatttaattagtgaattcagagaggggttatttgtagcactaatgtcaacaaaagtacatctaacattcttagtgatcaaaagagccyactacagcactaacatctaacataattagggatcaaagtttactaggcaagcaagaccctgcttgyagaagatgtggtctctcagtctttatttctggcatttttttccttcaagtttctttcctaagtactttcttttcatctagaacactagaatgttggtaattaagtaagttttgtaaggaagcaaatgaactgcagcagyagattgttakttctgtgatggctgctgaacactgacttcacagtacacacactaattttaaaatgtttcccaagatgtataaaaggtccttctgggtaatttcagcagagctttggtatggtaggtctgccctataaccagaggttatacattcaccttgtcctatgccttttgatgactctcaagcaggacttagaataggactcttgacaagagatgatgaattagattaaatcaagtagatgaaagttaatgaggattttttgtgcaattttcttccaccagaatgtgccatacata

SEQ ID NO: 45732 - DNA, 600 bp, Chicken  19866894286000_4
ttaattagtgaattcagagaggggttatttgtagcactaatgtcaacaaaagtacatctaacattcttagtgatcaaaagagccyactacagcactaacatctaacataattagggatcaaagtttactaggcaagcaagaccctgcttgyagaagatgtggtctctcagtctttatttctggcatttttttccttcaagtttctttcctaagtactttcttttcatctagaacactagaatgttggtaattaagtaagttttgtaaggaagcaaatgaactgcagcagyagattgttakttctgtgatggctgctgaacactgacttcacagtacacacactaattttaaaatgtttcccaagatgtataaaaggtccttctgggtaatttcagcagagctttggtatggtaggtctgccctataaccagaggttatacattcaccttgtcctatgccttttgatgactctcaagcaggacttagaataggactcttgacaagagatgatgaattagattaaatcaagtagatgaaagttaatgaggattttttgtgcaattttcttccaccagaatgtgccatacatatttctgcagc

SEQ ID NO: 45733 - DNA, 600 bp, Chicken  19866894286010_1
atttctggacaggtaaacacagggagagaaaaagaggaaaggaaaaattgcaaggtgatgctattggcctcctgtattaaatgaggcaagaagccccacttgtctggtcttctgtgctttatctggcttgtgagctggctttgctgatgtgttggacagccacaaattcagagattttagttttaaagtatgattcacatacagcattgatttaattacagcagtgggagggcaggagatccttctaactcctcctcaggcaacttgggacagtttattacaaggctttcagacaatacragcttgtcttggcttccagaaatagactcactgacactgtgtgccttggcatttctctgtggggttatggaggagaacaattccacagggttattgtgtatgctattgagcatttttgcattgaacgtaaagtgagatgtggttgcaaggggaaatcagtgagggaaaaagaaatgggaattgaatgaacaatacaawttttttccattttcagtcaaaccaatgatgaaagcagcttcccacaagctgtactttaagcagagtctttwaaaaaaatcatgtatttggcattttggaata

SEQ ID NO: 45734 - DNA, 600 bp, Chicken  19866894286010_2
atacagcattgatttaattacagcagtgggagggcaggagatccttctaactcctcctcaggcaacttgggacagtttattacaaggctttcagacaatacragcttgtcttggcttccagaaatagactcactgacactgtgtgccttggcatttctctgtggggttatggaggagaacaattccacagggttattgtgtatgctattgagcatttttgcattgaacgtaaagtgagatgtggttgcaaggggaaatcagtgagggaaaaagaaatgggaattgaatgaacaatacaawttttttccattttcagtcaaaccaatgatgaaagcagcttcccacaagctgtactttaagcagagtctttwaaaaaaatcatgtatttggcattttggaatactctgaggactgaaagcttttcctgagtgatttccttaaagcagagatcatgtttgaattgcttttatatttgtgaacaaagagatcctttgttgttttcactaatagacatgtatttcataaataaatattttaaaatagaaattttttactctctaaagaaagggactactggctccatggaattcctggctcatg

SEQ ID NO: 45735 - DNA, 600 bp, Chicken  19866894286010_3
acagtttattacaaggctttcagacaatacragcttgtcttggcttccagaaatagactcactgacactgtgtgccttggcatttctctgtggggttatggaggagaacaattccacagggttattgtgtatgctattgagcatttttgcattgaacgtaaagtgagatgtggttgcaaggggaaatcagtgagggaaaaagaaatgggaattgaatgaacaatacaawttttttccattttcagtcaaaccaatgatgaaagcagcttcccacaagctgtactttaagcagagtctttwaaaaaaatcatgtatttggcattttggaatactctgaggactgaaagcttttcctgagtgatttccttaaagcagagatcatgtttgaattgcttttatatttgtgaacaaagagatcctttgttgttttcactaatagacatgtatttcataaataaatattttaaaatagaaattttttactctctaaagaaagggactactggctccatggaattcctggctcatggacagcccctgtagcttgtgcctggcatttcaagctgacagcatggtacmggatgtattttgtggaagcct

SEQ ID NO: 45736 - DNA, 600 bp, Chicken  19866894286010_4
gtactttaagcagagtctttwaaaaaaatcatgtatttggcattttggaatactctgaggactgaaagcttttcctgagtgatttccttaaagcagagatcatgtttgaattgcttttatatttgtgaacaaagagatcctttgttgttttcactaatagacatgtatttcataaataaatattttaaaatagaaattttttactctctaaagaaagggactactggctccatggaattcctggctcatggacagcccctgtagcttgtgcctggcatttcaagctgacagcatggtacmggatgtattttgtggaagccttagggtatttagggtcacaacatttccaggtgcttctgtccatagcaaaatgcagtcttccatctcttcaggtgatcacatgaatgttgggcttttgaaatttgtgttgcatagtaatttctagttcccatcagagcatgatttaatgtgtcagtcttgccgtaaacccatttgatttttaaactgattaatctctgcattcttattaagatctgtttctctcagactctaaattgtgcaactctaaagaatcagtgtgtaataaccatcagctaattt

SEQ ID NO: 45737 - DNA, 600 bp, Chicken  19866894286010_5
ccatttgatttttaaactgattaatctctgcattcttattaagatctgtttctctcagactctaaattgtgcaactctaaagaatcagtgtgtaataaccatcagctaattttgaaatgtgcatcttagatctggacacatttgctagtattggaaaagccatgtagcagggccagcccatgttctgcagctcagcacagagacaagcttgcaaaacacttgccagctgtgcacttaaaatgtgtaattgcaatacacttcatgtctcctgttaactttaattctttggagcatcctcaygatagcaagttaaacgtgggtttgatttgtgtttcttcgatttttatttttcgcaacagtgtaccttaattttaggaagtgcaaattaatacttataaaatagaatygtgtattatttatatactgttttacatatatccctttaaaatgaataattwaaaaagcctgcttgtagtgcagaaatcatgccagaagtatgttgctgttggaatcagtatttaaggaacacatttgtggtttcagctctgtatatcagtttaatgttggaaaaacttcattgaygttaacatctcagattct

SEQ ID NO: 45738 - DNA, 600 bp, Chicken  19866894286010_6
aattttgaaatgtgcatcttagatctggacacatttgctagtattggaaaagccatgtagcagggccagcccatgttctgcagctcagcacagagacaagcttgcaaaacacttgccagctgtgcacttaaaatgtgtaattgcaatacacttcatgtctcctgttaactttaattctttggagcatcctcaygatagcaagttaaacgtgggtttgatttgtgtttcttcgatttttatttttcgcaacagtgtaccttaattttaggaagtgcaaattaatacttataaaatagaatygtgtattatttatatactgttttacatatatccctttaaaatgaataattwaaaaagcctgcttgtagtgcagaaatcatgccagaagtatgttgctgttggaatcagtatttaaggaacacatttgtggtttcagctctgtatatcagtttaatgttggaaaaacttcattgaygttaacatctcagattctgactgaagccagctagaagttttggtggtgggtttttatgtgtgtgtgtttttcccccccccataacaaaatccaaagctttccatggtctgtctttccaagatagt

SEQ ID NO: 45739 - DNA, 600 bp, Chicken  19866894286010_7
gccatgtagcagggccagcccatgttctgcagctcagcacagagacaagcttgcaaaacacttgccagctgtgcacttaaaatgtgtaattgcaatacacttcatgtctcctgttaactttaattctttggagcatcctcaygatagcaagttaaacgtgggtttgatttgtgtttcttcgatttttatttttcgcaacagtgtaccttaattttaggaagtgcaaattaatacttataaaatagaatygtgtattatttatatactgttttacatatatccctttaaaatgaataattwaaaaagcctgcttgtagtgcagaaatcatgccagaagtatgttgctgttggaatcagtatttaaggaacacatttgtggtttcagctctgtatatcagtttaatgttggaaaaacttcattgaygttaacatctcagattctgactgaagccagctagaagttttggtggtgggtttttatgtgtgtgtgtttttcccccccccataacaaaatccaaagctttccatggtctgtctttccaagatagttgggcagactacctgagtgcttgggctctgaaaactcttttacagaacttc

SEQ ID NO: 45740 - DNA, 600 bp, Chicken  19866894286010_8
tctttggagcatcctcaygatagcaagttaaacgtgggtttgatttgtgtttcttcgatttttatttttcgcaacagtgtaccttaattttaggaagtgcaaattaatacttataaaatagaatygtgtattatttatatactgttttacatatatccctttaaaatgaataattwaaaaagcctgcttgtagtgcagaaatcatgccagaagtatgttgctgttggaatcagtatttaaggaacacatttgtggtttcagctctgtatatcagtttaatgttggaaaaacttcattgaygttaacatctcagattctgactgaagccagctagaagttttggtggtgggtttttatgtgtgtgtgtttttcccccccccataacaaaatccaaagctttccatggtctgtctttccaagatagttgggcagactacctgagtgcttgggctctgaaaactcttttacagaacttcaaaaattttgggtttcattccagcttagaataaaaccagcttatcaacatgctctgaatatttgcatggcctttctttcatacaactttcctccagaatagcttttaaatttacttccaagtca

SEQ ID NO: 45741 - DNA, 600 bp, Chicken  19866894286013_1
aagctggaatagagattaactatttgatcatacttacaccttttagaaaaagagaaaaaaacattccacatttcactattcaatgtcatctgccagtaatgctcatcttaccttctgaacactgaagcaattacttccttattgtcttcttgcaattaatattctatagcaagttctcatgcttctttttatgtccccttctagttgcatttcattttgtgctgttttattctgattttgattttaaatgttcttgccaccctcttatttttatcattgctaaatgagacctactttctktttttagatagtatctcaagatctcatgatttaaccaaattgctctcttaaagcatttcctatccttgcccttgagtgggatactgaattgcatctctttttgcttcattttggacagacagagctacggctatttttttgcaagaagagtggatcttaattcaatgctattcaacactcccccatctttttctgacccacctgtatgggagaagaaagaaagatgctgaaaatctgaactaatccaagtacaaactaactaaaaacatattattcaaaatacttattttcaaagagtcc

SEQ ID NO: 45742 - DNA, 600 bp, Chicken  19866894286014_1
cctgtttgtttctgtctactgctttgccctcggtatgtaaattatattttgtgtgtgctgtgtaatgttgtaacaatagctgtagtgggtcacactgaaagtatctgaatctggttgataaagcagcttctcttatcacttcagttttcttgagcatcccacaggggaatttaaatgcacgtgaatcaaatgcaaatagcagaaaatacacgtagtgcattctaagccattctgttgctattctgcagtaaaattactatttctgtcataagagtgagcttctatttgtggagattctaractccttatcatcttgtcatttactaatgacaagactaatgactacttagtaaacaagacaccatcagctttctttcatttggtagggaagtgcaactaaccaacttgttagtaattgagaacagaycaaatcttccagaagccaaatacatggagggcctagaaacactttgaaaagtaagaaaaatcacagcagagagccatggttttcttcccttggctgtcaactgtacatgaagtgttaagttcccatcgcagtaaatcagggagttgagaactataggaatgtatatgtgaaaa

SEQ ID NO: 45743 - DNA, 600 bp, Chicken  19866894286014_2
ttctcttatcacttcagttttcttgagcatcccacaggggaatttaaatgcacgtgaatcaaatgcaaatagcagaaaatacacgtagtgcattctaagccattctgttgctattctgcagtaaaattactatttctgtcataagagtgagcttctatttgtggagattctaractccttatcatcttgtcatttactaatgacaagactaatgactacttagtaaacaagacaccatcagctttctttcatttggtagggaagtgcaactaaccaacttgttagtaattgagaacagaycaaatcttccagaagccaaatacatggagggcctagaaacactttgaaaagtaagaaaaatcacagcagagagccatggttttcttcccttggctgtcaactgtacatgaagtgttaagttcccatcgcagtaaatcagggagttgagaactataggaatgtatatgtgaaaagatacaagagattgctctgtcacaacctctgtgatcagtttattgtgattttctatttcttttaatttcattcagaatagttggttagtgcaagttttaacattgttcagccaaaacagaggttact

SEQ ID NO: 45744 - DNA, 600 bp, Chicken  19866894286032_1
catcacagcacaagaaacactaggcaagatgaagggtcggaagagtcggaagaaaaggtttgcatatcatggatcacctatcttcaaatattaaatacttcaaatattcatatatatctcaaatctaccacagaggaaggacaaactcagtggcattataggtttcacatctactaccttttaaataccacagaaaagtcacatacgaccaatacaaataccccaaagcagctgagtttcacccacatacctgttgcttcttcgtcaaagcaagcaaaagcattcctgatgacatcttcmggatcagtgccattgagcttctcaccaaacattgtgaggaacattgtgaagttgatggggcctggagcctcgttcatcatggcatccaggtattcatctgttgggttcttccctacaaataaaaggattcctgctttagctttcaaactgaaaaaaataactacaaatcacctgagtagcataatacaaactggaacccctctcataagctatcccaaactcagcgttttaattacaatagcacaaatatgtttggcagctgtaaacagaagagggacattaccgagggaggcaagcatg

SEQ ID NO: 45745 - DNA, 600 bp, Chicken  19866894286041_1
ggtatctgccctcccagatgaaaccacatatttgaacaccattttaaatcttcagcagggagctatcatttcatcatttatgttagttacgaggcatataaatgaggttttttgctcttatccttccaaaatacagatctcagcatcacacttttttccccaaatgttcagatgaaaccagctgttttcagtttctcaagcatgcatagtacagagagccagcagaaaccagagagatttgttgtcttaagtatcgaaagaaggagcaacttactgcacagatgcctgtagtcaactttwtatcagaaagcataggcatattccactgaagaaaatcctgacttcccatagacyattggcttcatggagtattgcttcttcctgatttatttcccttgttgtgcaccttgtttcttttttttctttttctttttttccttgtattttattttttattttattaaaacgtgtttcctgactgtcttgcatttgtacaacagtaatttctctaacctcttcctttcacttgctaggctagcaaagctgcaacatcagttcctattattcttaatacaagccatctgctcttaatatctgtat

SEQ ID NO: 45746 - DNA, 585 bp, Chicken  19866894286041_2
gcagggagctatcatttcatcatttatgttagttacgaggcatataaatgaggttttttgctcttatccttccaaaatacagatctcagcatcacacttttttccccaaatgttcagatgaaaccagctgttttcagtttctcaagcatgcatagtacagagagccagcagaaaccagagagatttgttgtcttaagtatcgaaagaaggagcaacttactgcacagatgcctgtagtcaactttwtatcagaaagcataggcatattccactgaagaaaatcctgacttcccatagacyattggcttcatggagtattgcttcttcctgatttatttcccttgttgtgcaccttgtttcttttttttctttttctttttttccttgtattttattttttattttattaaaacgtgtttcctgactgtcttgcatttgtacaacagtaatttctctaacctcttcctttcacttgctaggctagcaaagctgcaacatcagttcctattattcttaatacaagccatctgctcttaatatctgtatcaaaattctatgatgtgcacttgaatcagacatcttgag

SEQ ID NO: 45747 - DNA, 599 bp, Chicken  19866894286044_1
  misc_feature (1)..(96): n is any nucleotide
nnnnnnnnnnnnnnnnnnnnnnnnnnnnnnnnnnnnnnnnnnnnnnnnnnnnnnnnnnnnnnnnnnnnnnnnnnnnnnnnnnnnnnnnnnnnnnnntagtgaggtgttccagaagttcatgttcatctccgagtttacaacaggaaagatccaaacatgtcagctcccggaaagatttaatttcttctagcttttcagagataagcaggtatctgtaaggagcaaaaaagctatcaccgttgaggagcacaacaagggccccatgttctcaaattcaagcacaatgcagttatttctgaygcgtctgtggaagttgacagaaattagccagctgttgtaactaccttttgaacactgcattctgcctacagtgcacctgagctcccagccttctccttcaactgmtatcacacgtgctttgacaaagtactaacacactaattgttaagacttcaacctgcaagcatcgttgttrggggcttatttacagatgattaccatatcatttcaggataacgtagattaccttaaatcaactacacaaactgctcttccttagcatccagaaagtgygtagacaaaccaacaggtataaaatc

SEQ ID NO: 45748 - DNA, 600 bp, Chicken  19866894286044_2
gttccagaagttcatgttcatctccgagtttacaacaggaaagatccaaacatgtcagctcccggaaagatttaatttcttctagcttttcagagataagcaggtatctgtaaggagcaaaaaagctatcaccgttgaggagcacaacaagggccccatgttctcaaattcaagcacaatgcagttatttctgaygcgtctgtggaagttgacagaaattagccagctgttgtaactaccttttgaacactgcattctgcctacagtgcacctgagctcccagccttctccttcaactgmtatcacacgtgctttgacaaagtactaacacactaattgttaagacttcaacctgcaagcatcgttgttrggggcttatttacagatgattaccatatcatttcaggataacgtagattaccttaaatcaactacacaaactgctcttccttagcatccagaaagtgygtagacaaaccaacaggtataaaatctgttccaaatgcatcagaatggctcaccaaatgacaaartgttactttcttcgtatataaagtacttcactagagaagtagagcagttcactagctggattccaac

SEQ ID NO: 45749 - DNA, 600 bp, Chicken  19866894286044_3
tttaatttcttctagcttttcagagataagcaggtatctgtaaggagcaaaaaagctatcaccgttgaggagcacaacaagggccccatgttctcaaattcaagcacaatgcagttatttctgaygcgtctgtggaagttgacagaaattagccagctgttgtaactaccttttgaacactgcattctgcctacagtgcacctgagctcccagccttctccttcaactgmtatcacacgtgctttgacaaagtactaacacactaattgttaagacttcaacctgcaagcatcgttgttrggggcttatttacagatgattaccatatcatttcaggataacgtagattaccttaaatcaactacacaaactgctcttccttagcatccagaaagtgygtagacaaaccaacaggtataaaatctgttccaaatgcatcagaatggctcaccaaatgacaaartgttactttcttcgtatataaagtacttcactagagaagtagagcagttcactagctggattccaacgtgacacccacagggctgactccaaccagagttgtggctacaccccaggcagcagttatacagtgggtta

SEQ ID NO: 45750 - DNA, 600 bp, Chicken  19866894286044_4
ttcaagcacaatgcagttatttctgaygcgtctgtggaagttgacagaaattagccagctgttgtaactaccttttgaacactgcattctgcctacagtgcacctgagctcccagccttctccttcaactgmtatcacacgtgctttgacaaagtactaacacactaattgttaagacttcaacctgcaagcatcgttgttrggggcttatttacagatgattaccatatcatttcaggataacgtagattaccttaaatcaactacacaaactgctcttccttagcatccagaaagtgygtagacaaaccaacaggtataaaatctgttccaaatgcatcagaatggctcaccaaatgacaaartgttactttcttcgtatataaagtacttcactagagaagtagagcagttcactagctggattccaacgtgacacccacagggctgactccaaccagagttgtggctacaccccaggcagcagttatacagtgggttatttttttttagctgtgttggttccctgatctgattcactccgcagccacgcaagcatctgtgctggaactgttcagcaggagatttagagctgggaat

SEQ ID NO: 45751 - DNA, 600 bp, Chicken  19866894286044_5
aactaccttttgaacactgcattctgcctacagtgcacctgagctcccagccttctccttcaactgmtatcacacgtgctttgacaaagtactaacacactaattgttaagacttcaacctgcaagcatcgttgttrggggcttatttacagatgattaccatatcatttcaggataacgtagattaccttaaatcaactacacaaactgctcttccttagcatccagaaagtgygtagacaaaccaacaggtataaaatctgttccaaatgcatcagaatggctcaccaaatgacaaartgttactttcttcgtatataaagtacttcactagagaagtagagcagttcactagctggattccaacgtgacacccacagggctgactccaaccagagttgtggctacaccccaggcagcagttatacagtgggttatttttttttagctgtgttggttccctgatctgattcactccgcagccacgcaagcatctgtgctggaactgttcagcaggagatttagagctgggaatgcactgaagaatggcatgcacgaatacacagtaatatcgcttaccccccatctccccctgcattt

SEQ ID NO: 45752 - DNA, 600 bp, Chicken  19866894286044_6
ctctacatcacctacagaactatcttctgctgagtcctgaacgtgaaatgagctaggaaatgaaacgggatagaaactcatggtgaataaacccagatggtctgcaagggtatgttttatctgtacagtcacataagaatggaatgcttataaacagccactacagaaatatcccatgaaatacctgaggtggcacttgaaaggaatggtacaaaaggaagcaagcagcgttaggcgaggcaaggctcagctgatcaaaattaggtggcactgtaaggccctggagattaaaaaccgttyaaagttgtggttgagagaaaataaaagagaacttggagcaygccagcaaaaagctcagcagatgctgtgtgactgaacgcacctacctgttccgcaagcacaaggagcacagcaccaagctgccgtatgcttcagtgaacttctgcagggctcgcagtcccgtaacgggttctgtgaatttctgcctygcttcggcggctgaaaagagcttttcagcgatctgctctgggaagccgaccagggagtcaatgtggtcaacgttgtcggagatgtatcccagcaccaagctgaagagggact

SEQ ID NO: 45753 - DNA, 600 bp, Chicken  19866894286044_7
cgtgaaatgagctaggaaatgaaacgggatagaaactcatggtgaataaacccagatggtctgcaagggtatgttttatctgtacagtcacataagaatggaatgcttataaacagccactacagaaatatcccatgaaatacctgaggtggcacttgaaaggaatggtacaaaaggaagcaagcagcgttaggcgaggcaaggctcagctgatcaaaattaggtggcactgtaaggccctggagattaaaaaccgttyaaagttgtggttgagagaaaataaaagagaacttggagcaygccagcaaaaagctcagcagatgctgtgtgactgaacgcacctacctgttccgcaagcacaaggagcacagcaccaagctgccgtatgcttcagtgaacttctgcagggctcgcagtcccgtaacgggttctgtgaatttctgcctygcttcggcggctgaaaagagcttttcagcgatctgctctgggaagccgaccagggagtcaatgtggtcaacgttgtcggagatgtatcccagcaccaagctgaagagggacttggccgagtagcggaggttgccctccttggtgtacgtgaag

SEQ ID NO: 45754 - DNA, 600 bp, Chicken  19866894286044_8
ggtggcacttgaaaggaatggtacaaaaggaagcaagcagcgttaggcgaggcaaggctcagctgatcaaaattaggtggcactgtaaggccctggagattaaaaaccgttyaaagttgtggttgagagaaaataaaagagaacttggagcaygccagcaaaaagctcagcagatgctgtgtgactgaacgcacctacctgttccgcaagcacaaggagcacagcaccaagctgccgtatgcttcagtgaacttctgcagggctcgcagtcccgtaacgggttctgtgaatttctgcctygcttcggcggctgaaaagagcttttcagcgatctgctctgggaagccgaccagggagtcaatgtggtcaacgttgtcggagatgtatcccagcaccaagctgaagagggacttggccgagtagcggaggttgccctccttggtgtacgtgaagatgaagtgatcggtcctcggcctcctcgccctgtcgtcctccccgttcagacagagctccacagagaaccccccggagaacagcctgagaggccgcgctctgcggggcgcgttctggacgccgcccgcacccgcgttcaccacgtgc

SEQ ID NO: 45755 - DNA, 600 bp, Chicken  19866894286050_1
aaaatatgttctccaggcaggagaaaaaaaataattggaagaactttcactaaaatgatagcatcttacctcagtatctagtttgactggctttagtgttttcagatttgcattatgcttctgtttcaaacaaaaaataataatttttaataaaaagaattgatagtcatttttgctagcatatgaaaagagatggctgtatacttaagactttgcaggagagttccagcagttcacacaaacttcttaacagaagctgagaacctgttctgatttggatgtccttttgaaatgggaagkgcagccagggcycgtacctccagacacagtcaggtttcaaggagaagaccacttccacaattctcaggcttgtgcctctcttctattttctcatgcagtaccatttttccccttaccctcaaaatcccaggtactagttactgctgaacagtcaattgagtacaaccgcactgattttcccaacaaacaccacactgctgtatcagtgacttaggagtagctgaaccttccaacctgagctggggtacatataaacgttggcatgacaacgtaactgatccttctgtgtcagtttgctga

SEQ ID NO: 45756 - DNA, 600 bp, Chicken  19866894286050_2
ccaggcaggagaaaaaaaataattggaagaactttcactaaaatgatagcatcttacctcagtatctagtttgactggctttagtgttttcagatttgcattatgcttctgtttcaaacaaaaaataataatttttaataaaaagaattgatagtcatttttgctagcatatgaaaagagatggctgtatacttaagactttgcaggagagttccagcagttcacacaaacttcttaacagaagctgagaacctgttctgatttggatgtccttttgaaatgggaagkgcagccagggcycgtacctccagacacagtcaggtttcaaggagaagaccacttccacaattctcaggcttgtgcctctcttctattttctcatgcagtaccatttttccccttaccctcaaaatcccaggtactagttactgctgaacagtcaattgagtacaaccgcactgattttcccaacaaacaccacactgctgtatcagtgacttaggagtagctgaaccttccaacctgagctggggtacatataaacgttggcatgacaacgtaactgatccttctgtgtcagtttgctgaagtagctggaaa

SEQ ID NO: 45757 - DNA, 600 bp, Chicken  19866894286052_1
tttcaatgcagctacttgcagctaaagtgtttcacacaaaacaccttccccttcacctgctcttatctttagaggcagcagactcaacactagagcttttccaccttgcatagctacttcaccatttccagtattttccaggtagaaagctgagaagaaaaaaaaaaaatactgttagtaattacatctttggttgtccccaaagaactcatctttatgagccttactggcagcagactcacgtaacctacgttaggacctgcataatcctgctcagtgtcttgtaattatagttgggcmttatgtcagcttctgcagaagtcttctagcaccagaagaaattctttatctaaccttagcagtgaagattttgcccttttaatasatacaggcagaagacaagccctttctcctctgcagagttccctcgctgtattccatattctaaaacaaagttttgtttcatgaatgccccacagaaataaccacattgtcacagtgttttttcaatgtaaatgtcacacaataggtaatacctgaaatctatgatggcacacaccttacttgctgacaaaaataagtcccaagtgtagagggaat

SEQ ID NO: 45758 - DNA, 600 bp, Chicken  19866894286052_2
aacactagagcttttccaccttgcatagctacttcaccatttccagtattttccaggtagaaagctgagaagaaaaaaaaaaaatactgttagtaattacatctttggttgtccccaaagaactcatctttatgagccttactggcagcagactcacgtaacctacgttaggacctgcataatcctgctcagtgtcttgtaattatagttgggcmttatgtcagcttctgcagaagtcttctagcaccagaagaaattctttatctaaccttagcagtgaagattttgcccttttaatasatacaggcagaagacaagccctttctcctctgcagagttccctcgctgtattccatattctaaaacaaagttttgtttcatgaatgccccacagaaataaccacattgtcacagtgttttttcaatgtaaatgtcacacaataggtaatacctgaaatctatgatggcacacaccttacttgctgacaaaaataagtcccaagtgtagagggaatcatctgaagacagttgagcagaagagatcttatccaaaagaaatcatttaaagaacattactgtccaaagtaatttccactacaa

SEQ ID NO: 45759 - DNA, 599 bp, Chicken  19866894286058_1
  misc_feature (1)..(221): n is any nucleotide
nnnnnnnnnnnnnnnnnnnnnnnnnnnnnnnnnnnnnnnnnnnnnnnnnnnnnnnnnnnnnnnnnnnnnnnnnnnnnnnnnnnnnnnnnnnnnnnnnnnnnnnnnnnnnnnnnnnnnnnnnnnnnnnnnnnnnnnnnnnnnnnnnnnnnnnnnnnnnnnnnnnnnnnnnnnnnnnnnnnnnnnnnnnnnnnnnnnnnnnnnnnnnnnnnnnnnnnnnnnnnctcgcctgtgctgcagagatttgggccccaaagccctgccctgggcacagctggcctgaggcacaagaggaactgcagrtgcagtaccasccccaaatgcagcaagctgccctaagagtcccttcacagaggcacccacgaggacttctcctcctgctgatacatgacaagattcacactgtgcacttgcatgacatgtcacacacccttgaactcacccrtgttgtgtttaacactggaagcagtccagcttcctcaggtccacgtgtcaccagaggtgatgagcttctctacctggttccttaccacagcaccacactcaagcctggcctcacaagcaacttcctcatgtccttccccattctttcagggctggac

SEQ ID NO: 45760 - DNA, 599 bp, Chicken  19866894286058_2
  misc_feature (1)..(210): n is any nucleotide
nnnnnnnnnnnnnnnnnnnnnnnnnnnnnnnnnnnnnnnnnnnnnnnnnnnnnnnnnnnnnnnnnnnnnnnnnnnnnnnnnnnnnnnnnnnnnnnnnnnnnnnnnnnnnnnnnnnnnnnnnnnnnnnnnnnnnnnnnnnnnnnnnnnnnnnnnnnnnnnnnnnnnnnnnnnnnnnnnnnnnnnnnnnnnnnnnnnnnnnnnnnnnnnnnnctcgcctgtgctgcagagatttgggccccaaagccctgccctgggcacagctggcctgaggcacaagaggaactgcagrtgcagtaccasccccaaatgcagcaagctgccctaagagtcccttcacagaggcacccacgaggacttctcctcctgctgatacatgacaagattcacactgtgcacttgcatgacatgtcacacacccttgaactcacccrtgttgtgtttaacactggaagcagtccagcttcctcaggtccacgtgtcaccagaggtgatgagcttctctacctggttccttaccacagcaccacactcaagcctggcctcacaagcaacttcctcatgtccttccccattctttcagggctggactgagtggacca

SEQ ID NO: 45761 - DNA, 599 bp, Chicken  19866894286058_3
  misc_feature (1)..(79): n is any nucleotide
nnnnnnnnnnnnnnnnnnnnnnnnnnnnnnnnnnnnnnnnnnnnnnnnnnnnnnnnnnnnnnnnnnnnnnnnnnnnnnnctcgcctgtgctgcagagatttgggccccaaagccctgccctgggcacagctggcctgaggcacaagaggaactgcagrtgcagtaccasccccaaatgcagcaagctgccctaagagtcccttcacagaggcacccacgaggacttctcctcctgctgatacatgacaagattcacactgtgcacttgcatgacatgtcacacacccttgaactcacccrtgttgtgtttaacactggaagcagtccagcttcctcaggtccacgtgtcaccagaggtgatgagcttctctacctggttccttaccacagcaccacactcaagcctggcctcacaagcaacttcctcatgtccttccccattctttcagggctggactgagtggaccaactgcatcccagttaggtctggccactaccagcctagcagactattttgccagaaagtgacaagtcagaagaaacaaaaaaaactgcagtcatataaatgaaatggcagaaacagaaccaggctgaaagct

SEQ ID NO: 45762 - DNA, 600 bp, Chicken  19866894286059_1
catccaaccttgctttgaacacctccagggatagagcatccacagcttcactgggcaacctgttgcagtgccactctctgagtaaaaaatttcttcctaacttctaacttaaaccacccctcttctagttttaagccattcccccttgtcctatcattatcaagacaagtaaaaagttggcttcagtcctgtttgtaagcacccttcaaatactggaaagccataatgaggtctccttggagccttctctaagctaagcaaatccaacttcatcaacatttcttcacaggagaggtgctygagctctttgacaatctttgtagccctyctctggacccacttcaacagctccacatccttcccgtgttgagggtcctgggcctggacacagaagtccagacgggtcctcagaagggaagagtagacgaggacaatcccytccttgtccctgctgccacccctttgttcatgcagcccaggatactgttggccttcccccctgcaacagcacactgctggctcaggtccaactttttgtctgtcatgacccccattttattctcctcaggacaactctctatgacttcttttcccagtcta

SEQ ID NO: 45763 - DNA, 600 bp, Chicken  19866894286059_2
ggatagagcatccacagcttcactgggcaacctgttgcagtgccactctctgagtaaaaaatttcttcctaacttctaacttaaaccacccctcttctagttttaagccattcccccttgtcctatcattatcaagacaagtaaaaagttggcttcagtcctgtttgtaagcacccttcaaatactggaaagccataatgaggtctccttggagccttctctaagctaagcaaatccaacttcatcaacatttcttcacaggagaggtgctygagctctttgacaatctttgtagccctyctctggacccacttcaacagctccacatccttcccgtgttgagggtcctgggcctggacacagaagtccagacgggtcctcagaagggaagagtagacgaggacaatcccytccttgtccctgctgccacccctttgttcatgcagcccaggatactgttggccttcccccctgcaacagcacactgctggctcaggtccaactttttgtctgtcatgacccccattttattctcctcaggacaactctctatgacttcttttcccagtctatacttacatcggggtttgccccaaccca

SEQ ID NO: 45764 - DNA, 547 bp, Chicken  19866894286059_3
tcccccttgtcctatcattatcaagacaagtaaaaagttggcttcagtcctgtttgtaagcacccttcaaatactggaaagccataatgaggtctccttggagccttctctaagctaagcaaatccaacttcatcaacatttcttcacaggagaggtgctygagctctttgacaatctttgtagccctyctctggacccacttcaacagctccacatccttcccgtgttgagggtcctgggcctggacacagaagtccagacgggtcctcagaagggaagagtagacgaggacaatcccytccttgtccctgctgccacccctttgttcatgcagcccaggatactgttggccttcccccctgcaacagcacactgctggctcaggtccaactttttgtctgtcatgacccccattttattctcctcaggacaactctctatgacttcttttcccagtctatacttacatcggggtttgccccaacccaagtgcaacaccttgcatttggccttgttgaacttcattagactctcaggtgcccaatt

SEQ ID NO: 45765 - DNA, 599 bp, Chicken  19866894286061_1
  misc_feature (1)..(107): n is any nucleotide
nnnnnnnnnnnnnnnnnnnnnnnnnnnnnnnnnnnnnnnnnnnnnnnnnnnnnnnnnnnnnnnnnnnnnnnnnnnnnnnnnnnnnnnnnnnnnnnnnnnnnnnnnnnagagatgtaatgtcctcgtttttgctggaactgaggacagcttccccttccagattttagaactgttaccatttggattacagaccacatgacgatcgtatattttaacacatttctgtgctggtattgggagggagattctttttaaaatcacagaaataattttcaccaacagtctcgtacatttcttacraaaactaatccgggagtcaagttcatgctaggagtgccccagtaaatatctgcttcagtgtaaggaggagataaggaggctgttgctttggacgtgtgtartgtggtgcttaggggatggcataaagttgatcgtggctgagacatgcagggamgatcccrgtgttggaatatgcagtttcctcccttgttttacctcctaacrtatatttgttgtcttttccagtacattcaccacagccctgggaactcaaagcgaggatttggcatagactgtgctattctgtcgtgtcaggttta

SEQ ID NO: 45766 - DNA, 599 bp, Chicken  19866894286061_2
  misc_feature (1)..(6): n is any nucleotide
nnnnnnagagatgtaatgtcctcgtttttgctggaactgaggacagcttccccttccagattttagaactgttaccatttggattacagaccacatgacgatcgtatattttaacacatttctgtgctggtattgggagggagattctttttaaaatcacagaaataattttcaccaacagtctcgtacatttcttacraaaactaatccgggagtcaagttcatgctaggagtgccccagtaaatatctgcttcagtgtaaggaggagataaggaggctgttgctttggacgtgtgtartgtggtgcttaggggatggcataaagttgatcgtggctgagacatgcagggamgatcccrgtgttggaatatgcagtttcctcccttgttttacctcctaacrtatatttgttgtcttttccagtacattcaccacagccctgggaactcaaagcgaggatttggcatagactgtgctattctgtcgtgtcaggtttacatctcccagatccttgtggcctctgcccttggtagtgtggtggatgcggttggcacagtcagagtcattcccatggtggcttcagtgggatctttcctgg

SEQ ID NO: 45767 - DNA, 600 bp, Chicken  19866894286061_3
ttccagattttagaactgttaccatttggattacagaccacatgacgatcgtatattttaacacatttctgtgctggtattgggagggagattctttttaaaatcacagaaataattttcaccaacagtctcgtacatttcttacraaaactaatccgggagtcaagttcatgctaggagtgccccagtaaatatctgcttcagtgtaaggaggagataaggaggctgttgctttggacgtgtgtartgtggtgcttaggggatggcataaagttgatcgtggctgagacatgcagggamgatcccrgtgttggaatatgcagtttcctcccttgttttacctcctaacrtatatttgttgtcttttccagtacattcaccacagccctgggaactcaaagcgaggatttggcatagactgtgctattctgtcgtgtcaggtttacatctcccagatccttgtggcctctgcccttggtagtgtggtggatgcggttggcacagtcagagtcattcccatggtggcttcagtgggatctttcctggggtttttgacagctaccttcttggtgatttatcccgaagtcaatgaagagccaa

SEQ ID NO: 45768 - DNA, 600 bp, Chicken  19866894286061_4
ttttagaactgttaccatttggattacagaccacatgacgatcgtatattttaacacatttctgtgctggtattgggagggagattctttttaaaatcacagaaataattttcaccaacagtctcgtacatttcttacraaaactaatccgggagtcaagttcatgctaggagtgccccagtaaatatctgcttcagtgtaaggaggagataaggaggctgttgctttggacgtgtgtartgtggtgcttaggggatggcataaagttgatcgtggctgagacatgcagggamgatcccrgtgttggaatatgcagtttcctcccttgttttacctcctaacrtatatttgttgtcttttccagtacattcaccacagccctgggaactcaaagcgaggatttggcatagactgtgctattctgtcgtgtcaggtttacatctcccagatccttgtggcctctgcccttggtagtgtggtggatgcggttggcacagtcagagtcattcccatggtggcttcagtgggatctttcctggggtttttgacagctaccttcttggtgatttatcccgaagtcaatgaagagccaaaggaaga

SEQ ID NO: 45769 - DNA, 600 bp, Chicken  19866894286061_5
gtatattttaacacatttctgtgctggtattgggagggagattctttttaaaatcacagaaataattttcaccaacagtctcgtacatttcttacraaaactaatccgggagtcaagttcatgctaggagtgccccagtaaatatctgcttcagtgtaaggaggagataaggaggctgttgctttggacgtgtgtartgtggtgcttaggggatggcataaagttgatcgtggctgagacatgcagggamgatcccrgtgttggaatatgcagtttcctcccttgttttacctcctaacrtatatttgttgtcttttccagtacattcaccacagccctgggaactcaaagcgaggatttggcatagactgtgctattctgtcgtgtcaggtttacatctcccagatccttgtggcctctgcccttggtagtgtggtggatgcggttggcacagtcagagtcattcccatggtggcttcagtgggatctttcctggggtttttgacagctaccttcttggtgatttatcccgaagtcaatgaagagccaaaggaagaacagaaaggactgggtcctccagagacaactgagggcaacagc

SEQ ID NO: 45770 - DNA, 600 bp, Chicken  19866894286061_6
gtgcaggatcaagaactcttcttttattttttttttcaggaaaacaaattaagatcttcactacttgtagctaaaattgcagaagaaaaggcagtttcatgcaaaaatgtaaatgaagttctgtagtccttaatataggtttgaacaggtagctatgatgctaattgctttctctacaacttagaaatgtcatttctgaacacttttttattaccaatacatttagatttcaaataagttttattaatctgcatgagactcacagtgtatacaattagcagttagaaaaattaagttttyggctgtttttaaactaactgaaaatggaagctatcttgacttacagtctcctgctgtttatttgtctgaacatttcccaatttcactagtgcagtagctgaatgaaatgcttagacaccgtgatcagttcttttcataagcatattattggtctgacagctacagttcttgaatgttaattttagacgtcacatttttgttagtgcaattgctggagaattgttctgttttcaagaaaaaaagcaattactgcagtttctgagaaactgctgtgaatccttttggtcatactgttcaaca

SEQ ID NO: 45771 - DNA, 600 bp, Chicken  19866894286064_1
ccatgcactgagctgtgcatggtctcagccatcagtgcaataccccaacaccatgcactgagttgtgcatggtctcagccatcagtgcaacgctcccagcaccatgcatgccctcagccatccatgcaataccccctgcaccatacacaactctgtgcacggtctcagccaccaatgaaatacccccttcgccatccatacacaaagctgcgcatgctcccagcaccactgcaatgctcccagcaccgtgcactgagttgtgcatggtctcggccatcattgcaacgctcccagcaccaygcatgccctcagcaccagagcaacgcccccagcacaatgcacagagctgtgcaaagcctcagccaccgaygcaatgctgcaggtgtcggcgctggcgagcgcaggcggcgcggagaacctcatcgtgctggagcgtgccaagcaccgtccccacgaggtgggctctgtgcgctgggctggcagcacctttggccccatgcagaagagccgtttgggcgagcacgaatttgaagccctgatgaggatgctggacaacctggtgagcgcactgcgggcgagcgggcgccgtccctccatccc

SEQ ID NO: 45772 - DNA, 600 bp, Chicken  19866894286064_2
ggtctcagccatcagtgcaacgctcccagcaccatgcatgccctcagccatccatgcaataccccctgcaccatacacaactctgtgcacggtctcagccaccaatgaaatacccccttcgccatccatacacaaagctgcgcatgctcccagcaccactgcaatgctcccagcaccgtgcactgagttgtgcatggtctcggccatcattgcaacgctcccagcaccaygcatgccctcagcaccagagcaacgcccccagcacaatgcacagagctgtgcaaagcctcagccaccgaygcaatgctgcaggtgtcggcgctggcgagcgcaggcggcgcggagaacctcatcgtgctggagcgtgccaagcaccgtccccacgaggtgggctctgtgcgctgggctggcagcacctttggccccatgcagaagagccgtttgggcgagcacgaatttgaagccctgatgaggatgctggacaacctggtgagcgcactgcgggcgagcgggcgccgtccctccatcccttcgacccaccctgagaaaacaacctgcagaactcaacaccgttccgctcctcagggctaccgcaccggc

SEQ ID NO: 45773 - DNA, 599 bp, Chicken  19866894286068_1
  misc_feature (1)..(36): n is any nucleotide
nnnnnnnnnnnnnnnnnnnnnnnnnnnnnnnnnnnntaagcttcttgttggtttacaaaaacatcagactcacatctggaattgtcttagagatcaagattttcaagcagccaatcgatttaggcacataagttccaatgaaaaagtacaaacccaattcttggaattgctgaagtatattagtacatcattaattccaagaactaggcagtatggaaaaaaaaggtgttcaagattaaacatatgcaagaaagtaaatttcttacagctatagtaaatttaaggaaatccatttttctygttatatttatagctgggagaaatagccagctagtttctcccataaacctctaaatcttcatgcttttatggaggaacatttagcagaagcacgtccctttctcctcatgggtttatagtagtwttgtttgtttgaagactgtttgacatttagatttatttcaatctactctttttaaagactgcaaaaagcaattctgtatattcagaacattagagatgaaatccttctccattgccagtggtggaatagctcttgctgagttggatgttggttctgctatttctccgctgtacat

SEQ ID NO: 45774 - DNA, 600 bp, Chicken  19866894286068_2
cacataagttccaatgaaaaagtacaaacccaattcttggaattgctgaagtatattagtacatcattaattccaagaactaggcagtatggaaaaaaaaggtgttcaagattaaacatatgcaagaaagtaaatttcttacagctatagtaaatttaaggaaatccatttttctygttatatttatagctgggagaaatagccagctagtttctcccataaacctctaaatcttcatgcttttatggaggaacatttagcagaagcacgtccctttctcctcatgggtttatagtagtwttgtttgtttgaagactgtttgacatttagatttatttcaatctactctttttaaagactgcaaaaagcaattctgtatattcagaacattagagatgaaatccttctccattgccagtggtggaatagctcttgctgagttggatgttggttctgctatttctccgctgtacatctcccaaatgggaagaaaaaaaatctggaggaacagagtatggaaaaagctctgccagtcatacgccctttagtactaagtggattctgttctttaaagggtagggtaggaataaataaaacaag

SEQ ID NO: 45775 - DNA, 600 bp, Chicken  19866894286075_1
ggccaacgcgtcacactgtccgcagagacggacaaatgtcactgcagtacagaatagtggagttttccccagtaatatacctctgtctcagagattctcctgctgtctctcggggaaaggagctgaacccagcacagctgctaattgcaggctgcagatcccacctgatccaaggagcacagtcaggtgcttcatttctgcaccctgacttaggagcagaggggctccccgaccatcacatgttggctgatatcccactctggggcgcccgcctctcctccgtgctgcattctgagtctrgacagctagcaaccgttctgatttccctacagagtgttaaagttgcgaaggaaaacagacttccatcacttccttagtttcagaatgccagactttgcagctttaatgttcttttaatgaagtttttaggtgtaatacaaccatacaatcattttaagcatgcggcaataaactgcaaagtaaatataattacagtagctctcacccaatgtaaagctttacgttttgctgytaattgaccaaaaggatttccaaatgcggaaaagaaaactttggcatcgatttttaataagacacagc

SEQ ID NO: 45776 - DNA, 600 bp, Chicken  19866894286075_2
ccatcacatgttggctgatatcccactctggggcgcccgcctctcctccgtgctgcattctgagtctrgacagctagcaaccgttctgatttccctacagagtgttaaagttgcgaaggaaaacagacttccatcacttccttagtttcagaatgccagactttgcagctttaatgttcttttaatgaagtttttaggtgtaatacaaccatacaatcattttaagcatgcggcaataaactgcaaagtaaatataattacagtagctctcacccaatgtaaagctttacgttttgctgytaattgaccaaaaggatttccaaatgcggaaaagaaaactttggcatcgatttttaataagacacagcaataagacactaaaatcttgagggatgaaagagcagattttggatcttacaatatgatgaagaagaagtgtacaactgctgatggcagctgctctctaactaaattctgagctaacgttaaaataacagaaaaggtctgggttaagccaaaaagaaaagccattatctccattcatttttttaataatcattgtgaaggaagacccgtggcatagaatcatagaatggcctg

SEQ ID NO: 45777 - DNA, 600 bp, Chicken  19866894286076_1
tttgtggccactaaggtagtggcttaatgaagtcttggtggagaaacaatgctgtcctgtagaattactccaggctttcgcagtggaccagagcaaaggctcctgtctgaacttctgggagaccagttggatttctatgaggcacagagacacagttgtgctcagccatccgccagcagtgcaagacgagcaagcagctggtgcgcagctctgctggggcttccaggcctgatgccagccctgcccgaggccgggtgtctgcagctgccaggctggggcaacctggggccgtccgcaccsatcccctcccacttgtttgtgaaaccagctcaggcctgcgtttatctaaagctctcccagcacagctccgtcaggagcacagatgtgacaaagctgaggaaagtactgtggtagatgtagttatcctttattaagtgctttctcacagtctcattttgcttcgctgcactggaattggcaaatgccagactaagtgttttgtaccaggttagaacaggagccacctgatggctttttgtcatcagtaagacagagaacctgaagcaagactgctgctaaagcagcgccaggggagcagcc

SEQ ID NO: 45778 - DNA, 600 bp, Chicken  19866894286083_1
cccttaagatgggagctaagccatcagccttacagaccatgggagacacaaatcaggcagggatgtctttatgtgataatgatagtctagaatcacactctatggggctttgcttctcccttagcatttctcatttttttgctaatattttaattttttaccttacaatatgatatttatttatattcttaatttatgtctagtgacctcataaataccgtatgctgtatttccttgggaattatgaaaggaggcatttgattatttttagggtttcatatactctgcacaggtttaggrttccccgggagtctacagtgaaccatagactcaacatcaggagatgaaggacatgtttccagctgccagccttgaggaaggagtgtaccttggtcagtgttggctcagtatgttaccagtcagtgaatgggggaggactagagacttgggctgttgaggaaaggtacggctgttttgcttcatttggtgatgtagagttgctagagtggtttttactgaaataagaccataggtaattcattaaatggaaataaagcaagcccctagtaatgttgtaaattatttgcatttgggaggtaa

SEQ ID NO: 45779 - DNA, 600 bp, Chicken  19866894286083_2
atgtagagttgctagagtggtttttactgaaataagaccataggtaattcattaaatggaaataaagcaagcccctagtaatgttgtaaattatttgcatttgggaggtaaaagtctgttattactataatgaaataaaatattgccagagattaagatctaagagttttgccatgcctctatgatgcattcagttgacaggaatgtaatgctgataaagtgggcctaaacaaaagaagtagagagactgtttctaatggagtgtaatgataggacaaggagtaataattttaaatttgraaaaaaaaaaaatagtagatttaagtaagataagcactagaaatttttcactcagtgaggccctggaacagattacccagacataacacctaattcctagatctgttcaaagccaggttggatgaagtttttaagtgacttggtattctggaatgttttcctacccatagcagggagttggaactgtatgatctttaatgtcctatccttactatatgattctatgattgtatggattatgaagaaaatgctatagtatatttgtaaattcttctgaattgtcctgagaaatatgagaat

SEQ ID NO: 45780 - DNA, 600 bp, Chicken  19866894286084_1
tatctgcactgtctccaaattttattgctaaaaatttgtatatactgctagaatagcagttacaatgctacagagcattaccttcatagaatcccttggaaacacaactattcagtgatgactgtcaaatgactagtacttttagtgatgtctgtcacatatacatatgtatagcattgaactttttaaaggaagtgtgcgtttgcattataaaattgatctaaagcattttagataaattgctgcatttcagcaatttgcagatgtaagaaatgtcatcctgtgtacttaaagaacagrtagatgggatgcatagttcagcagcaaatgttgtgtgaaacttttgcattctgcaataacatttcttttacccatgtggagaaaggtctatatttgttaatactgctagtattttagatgctaaaatatctgcattcacattattttcattactatttccttggttaatttttataaattctacatgatctgcttttgaaggattttattcttatgagtaattgaagaaatgaacaaatgtgtacaaatcttattataaataaatctgttctctgctgtaccttggaaattaatataata

SEQ ID NO: 45781 - DNA, 489 bp, Chicken  19866894286084_2
cagcagcaaatgttgtgtgaaacttttgcattctgcaataacatttcttttacccatgtggagaaaggtctatatttgttaatactgctagtattttagatgctaaaatatctgcattcacattattttcattactatttccttggttaatttttataaattctacatgatctgcttttgaaggattttattcttatgagtaattgaagaaatgaacaaatgtgtacaaatcttattataaataaatctgttctctgctgtaccttggaaattaatataatatatttttatacttcaatrttacttttcttgttttctcttctaatgatgggaataatgacacatgatgaacttcttatagcatcttgaatatttcacatgagaaatgataaaagccatctcctgagagtgacatctgagaatatcaatactcagaataattcaggttgaagggaggaggggaacaaggagagaagagagggtaaaagg

SEQ ID NO: 45782 - DNA, 600 bp, Chicken  19866894286085_1
gtggaggttggtggccctgcctgtggtggggagttggagcttcatgatccttgaggtccctttcaacccaagccattctatgattctataattctatgattctatgatgtcccccactgaggatcccaaagaagaaaagctttaatttggatcatttattgggcaaaaggtttagatttgttttaaatggtgttgttatctttttatactgacttaaaagattaaaggagagaatcgagcatccatcctgcatggatacaggctatgaaataccagccatcttctggagcatgtcatcarcctgtgctaactgatcttccagaaaggtcccgaggctgggctttaaaattaagagaattagcacatttcccawgggagcttaatagctgcctaatatttcactcgmatttgacttccagccttcattcctttcatttgtatttttattttttgcccttttctcagtgtttttcctcctgcttggaccaatgggtccttctctgttcccagcgtcggtgcggggattcttggcagcgcggccgtggctctgccctgctttagctgaattaattcttgtggaacattccgccagttggacct

SEQ ID NO: 45783 - DNA, 600 bp, Chicken  19866894286085_2
cattctatgattctataattctatgattctatgatgtcccccactgaggatcccaaagaagaaaagctttaatttggatcatttattgggcaaaaggtttagatttgttttaaatggtgttgttatctttttatactgacttaaaagattaaaggagagaatcgagcatccatcctgcatggatacaggctatgaaataccagccatcttctggagcatgtcatcarcctgtgctaactgatcttccagaaaggtcccgaggctgggctttaaaattaagagaattagcacatttcccawgggagcttaatagctgcctaatatttcactcgmatttgacttccagccttcattcctttcatttgtatttttattttttgcccttttctcagtgtttttcctcctgcttggaccaatgggtccttctctgttcccagcgtcggtgcggggattcttggcagcgcggccgtggctctgccctgctttagctgaattaattcttgtggaacattccgccagttggacctgctctggagtttccagagaagcttagcagagcgctgagtctgtacagcagtaataataataaactgagcagcc

SEQ ID NO: 45784 - DNA, 600 bp, Chicken  19866894286085_3
atgtcccccactgaggatcccaaagaagaaaagctttaatttggatcatttattgggcaaaaggtttagatttgttttaaatggtgttgttatctttttatactgacttaaaagattaaaggagagaatcgagcatccatcctgcatggatacaggctatgaaataccagccatcttctggagcatgtcatcarcctgtgctaactgatcttccagaaaggtcccgaggctgggctttaaaattaagagaattagcacatttcccawgggagcttaatagctgcctaatatttcactcgmatttgacttccagccttcattcctttcatttgtatttttattttttgcccttttctcagtgtttttcctcctgcttggaccaatgggtccttctctgttcccagcgtcggtgcggggattcttggcagcgcggccgtggctctgccctgctttagctgaattaattcttgtggaacattccgccagttggacctgctctggagtttccagagaagcttagcagagcgctgagtctgtacagcagtaataataataaactgagcagccataacctggcctttaagggccgaggggtaacgc

SEQ ID NO: 45785 - DNA, 600 bp, Chicken  19866894286088_1
cccagatgggctttcagggcagagcatcccttggccttgctagggcagcattcagctccagaatccagtttacaaactaaagataagccgttgcaaaatgaaattgatggcttctctccaaccagcacagaatgagaagggggtgggactgctacccccgaatggaatcacatgatgcagatccttctccttcatccctgtgttttatctcctctgcatgcagaaggtgatgtcagcacagccccactgctcagcagacattggctcagcacaaccaagtgctgagcagctgcttcacayggcacwgtttgccttccactgggttcatacagagtgctgtcacattggactcctgtgggcaccctgagctaatgagaagataaagaggacttaggaactgccaaccccattggaagaaatccactcccatttgaatcgtcattaccagagctctttgagaggaaaacaacacatgtggtgcaatgaatccagaggcacaggaagtctgcatggcagccgagctcacagctcatcctcagcctctgtcccaccatgcatacatcttcacatggagaagttacttctgtaactgctgagctc

SEQ ID NO: 45786 - DNA, 600 bp, Chicken  19866894286088_2
tgggctttcagggcagagcatcccttggccttgctagggcagcattcagctccagaatccagtttacaaactaaagataagccgttgcaaaatgaaattgatggcttctctccaaccagcacagaatgagaagggggtgggactgctacccccgaatggaatcacatgatgcagatccttctccttcatccctgtgttttatctcctctgcatgcagaaggtgatgtcagcacagccccactgctcagcagacattggctcagcacaaccaagtgctgagcagctgcttcacayggcacwgtttgccttccactgggttcatacagagtgctgtcacattggactcctgtgggcaccctgagctaatgagaagataaagaggacttaggaactgccaaccccattggaagaaatccactcccatttgaatcgtcattaccagagctctttgagaggaaaacaacacatgtggtgcaatgaatccagaggcacaggaagtctgcatggcagccgagctcacagctcatcctcagcctctgtcccaccatgcatacatcttcacatggagaagttacttctgtaactgctgagctcgtttcc

SEQ ID NO: 45787 - DNA, 600 bp, Chicken  19866894286088_3
taactgctgagctcgtttcctcaggtgttcgtggccacggctcactaaattgtttaattaaagaaaatcaaagctagcaattcgaggaatggagacctaagcaagcagtgatgatgcacgctgaccggccactgctggcccgctgcatggagctgtgccctgggacagcagaggctgcatagctccatgcagacccagctcgtacggaacaaggcatctgtgcagtgagctgggcaacggatggcacagaaacagccctcatcatctcacatttcccagcacgtggctggcaaccagatyccaaagctcagacgctggaggcttagtcagaaacaagtgttttcaaacacatccccaaatcccattatctcatcgggtctgggaggcagcgttggatgctaaggcctgggaacaccgcctgctgaagcctatgagaacagggcctaacatgggaaaaggagtggatgcgtcagaagagctgtgtggctgagcagggaactcatggcggagctgccatgcaaacaagcagcatacaagagatggaagaagcagtggtccgtgagagaatgaagatcagaaacagaaacagaccacctggtg

SEQ ID NO: 45788 - DNA, 600 bp, Chicken  19866894286100_1
ctcgcatccaccgtctgatctccataaatgttcagcaagcatcagtgaatgtcagtgggtgccatttttttcatgtggaggagttcagtaacaaacctttgcttcgtacgcactttcatgtcaggctccgtttgaaggagaaggttcaacctccactgcaccgccaccaacatctgccgcatccatgggctagcataataaaataggatgcattacttttggagcatgccttgtattttgtgagctttcctccttttaaaaggcaaacaaattttagttattaaggagaatgagtactckwagcactgtaaaagatctcctggttcagtgtcttctgctgtcttgggaggaatgttggacttctggatatgtgaagttayacaagatatgaatgaatgaatgttttgttcttttgcaagtgttacacttcagtttaaattacattmttccttccctccacattccaattgtgcttttaaagaacacattgaccttcttcttccttcactgaacaagctaagcttttttgtgtgtctgtttttgtgggagtggtctttcagtattaatgatcttttgatagtgtattttttcgttgccatt

SEQ ID NO: 45789 - DNA, 600 bp, Chicken  19866894286100_2
tcgcatccaccgtctgatctccataaatgttcagcaagcatcagtgaatgtcagtgggtgccatttttttcatgtggaggagttcagtaacaaacctttgcttcgtacgcactttcatgtcaggctccgtttgaaggagaaggttcaacctccactgcaccgccaccaacatctgccgcatccatgggctagcataataaaataggatgcattacttttggagcatgccttgtattttgtgagctttcctccttttaaaaggcaaacaaattttagttattaaggagaatgagtactckwagcactgtaaaagatctcctggttcagtgtcttctgctgtcttgggaggaatgttggacttctggatatgtgaagttayacaagatatgaatgaatgaatgttttgttcttttgcaagtgttacacttcagtttaaattacattmttccttccctccacattccaattgtgcttttaaagaacacattgaccttcttcttccttcactgaacaagctaagcttttttgtgtgtctgtttttgtgggagtggtctttcagtattaatgatcttttgatagtgtattttttcgttgccattt

SEQ ID NO: 45790 - DNA, 600 bp, Chicken  19866894286100_3
gagttcagtaacaaacctttgcttcgtacgcactttcatgtcaggctccgtttgaaggagaaggttcaacctccactgcaccgccaccaacatctgccgcatccatgggctagcataataaaataggatgcattacttttggagcatgccttgtattttgtgagctttcctccttttaaaaggcaaacaaattttagttattaaggagaatgagtactckwagcactgtaaaagatctcctggttcagtgtcttctgctgtcttgggaggaatgttggacttctggatatgtgaagttayacaagatatgaatgaatgaatgttttgttcttttgcaagtgttacacttcagtttaaattacattmttccttccctccacattccaattgtgcttttaaagaacacattgaccttcttcttccttcactgaacaagctaagcttttttgtgtgtctgtttttgtgggagtggtctttcagtattaatgatcttttgatagtgtattttttcgttgccatttcagtttgaacatagttaactgaaacctcaaggtacagatgatgtctgtgctcttggaattatcgtgttgatacttcttt

SEQ ID NO: 45791 - DNA, 600 bp, Chicken  19866894286100_4
caacctccactgcaccgccaccaacatctgccgcatccatgggctagcataataaaataggatgcattacttttggagcatgccttgtattttgtgagctttcctccttttaaaaggcaaacaaattttagttattaaggagaatgagtactckwagcactgtaaaagatctcctggttcagtgtcttctgctgtcttgggaggaatgttggacttctggatatgtgaagttayacaagatatgaatgaatgaatgttttgttcttttgcaagtgttacacttcagtttaaattacattmttccttccctccacattccaattgtgcttttaaagaacacattgaccttcttcttccttcactgaacaagctaagcttttttgtgtgtctgtttttgtgggagtggtctttcagtattaatgatcttttgatagtgtattttttcgttgccatttcagtttgaacatagttaactgaaacctcaaggtacagatgatgtctgtgctcttggaattatcgtgttgatacttcttttctgcttttggaaattgatttcatggcatatccttgaattgtgtttcttttcttcatagatgtctt

SEQ ID NO: 45792 - DNA, 599 bp, Chicken  19866894286103_1
  misc_feature (1)..(10): n is any nucleotide
nnnnnnnnnngttttgcaaatcttcaaggacggggaactccacaatctccttgggcaacctgtggcaatgcttgaccaccccacagttccgtgtcactagatatcagtgagcaggacctggctccatcatttttactccccccatcaggtatttatccatgttggtaggatccctgagccttctcctctccaggaggaaccatcccatctacctcagcccctccccagaggagagactgtattatagaatcatttgagttggaaaagaccttcaagatcatcaagctcaaccaccgaccygacctacctagttccatcactaaaccatgctctaagtccttcatcatttttgtggctcctcactggtcttgttccagtgtgtgtgtatgtctcccttgtactggtgagctcggcactccaagtgtctcaccaaggctgaacagtgaaggcagttcacctcccttgacctactagcaaggctctgcctagtgtgctccaggaaggcagtggtcttttcacaaggacactgtgctggcttcayggtcaacttgctgtccaacagaaaccctaggctcttttttgtgcaaagagaaacttca

SEQ ID NO: 45793 - DNA, 600 bp, Chicken  19866894286103_2
ttatagaatcatttgagttggaaaagaccttcaagatcatcaagctcaaccaccgaccygacctacctagttccatcactaaaccatgctctaagtccttcatcatttttgtggctcctcactggtcttgttccagtgtgtgtgtatgtctcccttgtactggtgagctcggcactccaagtgtctcaccaaggctgaacagtgaaggcagttcacctcccttgacctactagcaaggctctgcctagtgtgctccaggaaggcagtggtcttttcacaaggacactgtgctggcttcayggtcaacttgctgtccaacagaaaccctaggctcttttttgtgcaaagagaaacttcaatcttacttgaagaayaagcagatcaaatgatattagttcatctgtacagtcattactttcttttactgatcgaatcagaaaaaaagtccagcaactgcaaaacaaccacagacagatagcaagtyctggttttttatgctttttgtttgtttgtggcttttaaaaaatgtattattaaattttcaaatgtgaacagccaaaaatgcaatgctcaaaccttttaaaaacaaacaagcaaatt

SEQ ID NO: 45794 - DNA, 600 bp, Chicken  19866894286103_3
atcactaaaccatgctctaagtccttcatcatttttgtggctcctcactggtcttgttccagtgtgtgtgtatgtctcccttgtactggtgagctcggcactccaagtgtctcaccaaggctgaacagtgaaggcagttcacctcccttgacctactagcaaggctctgcctagtgtgctccaggaaggcagtggtcttttcacaaggacactgtgctggcttcayggtcaacttgctgtccaacagaaaccctaggctcttttttgtgcaaagagaaacttcaatcttacttgaagaayaagcagatcaaatgatattagttcatctgtacagtcattactttcttttactgatcgaatcagaaaaaaagtccagcaactgcaaaacaaccacagacagatagcaagtyctggttttttatgctttttgtttgtttgtggcttttaaaaaatgtattattaaattttcaaatgtgaacagccaaaaatgcaatgctcaaaccttttaaaaacaaacaagcaaattgccaggaaacaacagcagactgttcagagtaaaaatagtaataataataaaaatgaaatgcaagaaattaatca

SEQ ID NO: 45795 - DNA, 600 bp, Chicken  19866894286103_4
ctcaccaaggctgaacagtgaaggcagttcacctcccttgacctactagcaaggctctgcctagtgtgctccaggaaggcagtggtcttttcacaaggacactgtgctggcttcayggtcaacttgctgtccaacagaaaccctaggctcttttttgtgcaaagagaaacttcaatcttacttgaagaayaagcagatcaaatgatattagttcatctgtacagtcattactttcttttactgatcgaatcagaaaaaaagtccagcaactgcaaaacaaccacagacagatagcaagtyctggttttttatgctttttgtttgtttgtggcttttaaaaaatgtattattaaattttcaaatgtgaacagccaaaaatgcaatgctcaaaccttttaaaaacaaacaagcaaattgccaggaaacaacagcagactgttcagagtaaaaatagtaataataataaaaatgaaatgcaagaaattaatcagtgaatggatgtatttccccttcttactcttttgcaaatagttccataaggagacaggtgtgcagctgaacagacacacacataatgaaccattacttaacttttgttta

SEQ ID NO: 45796 - DNA, 600 bp, Chicken  19866894286108_1
ggaaactgtaatgcaaacaataaatcatttgtttttgtattataccggtaaaataatttttcagggagcaagatggacaaattttattctcaaggaaatgaaaattgttaaaaatacagaaagcatcagaatattgggtgaagtagtggtagcagaagcttgcgaacaactctttgcacaggtgctgatggacccttgctgcgtctgtaggtgggtgttcagactcctgaccgtttccctgccacctggtgttggtgctgtcagcgtggcacagctgcttggcgacctcaagtggcacayggcctgcagcagcacgtcaccccagccttcccctgctcccttcagtcccttcctggcattcctgctctgtgccccagctttgcatagctccccaactccatttgttttgcattccctcctccaggaacttcttgtcaaacctttttactgtggcatagctctgcctagttctgggctccccattttaagaaggacagggaacttcttgagagattccattggaaggccgcagagatgatgagggacctggagccatctccttcataagacgaggcagagagatgtggggctgttcagcct

SEQ ID NO: 45797 - DNA, 599 bp, Chicken  19866894286109_1
  misc_feature (1)..(12): n is any nucleotide
nnnnnnnnnnnnataggaggaaagaaagtaaattatgaaaagcaatcaactactgtgcagtatttccaagtactgagatgtctgcataccacatggctgaaagtgtctcctccatccatgaagaggttttcctgcttgggcacatgctctggcatattcagttaatgctcgacaccaagttgcattatcaactgctgaccttacaacaaacaaaagctgacatattatttcctccctactttcaaatatatagtcaatctcatgacttttccttcactgcctacaagcacagtttgagtwtwsattaatacagctttaatgtgttgcctgaagaggctaaaatccttaaatggatatgtcattctactatggttgaagacagaagatcaatatatttgagacctgacattgaagccagtgakacagcaataaaaagagatgtgaacagaggtcttggtttttacaagagaaacagtatccaatagaacactcagaagaagatatatgatttccagagagttgtcacagtgcaaaaagtggaaactgttttctgccctgcctgttaaacagtcaaagctgctttgagatgagatttttaa

SEQ ID NO: 45798 - DNA, 599 bp, Chicken  19866894286109_2
  misc_feature (1)..(10): n is any nucleotide
nnnnnnnnnnataggaggaaagaaagtaaattatgaaaagcaatcaactactgtgcagtatttccaagtactgagatgtctgcataccacatggctgaaagtgtctcctccatccatgaagaggttttcctgcttgggcacatgctctggcatattcagttaatgctcgacaccaagttgcattatcaactgctgaccttacaacaaacaaaagctgacatattatttcctccctactttcaaatatatagtcaatctcatgacttttccttcactgcctacaagcacagtttgagtwtwsattaatacagctttaatgtgttgcctgaagaggctaaaatccttaaatggatatgtcattctactatggttgaagacagaagatcaatatatttgagacctgacattgaagccagtgakacagcaataaaaagagatgtgaacagaggtcttggtttttacaagagaaacagtatccaatagaacactcagaagaagatatatgatttccagagagttgtcacagtgcaaaaagtggaaactgttttctgccctgcctgttaaacagtcaaagctgctttgagatgagatttttaaat

SEQ ID NO: 45799 - DNA, 599 bp, Chicken  19866894286109_3
  misc_feature (1)..(9): n is any nucleotide
nnnnnnnnnataggaggaaagaaagtaaattatgaaaagcaatcaactactgtgcagtatttccaagtactgagatgtctgcataccacatggctgaaagtgtctcctccatccatgaagaggttttcctgcttgggcacatgctctggcatattcagttaatgctcgacaccaagttgcattatcaactgctgaccttacaacaaacaaaagctgacatattatttcctccctactttcaaatatatagtcaatctcatgacttttccttcactgcctacaagcacagtttgagtwtwsattaatacagctttaatgtgttgcctgaagaggctaaaatccttaaatggatatgtcattctactatggttgaagacagaagatcaatatatttgagacctgacattgaagccagtgakacagcaataaaaagagatgtgaacagaggtcttggtttttacaagagaaacagtatccaatagaacactcagaagaagatatatgatttccagagagttgtcacagtgcaaaaagtggaaactgttttctgccctgcctgttaaacagtcaaagctgctttgagatgagatttttaaatg

SEQ ID NO: 45800 - DNA, 600 bp, Chicken  19866894286109_4
gaggttttcctgcttgggcacatgctctggcatattcagttaatgctcgacaccaagttgcattatcaactgctgaccttacaacaaacaaaagctgacatattatttcctccctactttcaaatatatagtcaatctcatgacttttccttcactgcctacaagcacagtttgagtwtwsattaatacagctttaatgtgttgcctgaagaggctaaaatccttaaatggatatgtcattctactatggttgaagacagaagatcaatatatttgagacctgacattgaagccagtgakacagcaataaaaagagatgtgaacagaggtcttggtttttacaagagaaacagtatccaatagaacactcagaagaagatatatgatttccagagagttgtcacagtgcaaaaagtggaaactgttttctgccctgcctgttaaacagtcaaagctgctttgagatgagatttttaaatgatagcataaactgaaatagcttgtgagcatgcaggtaattaatttaaccaaaacttgaaattaatgtttactgattatggatgcctgattgatctattcagttacctttcattaagattc

SEQ ID NO: 45801 - DNA, 600 bp, Chicken  19866894286119_1
aggcagcatcggaggtccgaaagtggagtctcagagagggaaggagtgtgtggatttgcttctgtgaattgcagaaaaccaagggcaaacgagaaggaggaggtggatcttctacatcagtgactacagcaagaatagatgttctttttctaagaacttcataaacactgccagcacccagaagtctatcaggatattttgcatttggagatgaaaagcaatttcatgcgagaaaacaaaagggatgtgtggaagggctgagctacgatgatatccctggatagtagtacataaaagaartgcttccattgtaatggtggtcttggttaaagaacctgaaacacactttttaagaagatcaacgtgatctaataagttcctgaatggaaaagaaaggaatctttaatctcaaccctctcttgcaaataacctgtcgtgtacaaagcaaatcagaatgtctggggctgtgtgaaatgacactgtcattttgaaaatctgacacagaatgggatttcattcctaccaattcaaagtgctgtgaaagatctatagttacacatagtgctagaatgcatttttgagtatttaaataccagatct

SEQ ID NO: 45802 - DNA, 600 bp, Chicken  19866894286120_1
ccagctgattaaatgccctacctattcaggaaggagaacaagatgtctacccagacatttgtcatcgtaccacttcatttcctcatactaagtcttcggcaattaagcactgagcaatcaaaccaggtattctgtgcaaaagacctggtcaaagcgttcttccatcatctttccaagagaggccaagaaaaagcaacttcttaaacagcagcagttacgaacgagagaacatcaatctcttaaagccaacggaaggatagatggtcctccctatgtaggtgctcgtgtttttcccacacygtgggtaaaaaggagtggagcacagtggggacagaactgcctctataaccagaaggctgcacagctcctctcgctgccctgtcaaggagctgcaagctttggcatatcagctgtcaaaaagtttcctaaattatatcctgcttaaactagaggaccagaacacaagaaaaaaaaacatttcttttgcacgtagaacacttagcactgcagccaagctaagtacttctggacagaattcactcccatcrgtattctgccattgtggctctgaagatggatgatttcttttcccccctccaa

SEQ ID NO: 45803 - DNA, 600 bp, Chicken  19866894286120_2
acggaaggatagatggtcctccctatgtaggtgctcgtgtttttcccacacygtgggtaaaaaggagtggagcacagtggggacagaactgcctctataaccagaaggctgcacagctcctctcgctgccctgtcaaggagctgcaagctttggcatatcagctgtcaaaaagtttcctaaattatatcctgcttaaactagaggaccagaacacaagaaaaaaaaacatttcttttgcacgtagaacacttagcactgcagccaagctaagtacttctggacagaattcactcccatcrgtattctgccattgtggctctgaagatggatgatttcttttcccccctccaaatgatgcctccacatcaaaggcaggttagcctccccacttaaatgtagcaacagaccgctcaggtaccgtcacacatagcagaaataaggacaagatcaattacaaccagtttagcaataaagcccatgtcacgtacacatacattaagagtaatgcaacaagcaaagaaaaatcagtcacgttgctcttgaaccaattcttatcaccttgaactacctgactgaccgattcggcaagcgtggcatat

SEQ ID NO: 45804 - DNA, 600 bp, Chicken  19866894286129_1
tgaaaaataaagttagaaacctgggctggtcttctggaggagtgctgtttggaggcacattattgtggtatggtaaaaaaaaaatagagccgagagtatattcagtgtgcaaatgttcatggacttctcacagatgttaaagagtcagctccagcactttcttcataatattccatattcagccaagttaattaaactcagggttgctctacaagtcttcacttctctgagaatgagagaacttggtcttggttaaatgtagtttcatgtgttactacttacagagggagttttagatasctgctctyggtaagattttgacaagaatgcaggacctttgtaatgcagtaattgcctggagtaaggaaattccataggaaaatgcttcattcatgtgagttcatatcagcacwactcaacgcaagcatctgtaagtccagaaaatgtctttgaaatcttcctgcattagtttgggcctcgcccatccaatgagtgcactgtcttaatgagatcaagaacaggaatctattgtaaagcgaatgagcgggactttaattatttacagtcacaagtctcccacagtgtttattccatgcacgt

SEQ ID NO: 45805 - DNA, 600 bp, Chicken  19866894286129_2
aaagttagaaacctgggctggtcttctggaggagtgctgtttggaggcacattattgtggtatggtaaaaaaaaaatagagccgagagtatattcagtgtgcaaatgttcatggacttctcacagatgttaaagagtcagctccagcactttcttcataatattccatattcagccaagttaattaaactcagggttgctctacaagtcttcacttctctgagaatgagagaacttggtcttggttaaatgtagtttcatgtgttactacttacagagggagttttagatasctgctctyggtaagattttgacaagaatgcaggacctttgtaatgcagtaattgcctggagtaaggaaattccataggaaaatgcttcattcatgtgagttcatatcagcacwactcaacgcaagcatctgtaagtccagaaaatgtctttgaaatcttcctgcattagtttgggcctcgcccatccaatgagtgcactgtcttaatgagatcaagaacaggaatctattgtaaagcgaatgagcgggactttaattatttacagtcacaagtctcccacagtgtttattccatgcacgttcatagta

SEQ ID NO: 45806 - DNA, 600 bp, Chicken  19866894286129_3
tgttcatggacttctcacagatgttaaagagtcagctccagcactttcttcataatattccatattcagccaagttaattaaactcagggttgctctacaagtcttcacttctctgagaatgagagaacttggtcttggttaaatgtagtttcatgtgttactacttacagagggagttttagatasctgctctyggtaagattttgacaagaatgcaggacctttgtaatgcagtaattgcctggagtaaggaaattccataggaaaatgcttcattcatgtgagttcatatcagcacwactcaacgcaagcatctgtaagtccagaaaatgtctttgaaatcttcctgcattagtttgggcctcgcccatccaatgagtgcactgtcttaatgagatcaagaacaggaatctattgtaaagcgaatgagcgggactttaattatttacagtcacaagtctcccacagtgtttattccatgcacgttcatagtattgagtctgcgttgtttcagatctctcctactgacgttgccccttctgtgctggtactactgatgtggatacagcagtgacttgtgcacttatgtccaccttcat

SEQ ID NO: 45807 - DNA, 491 bp, Chicken  19866894286137_1
  misc_feature (1)..(111): n is any nucleotide
nnnnnnnnnnnnnnnnnnnnnnnnnnnnnnnnnnnnnnnnnnnnnnnnnnnnnnnnnnnnnnnnnnnnnnnnnnnnnnnnnnnnnnnnnnnnnnnnnnnnnnnnnnnnnnntccgtttgagaagaagcccacagatgcttttctttctgcattttcaagggcttttcttgtgtgtgtgtgtgtgtgtttttcccccctttctgctattcagaagcagttgcatgagctgcactaacataacctgactcccaggtcctgatttgacccctcagcactcttccctgggatcctgccccatcrcagggcacagcattggcactcagaaggagggagctgggctctgggcagcagcaacaacaaaaatagctcatcagtcaggactcctggaagggtttcacctggggtaaaagcctttttttccaaaagaaaaagccacttacttcagccaacccaccagcctggccactcagctatggttttggctgggcagg

SEQ ID NO: 45808 - DNA, 600 bp, Chicken  19866894286141_1
taacatactaattctgaaagtacctcagaggaactgggtggtggcttattacaccagtcgtgctgtgagaagcaagcttgcaggaaactttctgtacacagcatcacccccagataccagcagctccggttctggaacaggaatgcatgcactttatgcgtgcacttgcaaaaggcagagtgggttaaaatgaccaacacaccatcacttagtacaagcatacctgcagaagcacagaaaatagagcaggaaatggatatgctgggggaaccagcatcaacggctcattcagcactgacrtgtgatgaaaataaccttaatgcagttgaaaaaacaccattctctgacttaaataatgtctaataagaccacactccatccccgagacacacatccacaaccacctatctgtccctcacatcttgcctactccaaggccaacaaaacttcctttgggtcccagtgcctcagtgtcatggcagctcctggttgaaggccagactcagtaaagaaagagctggaggggacagccggatgctaatgtctttcacaggctctctctgcttctgaaaggcctccttgtttttacaagtgctcaag

SEQ ID NO: 45809 - DNA, 600 bp, Chicken  19866894286148_1
aagaaatgcacataggaaaaaagtatttccaaaataaaatactccaatcaattcagttaattgaagaagacctcagagaaaggaacttgtacttttattctacttagcagctcgtggtatggtaaggaagtccaaatttatggttaaacttaatcatctttggaatttgttccgtaggcagaatgctaacattcgtaactgtttatttcctgtcttaatctttctgtaacttttcttacagctttttttccttgacaaaattacttttaaatacgtggctcagtgggtcatttccaccayatatctccttcagagattcattactgttcgaggctgatgcagtgtgctttcarctctgaaatttcttggcttacgtgtgcttactaacagtctgacattcataaacaattaactgtagatagtgcaaatgttgatgatactaggagtcaaaatgcttacctagtagatatttttgaagtaacatttttttatcaatatgctattgcaaattgcctcggctctgaggtgataatcacttatgttcctttagcttgtgaggcagtatgcaaaaggtagaattcaataaaaagcaatgaaaat

SEQ ID NO: 45810 - DNA, 600 bp, Chicken  19866894286148_2
cagttaattgaagaagacctcagagaaaggaacttgtacttttattctacttagcagctcgtggtatggtaaggaagtccaaatttatggttaaacttaatcatctttggaatttgttccgtaggcagaatgctaacattcgtaactgtttatttcctgtcttaatctttctgtaacttttcttacagctttttttccttgacaaaattacttttaaatacgtggctcagtgggtcatttccaccayatatctccttcagagattcattactgttcgaggctgatgcagtgtgctttcarctctgaaatttcttggcttacgtgtgcttactaacagtctgacattcataaacaattaactgtagatagtgcaaatgttgatgatactaggagtcaaaatgcttacctagtagatatttttgaagtaacatttttttatcaatatgctattgcaaattgcctcggctctgaggtgataatcacttatgttcctttagcttgtgaggcagtatgcaaaaggtagaattcaataaaaagcaatgaaaatttcttactgtgaagaagcaagcaattgtaatctgttcttagctcctgttttga

SEQ ID NO: 45811 - DNA, 600 bp, Chicken  19866894286151_1
gttcttaacacaagtacgtatcagggatctggcatgttgcacctcaaaaaagcaaggctgttgcagtcttctgaggattggaatgcagcaaagagaaggcggttgtctgattccattgtggatttagatggaaaaaaggaagctttgttagctggcatggttgaaaatgtgcctaaaggcaaacaggatagcacattacttgcctctttgcttcagtcattcagctctaggcttcagagtgttgctctgtcacagcagattagacagagccttaaggagcaaggctattcccttagccaygattctttacaggtggagaaagatttacggtgctacggtgttgcatccagtcacctgaagactctcttgaagaagagcaaagcaaaggatcagaagttggacaacagcctgcctgatataacaaagaacctgcccaaagagaggtttatagaatctcctcatgcagtgcaaagcggacctaaagtaataaatgaaccactgtcatgtgctgcaagattacaagctgtggcaagcatggtagagaaacgatctagtcctgctgcttcaccgaagcccagtgtagcatgcagccaactagct

SEQ ID NO: 45812 - DNA, 552 bp, Chicken  19866894286160_1
ggaaatcaaagtgcagctgagtactgcttaggatttacaaatgcttctaatggttcactgaaagtgacagtgaaatacaagcctgactttttatttgcaggcagctctcgagcgcagagtgatttaagctccagacattgctaaggagggaggaattagctgcagcatgcctggcagcacagtgcaggctggaacttggtctgggctaatgggcactgaggcaggtgtgcatggaatatcatacagtatataaacagctccagtgctgtttaatgaaaaaaacacaacaccgccaatcayggtacatgaatcagatatgagtcatggctcttaggctacttaaacccatacatctattatttttcacttctcaatgtaaatgcagctcttgtaacctgaggacatagttaaaatcaaagagatttattcatttcaggattgtaacttgtattagtgcatgattaggaatgcggtccaggattccaaattcatacagcacttctctgtgccttatgaagatccacatacaagggatggaatgcttcctcgatg

SEQ ID NO: 45813 - DNA, 599 bp, Chicken  19866894286162_1
  misc_feature (1)..(53): n is any nucleotide
nnnnnnnnnnnnnnnnnnnnnnnnnnnnnnnnnnnnnnnnnnnnnnnnnnnnncctttccttattgattgtcggaaataatttgcacagaaatgtgcagcactttaatgaaagagttcagaatcactttaatttgaacttctgtctggcctggttgcaggttttatagcattcagcatctttaaaaaaaagtaaaatatcaaagtatttgatttcatatcagaaaaaaaaaaaacaacccaaacccttcttgtggctgagcagaatgtgctgcagctccatgcagcgctgagttgacctragctgcttttccagcacagcagtggctgtgcattggagcagtggctgtgtggtcagggagcagcgcgtgctggcaaacctgtagcattgctacggtccgagaagagaaccaattccttacaaaaccaaaaccaattgaagatgctcggtaccgtgcagccatgccgttcacaaagtgagccttmcctgcctctccgcttgctgttccctcagtctgctgtctgctgctcgctgtctgcagccccacgtgtctgtgcagggccagaggccgctcccggtatggagcatatggtgtgcacc

SEQ ID NO: 45814 - DNA, 600 bp, Chicken  19866894286162_2
aaaaaagtaaaatatcaaagtatttgatttcatatcagaaaaaaaaaaaacaacccaaacccttcttgtggctgagcagaatgtgctgcagctccatgcagcgctgagttgacctragctgcttttccagcacagcagtggctgtgcattggagcagtggctgtgtggtcagggagcagcgcgtgctggcaaacctgtagcattgctacggtccgagaagagaaccaattccttacaaaaccaaaaccaattgaagatgctcggtaccgtgcagccatgccgttcacaaagtgagccttmcctgcctctccgcttgctgttccctcagtctgctgtctgctgctcgctgtctgcagccccacgtgtctgtgcagggccagaggccgctcccggtatggagcatatggtgtgcacccctgtgtgcatagacacctttgtaccgtgtgcatgcacatgtgtgtgtttgagtgctgtccccaacgccgctctgttgcacaccatsagtcccaaaggcatttcccacaagccatgttgcagctcctctgtttatggctggttccctccagatgggaggagcaaacagccccaaatccccactgt

SEQ ID NO: 45815 - DNA, 600 bp, Chicken  19866894286162_3
ttgctacggtccgagaagagaaccaattccttacaaaaccaaaaccaattgaagatgctcggtaccgtgcagccatgccgttcacaaagtgagccttmcctgcctctccgcttgctgttccctcagtctgctgtctgctgctcgctgtctgcagccccacgtgtctgtgcagggccagaggccgctcccggtatggagcatatggtgtgcacccctgtgtgcatagacacctttgtaccgtgtgcatgcacatgtgtgtgtttgagtgctgtccccaacgccgctctgttgcacaccatsagtcccaaaggcatttcccacaagccatgttgcagctcctctgtttatggctggttccctccagatgggaggagcaaacagccccaaatccccactgtcactgctgctcttgctgagttcactattgctcacagctggtgtgtatacagacacatgtgtgtatttggggtatttatacgcactggcatgcttttgctgtacaggtaataaaggtgggggaaggtttttgtgttttcttaataggtgaagaaatcttgaagaccagaaattccaacttacagaattttacattttaaaaat

SEQ ID NO: 45816 - DNA, 599 bp, Chicken  19866894286164_1
  misc_feature (1)..(109): n is any nucleotide
nnnnnnnnnnnnnnnnnnnnnnnnnnnnnnnnnnnnnnnnnnnnnnnnnnnnnnnnnnnnnnnnnnnnnnnnnnnnnnnnnnnnnnnnnnnnnnnnnnnnnnnnnnnnnttgtttccctgcttctacaaagaatgtatgcatctttatgtatgtttttccagcaaggaaactgccctagcacgtatccttcataggcctgagcaggtttgtaccaacagaaacctgtgccgggcaatcagttccttaacaaggcagtacagctcttgagaccactttgtcctttctttcccaatggattyccaaccttcttacccatctgaaggtaccatctgtctcttggaaggacarctcccatacccctctgctgcatttgggagacagttggctgttaagaataagccctgggtttttctcaccagtaggcacagcaaatttctttagtcctcrggaaaaamgctgaagaaattatccacctgagccggctgccagcagctggccctaggccatcagtttctcccccctgcctttctgcagagtctgtgatctttgtcgggggttgttcagccttcccccctcttcaacctatcacaagttgggg

SEQ ID NO: 45817 - DNA, 599 bp, Chicken  19866894286164_2
  misc_feature (1)..(60): n is any nucleotide
nnnnnnnnnnnnnnnnnnnnnnnnnnnnnnnnnnnnnnnnnnnnnnnnnnnnnnnnnnnnttgtttccctgcttctacaaagaatgtatgcatctttatgtatgtttttccagcaaggaaactgccctagcacgtatccttcataggcctgagcaggtttgtaccaacagaaacctgtgccgggcaatcagttccttaacaaggcagtacagctcttgagaccactttgtcctttctttcccaatggattyccaaccttcttacccatctgaaggtaccatctgtctcttggaaggacarctcccatacccctctgctgcatttgggagacagttggctgttaagaataagccctgggtttttctcaccagtaggcacagcaaatttctttagtcctcrggaaaaamgctgaagaaattatccacctgagccggctgccagcagctggccctaggccatcagtttctcccccctgcctttctgcagagtctgtgatctttgtcgggggttgttcagccttcccccctcttcaacctatcacaagttggggctttgggcagtatttggtctctggcaccaggatcttacccataggagca

SEQ ID NO: 45818 - DNA, 600 bp, Chicken  19866894286164_3
gtatgtttttccagcaaggaaactgccctagcacgtatccttcataggcctgagcaggtttgtaccaacagaaacctgtgccgggcaatcagttccttaacaaggcagtacagctcttgagaccactttgtcctttctttcccaatggattyccaaccttcttacccatctgaaggtaccatctgtctcttggaaggacarctcccatacccctctgctgcatttgggagacagttggctgttaagaataagccctgggtttttctcaccagtaggcacagcaaatttctttagtcctcrggaaaaamgctgaagaaattatccacctgagccggctgccagcagctggccctaggccatcagtttctcccccctgcctttctgcagagtctgtgatctttgtcgggggttgttcagccttcccccctcttcaacctatcacaagttggggctttgggcagtatttggtctctggcaccaggatcttacccataggagcagcatttctcaccacagagttagggctgaagctgttatgtgtatctcagtcycatgggaacaagcattgatttgcacagcatcatcctacccaccagcgtt

SEQ ID NO: 45819 - DNA, 600 bp, Chicken  19866894286164_4
ttccagcaaggaaactgccctagcacgtatccttcataggcctgagcaggtttgtaccaacagaaacctgtgccgggcaatcagttccttaacaaggcagtacagctcttgagaccactttgtcctttctttcccaatggattyccaaccttcttacccatctgaaggtaccatctgtctcttggaaggacarctcccatacccctctgctgcatttgggagacagttggctgttaagaataagccctgggtttttctcaccagtaggcacagcaaatttctttagtcctcrggaaaaamgctgaagaaattatccacctgagccggctgccagcagctggccctaggccatcagtttctcccccctgcctttctgcagagtctgtgatctttgtcgggggttgttcagccttcccccctcttcaacctatcacaagttggggctttgggcagtatttggtctctggcaccaggatcttacccataggagcagcatttctcaccacagagttagggctgaagctgttatgtgtatctcagtcycatgggaacaagcattgatttgcacagcatcatcctacccaccagcgttggaaagca

SEQ ID NO: 45820 - DNA, 600 bp, Chicken  19866894286164_5
gccctgggtttttctcaccagtaggcacagcaaatttctttagtcctcrggaaaaamgctgaagaaattatccacctgagccggctgccagcagctggccctaggccatcagtttctcccccctgcctttctgcagagtctgtgatctttgtcgggggttgttcagccttcccccctcttcaacctatcacaagttggggctttgggcagtatttggtctctggcaccaggatcttacccataggagcagcatttctcaccacagagttagggctgaagctgttatgtgtatctcagtcycatgggaacaagcattgatttgcacagcatcatcctacccaccagcgttggaaagcaatgctgcacatctctgccaaggtctgcccactatccgctgagacaacagagaaagctgagtacacaagtggcagaaaaagcttgttacagagccaaaatatgccttgcacgattttaatgatgaatgctaatgcttgcaagaggcaaagtggcttgtctgcaggctattcacaaactctcagtccccctcgactgttgtctctgtaatagtgcctcatttgtgatgggacttctgggtcacac

SEQ ID NO: 45821 - DNA, 600 bp, Chicken  19866894286165_1
aataaacaaatggacaaaacaaaaccttacaattggaccactgcccacacaggccatcagcatgcctataatttcagactttgttcatagatacctgccacaaccactacatagggtattattaggagatacaaaacttgcaacagatttttgtaactcattttgttaatgtgtacgtcacaagtgcaatctcaggcatatttcctatgcaggattttctgcttataggtcctctgcagttctgtttattttcccatcagctggacttgtttcccccaatctcttgaagctttatgactwaaattcctgtttcttaccacactcccctgcattctgatctgagtcctgctcttccttgggcaaatataagctacgtgctaccagagcacactggatgtctatggcactttatgaagcaagacaaccaaatggagaaaatgttttcaacacactaatctactgatatcatatataccctgaggtgtcttatggctctttgaatgcattcaatttcctttaattcttcttcttttttttttttttttaattggttgtggaagaaaggagtaaagctgttgatgtaaccatcttctaaaaaat

SEQ ID NO: 45822 - DNA, 599 bp, Chicken  19866894286167_1
  misc_feature (1)..(11): n is any nucleotide
nnnnnnnnnnngctgtcttcgttgagtttgcagatgcctagtgagagaattagttgctagatgacacttgacttactttcctatttgtcagaatttccacttgatatatttactgatgtctttgcactggcttccaagacttgtagctttcagcagcctttgcgtacagacctacagaagaattttgcaacaatatgggttagttcatctaggggtgagtgtctgagttgagttataaatgctgcttaaatagtggctgtggcagaagtattgcctagagggcagataatcacatggcakggattcaggatacatgcgtttctccaagcagtcttggttttgtattcatttgcagagcactggcagcctctgccccaatctggcagtttggtgatttggttccctgtggtgcttactttaccatagtgacgaatgatttcaagaagagtgggactggctgctcagaaagcatccggaattcctggaatgccattaaccacctttcctcaacaggtaagactttaccactagccttcaaatggctgtaatgtttaggattatcttatgacttyataaaattagtgtctttgaatcatgcc

SEQ ID NO: 45823 - DNA, 600 bp, Chicken  19866894286167_2
gcctagagggcagataatcacatggcakggattcaggatacatgcgtttctccaagcagtcttggttttgtattcatttgcagagcactggcagcctctgccccaatctggcagtttggtgatttggttccctgtggtgcttactttaccatagtgacgaatgatttcaagaagagtgggactggctgctcagaaagcatccggaattcctggaatgccattaaccacctttcctcaacaggtaagactttaccactagccttcaaatggctgtaatgtttaggattatcttatgacttyataaaattagtgtctttgaatcatgcctttaacctggaaatgtactgttgctggtagttagttttttcttttttaagctatattcttggatgtgttcagcactgtttttgtaagtgcctgttttgttgaagcacgtgctttattcacacatggcaggatttggaatccagagccaatcgtccaagatcagatgagctgacagtcttttttcttaaaaatgagtaaataaaacctggtaggatgagttagccaattgacatcaaagctgaactggagaaattctagaccagataaaataaa

SEQ ID NO: 45824 - DNA, 600 bp, Chicken  19866894286167_3
aaaagaaaatgatatcccatcaggtgctgtgtatttcttgcagattcagactcctatctctcctcttcgttgcaggaagtttgcaagttcttaaaggaccccagtctctctgacaaattgttgctgcagaatattttccaggcaataaacatctactacaattatacaggagaagcctcctgctttgacatgtctgagactgcaacaaagaatctgggccagttgggttggtactatcaggtgtgtgttctgtccccttaaaatcacaacttggtaagttttttgggggttaggggagaygggaattcatgttgctgttaagatattggaccagatataaattgaggaggctatgtaagcaccagcaaagaccctgcttgtttgtatattgctttaaaagaacctcattcttcaaaaacagggaaaatgaaagggattataacatttcatagacagtatcacgtttcaagctatatctcttttttctgtctggcttagaacttgaacactttcctatgcacattttttttttttatcacaaactctataaacttctgaagacaggtaaacaggaatggactgagttagataaattgccac

SEQ ID NO: 45825 - DNA, 600 bp, Chicken  19866894286179_1
gtatttggcaattaaaaaggcatttggagctagaagtttcaatggattacagttagagaaaatgagaattaatttggaaaaagtttgatgcactatgcctgaagtgtatgcttaatacaagttgcaaaattcatagttgaatgaagaagcataaatctcaaacacattagatccttcttgcaagttccttgactcattttttctttatgtactatttgcaatggcataaactcgatacttgtctgttttcaaaactaagtgcttgggtgtagagaacggggaaattagtctaaaacttgrtatttcagtggatttttacaaatgcatgtaaatactagttttaaggttctaatcattagatctgatttttaacactttcaggaggataggtatgtggatattctatgaaaactacattctgcagcacagattttgcttaagccactacttttcttttttaacttatcaaggtattcagctatcctgatctggctacaaaagctcatggcttctaaacgtctgagtagacttgtgcaagaatctgtttttattgaagcagcttggggggggcaagatgagatacagtgattacatggcttt

SEQ ID NO: 45826 - DNA, 599 bp, Chicken  19866894286180_1
  misc_feature (1)..(90): n is any nucleotide
nnnnnnnnnnnnnnnnnnnnnnnnnnnnnnnnnnnnnnnnnnnnnnnnnnnnnnnnnnnnnnnnnnnnnnnnnnnnnnnnnnnnnnnnnnatttgatgtaatatcattatgatttttaaatcaaaattaaaactcaagagaaaaattgtgtgaaacttctcatgaaagtttctcaaagtggggtatttctcaattctaatgcatgtcagttctttctgaattggaaggaacatctttcaggaggcacccgcatatagaagtattaatgtactacatctttttaattaaagtaattcttgkaactttgggctaggacatacctaaaaataaacactgtctacagatgccctcctcctcccacaggaaaacctcacacttgcctaacttttctatcagacagatgaaggaagatgcatgactgaatgtatcatatattttgaacacctttttgctcttgaaagaaattaaatgagtccttacccgttgagcttgccacatttgtttcttctcctccttctgcagaggctctcggtgttttcatagtgtttcccattgtgttctctaattccgtcaaagctcttcagaactaaataaaagra

SEQ ID NO: 45827 - DNA, 600 bp, Chicken  19866894286180_2
gkaactttgggctaggacatacctaaaaataaacactgtctacagatgccctcctcctcccacaggaaaacctcacacttgcctaacttttctatcagacagatgaaggaagatgcatgactgaatgtatcatatattttgaacacctttttgctcttgaaagaaattaaatgagtccttacccgttgagcttgccacatttgtttcttctcctccttctgcagaggctctcggtgttttcatagtgtttcccattgtgttctctaattccgtcaaagctcttcagaactaaataaaagraaacattgcatttaaactgcagaacacctgctgtgccaacacatgaaaaataacccagttttggtgtctccratgttatacagctttacttttgagaatgtgtctcaaattcatgtgagagttttacatatttgctaaactctcaccactctggtgcttttatcaggggaatagcagaaaaccacagctagggaagttgctcagaagaacataatgtagtaaaagtttccattaccagtacctcagcacaataggaagtcacagcaaagccatgcccgtacagacatytgtgtataaaaa

SEQ ID NO: 45828 - DNA, 600 bp, Chicken  19866894286180_3
tcacacttgcctaacttttctatcagacagatgaaggaagatgcatgactgaatgtatcatatattttgaacacctttttgctcttgaaagaaattaaatgagtccttacccgttgagcttgccacatttgtttcttctcctccttctgcagaggctctcggtgttttcatagtgtttcccattgtgttctctaattccgtcaaagctcttcagaactaaataaaagraaacattgcatttaaactgcagaacacctgctgtgccaacacatgaaaaataacccagttttggtgtctccratgttatacagctttacttttgagaatgtgtctcaaattcatgtgagagttttacatatttgctaaactctcaccactctggtgcttttatcaggggaatagcagaaaaccacagctagggaagttgctcagaagaacataatgtagtaaaagtttccattaccagtacctcagcacaataggaagtcacagcaaagccatgcccgtacagacatytgtgtataaaaatgttctttgcagcacttggagttcttaagctacagagaagttaattagattgacgtatctgttttcagcttc

SEQ ID NO: 45829 - DNA, 445 bp, Chicken  19866894286180_4
ctaaataaaagraaacattgcatttaaactgcagaacacctgctgtgccaacacatgaaaaataacccagttttggtgtctccratgttatacagctttacttttgagaatgtgtctcaaattcatgtgagagttttacatatttgctaaactctcaccactctggtgcttttatcaggggaatagcagaaaaccacagctagggaagttgctcagaagaacataatgtagtaaaagtttccattaccagtacctcagcacaataggaagtcacagcaaagccatgcccgtacagacatytgtgtataaaaatgttctttgcagcacttggagttcttaagctacagagaagttaattagattgacgtatctgttttcagcttctgtgtactgtgttgctttattgctgaacattaagaatgctgctcggggggttttcttctga

SEQ ID NO: 45830 - DNA, 599 bp, Chicken  19866894286187_1
  misc_feature (1)..(240): n is any nucleotide
nnnnnnnnnnnnnnnnnnnnnnnnnnnnnnnnnnnnnnnnnnnnnnnnnnnnnnnnnnnnnnnnnnnnnnnnnnnnnnnnnnnnnnnnnnnnnnnnnnnnnnnnnnnnnnnnnnnnnnnnnnnnnnnnnnnnnnnnnnnnnnnnnnnnnnnnnnnnnnnnnnnnnnnnnnnnnnnnnnnnnnnnnnnnnnnnnnnnnnnnnnnnnnnnnnnnnnnnnnnnnnnnnnnnnnnnnnnnnnnnagctgctcatcttagcaagaccttggttctttccatgggtcacagctcctctgccgtgcygggtaggagcaaaagagagaatggcaaagaacttactggcaaataaatgaatggcaacttccttctgatggatttattcaatactttgagatataaatatgttcttgatgaccagagaaattggccattctgcaytaggaagcttgattgatgttttcagccggcttttgtgaagggctgtgtaagtggatcttgataacctacagggaaaaatacagcgtggtgaagttcatttaatacatgagtactcaattatgtttgtgttggttttgtttgtgtttccacttaaggaagttttg

SEQ ID NO: 45831 - DNA, 599 bp, Chicken  19866894286187_2
  misc_feature (1)..(105): n is any nucleotide
nnnnnnnnnnnnnnnnnnnnnnnnnnnnnnnnnnnnnnnnnnnnnnnnnnnnnnnnnnnnnnnnnnnnnnnnnnnnnnnnnnnnnnnnnnnnnnnnnnnnnnnnnagctgctcatcttagcaagaccttggttctttccatgggtcacagctcctctgccgtgcygggtaggagcaaaagagagaatggcaaagaacttactggcaaataaatgaatggcaacttccttctgatggatttattcaatactttgagatataaatatgttcttgatgaccagagaaattggccattctgcaytaggaagcttgattgatgttttcagccggcttttgtgaagggctgtgtaagtggatcttgataacctacagggaaaaatacagcgtggtgaagttcatttaatacatgagtactcaattatgtttgtgttggttttgtttgtgtttccacttaaggaagttttgatcatacagatttataaccaataagttacttcatcccttaaactccctctgtgtgacattaatcacccccaaactaatgcaacttcagccatgtctgaattttaatcagtgtactgttgtgtttctggttgccat

SEQ ID NO: 45832 - DNA, 600 bp, Chicken  19866894286194_1
gatgctttgatttatcatagaatcatagaatcaccaaggttggaaaagacccacaggatcacccagtccaaccatccacccatcaccaatggttctcactaaaccatgtccctcaacacaacctccaaacgttccttgaacacctccagggtcagtgactccaccacctctctgggcagcccattccagtgcctgaccaccctttttataccagataaggagttggtctcagaggtttatataatcagttcccaaaggtttataatttgcagaaatatttttcctttacattcagagaakttaagtttatgaggtctgcttgaacaatacattatttactacaggttttatctaaattctattcrtaggtatataccttaatctgttgtatttttaactttcttcctctcatattatttgttttgtatctctatagatttaacatgattatccaaatagaaaatctttccaaatatgactcagcagaaacagcttttacaaagtggcaaaactctcaatatcgtggcacacatactggaaaatagaggtttaaactcaacccttgcctatggtgtatttcctcagctcccaggctattaa

SEQ ID NO: 45833 - DNA, 600 bp, Chicken  19866894286194_2
gtccaaccatccacccatcaccaatggttctcactaaaccatgtccctcaacacaacctccaaacgttccttgaacacctccagggtcagtgactccaccacctctctgggcagcccattccagtgcctgaccaccctttttataccagataaggagttggtctcagaggtttatataatcagttcccaaaggtttataatttgcagaaatatttttcctttacattcagagaakttaagtttatgaggtctgcttgaacaatacattatttactacaggttttatctaaattctattcrtaggtatataccttaatctgttgtatttttaactttcttcctctcatattatttgttttgtatctctatagatttaacatgattatccaaatagaaaatctttccaaatatgactcagcagaaacagcttttacaaagtggcaaaactctcaatatcgtggcacacatactggaaaatagaggtttaaactcaacccttgcctatggtgtatttcctcagctcccaggctattaactgaagcaattcatgtgggtctaacattgcagttgtcagatgttgtttccatttctgcttttgtt

SEQ ID NO: 45834 - DNA, 600 bp, Chicken  19866894286199_1
tgcggtaaaattaatgaaggaaaattatatgtttagaaacgtccctaacactggaaaatactgcacagcaaaaagatgggttttataaagactttgttcctaaaattatacgaatgcgtgcatgttatcctgctgcgttttttccctctctaaggcggtaaacatgagtaataacctcaagagctgtaaggggaacaagcagtttttccttgcaacagcagtatggtgggcagagtcagaaatcaaggagaatgtataatgatgatggtaatatatcacatatgcttgaggctggtgggrgccaatgggctggtgtgagcgctttggaagggaggaaactgtacttttacagcgtatccatttattagaataaaatggggacgacttcgagcattcctcctctttccttcaagacaaggctgttcatctgcaaagtttattttacactgaagtacaataacgcatggctgtttgatccttctgagctgtggttagcttcccccttttggcaggggccgaatttgctgcagtgtggatttgaagctctctctgaagtgcagctgaagggaaattagtctgcatcgctttcttcctttcttt

SEQ ID NO: 45835 - DNA, 600 bp, Chicken  19866894286200_1
ataaaatccaatccaagctacatgattttttgtttgtttgtttgtttgttcctcgtcttgctatacttaacttaaaaataataccttaaagcaggtctcttccaaaccctacaagtctgtgactgcacaatgctttgacacatctttctctgagttgtcagaatttaatacaactcaggctgctagacagagatcgtagctagtgccagaatcaaagtaagtttgcagtttgtgagggaaatctcactgcaaatgggactctgaagagtaaagttaaagttcaacagctttctaatcatmtgagtctttggtcattcctccaatyagagaaaattcctttggaactatcagcagcacagcacctctgcagctacttcaaggaaagagagaaaacyctgaatttgactttggaaacaaacaataagagattgccaacgtgagtcaagtatcttctaatattacagtatcaaccaatatcttaatgctgactgtgaacccttatactacacgcttgttgtgcagacaggattaaacagacaaaaagagaagtatcctagaaaaagcaacaagtctaaatacaccaactaaaatggtagtgaa

SEQ ID NO: 45836 - DNA, 600 bp, Chicken  19866894286200_2
ttttttgtttgtttgtttgtttgttcctcgtcttgctatacttaacttaaaaataataccttaaagcaggtctcttccaaaccctacaagtctgtgactgcacaatgctttgacacatctttctctgagttgtcagaatttaatacaactcaggctgctagacagagatcgtagctagtgccagaatcaaagtaagtttgcagtttgtgagggaaatctcactgcaaatgggactctgaagagtaaagttaaagttcaacagctttctaatcatmtgagtctttggtcattcctccaatyagagaaaattcctttggaactatcagcagcacagcacctctgcagctacttcaaggaaagagagaaaacyctgaatttgactttggaaacaaacaataagagattgccaacgtgagtcaagtatcttctaatattacagtatcaaccaatatcttaatgctgactgtgaacccttatactacacgcttgttgtgcagacaggattaaacagacaaaaagagaagtatcctagaaaaagcaacaagtctaaatacaccaactaaaatggtagtgaaggtagggctaggatggccggtctcc

SEQ ID NO: 45837 - DNA, 600 bp, Chicken  19866894286200_3
tctcttccaaaccctacaagtctgtgactgcacaatgctttgacacatctttctctgagttgtcagaatttaatacaactcaggctgctagacagagatcgtagctagtgccagaatcaaagtaagtttgcagtttgtgagggaaatctcactgcaaatgggactctgaagagtaaagttaaagttcaacagctttctaatcatmtgagtctttggtcattcctccaatyagagaaaattcctttggaactatcagcagcacagcacctctgcagctacttcaaggaaagagagaaaacyctgaatttgactttggaaacaaacaataagagattgccaacgtgagtcaagtatcttctaatattacagtatcaaccaatatcttaatgctgactgtgaacccttatactacacgcttgttgtgcagacaggattaaacagacaaaaagagaagtatcctagaaaaagcaacaagtctaaatacaccaactaaaatggtagtgaaggtagggctaggatggccggtctcctgattgtttggtctctggaccaaatacttcttagagaagagctgtgctaaattagccccaaatgagtaac

SEQ ID NO: 45838 - DNA, 600 bp, Chicken  19866894286211_1
attgcttggaagtcatgagtccaagccagaaccacacatggatgggcttcccctatgctcctaatccaatggtctgattagtcccaggcaatatctggctcccaccctcaatttttgtgggtcttaataacaacccagtccttgctggggagtggagggtagtttctcaaatcttgactggataaatctgggctgaaaaatgctttattttccttttttttcattgtatttttattttcttttcctgtggaaaatgttgagattttaccaaacaatgaaaatgtttggccaagagccctycatttcagttcagaaatgctccctcgtgggagttgtagctggtatgctttgtgtccccgtccttccctgtgagctgacattcctgccttgcccacatctctcatgatgcagcgtcgtccccccctcttgctgagacaatgccatgtgccatggaaatcgtatcaccatggtgttttgtgagaaacacagttcacgtggcaagtccaccctaagaactggatgggatcacaatgatcttcagtgacagcctgtaggagacactgtccgaagatttcccarttgaatccccagactggtcat

SEQ ID NO: 45839 - DNA, 600 bp, Chicken  19866894286211_2
aatgtttggccaagagccctycatttcagttcagaaatgctccctcgtgggagttgtagctggtatgctttgtgtccccgtccttccctgtgagctgacattcctgccttgcccacatctctcatgatgcagcgtcgtccccccctcttgctgagacaatgccatgtgccatggaaatcgtatcaccatggtgttttgtgagaaacacagttcacgtggcaagtccaccctaagaactggatgggatcacaatgatcttcagtgacagcctgtaggagacactgtccgaagatttcccarttgaatccccagactggtcataacttgacacaaagcaattctgcttttattgaaaggcaaattttccactgaaaaagattctaatggaaaatttcaagcagtccctgaggaagttctttccaaccccctttgcattgtagcttcccaatttaatcttgcttctgttggacttctctgttgtctctgcttaatctctgataacagagggagagctcccttccgaacaaacacgagaccaggagaagctgacatacattactaacaacatatggaaaagttcgtacctttctgagcaggcag

SEQ ID NO: 45840 - DNA, 600 bp, Chicken  19866894286214_1
gaaatggaagcttttagaggccatgcaaggaaaaagctaaaaaggtgctagatcttgctacatgaaatttgccgtgttcatcagcagcaaaagttcttgtgtcttcagatgtaataaatctgcaatttagggaagcagatttgagttgctttggctctgaatgttctcagctggagaataaagtactttactttcattttgcgcagaacatttgttttccacacactcagttcttcaaaaagaaaatcagttttgcctgaaaattgccataatctcatcagaggttgtccccatctatayttgtacacccacttcttgatacccyatcaagtaggcttctggaggactggagaagcaagtttaccaggcttttcatgtcccagcctccacagctctgccatatggactgtccwgaaactggggctttctggtttggctgcaaaatatgaagagagaagtatagatgataggaaaaaaacatgtttttcttatagaaacttcaaaatattaaacttcagaatattcttgtttgagaatccacccatttcatgggattctttaaaccacatggtatagaagtttagcttccttatacatagg

SEQ ID NO: 45841 - DNA, 600 bp, Chicken  19866894286214_2
caaggaaaaagctaaaaaggtgctagatcttgctacatgaaatttgccgtgttcatcagcagcaaaagttcttgtgtcttcagatgtaataaatctgcaatttagggaagcagatttgagttgctttggctctgaatgttctcagctggagaataaagtactttactttcattttgcgcagaacatttgttttccacacactcagttcttcaaaaagaaaatcagttttgcctgaaaattgccataatctcatcagaggttgtccccatctatayttgtacacccacttcttgatacccyatcaagtaggcttctggaggactggagaagcaagtttaccaggcttttcatgtcccagcctccacagctctgccatatggactgtccwgaaactggggctttctggtttggctgcaaaatatgaagagagaagtatagatgataggaaaaaaacatgtttttcttatagaaacttcaaaatattaaacttcagaatattcttgtttgagaatccacccatttcatgggattctttaaaccacatggtatagaagtttagcttccttatacatagggaataagcatttgtcattctggagc

SEQ ID NO: 45842 - DNA, 600 bp, Chicken  19866894286214_3
ataaatctgcaatttagggaagcagatttgagttgctttggctctgaatgttctcagctggagaataaagtactttactttcattttgcgcagaacatttgttttccacacactcagttcttcaaaaagaaaatcagttttgcctgaaaattgccataatctcatcagaggttgtccccatctatayttgtacacccacttcttgatacccyatcaagtaggcttctggaggactggagaagcaagtttaccaggcttttcatgtcccagcctccacagctctgccatatggactgtccwgaaactggggctttctggtttggctgcaaaatatgaagagagaagtatagatgataggaaaaaaacatgtttttcttatagaaacttcaaaatattaaacttcagaatattcttgtttgagaatccacccatttcatgggattctttaaaccacatggtatagaagtttagcttccttatacatagggaataagcatttgtcattctggagctttctgaatattaaaaatcttctacagtataattcctgttcctgagcttaacttcccagaggtagtagctctgagccatgaggcaaac

SEQ ID NO: 45843 - DNA, 592 bp, Chicken  19866894286219_1
  misc_feature (1)..(112): n is any nucleotide
nnnnnnnnnnnnnnnnnnnnnnnnnnnnnnnnnnnnnnnnnnnnnnnnnnnnnnnnnnnnnnnnnnnnnnnnnnnnnnnnnnnnnnnnnnnnnnnnnnnnnnnnnnnnnnnntgagacttcgcagtagtgtgtgcatatataattccagtttgggcctgacgtttctactacaactgtatactgtataatcatagcaaagtgactagtttctgatttgtgtcgatcaacctagtcttcatatggaatcagttttggaatttaaatagcacggtttagtggaggtttggcagcatatggarttgagttttgtttgaacgtattcaagtctgttttccagactgagggattgttttctttttgcagaatcctcagaggaggaaggttcagatgatgagatgattgcggataaagactcagatgtaagtggagttgaattgaatcttctcccagtcagttgtcacagaagttgtgttaatgtcaaagattcaaacattcctgttttgttcaaccctccaggaaaactgggatgaggatgaagaaaaagaggagcaatcagatgaacaagacatgactgttgaaaaggaaatgaat

SEQ ID NO: 45844 - DNA, 599 bp, Chicken  19866894286220_1
  misc_feature (1)..(103): n is any nucleotide
nnnnnnnnnnnnnnnnnnnnnnnnnnnnnnnnnnnnnnnnnnnnnnnnnnnnnnnnnnnnnnnnnnnnnnnnnnnnnnnnnnnnnnnnnnnnnnnnnnnnnnncagctaataaaactagacgtttttaaaatcagtagacctgaataatttgtacggaggtattttaatacatttggcagagaatctgtctgcacagctagtgaggatttttagtacatcttgaagaactagggaagttccagggaactatgcaaaaatttttgtcaatacttaaaaagaataaatgcaacgacttaaaygtctataggcatttcaacctcacattgatctcaaataaggaatggtttctgggagtaccagctcattttaatcaaagtggtsagaactgaaatttatggaaaattatcatgccaaggctaactagatgccatttaataagagtatgtatttggtaggagaaaggtaattttagcagtattaaaaacacagaagaatactggaaagacttttagctattaatcacaatattttgacttataaaaattattaaaatcagtattgaacctattaaatagattcaaatctgagtttcatgtat

SEQ ID NO: 45845 - DNA, 599 bp, Chicken  19866894286220_2
  misc_feature (1)..(21): n is any nucleotide
nnnnnnnnnnnnnnnnnnnnncagctaataaaactagacgtttttaaaatcagtagacctgaataatttgtacggaggtattttaatacatttggcagagaatctgtctgcacagctagtgaggatttttagtacatcttgaagaactagggaagttccagggaactatgcaaaaatttttgtcaatacttaaaaagaataaatgcaacgacttaaaygtctataggcatttcaacctcacattgatctcaaataaggaatggtttctgggagtaccagctcattttaatcaaagtggtsagaactgaaatttatggaaaattatcatgccaaggctaactagatgccatttaataagagtatgtatttggtaggagaaaggtaattttagcagtattaaaaacacagaagaatactggaaagacttttagctattaatcacaatattttgacttataaaaattattaaaatcagtattgaacctattaaatagattcaaatctgagtttcatgtatgtagtaagtgggcaataataatcagtggtgcttattttaagtgtcccacaagtctatggccctgttattttttycccatctt

SEQ ID NO: 45846 - DNA, 522 bp, Chicken  19866894286220_3
aaagtggtsagaactgaaatttatggaaaattatcatgccaaggctaactagatgccatttaataagagtatgtatttggtaggagaaaggtaattttagcagtattaaaaacacagaagaatactggaaagacttttagctattaatcacaatattttgacttataaaaattattaaaatcagtattgaacctattaaatagattcaaatctgagtttcatgtatgtagtaagtgggcaataataatcagtggtgcttattttaagtgtcccacaagtctatggccctgttattttttycccatctttgacctgtctatcratagtaagagaaaatattttgacagttttcagttgaaatgattggaacatcagtaaataaggagagagccactgtggaacryggattgctcaataaactggctaaagctaaacaaactgcaaatttcagtccagacatgtaaaacactgttctattaacaacttcaagtcactgctacaaagcagggagttgtcccacca

SEQ ID NO: 45847 - DNA, 500 bp, Chicken  19866894286220_4
atggaaaattatcatgccaaggctaactagatgccatttaataagagtatgtatttggtaggagaaaggtaattttagcagtattaaaaacacagaagaatactggaaagacttttagctattaatcacaatattttgacttataaaaattattaaaatcagtattgaacctattaaatagattcaaatctgagtttcatgtatgtagtaagtgggcaataataatcagtggtgcttattttaagtgtcccacaagtctatggccctgttattttttycccatctttgacctgtctatcratagtaagagaaaatattttgacagttttcagttgaaatgattggaacatcagtaaataaggagagagccactgtggaacryggattgctcaataaactggctaaagctaaacaaactgcaaatttcagtccagacatgtaaaacactgttctattaacaacttcaagtcactgctacaaagcagggagttgtcccacca

SEQ ID NO: 45848 - DNA, 419 bp, Chicken  19866894286220_5
tattaaaaacacagaagaatactggaaagacttttagctattaatcacaatattttgacttataaaaattattaaaatcagtattgaacctattaaatagattcaaatctgagtttcatgtatgtagtaagtgggcaataataatcagtggtgcttattttaagtgtcccacaagtctatggccctgttattttttycccatctttgacctgtctatcratagtaagagaaaatattttgacagttttcagttgaaatgattggaacatcagtaaataaggagagagccactgtggaacryggattgctcaataaactggctaaagctaaacaaactgcaaatttcagtccagacatgtaaaacactgttctattaacaacttcaagtcactgctacaaagcagggagttgtcccacca

SEQ ID NO: 45849 - DNA, 418 bp, Chicken  19866894286220_6
attaaaaacacagaagaatactggaaagacttttagctattaatcacaatattttgacttataaaaattattaaaatcagtattgaacctattaaatagattcaaatctgagtttcatgtatgtagtaagtgggcaataataatcagtggtgcttattttaagtgtcccacaagtctatggccctgttattttttycccatctttgacctgtctatcratagtaagagaaaatattttgacagttttcagttgaaatgattggaacatcagtaaataaggagagagccactgtggaacryggattgctcaataaactggctaaagctaaacaaactgcaaatttcagtccagacatgtaaaacactgttctattaacaacttcaagtcactgctacaaagcagggagttgtcccacca

SEQ ID NO: 45850 - DNA, 600 bp, Chicken  19866894286225_1
aaaaactgacaaagtatgcaataaattatagccagcttttaccacacaccaatattaaatcaaatctacaccattttccttgtactcaaattaaatatccattaaatatccaacactattccaaaaagaatgctcacctctttatccatgtttgcatattcacaaactctttcaattgaaaccgcattggtctcgatttcacatgctttacgcacccaaaaatttagactctgaattatctggagaagaaagttgcattgtagaatgtaacaattcaactatactagaacacagcttaaygattacaaaaattacccaaactgaataatttcacaagcacatggtaatggtataacatgtgaaaggaagaacatgactcatactgtgggtacattattacactacttcttagataaagtacactaacaccacacacataaaataatctataatggaggtaagcatcggatctgttgtgcctgccaaattcttcaaacgtggaatgcttctgcagacagcatcggtaccatttttgtggtaattgagtaagtaacaattctgtctctaattacaggggaaaaaagtgagcccaaagaggtt

SEQ ID NO: 45851 - DNA, 600 bp, Chicken  19866894286228_1
ctcctttgcccagtcatggtctgtctcagaattctcccctcttctccctctatattttgtgcacctgatccttcttcctccctttcttcttctctctctaactattttaccttcttcaagatgattagttcaggttggattatcctacttctttcttcacctgcacatatatctctatattttctgtgcatgcaatattgttaaaatgtgtgttgaaactgatatcatcatttcacacagattatggctaaagttaagacttttatatcaagaaattgttcaagcatcaaaacacgtgaraaaaatcttactgaagacattcgaaagtctggcaaatcatcacatcctactaattagatcaggacagagtaaacaaaacaaatacatcattttcatgtgtcacaaaataatgaaatgacacacatttgcacaactccgcaatgaaaagcaagagataaatctggaaacatcaacattaccctgccaatatggtaacttcaagcaagtgaacatcataaaacaagttgaacttacttgatgttgacactattagtacatccacaaattctacagcattacaatttcttttttccctagtta

SEQ ID NO: 45852 - DNA, 599 bp, Chicken  19866894286230_1
  misc_feature (1)..(139): n is any nucleotide
nnnnnnnnnnnnnnnnnnnnnnnnnnnnnnnnnnnnnnnnnnnnnnnnnnnnnnnnnnnnnnnnnnnnnnnnnnnnnnnnnnnnnnnnnnnnnnnnnnnnnnnnnnnnnnnnnnnnnnnnnnnnnnnnnnnnnnnnnnngttgtgctatttaacggggtttggagcaccattttctgtagttagaaaacaaagcaggtcaagaggcaatagattaaaatgagactcagcttcacagcgctttctcagccagcaggtcttcttcgcagctgtccttgtaacttcaggttactattggaagrtggtttgctttttaaaacctcagccctgtgaagacaaaacaaaaagaggctgaagcagattcaaacatgctgatgaaactttgcattctcacatgcaatcacgcatttaggagtgtcagtgggggtcacagcctgcgcatggctccattctgccagtataaagctgatccagctcaatacakcagctagagtaaaagaaggcaaaaataaataattttttgcaatttcaggatgagtttcatgggccactcattttkaaaagtgtgtatgtttgtgggaartgaggtacagagagagga

SEQ ID NO: 45853 - DNA, 600 bp, Chicken  19866894286230_2
agaaaacaaagcaggtcaagaggcaatagattaaaatgagactcagcttcacagcgctttctcagccagcaggtcttcttcgcagctgtccttgtaacttcaggttactattggaagrtggtttgctttttaaaacctcagccctgtgaagacaaaacaaaaagaggctgaagcagattcaaacatgctgatgaaactttgcattctcacatgcaatcacgcatttaggagtgtcagtgggggtcacagcctgcgcatggctccattctgccagtataaagctgatccagctcaatacakcagctagagtaaaagaaggcaaaaataaataattttttgcaatttcaggatgagtttcatgggccactcattttkaaaagtgtgtatgtttgtgggaartgaggtacagagagaggatgagtgtttttatagcagagtgcaacagagtgggattttgagaaacagaagatgtgatcccacagtggattgagcagaacagtttttacactcagaaagtgttggaaggatgaaccacaaggacgkacctttagtaagttgcaatgaacctctccccaggattaacagcttaaaggctagtgg

SEQ ID NO: 45854 - DNA, 600 bp, Chicken  19866894286230_3
ttcttcgcagctgtccttgtaacttcaggttactattggaagrtggtttgctttttaaaacctcagccctgtgaagacaaaacaaaaagaggctgaagcagattcaaacatgctgatgaaactttgcattctcacatgcaatcacgcatttaggagtgtcagtgggggtcacagcctgcgcatggctccattctgccagtataaagctgatccagctcaatacakcagctagagtaaaagaaggcaaaaataaataattttttgcaatttcaggatgagtttcatgggccactcattttkaaaagtgtgtatgtttgtgggaartgaggtacagagagaggatgagtgtttttatagcagagtgcaacagagtgggattttgagaaacagaagatgtgatcccacagtggattgagcagaacagtttttacactcagaaagtgttggaaggatgaaccacaaggacgkacctttagtaagttgcaatgaacctctccccaggattaacagcttaaaggctagtggcacacgtgctttttcctttgtgaatgaaatgcattatacttcaccatccaaaggagtcaactttaagggggatgt

SEQ ID NO: 45855 - DNA, 600 bp, Chicken  19866894286230_4
tcaggttactattggaagrtggtttgctttttaaaacctcagccctgtgaagacaaaacaaaaagaggctgaagcagattcaaacatgctgatgaaactttgcattctcacatgcaatcacgcatttaggagtgtcagtgggggtcacagcctgcgcatggctccattctgccagtataaagctgatccagctcaatacakcagctagagtaaaagaaggcaaaaataaataattttttgcaatttcaggatgagtttcatgggccactcattttkaaaagtgtgtatgtttgtgggaartgaggtacagagagaggatgagtgtttttatagcagagtgcaacagagtgggattttgagaaacagaagatgtgatcccacagtggattgagcagaacagtttttacactcagaaagtgttggaaggatgaaccacaaggacgkacctttagtaagttgcaatgaacctctccccaggattaacagcttaaaggctagtggcacacgtgctttttcctttgtgaatgaaatgcattatacttcaccatccaaaggagtcaactttaagggggatgtccacaatgggtcaaactgattttg

SEQ ID NO: 45856 - DNA, 600 bp, Chicken  19866894286230_5
tcacagcctgcgcatggctccattctgccagtataaagctgatccagctcaatacakcagctagagtaaaagaaggcaaaaataaataattttttgcaatttcaggatgagtttcatgggccactcattttkaaaagtgtgtatgtttgtgggaartgaggtacagagagaggatgagtgtttttatagcagagtgcaacagagtgggattttgagaaacagaagatgtgatcccacagtggattgagcagaacagtttttacactcagaaagtgttggaaggatgaaccacaaggacgkacctttagtaagttgcaatgaacctctccccaggattaacagcttaaaggctagtggcacacgtgctttttcctttgtgaatgaaatgcattatacttcaccatccaaaggagtcaactttaagggggatgtccacaatgggtcaaactgattttgtcatttttggaaagaactgtgaatgtgagaggtcaaagctctgaccagtcccttggagagcacgtttttctggagcataacatgtttctctgtgtggtacactagtacccatcccacatttttttccatggattctttattgtc

SEQ ID NO: 45857 - DNA, 599 bp, Chicken  19866894286236_1
  misc_feature (1)..(51): n is any nucleotide
nnnnnnnnnnnnnnnnnnnnnnnnnnnnnnnnnnnnnnnnnnnnnnnnnnncaaaaaaaaagggtcacaatcttaggaaaatacctgtaaggcagaagtctgtcctctccaagggaaagaaaatctccagactccttactttaattggtacagaactgttatcatcaaggcttgatatgtaagtaaaatggaattaagcaagaaaataaccactgaggacttaactgaagtttgggtgatagaaagctgcatcttctgaatacatgaaaacgcgaaggatgataccatgccagctacttwtaggcagactccctctttgatttcacttacacattttacttacagtaggcactataatggcttgtaataatttaactgcatttatttctggagcaaaatacagtgtcaccctccatgtcaccatacgcggaggaggaactcgtgaagctaatttaagctggaaagagagaagaaagaggaaaaaggcatgcttggttctcacagcctacagaattacctcaatgcaagctagagagatgagcattctctctgaaaatcacaagaaatcacaccatcggaagatgcaagtaaacaaagtg

SEQ ID NO: 45858 - DNA, 599 bp, Chicken  19866894286241_1
  misc_feature (1)..(27): n is any nucleotide
nnnnnnnnnnnnnnnnnnnnnnnnnnnatgctttgcttttgtgggtcagtgttgacaacacaattacagtgcttgcacagcatcaagactttcttaccagtagcataggaaataatttgggaggagaaaatagccaggacagcttactcaaaccaaggggatactctgtacagtgtgctcagcaataaaagctgaggaaaaggagtttgttgtcagctatatgcacttcctgcatcccaggaagtgactggacaagtactaggaaattagtttttgctttgctactgcacatggctttgrcttttcttactaaactgtattgatgtcaacacataagcttttccatcatatttcttccctgtcctgtcctgtcaaggagagagattggagggcagctggttggttgcctggcatccaaccaaggtcaacccaccacattttcattgattcatggatagaataaaatgggtgtgtgtaacaaaaaactaaatattaatcagcaagtatttcaattaataaataagaaaagaatcaaaattagtacatgtaaatggctgagaaagtctgggatgtaagttaagctacaaaacatgaaggta

SEQ ID NO: 45859 - DNA, 600 bp, Chicken  19866894286242_1
agatgctgccaaggaagaatatgtggaatacaagtgaatgcagtgctgatgagggtcccgaagtcccacaagaggttagaaagagcacaacttgcattgttttttttgtctctgcgggggttatgcaacacagctgggagaggatgacagcaggagaaacgaggggctcatggagagcttctctctgctgtagggtgttcttgattgcttgtgtggctgagtcctgtctggagggcagcaattgccagtatgagagtttgcatgtcactgtgtggtaattatttctactcctctcccccyttttcctaattgattattggttctccctgcaaaaagtgaaatagataaaggtggcatttgtcttcgtcttgtctgagaaattcccaatgggcaatgaaggcatttccactgtcggtggattttacactcctgctcaacaaactcttctgcaaatgagaaaaaaagctctatttgagcagttccactaacaagcttcttggctgctggctggattatggcaaagttaggctttgtctgatcttaattaatcccaggcagtgcttctctttctgccgttggccggtcaagagagacgggtgg

SEQ ID NO: 45860 - DNA, 600 bp, Chicken  19866894286242_2
ggattttacactcctgctcaacaaactcttctgcaaatgagaaaaaaagctctatttgagcagttccactaacaagcttcttggctgctggctggattatggcaaagttaggctttgtctgatcttaattaatcccaggcagtgcttctctttctgccgttggccggtcaagagagacgggtggatagccaatatgctctgactacatcatgcagtgcctgctgcacgaagatgttacctgtgctgtaaacctgtcatgttattctttggagaagggaattcttattttctaatccatayacttacacaaagcagtcactcctcttacatgcaaagcgcttaataatttcatctgcagccttcaagcataaaagcaggaaagttatcctattccttatccttatatgcttaactacttgtgagtgttgttggtatcaaatatgattactacgtggaagatagcacatttatctttctcttgaaataacgcaggaagaatgttggatgcaaaatgatttttgaagttttgaagcagcattgactgctgctttatactgtgtgcaacttcagacagcagcagcattactgggcgagtccctc

SEQ ID NO: 45861 - DNA, 394 bp, Chicken  19866894286243_1
agcaaattatacaaaatagaggtgagacctctggtagttgagtcttccttttattgtttccattgtatttgtgtctggaaaataaataagaatctgaattgacataaaataaatgacagttcaggttctataggttcatgtttatgacatgattggcgcacagccactgcagctatttcatagtctacaagatgtccttgatttgttcttccaccagtatgataacaagcacatataatctttgcatactctgctaacaggcttctagtctctgtctgattttatattcagcttttacaytgctctttgcagaactctctaagctctcttaaataatcagtatattggcatctatattggtctcatcttccagcctaagttagatgaacataaa

SEQ ID NO: 45862 - DNA, 599 bp, Chicken  19866894286254_1
  misc_feature (1)..(63): n is any nucleotide
nnnnnnnnnnnnnnnnnnnnnnnnnnnnnnnnnnnnnnnnnnnnnnnnnnnnnnnnnnnnnnncttagtttagttctgcttgattttttttttttttaaacaaattgagttgacttgtcttgatgactggataaccaaggaaactagcaacccaggatgcatactgttgatccttctgctttcagatttttcatttttactggccacaatgactaaaaaactgtggaactatgtctttttttttttaaatgcaataccgttttccagagggcgaaaagtttgcggttagctacgcccaarctatactctcaattttmcactccttcataactgattatttgcaattcacctgaatgttgtagtaagattgtcaactttaggaaaagtaagaatgtaaattaatcagtgcatgtgttcagttctctgtctgtgttttccttctgttttgaaatgtagattgtttaaagactgtatcacaaagcaccatagtacttacttcctatccatttctgctttggkagctagggggaacagatgaagagctactttagagatgattcctacttacctccaaaataggtcaggagaaatgggaacct

SEQ ID NO: 45863 - DNA, 599 bp, Chicken  19866894286254_2
  misc_feature (1)..(46): n is any nucleotide
nnnnnnnnnnnnnnnnnnnnnnnnnnnnnnnnnnnnnnnnnnnnnncttagtttagttctgcttgattttttttttttttaaacaaattgagttgacttgtcttgatgactggataaccaaggaaactagcaacccaggatgcatactgttgatccttctgctttcagatttttcatttttactggccacaatgactaaaaaactgtggaactatgtctttttttttttaaatgcaataccgttttccagagggcgaaaagtttgcggttagctacgcccaarctatactctcaattttmcactccttcataactgattatttgcaattcacctgaatgttgtagtaagattgtcaactttaggaaaagtaagaatgtaaattaatcagtgcatgtgttcagttctctgtctgtgttttccttctgttttgaaatgtagattgtttaaagactgtatcacaaagcaccatagtacttacttcctatccatttctgctttggkagctagggggaacagatgaagagctactttagagatgattcctacttacctccaaaataggtcaggagaaatgggaacctaatgtggttttaatgtt

SEQ ID NO: 45864 - DNA, 600 bp, Chicken  19866894286254_3
actgtggaactatgtctttttttttttaaatgcaataccgttttccagagggcgaaaagtttgcggttagctacgcccaarctatactctcaattttmcactccttcataactgattatttgcaattcacctgaatgttgtagtaagattgtcaactttaggaaaagtaagaatgtaaattaatcagtgcatgtgttcagttctctgtctgtgttttccttctgttttgaaatgtagattgtttaaagactgtatcacaaagcaccatagtacttacttcctatccatttctgctttggkagctagggggaacagatgaagagctactttagagatgattcctacttacctccaaaataggtcaggagaaatgggaacctaatgtggttttaatgttttaaaattccatgcatggcatggaaccacctgaaatgatattgatggtagactacgtgtttacatttccatggtagtaattctcttaaggaaacttgcaatgaaatgtgttttctgtttctggctttagcttttcagaaccttgttataaatccattgggataaagtttcatgagttgaaacaagaaaatacaaagtatttct

SEQ ID NO: 45865 - DNA, 600 bp, Chicken  19866894286264_1
aaatttgcaatgccctgacacataggaggacaatttgcatcttgttctgagaaaatctttcaacttgtggattataaagacttcaaatttcttctgttccttgaacatatctcaaactacacttctcagaagtggatacagctttgttctaataacttcatctcagtggtggattttctactagattgtatatgcctgtatattttattgttatatatgtacacatagcataaacaataggctattcagtttgtctttgatcagtttcttagattgttttattatactttgttttgaaaygagaattataggaagaatacctctctagggtagagaaaaagctgagaaaaacatgaatttctttttgtggtcaagaaaagcaactttctgaaagcttgaaacattgtcaaatgaaagtttatgtgatgacattcatttttataggacactgtttctccagtgaacttgaacaagaagtctgtgattaacatctttctctctttctttctgtatatctgggtctttttcttccttaaaaaaaaacaaaaaacaactcttctttggtttggtttggtttggtttaatttctgggtataaata

SEQ ID NO: 45866 - DNA, 556 bp, Chicken  19866894286274_1
tgagccagcagtgtgccaaggaggccaaacagcatcccagcttcaccatctaaagatgctcagagggtgcagcacctcccctacaaagacaggctgagggagctgggcttcgttcagcctggagaagagagaaggctgcggggtgacctcattgcagccttccaggacctaaagggagcctccaaaacgggaggggagtcaactcattgaaaggggaaacggtttgaagttggaagagggaagattgagcacatcttcccgtttctgagagctgctggctctcagaaatgcccccccccscccatgaacagaaccggtgagctccagggctgggaggggggcgtgtgctgaatgctgggggtgctcctgcagacccagggctgcaagtggggagcaggaaggctgatttcagccctcctcctcccttcagtgccggcagtttcagcctttcctctgctgccctgtgccgagagcagcagaaatgggtttggggagagcggagttttgtgttccacatcacgttttttggggggggttgagatctgttggggaggtg

SEQ ID NO: 45867 - DNA, 600 bp, Chicken  19866894286284_1
actttctgtggtcatattttcacacttctctccttgaaaggtgatcttatttacaaatagagcaaacaccacctcagttcagccagcacttctggctctacttgaccaatccttttagcagcaacttgttttcaatctgaatacaaagcgagcgagatgaggcctaatactccaaacaaaggacagaaagacagttcttccaaggcactgaggcttctagtaatccattcttaaggctcctaaggaggtttagttcctatcgaagccaatgggagtcaagcagcttgagtcaaagaaacyaggagtgcaaaacaagatttaagaccaaggcttcccacttactgaactctctcatgtttcaaggtatcgcttctgtctttgacaataatgataaygcaacaagatggatgctccttaatatcacaaacartatttcatacagaattctctgaatacaacttaatagaatgagagataagtgtcagaaaaattatgtaagtgcttttgttcagaaagagtcaatgactacgtaagtttttttcctactctgcaaaccagtttcacagctacgagccaccaagctattagatattcacatcc

SEQ ID NO: 45868 - DNA, 600 bp, Chicken  19866894286284_2
ctctacttgaccaatccttttagcagcaacttgttttcaatctgaatacaaagcgagcgagatgaggcctaatactccaaacaaaggacagaaagacagttcttccaaggcactgaggcttctagtaatccattcttaaggctcctaaggaggtttagttcctatcgaagccaatgggagtcaagcagcttgagtcaaagaaacyaggagtgcaaaacaagatttaagaccaaggcttcccacttactgaactctctcatgtttcaaggtatcgcttctgtctttgacaataatgataaygcaacaagatggatgctccttaatatcacaaacartatttcatacagaattctctgaatacaacttaatagaatgagagataagtgtcagaaaaattatgtaagtgcttttgttcagaaagagtcaatgactacgtaagtttttttcctactctgcaaaccagtttcacagctacgagccaccaagctattagatattcacatcctcacaacagtacaaagtgctgttttaacccaaataccagaatcccaacaatctttatggggatgaggtggccacattacgctgtcccgaggcctg

SEQ ID NO: 45869 - DNA, 600 bp, Chicken  19866894286284_3
ttcaatctgaatacaaagcgagcgagatgaggcctaatactccaaacaaaggacagaaagacagttcttccaaggcactgaggcttctagtaatccattcttaaggctcctaaggaggtttagttcctatcgaagccaatgggagtcaagcagcttgagtcaaagaaacyaggagtgcaaaacaagatttaagaccaaggcttcccacttactgaactctctcatgtttcaaggtatcgcttctgtctttgacaataatgataaygcaacaagatggatgctccttaatatcacaaacartatttcatacagaattctctgaatacaacttaatagaatgagagataagtgtcagaaaaattatgtaagtgcttttgttcagaaagagtcaatgactacgtaagtttttttcctactctgcaaaccagtttcacagctacgagccaccaagctattagatattcacatcctcacaacagtacaaagtgctgttttaacccaaataccagaatcccaacaatctttatggggatgaggtggccacattacgctgtcccgaggcctggcctgggtttaacttcaggcctaacttccatgaga

SEQ ID NO: 45870 - DNA, 600 bp, Chicken  19866894286291_1
agattattttaactgtaaaaatgttttcactggcatgcgtatctcacaaatcattgcatgcagagtgatgtcaggttttgatccactttgaagaattacaagggaaaatgctagaaaagttatgaagattgacttacaaattagaagaatgtttacacgggactcaagcagggctgtaaactgttacacaccagcagcaactttatggatctcttaccgatgtgaaaaattgaccctaaacccatatattttcttgaacaccatcaataatcaggaaagttgggcatgctaagaaacatytgtaggtttaaacctatggaaattttgcatttattgcattggtttgctttgttgctagaatctggatacatgcaaatcgtatttttgttgaagatctatctgtaatcccacagtataaaataactgttaacaaaatatattcctaaatgatatcaacagagatacagcagaaatatcttcagcatcacctattacaagaagatccagtgtttttacttgctgaagttttttctcatttctgtaaggatggctcatagcactcagtccccaatagttacttgagagcatttactgcatgct

SEQ ID NO: 45871 - DNA, 600 bp, Chicken  19866894286302_1
cagaaaaaacacaagccatgaatcttgcattccaatgtacaaacctaataattgaacccttagatcccttaaacaaaggaaaaattacacagggctggcagaaagccatagactaacagctaagaaaataagtctttctgcccaggtagagctcaatacgttttagattaatgaagaagaatacaacagctgaattcaaccaattaataaaattaagagagggaacacaattggtccagaaatacttctcaccacttggatctggggcgatggaagtgtttggcacatacactgtaggcmsgaataggaggaagccccttatacaaagccatggggcatccctcttccctgtgaacatccagctgccaggaatcactcttggataaatcctcaaactcctcaccctgctttataatcccagtgagctctgttgtgcagaaggagagcagctttccaaccaagcagctgtgacagtggcatcagcagtacaacgcagcaggcagatatgttttgtttccaccttttcaccgtgactttgagatgagagagaaaggcacagtgctcctgacaggcaggaaccaagaggtaaacaacaagaaa

SEQ ID NO: 45872 - DNA, 600 bp, Chicken  19866894286302_2
agaaaaaacacaagccatgaatcttgcattccaatgtacaaacctaataattgaacccttagatcccttaaacaaaggaaaaattacacagggctggcagaaagccatagactaacagctaagaaaataagtctttctgcccaggtagagctcaatacgttttagattaatgaagaagaatacaacagctgaattcaaccaattaataaaattaagagagggaacacaattggtccagaaatacttctcaccacttggatctggggcgatggaagtgtttggcacatacactgtaggcmsgaataggaggaagccccttatacaaagccatggggcatccctcttccctgtgaacatccagctgccaggaatcactcttggataaatcctcaaactcctcaccctgctttataatcccagtgagctctgttgtgcagaaggagagcagctttccaaccaagcagctgtgacagtggcatcagcagtacaacgcagcaggcagatatgttttgtttccaccttttcaccgtgactttgagatgagagagaaaggcacagtgctcctgacaggcaggaaccaagaggtaaacaacaagaaag

SEQ ID NO: 45873 - DNA, 600 bp, Chicken  19866894286302_3
aggaatcactcttggataaatcctcaaactcctcaccctgctttataatcccagtgagctctgttgtgcagaaggagagcagctttccaaccaagcagctgtgacagtggcatcagcagtacaacgcagcaggcagatatgttttgtttccaccttttcaccgtgactttgagatgagagagaaaggcacagtgctcctgacaggcaggaaccaagaggtaaacaacaagaaaggaaggaacgcatttttatactgtttatttaagtctttaagacttttggctcagttccttgccattycactgttacagaacagcaggagttctgagctgtttggaagggagggttatttggctaaattcaggaagccaactgaaaatccctcctgcttcacctgacccaggcttgcacccaacgggcaccctcagaaagcagctcagggcgtgcagcaacaagtggtaagagatgctaaggagctttccaccccccatcccacacagctgatttaccactagtaacatcttaacaaggtattttctagtcttaaaacctcagagtggagtttgaaggcaccgtaacccagcacgtgccaaagaaaag

SEQ ID NO: 45874 - DNA, 600 bp, Chicken  19866894286307_1
tttatttgcttttgagtgaggctgctaagaataataaatcgagattgattcactgaattgcagcagccataatactggcagtaatagactgggaacaatgcacagcttgaggttttgagttttgcagctatttctgaaactatgacacagtaatgatcttgctactccactcacactgatataatacccaggactctacactgcagaaaagaacttggttggttgttcctcaagagagtcactgagtaaaacacatggcacaattatttggtaactgaatgcccattcccagaagtacaratgccaatgggctaagaagatttgaaagatgtgaagcattctttagcagactcataaaaaaaacaagaacaaacaaagcaacccaaaccctgttttgtttcttyttaaactatttatggcttggttcattctgtagttgttgctgcactgcatgagaattggagtaatgagccctgggctggtcctgctcctactgaagcattgggaactgggcgatgactctgttgatcttggactcagggttcctcatcagttaaagggaaagcagatttctcccacctcagaaagtccaggcttcct

SEQ ID NO: 45875 - DNA, 600 bp, Chicken  19866894286307_2
gcttgaggttttgagttttgcagctatttctgaaactatgacacagtaatgatcttgctactccactcacactgatataatacccaggactctacactgcagaaaagaacttggttggttgttcctcaagagagtcactgagtaaaacacatggcacaattatttggtaactgaatgcccattcccagaagtacaratgccaatgggctaagaagatttgaaagatgtgaagcattctttagcagactcataaaaaaaacaagaacaaacaaagcaacccaaaccctgttttgtttcttyttaaactatttatggcttggttcattctgtagttgttgctgcactgcatgagaattggagtaatgagccctgggctggtcctgctcctactgaagcattgggaactgggcgatgactctgttgatcttggactcagggttcctcatcagttaaagggaaagcagatttctcccacctcagaaagtccaggcttcctgtatcatatgtgaacaacacactcattatacctgggctctctgcttttatcttcaatctcctactaaagttttcttggaacagtattttccttctgagcctgga

SEQ ID NO: 45876 - DNA, 600 bp, Chicken  19866894286307_3
ttggttcattctgtagttgttgctgcactgcatgagaattggagtaatgagccctgggctggtcctgctcctactgaagcattgggaactgggcgatgactctgttgatcttggactcagggttcctcatcagttaaagggaaagcagatttctcccacctcagaaagtccaggcttcctgtatcatatgtgaacaacacactcattatacctgggctctctgcttttatcttcaatctcctactaaagttttcttggaacagtattttccttctgagcctggaaagtagttttatagasccttgttctgatatattgatgtttaaccccatggtggtccatctgtatctgaaactttctgtgcgtatctgactactgtgtgagttagattaaaactgactaaagcctctggctaaataaatacaagatgttcgtaatatatccaaagtaaaatgaacaaagccctggctactgagcttattctgcccttctgcagagcaggaatggcttcatttaggctgttatgtgttcttactgcattttcaggtggacttttgttctctgaagcctttttcagcatttgcatttggagctgcaaac

SEQ ID NO: 45877 - DNA, 600 bp, Chicken  19866894286321_1
atcattttccccgttgttttaaacacaagtactactctggagctgaacatgttttccttctgaaaacattgttattggcacagtgccatgaaaagttctagttctgaatttatagttctcacactacatagttctcatgcttgaaaaatcgtatctcaaagctaagtagttgctctgggtagtgtgaaaactgaatacaacaagcatgcaacaacagaaaatgaaatgtgcatatataaaccaaaccttgttactaaccccagtaaacaaaattgtttactcccaatggcaaaatcctgmatttagctctctaatataatttagaatatataataatacataatatagtaatatataacataatacacatctaatacagcaactattcatattacatacatctatatgctgtacctatacagatgtacacagttaaaatacacacccaggtatgcacattctaacactgtgcaaaaatacacaagcaggccctaagtttataagcaacggataggtgcaaatgagtatagacagaataggaaaacatgttatgttggacaacatcctgtgttgtcactgcaacgtactcaccatttgcag

SEQ ID NO: 45878 - DNA, 600 bp, Chicken  19866894286335_1
acgttgtagactctagggactaagaacctcttctttaaagctcactctcgtgaatagatggactgctccatgaatgagcagtacagagttattttcttctaattgcagaatctttaatagctttgctgacaagaaggattttttttttcctaactgagactgcagagaagacaattagggaaagaggagtttttgctttgaaaagggtttgtatttgaactggaagtttctgtagacacagaacatgataaatcaaatatatttttcagagtcatttttctcacagctcctccaaaccarcttttcaaacaaatgtttgtatcacaaataacaagcagcttcactgtcaaaagcaaaccatggctcgatgtgtttaccccatagacttatgtcatcattaaactgactgagacattcttcagcagtaatgcagtgatattcagcattatttactctgtgctttgrgctgytacctaacgtagctcctggcctactcagtttggcatctagaatagcaaaatcaaaatatagcagactttgaaaagaasatattaaacatatctgataaatagtactttaatataatgaaaataaagcaag

SEQ ID NO: 45879 - DNA, 600 bp, Chicken  19866894286335_2
agaagacaattagggaaagaggagtttttgctttgaaaagggtttgtatttgaactggaagtttctgtagacacagaacatgataaatcaaatatatttttcagagtcatttttctcacagctcctccaaaccarcttttcaaacaaatgtttgtatcacaaataacaagcagcttcactgtcaaaagcaaaccatggctcgatgtgtttaccccatagacttatgtcatcattaaactgactgagacattcttcagcagtaatgcagtgatattcagcattatttactctgtgctttgrgctgytacctaacgtagctcctggcctactcagtttggcatctagaatagcaaaatcaaaatatagcagactttgaaaagaasatattaaacatatctgataaatagtactttaatataatgaaaataaagcaagaaactcttcatttgtgttctttacagaccaaatatgacaaattacaataattgtattagtggtgtccagccaattttcagccactgccacagctgctgcaattctcccagtatgaagtgaagaaagtggataatctcaattgtagaaacgacggcctagacaagg

SEQ ID NO: 45880 - DNA, 600 bp, Chicken  19866894286335_3
acaattagggaaagaggagtttttgctttgaaaagggtttgtatttgaactggaagtttctgtagacacagaacatgataaatcaaatatatttttcagagtcatttttctcacagctcctccaaaccarcttttcaaacaaatgtttgtatcacaaataacaagcagcttcactgtcaaaagcaaaccatggctcgatgtgtttaccccatagacttatgtcatcattaaactgactgagacattcttcagcagtaatgcagtgatattcagcattatttactctgtgctttgrgctgytacctaacgtagctcctggcctactcagtttggcatctagaatagcaaaatcaaaatatagcagactttgaaaagaasatattaaacatatctgataaatagtactttaatataatgaaaataaagcaagaaactcttcatttgtgttctttacagaccaaatatgacaaattacaataattgtattagtggtgtccagccaattttcagccactgccacagctgctgcaattctcccagtatgaagtgaagaaagtggataatctcaattgtagaaacgacggcctagacaaggccttt

SEQ ID NO: 45881 - DNA, 600 bp, Chicken  19866894286335_4
taaatcaaatatatttttcagagtcatttttctcacagctcctccaaaccarcttttcaaacaaatgtttgtatcacaaataacaagcagcttcactgtcaaaagcaaaccatggctcgatgtgtttaccccatagacttatgtcatcattaaactgactgagacattcttcagcagtaatgcagtgatattcagcattatttactctgtgctttgrgctgytacctaacgtagctcctggcctactcagtttggcatctagaatagcaaaatcaaaatatagcagactttgaaaagaasatattaaacatatctgataaatagtactttaatataatgaaaataaagcaagaaactcttcatttgtgttctttacagaccaaatatgacaaattacaataattgtattagtggtgtccagccaattttcagccactgccacagctgctgcaattctcccagtatgaagtgaagaaagtggataatctcaattgtagaaacgacggcctagacaaggcctttttcttttgctttacccttctctggagcctggatgttttgaggaagggaagtatctgactggagaagggggaaaggaat

SEQ ID NO: 45882 - DNA, 600 bp, Chicken  19866894286338_1
ggctgtactgtagggtaaggtaagtctctctatagccccactgatatagaaaacaaaaagcaagcccactctggccagcagatacattactaaatcccctcgatgtctgtgctgaaaagctgtggagggctgaactgaacccacaaaatccagtgatttatcaagctatttttgcacattgagattgggttctgtccctgaatgacagcagcatttttctttttcttttcccaaacttgtcacttgatttacacacagaacacaaacctaagagcagagcactgtgggtcaaagagaaaytgaaaaacaaaacaaaacaaaataaaacaagcaaacaaaaaaaaaagcccacaaatgtgggagaaaagatgagtatatgaggaaatcttccatctcctctccacttgacatgtctgctatgcaggcaataacgcactggtattgtcctagatgcctctcaagcacatcatatttgccctttgggaaatggaaaaggagggtgttaactttcagtgatgaacagtaagaaactctgccagtgggaacatatctgaccactgtaggatttcttggattgtccttagcagcagctggtttggg

SEQ ID NO: 45883 - DNA, 600 bp, Chicken  19866894286338_2
gagtatatgaggaaatcttccatctcctctccacttgacatgtctgctatgcaggcaataacgcactggtattgtcctagatgcctctcaagcacatcatatttgccctttgggaaatggaaaaggagggtgttaactttcagtgatgaacagtaagaaactctgccagtgggaacatatctgaccactgtaggatttcttggattgtccttagcagcagctggtttgggactccaccagaattctacccttgtcccaggtctgagctgtgccatcacttccagtcagcattcgtcctcmcacaagaartgtgaagatgcacatacacacattctttggatggtccaaacttcgctactttagatccagctttagcttttcctcaatctcgattccccaagcaaagaagagcaaaggcaacctgctatacacccaaagcaagcagcagaatgggttcatcttttaggctggatgttaagagaaaatttcttcttcaaaagtgtgatgaggcacttagaacaggctgcccaggtatgtggtggagtcaccacacctagaggtgttcaagaaccatggagatgtggcatgagggacgtggtt

SEQ ID NO: 45884 - DNA, 600 bp, Chicken  19866894286338_3
aggaaatcttccatctcctctccacttgacatgtctgctatgcaggcaataacgcactggtattgtcctagatgcctctcaagcacatcatatttgccctttgggaaatggaaaaggagggtgttaactttcagtgatgaacagtaagaaactctgccagtgggaacatatctgaccactgtaggatttcttggattgtccttagcagcagctggtttgggactccaccagaattctacccttgtcccaggtctgagctgtgccatcacttccagtcagcattcgtcctcmcacaagaartgtgaagatgcacatacacacattctttggatggtccaaacttcgctactttagatccagctttagcttttcctcaatctcgattccccaagcaaagaagagcaaaggcaacctgctatacacccaaagcaagcagcagaatgggttcatcttttaggctggatgttaagagaaaatttcttcttcaaaagtgtgatgaggcacttagaacaggctgcccaggtatgtggtggagtcaccacacctagaggtgttcaagaaccatggagatgtggcatgagggacgtggttagtaggcat

SEQ ID NO: 45885 - DNA, 569 bp, Chicken  19866894286339_1
taaccatataagggatgaaacatttgtttctgtatctttatttaagaagcaatgtactactactagtggccataaaacaatttatcccttcaaaagatcctgtcctggccttcaatgcccccttacatcactatgctcaatattttccattatcaatttaaataaggaaagcatctcagggattaatccaaagtacactcacatcactgaaaaatcacttttccctcaaaataagcgtgctttggtgaggtttgggtctgttgaacaacaactgcatactcacttgacatatcttttccrctggacaagtggttaaccatcaatgatgcaatcgggaacaatgagctggagaggtagcagcagtccgctggcactctgagggcaagtcccaaacctaacagcacaggaagaaaagctgggttgctgtcaagcatgctgaatcacaggaaattaaagagagcttcagttttgttatagactttccccacactggagtttaagcctctaatcatggagttacatcaaggctgaacctggaaagtaatactttaatatggccataacaacta

SEQ ID NO: 45886 - DNA, 599 bp, Chicken  19866894286346_1
  misc_feature (1)..(218): n is any nucleotide
nnnnnnnnnnnnnnnnnnnnnnnnnnnnnnnnnnnnnnnnnnnnnnnnnnnnnnnnnnnnnnnnnnnnnnnnnnnnnnnnnnnnnnnnnnnnnnnnnnnnnnnnnnnnnnnnnnnnnnnnnnnnnnnnnnnnnnnnnnnnnnnnnnnnnnnnnnnnnnnnnnnnnnnnnnnnnnnnnnnnnnnnnnnnnnnnnnnnnnnnnnnnnnnnnnnnnnnnnnaacattttcctgacagttaaaggtaaatggctgccattgaaggcaaaaagaaataaccaagtaagataagatcaaatcttcrtgaaaatatattctttttcttctctaattaaactgtttcccaaaggaaatattcttcagtcctgtgcctgagtttttcatcagataacattctccatcgtctacaaggaggttgctgtaacactacagtactgctattcttaaatacataaatttgtaagattttattcgactagaattaatgcttggaataagaaagagctagttcagcagaaaattgtttttattagcttgttgctgctcgtttgcattttatcacaatatttttctcgtttccttatttatggcacattggcaaag

SEQ ID NO: 45887 - DNA, 525 bp, Chicken  19866894286346_2
ttatcacaatatttttctcgtttccttatttatggcacattggcaaaggaaatcacagacagagtctcatcaggtttctctgcaagatgagctttgtgtcatccagactgtcctgggtacctcttctgtcacgacgtgctgtctgagggaatgtgaggacttcagctgctcacctaaaatttccagagacagaccaatttgatctatttctagcagttgaaaagtgctcagctctttttttggaagtagatccttcatgaggtggttttgcaaacacgatcaattcactccaagaaaccwaaacaaagccatggcggtagtcgctgctgggagcaagaaaacaatagaatgcaaccaggataatggagagtgaccattaggtcagacctagagcttattctgagtggcaagtgatgttgaacataagtattctgtcctcagttcatggagatttaaactctacttccctaccaccaggttttatgataggtggagtgaggacatgccattgaagctctcacccaa

SEQ ID NO: 45888 - DNA, 600 bp, Chicken  19866894286374_1
gccattcagtgaagccatattttttcatatggtcactcattttttgaatgcctttctggagggatgtgggctgttttgtagagaaaaagagaactcattcttggagctgaagtaaacgaagttacttcttaatgtgaaatattttttgaaatatcaggtcctagttgcttaaattgcatgttccaaatacctctggccttttgacctccggttccctccctatgaaatgagagtaacacttgcctcttgcaatgtgtccctgtcctcagaaacatgctcagaagaataaattcattttgyttgcaaagccttttwgatgcaatactgtgagtagagccatgaaaaagtttgtggggaatttaataactctgtcttcagagcaggatatgaattgtgtatagtaaataaggcctgcaggcacaaatattacatagctgctcattatttgaactctgcctgtcctttgcgttgaatgagagaggaatggagaaaaaaatagtatgcatattcacacggaagctgattttgctatggatattagcctttacttacactcttttacttttgatacttctcagcttctgtaagcttgccttgcca

SEQ ID NO: 45889 - DNA, 600 bp, Chicken  19866894286374_2
catattttttcatatggtcactcattttttgaatgcctttctggagggatgtgggctgttttgtagagaaaaagagaactcattcttggagctgaagtaaacgaagttacttcttaatgtgaaatattttttgaaatatcaggtcctagttgcttaaattgcatgttccaaatacctctggccttttgacctccggttccctccctatgaaatgagagtaacacttgcctcttgcaatgtgtccctgtcctcagaaacatgctcagaagaataaattcattttgyttgcaaagccttttwgatgcaatactgtgagtagagccatgaaaaagtttgtggggaatttaataactctgtcttcagagcaggatatgaattgtgtatagtaaataaggcctgcaggcacaaatattacatagctgctcattatttgaactctgcctgtcctttgcgttgaatgagagaggaatggagaaaaaaatagtatgcatattcacacggaagctgattttgctatggatattagcctttacttacactcttttacttttgatacttctcagcttctgtaagcttgccttgccagctttcatggacttt

SEQ ID NO: 45890 - DNA, 599 bp, Chicken  19866894286377_1
  misc_feature (1)..(35): n is any nucleotide
nnnnnnnnnnnnnnnnnnnnnnnnnnnnnnnnnnnaatcagattgtcaaggaggtgtctttttgttaggggctctcccagccccctcttgctgcaggggaaggcgtttgcagcccgcgctgcatgcagcaggctttgcatcccagccctgtgctccgtccatgtgcatggggcggctttgggccgactgcaggagcttttgggcaaggagaagtggggctgtgggatgccaagaggtgccacgtgccccagctttgtgcaggactgccctctgctctgtggctgagtggcactgcgatgrgttacttccaggaggaatgacgttctcccacattaagtgacccccgtgtgcaggctgagcgctgggtcaaagggaaaacccccgttttcctccccttaatctgcacagcagccatgtggaagcactgtcagactgcatcagcccagcagcctgtccaagctgtgctctgygcctctgaaagtcgccggttccaaagaaagatgtgggaaatcagagcgagcagaggatgcttgaaagcactgagttactgccctgcttccttctgctgctttgcaacctgctcccaatgagatgctaaa

SEQ ID NO: 45891 - DNA, 600 bp, Chicken  19866894286377_2
ggcggctttgggccgactgcaggagcttttgggcaaggagaagtggggctgtgggatgccaagaggtgccacgtgccccagctttgtgcaggactgccctctgctctgtggctgagtggcactgcgatgrgttacttccaggaggaatgacgttctcccacattaagtgacccccgtgtgcaggctgagcgctgggtcaaagggaaaacccccgttttcctccccttaatctgcacagcagccatgtggaagcactgtcagactgcatcagcccagcagcctgtccaagctgtgctctgygcctctgaaagtcgccggttccaaagaaagatgtgggaaatcagagcgagcagaggatgcttgaaagcactgagttactgccctgcttccttctgctgctttgcaacctgctcccaatgagatgctaaagccaaaccggcataaaggagatggaaatcacagtcttgcatataaaagtgaccgaacatcatcaagagctgaattaattgctggcacatcgctaatgaagcgttatgagtcagcagcgcagcggtttgatgtcgggcagacgggtgggaagctgtttgaaatgccttccgt

SEQ ID NO: 45892 - DNA, 600 bp, Chicken  19866894286378_1
actgtgccccagacgagtgctctagctacttatgaaacaaaagcagggaaaccatttcacgaaataaggtaaacatcgctgaggggaatgagaaggccacctatcaaaccagggtaatgatattctagcacaaggtgactgcatcattaatcttacactaagaatatatatatatttttctttttttgtgatggaaaatcttaagggtgagaacacaagtgttcagagtgagcagacagctcaacctgaagagctggaatatgtactcctcagcagggagctgacagctattccccctcrtctgtgccagaactggagtgctcagccaatacagaattaaatggacctggacaaagcagcttcctgaggagcataattgcagcttggagtgctgtctaattcaattaacagcaccatttttcagagccagctgacatttacactttgccaacatcaatgtgagactcacagtgagttccagaagcctccagttcagcaggagcaaatggaaccgctgggatcatttattttcaaaagaacaagatctgcaaggatttttgttttgtttttaaatgctccctgctctgcagccactgagct

SEQ ID NO: 45893 - DNA, 600 bp, Chicken  19866894286378_2
cctggacaaagcagcttcctgaggagcataattgcagcttggagtgctgtctaattcaattaacagcaccatttttcagagccagctgacatttacactttgccaacatcaatgtgagactcacagtgagttccagaagcctccagttcagcaggagcaaatggaaccgctgggatcatttattttcaaaagaacaagatctgcaaggatttttgttttgtttttaaatgctccctgctctgcagccactgagctgcagacctgaaatctcccctggctgcttccctcacagctcagttkgaagtaactcttctattccctcctccctttcatcaaaaactgctgcattttcacagtgcttttacactcacttcctaggtagcaaggggcactctctactcactggagggaagcaggtgccactkttaagaactgcatcaattcactgagctggtagggggaagcacacactcagaaacacacacagcctggttcattgcatgaagctcctgatgcacgtccactgaccctgccctcaaaccttcacatcacactcagggaagacctctcctcacagacccgctagctctgggatccttc

SEQ ID NO: 45894 - DNA, 600 bp, Chicken  19866894286378_3
gtgagttccagaagcctccagttcagcaggagcaaatggaaccgctgggatcatttattttcaaaagaacaagatctgcaaggatttttgttttgtttttaaatgctccctgctctgcagccactgagctgcagacctgaaatctcccctggctgcttccctcacagctcagttkgaagtaactcttctattccctcctccctttcatcaaaaactgctgcattttcacagtgcttttacactcacttcctaggtagcaaggggcactctctactcactggagggaagcaggtgccactkttaagaactgcatcaattcactgagctggtagggggaagcacacactcagaaacacacacagcctggttcattgcatgaagctcctgatgcacgtccactgaccctgccctcaaaccttcacatcacactcagggaagacctctcctcacagacccgctagctctgggatccttccagctcaccaatttccagcacctgacatgcttcctgccctttcatctcattgctttttcagtcagaatgctctgcagtttgagcatctgagactccttgaagcaagctgctgccgcacagtgaga

SEQ ID NO: 45895 - DNA, 599 bp, Chicken  19866894286383_1
  misc_feature (1)..(77): n is any nucleotide
nnnnnnnnnnnnnnnnnnnnnnnnnnnnnnnnnnnnnnnnnnnnnnnnnnnnnnnnnnnnnnnnnnnnnnnnnnnnnctatttagcaagagatgtactttgggttattgactcagaaaagagtttcagagctatggcactctccctcaccgtcctctcctgccgtatccctcactgccacgtttcccagttaacctttttccctggtctcctcacgcagggattttgaggagtgtggaacaggtgctccactgctttgctccaactataataccctctgaggatgcctgcgcaatagcartgatgtgggttaagttcttggctaaaataaattgttgtatgttttgcagaggcagagacaggcaagtgcagcaagaacaggaagtactgcagggtttctctccttwgcctacagtttattacaagcacttcacagctccaattagtgttgggtatgaatgtctcacaagctttaatgcaatatcttaaatgaggctgaaaagggaagatgctgtgccttttgggagaatcaaagacatcaagggctaagggtgacgttatcttactgaggttaatctaccactaagatagatcaccagt

SEQ ID NO: 45896 - DNA, 600 bp, Chicken  19866894286383_2
ttgactcagaaaagagtttcagagctatggcactctccctcaccgtcctctcctgccgtatccctcactgccacgtttcccagttaacctttttccctggtctcctcacgcagggattttgaggagtgtggaacaggtgctccactgctttgctccaactataataccctctgaggatgcctgcgcaatagcartgatgtgggttaagttcttggctaaaataaattgttgtatgttttgcagaggcagagacaggcaagtgcagcaagaacaggaagtactgcagggtttctctccttwgcctacagtttattacaagcacttcacagctccaattagtgttgggtatgaatgtctcacaagctttaatgcaatatcttaaatgaggctgaaaagggaagatgctgtgccttttgggagaatcaaagacatcaagggctaagggtgacgttatcttactgaggttaatctaccactaagatagatcaccagtttgtattttctctgtgcttccctctccactggagagccaaatgcgtctccaacagcccacttatgtggtgctaatcactgggcaacccttccagataagtggcagca

SEQ ID NO: 45897 - DNA, 600 bp, Chicken  19866894286383_3
agtttattacaagcacttcacagctccaattagtgttgggtatgaatgtctcacaagctttaatgcaatatcttaaatgaggctgaaaagggaagatgctgtgccttttgggagaatcaaagacatcaagggctaagggtgacgttatcttactgaggttaatctaccactaagatagatcaccagtttgtattttctctgtgcttccctctccactggagagccaaatgcgtctccaacagcccacttatgtggtgctaatcactgggcaacccttccagataagtggcagcaagaagytggattgagaagcctgcacagctttagatgtgttcatggtaacaaaattctttgagagttagttattaaatccagagtaatagcattgagtttacaaaccaaagaagtaggatcagatatacttgtccagttgtgcttttactctttcctgagcacttagggccattgttggtgcttaaagccagtcacagcccagaaaatcagctttctggccattcctgtgttcttacatgaggatgttttatcagtgggagggagaatgaaaatttagtaatgatcaattttttttcaaatgggaaa

SEQ ID NO: 45898 - DNA, 561 bp, Chicken  19866894286384_1
cttcctgtggggatagcagcgcctgctgtaaagaggattatgattacagtttaagaggagcgtgcacagcactgccacaagaggcacaggcttatcagaagagaaaccaagctgcccccaaactatgcatgcggaactcccacccgccttcagttctggtttctggctctgcctcagatcacacacccgcttatcaggggtgatagagaggcagctgagcttgcagggagcacggaaaagactagggggataaatgagtaacactgtgcaaacagcttgcacacattcaccatcagaacrcattcatctgtatcacaacaygggcacgtcagagcacagtggctgcatgttcctggccacagttgggaaatcctaaaggaaaaactgctgatggagctatgctagctgtggtgactttggctggcttagcacaggcaagactgcaaatatagaaaagcagagcatcatccactagatccgctccgagcacttagctttgaggtgcagcttcacgtgctggtgaaggtctctggcagacctctcagtcttacacagagctga

SEQ ID NO: 45899 - DNA, 540 bp, Chicken  19866894286384_2
cttcctgtggggatagcagcgcctgctgtaaagaggattatgattacagtttaagaggagcgtgcacagcactgccacaagaggcacaggcttatcagaagagaaaccaagctgcccccaaactatgcatgcggaactcccacccgccttcagttctggtttctggctctgcctcagatcacacacccgcttatcaggggtgatagagaggcagctgagcttgcagggagcacggaaaagactagggggataaatgagtaacactgtgcaaacagcttgcacacattcaccatcagaacygggcacgtcagagcacagtggctgcatgttcctggccacagttgggaaatcctaaaggaaaaactgctgatggagctatgctagctgtggtgactttggctggcttagcacaggcaagactgcaaatatagaaaagcagagcatcatccactagatccgctccgagcacttagctttgaggtgcagcttcacgtgctggtgaaggtctctggcagacctctcagtcttacacagagctga

SEQ ID NO: 45900 - DNA, 599 bp, Chicken  19866894286394_1
  misc_feature (1)..(36): n is any nucleotide
nnnnnnnnnnnnnnnnnnnnnnnnnnnnnnnnnnnntatatatatatataaataaaacgtttaagctcattttagatagcgcacatctgcactgcaataaggcagttttcaaaagtgcagctctcagtgggatatttatttaattcgtattggttttggacctcagcctataatgagaaaagatatgggcacatgctagaggtggtggctgcgacttggacttttttgaacattaaagcagaaaaagcctttgcttgtagggagggtttagtgaaaattcaataacttttgcttcagacyctgtgcttcagagcaccaataaagacaagagagaaccgacacagacactgaattcacracagagctcctggaaaatgccaaccaattctggcaggaattttccaacatttctctcctcagatacttttcacttttctgttcaactctgatttcaaaaccaatttcaacccagctcacgttattcacatgcaacgtgttcaggcacagtctctgcagatgcgtccggctccccacctccatttctccatttcattggtaaatgacctccccgaactgaactaaaagtagcccattgcatg

SEQ ID NO: 45901 - DNA, 600 bp, Chicken  19866894286394_2
gtttaagctcattttagatagcgcacatctgcactgcaataaggcagttttcaaaagtgcagctctcagtgggatatttatttaattcgtattggttttggacctcagcctataatgagaaaagatatgggcacatgctagaggtggtggctgcgacttggacttttttgaacattaaagcagaaaaagcctttgcttgtagggagggtttagtgaaaattcaataacttttgcttcagacyctgtgcttcagagcaccaataaagacaagagagaaccgacacagacactgaattcacracagagctcctggaaaatgccaaccaattctggcaggaattttccaacatttctctcctcagatacttttcacttttctgttcaactctgatttcaaaaccaatttcaacccagctcacgttattcacatgcaacgtgttcaggcacagtctctgcagatgcgtccggctccccacctccatttctccatttcattggtaaatgacctccccgaactgaactaaaagtagcccattgcatgcacattgcaggttttgcaccaaattygtccattttgagagarttytagcacagagaaga

SEQ ID NO: 45902 - DNA, 600 bp, Chicken  19866894286394_3
caagagagaaccgacacagacactgaattcacracagagctcctggaaaatgccaaccaattctggcaggaattttccaacatttctctcctcagatacttttcacttttctgttcaactctgatttcaaaaccaatttcaacccagctcacgttattcacatgcaacgtgttcaggcacagtctctgcagatgcgtccggctccccacctccatttctccatttcattggtaaatgacctccccgaactgaactaaaagtagcccattgcatgcacattgcaggttttgcaccaaattygtccattttgagagarttytagcacagagaagaaagcagaaggcttttcccatgtggctggggggccagtgggcaatgctgggggcagcggagggttgctgcatcagtcctgcgctcatgtgggtcaaaaccagaagtgaaatgggggaagcgttccctggccacagactgtacatcttctggcactgttgtgaattttgctccatcccagggccattttgctccatcttatggcccaattcaatgactacaattgattttttggtacttcagtggctttgcatggaaaccagaggaatc

SEQ ID NO: 45903 - DNA, 600 bp, Chicken  19866894286394_4
cagacactgaattcacracagagctcctggaaaatgccaaccaattctggcaggaattttccaacatttctctcctcagatacttttcacttttctgttcaactctgatttcaaaaccaatttcaacccagctcacgttattcacatgcaacgtgttcaggcacagtctctgcagatgcgtccggctccccacctccatttctccatttcattggtaaatgacctccccgaactgaactaaaagtagcccattgcatgcacattgcaggttttgcaccaaattygtccattttgagagarttytagcacagagaagaaagcagaaggcttttcccatgtggctggggggccagtgggcaatgctgggggcagcggagggttgctgcatcagtcctgcgctcatgtgggtcaaaaccagaagtgaaatgggggaagcgttccctggccacagactgtacatcttctggcactgttgtgaattttgctccatcccagggccattttgctccatcttatggcccaattcaatgactacaattgattttttggtacttcagtggctttgcatggaaaccagaggaatcattttttattgaatac

SEQ ID NO: 45904 - DNA, 600 bp, Chicken  19866894286394_5
acactgaattcacracagagctcctggaaaatgccaaccaattctggcaggaattttccaacatttctctcctcagatacttttcacttttctgttcaactctgatttcaaaaccaatttcaacccagctcacgttattcacatgcaacgtgttcaggcacagtctctgcagatgcgtccggctccccacctccatttctccatttcattggtaaatgacctccccgaactgaactaaaagtagcccattgcatgcacattgcaggttttgcaccaaattygtccattttgagagarttytagcacagagaagaaagcagaaggcttttcccatgtggctggggggccagtgggcaatgctgggggcagcggagggttgctgcatcagtcctgcgctcatgtgggtcaaaaccagaagtgaaatgggggaagcgttccctggccacagactgtacatcttctggcactgttgtgaattttgctccatcccagggccattttgctccatcttatggcccaattcaatgactacaattgattttttggtacttcagtggctttgcatggaaaccagaggaatcattttttattgaatacaac

SEQ ID NO: 45905 - DNA, 600 bp, Chicken  19866894286403_1
cttttcagttcggcacagcaaacctggagtgacagcagagttcagaggagctgcacagtgttttctttttggtggtgggttcactctgctgtgcactgcctgcagcctaaactctcatggccacagatgaatacattgtctccagagcaatatgtctgtacaggatcagtgctattgctattctgttctgtgcagatctaaactttgtcatttcctctgttaacactcattggtgccaatcttcatgtgtagttggaggtctcaggcttcaagatctcctttccagaaggattttccttrtgcctgccaggctttactttttggccattgggatgaaagaagccttaaaacccacctggccatgttgtcttaatccctcacatggttggtgaaggaatgtgaggcagtgcaataaggaagtgcatactgttcctcacctgctgtcagatggggccactcagcccaacaggtattcctcccttttctacaggaaaaccacccgttggcagcagctcttgcctgcaggtgtggggtcaagggctgtgcccccagctgtgcctggggctgcagctgcacctgctttggcatcctgctgttgct

SEQ ID NO: 45906 - DNA, 599 bp, Chicken  19866894286409_1
  misc_feature (1)..(21): n is any nucleotide
nnnnnnnnnnnnnnnnnnnnnccccccgatttcggtaaaaagaggaattagcaaagtttagtttctgcctattcaataagctgtcacacgagcagcctggaaaggtgctgtcaaagaccaagtgaggtaatcatacaaaatctgcaccgcttcatcacaggtgttctttgcacctcatgtgcatcttttggaacataggattggaaggccgcagtgaggtctccccacagccttctcttctccaggctgaacaaggccagctcctccagcctgtcttcatgggagaggtgctccagcccycacacattcagcctcatgargtggtttctgacycactccactcttacagtgggagggattttgctctcctgacccgcacacctagaagttcagggacatgacaagcctgactgacagtgaaaatggaggcaaagaactcgctaagtacctcagaccgaggcctgctctctctcttcatttatcagagggggtacacacacctctgcctctctcttctgccaaacacagctgaagaatcccttcctgttgtttttcacatcccttgccaagtttaattccatctgcaccttgacttccct

SEQ ID NO: 45907 - DNA, 599 bp, Chicken  19866894286409_2
  misc_feature (1)..(1): n is any nucleotide
nccccccgatttcggtaaaaagaggaattagcaaagtttagtttctgcctattcaataagctgtcacacgagcagcctggaaaggtgctgtcaaagaccaagtgaggtaatcatacaaaatctgcaccgcttcatcacaggtgttctttgcacctcatgtgcatcttttggaacataggattggaaggccgcagtgaggtctccccacagccttctcttctccaggctgaacaaggccagctcctccagcctgtcttcatgggagaggtgctccagcccycacacattcagcctcatgargtggtttctgacycactccactcttacagtgggagggattttgctctcctgacccgcacacctagaagttcagggacatgacaagcctgactgacagtgaaaatggaggcaaagaactcgctaagtacctcagaccgaggcctgctctctctcttcatttatcagagggggtacacacacctctgcctctctcttctgccaaacacagctgaagaatcccttcctgttgtttttcacatcccttgccaagtttaattccatctgcaccttgacttccctgattccacccctgcacatcc

SEQ ID NO: 45908 - DNA, 600 bp, Chicken  19866894286409_3
ggtaaaaagaggaattagcaaagtttagtttctgcctattcaataagctgtcacacgagcagcctggaaaggtgctgtcaaagaccaagtgaggtaatcatacaaaatctgcaccgcttcatcacaggtgttctttgcacctcatgtgcatcttttggaacataggattggaaggccgcagtgaggtctccccacagccttctcttctccaggctgaacaaggccagctcctccagcctgtcttcatgggagaggtgctccagcccycacacattcagcctcatgargtggtttctgacycactccactcttacagtgggagggattttgctctcctgacccgcacacctagaagttcagggacatgacaagcctgactgacagtgaaaatggaggcaaagaactcgctaagtacctcagaccgaggcctgctctctctcttcatttatcagagggggtacacacacctctgcctctctcttctgccaaacacagctgaagaatcccttcctgttgtttttcacatcccttgccaagtttaattccatctgcaccttgacttccctgattccacccctgcacatccagacagsatcccta

SEQ ID NO: 45909 - DNA, 600 bp, Chicken  19866894286409_4
tctgacycactccactcttacagtgggagggattttgctctcctgacccgcacacctagaagttcagggacatgacaagcctgactgacagtgaaaatggaggcaaagaactcgctaagtacctcagaccgaggcctgctctctctcttcatttatcagagggggtacacacacctctgcctctctcttctgccaaacacagctgaagaatcccttcctgttgtttttcacatcccttgccaagtttaattccatctgcaccttgacttccctgattccacccctgcacatccagacagsatccctatattcttcccaggtcacccaaacaggaccagtcattcatcattaatctctaycaytgcaattttttccaaaacatttcagaacttgccatcatcacagacagctatttaattacgggatgtgcagcacagattgcatggtattatacctgacctgtatttggtacaaaagtagtcatctttccaatgaaaattcccatgtataagcaaatcgtaaacagtaggctgaaagcatttcaagcttcaaatgtcagtttgcatagcagctgaacaatggttctgccactgcagcaat

SEQ ID NO: 45910 - DNA, 600 bp, Chicken  19866894286409_5
aagttcagggacatgacaagcctgactgacagtgaaaatggaggcaaagaactcgctaagtacctcagaccgaggcctgctctctctcttcatttatcagagggggtacacacacctctgcctctctcttctgccaaacacagctgaagaatcccttcctgttgtttttcacatcccttgccaagtttaattccatctgcaccttgacttccctgattccacccctgcacatccagacagsatccctatattcttcccaggtcacccaaacaggaccagtcattcatcattaatctctaycaytgcaattttttccaaaacatttcagaacttgccatcatcacagacagctatttaattacgggatgtgcagcacagattgcatggtattatacctgacctgtatttggtacaaaagtagtcatctttccaatgaaaattcccatgtataagcaaatcgtaaacagtaggctgaaagcatttcaagcttcaaatgtcagtttgcatagcagctgaacaatggttctgccactgcagcaatggcagccaggaggaagcctcatgcaccttaaaagcaagagaaaagcagaaaaaaaggag

SEQ ID NO: 45911 - DNA, 600 bp, Chicken  19866894286409_6
ttcagggacatgacaagcctgactgacagtgaaaatggaggcaaagaactcgctaagtacctcagaccgaggcctgctctctctcttcatttatcagagggggtacacacacctctgcctctctcttctgccaaacacagctgaagaatcccttcctgttgtttttcacatcccttgccaagtttaattccatctgcaccttgacttccctgattccacccctgcacatccagacagsatccctatattcttcccaggtcacccaaacaggaccagtcattcatcattaatctctaycaytgcaattttttccaaaacatttcagaacttgccatcatcacagacagctatttaattacgggatgtgcagcacagattgcatggtattatacctgacctgtatttggtacaaaagtagtcatctttccaatgaaaattcccatgtataagcaaatcgtaaacagtaggctgaaagcatttcaagcttcaaatgtcagtttgcatagcagctgaacaatggttctgccactgcagcaatggcagccaggaggaagcctcatgcaccttaaaagcaagagaaaagcagaaaaaaaggagaaa

SEQ ID NO: 45912 - DNA, 599 bp, Chicken  19866894286419_1
  misc_feature (1)..(92): n is any nucleotide
nnnnnnnnnnnnnnnnnnnnnnnnnnnnnnnnnnnnnnnnnnnnnnnnnnnnnnnnnnnnnnnnnnnnnnnnnnnnnnnnnnnnnnnnnnnnttatgaataagtcatttccatccagacttcaaacaaatagccatgttattgcaaaaaatgtctgtggaacttttctgcacatattctcaaccactagaaacctactcacttcactcccattatacacagagctaaagtctggtcataggaaggcaggtgctaggcaaatcatgcacttctttttattttaatttcttaggaaaagatmaaggggcatttcaaatgtcagcttttctcagggaagctagatccttgtcagagccccagggactccagaggagcactgaggactgttggattagtggaaagagggcagccattctgtgggaaatatttttggaaatattactttaggaagaggttcatgaatgcatcttcaccaggcacggagtcaagggctctggctgttctttaggcatttcaagcccatgaaccaagatctccttcagggtatcgctctaggcacttccactgggtactggcaatcctgccataaagcttgttcaa

SEQ ID NO: 45913 - DNA, 479 bp, Chicken  19866894286419_2
gtcagcttttctcagggaagctagatccttgtcagagccccagggactccagaggagcactgaggactgttggattagtggaaagagggcagccattctgtgggaaatatttttggaaatattactttaggaagaggttcatgaatgcatcttcaccaggcacggagtcaagggctctggctgttctttaggcatttcaagcccatgaaccaagatctccttcagggtatcgctctaggcacttccactgggtactggcaatcctgccataaagcttgttcaaagtcactctactactgrtactactcacctaaacacacatacatagtgaatgactgtattccaaagcataggaatcttgatacagaattgctaaattgcgtttccctatacatatatatatatataaaagtcactctacttctgtaggcagctgaatcaatcctgatagaaaattacaacaggcaaagaatacaatc

SEQ ID NO: 45914 - DNA, 600 bp, Chicken  19866894286420_1
aattccacatagcttgcaaacagtctaactcaaatactaacaagaaggtccctgatctaaaccatttctgaagccctgtgattgatcacttctttatcaagtgtttatttagcaactgtttgttctaaactgctcacttgttcaatagaaaagttatgtttcccttgaacaaagaagaaaaaaggctacacaatgacaaccacttcctttcaaggtcaccaggtacccaatttatgagtgaaagcactcaaaacaggaggctgtgcaaacgaagcagtcacataacatttgtttcccttygtgcttgcaccaaaaggaggaaccttcataattcacatcagggaggagaggggtacaccttcagcagtaagcacagtcaccgaaccgaggcagaatgtggagctgtgctccttcccttcctgcagctaatagaggatgcacaagggaaggcttatttttagcagttacgaacaaaaaccaattgcatgagagagctgtgggtgacaaggaagcaaatcacctggaaacagctacagaagcaagcaccattttgagactgtgtaagctctaattcctgaacaatgcttttctgtacttcaa

SEQ ID NO: 45915 - DNA, 600 bp, Chicken  19866894286420_2
aacaaaaaccaattgcatgagagagctgtgggtgacaaggaagcaaatcacctggaaacagctacagaagcaagcaccattttgagactgtgtaagctctaattcctgaacaatgcttttctgtacttcaaaggacttgtcaaaacaacttctggaacagatgcagcttctgagtgccatctgctggctacccggctgcaccttggtgggcctccataccagcacaaatggtgtagcaacaatgcccaggaaggaggcaatgagtttgcatgggtgccaaaacagcaaaccaaactccarcagataattgtttttccttcctaagaacagatcctctgctaagacagtttatttttaaactaacaggagttgttgtattccaaagaattttattgtgtgcactttacaggtaaaaaatagtaaagaagcattctatttccaaccatattctgaaagaagattatgtgaaaccatgaaaaaaaagacatgctaggatttaagattcccaggatgctttttattcaatttttacttattttggcaagaccagaattcttccatctatccagctttgcctgtgctatctatctgtgcttccaa

SEQ ID NO: 45916 - DNA, 600 bp, Chicken  19866894286424_1
tccacacacaaatgtctctgtgaggaatgacctgtagagaaactatggagagtatttggtaatagctaaaattcactgagcagtctaatccaataaagacgtgttagtaatcagctatgctacatgagagaggtacagaaaattaatgatgcattcctgactacaataaatatttcttaacagaataggcagaagatgatggtgcacaaggaccaatatttcatcgcttttgtcttttaatgagcgcatagcagctaccttttgttgtgagtaaaaagtgctttctttgaacgtaagtgstggtagttgcataatatgaagcttactgatgcatataatgttagcagagrgccgtctgagcagaatgaacactttaaaattaatctctgcatagatcagcaagcacacacacactctcccatgttgacaagagcagcttacttctttaggagtagccaaactttcaaagcctggcagctggartttgcaagcctgtcgttccgttattaactctgtaggccttatggaaggggtaatggatgaggtgatcccttggggtcccttccagacctactttgtttggtttcatgattcctaacc

SEQ ID NO: 45917 - DNA, 600 bp, Chicken  19866894286424_2
agtatttggtaatagctaaaattcactgagcagtctaatccaataaagacgtgttagtaatcagctatgctacatgagagaggtacagaaaattaatgatgcattcctgactacaataaatatttcttaacagaataggcagaagatgatggtgcacaaggaccaatatttcatcgcttttgtcttttaatgagcgcatagcagctaccttttgttgtgagtaaaaagtgctttctttgaacgtaagtgstggtagttgcataatatgaagcttactgatgcatataatgttagcagagrgccgtctgagcagaatgaacactttaaaattaatctctgcatagatcagcaagcacacacacactctcccatgttgacaagagcagcttacttctttaggagtagccaaactttcaaagcctggcagctggartttgcaagcctgtcgttccgttattaactctgtaggccttatggaaggggtaatggatgaggtgatcccttggggtcccttccagacctactttgtttggtttcatgattcctaaccaagcaagcagtaagcaaaagtgttttctgaaataagcagaaggaggggga

SEQ ID NO: 45918 - DNA, 600 bp, Chicken  19866894286424_3
aataggcagaagatgatggtgcacaaggaccaatatttcatcgcttttgtcttttaatgagcgcatagcagctaccttttgttgtgagtaaaaagtgctttctttgaacgtaagtgstggtagttgcataatatgaagcttactgatgcatataatgttagcagagrgccgtctgagcagaatgaacactttaaaattaatctctgcatagatcagcaagcacacacacactctcccatgttgacaagagcagcttacttctttaggagtagccaaactttcaaagcctggcagctggartttgcaagcctgtcgttccgttattaactctgtaggccttatggaaggggtaatggatgaggtgatcccttggggtcccttccagacctactttgtttggtttcatgattcctaaccaagcaagcagtaagcaaaagtgttttctgaaataagcagaaggagggggatgcgtattaattatgcaagatgcttgatgtggttcaaaatgatgtagatggcagcaaggggagttcatcaaagggcaggtgaaaggagccgttatggtatttgctggggctcctgtgactcccagtgttgctt

SEQ ID NO: 45919 - DNA, 600 bp, Chicken  19866894286425_1
agtggacctgatctgacctctgtcagttgcctcatggttgtccacctgctgataccacggcagctgatgtaaggggtggctgcagtgggtgtcagggacatcttctgctggctacaaggggaagcagagcagccctgtgactgcgcctggtcagtgtgcatggctcaaaaggaagattaattgactatatctgatagcattaagctacatctgagacccatactagtatcactgtgcagcctgctggacttacaatatgaaattaaaagcttgtctgttttcatatcctcctgttgtcaytggccaacagcagatgctttggctaataatatttaatccagactattttgctcagttagttggtgctactcaaacgacagtctactgtgtggtgcgtatgtgtcattaaacttaagttctatggggaaaagatagaccactatgcaatacattacacaatagagagtgtaaaagaccctctggttactgctataatatktacaatttcaacctgccagtctattcattgcaaatcatctgttttcattctttttccaaaaagaacatagagcccacgtggatctctcaatcatctctcac

SEQ ID NO: 45920 - DNA, 600 bp, Chicken  19866894286425_2
ttaagctacatctgagacccatactagtatcactgtgcagcctgctggacttacaatatgaaattaaaagcttgtctgttttcatatcctcctgttgtcaytggccaacagcagatgctttggctaataatatttaatccagactattttgctcagttagttggtgctactcaaacgacagtctactgtgtggtgcgtatgtgtcattaaacttaagttctatggggaaaagatagaccactatgcaatacattacacaatagagagtgtaaaagaccctctggttactgctataatatktacaatttcaacctgccagtctattcattgcaaatcatctgttttcattctttttccaaaaagaacatagagcccacgtggatctctcaatcatctctcacctcaagttgtcaactggagtgtgaatgctgcaagacagatcagcttctctttgtgcactctttttagtgctttaaaaccttctggttttgtagttttttttttttgttggtcaggctactttactctgcaaaatctatgcataaaagccaaaacttcttaggtctctcaaaagttcttatcagaaaaaaatatgtatta

SEQ ID NO: 45921 - DNA, 600 bp, Chicken  19866894286432_1
agctgtccgttctgtatctctctcccactctcccacgcagttacagttctgcaccaaggatctgcatggcacacgtagacttttatcaaaagttaataccaccttacattccagagagtctggagatgctacctggacgtcaccgtccattgttcctttgttgcagatacttctgtcattctatgatcttaagtgggtcaaagctttgctggttatcttaaatgcaccttttttgatgttgtttctcccccacttctaggatgggtttcaagtccttgctactgataacctgtgggtaasagatggaaactcttgaataagttgtcatctctcatttctgcatattggtcttattatcatactgcttttcctattggcaatagtccttgcagccctcctgctcaccttctcaactgcgactacctcttagcgcagctctgcatatgctcagccagtgccaacatcacccccacatccacactgactgctcaacagcatccaaatattgttgcaccatggtcagaaggaaacaggacccattctcatccagtgatggatatgtgtgcttttgtacatcacctgtctttttggacccttctc

SEQ ID NO: 45922 - DNA, 600 bp, Chicken  19866894286441_1
ggagctctcagcagctccgcgtcgatgctggcctctgtcaggccgtggttgtgctgtgaggcatccctgcggggctctagctggctccgtttagccctgatttgctgtccgttgggttcactcggctcatccgtctgtacggggaggcttggtgcttcatcgtctgaggcttcacgtgtggcagcagtaggtgcacaaagccgagggtgggtgatgtgacagggagctgcagctgggagggattccccactgctataacaccaaaccaggtctgcagctcacagagctgtagggtatccygagttggaaggggcccataaggatcattgtgtccaactcctggctccagacagcaccaccccgaaatcagaccctgtggctgtctgagtgcttctctcagtctgttagttcacagtagttgtgcttcaccctgggctaagagcgttcaacgcattacatgtcttcctggtttaactgtgtgaactaatactgaccagtctcgtttcagagcgttggtccgggcatagacttgtacagaaatcagctctcaatgtcattgtgcaaatcttcatgtaaactgggttgtgatggcttcgtagc

SEQ ID NO: 45923 - DNA, 600 bp, Chicken  19866894286444_1
taagaagtcttgctagtttttgctttaaccatacttctagctcggactgcaatgcacaatcaacggacatcacccaggatagactcaggaggcaccatgtcccacagcactttaataaaatgcctatcacggcagacctggttgctcctgttctcaggtttttgacagaagttggcaacagccacataatgaaggactggttgggtggttctgaagtcaatccgctgtggacagcacttttatttctgttgtgccattctggtgctacttctggaggacacaatgtgactgcacaacagrcaggtgcaagatccagcttgctttcatcaactgtaacagcggggttgaccactcagcagcggacagcaattgaaaatgcaacagttgctttcttcttacagtgtatttcttgccatcctaataaccagaggcttatggcacaggtgagacagaaaacaaatgagattgttatttctttgttaataatgagtcaaaatttrcgtagttcctarttttgaaacttttttttttctttctttctttgaggtgtttgttttgtaacttgtcatcaactgggagagtttagtgctgaaactgtta

SEQ ID NO: 45924 - DNA, 600 bp, Chicken  19866894286444_2
ttgggtggttctgaagtcaatccgctgtggacagcacttttatttctgttgtgccattctggtgctacttctggaggacacaatgtgactgcacaacagrcaggtgcaagatccagcttgctttcatcaactgtaacagcggggttgaccactcagcagcggacagcaattgaaaatgcaacagttgctttcttcttacagtgtatttcttgccatcctaataaccagaggcttatggcacaggtgagacagaaaacaaatgagattgttatttctttgttaataatgagtcaaaatttrcgtagttcctarttttgaaacttttttttttctttctttctttgaggtgtttgttttgtaacttgtcatcaactgggagagtttagtgctgaaactgttagcttgttggtcagacttacaaaactataagaatacttggacatggccattcagtgctgtgtatggatttgtattccacttggctgtatcaagatgtatttctggccttaacaagacacttcaggccaaaatccacaatgctgtatttaagtacatcggtttaaaatcttctgaagtgggatttgaaaatgaagctccata

SEQ ID NO: 45925 - DNA, 600 bp, Chicken  19866894286444_3
gaagtcaatccgctgtggacagcacttttatttctgttgtgccattctggtgctacttctggaggacacaatgtgactgcacaacagrcaggtgcaagatccagcttgctttcatcaactgtaacagcggggttgaccactcagcagcggacagcaattgaaaatgcaacagttgctttcttcttacagtgtatttcttgccatcctaataaccagaggcttatggcacaggtgagacagaaaacaaatgagattgttatttctttgttaataatgagtcaaaatttrcgtagttcctarttttgaaacttttttttttctttctttctttgaggtgtttgttttgtaacttgtcatcaactgggagagtttagtgctgaaactgttagcttgttggtcagacttacaaaactataagaatacttggacatggccattcagtgctgtgtatggatttgtattccacttggctgtatcaagatgtatttctggccttaacaagacacttcaggccaaaatccacaatgctgtatttaagtacatcggtttaaaatcttctgaagtgggatttgaaaatgaagctccatacatgtattttaa

SEQ ID NO: 45926 - DNA, 600 bp, Chicken  19866894286449_1
gcatttgagaaagcactcataagattcaaaatatttcctaacgttagcaacattagtttctgatagcagattaatagctgaacgcttctgaaacttttgaaattagttatactccttacaagttactcaataaaataatgtgttataaattaaaatcaccaaatttccctgcctttgggaaactgtggctgtcaatgagtatagacattcaaatatctgatcataaaatttatgttagattggattaacctttacatatttaaaaattaataatcctgttaaaagaacattctgatttargagtcatctgcagtaaatcaaacaaggatgcagtcactgttacgattacacatatgcttttgcaatgaaatgcattttctgcaaattgtggagatgcaagataggtaactttttttttttttctttgtcagctgaaccagttgatgtactaaaagtattagaatttcataattcaccggaaggagtatcaagaacagcaggattttgcactaacagaagagattcaaaaggctcagatgttgcctacagagtttcaaaaactgcacagctcagtgccccaacaaagcagctgtacccagg

SEQ ID NO: 45927 - DNA, 600 bp, Chicken  19866894286453_1
acaaaagaaaaaggttttaaggtcaaagtctttgtaaagcgaatagagacgggcagtaatagctgtgttcttgctacacgattaaattcactgtctcgtgtgcaagatgaatggacgtaacggtgcgagccttcgctttgctgacttaaaaataaaaaaaaaaagtatgaattccttaaagttttaatattgttaaatttctcctctgtagggatgctttggacaagcatggctgtgccttgctgcgatagatctaaaatcaaatctggattgtaagaaggttttttctttgttcgctcyggctgatgtgcacttccttgcacccagcaatgcagagccacctcaaacattttttctcagctcragagcagcagtctaagaatttttgtctaacctatggcaaaaagcagaaatcaataataaatgatctggtgccttcctggttgtgctctgtgtatgagtgtcttctctgtagttcaaaggttatggaatttatagtagacaaattcgagctacaaataatactgctagcattttgcaggcaatcttaaaacctttttatttatttccttctctacgagagtcaaataagaggctttt

SEQ ID NO: 45928 - DNA, 600 bp, Chicken  19866894286453_2
gtgttcttgctacacgattaaattcactgtctcgtgtgcaagatgaatggacgtaacggtgcgagccttcgctttgctgacttaaaaataaaaaaaaaaagtatgaattccttaaagttttaatattgttaaatttctcctctgtagggatgctttggacaagcatggctgtgccttgctgcgatagatctaaaatcaaatctggattgtaagaaggttttttctttgttcgctcyggctgatgtgcacttccttgcacccagcaatgcagagccacctcaaacattttttctcagctcragagcagcagtctaagaatttttgtctaacctatggcaaaaagcagaaatcaataataaatgatctggtgccttcctggttgtgctctgtgtatgagtgtcttctctgtagttcaaaggttatggaatttatagtagacaaattcgagctacaaataatactgctagcattttgcaggcaatcttaaaacctttttatttatttccttctctacgagagtcaaataagaggcttttacataccaagtcaaggtttttttagacttaaacttcagaatattttcaatatctgcaacattat

SEQ ID NO: 45929 - DNA, 600 bp, Chicken  19866894286453_3
aaataatactgctagcattttgcaggcaatcttaaaacctttttatttatttccttctctacgagagtcaaataagaggcttttacataccaagtcaaggtttttttagacttaaacttcagaatattttcaatatctgcaacattatcttttgaataataattacctcttatattaaattataagacagcaggattcaggattagatctctgcatattattctagtgaaggaaattatgacaggggtcattttttagaattatgtaggagggtaaaaggtcccaggcagcattagaagrgaaggcgtttataattaaattgtaatttaggcccatgatttatagttttctcaatgaaaaatttggtgctgtggagagatcctaggaggaactttagtgagatacaacttaatgaaataataaaaagaaaaattattctggaatagagtgtattatagcggtacccgttagcacacttcagtgtagctaatgttctgtcagcatttccgtgatatactctgttttccagggttagatctaggcagtaacattccgttttaggctgaaacatggcatgtcagctttcagatcaagagaatt

SEQ ID NO: 45930 - DNA, 600 bp, Chicken  19866894286455_1
acccccacctcaccgcaaacccctctcagagtattgtagggaagataaggccttccctgagcctcctcttctccagactgagcaatcccagctctctcagctgttcctcttaagactcatgctgtagacccttcacatctccactgtccttctctggatatgctccagggcctcgatatctttctggcagtgaagaactcagaactgaacacaatacccaagttgcagcctcaccagtgctgagcacagagggacaatgctgaccggtgagctgttgctttcagggaacattctgactcstcaacccccttcccgatgctcgcagctcatgcagaggccctggttttatatgtagtgttaaggttatccccctcctycccccctccccatgtattatcttgaaaatacaaatactgaatttcatgtctgctgttttaaaattcacccacttggcattatgtgatcaccctcaactctttgcaatcagctttagttctgtgtagcttcattgcagcagcttgaatgtttttgtaccatcttcaggctgtatcatctcactactcaccctccacttccagatttctgcaaagatgtctcgag

SEQ ID NO: 45931 - DNA, 600 bp, Chicken  19866894286455_2
ctgagcaatcccagctctctcagctgttcctcttaagactcatgctgtagacccttcacatctccactgtccttctctggatatgctccagggcctcgatatctttctggcagtgaagaactcagaactgaacacaatacccaagttgcagcctcaccagtgctgagcacagagggacaatgctgaccggtgagctgttgctttcagggaacattctgactcstcaacccccttcccgatgctcgcagctcatgcagaggccctggttttatatgtagtgttaaggttatccccctcctycccccctccccatgtattatcttgaaaatacaaatactgaatttcatgtctgctgttttaaaattcacccacttggcattatgtgatcaccctcaactctttgcaatcagctttagttctgtgtagcttcattgcagcagcttgaatgtttttgtaccatcttcaggctgtatcatctcactactcaccctccacttccagatttctgcaaagatgtctcgagaaacctgtgtgcctacaaaggagctagggaacccagcaagtgatatttgccagcctgctgagggtaggtgggtggtg

SEQ ID NO: 45932 - DNA, 600 bp, Chicken  19866894286456_1
ccaaatacgagggcttctgttagaaggcgcagatggaaaactttctcaacgcgtgtcctaaaactgaacccgaattgggatttcttttaccttgaggatgctgtctgaaaacaaatgccttcttgctcttgctgcaagtgtagctcattaacgctgaggttctgcactctgttttccagtgttgtgtttatctgcgatgtgtttgtgagaggcctctctgtggttgtgagggaaacaaagggaaggtgtagttattaacatgggccgtgagttctggcagcggttaaggatctctatgtytgcatctttgtttttctttcttttcagtatgtgctttctttagaygaamgtgcttaattttgggaacatgctttctatrtgcagcacggcaaatggacagcagcagtggtttggcagaggagcgttggggtatatagccacaacccacttgcttgcagtcagatggctgttttctgagtctgaccattggcgtgtgaacttgcacactgctgtggagggctcaagatgtttccatttgaggctatccggttggtccccaccaagcgtgagcgctgtggtgagggactgtcgtttcagaaa

SEQ ID NO: 45933 - DNA, 600 bp, Chicken  19866894286456_2
tcaacgcgtgtcctaaaactgaacccgaattgggatttcttttaccttgaggatgctgtctgaaaacaaatgccttcttgctcttgctgcaagtgtagctcattaacgctgaggttctgcactctgttttccagtgttgtgtttatctgcgatgtgtttgtgagaggcctctctgtggttgtgagggaaacaaagggaaggtgtagttattaacatgggccgtgagttctggcagcggttaaggatctctatgtytgcatctttgtttttctttcttttcagtatgtgctttctttagaygaamgtgcttaattttgggaacatgctttctatrtgcagcacggcaaatggacagcagcagtggtttggcagaggagcgttggggtatatagccacaacccacttgcttgcagtcagatggctgttttctgagtctgaccattggcgtgtgaacttgcacactgctgtggagggctcaagatgtttccatttgaggctatccggttggtccccaccaagcgtgagcgctgtggtgagggactgtcgtttcagaaacagatgtgaaagctgttctattcgagcaagaccaaacaaatagtt

SEQ ID NO: 45934 - DNA, 600 bp, Chicken  19866894286456_3
cgcgtgtcctaaaactgaacccgaattgggatttcttttaccttgaggatgctgtctgaaaacaaatgccttcttgctcttgctgcaagtgtagctcattaacgctgaggttctgcactctgttttccagtgttgtgtttatctgcgatgtgtttgtgagaggcctctctgtggttgtgagggaaacaaagggaaggtgtagttattaacatgggccgtgagttctggcagcggttaaggatctctatgtytgcatctttgtttttctttcttttcagtatgtgctttctttagaygaamgtgcttaattttgggaacatgctttctatrtgcagcacggcaaatggacagcagcagtggtttggcagaggagcgttggggtatatagccacaacccacttgcttgcagtcagatggctgttttctgagtctgaccattggcgtgtgaacttgcacactgctgtggagggctcaagatgtttccatttgaggctatccggttggtccccaccaagcgtgagcgctgtggtgagggactgtcgtttcagaaacagatgtgaaagctgttctattcgagcaagaccaaacaaatagttgaaa

SEQ ID NO: 45935 - DNA, 600 bp, Chicken  19866894286456_4
atttcttttaccttgaggatgctgtctgaaaacaaatgccttcttgctcttgctgcaagtgtagctcattaacgctgaggttctgcactctgttttccagtgttgtgtttatctgcgatgtgtttgtgagaggcctctctgtggttgtgagggaaacaaagggaaggtgtagttattaacatgggccgtgagttctggcagcggttaaggatctctatgtytgcatctttgtttttctttcttttcagtatgtgctttctttagaygaamgtgcttaattttgggaacatgctttctatrtgcagcacggcaaatggacagcagcagtggtttggcagaggagcgttggggtatatagccacaacccacttgcttgcagtcagatggctgttttctgagtctgaccattggcgtgtgaacttgcacactgctgtggagggctcaagatgtttccatttgaggctatccggttggtccccaccaagcgtgagcgctgtggtgagggactgtcgtttcagaaacagatgtgaaagctgttctattcgagcaagaccaaacaaatagttgaaaacgtaaaatcttggcccgtttctaaacgct

SEQ ID NO: 45936 - DNA, 600 bp, Chicken  19866894286458_1
gtctatctctgttctaaaagaccactggaaaaatgggaaacaacacttaattcaatgtcagagaaaagtgaaagaggaagaccacttaaactgtgagcatgagatatttcagaatcccaggatacagcctgtgatcatgcccatcagggtagacggcagtgaagtacctttgttagaaaagatagaaggcaagcagtggctgattgtcacttggtacatcccaaggttggcatggatactccggtgttcagagtgatgtgcttgaccacctctgaccacctgtctcaccccagagaaaaktgagcagaaaacactatggtaatgattcatctttacctagcacaaggattacaagctctgcttggacaagcccatggtattgtttcaaacatcttaactctgtctgttattttacggtttcccaaatcacagtgctttagaaaaaggacatgtggcaactacctgtgaccagaaaaattcttactgaacagatgaatatctgggactaggaatggacctaaagtgtaagtggacttacggtgtaagtgcttactggacttcctgatagagccacaaaggcttttgtagtatgtatttcaa

SEQ ID NO: 45937 - DNA, 600 bp, Chicken  19866894286466_1
ctcttgctcctgctcccttctgtcgttgtgctgtttgcagtctggctgcccattgcagtacacccatctcattcaccttttccctctgaagggaagtcggagttttccaaatgctccctgagatggagagcagctcctcactggtgatgtttgtcctactaatgtgctccatcagcagcagctatccatattcgtatccaggtgggtacttctaattacgtttttaacctaattgacttgagagaatctcagcacattctcctgcaggttcgagtagcgcttcctgaggtgcacaagagraagatgagcacttggttttgtttccatgagacatyggccatttgtagcttccttcttaggcccacgttctgtttttcctgtactgccccgtgacatcraaacccacatttgaattatgacttgcaattgtggcaatgttttcaggccttcagaaattccctgagcttcaatacgaaaatagcacttgtaaaggtgatcaaatctttaacacaggaagagatttcagagatgaaatgaatggttcgatgctgtttttctagtgttcatgaggaaagatgcagcgcatgaggtgctgagggt

SEQ ID NO: 45938 - DNA, 600 bp, Chicken  19866894286466_2
tgcagtctggctgcccattgcagtacacccatctcattcaccttttccctctgaagggaagtcggagttttccaaatgctccctgagatggagagcagctcctcactggtgatgtttgtcctactaatgtgctccatcagcagcagctatccatattcgtatccaggtgggtacttctaattacgtttttaacctaattgacttgagagaatctcagcacattctcctgcaggttcgagtagcgcttcctgaggtgcacaagagraagatgagcacttggttttgtttccatgagacatyggccatttgtagcttccttcttaggcccacgttctgtttttcctgtactgccccgtgacatcraaacccacatttgaattatgacttgcaattgtggcaatgttttcaggccttcagaaattccctgagcttcaatacgaaaatagcacttgtaaaggtgatcaaatctttaacacaggaagagatttcagagatgaaatgaatggttcgatgctgtttttctagtgttcatgaggaaagatgcagcgcatgaggtgctgagggtccataaacgtgccaactactttctagaagagatcc

SEQ ID NO: 45939 - DNA, 600 bp, Chicken  19866894286466_3
ggagttttccaaatgctccctgagatggagagcagctcctcactggtgatgtttgtcctactaatgtgctccatcagcagcagctatccatattcgtatccaggtgggtacttctaattacgtttttaacctaattgacttgagagaatctcagcacattctcctgcaggttcgagtagcgcttcctgaggtgcacaagagraagatgagcacttggttttgtttccatgagacatyggccatttgtagcttccttcttaggcccacgttctgtttttcctgtactgccccgtgacatcraaacccacatttgaattatgacttgcaattgtggcaatgttttcaggccttcagaaattccctgagcttcaatacgaaaatagcacttgtaaaggtgatcaaatctttaacacaggaagagatttcagagatgaaatgaatggttcgatgctgtttttctagtgttcatgaggaaagatgcagcgcatgaggtgctgagggtccataaacgtgccaactactttctagaagagatccgcctggggaacttggagagggaatgcaacgaggagaagtgctcgtttgaggaggcgaaggaga

SEQ ID NO: 45940 - DNA, 599 bp, Chicken  19866894286470_1
  misc_feature (1)..(207): n is any nucleotide
nnnnnnnnnnnnnnnnnnnnnnnnnnnnnnnnnnnnnnnnnnnnnnnnnnnnnnnnnnnnnnnnnnnnnnnnnnnnnnnnnnnnnnnnnnnnnnnnnnnnnnnnnnnnnnnnnnnnnnnnnnnnnnnnnnnnnnnnnnnnnnnnnnnnnnnnnnnnnnnnnnnnnnnnnnnnnnnnnnnnnnnnnnnnnnnnnnnnnnnnnnnnnnncatgtccagagaagggcagcaaagctgatgagggggcctggagcacaggtcttatgaggagcagctgagggaggtgggattcttctggaaaaraggaggctcaggggagaccttatcactttttacaactacctgaagggagattgtggcaaggtggggatttggcctgttgtcccatataactgttgacgggacaagggggaatggcctgaagttgttccaggcaaggttcaggttggatattaggaagaatttattctcagaaagattggtcaggcattggttgcttagggaagtgatggagttgccgttcctggaggtgtttaaggaaagggtagatgtatttagggacatggtttagtggagcaatactggtggtacgtggacggttg

SEQ ID NO: 45941 - DNA, 599 bp, Chicken  19866894286471_1
  misc_feature (1)..(24): n is any nucleotide
nnnnnnnnnnnnnnnnnnnnnnnnattgttgtcttttccttaaaaagaaaagaatccactggcttcattatttacttgtagcagaattcttcagtttactttatccagtgaatcagttcttcttcttttgtttagtaaccttgaatgccatcctaaggacaatttctatagatttttatatatataaaatattttgagcatgttaaaaaatggtgtagggcaaggggcccaagacattacttgcttctacaaaacccaggtattatgtactaaatgattaaaactgctctgacatttagrccttagtagtagtttcctgcatttttatgctctaacagaattttgtgtagttgatagaaaaagggcttgaaagagcttttgtttaaagcagaacaaagatattaagtaaaatagagatgtattgttaattttgttttactgtgtttttatttgaaatttgatgcttgggattcctttcctattgcaccttccttttkacagagtatttaagtttgagtacacattgtagatctcttaattaagacatttctcagtgtcctctatattcttcttactgcattccctagcattttttgccg

SEQ ID NO: 45942 - DNA, 600 bp, Chicken  19866894286471_2
gcatgttaaaaaatggtgtagggcaaggggcccaagacattacttgcttctacaaaacccaggtattatgtactaaatgattaaaactgctctgacatttagrccttagtagtagtttcctgcatttttatgctctaacagaattttgtgtagttgatagaaaaagggcttgaaagagcttttgtttaaagcagaacaaagatattaagtaaaatagagatgtattgttaattttgttttactgtgtttttatttgaaatttgatgcttgggattcctttcctattgcaccttccttttkacagagtatttaagtttgagtacacattgtagatctcttaattaagacatttctcagtgtcctctatattcttcttactgcattccctagcattttttgccgcttagtattttggtcacaatggacacacyrtgttttctttgctgtttaccttcatttcatcactgttgtaatattgtaattgatgaccacttatttctgagattttgactgggtgttgcctattgaaattttctggtcatgcatgagatagtgtagttttgtacacagtacattatttgagttttagtaagtgttaga

SEQ ID NO: 45943 - DNA, 600 bp, Chicken  19866894286471_3
gctctaacagaattttgtgtagttgatagaaaaagggcttgaaagagcttttgtttaaagcagaacaaagatattaagtaaaatagagatgtattgttaattttgttttactgtgtttttatttgaaatttgatgcttgggattcctttcctattgcaccttccttttkacagagtatttaagtttgagtacacattgtagatctcttaattaagacatttctcagtgtcctctatattcttcttactgcattccctagcattttttgccgcttagtattttggtcacaatggacacacyrtgttttctttgctgtttaccttcatttcatcactgttgtaatattgtaattgatgaccacttatttctgagattttgactgggtgttgcctattgaaattttctggtcatgcatgagatagtgtagttttgtacacagtacattatttgagttttagtaagtgttagaacttgaaatactagaaaaatctcctgctacaacttgacctgtatattttaagtgcttaaaatatctgtagtaaggtagaccctggagcagtgcttaaattgggtgatttaaactggaccactctcttgcac

SEQ ID NO: 45944 - DNA, 600 bp, Chicken  19866894286471_4
ctctaacagaattttgtgtagttgatagaaaaagggcttgaaagagcttttgtttaaagcagaacaaagatattaagtaaaatagagatgtattgttaattttgttttactgtgtttttatttgaaatttgatgcttgggattcctttcctattgcaccttccttttkacagagtatttaagtttgagtacacattgtagatctcttaattaagacatttctcagtgtcctctatattcttcttactgcattccctagcattttttgccgcttagtattttggtcacaatggacacacyrtgttttctttgctgtttaccttcatttcatcactgttgtaatattgtaattgatgaccacttatttctgagattttgactgggtgttgcctattgaaattttctggtcatgcatgagatagtgtagttttgtacacagtacattatttgagttttagtaagtgttagaacttgaaatactagaaaaatctcctgctacaacttgacctgtatattttaagtgcttaaaatatctgtagtaaggtagaccctggagcagtgcttaaattgggtgatttaaactggaccactctcttgcacc

SEQ ID NO: 45945 - DNA, 516 bp, Chicken  19866894286471_5
ttaactaagttaatttaactgagttaactgataccttggctttttcagtctgatggaattttgtgataggaagtttcataacattccattttgtgcctgattgaataactcatttgaaggtatctgttttcttgttgtggcatctgatagaatttacactgtatttctttagaaagctgtaggtgttctctggaagtggcagaatacatcagtgtgtgtgactgggatattacaagatactgtttataagtttgatgttaaaacacttaaatggactgaacttgtggcaggaataaaacrcagcttcagttggagtaagtagctctgcaagttttaacagcgggaattaatatcaaagtttccttgcttagatacatatctgctttgttgtacacctatgaagtgttgcttgtttctggagtgtcaactaaaacactgcagggtggctttatatacatttatttacacctctgactttgacatagtatgactacaggatgggaaatggaaatttga

SEQ ID NO: 45946 - DNA, 600 bp, Chicken  19866894286473_1
tgccacttgctgcactactggcaggcacacagacacgacgctgatgtgagtgcagcggaacaagcaccataaaaacattacttcccagtacttctagaaagcacaatgactggcattcctacaaaccactgatgatactcccctacttttattagccagtaccagcgagacactacatctcattaagaaacataaaaagagtaatcttttctcctctatcttggttcctgtgctgctccccttaggactatcctatagggatggtgggtattggtattgcaaaacagtactattttcatytgaactgtaatgcacgttgcagtgaattcagaagtctgtgcacaggataaagaaatgcactggtgaagtaaatgcwgttttaaattaaaaggggatgcagtggcagaaaatagctaccctcatgtctcaggtgtgtatcrgtcatatacaacttcaaaagcagaatccccatctagttagaaaacattctggggacgctgacagtgttctgtggtttcctatttgcatttattgactacgttgccctccacatgtaaaatattttgcacaaaaattatctgattgtagaggtctgttgta

SEQ ID NO: 45947 - DNA, 600 bp, Chicken  19866894286473_2
attacttcccagtacttctagaaagcacaatgactggcattcctacaaaccactgatgatactcccctacttttattagccagtaccagcgagacactacatctcattaagaaacataaaaagagtaatcttttctcctctatcttggttcctgtgctgctccccttaggactatcctatagggatggtgggtattggtattgcaaaacagtactattttcatytgaactgtaatgcacgttgcagtgaattcagaagtctgtgcacaggataaagaaatgcactggtgaagtaaatgcwgttttaaattaaaaggggatgcagtggcagaaaatagctaccctcatgtctcaggtgtgtatcrgtcatatacaacttcaaaagcagaatccccatctagttagaaaacattctggggacgctgacagtgttctgtggtttcctatttgcatttattgactacgttgccctccacatgtaaaatattttgcacaaaaattatctgattgtagaggtctgttgtaatgggactaagagactatccaaaaggcagacttcagatgatcatcaacatattattggctagtataaaagctgcag

SEQ ID NO: 45948 - DNA, 600 bp, Chicken  19866894286473_3
ccctacttttattagccagtaccagcgagacactacatctcattaagaaacataaaaagagtaatcttttctcctctatcttggttcctgtgctgctccccttaggactatcctatagggatggtgggtattggtattgcaaaacagtactattttcatytgaactgtaatgcacgttgcagtgaattcagaagtctgtgcacaggataaagaaatgcactggtgaagtaaatgcwgttttaaattaaaaggggatgcagtggcagaaaatagctaccctcatgtctcaggtgtgtatcrgtcatatacaacttcaaaagcagaatccccatctagttagaaaacattctggggacgctgacagtgttctgtggtttcctatttgcatttattgactacgttgccctccacatgtaaaatattttgcacaaaaattatctgattgtagaggtctgttgtaatgggactaagagactatccaaaaggcagacttcagatgatcatcaacatattattggctagtataaaagctgcagaaatgtattctgsacaagattttgctcttgattcttcagatttctaacatctagctgacctagt

SEQ ID NO: 45949 - DNA, 600 bp, Chicken  19866894286473_4
aggggatgcagtggcagaaaatagctaccctcatgtctcaggtgtgtatcrgtcatatacaacttcaaaagcagaatccccatctagttagaaaacattctggggacgctgacagtgttctgtggtttcctatttgcatttattgactacgttgccctccacatgtaaaatattttgcacaaaaattatctgattgtagaggtctgttgtaatgggactaagagactatccaaaaggcagacttcagatgatcatcaacatattattggctagtataaaagctgcagaaatgtattctgsacaagattttgctcttgattcttcagatttctaacatctagctgacctagtagatacagagatgataaacctcaatttgacatgtcagccagaagatgcattgaaagatttctgaggatcttttaaggcaagttgttcatgcgtatgttcactctactgtgcatgatcacttacaccaaggactttttaaaccacagcagtaccttgaggcagcttgctgaagccctctgccatgcagagcacccacagtgtacacacagatgctgggagcactcagcgcctttggtttctctccaccct

SEQ ID NO: 45950 - DNA, 600 bp, Chicken  19866894286475_1
ccaaaagcacccacagagtgggagtcagagttactacattgtagagttagaagactgacatatcatcccccaaaaggtccatgtctgtgatgcatgaaaacatttctttctctatgtataaagcaatagttcatgaaggaatattccctattcttatcatgtttaaagaataataactaaagagaaagcagaaatgtgtcacatcatcagctggtaatcatcagttttacttcatctaattcagcgagagctggcagtaccttttctgccaagtgtcaattctttttgagaaaaggtcamtttgtatgcagtcacaccagcagggctcagggtgagggagcaacccaaacagtagggacctatgcattattcagactgaccatcatgcaggacggttggactgtattcctggaacatcagctcaagtgggaagcaaggggtcacactaaggagtcctgcatcttctgcactcaagctgttttggataaactgctgttttcatgtactcctttttctcacagtagccatcctttcagtgtgtttgttctcatttcaaattaccaattgagcctttcatctaaaatatgagggacattacag

SEQ ID NO: 45951 - DNA, 600 bp, Chicken  19866894286485_1
ccttgagccttggatttcagtcatcttcagaggttgacgaatgtcgccgagcgactgttcgaggttcactggagagcaatattcagccaaggcgcggcatggacgaggcaacacaccagtgtgcttactagtagccaaaccatttaataactgcgaacagccatttatatagagaggtacaaatagcatgctaagcactcaaggcacggttcccataacttgcagttgattgcatcttgtctcatgaatgctggcacagcggtctcatatcgcagctccgcattacttccgcctacttcrtccttgttctgtgcgagtcagcgatctgtagcggctgttttgctcgcagtgctccaggggagacaaacatgacctccctgggtcagccatccttccacaactcccctgttcttttcttgcacaagcaaaacagccgaggtaacctttgagaacattttcttaacaacagcgataaccgtacaaattatgaggattcccaccaccagcaacatcaatagacgaaggccctccttgacaaggccattaagccatcccgtgatgcctaaactattcagccacttgtcaaagggacataattct

SEQ ID NO: 45952 - DNA, 600 bp, Chicken  19866894286496_1
ctacttaccctgagaaggcctcaggtatgcatgggtctccagcaagacacaccctcacctccaccaccaacacttaaatgagctctggaaggggtgggtcctggctccagcccttccatcactcgggtacactgcatgcacctgagctcccctgggctggccctgccttccctccaggtgctcaatcactgcttcaggctgtgacagcatttctgttacacgagccttgtattttgtctctacccccgttcacctatgtgcaaaacacatcctcttctattccatttaagtcaaactgcscaccacaaaatggtacctgagtgctcccacttcagcaacgaaccaagttcattaagcagtgtgactagctcctaccttcttgctcttcctgggcaggaagctgcctcagatggactctcaggcacgctgtgccagatgtgctcacatgactgcggggagaggggcacgttgctctgccctcctacgtggggccgcagtccttctccccctgcagctcaggagccttctcctattccccatttagagggatcaccctccctatgcttgtttgttccacgtccatccaggacagtatctgac

SEQ ID NO: 45953 - DNA, 600 bp, Chicken  19866894286498_1
tgcatatgagtctcaaaaagccattattattcaaaaatctatctatggtttgtgaacaacttcttagcatcacagctcaaaactggtgagcatgctctaacccatgaacggcacttaccatcattgcttttggacagatttggcaaaaaaatgccacacgagatgctgtcagatatggagagctggccctgacttgccatgtgagcgcttcattggtcaccttcctagtgccagctgcctacctcatgaatagcacgttttgatgtttgagattgcaatgttaaacataagatttttccrtttaggacataacgaggccaaggactttccaaatctgtgatttccccactttcctttcaagccgtaagggattacatggatccagaaccatggtgtttaccttccttcaaatagtttgttatagcctgacagtatgtcaggatggaaatggaaagaagaaacaacagatggacacttacaaaattaaaatattatttgcagagctttaagaactggcaaaatgtatagtaacaattcatcagttcttctctctgaagtggtcttttgattaaaaaaatgccatctgagcaatgctttaac

SEQ ID NO: 45954 - DNA, 600 bp, Chicken  19866894286504_1
ttggcaatggtcttgcacagtcaactgctgtaaattccagagttctgtattatagttacacggtaagcaccactattttacacactaaatcatggagttttacccaagaagctacaatttcagctgctttcctgcattgtttgtatttatggggagcgttcatcactgatagataaggtccatttgtgctgctgttgttgctgcctgagactgagaatgcaatgatttctcagaaatcctttctatttcttgctgtcccgtgtcacccagaaaattaactctagcaaaagcaagcagaaragtggaacagacagtgtgaattcaaagcatatttgagggagacttttgatttcataactgcacagttgtctggttactactccatttactctttatgaaaactgcagtggagttttctgcctaggcactcagataacaaagaaatgagtattggatgtaatagcgaataaggagggtaacattaaagtttgtagctgaatcaacatttgtttctataatgtagaattacaaaaagtgtttgaaataaaacccagtgtaaaaacatgagaaaatatccgtgtcccagcaatggcagaattg

SEQ ID NO: 45955 - DNA, 600 bp, Chicken  19866894286508_1
aaaaaaggaaatggtgacatatggtcttttgcatttctcatttagatggcagcagtttgctaagggggtcactgtatatcccagcaacctcatagtaacaggatatttacagtctgttgagataacttaatgactttccaactgtgcttctgatttgtgattttattgacaaagggtacatgaggcaaggctagacagccatagagacatctgggacactgcagtagccactcagactggagtgcatgtgctgcctatccaacaacaaaagcaataaaatttctgggatgggaagaagayatccttgctacaagcattcttccctcacatctcatataactagcagtacttctttcacaccaggtcctgctgcagggacgcatggccaagaggatccacgtctgcccataggcctcaattgccagctcagggtcaaagaagatcaaaaacctgccatatacatcagtttccagctgaactgcaatggcctttttacagatttgttagaattgagttaatttacagagagacttaaaaattgcttatttcattcatttctcaattccttgacagattcactttcagattcactcagctcag

SEQ ID NO: 45956 - DNA, 600 bp, Chicken  19866894286511_1
aaatcccggccctcccggccctgcacaaaggtatttcctcagtggtgcatgcacggagaagggccctgagccccgtggtgaagggaaacagcatcatgaggtggcggagtgccctctgctttcctgtatgtctctgtggggctcagcaaaacctgggggtttgttctgctttgggggatgacctggcttcatttggcccaggggttcagtcctctcccagtgtgactgagagctgctgtatgggaactgccccttggctccctcccgttggcctacagccaccatggcaccactgggccyggggagcactgcagcacacagccccacgctccctcctgaccccagcagaagctgccgtcaaagatttttctacttggataatggtaattaggatgggcaaattagattgcctakgagcagctgcaratccctcctgrgaaggaggagctccatcatcccaggtgtctccaccatctcatgtggctcttcccctgctctgggtgctggggccacatccatctgtgtggcgcggagctgacggctggctctctcctctcccaaggtggatgctccccgggaccggcgggcgggcaccccgca

SEQ ID NO: 45957 - DNA, 600 bp, Chicken  19866894286511_2
tctgctttcctgtatgtctctgtggggctcagcaaaacctgggggtttgttctgctttgggggatgacctggcttcatttggcccaggggttcagtcctctcccagtgtgactgagagctgctgtatgggaactgccccttggctccctcccgttggcctacagccaccatggcaccactgggccyggggagcactgcagcacacagccccacgctccctcctgaccccagcagaagctgccgtcaaagatttttctacttggataatggtaattaggatgggcaaattagattgcctakgagcagctgcaratccctcctgrgaaggaggagctccatcatcccaggtgtctccaccatctcatgtggctcttcccctgctctgggtgctggggccacatccatctgtgtggcgcggagctgacggctggctctctcctctcccaaggtggatgctccccgggaccggcgggcgggcaccccgcagagccgcagctgcaccgagctgcaccggcacctcacctccgccaccccctgcgcccagaccaaagccccccgcgcacccgagcagtgccagagcggccaccaccacccgcccat

SEQ ID NO: 45958 - DNA, 600 bp, Chicken  19866894286511_3
tatgtctctgtggggctcagcaaaacctgggggtttgttctgctttgggggatgacctggcttcatttggcccaggggttcagtcctctcccagtgtgactgagagctgctgtatgggaactgccccttggctccctcccgttggcctacagccaccatggcaccactgggccyggggagcactgcagcacacagccccacgctccctcctgaccccagcagaagctgccgtcaaagatttttctacttggataatggtaattaggatgggcaaattagattgcctakgagcagctgcaratccctcctgrgaaggaggagctccatcatcccaggtgtctccaccatctcatgtggctcttcccctgctctgggtgctggggccacatccatctgtgtggcgcggagctgacggctggctctctcctctcccaaggtggatgctccccgggaccggcgggcgggcaccccgcagagccgcagctgcaccgagctgcaccggcacctcacctccgccaccccctgcgcccagaccaaagccccccgcgcacccgagcagtgccagagcggccaccaccacccgcccatggccgactgcgg

SEQ ID NO: 45959 - DNA, 600 bp, Chicken  19866894286511_4
ggggctcagcaaaacctgggggtttgttctgctttgggggatgacctggcttcatttggcccaggggttcagtcctctcccagtgtgactgagagctgctgtatgggaactgccccttggctccctcccgttggcctacagccaccatggcaccactgggccyggggagcactgcagcacacagccccacgctccctcctgaccccagcagaagctgccgtcaaagatttttctacttggataatggtaattaggatgggcaaattagattgcctakgagcagctgcaratccctcctgrgaaggaggagctccatcatcccaggtgtctccaccatctcatgtggctcttcccctgctctgggtgctggggccacatccatctgtgtggcgcggagctgacggctggctctctcctctcccaaggtggatgctccccgggaccggcgggcgggcaccccgcagagccgcagctgcaccgagctgcaccggcacctcacctccgccaccccctgcgcccagaccaaagccccccgcgcacccgagcagtgccagagcggccaccaccacccgcccatggccgactgcggacagcacgagg

SEQ ID NO: 45960 - DNA, 600 bp, Chicken  19866894286515_1
atataccagaataaaccagaatgtatactatagtaaataaaaaatgaaaatatttttactctcagaaatgtgacatacagctacaacatctgagcacaaaaggttattaaaatgccaaggttatatatcaggagggagaatctggagattatcacaggaatttcttctaaaaaaatgttctttactgtctaataaattaaaactttgcaaatttatgttcatgctgtataaaggaatgaaaaaagcatcttaaagtaatgaagctgaaatttaaaaaatgtgaaacaaaaaaatcacatraactacagatcttacattttcagagaatcatagagtcaaagaatggattacattggaggagaccttaaagatcatctagttccatgccccctgccatcggcaggtttgccagctgctatgtcagggtgcccaccatcccatacaacctggccttcagtgcctccagagatgggaaatgcagagcctttctgggcaaactgttacagagtgtgaatgagtgcatctgtcataaatcacagtcaaaatgaataataataataataataattaaaaaaaaaacacgtatgtcagtggtgtttg

SEQ ID NO: 45961 - DNA, 599 bp, Chicken  19866894286518_1
  misc_feature (1)..(171): n is any nucleotide
nnnnnnnnnnnnnnnnnnnnnnnnnnnnnnnnnnnnnnnnnnnnnnnnnnnnnnnnnnnnnnnnnnnnnnnnnnnnnnnnnnnnnnnnnnnnnnnnnnnnnnnnnnnnnnnnnnnnnnnnnnnnnnnnnnnnnnnnnnnnnnnnnnnnnnnnnnnnnnnnnnnnnnnnnnnaattgcattgtgaagatcttgcaaagcattggaacagactacagtcagcacagggaaggaactgtctcctccccagttgcatgcaaacatctttgcttaaatattttgcacatccagattattgcttaytgaaatggctaggcaaatgcctctgcactcatttccacatgctgtaagatgttcttctgtgctcgcaggtgctcattgcacacttccagctcttccaggttgcatgtggttagctggatgcttatcttgctgctcctcatgcacacagcctccactgtaccaaacaactcygctsatactttatttttttatggcagtgcggccagtaagtgaggactgctgggaaagatttgttctgccatagaaataaggctgcctcttcttttctaagcttatagatgattattaatgtaactaat

SEQ ID NO: 45962 - DNA, 600 bp, Chicken  19866894286518_2
aattgcattgtgaagatcttgcaaagcattggaacagactacagtcagcacagggaaggaactgtctcctccccagttgcatgcaaacatctttgcttaaatattttgcacatccagattattgcttaytgaaatggctaggcaaatgcctctgcactcatttccacatgctgtaagatgttcttctgtgctcgcaggtgctcattgcacacttccagctcttccaggttgcatgtggttagctggatgcttatcttgctgctcctcatgcacacagcctccactgtaccaaacaactcygctsatactttatttttttatggcagtgcggccagtaagtgaggactgctgggaaagatttgttctgccatagaaataaggctgcctcttcttttctaagcttatagatgattattaatgtaactaattttgattgtatgatagtttaatttctcctctgtaagcagagaccaggaggagctgcagattaataggatttcttttattgtgcaaatacaacagtgtttcagggcttttgactctaagggtggttgggccttttagtgtctgtgcaattctagctgcagctagttgttggta

SEQ ID NO: 45963 - DNA, 600 bp, Chicken  19866894286518_3
gcattgtgaagatcttgcaaagcattggaacagactacagtcagcacagggaaggaactgtctcctccccagttgcatgcaaacatctttgcttaaatattttgcacatccagattattgcttaytgaaatggctaggcaaatgcctctgcactcatttccacatgctgtaagatgttcttctgtgctcgcaggtgctcattgcacacttccagctcttccaggttgcatgtggttagctggatgcttatcttgctgctcctcatgcacacagcctccactgtaccaaacaactcygctsatactttatttttttatggcagtgcggccagtaagtgaggactgctgggaaagatttgttctgccatagaaataaggctgcctcttcttttctaagcttatagatgattattaatgtaactaattttgattgtatgatagtttaatttctcctctgtaagcagagaccaggaggagctgcagattaataggatttcttttattgtgcaaatacaacagtgtttcagggcttttgactctaagggtggttgggccttttagtgtctgtgcaattctagctgcagctagttgttggtactca

SEQ ID NO: 45964 - DNA, 600 bp, Chicken  19866894286525_1
ctaatactatctttcttaatgatcagatattgtagaggtatgaattttagaaatacagctatatgcacatctaaggcttttgacatttgtctcttgctaacactggtactgctattttgagctgatgcctacattaggaaaatcaaatataaacatgtacctggaataaatatgctgtgctttctaacagctcaccaaatatgagttacgaaagaattcctttcataattgtgtttctttttcctggcattatttgtgtgaccttctctcatggtgtgagatgatttctaatgagcaagrgattctctgagaaagccaaatgttatgagttaattagtactaaaatgtgaatgaaagacagtctactcagtcaccttaggcttggtgaaggaaggaaagagatttatcattttgaaagttgctaattgtgcctgtttctctgtttggagaagggagtctgcaggtctgggccagttgcccttggggacctatctgttaactcactgtcaccttctcttgagataccatcatcttgtaatgctgagcaataaaatttgtaattgtaggtcttttgaagcccatagctgaaagacactaact

SEQ ID NO: 45965 - DNA, 551 bp, Chicken  19866894286525_2
aaaatgtgaatgaaagacagtctactcagtcaccttaggcttggtgaaggaaggaaagagatttatcattttgaaagttgctaattgtgcctgtttctctgtttggagaagggagtctgcaggtctgggccagttgcccttggggacctatctgttaactcactgtcaccttctcttgagataccatcatcttgtaatgctgagcaataaaatttgtaattgtaggtcttttgaagcccatagctgaaagacactaactcagtttgtttacactcaaaaagttcacaagaaaaacttaartaattagattagtttaatgggtagataccaagaatagggctgtgtccagtataaactggcatttcagccagagttctgtttagcactgctttgtagtagaaatagtgtagtattaaaaatgtctccaaaaagcatcagctcatcatggaattcattattattataattacagtgacactaatttgtatgaattttatttcatttctgtgaactatctaccattcacacagctaacaagaggaaacaaagaa

SEQ ID NO: 45966 - DNA, 599 bp, Chicken  19866894286530_1
  misc_feature (1)..(140): n is any nucleotide
nnnnnnnnnnnnnnnnnnnnnnnnnnnnnnnnnnnnnnnnnnnnnnnnnnnnnnnnnnnnnnnnnnnnnnnnnnnnnnnnnnnnnnnnnnnnnnnnnnnnnnnnnnnnnnnnnnnnnnnnnnnnnnnnnnnnnnnnnnnnaattgctgtgtggcacacggaaggataattcagttatgtaactggcaacgggatttgcactttgcaaatgttgtttcagtaaatcagacccagctcagacaacgtggccgtttcacagggctcagcactgctgtctgattttgggaggggatttttaggktggggggagaaggcaacaccaggaggttgctgatggcagcagtgaatgaggaggaagtccaaagaatgtgacaaaactctgcgatgccctgtttgcttgtcaacaggagctgctttcattacacttttaaaggcctgttggattaaggaagcattagaggaatgcatctccctgtcctctctcctccagagcctgctgctggtggtgcccattagcgctaatgcaagcgcattagcacgttgaaaggattcctgtgttacagcagtccctgatgacttcactccttcttctctctctaa

SEQ ID NO: 45967 - DNA, 599 bp, Chicken  19866894286533_1
  misc_feature (1)..(4): n is any nucleotide
nnnncctgagtaagcactgacgagatgcagacacttggagtccaagctacatccactaacactgaaagaaattcacagggctgcatgcacggacacctgctctctgcttgtacagtggcactgtgtcagcaacacaacctgctccacctccatgcaacggctcccaccttcacactcagtgcttccatcaccccaagtcctcccagccccattctccaaacccatcattatcctgcacctatcacctttcagaaacagagggaaggctcttatggagaacgagctgtgagcaacaggaaygactccacatctgctgccaggtgagcagaacatctgggtctcaatcttacccctgagctccccccctccctgctcaccagayaacaggagcagaaatcaaagcrcatcccagcacyaaaggctttgggctgcagtgatgctcttcccatgcaaacaggagaagcgtctcctgcacggaacacaattcagcatgtaaatcttctggagctgccaaaagcaacctgttataaatggccctctacgttgtgagatatggactctccacagcacggttaataaataatgctctgatctctgtg

SEQ ID NO: 45968 - DNA, 600 bp, Chicken  19866894286533_2
gcatgcacggacacctgctctctgcttgtacagtggcactgtgtcagcaacacaacctgctccacctccatgcaacggctcccaccttcacactcagtgcttccatcaccccaagtcctcccagccccattctccaaacccatcattatcctgcacctatcacctttcagaaacagagggaaggctcttatggagaacgagctgtgagcaacaggaaygactccacatctgctgccaggtgagcagaacatctgggtctcaatcttacccctgagctccccccctccctgctcaccagayaacaggagcagaaatcaaagcrcatcccagcacyaaaggctttgggctgcagtgatgctcttcccatgcaaacaggagaagcgtctcctgcacggaacacaattcagcatgtaaatcttctggagctgccaaaagcaacctgttataaatggccctctacgttgtgagatatggactctccacagcacggttaataaataatgctctgatctctgtgtatggaattgtaagttcagtgacagttctgcttatccaagagaggacacagttacaggatgggctgccaggaaaaaaagtact

SEQ ID NO: 45969 - DNA, 582 bp, Chicken  19866894286533_3
tgcttgtacagtggcactgtgtcagcaacacaacctgctccacctccatgcaacggctcccaccttcacactcagtgcttccatcaccccaagtcctcccagccccattctccaaacccatcattatcctgcacctatcacctttcagaaacagagggaaggctcttatggagaacgagctgtgagcaacaggaaygactccacatctgctgccaggtgagcagaacatctgggtctcaatcttacccctgagctccccccctccctgctcaccagayaacaggagcagaaatcaaagcrcatcccagcacyaaaggctttgggctgcagtgatgctcttcccatgcaaacaggagaagcgtctcctgcacggaacacaattcagcatgtaaatcttctggagctgccaaaagcaacctgttataaatggccctctacgttgtgagatatggactctccacagcacggttaataaataatgctctgatctctgtgtatggaattgtaagttcagtgacagttctgcttatccaagagaggacacagttacaggatgggctgccaggaaaaaaagtactttta

SEQ ID NO: 45970 - DNA, 570 bp, Chicken  19866894286533_4
ggcactgtgtcagcaacacaacctgctccacctccatgcaacggctcccaccttcacactcagtgcttccatcaccccaagtcctcccagccccattctccaaacccatcattatcctgcacctatcacctttcagaaacagagggaaggctcttatggagaacgagctgtgagcaacaggaaygactccacatctgctgccaggtgagcagaacatctgggtctcaatcttacccctgagctccccccctccctgctcaccagayaacaggagcagaaatcaaagcrcatcccagcacyaaaggctttgggctgcagtgatgctcttcccatgcaaacaggagaagcgtctcctgcacggaacacaattcagcatgtaaatcttctggagctgccaaaagcaacctgttataaatggccctctacgttgtgagatatggactctccacagcacggttaataaataatgctctgatctctgtgtatggaattgtaagttcagtgacagttctgcttatccaagagaggacacagttacaggatgggctgccaggaaaaaaagtactttta

SEQ ID NO: 45971 - DNA, 600 bp, Chicken  19866894286534_1
gatgagattcaacaaggcgaggtctgcactcggatcttggcaattctagatatgtctgcaggctgggagaagaattcattgagagcagtcctgcagaataaaacttgggagttctggtggatgaaaagtttggtatgggccagcagtgtgcactggcagcccagaaggtcaacagtatcctgggctgtatccaaagaggggtggcagcagggcgcaggaagtgattgtccccctttgctctgcccttgtaaggctccatctgtagtactgtgtccaggcctagggcccctagcacaaacrtgatgtacataaaggttatcaaagggctggagcacctctcctatgagaaagggctgagggagctgggcttggttagcttagagaagagaaggctctgagaagacctcattgtggctttctagtacttaaagggaacttacaaacaggagagcgagaccaatttttttttacatatcctggtgatagggcaagagggaatggttttaaactaaaaagtggatatttcagttagatgttaaggggaaattctttactcagaggatgggtgatgtactggcatgggctgcccagagaaattgt

SEQ ID NO: 45972 - DNA, 600 bp, Chicken  19866894286538_1
aggctgtggaataatctctcaagggagctgatagaaactttgccacgtgagatttttaaaagtagctgggaaaaaaatgcttttaaaaaatgtaccatgaaacatactcccttagtagagagagaatggactaagtgtcttcacaaggctatctttttatatcaagtttctgtagatatttgcacagaaacacgagcgttgctaattaactgctcatctgtttcatgtgcttatggcttaccagctatagtcaaatcccatctgccacttgaggacaattaagtgggctgagtgtcatcrttttatgactgcacctggccacgagcaggtattccagatggacagcatgggaagcaggagacacctagaagagagagggaaagctgtctcttcaataagcaattgcaagttgttctaaatccattcatgtaagaaacaaaaatattgttttgaggtggttctagtgaatggtatgaaatccgtatgtatggtttcagtatcaatataagagctatgaattttgcatcaaactaagattttgtctgcagctttgtatcaagtttatcactagccattgtcactggggataggcaaggagat

SEQ ID NO: 45973 - DNA, 599 bp, Chicken  19866894286540_1
  misc_feature (1)..(76): n is any nucleotide
nnnnnnnnnnnnnnnnnnnnnnnnnnnnnnnnnnnnnnnnnnnnnnnnnnnnnnnnnnnnnnnnnnnnnnnnnnnnatagaaggccaccagatttgtcaggtatgatctgtcttagatcacctccctcatctcacatatgacttaacatctcttccaggaggatctggcacagatttgagcctcatcagcttgtagtttcctgggtcttcctttcttcttttcttatatggaactgatgtttctctttttccagtcactggggacttcacctgagagacctaatttttcagatatgatgragagtggcttgggaagcatataagcaagttccttcaaaacactgggatggggtaaaatgagtcctttccctcatggaatggtaatcaggaatcacaatatgtttaactagtcttgaccttccccaagtcctccttagagttgtctgttgtttttattttgtttttgtttcaataaggctcccaaattaaaacaaggaaaactgttatttcacctcaggggagagacagtgcttctgtccatgggctgtgaccgtcagaagaaatggagatcacaggtatgcattacagagaaaacaggc

SEQ ID NO: 45974 - DNA, 600 bp, Chicken  19866894286548_1
tttataaagcttaaatgcttagaaagtaaataaaagatgtttgagtctaaagaccaggacagtattctttttaaatatgtgatgttgtgtaagaggtcagtcagtaagtgatgatgagtcttacttgtctgtaaacaataacataaactgtaaaaaatcattgtaacaaaaattcttagataagtgcatcttgacttgttatttttcaccaaacttaatggatcgtatttgttaatgctctgtcacttagttcgcttttcattaaaactttcttctttttgacttctgccaattttcttyttgayagatcaaagaaatggaaggcattctaaaaagacgttatccaaattctttgcctgctttgatttatgctgctgctactgctgagaaagctgatgatctttcagctaaagcaaaaacaattgattttttggaaagaagaataaaaaagttggaaacagaacttgaaggtaaagatgatgaagctaaaacaagtctccgtgccatggaacaacaatttcaaaagataaaggtaaaaattggaggcttgttgagtagtctacgctgcaattagtggttgtaaggtggctggtctgtacc

SEQ ID NO: 45975 - DNA, 600 bp, Chicken  19866894286548_2
aaagcttaaatgcttagaaagtaaataaaagatgtttgagtctaaagaccaggacagtattctttttaaatatgtgatgttgtgtaagaggtcagtcagtaagtgatgatgagtcttacttgtctgtaaacaataacataaactgtaaaaaatcattgtaacaaaaattcttagataagtgcatcttgacttgttatttttcaccaaacttaatggatcgtatttgttaatgctctgtcacttagttcgcttttcattaaaactttcttctttttgacttctgccaattttcttyttgayagatcaaagaaatggaaggcattctaaaaagacgttatccaaattctttgcctgctttgatttatgctgctgctactgctgagaaagctgatgatctttcagctaaagcaaaaacaattgattttttggaaagaagaataaaaaagttggaaacagaacttgaaggtaaagatgatgaagctaaaacaagtctccgtgccatggaacaacaatttcaaaagataaaggtaaaaattggaggcttgttgagtagtctacgctgcaattagtggttgtaaggtggctggtctgtaccaaaga

SEQ ID NO: 45976 - DNA, 600 bp, Chicken  19866894286552_1
tgtcccagaaaggccagacactcttgcacctccaaatacttgaaggaatagactgaagtcactgatgctttggtatgttgtgctgaaactgcatggctcatgaaagtttagaggaagggttgaacccacttgtaattttgacagaaaaagctttaaaattggttttgctaagtgaaaccatttaattttctgagcagaagcattagtgaagcagtggagtattaattggtttctagcattctgtggcttttaataaaaatagcatcatcctgtgattcactatgccctttagaagcaagygtgcagcctgcactcagcctcaatatgcaggttgtctcctgtctcgacawgttacatgaagcctctgtatttccaatggcccctctaaaatctctgggctgggtttgaggttggtgatgtcagaggtcttctccagccttcatgattccgtcatttgatgaacactgaaattcatttctcccacaaggcagactcgcagtgggatcagcttgaggaactaacactacgagtaacgcaaagctccagcactgtgcaattgaaagaggatgtttcatcttttctttcatttgccaagtatca

SEQ ID NO: 45977 - DNA, 586 bp, Chicken  19866894286552_2
gactgaagtcactgatgctttggtatgttgtgctgaaactgcatggctcatgaaagtttagaggaagggttgaacccacttgtaattttgacagaaaaagctttaaaattggttttgctaagtgaaaccatttaattttctgagcagaagcattagtgaagcagtggagtattaattggtttctagcattctgtggcttttaataaaaatagcatcatcctgtgattcactatgccctttagaagcaagygtgcagcctgcactcagcctcaatatgcaggttgtctcctgtctcgacawgttacatgaagcctctgtatttccaatggcccctctaaaatctctgggctgggtttgaggttggtgatgtcagaggtcttctccagccttcatgattccgtcatttgatgaacactgaaattcatttctcccacaaggcagactcgcagtgggatcagcttgaggaactaacactacgagtaacgcaaagctccagcactgtgcaattgaaagaggatgtttcatcttttctttcatttgccaagtatcagtgtagctgtacctctcgtcttctgtaagacagcct

SEQ ID NO: 45978 - DNA, 600 bp, Chicken  19866894286557_1
aaagcagtagacagccctttaattctctcattggaaaagagatactgaaactgagtagcaaataagttaagatactgagaacaaatagtatgcaaacagagatacatgggtaagtgaagacttgaggagtagggcaatgacattaagtcaacaaagtaacagcaaaattagcaatcagatgacaactaagagaaaacctggtggggagggaagagcaggatccaccaagttctgcagaaaacttttcttttctatatgagaatgtctgagtgcagaacctgctccagacaaacagtgcayagaagaaagtcttctgtgaaacaaacagtgtgaccagatacagaaaaatggcattataaatcacaaaagagatgaataattccagtggcttgaatgcttgactcttgtgatcttaattacgctcctttaacgctttaagtatgtgtatgcatgtctgagtagtatggacctgcaaccagatccttcatggataatagtccctctatcacccgatgcaagtttcctttgaactgaacagggatgttaggcagcaagtgagcaaggcacaactggagctgtccaagctgaacatgttatgcc

SEQ ID NO: 45979 - DNA, 600 bp, Chicken  19866894286560_1
gttttagagccacagcttgttcctgtctagttatgagagatactgcttggtctgtaacactagcctgtttcctcatagctttttcaggaagactcctgacttgctgcttacacagggatgttctcaaaggccatgaaaaggtctcaggtcacgctagtctgacataaacaagattttttatgcactttcttattttagcactgtcatcagttatagaggttcagacattaggttaatgtttgttagtcacctgctgtttcagatcaagaaaatctgtgcgcaaacctatgggcctggatwttgggaaaatgttggctattttcatttgtttgtgttctttatttttaagttaagcttaccttttatttttttagtttttttcacagcacctctgacgatataaatcagtgtagcatgattggtttcaaaagacttatgccaattttcaactgttaaataaatggctaaagctattgctaatctgaaagctcattataatatttttagtgctcatcaatttgggttactaaaaatatttgatttagtcaaaagccttctgatgtccatgctaaaacatagtaaaaacaataataataataa

SEQ ID NO: 45980 - DNA, 600 bp, Chicken  19866894286560_2
aaaaggcggtatcaataaaagaataataattacaaaaaatctttgtgttattctttggtcagattaaattgcattatcttttttattcatgtcttaggtttgaaatcaaactcaataaaactattttccctcacatctgtcagcattttgacatatccctgcccagctctctacatgtcagttgaaaaaaaatgaaaaattattgatgtttatcacttctgcaaaaagtgatttctcagatgctgatctcttctaaaaattctcatatattttaacccctaactaaggtgataaaattaycatgacttatttatctctatgtrtctgactgttttgtcataatattatttcacttattcattatttaagaagctgctttaataatatttaaaactggcatcacagtgatcctaaagaggttaggagagttttgtcaactgtttccaaaaaaacycaccttacttctacasactgattcccatttaacatttgtaataacgtaataaatacagtctgtggcctaaacgtagatgggtatacaaatacacacatacatacatatacatgcacatatatatacacgcatatgtgtgtatactc

SEQ ID NO: 45981 - DNA, 600 bp, Chicken  19866894286560_3
taataattacaaaaaatctttgtgttattctttggtcagattaaattgcattatcttttttattcatgtcttaggtttgaaatcaaactcaataaaactattttccctcacatctgtcagcattttgacatatccctgcccagctctctacatgtcagttgaaaaaaaatgaaaaattattgatgtttatcacttctgcaaaaagtgatttctcagatgctgatctcttctaaaaattctcatatattttaacccctaactaaggtgataaaattaycatgacttatttatctctatgtrtctgactgttttgtcataatattatttcacttattcattatttaagaagctgctttaataatatttaaaactggcatcacagtgatcctaaagaggttaggagagttttgtcaactgtttccaaaaaaacycaccttacttctacasactgattcccatttaacatttgtaataacgtaataaatacagtctgtggcctaaacgtagatgggtatacaaatacacacatacatacatatacatgcacatatatatacacgcatatgtgtgtatactcagaaggccatttagatacatgat

SEQ ID NO: 45982 - DNA, 600 bp, Chicken  19866894286560_4
atccctgcccagctctctacatgtcagttgaaaaaaaatgaaaaattattgatgtttatcacttctgcaaaaagtgatttctcagatgctgatctcttctaaaaattctcatatattttaacccctaactaaggtgataaaattaycatgacttatttatctctatgtrtctgactgttttgtcataatattatttcacttattcattatttaagaagctgctttaataatatttaaaactggcatcacagtgatcctaaagaggttaggagagttttgtcaactgtttccaaaaaaacycaccttacttctacasactgattcccatttaacatttgtaataacgtaataaatacagtctgtggcctaaacgtagatgggtatacaaatacacacatacatacatatacatgcacatatatatacacgcatatgtgtgtatactcagaaggccatttagatacatgattcagatatgcatacatacattcatacacacatatatataaatctatctttctattatctgtatatagctatatataaatgaaattactttctgaccttaaaactatcacagattaacctgtcaagtttaca

SEQ ID NO: 45983 - DNA, 600 bp, Chicken  19866894286560_5
ctacatgtcagttgaaaaaaaatgaaaaattattgatgtttatcacttctgcaaaaagtgatttctcagatgctgatctcttctaaaaattctcatatattttaacccctaactaaggtgataaaattaycatgacttatttatctctatgtrtctgactgttttgtcataatattatttcacttattcattatttaagaagctgctttaataatatttaaaactggcatcacagtgatcctaaagaggttaggagagttttgtcaactgtttccaaaaaaacycaccttacttctacasactgattcccatttaacatttgtaataacgtaataaatacagtctgtggcctaaacgtagatgggtatacaaatacacacatacatacatatacatgcacatatatatacacgcatatgtgtgtatactcagaaggccatttagatacatgattcagatatgcatacatacattcatacacacatatatataaatctatctttctattatctgtatatagctatatataaatgaaattactttctgaccttaaaactatcacagattaacctgtcaagtttacagataaccagataccag

SEQ ID NO: 45984 - DNA, 600 bp, Chicken  19866894286560_6
tatttttaatttcacatcttcattacagaggaatgacctccttagccagaaaaattcaaaagagtaaactgctgcaatgtcaatttagaaatcatctgcacaaccaattattattcaagctgtagtactatacctataatgtaacacaggcatttcatctccagatgccattgcactaccagagatgtgcgttacacacaactgagccttgcaaatcatagctttacctggtgaattgcctcctatataataattaaaatagaaaattatttaaggtcataaaggaggaatgaaggagtwgaattgatgttgggacaacttttaaaatccatctctaactgctctcactctgaaaaggtagactttcaacagcacactgaggtttgaaaacacataggaaacaccctgaatagcccaagaatttaaaggttcaacttttcttttgtaatattcagtgtgctccatccctgacagccaaaaatacctcagctataaacatggatcgctaaaatcagcaggacgcaagcatgtccaaaagtgctgtaaatgtacattacttctagatctcagcttcctttaaaatggtaagatggtctgatt

SEQ ID NO: 45985 - DNA, 599 bp, Chicken  19866894286563_1
  misc_feature (1)..(84): n is any nucleotide
nnnnnnnnnnnnnnnnnnnnnnnnnnnnnnnnnnnnnnnnnnnnnnnnnnnnnnnnnnnnnnnnnnnnnnnnnnnnnnnnnnnnggtactttgatttattaatgggaacagacccttggaaattcacacttaagtgattattaatttcccttttgctccagacacttctatgggagtgtctcatttcaagagttttctggcgtggggtttttctgtatgtgtgtgtgtgttgttgtttgtttgttttttaatctccgttcatttcataatataaaactgttttctttgccatgcaaggawgrctgtcaaaatagccaaatcttgctataatagagcccagagtttatgcttgaggttgtattcatagaactgacaagctcaaacacaattccctagaaagagaacatgcaccaaaaacaagtcgatctagctgtacaatattggctggttatccaaaatgtataaatattgatatagtaagttgagaaatatgaaggggagctgtgatcagaaattgcagaaagctgctttagagtcaaaatcccacgtaggtaatgaatgctcctgctttcattttcattcrattgtctctggctgtc

SEQ ID NO: 45986 - DNA, 599 bp, Chicken  19866894286563_2
  misc_feature (1)..(82): n is any nucleotide
nnnnnnnnnnnnnnnnnnnnnnnnnnnnnnnnnnnnnnnnnnnnnnnnnnnnnnnnnnnnnnnnnnnnnnnnnnnnnnnnnnggtactttgatttattaatgggaacagacccttggaaattcacacttaagtgattattaatttcccttttgctccagacacttctatgggagtgtctcatttcaagagttttctggcgtggggtttttctgtatgtgtgtgtgtgttgttgtttgtttgttttttaatctccgttcatttcataatataaaactgttttctttgccatgcaaggawgrctgtcaaaatagccaaatcttgctataatagagcccagagtttatgcttgaggttgtattcatagaactgacaagctcaaacacaattccctagaaagagaacatgcaccaaaaacaagtcgatctagctgtacaatattggctggttatccaaaatgtataaatattgatatagtaagttgagaaatatgaaggggagctgtgatcagaaattgcagaaagctgctttagagtcaaaatcccacgtaggtaatgaatgctcctgctttcattttcattcrattgtctctggctgtcaa

SEQ ID NO: 45987 - DNA, 600 bp, Chicken  19866894286563_3
ctttgccatgcaaggawgrctgtcaaaatagccaaatcttgctataatagagcccagagtttatgcttgaggttgtattcatagaactgacaagctcaaacacaattccctagaaagagaacatgcaccaaaaacaagtcgatctagctgtacaatattggctggttatccaaaatgtataaatattgatatagtaagttgagaaatatgaaggggagctgtgatcagaaattgcagaaagctgctttagagtcaaaatcccacgtaggtaatgaatgctcctgctttcattttcattcrattgtctctggctgtcaaacaaaataaatggcacatctcttgtgaaatcacatctatattaactttaatatttttttttcaccattttcaaattgtcttttatatatatagcactttaattagacatcttgacaacacagcaacagatcaaactgtcagatgggtttctgagacgctggctgcttatgtcagtgtcattgtcacttcctgaaactcttttttacagtttacttattggattaactttctgagattccctgctaccaaagcattcatccttaacactactccccagataaa

SEQ ID NO: 45988 - DNA, 599 bp, Chicken  19866894286576_1
  misc_feature (1)..(75): n is any nucleotide
nnnnnnnnnnnnnnnnnnnnnnnnnnnnnnnnnnnnnnnnnnnnnnnnnnnnnnnnnnnnnnnnnnnnnnnnnnnccacacgccctcacactccagccctgcgtgggccctgcaaacccagcaccaggctctgcagccacctggtgggcccagatggggctgggggaaagtcctcagccagcacagctccttagaatatatatatatgtatatatatgtgtgtgtgtgtgtgtaatttttctttatggaaagaattaggatgttgctttgagtcttttgttattgctgcaagtggattgyggcgctgactcgcggtgcccatgaagctgatggcactgtgtgtgtcctctgattggattaagttgtggatttacagtttcattcggggaaacaatattaaaaagaagggraaaaaaaaatccatgtggagagaagggaggcaaacgggacggcgttctctaataattaccactgccttgaaaataaccgtgacgcgtgaaaatccaattacatacatctatagaaacctccgagtaaaggcatcccatgttctcgagtccccctcagtcctgagcccttggccaatgccacccrtgggt

SEQ ID NO: 45989 - DNA, 600 bp, Chicken  19866894286576_2
tgcaaacccagcaccaggctctgcagccacctggtgggcccagatggggctgggggaaagtcctcagccagcacagctccttagaatatatatatatgtatatatatgtgtgtgtgtgtgtgtaatttttctttatggaaagaattaggatgttgctttgagtcttttgttattgctgcaagtggattgyggcgctgactcgcggtgcccatgaagctgatggcactgtgtgtgtcctctgattggattaagttgtggatttacagtttcattcggggaaacaatattaaaaagaagggraaaaaaaaatccatgtggagagaagggaggcaaacgggacggcgttctctaataattaccactgccttgaaaataaccgtgacgcgtgaaaatccaattacatacatctatagaaacctccgagtaaaggcatcccatgttctcgagtccccctcagtcctgagcccttggccaatgccacccrtgggtgctgcagtcctttcctctggatgggcactccctcctcctgctgctttggggttttcaatagggaacagagctccggggaaatcagccacgtttctccttagacaaataact

SEQ ID NO: 45990 - DNA, 574 bp, Chicken  19866894286576_3
gattgyggcgctgactcgcggtgcccatgaagctgatggcactgtgtgtgtcctctgattggattaagttgtggatttacagtttcattcggggaaacaatattaaaaagaagggraaaaaaaaatccatgtggagagaagggaggcaaacgggacggcgttctctaataattaccactgccttgaaaataaccgtgacgcgtgaaaatccaattacatacatctatagaaacctccgagtaaaggcatcccatgttctcgagtccccctcagtcctgagcccttggccaatgccacccrtgggtgctgcagtcctttcctctggatgggcactccctcctcctgctgctttggggttttcaatagggaacagagctccggggaaatcagccacgtttctccttagacaaataacttccatctgaagtctttttatctcctcttccttatccttcccgggctgcagcgggaggagagctggtgtttaatgacttccttcatcctctgaataaggagtgtgctgaatcatcccatctgcaggcacactctgcggggctgctggcgggtggggatg

SEQ ID NO: 45991 - DNA, 600 bp, Chicken  19866894286586_1
cagcaagcctctgaactgactaacagtgctgcagggcagtattcacagcttgaagatgaatgcagagccttgccaagtataccaaataggatgggaaatagctccagtaattgcttagcctacatttattagagtgtagcaccacctaatgtgtaaatgcttcaacttcaagcacttcacgctataggcagggaggaaacagcctggctggagctggagaaagctcagggcataagtaagcattaaatttaatcccttgtctacctggctcccaactctgcccttataagcagagaattmagaaagaggagcacaatgctgattctgggatcaaatctggcttcccaaaagtgcaagaattgccatacaggcagctttgcagggctgaagagttgaaaaaagctcttacacctgtgaattaaagctgtagtgtgacgattcagcccagggaggtggtggacgcctgtccttcaaggtcaggctggatggggctctgagcaccctgatggagctgtaggtttccctgttcattgcaggggagttggactcggtggcctttaagagtcaattccarctcaaatgattttatgattctattaa

SEQ ID NO: 45992 - DNA, 600 bp, Chicken  19866894286586_2
actctgcccttataagcagagaattmagaaagaggagcacaatgctgattctgggatcaaatctggcttcccaaaagtgcaagaattgccatacaggcagctttgcagggctgaagagttgaaaaaagctcttacacctgtgaattaaagctgtagtgtgacgattcagcccagggaggtggtggacgcctgtccttcaaggtcaggctggatggggctctgagcaccctgatggagctgtaggtttccctgttcattgcaggggagttggactcggtggcctttaagagtcaattccarctcaaatgattttatgattctattaagtaaacacctttctagctgtttacacctggacactcagagaagccggctctctctaccacatcctcttgcttctaaagagccagcagggtgtcaggagaaagatgaacccatgccttgctcaatcaatattgatttttaggaacaatccatttggaaagcaagcctagcaatacccaaccatactctcaattttaccctgaataggcatcccttgagaaaccaggatgctatttgaaattgtgaaagctatgaaaacacacaaaactccatttt

SEQ ID NO: 45993 - DNA, 594 bp, Chicken  19866894286586_3
tttatgattctattaagtaaacacctttctagctgtttacacctggacactcagagaagccggctctctctaccacatcctcttgcttctaaagagccagcagggtgtcaggagaaagatgaacccatgccttgctcaatcaatattgatttttaggaacaatccatttggaaagcaagcctagcaatacccaaccatactctcaattttaccctgaataggcatcccttgagaaaccaggatgctatttgaaattgtgaaagctatgaaaacacacaaaactccattttctcctacccyatttgtcttcattcactgcaacttgcacatcccggagcctgggtgttctggtacagcccagtgaatcactggagcagctggaggtgtcccaacccatgcatcttgcagctaacagggatacctagctcccatttcgaaaaatattctcccgtgggtcccccatagtgacccaggtcattatttttgtgatcatgaagcagactctgagtttagctgggagtcaaaccaggatacaggatggggtttcaagtaaatatagaaagtctcagtcctagcagggtcatttctaagtca

SEQ ID NO: 45994 - DNA, 599 bp, Chicken  19866894286589_1
  misc_feature (1)..(98): n is any nucleotide
nnnnnnnnnnnnnnnnnnnnnnnnnnnnnnnnnnnnnnnnnnnnnnnnnnnnnnnnnnnnnnnnnnnnnnnnnnnnnnnnnnnnnnnnnnnnnnnnnnttgggtatgcatttttgccagtgaatagcaatggcctgcctgtagtatttgtaaatatctacactggtggaggtcgctactgcatggaggaattcagtttcacgcctctacttcatacaaacttccacatcagatgccattttatcagactgcccctctgctgccatttataacagaacaacaaaatgtaacagaatattgktgggtgggttcaacctctactgtcataccaccaatatccgcctctgactttgtgggctaacataataaaatgggaggcattactttcggagcagcsctcataattgtaatttccattagtgaaatagtgatgtttcctacwgcatagataaataacacttttctaatgaacagtgaacaataaatagtaaaatataaacaaatgaggcatgaaaccccaggataaatatttctccytacagagctaatattaaaactttatgctggataataacatatcaaaaggttaggaaagcacct

SEQ ID NO: 45995 - DNA, 599 bp, Chicken  19866894286589_2
  misc_feature (1)..(2): n is any nucleotide
nnttgggtatgcatttttgccagtgaatagcaatggcctgcctgtagtatttgtaaatatctacactggtggaggtcgctactgcatggaggaattcagtttcacgcctctacttcatacaaacttccacatcagatgccattttatcagactgcccctctgctgccatttataacagaacaacaaaatgtaacagaatattgktgggtgggttcaacctctactgtcataccaccaatatccgcctctgactttgtgggctaacataataaaatgggaggcattactttcggagcagcsctcataattgtaatttccattagtgaaatagtgatgtttcctacwgcatagataaataacacttttctaatgaacagtgaacaataaatagtaaaatataaacaaatgaggcatgaaaccccaggataaatatttctccytacagagctaatattaaaactttatgctggataataacatatcaaaaggttaggaaagcacctaaggaagaaggagagccaatgctaactattaatacttcaaatatttctctaagcgtgttaaacttacaggaactaaatatacttactgaatgttta

SEQ ID NO: 45996 - DNA, 600 bp, Chicken  19866894286589_3
agtatttgtaaatatctacactggtggaggtcgctactgcatggaggaattcagtttcacgcctctacttcatacaaacttccacatcagatgccattttatcagactgcccctctgctgccatttataacagaacaacaaaatgtaacagaatattgktgggtgggttcaacctctactgtcataccaccaatatccgcctctgactttgtgggctaacataataaaatgggaggcattactttcggagcagcsctcataattgtaatttccattagtgaaatagtgatgtttcctacwgcatagataaataacacttttctaatgaacagtgaacaataaatagtaaaatataaacaaatgaggcatgaaaccccaggataaatatttctccytacagagctaatattaaaactttatgctggataataacatatcaaaaggttaggaaagcacctaaggaagaaggagagccaatgctaactattaatacttcaaatatttctctaagcgtgttaaacttacaggaactaaatatacttactgaatgtttatggagccctatcaacttaggtgagcatagtgaggaagtaggtggtg

SEQ ID NO: 45997 - DNA, 600 bp, Chicken  19866894286589_4
attttatcagactgcccctctgctgccatttataacagaacaacaaaatgtaacagaatattgktgggtgggttcaacctctactgtcataccaccaatatccgcctctgactttgtgggctaacataataaaatgggaggcattactttcggagcagcsctcataattgtaatttccattagtgaaatagtgatgtttcctacwgcatagataaataacacttttctaatgaacagtgaacaataaatagtaaaatataaacaaatgaggcatgaaaccccaggataaatatttctccytacagagctaatattaaaactttatgctggataataacatatcaaaaggttaggaaagcacctaaggaagaaggagagccaatgctaactattaatacttcaaatatttctctaagcgtgttaaacttacaggaactaaatatacttactgaatgtttatggagccctatcaacttaggtgagcatagtgaggaagtaggtggtgtttcagcagcagcaacagtgatgtgaacaacaagccacattctgaatggctgtgtacagctatcacaccacaaaatgaagagtgtctcgatcaac

SEQ ID NO: 45998 - DNA, 436 bp, Chicken  19866894286589_5
cttacaggaactaaatatacttactgaatgtttatggagccctatcaacttaggtgagcatagtgaggaagtaggtggtgtttcagcagcagcaacagtgatgtgaacaacaagccacattctgaatggctgtgtacagctatcacaccacaaaatgaagagtgtctcgatcaactcatgcatataaaaaagcaaatggtgatgactatattaaacaatagtgttatgtaactgaaaaatctgctctatcaaacagtggcattgcactctttgcatctgctgctttttctatcaaaaaaraaaaaaaaaaaaaagtaggaggcactactcttggagtgaccctgtgtttaactgttgggaatccaccaaaataagtgaagaataagactactaatggtttctttttttggaatttttaaattaattaatattcaat

SEQ ID NO: 45999 - DNA, 600 bp, Chicken  19866894286590_1
agaatcacattctgtcattcttcctctgacatctgggatgctgtgatgtcttgtaacgcttccaggagaaaggaaaaaaaggaaaaggaagcatttgccttatggaaattacaggtcagtagcacaaaaagtgcctagatgtgcatccgtgcataaagtctcacagtgtgacttttcctcagaaaacaacaattattgcctaaggcaactcagttctgcaataggcacgtaatagacatctaaacaagcattcagtctttgcaggctcggtgtagttgtcagaagtgagcagcacacaayaaacaaaaagttttacaagaagaaacttctgagttttgaaatagtatacacaaaagagtgcttaacttacgtggcccaagtaggtaaccagcactgttcaaagtccagccccttttttcttttgcctcaaagaaagagaaatgcaagtagatcagtgcttgaactactctttctgaagacaagaaggcaatcggcacccaaatggatgctctccagaagtatcttctgaaggtttgaaataagagaaatttagtgaaaaaataaataatataataatatcaaagcgtttactactgctag

SEQ ID NO: 46000 - DNA, 600 bp, Chicken  19866894286605_1
tcgcaccagaaattcttctacatgatttccaggaaggcgttgggatctttagtctgcctgtctgctgttgccacattgatctggtaagcgtttgctggcaagttggttaatgtttaaagtgagttccctggctgcagcaggcaggaagtgtgacagcaggtcagtacaggcagtgtgttttgcaggaagttccccgcagagtaatgattaacagaagctgccgctctcctctcccaccctcaccctaatgggcggctcttccccacccagccctgtctgtgcccatcgctcagcaccctwatggtccctccttgctctgcatggcctgtgcatgctgctgtgaccaaagctgaagggagaaagaaagctgtgcagcctctgttccgtgatttacgtgtgctttacccagcatctctgcttcagaaagcaccgttgtggcacaccactgtgattgcacacttctcagttttgaaccatctccatttgtggactcctttcaacctgagcttcccgtttatgccttggcagtgctgtactctgttaaaggctgaatacaatgtatgctacactcacgagtaaagtccaccagcagttaactag

SEQ ID NO: 46001 - DNA, 600 bp, Chicken  19866894286611_1
ggggtctggggctcagggcactaaaagggtgggaatttgggaacgtggctgttggattcttggaagggagagcactgcaagttaatattccagaatatactgagcctggtttgagtgagcatcccaaagagcattgaaggatggtgagcaacgccatcaactggctcatcaaatggccagacctgggggggaggttggtgtaaagctgaaatcctggatacaatgggatgctgaaaacagctctaaatggaaaggaacaaagacattgtctcgaggcaacttgcaatattttctactccrtccttcctccgagcattttgttttgttaaggctccctcagaaagcacgtaaagctctgctgctcttcggagrgatgggaggaagccttcagtgcggtggtgcagctgcaggtctgccctgacatcgtgcaattactgtccttagtgagcacgaagagtgacgtgcctgtctttgctcttccagagaccggatcacccgcagagcacgggcgccttcctccctgttgccaccgagctgaaacggaaagacaaatacatgaacgttctcttctcatgtcacgtccgcaaggtaacgtgggtg

SEQ ID NO: 46002 - DNA, 600 bp, Chicken  19866894286611_2
cactgcaagttaatattccagaatatactgagcctggtttgagtgagcatcccaaagagcattgaaggatggtgagcaacgccatcaactggctcatcaaatggccagacctgggggggaggttggtgtaaagctgaaatcctggatacaatgggatgctgaaaacagctctaaatggaaaggaacaaagacattgtctcgaggcaacttgcaatattttctactccrtccttcctccgagcattttgttttgttaaggctccctcagaaagcacgtaaagctctgctgctcttcggagrgatgggaggaagccttcagtgcggtggtgcagctgcaggtctgccctgacatcgtgcaattactgtccttagtgagcacgaagagtgacgtgcctgtctttgctcttccagagaccggatcacccgcagagcacgggcgccttcctccctgttgccaccgagctgaaacggaaagacaaatacatgaacgttctcttctcatgtcacgtccgcaaggtaacgtgggtggggatgctgtggggctggggtggcattctgtggtgccagtggtgaggtggtagtactggagatatgtctacg

SEQ ID NO: 46003 - DNA, 600 bp, Chicken  19866894286611_3
tccaccaggagagaatattttgagttctacaaacccatcagacgaaaacatttcggtggccactgatgttggagtgctgtcaggaagccatgcatctgtgtgtgctttttgtgcccaatggggactggtggggtcggtgtccccttgccaggcatggactgatgattctgcagatacattcaatagcaacagcattcattttgcagtgagaaatctcactttgtaatgagacttctttcgttgtggcaatgatatttatacgacaggaagtgattcctgtatacagaaatagaaatctcytactgctctctgctatttcagcggaggagcccattgctttcagcactccctttttaaaagttgctaattaaatgagccatttgagtgagcattgggttgtactgccaggayggggagtctcagtccagacctcatctgcacaatcctggaagcgctttgtgtagaatctgaaggagatactgaagaatttctccytggatttttgttcctctgggctgaaaacaaagaaattcccattgcaactcatttaataaagcagatccagttactgttgactcctgttaatacttaaaactgggt

SEQ ID NO: 46004 - DNA, 600 bp, Chicken  19866894286611_4
tgcccaatggggactggtggggtcggtgtccccttgccaggcatggactgatgattctgcagatacattcaatagcaacagcattcattttgcagtgagaaatctcactttgtaatgagacttctttcgttgtggcaatgatatttatacgacaggaagtgattcctgtatacagaaatagaaatctcytactgctctctgctatttcagcggaggagcccattgctttcagcactccctttttaaaagttgctaattaaatgagccatttgagtgagcattgggttgtactgccaggayggggagtctcagtccagacctcatctgcacaatcctggaagcgctttgtgtagaatctgaaggagatactgaagaatttctccytggatttttgttcctctgggctgaaaacaaagaaattcccattgcaactcatttaataaagcagatccagttactgttgactcctgttaatacttaaaactgggttaattgtaaaaatacaacattcagttctcaacagcgtggtagttatttcttataggagagaagtgttggtttttaataggggtagagtgatggtaactgctcagcgcatat

SEQ ID NO: 46005 - DNA, 600 bp, Chicken  19866894286611_5
tcattttgcagtgagaaatctcactttgtaatgagacttctttcgttgtggcaatgatatttatacgacaggaagtgattcctgtatacagaaatagaaatctcytactgctctctgctatttcagcggaggagcccattgctttcagcactccctttttaaaagttgctaattaaatgagccatttgagtgagcattgggttgtactgccaggayggggagtctcagtccagacctcatctgcacaatcctggaagcgctttgtgtagaatctgaaggagatactgaagaatttctccytggatttttgttcctctgggctgaaaacaaagaaattcccattgcaactcatttaataaagcagatccagttactgttgactcctgttaatacttaaaactgggttaattgtaaaaatacaacattcagttctcaacagcgtggtagttatttcttataggagagaagtgttggtttttaataggggtagagtgatggtaactgctcagcgcatatgtaatatatgcaaaccactgtgggagtttaatgctgctcactgttatgcaacatttaagcttttaagtacttacgtttctctca

SEQ ID NO: 46006 - DNA, 600 bp, Chicken  19866894286613_1
tgtttaacaacctcacattttccagacacgcaaacccctcggaaatcagtgtatttgcaggatgttccatcccgagcctgaaccattaattgtctctgaccatccacagtggtgcaatggaggtcacagggcttgctagaaatgtgaacatagtcatctaaggggaaaggatatagagacacattcaaaacagcagaaacacaataactttcatcctaccaatgtcaatctctgccaagctaaacaacagcagcagcaacacaaattgcacggcagccagtgctgcaggagccacaaccycttgtgcctgcaggttggacaggagattgtgctcccggcagcccgctgctgcaagcctttgcacagccccagtgctggaatgagatgcacctgctgctggcaaaggtaccaccagcatcacagccactgtgctgtgcaagggcgtgcagccacatagtacacattacactatgcacgttcacttatcaatatttaatacatacattagttgttgtaaatagacatacgagactattcaaaaccacgtcagcttataactccagatctctcccatcgacattctcccaagtcgggctcagt

SEQ ID NO: 46007 - DNA, 535 bp, Chicken  19866894286613_2
gagcagcgatatacccactggcccaagacagcatcaatggcaaaacattatcctgccaatcccccaggagacacgtgagcgcctgctaaaaaacaaaacaattcactgtcactgttctggtgaatcatcagcttgaagggcgaatatgttcatagaaattgtcaccttgccataggagtgggacgaggccaagcagagccgaccacgtcccagcacacagccctgccacggggatgcagacaggggctggtgtcactcgaagggaggcaacaaggagcatcatgaagcataactgtcagkgggtatctacagagacacccaagcaagaaaactctgctaaatcctctattttcagacacttaagctcccaaggggaatcccagtatccccaggaattggctgggattctcttaaagctcggtttcagtgggagttaggtgcctaaaaatactcttaaagtatatatatcccagcctgactcctcagttatccctgcagtttttgtctctctcaccccagatgaccgaactgactc

SEQ ID NO: 46008 - DNA, 600 bp, Chicken  19866894286614_1
tctttgagctgcatgataagcatagggaaacaagcaaattaaagcaaaaagggaaaggtattcaaggcctctcaaggtttttttttccgctcaaactgtgagcaaagagaaaataattaccaccgcactgcaggctggaagagacaaatgtttgtggatactgctcataaaacctcttgtttttaaaccatcaacctgcagtactaacatactgtcccttcaactgcttgtcaagtcatgtagaatgagagttcaactgcataagaactaggtagacatggctgtgtgtccatgcgaaaygctctccctgcagcactgctacagacactgaaaggttccatttcctatgtgcttcgttacctaaaggtctgtctctctcaccaagcacaaccactcrgcaggaacagctgagctactcctctgctttctgcagctgaactgtacacgatgtctgggagcagagatcttccttctgggcagaactgaaaatttaattctttccaaatgagaaatctgagcatcagaactaccctggtggttcctcaaggatcagaagactgatattagtaccatttccctcaggtaggtagacggacacct

SEQ ID NO: 46009 - DNA, 600 bp, Chicken  19866894286614_2
gtgagcaaagagaaaataattaccaccgcactgcaggctggaagagacaaatgtttgtggatactgctcataaaacctcttgtttttaaaccatcaacctgcagtactaacatactgtcccttcaactgcttgtcaagtcatgtagaatgagagttcaactgcataagaactaggtagacatggctgtgtgtccatgcgaaaygctctccctgcagcactgctacagacactgaaaggttccatttcctatgtgcttcgttacctaaaggtctgtctctctcaccaagcacaaccactcrgcaggaacagctgagctactcctctgctttctgcagctgaactgtacacgatgtctgggagcagagatcttccttctgggcagaactgaaaatttaattctttccaaatgagaaatctgagcatcagaactaccctggtggttcctcaaggatcagaagactgatattagtaccatttccctcaggtaggtagacggacacctcttggctgagatttgtgaagaactgcctttcaaatgtgagttacctacccaaaggcaacgccctgtttccaaactagcaaaaaccatgtttttttaa

SEQ ID NO: 46010 - DNA, 600 bp, Chicken  19866894286614_3
taagacacaagcaagggcacagagcaggcacagttaattgagaagtagcaagcatatgcggagtcatccagctgaacgaagtaagcatttacctgacagttacaatgaacaagtaattcaggccacaaccaagtcttaacattaatttcagttgagacttcatgcagcaaagtgcaggacaatcctgatttggtactgagcagcagtatgcaactgtcctgaaaaggctaccaccgtatcgtaactacagctgtaatgcacttcactgctggataggtactcctttgcctggcaagtacraaaccttctggcactatcagagaggattattaccaaaaaaatgcaacatagtacaaattaaagggtgcaaaactactcatccctaaagaaatcctggcgcactttcttcatggtattctcaagtaaaaaaaaaaaagaaagcagagtagccctatcatgctacccctctacycaatcattttccaagctgaggctgctgtgcatcactttgcctgctctgaaggcacagtactcccagctcaccgagaaggccagaggcatgtagtttcggcgtcgcaccagcttcttccggtcccgctc

SEQ ID NO: 46011 - DNA, 600 bp, Chicken  19866894286614_4
tgcaggacaatcctgatttggtactgagcagcagtatgcaactgtcctgaaaaggctaccaccgtatcgtaactacagctgtaatgcacttcactgctggataggtactcctttgcctggcaagtacraaaccttctggcactatcagagaggattattaccaaaaaaatgcaacatagtacaaattaaagggtgcaaaactactcatccctaaagaaatcctggcgcactttcttcatggtattctcaagtaaaaaaaaaaaagaaagcagagtagccctatcatgctacccctctacycaatcattttccaagctgaggctgctgtgcatcactttgcctgctctgaaggcacagtactcccagctcaccgagaaggccagaggcatgtagtttcggcgtcgcaccagcttcttccggtcccgctcgatcttctctttctgagccaactgctggtagtactcaaccagcttgttaatctggagggaagaagaagtacagatacccagtgaaagaagaacaaacatcacaccagctgcagtatttcaatgtgaacaakctggggttcctgctacttgtttcattctgtcccagtaccag

SEQ ID NO: 46012 - DNA, 600 bp, Chicken  19866894286614_5
aaaaagaaagcagagtagccctatcatgctacccctctacycaatcattttccaagctgaggctgctgtgcatcactttgcctgctctgaaggcacagtactcccagctcaccgagaaggccagaggcatgtagtttcggcgtcgcaccagcttcttccggtcccgctcgatcttctctttctgagccaactgctggtagtactcaaccagcttgttaatctggagggaagaagaagtacagatacccagtgaaagaagaacaaacatcacaccagctgcagtatttcaatgtgaacaakctggggttcctgctacttgtttcattctgtcccagtaccagtatatcacaggatacgcattaaagaagctgctgtgtcttaaaacttatttatgcacatcgtgggtgacgaactgatgttcctctgggaatgagacctaccagaaaacagcatcctgttctgatttcccagttagtaactgtccctgtttagattcatcctttagtttttccaaagcatgctttgaaagttattaagagttttaaagggagaccagtaaggtaaaattggatgtgctctgtcaaaggttaagaacacttc

SEQ ID NO: 46013 - DNA, 467 bp, Chicken  19866894286614_6
tgtatttttgcacgtcacttaccgacagacttgtctgccatgcccacatccctggaagtccagcggcaaaacccacaggccaagtaatatgctttcttcatggtagtcttggctgggtcatcagggagcggagcaggaatgctagtggcccgggtggaaagggtgtgcatgcagcaggggcagtcaaaacagttagcacacctggagagagaaaggccttagaattgtggaatcattaaggctggaaaagccttccaagatcatccagtccaattgtcagcccaccacagtgctcctaaygcagtccataggagcaggaacacacactcaatgagcaaattaaatcaacatcatgggaaaatgatgttgactttttccccaagacaaaccaaaaggtaacgagtgatgtaatttttgaagggagcttcaggtacgtgcggttgggtgctcataatataaggacaaag

SEQ ID NO: 46014 - DNA, 599 bp, Chicken  19866894286615_1
  misc_feature (1)..(1): n is any nucleotide
nccgtgcctttgcctgtggtgtcttaagaaacctccaacattattaaacatcagtgcttggctgagatggccagaggtttcagataccaaaagaacactgtcctcactggcttcacccagctgtctgcaggcaaagcctcatgagtagtgcagcagtttccagctgcagtctgtgtgctacagcatggcaggacagtgacatgtctgtgctgtccctcaggtggactcccactactgccccagctgcctggaaaacatgccgtcagccgaggccaagctgaagaagaatcggtaaggttmatttgtcatcaagggccaccattcagagcagctttgtccttatattatgagcacccaacygcacgtacctgaagctcccttcaaaaattacatcactcgttaccttttggtttgtcttggggaaaaagtcaacatcattttcccatgatgttgatttaatttgctcattgagtgtgtgttcctgctcctatggactgcrttaggagcactgtggtgggctgacaattggactggatgatcttggaaggcttttccagccttaatgattccacaattctaaggcytttctctctccaggt

SEQ ID NO: 46015 - DNA, 600 bp, Chicken  19866894286615_2
gctgagatggccagaggtttcagataccaaaagaacactgtcctcactggcttcacccagctgtctgcaggcaaagcctcatgagtagtgcagcagtttccagctgcagtctgtgtgctacagcatggcaggacagtgacatgtctgtgctgtccctcaggtggactcccactactgccccagctgcctggaaaacatgccgtcagccgaggccaagctgaagaagaatcggtaaggttmatttgtcatcaagggccaccattcagagcagctttgtccttatattatgagcacccaacygcacgtacctgaagctcccttcaaaaattacatcactcgttaccttttggtttgtcttggggaaaaagtcaacatcattttcccatgatgttgatttaatttgctcattgagtgtgtgttcctgctcctatggactgcrttaggagcactgtggtgggctgacaattggactggatgatcttggaaggcttttccagccttaatgattccacaattctaaggcytttctctctccaggtgtgctaactgttttgactgcccctgctgcatgcacaccctttccacccgggccactagcat

SEQ ID NO: 46016 - DNA, 519 bp, Chicken  19866894286615_3
catgtctgtgctgtccctcaggtggactcccactactgccccagctgcctggaaaacatgccgtcagccgaggccaagctgaagaagaatcggtaaggttmatttgtcatcaagggccaccattcagagcagctttgtccttatattatgagcacccaacygcacgtacctgaagctcccttcaaaaattacatcactcgttaccttttggtttgtcttggggaaaaagtcaacatcattttcccatgatgttgatttaatttgctcattgagtgtgtgttcctgctcctatggactgcrttaggagcactgtggtgggctgacaattggactggatgatcttggaaggcttttccagccttaatgattccacaattctaaggcytttctctctccaggtgtgctaactgttttgactgcccctgctgcatgcacaccctttccacccgggccactagcattcctgctccgctccctgatgacccagccaagactaccatgaagaaagcatattacttg

SEQ ID NO: 46017 - DNA, 434 bp, Chicken  19866894286615_4
agaatcggtaaggttmatttgtcatcaagggccaccattcagagcagctttgtccttatattatgagcacccaacygcacgtacctgaagctcccttcaaaaattacatcactcgttaccttttggtttgtcttggggaaaaagtcaacatcattttcccatgatgttgatttaatttgctcattgagtgtgtgttcctgctcctatggactgcrttaggagcactgtggtgggctgacaattggactggatgatcttggaaggcttttccagccttaatgattccacaattctaaggcytttctctctccaggtgtgctaactgttttgactgcccctgctgcatgcacaccctttccacccgggccactagcattcctgctccgctccctgatgacccagccaagactaccatgaagaaagcatattacttg

SEQ ID NO: 46018 - DNA, 600 bp, Chicken  19866894286618_1
attaattgggtagcatcagctatggagacatccccatcagggtggaaactggtaaagaggcacagtggtttcggaatactgttcttctgttagagaaaccatataacctcaagaatagaacactctcattaatgctgttttttgtgggtcaatggctatgctgggtaattttcctgcagtttggtgtgggagagcatcctccagacccagtgagaaaccacttcaggttcaaaaaaggccatctctaagcctcaaactagaaacagtggacattaggtacagtttcatcacaataccagygacacagcaatagttaccttgtaccatacaacatctggttcttgactgtctattttgtaatcctcgatatcaggacaggagattgtctttctcttggtaacttctgatttttccagatatctgatcttgctgttgtagcaaagcccagattcattctcagctaccgtcaaggacatggacaccttcatgcaatacgttgagtttctgcagggacagaaagatgttgtcatttacttcactccttctttttwatttctttttcttttttctttttactatatttcatcacagtacrttttc

SEQ ID NO: 46019 - DNA, 600 bp, Chicken  19866894286618_2
tcaaactagaaacagtggacattaggtacagtttcatcacaataccagygacacagcaatagttaccttgtaccatacaacatctggttcttgactgtctattttgtaatcctcgatatcaggacaggagattgtctttctcttggtaacttctgatttttccagatatctgatcttgctgttgtagcaaagcccagattcattctcagctaccgtcaaggacatggacaccttcatgcaatacgttgagtttctgcagggacagaaagatgttgtcatttacttcactccttctttttwatttctttttcttttttctttttactatatttcatcacagtacrttttcttgttaagcactgatcttcacaaacacttcacaaacacttcagtgatacgttcaaacygtggctgtcaaactgcattttcagcacaaaggaattactataggacatgaaggttcatttctggcttactatgaagaatcttgtagaaattttgctgacaagtgatttacgcctgcacagcagctctttcaccttccaagtctatgaacacaggaaactgttgccacctgaaatgctggtcaggatgcactta

SEQ ID NO: 46020 - DNA, 600 bp, Chicken  19866894286618_3
ccagygacacagcaatagttaccttgtaccatacaacatctggttcttgactgtctattttgtaatcctcgatatcaggacaggagattgtctttctcttggtaacttctgatttttccagatatctgatcttgctgttgtagcaaagcccagattcattctcagctaccgtcaaggacatggacaccttcatgcaatacgttgagtttctgcagggacagaaagatgttgtcatttacttcactccttctttttwatttctttttcttttttctttttactatatttcatcacagtacrttttcttgttaagcactgatcttcacaaacacttcacaaacacttcagtgatacgttcaaacygtggctgtcaaactgcattttcagcacaaaggaattactataggacatgaaggttcatttctggcttactatgaagaatcttgtagaaattttgctgacaagtgatttacgcctgcacagcagctctttcaccttccaagtctatgaacacaggaaactgttgccacctgaaatgctggtcaggatgcacttattcatcattctcatttcctatacatgccacaggcacacctcctc

SEQ ID NO: 46021 - DNA, 600 bp, Chicken  19866894286618_4
aatcctcgatatcaggacaggagattgtctttctcttggtaacttctgatttttccagatatctgatcttgctgttgtagcaaagcccagattcattctcagctaccgtcaaggacatggacaccttcatgcaatacgttgagtttctgcagggacagaaagatgttgtcatttacttcactccttctttttwatttctttttcttttttctttttactatatttcatcacagtacrttttcttgttaagcactgatcttcacaaacacttcacaaacacttcagtgatacgttcaaacygtggctgtcaaactgcattttcagcacaaaggaattactataggacatgaaggttcatttctggcttactatgaagaatcttgtagaaattttgctgacaagtgatttacgcctgcacagcagctctttcaccttccaagtctatgaacacaggaaactgttgccacctgaaatgctggtcaggatgcacttattcatcattctcatttcctatacatgccacaggcacacctcctctttcaccttcagacttcactctagtatgtagcactttacatttgagaagggttaagcagctga

SEQ ID NO: 46022 - DNA, 600 bp, Chicken  19866894286618_5
tgaaaaatgcaatcccttaacaaataaaaccatggcccactccatcagaaaaggtccttgggggttaaatctatgcaagtggcttgtgagttctctgagctcagtttttcttaacatcaggtcagagtaaacatgaacaaccagctcctgtgcctcacaataatggaaacaggattaaattaaattccttcagactcacatctttaacagagttatcagatgcacagtaaaaaagacatttctcatggtgttattgtaaagaatttgcactttgcacaggattgttgcaagccatactgycacttctggccttcattaggtgcaatggcaaacagagtccttcaaaagccaactacaaagtacaagcgacaatataatgaggctcttcctcccatcatacatcattttgtcactttaattgactacaccataaccaaaaagcctggagtaaatctgacatgctgaatggttactcccatcaaagggagctgaggagagctcctgcagaagatactactgctttgctgtcacttcttccatcacagctctgctgcaaacttcagcagaggcaatggcacagcagactaaaattgccccatg

SEQ ID NO: 46023 - DNA, 397 bp, Chicken  19866894286618_6
taggtgcaatggcaaacagagtccttcaaaagccaactacaaagtacaagcgacaatataatgaggctcttcctcccatcatacatcattttgtcactttaattgactacaccataaccaaaaagcctggagtaaatctgacatgctgaatggttactcccatcaaagggagctgaggagagctcctgcagaagatactactgctttgctgtcacttcttccatcacagctctgctgcaaacttcagcagaggcaatggcacagcagactaaaattgccccatgcacctggaaagggatmtgtcagtcagaccttgacactaatagtactagatgcttactccctccaatgagactcatgacaatgcttttaaataaaatgaactagaaaaatccac

SEQ ID NO: 46024 - DNA, 600 bp, Chicken  19866894286620_1
tatccaaaggttgggttttacgttgataaaccaatgagaaacctgatccatgtgtttctgcagatctttttcctggccagaaacaggagaggatgtggaggatgcgggattttttcattcctttaatggttcatttccgtttagctttgagctgcatccctacttgctggtgaaacagaggacttggtgaaagggcaagaatgaatgttcagtcaagggacagcaagagtttcttaagctgcattactttcagtgtggacagacaatgaatgacatgccaacccagattaagaagatgcyttccatctctgccatcttcttcacgagttaggaaaystgcaagttttcaggtacaattcttgcaatgatcsaagccttgtgctggagctcttcaaggcaatttgctggagaaactctggtttataatcccagtatcaattaataccacttggcatggtgttgcccagggttgcacagcagacaggagtgccacagctgatctcctgccctgttctctcttatggctgaactaggctgggctgcttttgctggagctcggtactgtgcctttacgtaaaggagccataactagattaggaa

SEQ ID NO: 46025 - DNA, 600 bp, Chicken  19866894286620_2
agaaacctgatccatgtgtttctgcagatctttttcctggccagaaacaggagaggatgtggaggatgcgggattttttcattcctttaatggttcatttccgtttagctttgagctgcatccctacttgctggtgaaacagaggacttggtgaaagggcaagaatgaatgttcagtcaagggacagcaagagtttcttaagctgcattactttcagtgtggacagacaatgaatgacatgccaacccagattaagaagatgcyttccatctctgccatcttcttcacgagttaggaaaystgcaagttttcaggtacaattcttgcaatgatcsaagccttgtgctggagctcttcaaggcaatttgctggagaaactctggtttataatcccagtatcaattaataccacttggcatggtgttgcccagggttgcacagcagacaggagtgccacagctgatctcctgccctgttctctcttatggctgaactaggctgggctgcttttgctggagctcggtactgtgcctttacgtaaaggagccataactagattaggaaaagtgattattttacaggtgttgttaaaatattgtt

SEQ ID NO: 46026 - DNA, 600 bp, Chicken  19866894286620_3
gaaacctgatccatgtgtttctgcagatctttttcctggccagaaacaggagaggatgtggaggatgcgggattttttcattcctttaatggttcatttccgtttagctttgagctgcatccctacttgctggtgaaacagaggacttggtgaaagggcaagaatgaatgttcagtcaagggacagcaagagtttcttaagctgcattactttcagtgtggacagacaatgaatgacatgccaacccagattaagaagatgcyttccatctctgccatcttcttcacgagttaggaaaystgcaagttttcaggtacaattcttgcaatgatcsaagccttgtgctggagctcttcaaggcaatttgctggagaaactctggtttataatcccagtatcaattaataccacttggcatggtgttgcccagggttgcacagcagacaggagtgccacagctgatctcctgccctgttctctcttatggctgaactaggctgggctgcttttgctggagctcggtactgtgcctttacgtaaaggagccataactagattaggaaaagtgattattttacaggtgttgttaaaatattgttt

SEQ ID NO: 46027 - DNA, 600 bp, Chicken  19866894286620_4
cctggccagaaacaggagaggatgtggaggatgcgggattttttcattcctttaatggttcatttccgtttagctttgagctgcatccctacttgctggtgaaacagaggacttggtgaaagggcaagaatgaatgttcagtcaagggacagcaagagtttcttaagctgcattactttcagtgtggacagacaatgaatgacatgccaacccagattaagaagatgcyttccatctctgccatcttcttcacgagttaggaaaystgcaagttttcaggtacaattcttgcaatgatcsaagccttgtgctggagctcttcaaggcaatttgctggagaaactctggtttataatcccagtatcaattaataccacttggcatggtgttgcccagggttgcacagcagacaggagtgccacagctgatctcctgccctgttctctcttatggctgaactaggctgggctgcttttgctggagctcggtactgtgcctttacgtaaaggagccataactagattaggaaaagtgattattttacaggtgttgttaaaatattgtttgaatgcgattttcctagtttttacaaattcctgt

SEQ ID NO: 46028 - DNA, 600 bp, Chicken  19866894286620_5
tacaggtgttgttaaaatattgtttgaatgcgattttcctagtttttacaaattcctgtttagcagaaaatccagtgtgccacgatttcccaagtccgttttctatcttcttggcttaggcagttcgtatgtatttgagccatttaaaattccttttttcccttgtgggaggaggaaggaactccttgtccagggtggaaattaaacctcctgtcattttaatcggtactaggtgggtgttaaatgcccatcacctgtctgtagattcagacctgactgcacttgtcctcctgcattatmtgacctagccatcatttggtaccagacaaattttctccagtacatctcctttaagaaagcagattggcattagccccccatacgactccttcttttagccccttggcctcccatcaccacagggacagggccccggggtcacttttgttggtcacaatttaactctttgcagcctttgaaatgattcttttggcttaccaaacggtccaagtctgtggctgaagggcgtgcgtttccaggctttctgtatccattgcaaagagaagaagagcccaagcccattttactctcattgcagat

SEQ ID NO: 46029 - DNA, 600 bp, Chicken  19866894286620_6
ctgaagggcgtgcgtttccaggctttctgtatccattgcaaagagaagaagagcccaagcccattttactctcattgcagattaccgttaacgtttgctctcagatggatgtgagcattatttgctttggacaggaaacgtatgaggagggaggcaggcacattctcgccaaactgtaactgaagaaatgcgaatacttcatatggcagtaagctttggctcagtctcatttgttttgttataacaagcaccagcttcagttagtggtttttgttgttttcttttttccctccacccttyttttccctgcttctcctcagatcgtgacatcgggtcctgggaatgaatgtctgacaagaggaatgaaatagcatgtattcattaccagtcattcttactgttgcaccccgtgtatactgaacaagcttttgagacaaacrtactaccactcaaaacyctgttctgcacgttattgagcaagcactgctaacaagtgaagtacaaaactgaaacagaagcaggggaaacgactatttgaactactttatcacctattaacatgttgaatgttgtcacggattcctgttaaccaaaagcatg

SEQ ID NO: 46030 - DNA, 590 bp, Chicken  19866894286620_7
tatgaggagggaggcaggcacattctcgccaaactgtaactgaagaaatgcgaatacttcatatggcagtaagctttggctcagtctcatttgttttgttataacaagcaccagcttcagttagtggtttttgttgttttcttttttccctccacccttyttttccctgcttctcctcagatcgtgacatcgggtcctgggaatgaatgtctgacaagaggaatgaaatagcatgtattcattaccagtcattcttactgttgcaccccgtgtatactgaacaagcttttgagacaaacrtactaccactcaaaacyctgttctgcacgttattgagcaagcactgctaacaagtgaagtacaaaactgaaacagaagcaggggaaacgactatttgaactactttatcacctattaacatgttgaatgttgtcacggattcctgttaaccaaaagcatgaaatggggaattcttaattgaaaatcgtgttgttaaagatatcgctccaacttggtactttgtgagtggtttctggaagactgtccagatgttttttactttgctgctttgcagctagctctgcctccat

SEQ ID NO: 46031 - DNA, 573 bp, Chicken  19866894286620_8
gcacattctcgccaaactgtaactgaagaaatgcgaatacttcatatggcagtaagctttggctcagtctcatttgttttgttataacaagcaccagcttcagttagtggtttttgttgttttcttttttccctccacccttyttttccctgcttctcctcagatcgtgacatcgggtcctgggaatgaatgtctgacaagaggaatgaaatagcatgtattcattaccagtcattcttactgttgcaccccgtgtatactgaacaagcttttgagacaaacrtactaccactcaaaacyctgttctgcacgttattgagcaagcactgctaacaagtgaagtacaaaactgaaacagaagcaggggaaacgactatttgaactactttatcacctattaacatgttgaatgttgtcacggattcctgttaaccaaaagcatgaaatggggaattcttaattgaaaatcgtgttgttaaagatatcgctccaacttggtactttgtgagtggtttctggaagactgtccagatgttttttactttgctgctttgcagctagctctgcctccat

SEQ ID NO: 46032 - DNA, 600 bp, Chicken  19866894286625_1
taaaatctgaagtcgatcccatctcatccgactgcactctttatggaagtcaaatgctatgtatctgttcagaggaagaagaacctttttagaatacttactgcagtgaaggtctcaagaatccacatatccataaagcaagcagtgacagaatttacacctgtgcattttgtcagtgctctgcaatctttccatggctgcttccttagagcgcatggtgacagcgcctacattgcattacaggataccattagcctcagaaagcactcgttactcattttaagttctggctactatgtkttctccagaaagcaygtaagagaagaaatgcatcygatttcatctgtgtggctaccatgaccctcgacttccctcctttgttctgtttgtcccatcttcagcctcacctgtgcgtaaaatctgaggtagggccaatggctacataaaggttacttcatataaacaaaacatcgacaaatcagctatttaataaaggccctgaaatcactgatcactctgtctctcaggcaacgctcagtttttaaactcaaggaagtatcatttgacttcacacgtacctgaccatttccatttgccatg

SEQ ID NO: 46033 - DNA, 600 bp, Chicken  19866894286625_2
atcccatctcatccgactgcactctttatggaagtcaaatgctatgtatctgttcagaggaagaagaacctttttagaatacttactgcagtgaaggtctcaagaatccacatatccataaagcaagcagtgacagaatttacacctgtgcattttgtcagtgctctgcaatctttccatggctgcttccttagagcgcatggtgacagcgcctacattgcattacaggataccattagcctcagaaagcactcgttactcattttaagttctggctactatgtkttctccagaaagcaygtaagagaagaaatgcatcygatttcatctgtgtggctaccatgaccctcgacttccctcctttgttctgtttgtcccatcttcagcctcacctgtgcgtaaaatctgaggtagggccaatggctacataaaggttacttcatataaacaaaacatcgacaaatcagctatttaataaaggccctgaaatcactgatcactctgtctctcaggcaacgctcagtttttaaactcaaggaagtatcatttgacttcacacgtacctgaccatttccatttgccatgctattcaccattttt

SEQ ID NO: 46034 - DNA, 586 bp, Chicken  19866894286625_3
actctttatggaagtcaaatgctatgtatctgttcagaggaagaagaacctttttagaatacttactgcagtgaaggtctcaagaatccacatatccataaagcaagcagtgacagaatttacacctgtgcattttgtcagtgctctgcaatctttccatggctgcttccttagagcgcatggtgacagcgcctacattgcattacaggataccattagcctcagaaagcactcgttactcattttaagttctggctactatgtkttctccagaaagcaygtaagagaagaaatgcatcygatttcatctgtgtggctaccatgaccctcgacttccctcctttgttctgtttgtcccatcttcagcctcacctgtgcgtaaaatctgaggtagggccaatggctacataaaggttacttcatataaacaaaacatcgacaaatcagctatttaataaaggccctgaaatcactgatcactctgtctctcaggcaacgctcagtttttaaactcaaggaagtatcatttgacttcacacgtacctgaccatttccatttgccatgctattcaccatttttgcaaat

SEQ ID NO: 46035 - DNA, 600 bp, Chicken  19866894286635_1
tttcacacttctggtattgaagtttttcagataaattaaagattgttttgataacaggcctgaagataaatctgattaatcagtcccaccccaaaacagttccaggtgaaagactcaagtaatttacgctccctccatacacgcgaatcaaataaggtgagagggagctttgatccagtcctgccatcgttaacaggacttttatttgttatcttcaaaagacagcagaggactgaacctgaacacagggcctgactgctatggcaaagctttccctggtggacaccacaaggagcaccrgtgcctgcagccgcacagcacgagggagaggagattcaaggacacaatatggaagaaaaaaggaacacacaatgatggcttgcagcagagcttaccaccttttatctgagtgaaacactgccctggataaaagaagtcaggctgctatctgcctctcctcagctaccctgcctgtaggagaagaaaattaaagccatctgcagaaggagctcaggattagagaagkaaagaaacttccagagctacagacacacttaaaagtaatatcttaaggagaaatgtaattcatgaggaaactca

SEQ ID NO: 46036 - DNA, 580 bp, Chicken  19866894286635_2
agaggactgaacctgaacacagggcctgactgctatggcaaagctttccctggtggacaccacaaggagcaccrgtgcctgcagccgcacagcacgagggagaggagattcaaggacacaatatggaagaaaaaaggaacacacaatgatggcttgcagcagagcttaccaccttttatctgagtgaaacactgccctggataaaagaagtcaggctgctatctgcctctcctcagctaccctgcctgtaggagaagaaaattaaagccatctgcagaaggagctcaggattagagaagkaaagaaacttccagagctacagacacacttaaaagtaatatcttaaggagaaatgtaattcatgaggaaactcatatgaaatcatagtaaacgtggagaaaggacgcacgtttctgacaacaaaataaatacactggatagtctatttcctagcatagttatttgcatggaaggttggatttatgctgtgctgtgcctgacagcaatacagacaaagcaaatccaaaaagaaatactgcttgcaaatcacagcttctagtacaaatctttgagaatcaca

SEQ ID NO: 46037 - DNA, 599 bp, Chicken  19866894286637_1
  misc_feature (1)..(121): n is any nucleotide
nnnnnnnnnnnnnnnnnnnnnnnnnnnnnnnnnnnnnnnnnnnnnnnnnnnnnnnnnnnnnnnnnnnnnnnnnnnnnnnnnnnnnnnnnnnnnnnnnnnnnnnnnnnnnnnnnnnnnnnnntcttgatttattgctagcaattttgtgtgctcctggccataaataactcatcctggccaaaccgaatatgcagaccatgattaaacctcaagttatcacaccctaaaatgctgaaattataataaataaatagagtaaatcatactcgttttcactggctgacatcagagagtacataygtgctgtaagctgtgagaatctgtgtcttgggtgggctcttaagatttactttgaggtgacttaatgatagcttgctttcttgttgtgctctgtgctgtataactgtttcatttcagatatatcccatgttttagtgactatgacgttttataccaaatttcttgtaagactttttagctgcgtttctcattgttttaattgtttgataatctttagaactgctgtaaaattaatagctgcttcctgctggcatttgttcgaargtggtgaatgctaaatttgtaaatcaaatttctgc

SEQ ID NO: 46038 - DNA, 600 bp, Chicken  19866894286637_2
actcgttttcactggctgacatcagagagtacataygtgctgtaagctgtgagaatctgtgtcttgggtgggctcttaagatttactttgaggtgacttaatgatagcttgctttcttgttgtgctctgtgctgtataactgtttcatttcagatatatcccatgttttagtgactatgacgttttataccaaatttcttgtaagactttttagctgcgtttctcattgttttaattgtttgataatctttagaactgctgtaaaattaatagctgcttcctgctggcatttgttcgaargtggtgaatgctaaatttgtaaatcaaatttctgcagagtatatatcacagttttaaatattttgttcttctagcaccagcattagatgttgattggcagagcaacaacacatttgcctcttgcagcacggacatgtgcattcatgtctgtaaactaggacaagataggcccatcaaaaccttccagggtcacacagtaagtactagaaaatgacagattttatgacgtttttattaatgagaggctgttggggtgggcagggagcatcactactcttgccagtatacagtgcttgcata

SEQ ID NO: 46039 - DNA, 600 bp, Chicken  19866894286642_1
taaagtaaggttaataaaacagaactgtagattgaaaagctgcaatttatcctttttcctctaaagatggttattttaaattaagagagtccatgctctgctaattgatagagagcattttctagcaagccaaaatgatcattttaaatcttactttaatgtatcactgattcttgttctctataagcaaagacaagaaaatctgcttatgcactacttatctatatagctgtttttccttgaagtacagagagtaaaggaataaaatcttaaaatggtttattcccaataaaacaaagygactcacgctctccacacagaggcatctgtgtttggcattttgcatatttctatgtagaagctaacaatatgtggggcagacactctaacacattatatggaaagacctgtttggaagtataaccacttctgaaagataaaaatatttagttacctaagagtattacaatggcatgatttaagtggcattactcctatatgcataataggtaccggaaaaattattcttgcagacggattaaaattacaggaatcaccaaggacaagtatccttgctacagtacagctataccactcaga

SEQ ID NO: 46040 - DNA, 600 bp, Chicken  19866894286645_1
aagtgaaacactggcagtattttcaacccaaggctttgctccccgtgcctcagcctgtacctataacctcactcatggatgtactgcagcgcagaggagcgacaactgattaaaaagccaacagacaaatgactgcctatgaggtagcagctgatcctacatcaaaagatctgtgccatgctgataccgtaaagtatgtcagtgattcatcagcagaatatcatttacccacttatcaaaaaaacccctacagatgtcaaaatagaggctacacatcttcggttcacaagcgagcttccraaaggcatctaaaattcatatcccatggatttcattggcaaatcagtgttactatcaaccagcgttgttatgaaaatgcttttgcacagactcacrtctacgaccccagtgagtgatttcagaagcagcagcactacggctacctctgtcagatgctgtcttggagtgctttcatacaacgtccttcacgatgaaggttccatcctgatggtggtgacagagccctaccgccttctaaaagacacaggcagctttgactcaaacacgtcgaaaatcaaaacagagctaaaaattaaaccc

SEQ ID NO: 46041 - DNA, 600 bp, Chicken  19866894286645_2
gagcgacaactgattaaaaagccaacagacaaatgactgcctatgaggtagcagctgatcctacatcaaaagatctgtgccatgctgataccgtaaagtatgtcagtgattcatcagcagaatatcatttacccacttatcaaaaaaacccctacagatgtcaaaatagaggctacacatcttcggttcacaagcgagcttccraaaggcatctaaaattcatatcccatggatttcattggcaaatcagtgttactatcaaccagcgttgttatgaaaatgcttttgcacagactcacrtctacgaccccagtgagtgatttcagaagcagcagcactacggctacctctgtcagatgctgtcttggagtgctttcatacaacgtccttcacgatgaaggttccatcctgatggtggtgacagagccctaccgccttctaaaagacacaggcagctttgactcaaacacgtcgaaaatcaaaacagagctaaaaattaaacccagatgcaacgggaggcaaaccaaacacagacctctgacgcaccggcttcaggatgcagaaagccttttgttaatgatgctccctgcatagaatatg

SEQ ID NO: 46042 - DNA, 600 bp, Chicken  19866894286648_1
taacctcatgcagcttctaagactgagatgagagcgtgggaggcatttgttaacgagattcaaggtacgctgttttcctctggtgttgtttcaccacaacttgttacttccattttccaaaacttttggtacagtttggaggggaggccctgtcctgctgtcctgagttgtttttgtggactgtccttcccctgtatcatttggttagttgcatgatgaaagctaatttaatgatccttacattacagatgagtggggagagataaatggctgaggacatgctcaggacacttgaaacaytgacagtcagactatgggaactacttctcttcatttgattagcctgtgccagtctgcggtggccacttctacaaagtagtctttactatctgttgtggggtgggcagacatgctgtcacttgcttccatatatcaaaggaaacctcattctgaacttctgctgtgtttttatttccctcataagagacagataatcagtcaggggtaggtgctgactttcctttctcctcactgcagagggaaggcaagttcataactcccctcttgatctctttyccacagccattgatgagacctccc

SEQ ID NO: 46043 - DNA, 464 bp, Chicken  19866894286648_2
acatgctcaggacacttgaaacaytgacagtcagactatgggaactacttctcttcatttgattagcctgtgccagtctgcggtggccacttctacaaagtagtctttactatctgttgtggggtgggcagacatgctgtcacttgcttccatatatcaaaggaaacctcattctgaacttctgctgtgtttttatttccctcataagagacagataatcagtcaggggtaggtgctgactttcctttctcctcactgcagagggaaggcaagttcataactcccctcttgatctctttyccacagccattgatgagacctccctrtccacctaaagrccccttttctttgcaagtgctcccactggactcagtccactgcaggtgtgctaaaagcctgtagcattgtccctttaacataaactgtagaaaaattaatgtttgcatagatagcgcaaatgggga

SEQ ID NO: 46044 - DNA, 438 bp, Chicken  19866894286648_3
acagtcagactatgggaactacttctcttcatttgattagcctgtgccagtctgcggtggccacttctacaaagtagtctttactatctgttgtggggtgggcagacatgctgtcacttgcttccatatatcaaaggaaacctcattctgaacttctgctgtgtttttatttccctcataagagacagataatcagtcaggggtaggtgctgactttcctttctcctcactgcagagggaaggcaagttcataactcccctcttgatctctttyccacagccattgatgagacctccctrtccacctaaagrccccttttctttgcaagtgctcccactggactcagtccactgcaggtgtgctaaaagcctgtagcattgtccctttaacataaactgtagaaaaattaatgtttgcatagatagcgcaaatgggga

SEQ ID NO: 46045 - DNA, 426 bp, Chicken  19866894286648_4
tgggaactacttctcttcatttgattagcctgtgccagtctgcggtggccacttctacaaagtagtctttactatctgttgtggggtgggcagacatgctgtcacttgcttccatatatcaaaggaaacctcattctgaacttctgctgtgtttttatttccctcataagagacagataatcagtcaggggtaggtgctgactttcctttctcctcactgcagagggaaggcaagttcataactcccctcttgatctctttyccacagccattgatgagacctccctrtccacctaaagrccccttttctttgcaagtgctcccactggactcagtccactgcaggtgtgctaaaagcctgtagcattgtccctttaacataaactgtagaaaaattaatgtttgcatagatagcgcaaatgggga

SEQ ID NO: 46046 - DNA, 541 bp, Chicken  19866894286652_1
catgccccgggcgcagcgtgatgagctgcagcgctgcatttggttctgcgttagggacgttgagtgccatgtcctcccctgcccagcacagcacagcgcattgctgctcactgccctcccctgccccagggcagggccgggctcagcctctgcctcagcaccagctcagaaaaccaaagaggaacgaggcaaagccagattctacaaaaggaatgaatgaattagaaaaacaacgagcagtggggtggtctcggtctctgacagcccagtgtgagcctgcctcgggggccgggcagggargggagcagcccctgctgctgccagctctgccctcatgctgggcagcatcaagccacggtgatggagagagtgtctcaggggtcccagccccgctctggcatttggactcctccagcagccactctgcagctccgtcctgcgcagcagtgcacagccacgctcacagcgcagcaatggctttggcagcgacgcggcggcccaggggcagacccagatccgtgatggccaggacgattttggg

SEQ ID NO: 46047 - DNA, 599 bp, Chicken  19866894286655_1
  misc_feature (1)..(161): n is any nucleotide
nnnnnnnnnnnnnnnnnnnnnnnnnnnnnnnnnnnnnnnnnnnnnnnnnnnnnnnnnnnnnnnnnnnnnnnnnnnnnnnnnnnnnnnnnnnnnnnnnnnnnnnnnnnnnnnnnnnnnnnnnnnnnnnnnnnnnnnnnnnnnnnnnnnnnnnnnnnnnnnnnacctttctggggtaggttggtgtgcctcttccttcatcagctgagcagcaacagacccattatccctccttacgtgcttatctcccacttagaagggttctgactgccaggctgcaatcccagggattagctgcaggcrcttagctcctgtcctcactgctgcccatgtcagaaacacagagctgctggggctcgagctgcaaaaatagcatcttctattctcgtatcaccagtctggattgaagaaggcagaaagaaccacagcagggcttgggccttcagttggtacaagactgccagcgctacacaacagtcactgatgttttgtttgttttgtcagatttttcacttgttggttcacagaatcattmcagttggaaaagacctcaaggccaccaagtccaaccatgcgcccaatgcaccgctaagagccaccgc

SEQ ID NO: 46048 - DNA, 600 bp, Chicken  19866894286655_2
acgtgcttatctcccacttagaagggttctgactgccaggctgcaatcccagggattagctgcaggcrcttagctcctgtcctcactgctgcccatgtcagaaacacagagctgctggggctcgagctgcaaaaatagcatcttctattctcgtatcaccagtctggattgaagaaggcagaaagaaccacagcagggcttgggccttcagttggtacaagactgccagcgctacacaacagtcactgatgttttgtttgttttgtcagatttttcacttgttggttcacagaatcattmcagttggaaaagacctcaaggccaccaagtccaaccatgcgcccaatgcaccgctaagagccaccgctcactgcaccaacacctgccatggaactgcatgaacacacatcagatcacacaaatcagatcccaaaataaaaatgagtctctaatgagtggcagtgagatgacagagttcaaacaatgtgacagagcactaacctaattcagaaaaaagaagggacacgtatacaaagaataggctaaaaaggctgaaaattacagtgacaaaaattaatttggaaagacagcaaaaggaca

SEQ ID NO: 46049 - DNA, 599 bp, Chicken  19866894286661_1
  misc_feature (1)..(220): n is any nucleotide
nnnnnnnnnnnnnnnnnnnnnnnnnnnnnnnnnnnnnnnnnnnnnnnnnnnnnnnnnnnnnnnnnnnnnnnnnnnnnnnnnnnnnnnnnnnnnnnnnnnnnnnnnnnnnnnnnnnnnnnnnnnnnnnnnnnnnnnnnnnnnnnnnnnnnnnnnnnnnnnnnnnnnnnnnnnnnnnnnnnnnnnnnnnnnnnnnnnnnnnnnnnnnnnnnnnnnnnnnnnntaggaatgcgggaggcatttagatgctcagtgcattcccagtttccttcaacagaccaatggctctgcatctctctattsccaacatacggcaaaggttgccatgacctcttcaatggctgtttacagaccagcaaaaatagaaaggcatttctctaaataaatagcgagctaataactttaagagtcatttgataggtttaatttagattgctttcagccaaaatgagaccaggacctgtgtgagcctctctgaccttcctgatacttcccaggaggctgatatgttcagaagtacaaagcaacagtgctgagactgaccctctccattcactcatttgtgtgcgacaaatcaattctgcgacgagatgagcagcact

SEQ ID NO: 46050 - DNA, 600 bp, Chicken  19866894286661_2
gctgtttacagaccagcaaaaatagaaaggcatttctctaaataaatagcgagctaataactttaagagtcatttgataggtttaatttagattgctttcagccaaaatgagaccaggacctgtgtgagcctctctgaccttcctgatacttcccaggaggctgatatgttcagaagtacaaagcaacagtgctgagactgaccctctccattcactcatttgtgtgcgacaaatcaattctgcgacgagatgagcagcactgaaagctagcgaggtgcccaatggatccaatcgtctcsactcaaattttcctttccyccaaaatttgcatagaacagatccaagagcgaagctacaactgaatttagttttgaaagtcaagcacatgatagtcctcagaagtgtcagaaagaggaccctgcatcatccacgcttgtttgtatgcatgtttgaaggctacaaaatgcttctggcatgaaagagaaatgactttaaaaataaaatgycatcctacaaactgtatggttaccaactagacattgagtttcactacctttactattacgttagaagtagtgtattatacagtttgtgtatta

SEQ ID NO: 46051 - DNA, 600 bp, Chicken  19866894286661_3
aaatagaaaggcatttctctaaataaatagcgagctaataactttaagagtcatttgataggtttaatttagattgctttcagccaaaatgagaccaggacctgtgtgagcctctctgaccttcctgatacttcccaggaggctgatatgttcagaagtacaaagcaacagtgctgagactgaccctctccattcactcatttgtgtgcgacaaatcaattctgcgacgagatgagcagcactgaaagctagcgaggtgcccaatggatccaatcgtctcsactcaaattttcctttccyccaaaatttgcatagaacagatccaagagcgaagctacaactgaatttagttttgaaagtcaagcacatgatagtcctcagaagtgtcagaaagaggaccctgcatcatccacgcttgtttgtatgcatgtttgaaggctacaaaatgcttctggcatgaaagagaaatgactttaaaaataaaatgycatcctacaaactgtatggttaccaactagacattgagtttcactacctttactattacgttagaagtagtgtattatacagtttgtgtattataaagtattctaaagtttg

SEQ ID NO: 46052 - DNA, 436 bp, Chicken  19866894286661_4
tccattcactcatttgtgtgcgacaaatcaattctgcgacgagatgagcagcactgaaagctagcgaggtgcccaatggatccaatcgtctcsactcaaattttcctttccyccaaaatttgcatagaacagatccaagagcgaagctacaactgaatttagttttgaaagtcaagcacatgatagtcctcagaagtgtcagaaagaggaccctgcatcatccacgcttgtttgtatgcatgtttgaaggctacaaaatgcttctggcatgaaagagaaatgactttaaaaataaaatgycatcctacaaactgtatggttaccaactagacattgagtttcactacctttactattacgttagaagtagtgtattatacagtttgtgtattataaagtattctaaagtttggagagaatattgggcaggtaattt

SEQ ID NO: 46053 - DNA, 600 bp, Chicken  19866894286663_1
actcacccctgtcaaagccaaggcagtaaagaaagaaccacttgctagcccttcaccagagtggagtaccaggtaatgtatttctaaacaaacacgtgcaaaagcccagaagaaaaaattcatatgagaacagatgttctgactgatacttatttcccactgggtttagcctggaaattaatgttcccttctcactgttgttgtgcacacccattgcactagcaagaagctgcctatgtttggaaattaccaagcagtgaggaagcaagcagccacacaaatacctatgggaaaagccayacacagcataagcactgcccacacaaatactctgcacaaacagaaagacastgaacttgacataycactgctgaacatttcctaaatctatagaatattttccaaactgataytggaggtcagattggcctcttcactgataggtaggatagtcattaattcagcaggaactggcagtgattaagttcatctttaaactatttgagcctatctgagcccccaagcagaacattctctgactagaactaaacactgctgcagcttcatcctaaccttcaatagaaatctcgggcagttagt

SEQ ID NO: 46054 - DNA, 600 bp, Chicken  19866894286663_2
ttcaccagagtggagtaccaggtaatgtatttctaaacaaacacgtgcaaaagcccagaagaaaaaattcatatgagaacagatgttctgactgatacttatttcccactgggtttagcctggaaattaatgttcccttctcactgttgttgtgcacacccattgcactagcaagaagctgcctatgtttggaaattaccaagcagtgaggaagcaagcagccacacaaatacctatgggaaaagccayacacagcataagcactgcccacacaaatactctgcacaaacagaaagacastgaacttgacataycactgctgaacatttcctaaatctatagaatattttccaaactgataytggaggtcagattggcctcttcactgataggtaggatagtcattaattcagcaggaactggcagtgattaagttcatctttaaactatttgagcctatctgagcccccaagcagaacattctctgactagaactaaacactgctgcagcttcatcctaaccttcaatagaaatctcgggcagttagttaaccttagctgagcagaatatcaacaccagtgtctctgagcctctctttg

SEQ ID NO: 46055 - DNA, 600 bp, Chicken  19866894286663_3
gtaccaggtaatgtatttctaaacaaacacgtgcaaaagcccagaagaaaaaattcatatgagaacagatgttctgactgatacttatttcccactgggtttagcctggaaattaatgttcccttctcactgttgttgtgcacacccattgcactagcaagaagctgcctatgtttggaaattaccaagcagtgaggaagcaagcagccacacaaatacctatgggaaaagccayacacagcataagcactgcccacacaaatactctgcacaaacagaaagacastgaacttgacataycactgctgaacatttcctaaatctatagaatattttccaaactgataytggaggtcagattggcctcttcactgataggtaggatagtcattaattcagcaggaactggcagtgattaagttcatctttaaactatttgagcctatctgagcccccaagcagaacattctctgactagaactaaacactgctgcagcttcatcctaaccttcaatagaaatctcgggcagttagttaaccttagctgagcagaatatcaacaccagtgtctctgagcctctctttggcaagtaggtttgt

SEQ ID NO: 46056 - DNA, 600 bp, Chicken  19866894286663_4
aaaaattcatatgagaacagatgttctgactgatacttatttcccactgggtttagcctggaaattaatgttcccttctcactgttgttgtgcacacccattgcactagcaagaagctgcctatgtttggaaattaccaagcagtgaggaagcaagcagccacacaaatacctatgggaaaagccayacacagcataagcactgcccacacaaatactctgcacaaacagaaagacastgaacttgacataycactgctgaacatttcctaaatctatagaatattttccaaactgataytggaggtcagattggcctcttcactgataggtaggatagtcattaattcagcaggaactggcagtgattaagttcatctttaaactatttgagcctatctgagcccccaagcagaacattctctgactagaactaaacactgctgcagcttcatcctaaccttcaatagaaatctcgggcagttagttaaccttagctgagcagaatatcaacaccagtgtctctgagcctctctttggcaagtaggtttgtgctgttgctttgctcccctttgcatcaaaggcctgtgccctttagctg

SEQ ID NO: 46057 - DNA, 599 bp, Chicken  19866894286664_1
  misc_feature (1)..(183): n is any nucleotide
nnnnnnnnnnnnnnnnnnnnnnnnnnnnnnnnnnnnnnnnnnnnnnnnnnnnnnnnnnnnnnnnnnnnnnnnnnnnnnnnnnnnnnnnnnnnnnnnnnnnnnnnnnnnnnnnnnnnnnnnnnnnnnnnnnnnnnnnnnnnnnnnnnnnnnnnnnnnnnnnnnnnnnnnnnnnnnnnnnnnnnnattttttttgcattatttgtgaatttaaatcgaaacctttatgatttgctgttaccaagatgaaaagttgtgccaagggagatgtccacagtcattcgccttcatttccaccctctyctcatagcagtagatggatttctttgtcctctcaaagacagaaattaatatcacacacgtaataatggaaacaagaactaggatatgaactggagacattctagcctccaaacaataacttctctggacaaactaaatgcttttgactcagtcaatagaacatttctatctatagaggataatcacaccctccagcacaaaggataacagatgtaacatttgagcggggaaaaaagacaacaggaatgcggagccatcaagttgcattactttaatatactggttagttgttgtgttga

SEQ ID NO: 46058 - DNA, 599 bp, Chicken  19866894286665_1
  misc_feature (1)..(103): n is any nucleotide
nnnnnnnnnnnnnnnnnnnnnnnnnnnnnnnnnnnnnnnnnnnnnnnnnnnnnnnnnnnnnnnnnnnnnnnnnnnnnnnnnnnnnnnnnnnnnnnnnnnnnnnacattcatccagaaggccctctcaatgagtcctggggttcagagcagacctctttgttttctaaactcctagaaccacagaggtaaggagattaggtgcagctggatccagtcctagtctcacacttggttaacagtttaggcctgagaaattatatgtgcacaatcaatcaaagatttaatcttagcaaagcaaaygaaacttaaagtattaagtcacttaccaaggatcckataggcaaggcatcttgatgtcaaggtgtaaggtatctctgctcacatgtaaccttgacaggcaaccctacttgagggcagaacctattgggtagtcagcagccatgcaagagagctcatgtagcccatgattatttgtgtactcagggctctgtggatgacagtgaaacaggcagggatgagtmtcgggcagcacaccaggtcaaaggagaagaggtggtttcagggaggggaatgcacagaaagagtaaactagaaagtgg

SEQ ID NO: 46059 - DNA, 599 bp, Chicken  19866894286665_2
  misc_feature (1)..(67): n is any nucleotide
nnnnnnnnnnnnnnnnnnnnnnnnnnnnnnnnnnnnnnnnnnnnnnnnnnnnnnnnnnnnnnnnnnnacattcatccagaaggccctctcaatgagtcctggggttcagagcagacctctttgttttctaaactcctagaaccacagaggtaaggagattaggtgcagctggatccagtcctagtctcacacttggttaacagtttaggcctgagaaattatatgtgcacaatcaatcaaagatttaatcttagcaaagcaaaygaaacttaaagtattaagtcacttaccaaggatcckataggcaaggcatcttgatgtcaaggtgtaaggtatctctgctcacatgtaaccttgacaggcaaccctacttgagggcagaacctattgggtagtcagcagccatgcaagagagctcatgtagcccatgattatttgtgtactcagggctctgtggatgacagtgaaacaggcagggatgagtmtcgggcagcacaccaggtcaaaggagaagaggtggtttcagggaggggaatgcacagaaagagtaaactagaaagtggatgaaataaatgaaaatatgcaagtatgtacatcta

SEQ ID NO: 46060 - DNA, 600 bp, Chicken  19866894286665_3
ctcacacttggttaacagtttaggcctgagaaattatatgtgcacaatcaatcaaagatttaatcttagcaaagcaaaygaaacttaaagtattaagtcacttaccaaggatcckataggcaaggcatcttgatgtcaaggtgtaaggtatctctgctcacatgtaaccttgacaggcaaccctacttgagggcagaacctattgggtagtcagcagccatgcaagagagctcatgtagcccatgattatttgtgtactcagggctctgtggatgacagtgaaacaggcagggatgagtmtcgggcagcacaccaggtcaaaggagaagaggtggtttcagggaggggaatgcacagaaagagtaaactagaaagtggatgaaataaatgaaaatatgcaagtatgtacatctagaagrgatctactatttgatcttccccatctgagagccactatgtttacaaataaggaatttacttcccatttagtacagaagctgtccttgtactcatttatgctgtttgactccaccccctgtgtttagaattccacaaggcaagtactgcatgctttttttcctccagtcacagcaatagaca

SEQ ID NO: 46061 - DNA, 600 bp, Chicken  19866894286665_4
gcaaggcatcttgatgtcaaggtgtaaggtatctctgctcacatgtaaccttgacaggcaaccctacttgagggcagaacctattgggtagtcagcagccatgcaagagagctcatgtagcccatgattatttgtgtactcagggctctgtggatgacagtgaaacaggcagggatgagtmtcgggcagcacaccaggtcaaaggagaagaggtggtttcagggaggggaatgcacagaaagagtaaactagaaagtggatgaaataaatgaaaatatgcaagtatgtacatctagaagrgatctactatttgatcttccccatctgagagccactatgtttacaaataaggaatttacttcccatttagtacagaagctgtccttgtactcatttatgctgtttgactccaccccctgtgtttagaattccacaaggcaagtactgcatgctttttttcctccagtcacagcaatagacatttcagcatcaattcaactcagctcaaaaagctaaagtaatgctagtctggaagctaatataccaaattacattttccctctgtactcagaatttggcctgtagaatatcaaccgttta

SEQ ID NO: 46062 - DNA, 600 bp, Chicken  19866894286671_1
catgcaagggtgtgtgcttgagctctctattaatcatacaccttggtgtcttcctaggcacttggccaaaagaaaaatgttgtcaactctctcaaagtgttattgttacaggataagacgatgtatgccctcaggtgtcttgtaatctaattatttatagagttatgtcaaaggaaaaatctctggaagtatggcagttagttttgatcataatgtcttaactctgctcccttgtgctaatgcactgctttgctcatagtaataaatgcttgcataatgagagaaccacaaaaatactcmatttggttttggctcttattgcacagaaataatctctacagaggacaattcacagcttaaaaggtataaaaccaaaatggtatgttactaatggctgaattcaggaagaaccagtatagtttgcttagctacgtctttcctttctgttaataattttgatagtaggaatgaggaaataagagcaagtgtgtgtaggcacaagtagagtgaggccaaggggactgataaagctcttggtggaaattccatgttgcagaacaatctttgtgcatgtgacagatgcacaaaatagcatctttt

SEQ ID NO: 46063 - DNA, 599 bp, Chicken  19866894286674_1
  misc_feature (1)..(36): n is any nucleotide
nnnnnnnnnnnnnnnnnnnnnnnnnnnnnnnnnnnnactgtttctgtgcccaagcattgcatgtggctgtgcagccgtggctgtttgcagctggcagggggttgtttgtacaggagcaaagcatccccagccctgagtgctgcaaactgggggagtctgctgcctgtgcgcactgccccatcctttattttttttatgcaaacaacggaagggagatgatgtccatgtgccccagacttgagtgctgcttatgtgacttcttagggattgggcagagctcacacctgttcccagtgatgstattgaggtttggggctgcaggaggtgaccccagcacccaaaggtgacacacttacgcagtagggaagcccagtgctaacacttctttacccatgctgcagttgggcttgtgtgaaaatatcttttttttttttccctaattttgagcctcctcttggtctctgtgctctgctctaggggggctgtgggacctgactgagcagcccacacgcctgcctgtgggcactggtcctgtgcgagccctcttgatgctggatgagaccctgtgggccagctgtgccaaccaggtcaccgtcctt

SEQ ID NO: 46064 - DNA, 600 bp, Chicken  19866894286674_2
tccccagccctgagtgctgcaaactgggggagtctgctgcctgtgcgcactgccccatcctttattttttttatgcaaacaacggaagggagatgatgtccatgtgccccagacttgagtgctgcttatgtgacttcttagggattgggcagagctcacacctgttcccagtgatgstattgaggtttggggctgcaggaggtgaccccagcacccaaaggtgacacacttacgcagtagggaagcccagtgctaacacttctttacccatgctgcagttgggcttgtgtgaaaatatcstttttttttttccctaattttgagcctcctcttggtctctgtgctctgctctaggggggctgtgggacctgactgagcagcccacacgcctgcctgtgggcactggtcctgtgcgagccctcttgatgctggatgagaccctgtgggccagctgtgccaaccaggtcaccgtccttgatgcctccaccctctgtgctcaggtatctcaggagcacccagcatcatcaccaccccctgtgccccttttgggggacagctttcctgtagccgtgtgagcagggatgttgagtagtcatctct

SEQ ID NO: 46065 - DNA, 600 bp, Chicken  19866894286674_3; identical to SEQ ID NO: 46064

SEQ ID NO: 46066 - DNA, 600 bp, Chicken  19866894286684_1
caagctggatgttgcgtgctgccaaggtggggagggcagcaaggggcagcacagtgggacggctccttctctcatcaccatcaaacccggagtgtcacctccctgcttgttggagtgggcttggatgttctgcgagggttttttccatgccaccagcagacaccgagtggaaagtccccaggagccgtggctgctctgctggggacaccaacggcgtcagggtgcccgtgttgcttccttccagccccgcggcactcgcctgccctggcacttgcccagaccgcagcacttggctgaatygtgcagcccrgggggtgagctgctggcacagcccgaggcagggtgaggcaaggcaggggagtggagcgcagggtaacacagtgaggacacggggctgaggcgtgaggagatggcagctctgggtggtggcattgcccccccatgccagctccttaaggggagtgctcccaccactcccccttagtggtccccaagtggcagattagggatggtttgagtgctctctggcagcttcaatcccattgctggagctacgggagcatgctgtcatgaagcagagcctcttttccacgtgctggg

SEQ ID NO: 46067 - DNA, 600 bp, Chicken  19866894286684_2
gttgcgtgctgccaaggtggggagggcagcaaggggcagcacagtgggacggctccttctctcatcaccatcaaacccggagtgtcacctccctgcttgttggagtgggcttggatgttctgcgagggttttttccatgccaccagcagacaccgagtggaaagtccccaggagccgtggctgctctgctggggacaccaacggcgtcagggtgcccgtgttgcttccttccagccccgcggcactcgcctgccctggcacttgcccagaccgcagcacttggctgaatygtgcagcccrgggggtgagctgctggcacagcccgaggcagggtgaggcaaggcaggggagtggagcgcagggtaacacagtgaggacacggggctgaggcgtgaggagatggcagctctgggtggtggcattgcccccccatgccagctccttaaggggagtgctcccaccactcccccttagtggtccccaagtggcagattagggatggtttgagtgctctctggcagcttcaatcccattgctggagctacgggagcatgctgtcatgaagcagagcctcttttccacgtgctgggcaggatgaag

SEQ ID NO: 46068 - DNA, 600 bp, Chicken  19866894286688_1
tcatcagtgacaacagcaacagtgattcacctctgttggtgcagatgtttatgagtgtagcatgcaggcttttgttcaatgctggtgaaaatgcagaactagtggtggcgactgtgttggaaaatagtgttttgtagctgagaatttgctctatcaaatagtgttcttgctctctttttatttgttgtagtttccatggaaataaataggaggcattgcttttggagggacctacatattttaaacactattttagacatataaataaaagttatataatcatatgttgctctagcaatrtctaaaaattttcctggtagcatatattctgacatttgttccrtcagaacctgatttagttgaaactgtgtttagacctgtcaagcaatggtaaaaggaattgtgtttgcaagttactgaacccaattacctgcctatgacttattgtgacactgtctcaggatgtgtcactggttgccactattctgtattgcccagaacgtctgtgatgtgaaccttctgtaacaaaaaccctttttttgtccytaatacgcccttctgtatgaacagaaaatgyccttagtcttggcacgtgccaag

SEQ ID NO: 46069 - DNA, 600 bp, Chicken  19866894286688_2
gatgtttatgagtgtagcatgcaggcttttgttcaatgctggtgaaaatgcagaactagtggtggcgactgtgttggaaaatagtgttttgtagctgagaatttgctctatcaaatagtgttcttgctctctttttatttgttgtagtttccatggaaataaataggaggcattgcttttggagggacctacatattttaaacactattttagacatataaataaaagttatataatcatatgttgctctagcaatrtctaaaaattttcctggtagcatatattctgacatttgttccrtcagaacctgatttagttgaaactgtgtttagacctgtcaagcaatggtaaaaggaattgtgtttgcaagttactgaacccaattacctgcctatgacttattgtgacactgtctcaggatgtgtcactggttgccactattctgtattgcccagaacgtctgtgatgtgaaccttctgtaacaaaaaccctttttttgtccytaatacgcccttctgtatgaacagaaaatgyccttagtcttggcacgtgccaagaatctgaataaaaaaatttgcctcatttctgattccaagagtt

SEQ ID NO: 46070 - DNA, 600 bp, Chicken  19866894286688_3
actattttagacatataaataaaagttatataatcatatgttgctctagcaatrtctaaaaattttcctggtagcatatattctgacatttgttccrtcagaacctgatttagttgaaactgtgtttagacctgtcaagcaatggtaaaaggaattgtgtttgcaagttactgaacccaattacctgcctatgacttattgtgacactgtctcaggatgtgtcactggttgccactattctgtattgcccagaacgtctgtgatgtgaaccttctgtaacaaaaaccctttttttgtccytaatacgcccttctgtatgaacagaaaatgyccttagtcttggcacgtgccaagaatctgaataaaaaaatttgcctcatttctgattccaagagttgtcattaacaaggagctcagaggtaaatacgcaaagtagwtttatttttcctggtattgtaaatttatgtagtgtgaacaggtatgaatttggtagttctgataayactgtatgttatctgtctaatattttctgttgtatgcaggaggtaatcaggaaaaacccttctgtgttttatttracgcttacagttcctgctgata

SEQ ID NO: 46071 - DNA, 600 bp, Chicken  19866894286688_4
aatcatatgttgctctagcaatrtctaaaaattttcctggtagcatatattctgacatttgttccrtcagaacctgatttagttgaaactgtgtttagacctgtcaagcaatggtaaaaggaattgtgtttgcaagttactgaacccaattacctgcctatgacttattgtgacactgtctcaggatgtgtcactggttgccactattctgtattgcccagaacgtctgtgatgtgaaccttctgtaacaaaaaccctttttttgtccytaatacgcccttctgtatgaacagaaaatgyccttagtcttggcacgtgccaagaatctgaataaaaaaatttgcctcatttctgattccaagagttgtcattaacaaggagctcagaggtaaatacgcaaagtagwtttatttttcctggtattgtaaatttatgtagtgtgaacaggtatgaatttggtagttctgataayactgtatgttatctgtctaatattttctgttgtatgcaggaggtaatcaggaaaaacccttctgtgttttatttracgcttacagttcctgctgatagaaacaaaattgcagtccactgaacagcatc

SEQ ID NO: 46072 - DNA, 600 bp, Chicken  19866894286688_5
agcaatggtaaaaggaattgtgtttgcaagttactgaacccaattacctgcctatgacttattgtgacactgtctcaggatgtgtcactggttgccactattctgtattgcccagaacgtctgtgatgtgaaccttctgtaacaaaaaccctttttttgtccytaatacgcccttctgtatgaacagaaaatgyccttagtcttggcacgtgccaagaatctgaataaaaaaatttgcctcatttctgattccaagagttgtcattaacaaggagctcagaggtaaatacgcaaagtagwtttatttttcctggtattgtaaatttatgtagtgtgaacaggtatgaatttggtagttctgataayactgtatgttatctgtctaatattttctgttgtatgcaggaggtaatcaggaaaaacccttctgtgttttatttracgcttacagttcctgctgatagaaacaaaattgcagtccactgaacagcatccacatttcactgcaaagacagtaagtcaaattcatgagggagaattctatttctgtgagacattctgtgtatctttaactctcttagggtcaaagggtcgttgcat

SEQ ID NO: 46073 - DNA, 600 bp, Chicken  19866894286688_6
acactgtctcaggatgtgtcactggttgccactattctgtattgcccagaacgtctgtgatgtgaaccttctgtaacaaaaaccctttttttgtccytaatacgcccttctgtatgaacagaaaatgyccttagtcttggcacgtgccaagaatctgaataaaaaaatttgcctcatttctgattccaagagttgtcattaacaaggagctcagaggtaaatacgcaaagtagwtttatttttcctggtattgtaaatttatgtagtgtgaacaggtatgaatttggtagttctgataayactgtatgttatctgtctaatattttctgttgtatgcaggaggtaatcaggaaaaacccttctgtgttttatttracgcttacagttcctgctgatagaaacaaaattgcagtccactgaacagcatccacatttcactgcaaagacagtaagtcaaattcatgagggagaattctatttctgtgagacattctgtgtatctttaactctcttagggtcaaagggtcgttgcatcttcagcacttaattgtctttatcatctaaaagtaatttgcatttaagaagaatattaaatctttt

SEQ ID NO: 46074 - DNA, 600 bp, Chicken  19866894286688_7
acaaaaaccctttttttgtccytaatacgcccttctgtatgaacagaaaatgyccttagtcttggcacgtgccaagaatctgaataaaaaaatttgcctcatttctgattccaagagttgtcattaacaaggagctcagaggtaaatacgcaaagtagwtttatttttcctggtattgtaaatttatgtagtgtgaacaggtatgaatttggtagttctgataayactgtatgttatctgtctaatattttctgttgtatgcaggaggtaatcaggaaaaacccttctgtgttttatttracgcttacagttcctgctgatagaaacaaaattgcagtccactgaacagcatccacatttcactgcaaagacagtaagtcaaattcatgagggagaattctatttctgtgagacattctgtgtatctttaactctcttagggtcaaagggtcgttgcatcttcagcacttaattgtctttatcatctaaaagtaatttgcatttaagaagaatattaaatcttttattgcttgaaaaaaaacaaacaaaatacacaattttatgcctcatctgcctgaaaatttgcttgaagttattcct

SEQ ID NO: 46075 - DNA, 599 bp, Chicken  19866894286690_1
  misc_feature (1)..(127): n is any nucleotide
nnnnnnnnnnnnnnnnnnnnnnnnnnnnnnnnnnnnnnnnnnnnnnnnnnnnnnnnnnnnnnnnnnnnnnnnnnnnnnnnnnnnnnnnnnnnnnnnnnnnnnnnnnnnnnnnnnnnnnnnnnnnnnnaaatagactccatcttctcttcagcttattaaaaaccagattcgcaaacacagcactgagcctcatggtcccttccacactttcaacatctcctcaccaactctaccagaaattgtcacaaaaaaaaagcacctgtggttttggtttggaagaaagacagtgttggaaatacrccgaaggttttaagttgggatctaccagttcagtaacatggagaaaaccttcaacatcttagtgacccaaagcagctagattagactgtttcttgtgcatttaacttgatttgctcactctgagcttttttcttctgtaatgcctatgaatcattgcactgtccagaatgaatatcaaatgaatgcttctttggcttagagataacagagccccttgcttagtcaggaaaattattcaagaaaatcaatgtctttgctttggttaggaaataaatttaaaaaataacacagtaagagct

SEQ ID NO: 46076 - DNA, 600 bp, Chicken  19866894286691_1
cacttaacatctatttacctagcaaagttcccttcagaaatacttaagatgctacttgaaggaggtgacttgtgtgctagaacctacgttagatagaaggagtacactgggttatatcaaaggttcatttaggccactagcctttttctaaaagcagccagaagtaaatccagaaattaccacagatgcatactaattcatctccagaacagtttcttatccatcattaatttggggctcagggactttcagggcagtgtggcatctttgccttccacagtcctctgtggtgttttctcycaggagtttgtgtatctaatttgtgttagcaggatattgtcatgggcagaatattaattaacagtccttcacatagtataactgatatcctatcacatgggtacagaggtatggaggagtcagttggatatgaaattcctgttcactcaaatggctgatagcaaactcaagttttctgaaaagaaatgtttctatgtacttctgcagaagacaaggacaagaagggcaagcaactctgctctggaagaggaggatgagtttaattcttaaaaggtgagttcaagagtcatgactatagct

SEQ ID NO: 46077 - DNA, 600 bp, Chicken  19866894286695_1
ctgcatgctctaaccctacccctacccctgcccctacccctacccaaccctaactccaattgatatagcactaagctcgtttcttgataaacgtcattcactaaataagcatcatgttcatgctttcctcttcagcatggctttggcatcacaaaatggtcattaaaatcttactgaggatcctacagagactccttaagcttcatgcccaaatagtatgagctcacattctttagcagggaccatactagaccactgtggcaggtgtgcggttttagtacttgttctagaaatatcccrgtctttccatctctcccctcagctctggctgctgtacatctacatcttgacaagttgacatctttcaaagaccttcagcaagaagttcccagcagaagcagagactagaaaggtgttctcagctgagcagcagctcatcgcgttggcatttccttacagaggatcacagaattacgaaggttggaaaagagcactaagatcatctagcccagctgtcaacccattgccaccatgcccactaagccgtgtccctaagtgggtgctcattgcttcaggtcacacagaatcctactttttgcc

SEQ ID NO: 46078 - DNA, 600 bp, Chicken  19866894286697_1
agccccgagcagggccggctgccgcccgccaggtggtagcaattttcctgaacatcgacaaaatataattatcactctattttcacttctgaaatattaaaacttgtgtccctgctgggattaattccgagagaagtcttaatgggtcactgtgactcacggccgcgccgcgctgccgggcccctcgggggtgacacgctcatgtccccaagccctggggcaatggggagcgcggccaggagtgaccccgggatgtgactgtgcccaggggtgcggggaagagaagctcccacatccctrtgggaacccacagccctcattgccacggatggaggtggggactcccactgcttgggaccgtgcggggtggcttagtggcactcggcccacggagcagagaggggacaaggacagacggcacttggaggtggccaaggagcaggtgcatggctgtttcttcacccagctgcgtgacactgagcctgacccagagcaggaggggaggctccagtggcgctgaccccacagtgcacagcccttgcagtgctgcgttgtctgtgcctgggggcactcagccatgtgctgcacatccaagcaaag

SEQ ID NO: 46079 - DNA, 600 bp, Chicken  19866894286702_1
attctgaattctaccctgattgaaatggaacccagctaacaaaattcaaagcccctgtctcacccccaaccacagaaatcccccaccagcccagcaccgggttgctgatactttattttcattcttgtaatgctgttaccatattcagcctggctattaaagtagcaaggtgaaagagtaaggaaacacctgcctctgcattatctgcctgtgacaagctacctctggatgctgcgtctgattatctgcgatgtccaggactgatttctgggcagaaaatgactgatttggttgaagagrgaaaagaggtccagcctgctcagcatagcaggcagctggcactgagatgaaaaaaagtgagatctggggcatctgaagtccttggtaagggggaacttgaaagtccaggtgrgaaaacagaacaaagtggaataaggggctaagatgtgaagtgtgtgtgtcaagagaactgaactggggcattcctttgggagcgtgaaaagcccagagcccctggtgtgaaaaaggtaagggaaggtatgcagagaatccctgacataccaggaaggaggacagggctgggacaccgagtacaggcag

SEQ ID NO: 46080 - DNA, 600 bp, Chicken  19866894286702_2
ttattttcattcttgtaatgctgttaccatattcagcctggctattaaagtagcaaggtgaaagagtaaggaaacacctgcctctgcattatctgcctgtgacaagctacctctggatgctgcgtctgattatctgcgatgtccaggactgatttctgggcagaaaatgactgatttggttgaagagrgaaaagaggtccagcctgctcagcatagcaggcagctggcactgagatgaaaaaaagtgagatctggggcatctgaagtccttggtaagggggaacttgaaagtccaggtgrgaaaacagaacaaagtggaataaggggctaagatgtgaagtgtgtgtgtcaagagaactgaactggggcattcctttgggagcgtgaaaagcccagagcccctggtgtgaaaaaggtaagggaaggtatgcagagaatccctgacataccaggaaggaggacagggctgggacaccgagtacaggcagaatgcagccctgggttctgaggtgtgaggttgtatgcagtgcttctgtctgcaggggctcagcagtgggcacatacccttcccctgcaaccaggagactgatcctggagccc

SEQ ID NO: 46081 - DNA, 599 bp, Chicken  19866894286709_1
  misc_feature (1)..(149): n is any nucleotide
nnnnnnnnnnnnnnnnnnnnnnnnnnnnnnnnnnnnnnnnnnnnnnnnnnnnnnnnnnnnnnnnnnnnnnnnnnnnnnnnnnnnnnnnnnnnnnnnnnnnnnnnnnnnnnnnnnnnnnnnnnnnnnnnnnnnnnnnnnnnnnnnnnnnntgatatgagccttatgagctgaactgccctcacctaagttatcttgaaaaaatacatttccattctatgcaagcattgcaattttgggagttaggctccaccttcttcagcagttgttatcagcactggtggttcaacccactttctggastgggtcagcatcctggttaccattggcctgcatggaagtttttgcatgcttagggattagtagggggctattagatacaagaatggcaactcctaaatggcagttgttttgaagcaaaacattcagttttcacattcagttgtcacatttccttgaaaaatacatttttacagtaacgctaacagtggagataagatgagactttggatcaggttttttcataagcccatggatgaagaagaggctggatttgcaatgtgactttgtggtatatttccacaacagcrgaggggtctgtg

SEQ ID NO: 46082 - DNA, 600 bp, Chicken  19866894286709_2
ccactttctggastgggtcagcatcctggttaccattggcctgcatggaagtttttgcatgcttagggattagtagggggctattagatacaagaatggcaactcctaaatggcagttgttttgaagcaaaacattcagttttcacattcagttgtcacatttccttgaaaaatacatttttacagtaacgctaacagtggagataagatgagactttggatcaggttttttcataagcccatggatgaagaagaggctggatttgcaatgtgactttgtggtatatttccacaacagcrgaggggtctgtgttaaagcccaatataaatggcagctttgatgccagcagatccagctgtggactccggtctgtgttgcaggagaacattgcacagcaattgcatttagtgtgtawtgrtctaatttaattygctcccatttagggtttttagtttttstttgagcttgatttccttaatgtgttgccactgtgaccggtatcttataagaatagtaagcataaataagtacagcattagagccatccagattgggcatgtcctgtgcttggcatgttgactcgtaattgtgtttctctc

SEQ ID NO: 46083 - DNA, 586 bp, Chicken  19866894286709_3
ttgttttgaagcaaaacattcagttttcacattcagttgtcacatttccttgaaaaatacatttttacagtaacgctaacagtggagataagatgagactttggatcaggttttttcataagcccatggatgaagaagaggctggatttgcaatgtgactttgtggtatatttccacaacagcrgaggggtctgtgttaaagcccaatataaatggcagctttgatgccagcagatccagctgtggactccggtctgtgttgcaggagaacattgcacagcaattgcatttagtgtgtawtgrtctaatttaattygctcccatttagggtttttagtttttstttgagcttgatttccttaatgtgttgccactgtgaccggtatcttataagaatagtaagcataaataagtacagcattagagccatccagattgggcatgtcctgtgcttggcatgttgactcgtaattgtgtttctctcatctcctgcaatctgtgaccttctctgaactcttgccaagttattcataaccgcctgcactgctgcagtgaggccagcagacaagctgcctcgcttgcccaa

SEQ ID NO: 46084 - DNA, 583 bp, Chicken  19866894286709_4
ttttgaagcaaaacattcagttttcacattcagttgtcacatttccttgaaaaatacatttttacagtaacgctaacagtggagataagatgagactttggatcaggttttttcataagcccatggatgaagaagaggctggatttgcaatgtgactttgtggtatatttccacaacagcrgaggggtctgtgttaaagcccaatataaatggcagctttgatgccagcagatccagctgtggactccggtctgtgttgcaggagaacattgcacagcaattgcatttagtgtgtawtgrtctaatttaattygctcccatttagggtttttagtttttstttgagcttgatttccttaatgtgttgccactgtgaccggtatcttataagaatagtaagcataaataagtacagcattagagccatccagattgggcatgtcctgtgcttggcatgttgactcgtaattgtgtttctctcatctcctgcaatctgtgaccttctctgaactcttgccaagttattcataaccgcctgcactgctgcagtgaggccagcagacaagctgcctcgcttgcccaa

SEQ ID NO: 46085 - DNA, 570 bp, Chicken  19866894286709_5
cattcagttttcacattcagttgtcacatttccttgaaaaatacatttttacagtaacgctaacagtggagataagatgagactttggatcaggttttttcataagcccatggatgaagaagaggctggatttgcaatgtgactttgtggtatatttccacaacagcrgaggggtctgtgttaaagcccaatataaatggcagctttgatgccagcagatccagctgtggactccggtctgtgttgcaggagaacattgcacagcaattgcatttagtgtgtawtgrtctaatttaattygctcccatttagggtttttagtttttstttgagcttgatttccttaatgtgttgccactgtgaccggtatcttataagaatagtaagcataaataagtacagcattagagccatccagattgggcatgtcctgtgcttggcatgttgactcgtaattgtgtttctctcatctcctgcaatctgtgaccttctctgaactcttgccaagttattcataaccgcctgcactgctgcagtgaggccagcagacaagctgcctcgcttgcccaa

SEQ ID NO: 46086 - DNA, 543 bp, Chicken  19866894286709_6
atttccttgaaaaatacatttttacagtaacgctaacagtggagataagatgagactttggatcaggttttttcataagcccatggatgaagaagaggctggatttgcaatgtgactttgtggtatatttccacaacagcrgaggggtctgtgttaaagcccaatataaatggcagctttgatgccagcagatccagctgtggactccggtctgtgttgcaggagaacattgcacagcaattgcatttagtgtgtawtgrtctaatttaattygctcccatttagggtttttagtttttstttgagcttgatttccttaatgtgttgccactgtgaccggtatcttataagaatagtaagcataaataagtacagcattagagccatccagattgggcatgtcctgtgcttggcatgttgactcgtaattgtgtttctctcatctcctgcaatctgtgaccttctctgaactcttgccaagttattcataaccgcctgcactgctgcagtgaggccagcagacaagctgcctcgcttgcccaa

SEQ ID NO: 46087 - DNA, 576 bp, Chicken  19866894286714_1
agaggagaaaagaagtaggtatgataggctggaaggaaacacttgtataagttagcgacaagcacagaactgatttgcagtcactttcccatagccagcacagtttggaagatcattactaagaagcagcatcagtacaaaacatctccgctgcagcatctgatccatctgaggtatgtgagaggcacttagtctttaatattaaacatttcataatgctttgaatgagtaacgttccctgtcagactgacaaccagagaatccaaacactccttcctctgctgtctgctctctttatamagcaagcagaggcaagggagaaggacagagaacaaagtacagcaaaaacttcctatctcaagcaggaaggatgctacctaaagctttcacaatactgctatcaaggtgcaacaacacctctaaagcatttgcacaaaaaccagaggattctgcagggcagcagaagtaattttacttccaaggggctgtatacaacagcaccaagctacaccaagtactgctgacacaacagtatcacaacagccagtaattccaacatcactcatgtttaaagct

SEQ ID NO: 46088 - DNA, 600 bp, Chicken  19866894286731_1
gaagtgtgatatagtgggtggcagtggcccatggcagtgggttggaactagagggtttacatggacactcccaactccaagccattgtatgtttttatgattctgagtgcgtggacatggctgcatgaccttggtgcacagcagcccactgctgagggacagacagctgaaggaaccttctttggtgcactgggagcaggaggaacagcagccgcacgtggatgcagcatctgatttatcctgcattgcagatgggagacctgattcccacagcatggtggcactgcgtcaggacagagragtcctggcactgatttcagtcaggaggagagcaaaacgtgacatggtgacaggtggggcacagagtacggcagcatccctgaagaccagtggactcctcctgccctattgcccataggacagagaggtgcagcactctgccctgccttcctgtctgtttcctgcaaggctgcttcagctagcagaaaaaatcatcatttgagttgcctcagcttacacagcacaagcttgttttaaaaaagctgtgatcatgtcagcaagcacggcctgtcacgttcctaccagcctccttccaaaacc

SEQ ID NO: 46089 - DNA, 599 bp, Chicken  19866894286733_1
  misc_feature (1)..(81): n is any nucleotide
nnnnnnnnnnnnnnnnnnnnnnnnnnnnnnnnnnnnnnnnnnnnnnnnnnnnnnnnnnnnnnnnnnnnnnnnnnnnnnnnnttttatggcaaggttattaattaacagtgctagataagaattttcatttaaaatttgtgcgttattccattggagcagtgagtctggtgaatttaataacaacgtaaaatacaccttcccccaaaaaagacaaaagtaatgacatctttatgagaaacaaagctgtctctcagttaaactgcctctgactgctgtaaattcagcttatgaaagaacagygagarcgctgtagcaaggaaggctcagtatttatttatcactctgttatttgtaaattctcccagtctctccctttcttgctggcatagtaaaacaacatgaagctttgactgtcttgtaatttttctgttcatttaaaagtaactattgaatggtttgagctggaaagcygatgccaccttggctttcaaaagctctcaacattggctggctgcattgtttctgatggttttgttccagctatttagagttgtaggagacgaagcctccagctcgctgcgaggagcaggaaagctggc

SEQ ID NO: 46090 - DNA, 599 bp, Chicken  19866894286733_2
  misc_feature (1)..(76): n is any nucleotide
nnnnnnnnnnnnnnnnnnnnnnnnnnnnnnnnnnnnnnnnnnnnnnnnnnnnnnnnnnnnnnnnnnnnnnnnnnnnttttatggcaaggttattaattaacagtgctagataagaattttcatttaaaatttgtgcgttattccattggagcagtgagtctggtgaatttaataacaacgtaaaatacaccttcccccaaaaaagacaaaagtaatgacatctttatgagaaacaaagctgtctctcagttaaactgcctctgactgctgtaaattcagcttatgaaagaacagygagarcgctgtagcaaggaaggctcagtatttatttatcactctgttatttgtaaattctcccagtctctccctttcttgctggcatagtaaaacaacatgaagctttgactgtcttgtaatttttctgttcatttaaaagtaactattgaatggtttgagctggaaagcygatgccaccttggctttcaaaagctctcaacattggctggctgcattgtttctgatggttttgttccagctatttagagttgtaggagacgaagcctccagctcgctgcgaggagcaggaaagctggcaataa

SEQ ID NO: 46091 - DNA, 600 bp, Chicken  19866894286733_3
atttaataacaacgtaaaatacaccttcccccaaaaaagacaaaagtaatgacatctttatgagaaacaaagctgtctctcagttaaactgcctctgactgctgtaaattcagcttatgaaagaacagygagarcgctgtagcaaggaaggctcagtatttatttatcactctgttatttgtaaattctcccagtctctccctttcttgctggcatagtaaaacaacatgaagctttgactgtcttgtaatttttctgttcatttaaaagtaactattgaatggtttgagctggaaagcygatgccaccttggctttcaaaagctctcaacattggctggctgcattgtttctgatggttttgttccagctatttagagttgtaggagacgaagcctccagctcgctgcgaggagcaggaaagctggcaataagattctctgtatatttgttgcttctggaagcatttgtttgcaaggttgggaaagtgaattgatttgcattgtgaaggttatttctacagtgaagagagctggctttgtttttgaaagaaggtttgttttgacagaaaacagatatatgaagaaaatgctaatttaaa

SEQ ID NO: 46092 - DNA, 600 bp, Chicken  19866894286741_1
ttgtaacactgctatgggctgccactgccaaaattctgattaatcactgcagagactacaagcaaaaactcccacagcaagtcataaattaattagaaagaattacccaagtggaagacgcgatcccaaacattattgaatcacgcatttcattgcctattcaaaaacattaacttttgtaacctgatgtgactgaagcaacagccttgtttttgtagaattctgggggagaaagtgtgtaataacatttatatctactgtacttttataactccagccagcaaatattcatgttcattrcaaatctcaatasstggcctccagaacagaagtcaccatttcatgtcatcatggaaataaggcattccaaacttctcaaagcacaccatgcccatgtrcctgccacacatggagccacccaaagattcggcttctcacagcctgggacagtcagaacgcagaaatcacttcagtgtagacttcaagtttattccaaactttgccatgtggttcagctgcattcacagcagtatggaacacggtttagatattaggaggaagtttttcatacagagggtggtgacacactggaacaggttg

SEQ ID NO: 46093 - DNA, 600 bp, Chicken  19866894286741_2
atgggctgccactgccaaaattctgattaatcactgcagagactacaagcaaaaactcccacagcaagtcataaattaattagaaagaattacccaagtggaagacgcgatcccaaacattattgaatcacgcatttcattgcctattcaaaaacattaacttttgtaacctgatgtgactgaagcaacagccttgtttttgtagaattctgggggagaaagtgtgtaataacatttatatctactgtacttttataactccagccagcaaatattcatgttcattrcaaatctcaatasstggcctccagaacagaagtcaccatttcatgtcatcatggaaataaggcattccaaacttctcaaagcacaccatgcccatgtrcctgccacacatggagccacccaaagattcggcttctcacagcctgggacagtcagaacgcagaaatcacttcagtgtagacttcaagtttattccaaactttgccatgtggttcagctgcattcacagcagtatggaacacggtttagatattaggaggaagtttttcatacagagggtggtgacacactggaacaggttgcccaaggaggctg

SEQ ID NO: 46094 - DNA, 600 bp, Chicken  19866894286741_3
tgggctgccactgccaaaattctgattaatcactgcagagactacaagcaaaaactcccacagcaagtcataaattaattagaaagaattacccaagtggaagacgcgatcccaaacattattgaatcacgcatttcattgcctattcaaaaacattaacttttgtaacctgatgtgactgaagcaacagccttgtttttgtagaattctgggggagaaagtgtgtaataacatttatatctactgtacttttataactccagccagcaaatattcatgttcattrcaaatctcaatasstggcctccagaacagaagtcaccatttcatgtcatcatggaaataaggcattccaaacttctcaaagcacaccatgcccatgtrcctgccacacatggagccacccaaagattcggcttctcacagcctgggacagtcagaacgcagaaatcacttcagtgtagacttcaagtttattccaaactttgccatgtggttcagctgcattcacagcagtatggaacacggtttagatattaggaggaagtttttcatacagagggtggtgacacactggaacaggttgcccaaggaggctgt

SEQ ID NO: 46095 - DNA, 572 bp, Chicken  19866894286741_4
agaattacccaagtggaagacgcgatcccaaacattattgaatcacgcatttcattgcctattcaaaaacattaacttttgtaacctgatgtgactgaagcaacagccttgtttttgtagaattctgggggagaaagtgtgtaataacatttatatctactgtacttttataactccagccagcaaatattcatgttcattrcaaatctcaatasstggcctccagaacagaagtcaccatttcatgtcatcatggaaataaggcattccaaacttctcaaagcacaccatgcccatgtrcctgccacacatggagccacccaaagattcggcttctcacagcctgggacagtcagaacgcagaaatcacttcagtgtagacttcaagtttattccaaactttgccatgtggttcagctgcattcacagcagtatggaacacggtttagatattaggaggaagtttttcatacagagggtggtgacacactggaacaggttgcccaaggaggctgtggatgccccatccctggaggcattcaaggccaggcctggatgtggctctggacagc

SEQ ID NO: 46096 - DNA, 600 bp, Chicken  19866894286743_1
ttgcaactgttcggtacattacaatgatcttcacataaacttgctggaaacagaaccagtaactgcaacaggattgaccaaacgactcccagtcactggtattaaattacacctgaatacaaatggaaatacattatatccataaaagcaccccatgaattcataatgagctggcgctgtcaccattgtaacacactgtgatgccagaaaagagcttacagaggtgaccagaactcgtttttttttcagggaccacggacacaataaatactaccgtatttttagctgcaaactaaaacratgcactagagctatgaaattcagccctaagtgcttattcccatgctttttaactttactgaataagcagatgargatgaaaaagcgcaacctgtagcatcatatcctgcctgtcctgttgcaaatgaccgaccccatcagtacaaaatgcagtcgtgtttgtcccttccagcttgaatctaccggattactttaaagcagcttaaaacggcttgttctgacccttcaaatgccaactaccacagttctaataccttggctccgtttccagtctgcttcgtagttgagtggcatgaagag

SEQ ID NO: 46097 - DNA, 600 bp, Chicken  19866894286743_2
gaccaaacgactcccagtcactggtattaaattacacctgaatacaaatggaaatacattatatccataaaagcaccccatgaattcataatgagctggcgctgtcaccattgtaacacactgtgatgccagaaaagagcttacagaggtgaccagaactcgtttttttttcagggaccacggacacaataaatactaccgtatttttagctgcaaactaaaacratgcactagagctatgaaattcagccctaagtgcttattcccatgctttttaactttactgaataagcagatgargatgaaaaagcgcaacctgtagcatcatatcctgcctgtcctgttgcaaatgaccgaccccatcagtacaaaatgcagtcgtgtttgtcccttccagcttgaatctaccggattactttaaagcagcttaaaacggcttgttctgacccttcaaatgccaactaccacagttctaataccttggctccgtttccagtctgcttcgtagttgagtggcatgaagagcagtccaaagagaaactgcaaataaatgactctgtcygctgagcggtgaccttgctaaattacagcaggtatcct

SEQ ID NO: 46098 - DNA, 600 bp, Chicken  19866894286743_3
ttcccatgctttttaactttactgaataagcagatgargatgaaaaagcgcaacctgtagcatcatatcctgcctgtcctgttgcaaatgaccgaccccatcagtacaaaatgcagtcgtgtttgtcccttccagcttgaatctaccggattactttaaagcagcttaaaacggcttgttctgacccttcaaatgccaactaccacagttctaataccttggctccgtttccagtctgcttcgtagttgagtggcatgaagagcagtccaaagagaaactgcaaataaatgactctgtcygctgagcggtgaccttgctaaattacagcaggtatcctgagcatctgtgccgtggccttctctcactgcactatgataggaacatgcattagctctggaggattgatctcaaccaaactggcagagaaaggacacttcaatgagaaaattaataattctttactctgattatgatgattaattctgttacgtcagcagcctttggcagagccagtgacagcaacagatttcatatgggaaaaaacctaattcaggagccaagaacattaaagtggaattttgtgcagttaagcaatgata

SEQ ID NO: 46099 - DNA, 600 bp, Chicken  19866894286743_4
ttgctaaattacagcaggtatcctgagcatctgtgccgtggccttctctcactgcactatgataggaacatgcattagctctggaggattgatctcaaccaaactggcagagaaaggacacttcaatgagaaaattaataattctttactctgattatgatgattaattctgttacgtcagcagcctttggcagagccagtgacagcaacagatttcatatgggaaaaaacctaattcaggagccaagaacattaaagtggaattttgtgcagttaagcaatgatattaacaaattacayacaagcggctataatttaaatatgttcagaaaggcacgttcgttcctcagtcctatataagacatcgcagcgatgtaaacttatttggtgtttgatatattagccaagataaaaagtgattgtatctggaattgaccactggcagatggactcaactgtggaagttttttggaccatgcaaagctgagtacaaactctatcacgggtgccagcttcacaagctggtaaccgccgctggcctagcaagcatccttcttccatctcttcaactttggttatgcaaccaagcctaatcaagcc

SEQ ID NO: 46100 - DNA, 600 bp, Chicken  19866894286746_1
ggtggtgaatagatgtaaaacgtcgtgtacaccttaggtgaactggcactcttccagctggccggctggtggcactgttaatcagctgcagcagcacacgttgctctcgggcctcttttcagagagcagggccatgatctcctgcctggaaaaacgcgaactctgtgccagaatgagagtgtcaggtatgcttttctcatggtcagcttcagtgaacgcttaacgtgtaatttcggtctgaagactaaaagctctgttcctcttcctcttgatttcctctatatttattgccctttaaaryrtttaattcctgagtgttccagcgtgtgcagatttgttcygcagctacatgcacacctgtagtcaaatcttagcccagctacggggtctcttggccaccatgcagttacctgactaaagcctgtaaatactgagcataccctattctaccaccacagccaggtattcctatctgagactcatgctttccttctacgagaagttgggactctgcccctgtcctgtgtccccacccctttagcacatctgactggagttattaaggagaggagggcacgatttcttgcctattggtgtccc

SEQ ID NO: 46101 - DNA, 600 bp, Chicken  19866894286746_2
gtggtgaatagatgtaaaacgtcgtgtacaccttaggtgaactggcactcttccagctggccggctggtggcactgttaatcagctgcagcagcacacgttgctctcgggcctcttttcagagagcagggccatgatctcctgcctggaaaaacgcgaactctgtgccagaatgagagtgtcaggtatgcttttctcatggtcagcttcagtgaacgcttaacgtgtaatttcggtctgaagactaaaagctctgttcctcttcctcttgatttcctctatatttattgccctttaaaryrtttaattcctgagtgttccagcgtgtgcagatttgttcygcagctacatgcacacctgtagtcaaatcttagcccagctacggggtctcttggccaccatgcagttacctgactaaagcctgtaaatactgagcataccctattctaccaccacagccaggtattcctatctgagactcatgctttccttctacgagaagttgggactctgcccctgtcctgtgtccccacccctttagcacatctgactggagttattaaggagaggagggcacgatttcttgcctattggtgtccct

SEQ ID NO: 46102 - DNA, 600 bp, Chicken  19866894286746_3
tggtgaatagatgtaaaacgtcgtgtacaccttaggtgaactggcactcttccagctggccggctggtggcactgttaatcagctgcagcagcacacgttgctctcgggcctcttttcagagagcagggccatgatctcctgcctggaaaaacgcgaactctgtgccagaatgagagtgtcaggtatgcttttctcatggtcagcttcagtgaacgcttaacgtgtaatttcggtctgaagactaaaagctctgttcctcttcctcttgatttcctctatatttattgccctttaaaryrtttaattcctgagtgttccagcgtgtgcagatttgttcygcagctacatgcacacctgtagtcaaatcttagcccagctacggggtctcttggccaccatgcagttacctgactaaagcctgtaaatactgagcataccctattctaccaccacagccaggtattcctatctgagactcatgctttccttctacgagaagttgggactctgcccctgtcctgtgtccccacccctttagcacatctgactggagttattaaggagaggagggcacgatttcttgcctattggtgtccctt

SEQ ID NO: 46103 - DNA, 600 bp, Chicken  19866894286746_4
actggcactcttccagctggccggctggtggcactgttaatcagctgcagcagcacacgttgctctcgggcctcttttcagagagcagggccatgatctcctgcctggaaaaacgcgaactctgtgccagaatgagagtgtcaggtatgcttttctcatggtcagcttcagtgaacgcttaacgtgtaatttcggtctgaagactaaaagctctgttcctcttcctcttgatttcctctatatttattgccctttaaaryrtttaattcctgagtgttccagcgtgtgcagatttgttcygcagctacatgcacacctgtagtcaaatcttagcccagctacggggtctcttggccaccatgcagttacctgactaaagcctgtaaatactgagcataccctattctaccaccacagccaggtattcctatctgagactcatgctttccttctacgagaagttgggactctgcccctgtcctgtgtccccacccctttagcacatctgactggagttattaaggagaggagggcacgatttcttgcctattggtgtcccttgccctctaagttaaggcccacagggggctgaaaggatag

SEQ ID NO: 46104 - DNA, 600 bp, Chicken  19866894286751_1
tagacaggaggaattagagatctatgtgagattgcagggctgtaatctcatagagatcacggagacatggtgggacagttcacatgactggaatgcagtcttggacagctatgtcatttttaggagagacaggcaagcaagacaaggtagtgaagctggtctttatgtgagagagcgactggagtatattgagctccacctagggatgaataatgaactagagagattgtggatgtgaattgagggaaagttaatatgcgtaacatcattgtgagtgtttactacaggccacttgattgygaggaggaagataatgaggccttctacacacaactgacattttatgatcccaggcactgattcttatcagggacttctaccataacatcagattactctgatgcaggtggtgatggagccaatgaggagaggtgtgctgctggaccttgttcttacaaacaaggaagggctgcctgggaatatgaaggctgggggcactgtgggatgcagtgaccatgagacaatggagtccaggatcttgtgtggaggaaacaaggtgataagtaggattgcagccctgaatttcaggagagccaaatt

SEQ ID NO: 46105 - DNA, 600 bp, Chicken  19866894286757_1
aacaagtacctgagataatgagacatttttaatagatccctatatttgtatgctctagtctatgggtgtccaaccttttggtgtgcctgggctgcaatgagtgaagaggaattgtctaaggctgcatctatgaatgttgctccaaaagcaatgccttataattatttctgtggaaactacaactgatacaaagagcataacaatactgtttagtagagcacattctcagctacaaaacagtatttttcaacacagtcaccaccattaacaatgcattttttgtcagcaatgaacaaaagsttgcatgccacacttgtaaaaatttgcaccagtggaggtgatccaatgttgctactgcagaaacacaccrcttactgcgctcacatccactgtttggtctccatcaacattcagcaagcactgatgaatgtcagtgggtgcaaattttctacatggaggaatttggtgacacgtttgcttcctatacacttccatgtcagatgccattgtatcagactgcccctctgctgccatctgttacacagcaacaacatataatgggatattaatggtaaggttcagcctatgctgccataccac

SEQ ID NO: 46106 - DNA, 600 bp, Chicken  19866894286757_2
caaccttttggtgtgcctgggctgcaatgagtgaagaggaattgtctaaggctgcatctatgaatgttgctccaaaagcaatgccttataattatttctgtggaaactacaactgatacaaagagcataacaatactgtttagtagagcacattctcagctacaaaacagtatttttcaacacagtcaccaccattaacaatgcattttttgtcagcaatgaacaaaagsttgcatgccacacttgtaaaaatttgcaccagtggaggtgatccaatgttgctactgcagaaacacaccrcttactgcgctcacatccactgtttggtctccatcaacattcagcaagcactgatgaatgtcagtgggtgcaaattttctacatggaggaatttggtgacacgtttgcttcctatacacttccatgtcagatgccattgtatcagactgcccctctgctgccatctgttacacagcaacaacatataatgggatattaatggtaaggttcagcctatgctgccataccaccaatatctgcctctgacatcatggagaaacatgataaaacagaaggcatcactttaggagcaggcctcat

SEQ ID NO: 46107 - DNA, 599 bp, Chicken  19866894286758_1
  misc_feature (1)..(31): n is any nucleotide
nnnnnnnnnnnnnnnnnnnnnnnnnnnnnnncttgaaatatggcggacagctactggattatgaagctcgttttctggaggtaatagtggggcagttttgtaagcactactaaggctcagtttctggagtgggtctggatttgatacaacctttatcagaagtgataaagttcatacaagagcagtaaacagcagtgttcattagaaccactaagttggttatgtaaaagatatttaacagactggaaaggatggtcggcaatgtttgttatctttttttaaagaagaatcaacagaagkrttcagttagtgctgtgcaatttcacgtttttaggctaagttaagaaattagaaaatcatattacagcagtactttgatttcaaaagaactctaaaccaactaagaagagatagtactgtaggaaattacattttccttcgygtgaaaatatcactttgataaataaatggtatcatttatgaatgagaagctgctgagttgtatttgtattagtttgagaatttcatttctctcctagttttgtttactggaggccatcacagtttatacaagcagttacatgagtatgataatgatt

SEQ ID NO: 46108 - DNA, 599 bp, Chicken  19866894286758_2
  misc_feature (1)..(30): n is any nucleotide
nnnnnnnnnnnnnnnnnnnnnnnnnnnnnncttgaaatatggcggacagctactggattatgaagctcgttttctggaggtaatagtggggcagttttgtaagcactactaaggctcagtttctggagtgggtctggatttgatacaacctttatcagaagtgataaagttcatacaagagcagtaaacagcagtgttcattagaaccactaagttggttatgtaaaagatatttaacagactggaaaggatggtcggcaatgtttgttatctttttttaaagaagaatcaacagaagkrttcagttagtgctgtgcaatttcacgtttttaggctaagttaagaaattagaaaatcatattacagcagtactttgatttcaaaagaactctaaaccaactaagaagagatagtactgtaggaaattacattttccttcgygtgaaaatatcactttgataaataaatggtatcatttatgaatgagaagctgctgagttgtatttgtattagtttgagaatttcatttctctcctagttttgtttactggaggccatcacagtttatacaagcagttacatgagtatgataatgatta

SEQ ID NO: 46109 - DNA, 600 bp, Chicken  19866894286758_3
gatacaacctttatcagaagtgataaagttcatacaagagcagtaaacagcagtgttcattagaaccactaagttggttatgtaaaagatatttaacagactggaaaggatggtcggcaatgtttgttatctttttttaaagaagaatcaacagaagkrttcagttagtgctgtgcaatttcacgtttttaggctaagttaagaaattagaaaatcatattacagcagtactttgatttcaaaagaactctaaaccaactaagaagagatagtactgtaggaaattacattttccttcgygtgaaaatatcactttgataaataaatggtatcatttatgaatgagaagctgctgagttgtatttgtattagtttgagaatttcatttctctcctagttttgtttactggaggccatcacagtttatacaagcagttacatgagtatgataatgattaatagggccactgttactggtatatctacatggaatcttagagcaattcactggaatgtttgaggtttattattaaaaatgtagaatgagatttttgtttaaatagataacaaacaaccccaaggaaataaaatattttatgt

SEQ ID NO: 46110 - DNA, 600 bp, Chicken  19866894286758_4
tagaatgagatttttgtttaaatagataacaaacaaccccaaggaaataaaatattttatgtatattagtatcttatggatgcctaaacaggaacctgcaaacaagtttttattttttttaatctgatttgctcttagtctctgctctgtaatgtttagattgccagagtccacagggaatatctttttccattgtaattaaaattgaactgggatatgtttatgttacatctttgaaagcatgcaagagagcctctttcagcaaaggatatgctgtaggcaaatgcagtgtacgttgaygcaaggatatgttttttaatgaagaaggcttaatgaccaaaatttgacaacagcagaggtagccaaaatgacaatttctgaggcaaaaacactaatgtaagttctatataattgattacagtgtaagcacaacaaaataaaggtaaagaactgcaaaatctcatcaaccaaatgttctgaaatggttgcagtggaaagagattgtgtggagcagagtagatcattattcagacctctgtgatctctccagcacaaactctggtctgtactgccattgaggtcagcactgcttggtctttt

SEQ ID NO: 46111 - DNA, 600 bp, Chicken  19866894286765_1
tgtctttgaatatttgtggtcagtaagcttaaaataagattgatttctggggacatgtactggagttcttcatatctcttcaatacatggatctttgttctgcagcttcttctctgtcattagtagatgttggctcaagagaaaatttctgtagtattctcataatatgcaaccaatctagatttgtatccagatgtaagtctcataaacgtttatgtcgagcaggagctttgctgctagggaggattttgagaaacttgagcttttgcataagaaagatttacatttctcagtgatgcytgttgaaagggcaggaagaagggagcacgaagtaaggtgcagggaagtccawttgagcacacagaagtacatttttattttcttatttttaactgggaaggtggttgaacactggcacagggttatgcagaatgcttttagtttccctccttggaaatgttctaaactcacctrgacatgatcacaggcaaactgctgtaaacraccctggctgagcaggggtcttgaagtacacagccttgagaaggcccttcctgcgtcttctattctgggcttctgatatccatttagcagcatttt

SEQ ID NO: 46112 - DNA, 600 bp, Chicken  19866894286765_2
acatgtactggagttcttcatatctcttcaatacatggatctttgttctgcagcttcttctctgtcattagtagatgttggctcaagagaaaatttctgtagtattctcataatatgcaaccaatctagatttgtatccagatgtaagtctcataaacgtttatgtcgagcaggagctttgctgctagggaggattttgagaaacttgagcttttgcataagaaagatttacatttctcagtgatgcytgttgaaagggcaggaagaagggagcacgaagtaaggtgcagggaagtccawttgagcacacagaagtacatttttattttcttatttttaactgggaaggtggttgaacactggcacagggttatgcagaatgcttttagtttccctccttggaaatgttctaaactcacctrgacatgatcacaggcaaactgctgtaaacraccctggctgagcaggggtcttgaagtacacagccttgagaaggcccttcctgcgtcttctattctgggcttctgatatccatttagcagcattttaagaactggctagctgctgagcccagcctcacctcaaaggcagcagcttatc

SEQ ID NO: 46113 - DNA, 600 bp, Chicken  19866894286765_3
aatctagatttgtatccagatgtaagtctcataaacgtttatgtcgagcaggagctttgctgctagggaggattttgagaaacttgagcttttgcataagaaagatttacatttctcagtgatgcytgttgaaagggcaggaagaagggagcacgaagtaaggtgcagggaagtccawttgagcacacagaagtacatttttattttcttatttttaactgggaaggtggttgaacactggcacagggttatgcagaatgcttttagtttccctccttggaaatgttctaaactcacctrgacatgatcacaggcaaactgctgtaaacraccctggctgagcaggggtcttgaagtacacagccttgagaaggcccttcctgcgtcttctattctgggcttctgatatccatttagcagcattttaagaactggctagctgctgagcccagcctcacctcaaaggcagcagcttatcacactcagcttgtgagccacgtcttaacactctccctttcctgagctccacaaggtgcatagagtggatcttgaatatttttgtcatgttgcttctgggtccaagaaattggatcatacttg

SEQ ID NO: 46114 - DNA, 600 bp, Chicken  19866894286765_4
ataaacgtttatgtcgagcaggagctttgctgctagggaggattttgagaaacttgagcttttgcataagaaagatttacatttctcagtgatgcytgttgaaagggcaggaagaagggagcacgaagtaaggtgcagggaagtccawttgagcacacagaagtacatttttattttcttatttttaactgggaaggtggttgaacactggcacagggttatgcagaatgcttttagtttccctccttggaaatgttctaaactcacctrgacatgatcacaggcaaactgctgtaaacraccctggctgagcaggggtcttgaagtacacagccttgagaaggcccttcctgcgtcttctattctgggcttctgatatccatttagcagcattttaagaactggctagctgctgagcccagcctcacctcaaaggcagcagcttatcacactcagcttgtgagccacgtcttaacactctccctttcctgagctccacaaggtgcatagagtggatcttgaatatttttgtcatgttgcttctgggtccaagaaattggatcatacttggaaaagatctttggtggggcatcttgcctc

SEQ ID NO: 46115 - DNA, 600 bp, Chicken  19866894286766_1
tggtaggaaaagaaatactgtatggatttgtataaaagcggagcagctttgtaactcccgtgataacgagagcaatttcactttgagtgtcttgaacctgaaatgactgatcctggcaaggggccaaagcaatggcagagggtggcattatcagatacatagaccaatatgcaaaacagcacagatcagctctgcagaattatctgcaaggttgtgccagtaggatgatagaatgatagcaacgcaacccatcctaacaccagcatttctgaatgcagcggaaatcaagtggatggaagycaagaagccatgtggacattaattactgggacgctatcatgaggtatggacaatttcagactaccactaagctttggcattcagaagtacttgctggttcctggcgagtaccttgttactgtacagattctctccattctttctgtgacccagctttcactgagaagaaatttggtgtgggattttctcagcctggctgacctcaggtccaggacctataagcataccgtgggagtatttctgactcacagtgtagctacaaacagcacctctagacctagaatgtaggtactataaatt

SEQ ID NO: 46116 - DNA, 600 bp, Chicken  19866894286766_2
ttctgtgacccagctttcactgagaagaaatttggtgtgggattttctcagcctggctgacctcaggtccaggacctataagcataccgtgggagtatttctgactcacagtgtagctacaaacagcacctctagacctagaatgtaggtactataaattcaactggaatcagcaaagtgtgagaattaaaatggtatgtaaaaatggtgttcttggcttataatttgtgaaatatctagctatgactgaaaactaagattcactgcactgtgatatctcttacgtaaaaacgaaagacrtggcagaatgcatcagaaaccctgggtaaaaacagtagaaggaagcaatgctctcttcttcctcactgcatcaggaagcactgccagttcagtatcggcagcacagggaaagcttgaataagaaccatacaatggcaatggaattagtttgtactgcaattaataattatgtacttgcatgtcttgtaataggaaaacaaaccgaaaacaggagaatagggaaaaaaaccaaccacgttgatctcactgccaataaacaacgtgaagaagtagcatgaacccagattaggaatgcttgtg

SEQ ID NO: 46117 - DNA, 600 bp, Chicken  19866894286768_1
ttagtttttgttgcagtggtgagcattcatttccatttattcagcctcataacttataatgaagaattgagaacttaagacacaattcataatttataataacaaacaataatgttaagaatgcagtcgtattttcattcgtattttcagtcatttttcattcaaacgtatatttgttgtaaacagtcaaaaccttagtaaatgttacagaattatgaagcagtgctttctacctgattgttgtatagatagctaatgggtaggataaatttgctgttttgttgtttgtttgtttgtttkttttttaactatatttatcagcttcaaaaaagagtgtaatatgaagaagaaaaaaataaaaaatgcacaattgtatgtcacatatacatgccataytgtgatggcatgtgtatgtgacctttatcaataataattgtttactacttcacaggtttcgtaagtcttcttcaccctggtcgttattgtctaataagtattttaatttgaaaacatgttttgagaacagcaactaataatgatgtagaatttagcataaatgactaaatgatgtgtgttatataatctgacctacagaaatct

SEQ ID NO: 46118 - DNA, 600 bp, Chicken  19866894286768_2
taataacaaacaataatgttaagaatgcagtcgtattttcattcgtattttcagtcatttttcattcaaacgtatatttgttgtaaacagtcaaaaccttagtaaatgttacagaattatgaagcagtgctttctacctgattgttgtatagatagctaatgggtaggataaatttgctgttttgttgtttgtttgtttgtttkttttttaactatatttatcagcttcaaaaaagagtgtaatatgaagaagaaaaaaataaaaaatgcacaattgtatgtcacatatacatgccataytgtgatggcatgtgtatgtgacctttatcaataataattgtttactacttcacaggtttcgtaagtcttcttcaccctggtcgttattgtctaataagtattttaatttgaaaacatgttttgagaacagcaactaataatgatgtagaatttagcataaatgactaaatgatgtgtgttatataatctgacctacagaaatctgtagaataatataataatttgcatactttatttttgcacagtgtttatggctgtcctttggcaaaaaaacgaaaaacacaagataagcagccccaa

SEQ ID NO: 46119 - DNA, 600 bp, Chicken  19866894286772_1
tgatgggtgcgggcagagtcagggagtcacagggtcatgtgggggtatggttcccccagagctgtgggtcgcgtgcagccatggggtcacgcacatacagcgtgatgaggtcatcttgggttattgctcatgtagggttatggctcagggccccacctttgggccacagggacgcccagtcccctctcaggatgaattgaaaccactacaactctccccctcccccccacctctttttacctcaaattgctccccacatcctcccataccccctatgtctccatactaccccatgtcccwgtttcccacctgcagcccacatcttgtcttctcttggacagcattctgctcctgcagcctgtgttcccatatcccccgatgtccctatatccctcccacaccccccacagagccccatagctcctcaaggaccttctcccggtacacctctccccagcaacctgggacctcacagagctccacagtccccagcagcaccccacgtccccctctgagctcccactgaactcccctatttcctccttcagacatccttaacctcttcagccccctccgccccggcttctcggactcccacag

SEQ ID NO: 46120 - DNA, 600 bp, Chicken  19866894286776_1
gatgcgcggggggcgcgtctgatggcatcgcggtacttccgaagaagtgtacgcccgtcgccggggttagcacccagctgcctccgtgagcgggacgcgggctgttagtggggcggctgcacagcccaggaggtgtgcgcagggaaatggggcagagcacgcgtgcagctgtgcacacccgtgctgctgtgtgtaggtgggtagggcggtggtggggacgtggtcccgtcccacgccaattgggcaggtaggtatcactgaacgaagtcactgcgtgagactgggtcgccgttggttgtrggtgacaaaccagaaggtggcaaatttgagctatttggactttttcrcttccctccaaaaatgtcagcttttgggacaagcactcagaagcttccaactttcagctcccaccggttgggccagcgctccctaactctgttgtgggaatggctgcccactgtgcacggagtcctgctcatttttccctctccctctctctaggcatccgttttatggagctgcggaccaggaccagcccagctccccggctgctccctggcgatgctgctgatcctggcgtggagagagccccggcagccc

SEQ ID NO: 46121 - DNA, 600 bp, Chicken  19866894286776_2
tgtacgcccgtcgccggggttagcacccagctgcctccgtgagcgggacgcgggctgttagtggggcggctgcacagcccaggaggtgtgcgcagggaaatggggcagagcacgcgtgcagctgtgcacacccgtgctgctgtgtgtaggtgggtagggcggtggtggggacgtggtcccgtcccacgccaattgggcaggtaggtatcactgaacgaagtcactgcgtgagactgggtcgccgttggttgtrggtgacaaaccagaaggtggcaaatttgagctatttggactttttcrcttccctccaaaaatgtcagcttttgggacaagcactcagaagcttccaactttcagctcccaccggttgggccagcgctccctaactctgttgtgggaatggctgcccactgtgcacggagtcctgctcatttttccctctccctctctctaggcatccgttttatggagctgcggaccaggaccagcccagctccccggctgctccctggcgatgctgctgatcctggcgtggagagagccccggcagccccgctgagcccgagtgccgaggcggcggcctgcctgtgcgctccggct

SEQ ID NO: 46122 - DNA, 600 bp, Chicken  19866894286778_1
ctttcacttctattttatttttaacatccttttctctccctgcaggtatttgcagcattaatggcttgcagttcaatattcggcagccttcaccccactcttcttattggaaaaaatgctctcagataatcatttaacccctaaagcatctgtcctgcctcccttcaccttttagcaacacagaccatgagatttcagtattgtttttagtcatttataactcgactctgcagaggcaattaagagcagctccactgaaatcagcactcagtgctttaaacagccctgagaattcagtgragctctcacacctgtaattccagagctgcaagctgtgtgcaggcagaggatttcagcttggcacacacctccagccccagcctcaaattcagacgttaccttttgtgtttcagagtcccggagagagcattcaaccaagatccaataatgggactggagaaaaagatgctgcaatcattttatgttgacagctgcgcgtttggaatgacagcatcttctttcttaaagaatataaagataaggacacaccaactcatgcagcccacaaccagaagcaggagttctgcaccaagctggaag

SEQ ID NO: 46123 - DNA, 600 bp, Chicken  19866894286779_1
atttgggaataattcatttaatccatttgagatgcctactgaaggagtgagatgactgccccctcagaggcagatctatgccttagtaagtgggaccactaggctatgcaccttacttcaggcttgtccagtagacactcccagcatccctcttcttacaagcaaagttgtatagactcatatatgaaggtcttagccagtttttcaggttagatatttctcaacctaaagtgtgatgttccctcttgagagcaatgcccagttctgagtatagctagatcaagggtgaattttgttagytttgtttggttttttttaaccctttaaaagatggtaaggatttctagatacttatgaatgaatcactaaccccttacagctcactgcaaacactaccttcctggaaagctttagaagtagtagaaaatgcctgttttgtctgatttggaaacatcctttgagagtggcctcacctggagggcaattgaatgtggtttggcccaaatcattgaaaccatctgctagaattttattttgcttttccaatcaatttttacccttgcctctgttgtgcccttgtggtcacaattcacgtgcttc

SEQ ID NO: 46124 - DNA, 600 bp, Chicken  19866894286783_1
cccatttaccctaaatactgtatgtggtacaatgttcaaatttgacttcctgcttaaaaaccttttttcctacattaatagtatacttgccatttcttaataaaaacagctatagtgaaaattttaacagtcaaagaccatattgttattataacaaaaattttaaatgaacttgttttcaaccattcccagtagacattaccaagaaatattattgaaagagaaagatataataagaaatagtagcaacattgttctgtcccttacctcagatacagatttttgtagattgttgagcartgggaatgatgratctgcaggctcatcggggttaatgttgacaatgagcaattattatttttgacaagaatactaaagggtttcaagatgactgttctaactgaaagcagattatgacttgagttttattactaactgtcaagcatagttgttaagcatataaaagtgtgatacaaaggaagatcattttattatagtgggagacaaagcagagatcagatgatgaccttttttgtggttggtttttttttttttttcaattacccacaggaagaaggaggcagagtcctcagtgtttta

SEQ ID NO: 46125 - DNA, 600 bp, Chicken  19866894286783_2
aaatactgtatgtggtacaatgttcaaatttgacttcctgcttaaaaaccttttttcctacattaatagtatacttgccatttcttaataaaaacagctatagtgaaaattttaacagtcaaagaccatattgttattataacaaaaattttaaatgaacttgttttcaaccattcccagtagacattaccaagaaatattattgaaagagaaagatataataagaaatagtagcaacattgttctgtcccttacctcagatacagatttttgtagattgttgagcartgggaatgatgratctgcaggctcatcggggttaatgttgacaatgagcaattattatttttgacaagaatactaaagggtttcaagatgactgttctaactgaaagcagattatgacttgagttttattactaactgtcaagcatagttgttaagcatataaaagtgtgatacaaaggaagatcattttattatagtgggagacaaagcagagatcagatgatgaccttttttgtggttggtttttttttttttttcaattacccacaggaagaaggaggcagagtcctcagtgttttaaaaagggaaatg

SEQ ID NO: 46126 - DNA, 600 bp, Chicken  19866894286787_1
tgtcaaagcagatttggtgtggttatacagcaagtagctcgacaagatgggataggaaaatccttcaaggcccttaatcggcagtctctgcctcttgctttgaggtcttcccctcctcttgcttttggaagaagtcatgcttgagaacgtttaatccactgcagcccttagcaccgtccctctgggagctcactcatgcttgttatcatatgttcgccatgtcagaggttagagggtataacgtgcaacgtgagccaatccccagctcgtagctcagccaaaacttatctatgatcacarccaaggctggtggggcagcatcaagatggagatgtagcaagctctttctattagcatgtagtttatagatgaggagcgaagtcacacaccaccttctaaatatggccagattttgtttgaaacattataagatgttttccattcctcagtattgactttgtaaatgataccttccaaaactttaacaggcgtgagaaatttaaatatacaaacccccttcgacctgaaaaaggaaaacagtatattttaaacaattgtgcagggaaagacagtggcagaacagaaaaagcacttggttgg

SEQ ID NO: 46127 - DNA, 599 bp, Chicken  19866894286805_1
  misc_feature (1)..(86): n is any nucleotide
nnnnnnnnnnnnnnnnnnnnnnnnnnnnnnnnnnnnnnnnnnnnnnnnnnnnnnnnnnnnnnnnnnnnnnnnnnnnnnnnnnnnnncattttgttcaattcagattattacgatatcctgtctaaactggtgaatttgaactctgtcagccttgaatcgtaattcaggaacagctaattcacagcttgctttgaaagagcttcagatttaaataactgtcttttattttatgtcaagtgcaaaactgtaataaagggaaaatcacaagcaaaccaaggctatctcagtacttaaaacatygctgttatatccyaccccttcccaaggaaaacaaatcaataattaaaaaacagatattatggtgtggtaataccttatctataaccctttcttcctcatgtacctttttggaaaakattttattaagcatatcttaaagtttaatgaactactcttactggttttatttatcagagaatacataaaacccaccttaaagaaacagcctattcttgtacatagacaagcagagctttgggcactttctgagcaccctcactgttttactcagatttataagacatagcaatctatgttgc

SEQ ID NO: 46128 - DNA, 599 bp, Chicken  19866894286805_2
  misc_feature (1)..(73): n is any nucleotide
nnnnnnnnnnnnnnnnnnnnnnnnnnnnnnnnnnnnnnnnnnnnnnnnnnnnnnnnnnnnnnnnnnnnnnnnncattttgttcaattcagattattacgatatcctgtctaaactggtgaatttgaactctgtcagccttgaatcgtaattcaggaacagctaattcacagcttgctttgaaagagcttcagatttaaataactgtcttttattttatgtcaagtgcaaaactgtaataaagggaaaatcacaagcaaaccaaggctatctcagtacttaaaacatygctgttatatccyaccccttcccaaggaaaacaaatcaataattaaaaaacagatattatggtgtggtaataccttatctataaccctttcttcctcatgtacctttttggaaaakattttattaagcatatcttaaagtttaatgaactactcttactggttttatttatcagagaatacataaaacccaccttaaagaaacagcctattcttgtacatagacaagcagagctttgggcactttctgagcaccctcactgttttactcagatttataagacatagcaatctatgttgcctcttctcattaa

SEQ ID NO: 46129 - DNA, 600 bp, Chicken  19866894286805_3
cctgtctaaactggtgaatttgaactctgtcagccttgaatcgtaattcaggaacagctaattcacagcttgctttgaaagagcttcagatttaaataactgtcttttattttatgtcaagtgcaaaactgtaataaagggaaaatcacaagcaaaccaaggctatctcagtacttaaaacatygctgttatatccyaccccttcccaaggaaaacaaatcaataattaaaaaacagatattatggtgtggtaataccttatctataaccctttcttcctcatgtacctttttggaaaakattttattaagcatatcttaaagtttaatgaactactcttactggttttatttatcagagaatacataaaacccaccttaaagaaacagcctattcttgtacatagacaagcagagctttgggcactttctgagcaccctcactgttttactcagatttataagacatagcaatctatgttgcctcttctcattaataataacatacagtcagatatgcaaatattccgaaacatcttctttcatgcraaatgttgagtaacaaatatgtctgtgcatgacatgctttctagtctttctt

SEQ ID NO: 46130 - DNA, 600 bp, Chicken  19866894286805_4
tggtaataccttatctataaccctttcttcctcatgtacctttttggaaaakattttattaagcatatcttaaagtttaatgaactactcttactggttttatttatcagagaatacataaaacccaccttaaagaaacagcctattcttgtacatagacaagcagagctttgggcactttctgagcaccctcactgttttactcagatttataagacatagcaatctatgttgcctcttctcattaataataacatacagtcagatatgcaaatattccgaaacatcttctttcatgcraaatgttgagtaacaaatatgtctgtgcatgacatgctttctagtctttcttcctcacttcttgtctatattttaatagctttccttcttgctarattaggtactatagcttatttcatcacatataaatgccatgaatcatgtaagtgtacttggcaactcacctaccaggagtacagctattgtaaatagaaaactgactagatgttaaaaataattgaaaggatgtccttcagaatcagctataagaacaacctaactgcactggcaatgaaggcctatcatcaaagcctctttgga

SEQ ID NO: 46131 - DNA, 600 bp, Chicken  19866894286805_5
ggttttatttatcagagaatacataaaacccaccttaaagaaacagcctattcttgtacatagacaagcagagctttgggcactttctgagcaccctcactgttttactcagatttataagacatagcaatctatgttgcctcttctcattaataataacatacagtcagatatgcaaatattccgaaacatcttctttcatgcraaatgttgagtaacaaatatgtctgtgcatgacatgctttctagtctttcttcctcacttcttgtctatattttaatagctttccttcttgctarattaggtactatagcttatttcatcacatataaatgccatgaatcatgtaagtgtacttggcaactcacctaccaggagtacagctattgtaaatagaaaactgactagatgttaaaaataattgaaaggatgtccttcagaatcagctataagaacaacctaactgcactggcaatgaaggcctatcatcaaagcctctttggaggagatatcctagctatgttatctacataaagaaagagtaccatcatgtctttggatcatgtgttcactgcaggctcactcatgacatcagaaca

SEQ ID NO: 46132 - DNA, 600 bp, Chicken  19866894286810_1
agtacctgaactttaaaaaataaagtattccttttgggagcagccatgctactgatagatttatgccgcacatttcatgctcctatgctttcccctgcttgtgatctctggacaccaataaatatctccggcaccttcccccattcttacctttattatgtagagagttggagtagaaatgttaagagtgctgtgaatagagtgcctgcaatgaagggcaggaaaggacgtgctgatggcacctagattagcaggtatccaggattcccagcctggctgtgtgcagcttctgggtatacycaggttagcaggggaaggggagtgagtaaatcctgatgactcacaaggatggacagaatggagaggctgaygactgtcagctcctaaagggtgcataacaagcatacccaaaatcaacacatggatctcattgagaaaaattgagaaactgcagaaccaactcagcagactaatctgctcckctagcagaaggaaggaagcaggatctgctacaaaaatagaaagggattatagagtctttatgttgctttccactgcttgttctgtagaataagtaatttgtattagagaaaatgaaga

SEQ ID NO: 46133 - DNA, 600 bp, Chicken  19866894286810_2
atttcatgctcctatgctttcccctgcttgtgatctctggacaccaataaatatctccggcaccttcccccattcttacctttattatgtagagagttggagtagaaatgttaagagtgctgtgaatagagtgcctgcaatgaagggcaggaaaggacgtgctgatggcacctagattagcaggtatccaggattcccagcctggctgtgtgcagcttctgggtatacycaggttagcaggggaaggggagtgagtaaatcctgatgactcacaaggatggacagaatggagaggctgaygactgtcagctcctaaagggtgcataacaagcatacccaaaatcaacacatggatctcattgagaaaaattgagaaactgcagaaccaactcagcagactaatctgctcckctagcagaaggaaggaagcaggatctgctacaaaaatagaaagggattatagagtctttatgttgctttccactgcttgttctgtagaataagtaatttgtattagagaaaatgaagacattgcaaagcactaaaaagtaacattggagaactagaatttttcattgtgatgggtctttatccctgcat

SEQ ID NO: 46134 - DNA, 600 bp, Chicken  19866894286810_3
taagagtgctgtgaatagagtgcctgcaatgaagggcaggaaaggacgtgctgatggcacctagattagcaggtatccaggattcccagcctggctgtgtgcagcttctgggtatacycaggttagcaggggaaggggagtgagtaaatcctgatgactcacaaggatggacagaatggagaggctgaygactgtcagctcctaaagggtgcataacaagcatacccaaaatcaacacatggatctcattgagaaaaattgagaaactgcagaaccaactcagcagactaatctgctcckctagcagaaggaaggaagcaggatctgctacaaaaatagaaagggattatagagtctttatgttgctttccactgcttgttctgtagaataagtaatttgtattagagaaaatgaagacattgcaaagcactaaaaagtaacattggagaactagaatttttcattgtgatgggtctttatccctgcatggttataggtgacataagcataaggcacaagcacatgacaagactaagtgctgctcctgctgccaaatatacaatgcttttattttgaaatattcatgtaggtcattgctc

SEQ ID NO: 46135 - DNA, 600 bp, Chicken  19866894286810_4
tatacttcagtaatcattttcaaatctcccaggttctcatcatttaaccattgttaattattcggcaattacgctgatgaaaggttaaaaatgatcgcagagccatttcttcagtcagggaaaggaggaacagttttaaattaaatccttgcagtcggtgcttaatggtaatgacatgctatttttatattatttgaagtaacagatgattacttagtaacttcaacattggaaaatgggctagaaaagtatggtgatctaaataacagacaagcactctcggctgtgaaattaggacayggaagaggccattacagaaatacaactttacaaggggatatcttgatgaacaccatgatgtgagactcacagttctgctgtcagggtccatgtgtaaaataagcagargctatggataggaggaactttgcttttgtgagaaagaacaagttacattctcatatattactcatgtggtaagccttgcacactgaaatgaaaaataaaagtatgttaaaccaacagtatgcatagtctcttttttttaaatcataccccaaatatcagtaacttctgctaagctacmaagtttttacttct

SEQ ID NO: 46136 - DNA, 600 bp, Chicken  19866894286810_5
cttcagtcagggaaaggaggaacagttttaaattaaatccttgcagtcggtgcttaatggtaatgacatgctatttttatattatttgaagtaacagatgattacttagtaacttcaacattggaaaatgggctagaaaagtatggtgatctaaataacagacaagcactctcggctgtgaaattaggacayggaagaggccattacagaaatacaactttacaaggggatatcttgatgaacaccatgatgtgagactcacagttctgctgtcagggtccatgtgtaaaataagcagargctatggataggaggaactttgcttttgtgagaaagaacaagttacattctcatatattactcatgtggtaagccttgcacactgaaatgaaaaataaaagtatgttaaaccaacagtatgcatagtctcttttttttaaatcataccccaaatatcagtaacttctgctaagctacmaagtttttacttctgttttctgaaatctagtatgactgaactgtgatatctaagggtggttgtcctttgggtgcctcacactgggcattttgaagtcatcactaaaagatgagcccatgttt

SEQ ID NO: 46137 - DNA, 469 bp, Chicken  19866894286810_6
tgaaattaggacayggaagaggccattacagaaatacaactttacaaggggatatcttgatgaacaccatgatgtgagactcacagttctgctgtcagggtccatgtgtaaaataagcagargctatggataggaggaactttgcttttgtgagaaagaacaagttacattctcatatattactcatgtggtaagccttgcacactgaaatgaaaaataaaagtatgttaaaccaacagtatgcatagtctcttttttttaaatcataccccaaatatcagtaacttctgctaagctacmaagtttttacttctgttttctgaaatctagtatgactgaactgtgatatctaagggtggttgtcctttgggtgcctcacactgggcattttgaagtcatcactaaaagatgagcccatgttttaagtgttgcagaggcacttaagtgaatactgtaaacgactgccagg

SEQ ID NO: 46138 - DNA, 600 bp, Chicken  19866894286814_1
gtgtcatctggctgaggtattccacttgctatggcttgctttgaacagtcatttatgaagcatggaaatttatgttttgagcagctatgacggccagctggatgttgctctctgttctgtgttattcgtcattatttgttcacttgtttgtctgtgtgcatgtttgtattgtggatccactgcgtactcatttttttcatgacagatattcatgctttttgcagttgccccgtgtgactgtgcttttcgggtgcgcactttaatatcagatgagaggcagaaaggaagtaataattctgrrtgaataataacacacacgcaatgcaatggagaatcytgctrtgttgtgtccatgttcttgtgtccactgcaatcttagtgcacttctaaataaaaaatgggaagctggcaacacacaaaaataaccctcacttcctcatctctcctaccaccatgggctttctgtgcccacagagcagcagggacaaggaattagcaggtgatgctgagaccagagtttgcccaaatatttccatgctttggtttgcttatgcagtcgccacagagtcctattggcatcagcagctattgtgcatcagc

SEQ ID NO: 46139 - DNA, 600 bp, Chicken  19866894286814_2
tgtcatctggctgaggtattccacttgctatggcttgctttgaacagtcatttatgaagcatggaaatttatgttttgagcagctatgacggccagctggatgttgctctctgttctgtgttattcgtcattatttgttcacttgtttgtctgtgtgcatgtttgtattgtggatccactgcgtactcatttttttcatgacagatattcatgctttttgcagttgccccgtgtgactgtgcttttcgggtgcgcactttaatatcagatgagaggcagaaaggaagtaataattctgrrtgaataataacacacacgcaatgcaatggagaatcytgctrtgttgtgtccatgttcttgtgtccactgcaatcttagtgcacttctaaataaaaaatgggaagctggcaacacacaaaaataaccctcacttcctcatctctcctaccaccatgggctttctgtgcccacagagcagcagggacaaggaattagcaggtgatgctgagaccagagtttgcccaaatatttccatgctttggtttgcttatgcagtcgccacagagtcctattggcatcagcagctattgtgcatcagct

SEQ ID NO: 46140 - DNA, 600 bp, Chicken  19866894286814_3
gctttgaacagtcatttatgaagcatggaaatttatgttttgagcagctatgacggccagctggatgttgctctctgttctgtgttattcgtcattatttgttcacttgtttgtctgtgtgcatgtttgtattgtggatccactgcgtactcatttttttcatgacagatattcatgctttttgcagttgccccgtgtgactgtgcttttcgggtgcgcactttaatatcagatgagaggcagaaaggaagtaataattctgrrtgaataataacacacacgcaatgcaatggagaatcytgctrtgttgtgtccatgttcttgtgtccactgcaatcttagtgcacttctaaataaaaaatgggaagctggcaacacacaaaaataaccctcacttcctcatctctcctaccaccatgggctttctgtgcccacagagcagcagggacaaggaattagcaggtgatgctgagaccagagtttgcccaaatatttccatgctttggtttgcttatgcagtcgccacagagtcctattggcatcagcagctattgtgcatcagctgcataatcaggygtttattgaagaggtggggaggaa

SEQ ID NO: 46141 - DNA, 600 bp, Chicken  19866894286814_4
gaacagtcatttatgaagcatggaaatttatgttttgagcagctatgacggccagctggatgttgctctctgttctgtgttattcgtcattatttgttcacttgtttgtctgtgtgcatgtttgtattgtggatccactgcgtactcatttttttcatgacagatattcatgctttttgcagttgccccgtgtgactgtgcttttcgggtgcgcactttaatatcagatgagaggcagaaaggaagtaataattctgrrtgaataataacacacacgcaatgcaatggagaatcytgctrtgttgtgtccatgttcttgtgtccactgcaatcttagtgcacttctaaataaaaaatgggaagctggcaacacacaaaaataaccctcacttcctcatctctcctaccaccatgggctttctgtgcccacagagcagcagggacaaggaattagcaggtgatgctgagaccagagtttgcccaaatatttccatgctttggtttgcttatgcagtcgccacagagtcctattggcatcagcagctattgtgcatcagctgcataatcaggygtttattgaagaggtggggaggaagaagg

SEQ ID NO: 46142 - DNA, 600 bp, Chicken  19866894286814_5
cacacgcaatgcaatggagaatcytgctrtgttgtgtccatgttcttgtgtccactgcaatcttagtgcacttctaaataaaaaatgggaagctggcaacacacaaaaataaccctcacttcctcatctctcctaccaccatgggctttctgtgcccacagagcagcagggacaaggaattagcaggtgatgctgagaccagagtttgcccaaatatttccatgctttggtttgcttatgcagtcgccacagagtcctattggcatcagcagctattgtgcatcagctgcataatcaggygtttattgaagaggtggggaggaagaaggacacgcttgtcccctgtgttcccaaacacagaggatgaaacagttggaaaaagcattgtgwgattttgatgtgcagctgttggtccctcttctctgtaagtctgatgagaatgcagtgctagaaaaactgatgatggtatgtgtcttctgggagcccagcctcacacattccccagctgctctgcttatggtcctctgtttggcctcctgtgcagtttcagatgatamaaccaagccagggactctcgcttatactccacaagtcatctcg

SEQ ID NO: 46143 - DNA, 600 bp, Chicken  19866894286814_6
agctggcaacacacaaaaataaccctcacttcctcatctctcctaccaccatgggctttctgtgcccacagagcagcagggacaaggaattagcaggtgatgctgagaccagagtttgcccaaatatttccatgctttggtttgcttatgcagtcgccacagagtcctattggcatcagcagctattgtgcatcagctgcataatcaggygtttattgaagaggtggggaggaagaaggacacgcttgtcccctgtgttcccaaacacagaggatgaaacagttggaaaaagcattgtgwgattttgatgtgcagctgttggtccctcttctctgtaagtctgatgagaatgcagtgctagaaaaactgatgatggtatgtgtcttctgggagcccagcctcacacattccccagctgctctgcttatggtcctctgtttggcctcctgtgcagtttcagatgatamaaccaagccagggactctcgcttatactccacaagtcatctcgccttgttataaaatcatacctaaaggggtattttggcgcatatcaagatatttccttgcagaaatggacacttcagtgagatgaacggcc

SEQ ID NO: 46144 - DNA, 600 bp, Chicken  19866894286814_7
tattggcatcagcagctattgtgcatcagctgcataatcaggygtttattgaagaggtggggaggaagaaggacacgcttgtcccctgtgttcccaaacacagaggatgaaacagttggaaaaagcattgtgwgattttgatgtgcagctgttggtccctcttctctgtaagtctgatgagaatgcagtgctagaaaaactgatgatggtatgtgtcttctgggagcccagcctcacacattccccagctgctctgcttatggtcctctgtttggcctcctgtgcagtttcagatgatamaaccaagccagggactctcgcttatactccacaagtcatctcgccttgttataaaatcatacctaaaggggtattttggcgcatatcaagatatttccttgcagaaatggacacttcagtgagatgaacggccctgccaaactccagctggttcaatgctagtgacatgtataagctcatcttccaatatactgaccaaaaargaaagaagagtgagaagcacccragtgatttagtccaccctaagtgaagggagatgaacagccctctggaaatgtttctctcagtgtgtcagggaga

SEQ ID NO: 46145 - DNA, 600 bp, Chicken  19866894286814_8
tgatggtatgtgtcttctgggagcccagcctcacacattccccagctgctctgcttatggtcctctgtttggcctcctgtgcagtttcagatgatamaaccaagccagggactctcgcttatactccacaagtcatctcgccttgttataaaatcatacctaaaggggtattttggcgcatatcaagatatttccttgcagaaatggacacttcagtgagatgaacggccctgccaaactccagctggttcaatgctagtgacatgtataagctcatcttccaatatactgaccaaaaargaaagaagagtgagaagcacccragtgatttagtccaccctaagtgaagggagatgaacagccctctggaaatgtttctctcagtgtgtcagggagaatgtctaaataactggcttggggtatacactcgaggttcagatggttaaactgactgaggttaatccttctctttatcaccactctagatttgaattaattgatctatcaggtattaagacattctctgtctttgtttgctgcaatcctcttttatctgaaatctcctcacaaagaatttacagactgggatcaaattaactt

SEQ ID NO: 46146 - DNA, 600 bp, Chicken  19866894286814_9
cccagcctcacacattccccagctgctctgcttatggtcctctgtttggcctcctgtgcagtttcagatgatamaaccaagccagggactctcgcttatactccacaagtcatctcgccttgttataaaatcatacctaaaggggtattttggcgcatatcaagatatttccttgcagaaatggacacttcagtgagatgaacggccctgccaaactccagctggttcaatgctagtgacatgtataagctcatcttccaatatactgaccaaaaargaaagaagagtgagaagcacccragtgatttagtccaccctaagtgaagggagatgaacagccctctggaaatgtttctctcagtgtgtcagggagaatgtctaaataactggcttggggtatacactcgaggttcagatggttaaactgactgaggttaatccttctctttatcaccactctagatttgaattaattgatctatcaggtattaagacattctctgtctttgtttgctgcaatcctcttttatctgaaatctcctcacaaagaatttacagactgggatcaaattaacttttaatgctcttgtagccttcagc

SEQ ID NO: 46147 - DNA, 599 bp, Chicken  19866894286816_1
  misc_feature (1)..(234): n is any nucleotide
nnnnnnnnnnnnnnnnnnnnnnnnnnnnnnnnnnnnnnnnnnnnnnnnnnnnnnnnnnnnnnnnnnnnnnnnnnnnnnnnnnnnnnnnnnnnnnnnnnnnnnnnnnnnnnnnnnnnnnnnnnnnnnnnnnnnnnnnnnnnnnnnnnnnnnnnnnnnnnnnnnnnnnnnnnnnnnnnnnnnnnnnnnnnnnnnnnnnnnnnnnnnnnnnnnnnnnnnnnnnnnnnnnnnnnnnnntgtatacatatatgaagattctagccactttttaaaccagtatctattttacagcacggaagtaamttctagtacatgaacagaagtcatttgcttttgaatactgccaaagtagacccactgaggaaagaggtattgcaaaccctttgagctctttattctcagattgttcctgcagacagrgcacatactgtggcagggatgaacatgggaaaatctctatctgttattgagacagaacagtcctcctgggcttccctagcactgagcgagagaggaagctgcaatgaagtggcctctatcaccataagcccttgactacacagagtctgtaggaaagttaatttcccagaagacaaggcttt

SEQ ID NO: 46148 - DNA, 599 bp, Chicken  19866894286816_2
  misc_feature (1)..(117): n is any nucleotide
nnnnnnnnnnnnnnnnnnnnnnnnnnnnnnnnnnnnnnnnnnnnnnnnnnnnnnnnnnnnnnnnnnnnnnnnnnnnnnnnnnnnnnnnnnnnnnnnnnnnnnnnnnnnnnnnnnnnntgtatacatatatgaagattctagccactttttaaaccagtatctattttacagcacggaagtaamttctagtacatgaacagaagtcatttgcttttgaatactgccaaagtagacccactgaggaaagaggtattgcaaaccctttgagctctttattctcagattgttcctgcagacagrgcacatactgtggcagggatgaacatgggaaaatctctatctgttattgagacagaacagtcctcctgggcttccctagcactgagcgagagaggaagctgcaatgaagtggcctctatcaccataagcccttgactacacagagtctgtaggaaagttaatttcccagaagacaaggctttacctgggattgcagtatcaacttaaaaccatatgatgatttaaatagaaagcttgtatgacatggaattaatagggaaaagattgaaacctaggtcagttacagatacaaaatggac

SEQ ID NO: 46149 - DNA, 600 bp, Chicken  19866894286816_3
gaacatgggaaaatctctatctgttattgagacagaacagtcctcctgggcttccctagcactgagcgagagaggaagctgcaatgaagtggcctctatcaccataagcccttgactacacagagtctgtaggaaagttaatttcccagaagacaaggctttacctgggattgcagtatcaacttaaaaccatatgatgatttaaatagaaagcttgtatgacatggaattaatagggaaaagattgaaacctaggtcagttacagatacaaaatggacttgttattaggaacgcataamaatgtccagccttttcagtgcgtttcctagagagcagttycacctgatgggatgatcattccagacactgacaaagcatctgtgctaataatgtgtgcagatgacagagaaattggcagggtagtaaacaaggaaaaaagttagctgggctgtgcaagctgaatgacttaattagcctgtcacaataagcatgggttcattttaataaaactaaatagaaaaagaacatacggagcaaaattgcaagctctggtttgagaatagtaaactgtcacagcaagcagttgcttgggagtcatt

SEQ ID NO: 46150 - DNA, 600 bp, Chicken  19866894286816_4
tcctcctgggcttccctagcactgagcgagagaggaagctgcaatgaagtggcctctatcaccataagcccttgactacacagagtctgtaggaaagttaatttcccagaagacaaggctttacctgggattgcagtatcaacttaaaaccatatgatgatttaaatagaaagcttgtatgacatggaattaatagggaaaagattgaaacctaggtcagttacagatacaaaatggacttgttattaggaacgcataamaatgtccagccttttcagtgcgtttcctagagagcagttycacctgatgggatgatcattccagacactgacaaagcatctgtgctaataatgtgtgcagatgacagagaaattggcagggtagtaaacaaggaaaaaagttagctgggctgtgcaagctgaatgacttaattagcctgtcacaataagcatgggttcattttaataaaactaaatagaaaaagaacatacggagcaaaattgcaagctctggtttgagaatagtaaactgtcacagcaagcagttgcttgggagtcatttagtaatctgtggtaaacacctcaaggtgaggaggaactc

SEQ ID NO: 46151 - DNA, 600 bp, Chicken  19866894286826_1
agagattccataaaccaacttgaatcgggatttggcttatcctttggttgagcaacttgttttctaaaccatatgggagaagtttgtccttcctgaaaattgggaaaaactcttaaactggagggactgattcagaaggtgaagagaaagcacggagggagggagaggcagtcagtgctgctgacttcagctgtacagaaggaaggaagctccccaaatgcgaaatgctggaaatacaatcagtggtgtataaaaagaatcggagaaaacagccaagcagagttcaagcaattgccctcrttgttgcccttctgttttagaggagatgcaatgctcaggcaattggttcactggtttcttatggtgccaaattgctaaatgctgtccaggcaggtacgttagcggtgtcagtgactggtacagcgtggccatgaaaccagattgttcctgtcagctaacccatcatcagctttgcgtgctggcacagcagtgccaggctgagcagatggttacrcaccagacccaaaatagctgctgtggtgggcactgggcatgacaagaaggagcaagcacagaaggtttcagagcctgccactcaca

SEQ ID NO: 46152 - DNA, 600 bp, Chicken  19866894286826_2
caaatgcgaaatgctggaaatacaatcagtggtgtataaaaagaatcggagaaaacagccaagcagagttcaagcaattgccctcrttgttgcccttctgttttagaggagatgcaatgctcaggcaattggttcactggtttcttatggtgccaaattgctaaatgctgtccaggcaggtacgttagcggtgtcagtgactggtacagcgtggccatgaaaccagattgttcctgtcagctaacccatcatcagctttgcgtgctggcacagcagtgccaggctgagcagatggttacrcaccagacccaaaatagctgctgtggtgggcactgggcatgacaagaaggagcaagcacagaaggtttcagagcctgccactcacataaccctgctccctgagtgcaggactggggcttttggccaggacaaccccagcccttcagtaatggggccaagtccatctgtaacaacccaaatggagcaaggggaagagcagcaggacagtgaacctctgtctgtatgcagtttactggtccctgtcctgtagccgtgtaagagaatggagcagcagcaactgggcacctatgggaaggcaaa

SEQ ID NO: 46153 - DNA, 600 bp, Chicken  19866894286840_1
gtggagcagtggggaagaggggaagaaacctgggaaggaggaagccaggaaaatgctgccgctaactgctgttctcctgccttcccacagcaaacccaagtttttgctcttctagagagctctgtgagccagtgctgctcatagctgtggcttagagcttggcatcatcagagatgaggagaaaacgtgggatagggagctatatttgttttgaagctcactccatcagttgctggtgaaaaataagcctggtgatcatgttcatgtcaactgaaagtgatttaaaagcttttacttggraaaatgaacttttgttttggggggatgctcatgagtgagggaggccggtttctgttctcactcccaccactggtgtcagtgggttgatgaggatgaaatctggcctgctgaaagaggacattaaggacaggaacttgcaagtgaatkatgtattgccactgtctttggagacgcttgctgttactttttctaagaggacatgtatgacccttccacctgctcacatctctgacctgggaacggtttggtttgtggacctgcctctgccatccacagtgagccagcctcttgtgatggagt

SEQ ID NO: 46154 - DNA, 600 bp, Chicken  19866894286840_2
tggcttagagcttggcatcatcagagatgaggagaaaacgtgggatagggagctatatttgttttgaagctcactccatcagttgctggtgaaaaataagcctggtgatcatgttcatgtcaactgaaagtgatttaaaagcttttacttggraaaatgaacttttgttttggggggatgctcatgagtgagggaggccggtttctgttctcactcccaccactggtgtcagtgggttgatgaggatgaaatctggcctgctgaaagaggacattaaggacaggaacttgcaagtgaatkatgtattgccactgtctttggagacgcttgctgttactttttctaagaggacatgtatgacccttccacctgctcacatctctgacctgggaacggtttggtttgtggacctgcctctgccatccacagtgagccagcctcttgtgatggagttggcatgaagtgctgggggtttccrtacagtctgaggccatactcaccagatgacgcttacccactgagactgtcacactggstgaattttaagctcaggtttaaatccagcctgcccaacaagatgraaaatcccagcctttagct

SEQ ID NO: 46155 - DNA, 600 bp, Chicken  19866894286840_3
tgctcatgagtgagggaggccggtttctgttctcactcccaccactggtgtcagtgggttgatgaggatgaaatctggcctgctgaaagaggacattaaggacaggaacttgcaagtgaatkatgtattgccactgtctttggagacgcttgctgttactttttctaagaggacatgtatgacccttccacctgctcacatctctgacctgggaacggtttggtttgtggacctgcctctgccatccacagtgagccagcctcttgtgatggagttggcatgaagtgctgggggtttccrtacagtctgaggccatactcaccagatgacgcttacccactgagactgtcacactggstgaattttaagctcaggtttaaatccagcctgcccaacaagatgraaaatcccagcctttagctgtggtccaggagcattcttgctctcactgttgcctctatcagcctttcactggtcttgagcraagagtttatgctgtgtcctctgcccagtgaacaacttaatgtgcaactgaggctcctatttgtgaaatttaatttcacttggtgtttttcttagcactgtgtagatcttaaagcg

SEQ ID NO: 46156 - DNA, 600 bp, Chicken  19866894286840_4
ttgatgaggatgaaatctggcctgctgaaagaggacattaaggacaggaacttgcaagtgaatkatgtattgccactgtctttggagacgcttgctgttactttttctaagaggacatgtatgacccttccacctgctcacatctctgacctgggaacggtttggtttgtggacctgcctctgccatccacagtgagccagcctcttgtgatggagttggcatgaagtgctgggggtttccrtacagtctgaggccatactcaccagatgacgcttacccactgagactgtcacactggstgaattttaagctcaggtttaaatccagcctgcccaacaagatgraaaatcccagcctttagctgtggtccaggagcattcttgctctcactgttgcctctatcagcctttcactggtcttgagcraagagtttatgctgtgtcctctgcccagtgaacaacttaatgtgcaactgaggctcctatttgtgaaatttaatttcacttggtgtttttcttagcactgtgtagatcttaaagcgatgaagatcagtcctgatacaacttgtgcattgctcatcccaagtcctggggtattgc

SEQ ID NO: 46157 - DNA, 600 bp, Chicken  19866894286840_5
aggaacttgcaagtgaatkatgtattgccactgtctttggagacgcttgctgttactttttctaagaggacatgtatgacccttccacctgctcacatctctgacctgggaacggtttggtttgtggacctgcctctgccatccacagtgagccagcctcttgtgatggagttggcatgaagtgctgggggtttccrtacagtctgaggccatactcaccagatgacgcttacccactgagactgtcacactggstgaattttaagctcaggtttaaatccagcctgcccaacaagatgraaaatcccagcctttagctgtggtccaggagcattcttgctctcactgttgcctctatcagcctttcactggtcttgagcraagagtttatgctgtgtcctctgcccagtgaacaacttaatgtgcaactgaggctcctatttgtgaaatttaatttcacttggtgtttttcttagcactgtgtagatcttaaagcgatgaagatcagtcctgatacaacttgtgcattgctcatcccaagtcctggggtattgctgttggtgttccaagcagcagaaaaccaatcaagcactgtgctgc

SEQ ID NO: 46158 - DNA, 600 bp, Chicken  19866894286840_6
cttccacctgctcacatctctgacctgggaacggtttggtttgtggacctgcctctgccatccacagtgagccagcctcttgtgatggagttggcatgaagtgctgggggtttccrtacagtctgaggccatactcaccagatgacgcttacccactgagactgtcacactggstgaattttaagctcaggtttaaatccagcctgcccaacaagatgraaaatcccagcctttagctgtggtccaggagcattcttgctctcactgttgcctctatcagcctttcactggtcttgagcraagagtttatgctgtgtcctctgcccagtgaacaacttaatgtgcaactgaggctcctatttgtgaaatttaatttcacttggtgtttttcttagcactgtgtagatcttaaagcgatgaagatcagtcctgatacaacttgtgcattgctcatcccaagtcctggggtattgctgttggtgttccaagcagcagaaaaccaatcaagcactgtgctgcagaagaaatctgattaaacaatatgaagcagaatgtgccttgttcggttatggcctcagtcaccagcagctgtcaaatcag

SEQ ID NO: 46159 - DNA, 600 bp, Chicken  19866894286841_1
atcttcttctggcaaatttactaagtaagctaccaggaagcctggatccagacaagccagtgctcaagggctgctcaccttcttctatcgaatcccctagtgcaagcacttccacagcctcctgattaagaaggattctgtcccagtcctgactgtgagccatgccctgtcccagcaaatcccctcagctgtcgcctactcccagggagtagtctgtctactgctggaatttataccagaacaaagagttcccaggggttaggttcaaagcttgaaagaagttaaactgaaaactgatcrtatctgtaaattacttatattttccttcattaggaaatgtgaaatctcactttttaaattctaatttcatcatgcattgcatgttgagtttcaatcagttttacacacaatgctttcttgtggctagtttaatttcttctagattatattcccttccttcacctaaactgcttcaaattttcaccaagacagctgtacacaaaaagactagtgatatattgagtacactgagcacactcaggaaatcaaggtgtaaacacctccaagtgcaatagacattctgtagccagtcaggagtaa

SEQ ID NO: 46160 - DNA, 600 bp, Chicken  19866894286842_1
cttaaactatacaaaacctggaaatgcgaagaaaggtcttttattacatgcagattcaaagctacagtagggcagttaaagagaagacacatttataagaaatctcaccggtccaggtatttgtagccacagcacatgcattcaaacttccatgaaaatgaatgcgagaagagtttctcagcatgctgatcctgttttaagagcagagggagtgcaaacactggactttcctccttaccttcaaagacagggcagaaaaaatagacactgaatttgaaatcagatttcagcacttcaaaygctaagataagctcactgcaacgattgcaattcagggcatccctctaaagctcacagcaaagggattgatccacgttagtagactgctctcaatgacagtttcgggaatgcagcatagttacaaaaacgtgagtacgctctcaaaaacagtgagggacaaaacagctgatcacacacagtaaactgtgtgtataccacaagctaacaaatgtacagcttgcagggtgtcttgcatgcatatatacagatgtatttttatgaactgacatgctaaaagtctttagatgtacagtttcctga

SEQ ID NO: 46161 - DNA, 600 bp, Chicken  19866894286848_1
tcataaaatctggtcttccctctttaatctatagatcggacaagtaatttaataggacaagtaaatctataaatccagtgacaggaaatttggcatcagatcctttgttgtagctcaaaatgttcccatttattgtgcagtttgaactcttgccatgttaactagagttctctgtatttttatattgtttgaaaagcatgtattcagtgttttgcataatatatgtgaggccatatatatataagactactgtgattatgcctccctagagactgcaaattacaagaatagcatcttggygatactctgggaaaaatctcttggattaaaaaytcttgcttgttttgcagaccagcaatcacctccttggaccaaagccatttcctctggacagattattagcaatattatatagtattgtggacaacagagttgctccaactgcaaatatattttcccaggtgagtacatatatacttgcttttatttcctgtctattgtgtttggaatttttggaaaggtttcacactggtatgtgtgtggggttttttttgttggttcttttttaagtcactattttaatagaatataatggaaaaa

SEQ ID NO: 46162 - DNA, 600 bp, Chicken  19866894286848_2
gatcggacaagtaatttaataggacaagtaaatctataaatccagtgacaggaaatttggcatcagatcctttgttgtagctcaaaatgttcccatttattgtgcagtttgaactcttgccatgttaactagagttctctgtatttttatattgtttgaaaagcatgtattcagtgttttgcataatatatgtgaggccatatatatataagactactgtgattatgcctccctagagactgcaaattacaagaatagcatcttggygatactctgggaaaaatctcttggattaaaaaytcttgcttgttttgcagaccagcaatcacctccttggaccaaagccatttcctctggacagattattagcaatattatatagtattgtggacaacagagttgctccaactgcaaatatattttcccaggtgagtacatatatacttgcttttatttcctgtctattgtgtttggaatttttggaaaggtttcacactggtatgtgtgtggggttttttttgttggttcttttttaagtcactattttaatagaatataatggaaaaattaaaattattaatttttcattaacattattaa

SEQ ID NO: 46163 - DNA, 557 bp, Chicken  19866894286851_1
cttcgggaaaaaaagaaaacaaaacatccaagaaggagggagttctatgagctcaagcttggatgcaaaagtgttaaattaaaaacacactaactgcgtgataattccacaagaacttgtttgtcttcacagttaggctctgaacagctcacaaaccaaacactgcgaccagcggaggctacgtgggctatcccaacagtgatgaactggtgtgcagtaagtgcagagtttgttttgggaattcctattcttagttctagacaaaacagcagaaaacataaatgctactacagagagatmgtttcaggaaaatgattgcatcacatttaaggtctttgatttctttggaatgagtgtttccaggaagattgcaagtttggttttcaaaaggtgatgccatgatctcgtgtggtcttcagagaccctcaaatataaagattggaaaacagcatgataaaggaaggaatctgactgactgctcagcacaggccagagaactccaacatatctgcatcaagatcattactttgacccttagtatccttgcaaaaagccaa

SEQ ID NO: 46164 - DNA, 600 bp, Chicken  19866894286854_1
atagaataaattcagggccagcaaagggcacaattacagagctaggtatgcagataggaccaagcatactatgcaagacacaaactgttcaattactgtttacccttaacttcatcactcccagagaagaacttggatgtatctgcacacatctgtatggacacataccaaagaaagggtcagtgactacacatttgtcacagaactcaaacaattttcctctttaccttctcctgtagagtagcattagtaagaaacttaaggagcttgttaactgcacatgaatttatttccatagartattctgaactgatttcttcagcctcttatcatctcttgtgtattcctgagcccttcagaacacacagactagccccaaggattggtgagcctcatctctcaatactctgaacatcagcacagctctcctgcacaagaatgatgcaaaatactgcactgagctcagtgtaagagcaaggtgaagtaacacaagcaagtgtaagagcagggtgaggaaaagagaagcactggtaaatcattcattctactggaagagtcaagtgcattgcttgtctatttccctatcctgtaaaactgaaa

SEQ ID NO: 46165 - DNA, 600 bp, Chicken  19866894286856_1
ctaaaacacaatgcaaaaatgctaagttacattcagccttgtaaccactttttttttcactataatttcctttttttttcttttctcaagtcttctcttggtggtcctattccacttgatgctcaggtatcaactcagccctttggactaaagaaaagtcttcagtgactactggtaggaaaggtttacctgaacccggccatgaagctcttgtgaaatgccaccttgatttgactgaaagagggatctattgtaccgtaaaaacaaaagatgcccttcagggctggtgtgactgtacaycatgggcattccttgtatattgcactgattcaatgacaaaagcacacagtgttgaatagcaagtcaactatggtgccacatgttcacctcaccccaaaacggagcctgaaaaacaccctaaaaaggatccatcttctcatttggtgtggaaagatggagcaaataagaaggtgcatcccttgatgaacaccttatcatgcctaatttgaggcagcctgtctagactcatgttgttggccactgctgggctgagacttgtctcttccccagccagacttatataagatgtgtgttcctgac

SEQ ID NO: 46166 - DNA, 600 bp, Chicken  19866894286859_1
tgttggtggtggtggtgtggtagtagcagtgtttctgtttttattaattaaataagaaatgcttcttgccagatagctattggtgtcctggagttacggagttaataagagtttctacaacttagtgtcaccagcagtaaaaacattacctacattatcgtactcaccattcatctgggttaaataacttgttttgacaagaaaggaaaatagctctcatttttcattaccgttacatgaaatatgagcaaacagactgtctaaacaggtaaatctgtttgcaatgatgttaaaaaatayataatcttggcattgcaaaagtggataacataccagttttaaagaaatctcctttactatgcactgcttctgtctatgtcactcagcagtaatttgttttaaatctgcacctacatagcagaacacagtggacatttccctggatatccccaggtttacacatgtgagctcaggaacccaactcaagarctcacaacgaagaagctgccatgcactggtccttttcctactgggagcaagaacaaaagtccaaagcctaaagaggtagtgggacatatttatcaagtaaataaaatatca

SEQ ID NO: 46167 - DNA, 600 bp, Chicken  19866894286859_2
tgttttgacaagaaaggaaaatagctctcatttttcattaccgttacatgaaatatgagcaaacagactgtctaaacaggtaaatctgtttgcaatgatgttaaaaaatayataatcttggcattgcaaaagtggataacataccagttttaaagaaatctcctttactatgcactgcttctgtctatgtcactcagcagtaatttgttttaaatctgcacctacatagcagaacacagtggacatttccctggatatccccaggtttacacatgtgagctcaggaacccaactcaagarctcacaacgaagaagctgccatgcactggtccttttcctactgggagcaagaacaaaagtccaaagcctaaagaggtagtgggacatatttatcaagtaaataaaatatcaaacgctagagtaggcttataggaaaagagggaaatggtaagagagaacaatgtggaaaccaaccattactttaactagtcattctttaaaaacatactttaatatctataacacagcctctgttctggcctgatgcaaaagcaacagaaaatctttacttttgctgtgatactatagaatgatagacag

SEQ ID NO: 46168 - DNA, 600 bp, Chicken  19866894286860_1
tgcatttttggtgcagatctctaacaatgacaccagaaggggaaaaaaaaaaagaaataaaaaaaacaaaaacaacttcctatctattttttccatcttcacctcttcagaaagtacaagtataaaaatacccaatggtggaaaaacccatcgcatagtaaaaatacaacccacaggacaaactcatctgtgaagtaactaaccacagctttcttcaaactcccactcactgacttctgccatttcagcctttctctgcagtgttctctttatgcaaaaggcaattttgattcttttacyccacactggtgtccatctcactctgtactggtcagccacggtatgtcccaaacccttcctggcatacactctcagcacaccctgaactaagaggatatgactgaggatgataaaaactgagtcctttaaaacagtactaggcagactaccatttatgatcatccacttgagacaaagcacatctacacatacccaggcaatcaccaaaggcgagttactaatttgtatggacactaaagaaaacgttgctctctgttccagctgcacagtcctgtttcacttaatgtattatgcaggcat

SEQ ID NO: 46169 - DNA, 600 bp, Chicken  19866894286860_2
acactctcagcacaccctgaactaagaggatatgactgaggatgataaaaactgagtcctttaaaacagtactaggcagactaccatttatgatcatccacttgagacaaagcacatctacacatacccaggcaatcaccaaaggcgagttactaatttgtatggacactaaagaaaacgttgctctctgttccagctgcacagtcctgtttcacttaatgtattatgcaggcatcccaacagttcatcttcggagaaaaatcaaaacttacttgctggaatacagcatcaccttcatayagtcttttattacttaggacatatggcaggaaagccagctattgcaagaatcaagcatggccaccaaactagccatgtgaaaattctctcttttcaactgcttattctccttgtttgactaagaggtaatctggcaattttactcccaagcaacactcagttctaaacctgtagaaaaaaagtcccaaaagattaattaaaattttaagtaatcagaaataaaaataagcaaaaatattttaggttgaagctgaaattgtcaatggtaggtaatttagctctcctgtttttgaatggcat

SEQ ID NO: 46170 - DNA, 600 bp, Chicken  19866894286865_1
ttcaaagttctttgtgactgattaagtagtcaatgtactagctaactaaaaaaaaaaaaggagcaaaggaagcatttctttctctaatgtaagcacctatctacagctcaggaaagggcccatgacgtcattacttcaactacaaatcactcttcaagatttaattgtctaacagaaaatgaaacgttactttagttcatttccttcaaaaaatgactgcacaaaagggtttgaactaagaattacagtgcttgtggtaggattgaggaaatctggctgatcaacgtaaaactcccccaractgggagaatatcatgaaggctcacacacacggagatgttctctgggcatctctttaaactttatttaccactgtgcttcagagagaggagagactgtgatgatgcaggcaggcttaatttctctctggaattgtaaagaaattggatttactatactggtttctattgtaggagaataacctagtaacatagggccatgggagtgtaaggtacttttagtattatacttgggtaaattattaaagacattttgtagcattagtattcataatatgcaaaactttatttaattttctat

SEQ ID NO: 46171 - DNA, 600 bp, Chicken  19866894286865_2
aaaaaaaaatgctatgtgtagtggtcaaaatagagctaagaaaaaaaaaaagccttccaaagacactactttatgaatgcacttttataaaatggatagctttctttggtaatagaaagcaagtttgtagagacttttattcaatgcagaatatctttaatacttttcattcctaaaaattgataaagttgagcataccttcgaaggaattcattgaaacagcaaggcctctgaaataggtctttttaaattttgttttaaaagaattaattaatattttaaactacgaggaagaagagsatttcttccatattatatttacatgcttgcaaccattcaaaatatgctgttttgaaaataaacatttgtatctaatactaaagatgtaaacaacttaagactaggaccttctttctttttacctgtaaagtttggctactacttaagatacttcataaataaatgatgtgcttgatgttaaatactgatatttttagttagttactcaaagtcttgaataggrcatgttacagaaggttttcaccatccttaaggaactgcactgctgggatgcattatccttgacgttcacttatgtca

SEQ ID NO: 46172 - DNA, 600 bp, Chicken  19866894286865_3
aaggcctctgaaataggtctttttaaattttgttttaaaagaattaattaatattttaaactacgaggaagaagagsatttcttccatattatatttacatgcttgcaaccattcaaaatatgctgttttgaaaataaacatttgtatctaatactaaagatgtaaacaacttaagactaggaccttctttctttttacctgtaaagtttggctactacttaagatacttcataaataaatgatgtgcttgatgttaaatactgatatttttagttagttactcaaagtcttgaataggrcatgttacagaaggttttcaccatccttaaggaactgcactgctgggatgcattatccttgacgttcacttatgtcattagttgctggagacatagacaggttgacaaaatatacatttttttcatcagtacacttttaaaacattttctcttaacatttacaatttttaatttcttagctgacatgcttaatgcagtatgtcaycacagactgcaatagtcagtgtggtatagcatgcaaagtaatacagtgacaatttgcaaaatatttcttcccatttgaaaaaatggtatggcctt

SEQ ID NO: 46173 - DNA, 533 bp, Chicken  19866894286865_4
agtttggctactacttaagatacttcataaataaatgatgtgcttgatgttaaatactgatatttttagttagttactcaaagtcttgaataggrcatgttacagaaggttttcaccatccttaaggaactgcactgctgggatgcattatccttgacgttcacttatgtcattagttgctggagacatagacaggttgacaaaatatacatttttttcatcagtacacttttaaaacattttctcttaacatttacaatttttaatttcttagctgacatgcttaatgcagtatgtcaycacagactgcaatagtcagtgtggtatagcatgcaaagtaatacagtgacaatttgcaaaatatttcttcccatttgaaaaaatggtatggccttagatgatatcttagataaattgctgctttcaaagaagagagagccagaatgacttcaccaagggcaaatcattcctgaccaatctagtggccttctacagtggagcgactgcatgagtcaacaagtgaagacaactga

SEQ ID NO: 46174 - DNA, 599 bp, Chicken  19866894286867_1
  misc_feature (1)..(79): n is any nucleotide
nnnnnnnnnnnnnnnnnnnnnnnnnnnnnnnnnnnnnnnnnnnnnnnnnnnnnnnnnnnnnnnnnnnnnnnnnnnnnnnaagttgaatgtcttggatgccctagaaaaacttggaagtccaaggctattgtgactttcttccttacctgacaggctccaggcaagtgtctgctctgttaggtagttgcttgatcacttctactcttgctgtgcatgtgtgtgtatttgtgtctgaagaatgttgccttgtggaaaaagataacgagcctttactttctattcacgttcccttcctgcatrcttctttctctctgttggcatgagatgtagaattgtgtgtcaagccaagttttgtcatttcttctccttgacctcacagcttggcttggaaatatggggagcttgactrtgctggctcttgcatctcctactgtgtgatgaatttgggtagcactctctcatggcagattaaatagatgatgccactaagctctattttccccatctggacaatgaattgtgacctttggctttctagttcagaaagatagagctgtgtttcctgtaggctccctgctttttgtgtctgactcctgacc

SEQ ID NO: 46175 - DNA, 599 bp, Chicken  19866894286867_2
  misc_feature (1)..(50): n is any nucleotide
nnnnnnnnnnnnnnnnnnnnnnnnnnnnnnnnnnnnnnnnnnnnnnnnnnaagttgaatgtcttggatgccctagaaaaacttggaagtccaaggctattgtgactttcttccttacctgacaggctccaggcaagtgtctgctctgttaggtagttgcttgatcacttctactcttgctgtgcatgtgtgtgtatttgtgtctgaagaatgttgccttgtggaaaaagataacgagcctttactttctattcacgttcccttcctgcatrcttctttctctctgttggcatgagatgtrgaattgtgtgtcaagccaagttttgtcatttcttctccttgacctcacagcttggcttggaaatatggggagcttgactrtgctggctcttgcatctcctactgtgtgatgaatttgggtagcactctctcatggcagattaaatagatgatgccactaagctctattttccccatctggacaatgaattgtgacctttggctttctagttcagaaagatagagctgtgtttcctgtaggctccctgctttttgtgtctgactcctgaccgttgcaaacttgctccgtttgtagcagag

SEQ ID NO: 46176 - DNA, 599 bp, Chicken  19866894286867_3; identical to SEQ ID NO: 46175
  misc_feature (1)..(50): n is any nucleotide

SEQ ID NO: 46177 - DNA, 600 bp, Chicken  19866894286867_4
cttggaagtccaaggctattgtgactttcttccttacctgacaggctccaggcaagtgtctgctctgttaggtagttgcttgatcacttctactcttgctgtgcatgtgtgtgtatttgtgtctgaagaatgttgccttgtggaaaaagataacgagcctttactttctattcacgttcccttcctgcatrcttctttctctctgttggcatgagatgtagaattgtgtgtcaagccaagttttgtcatttcttctccttgacctcacagcttggcttggaaatatggggagcttgactrtgctggctcttgcatctcctactgtgtgatgaatttgggtagcactctctcatggcagattaaatagatgatgccactaagctctattttccccatctggacaatgaattgtgacctttggctttctagttcagaaagatagagctgtgtttcctgtaggctccctgctttttgtgtctgactcctgaccgttgcaaacttgctccgtttgtagcagagctattagtggcagtgataacaagtactagaataggaaaatggtgggtgcttgcaggagaagcagaatgtaactgcagcagt

SEQ ID NO: 46178 - DNA, 600 bp, Chicken  19866894286871_1
cacagggccaggtgtccctttgatttgccctgctcactgaaagcgctgcgttggcgaaatatctttccattttgtggctttatgcatttgcatgagggtaggaatcatttatcatgcagaccgaccagctaggagcctgtgttctgttttgaatgcagtccttctgacatttgctgaccatcgtaggtagagcaacacttgttccaggtgagtgggttcttgagtgattgattcagtgaaccatatccatccctgtctgctgtctctggtgcagatggctgtcatgcagtttgtctctcyctaagcattcccatgactkcatgcacgctgtgggcctttctgatcctgcaaactgggctgagtccttgaatgacagaacctacctcgtgcaggaagtgcttcagtctatggaatgcartgcagccttcaccaaaattagagggtgttcttccacgtggctgtgcaatttgttcgtaaaaacatacatctcatagagattttgcaaagtgtaacccaagacagggttgaatggctgggcaataaatctgccttaactgatttagatattgttagctggagattaatgggcagtttgggtgc

SEQ ID NO: 46179 - DNA, 600 bp, Chicken  19866894286871_2
ttgatttgccctgctcactgaaagcgctgcgttggcgaaatatctttccattttgtggctttatgcatttgcatgagggtaggaatcatttatcatgcagaccgaccagctaggagcctgtgttctgttttgaatgcagtccttctgacatttgctgaccatcgtaggtagagcaacacttgttccaggtgagtgggttcttgagtgattgattcagtgaaccatatccatccctgtctgctgtctctggtgcagatggctgtcatgcagtttgtctctcyctaagcattcccatgactkcatgcacgctgtgggcctttctgatcctgcaaactgggctgagtccttgaatgacagaacctacctcgtgcaggaagtgcttcagtctatggaatgcartgcagccttcaccaaaattagagggtgttcttccacgtggctgtgcaatttgttcgtaaaaacatacatctcatagagattttgcaaagtgtaacccaagacagggttgaatggctgggcaataaatctgccttaactgatttagatattgttagctggagattaatgggcagtttgggtgcttctcttcccctcgggctc

SEQ ID NO: 46180 - DNA, 600 bp, Chicken  19866894286871_3
gaccgaccagctaggagcctgtgttctgttttgaatgcagtccttctgacatttgctgaccatcgtaggtagagcaacacttgttccaggtgagtgggttcttgagtgattgattcagtgaaccatatccatccctgtctgctgtctctggtgcagatggctgtcatgcagtttgtctctcyctaagcattcccatgactkcatgcacgctgtgggcctttctgatcctgcaaactgggctgagtccttgaatgacagaacctacctcgtgcaggaagtgcttcagtctatggaatgcartgcagccttcaccaaaattagagggtgttcttccacgtggctgtgcaatttgttcgtaaaaacatacatctcatagagattttgcaaagtgtaacccaagacagggttgaatggctgggcaataaatctgccttaactgatttagatattgttagctggagattaatgggcagtttgggtgcttctcttcccctcgggctcctgctatcattgtagagtgaacaaagtgcattgagatggaaaggtgtgctgcagtaggactgggagactytgggatctgcctgcagtctgctcacctca

SEQ ID NO: 46181 - DNA, 600 bp, Chicken  19866894286871_4
caggaagtgcttcagtctatggaatgcartgcagccttcaccaaaattagagggtgttcttccacgtggctgtgcaatttgttcgtaaaaacatacatctcatagagattttgcaaagtgtaacccaagacagggttgaatggctgggcaataaatctgccttaactgatttagatattgttagctggagattaatgggcagtttgggtgcttctcttcccctcgggctcctgctatcattgtagagtgaacaaagtgcattgagatggaaaggtgtgctgcagtaggactgggagactytgggatctgcctgcagtctgctcacctcagctgccattcgtgtgtgtggacttggcagtcagctgtattgttktgtgttttcagaatggagaagcatccttgttcgaggtgaacatccgctacatcggaggactgctggctgcctactacttaactggagaagaggtttgtgtcagcagctctgtgtaccacactgttaccaaggctgagctgaaagggtttctccatcagcttttctctgagcatcggatgatctcaccataacaacaggctaaacctggtggtttttgtgcatattga

SEQ ID NO: 46182 - DNA, 562 bp, Chicken  19866894286871_5
gcaatttgttcgtaaaaacatacatctcatagagattttgcaaagtgtaacccaagacagggttgaatggctgggcaataaatctgccttaactgatttagatattgttagctggagattaatgggcagtttgggtgcttctcttcccctcgggctcctgctatcattgtagagtgaacaaagtgcattgagatggaaaggtgtgctgcagtaggactgggagactytgggatctgcctgcagtctgctcacctcagctgccattcgtgtgtgtggacttggcagtcagctgtattgttktgtgttttcagaatggagaagcatccttgttcgaggtgaacatccgctacatcggaggactgctggctgcctactacttaactggagaagaggtttgtgtcagcagctctgtgtaccacactgttaccaaggctgagctgaaagggtttctccatcagcttttctctgagcatcggatgatctcaccataacaacaggctaaacctggtggtttttgtgcatattgaaatgctgctaatattctttaattctcatgtaatta

SEQ ID NO: 46183 - DNA, 600 bp, Chicken  19866894286874_1
cttccttggaagaatatggtaaaaataagactggtagtgaaaggcagctttgtatcattttcaaaggaggtactgtcttgtgtgacaatagaagtataactagcctaaagttagatgtaatgtagagtggctacagctcatgtaacacttggcttcgactcaagactaaatgaatttagtgagcagtggcatatatatcttaaaaagaaaacagggcttgtacacatgtatctaagttgatcttgacttttacaactagcagatacaaagagcagcttagatgggatcaccctgcatctwagaaggacagtacacactttccttgctccctccatttccctcagttttgctaacattcctggtcaaatatgaacacttgctattgccaagctacccagtgtgcatactggtcagttcagtgggttggaataactggccaaaaccagcgtgccatgcctgcctgcatcattttatctgttgccagctgatgttgccacgacagatgtttgcttggctctgctccctcttctgtagcacttatcaacagtgtttgttgtctgactaactggaccatttttaacagtgaggaacagtgcccat

SEQ ID NO: 46184 - DNA, 599 bp, Chicken  19866894286877_1
  misc_feature (1)..(143): n is any nucleotide
nnnnnnnnnnnnnnnnnnnnnnnnnnnnnnnnnnnnnnnnnnnnnnnnnnnnnnnnnnnnnnnnnnnnnnnnnnnnnnnnnnnnnnnnnnnnnnnnnnnnnnnnnnnnnnnnnnnnnnnnnnnnnnnnnnnnnnnnnnnnnnnggagtgctaactgggctgtggccaaaagagttattccttttgtttctctggacacttcttaaataaaggaatctctggcatgagcaagaatgtatcttctttcataaaaggtgggactcgaaataggtttatttctgatactgagggggccttaatwgggggggaaaaggttgctttttaggactgaaataaagaaaataggacatcttcagttaatgctgccagaagagactgcattcttcaagctatgtaaatgagtagattttattctgtggatggaaattttactcaaaactatacgagtgtttttctgttgtctctccagtaaaagaagctgctattctgtgctcttgagttttcagataccttaagttaagaaaggtaaaaattgacgctggcactctttctttgcttcaagtgctttttttycccccccctgctattctgctgtatttt

SEQ ID NO: 46185 - DNA, 600 bp, Chicken  19866894286877_2
tatttctgatactgagggggccttaatggggggggaaaaggttgctttttaggactgaaataaagaaaataggacatcttcagttaatgctgccagaagagactgcattcttcaagctatgtaaatgagtagattttattctgtggatggaaattttactcaaaactatacgagtgtttttctgttgtctctccagtaaaagaagctgctattctgtgctcttgagttttcagataccttaagttaagaaaggtaaaaattgacgctggcactctttctttgcttcaagtgctttttttycccccccctgctattctgctgtattttgtttgtgtttccagtgtttgatcacttgtaaaatgtatcctacagttgtgaacaattaagatttgcttctaaggaacaaaaaatattataactattatcatagtaatttaaatttgcctttctcctgcactgaaataagtattttagtgagaaaagagcataaatcagggttgtaaagaattatctgtagaactgctttgtctcacagttgtgttttttccactccaaaactgctatgaaactatttcatcaagattttgcaatattggctct

SEQ ID NO: 46186 - DNA, 600 bp, Chicken  19866894286877_3
atttctgatactgagggggccttaatggggggggaaaaggttgctttttaggactgaaataaagaaaataggacatcttcagttaatgctgccagaagagactgcattcttcaagctatgtaaatgagtagattttattctgtggatggaaattttactcaaaactatacgagtgtttttctgttgtctctccagtaaaagaagctgctattctgtgctcttgagttttcagataccttaagttaagaaaggtaaaaattgacgctggcactctttctttgcttcaagtgctttttttyyccccccctgctattctgctgtattttgtttgtgtttccagtgtttgatcacttgtaaaatgtatcctacagttgtgaacaattaagatttgcttctaaggaacaaaaaatattataactattatcatagtaatttaaatttgcctttctcctgcactgaaataagtattttagtgagaaaagagcataaatcagggttgtaaagaattatctgtagaactgctttgtctcacagttgtgttttttccactccaaaactgctatgaaactatttcatcaagattttgcaatattggctctg

SEQ ID NO: 46187 - DNA, 600 bp, Chicken  19866894286879_1
gttaagtagcttatttagcatttctgaaccagtcatggggtgttgcacaagacatagtacttaatttttatgtggcatcctgtccagccactttagtgtgttacagactgtgagatacaactaaaggtgcatggactgatgaatgagaaactagactgaccacaaaaaggagcccctcaggacatttttaaaaatagtttagcagtgaattctaccttttattagtagggaatagttttatccagagcatatgtacaacttttttatatttgttaaatcttactataatattctgctgcrtttaatactttgtgtttttccactcaatttctcgggtaaattgctggggaatgtattccatatgatcccattctatcatgcttattgcagcagaaacgcttcaccaatacattttcatggcattgttcaaataatttgtttagtgtacctagaaaggcttaatttatgtggacttatctagaagtctggtagacacagacttctgttttactgaaaatggctgatcttctacacttgtctttcatctgggacatggggcttaatagaacagttgtcctagaatactgctgctctggatgt

SEQ ID NO: 46188 - DNA, 599 bp, Chicken  19866894286884_1
  misc_feature (1)..(188): n is any nucleotide
nnnnnnnnnnnnnnnnnnnnnnnnnnnnnnnnnnnnnnnnnnnnnnnnnnnnnnnnnnnnnnnnnnnnnnnnnnnnnnnnnnnnnnnnnnnnnnnnnnnnnnnnnnnnnnnnnnnnnnnnnnnnnnnnnnnnnnnnnnnnnnnnnnnnnnnnnnnnnnnnnnnnnnnnnnnnnnnnnnnnnnnnnnnnagtttgtggcttggcagtgacatcccagctgccgcctggcagctgccctaatgaaactaattggaggttcacctgcaatgtggcgagccctgcgaacagagattttgccttygactgttgaccttaaagtggaaaactgcagcgtgctggttttaaatggctcttaggctttattaagtggcttttggttggctgtactgtgtgatcattcttgtcytgtccttatggtgtggtcctgtgtatgcagtgctgacgctgaaagaaatccctactgtgcagatgatgccttgccagtccaacccctctgctgttcaggccatgccctattggagttcctaacacacatgctgatggatcataaaacagaacaatggcatccctgaattttgctattttgggyacaaaatcaga

SEQ ID NO: 46189 - DNA, 599 bp, Chicken  19866894286884_2
  misc_feature (1)..(83): n is any nucleotide
nnnnnnnnnnnnnnnnnnnnnnnnnnnnnnnnnnnnnnnnnnnnnnnnnnnnnnnnnnnnnnnnnnnnnnnnnnnnnnnnnnnagtttgtggcttggcagtgacatcccagctgccgcctggcagctgccctaatgaaactaattggaggttcacctgcaatgtggcgagccctgcgaacagagattttgccttygactgttgaccttaaagtggaaaactgcagcgtgctggttttaaatggctcttaggctttattaagtggcttttggttggctgtactgtgtgatcattcttgtcytgtccttatggtgtggtcctgtgtatgcagtgctgacgctgaaagaaatccctactgtgcagatgatgccttgccagtccaacccctctgctgttcaggccatgccctattggagttcctaacacacatgctgatggatcataaaacagaacaatggcatccctgaattttgctattttgggyacaaaatcagaagggcatgtacaagttgcattatgttttaggtttgtaagttccttctgcactgcagccctgctccttgttaagcacttcacarggtgcttgatgatccttttcag

SEQ ID NO: 46190 - DNA, 600 bp, Chicken  19866894286884_3
gattttgccttygactgttgaccttaaagtggaaaactgcagcgtgctggttttaaatggctcttaggctttattaagtggcttttggttggctgtactgtgtgatcattcttgtcytgtccttatggtgtggtcctgtgtatgcagtgctgacgctgaaagaaatccctactgtgcagatgatgccttgccagtccaacccctctgctgttcaggccatgccctattggagttcctaacacacatgctgatggatcataaaacagaacaatggcatccctgaattttgctattttgggyacaaaatcagaagggcatgtacaagttgcattatgttttaggtttgtaagttccttctgcactgcagccctgctccttgttaagcacttcacarggtgcttgatgatccttttcagagtgtccagactcatgccatccaggtgctttctgggatgttctgtatccatacgaccctctgatcaatcttgcttaaatgttgtatatcctgttataaccactgcacaggtctgcaagggggaagcagaaagtaacctcccttttaccaccactgtcttgcatcaaactcttctttaggattgc

SEQ ID NO: 46191 - DNA, 600 bp, Chicken  19866894286884_4
gtactgtgtgatcattcttgtcytgtccttatggtgtggtcctgtgtatgcagtgctgacgctgaaagaaatccctactgtgcagatgatgccttgccagtccaacccctctgctgttcaggccatgccctattggagttcctaacacacatgctgatggatcataaaacagaacaatggcatccctgaattttgctattttgggyacaaaatcagaagggcatgtacaagttgcattatgttttaggtttgtaagttccttctgcactgcagccctgctccttgttaagcacttcacarggtgcttgatgatccttttcagagtgtccagactcatgccatccaggtgctttctgggatgttctgtatccatacgaccctctgatcaatcttgcttaaatgttgtatatcctgttataaccactgcacaggtctgcaagggggaagcagaaagtaacctcccttttaccaccactgtcttgcatcaaactcttctttaggattgccttgcagagaggtgggtgctgggagcactgttgtctaccacggccatgtccagaattgtttgattttcccactttcaaattccgtagctgaaag

SEQ ID NO: 46192 - DNA, 599 bp, Chicken  19866894286891_1
  misc_feature (1)..(60): n is any nucleotide
nnnnnnnnnnnnnnnnnnnnnnnnnnnnnnnnnnnnnnnnnnnnnnnnnnnnnnnnnnnngacgtttcttttcctatactcagtttccttgcattgaaaggaaatatttggacttgtttcttttctttgtttttgttttggtcagagaagtaatagaaattcgtgtacaataacttcttgctcattctctgaagatgacgtgttctggtgggctgtgatgggtgtcatcgtgggggagccgtggtgatgagctctgccccggggtgacgagctgtgcatggcaagcaaagaaccacattkgagcagcgccgctgggcagggcccagaaacaacagatgtgcrgttctgcacgctccttccaatcyctttgtttggattgaattaggttctgctttgagcaggtggtaaagagtgactgcctggtcctgaaagagatggagagatatcacacccacctgcragaggctggcggcgtggaagccatagcctgaggggctgctgagcagtgcctggcacaaagcatgtttattgtcctggggctgtggaacgctggttaggtgtcttggtgcgtggggatatttgcagaagcactaagtgtt

SEQ ID NO: 46193 - DNA, 599 bp, Chicken  19866894286891_2
  misc_feature (1)..(18): n is any nucleotide
nnnnnnnnnnnnnnnnnngacgtttcttttcctatactcagtttccttgcattgaaaggaaatatttggacttgtttcttttctttgtttttgttttggtcagagaagtaatagaaattcgtgtacaataacttcttgctcattctctgaagatgacgtgttctggtgggctgtgatgggtgtcatcgtgggggagccgtggtgatgagctctgccccggggtgacgagctgtgcatggcaagcaaagaaccacattkgagcagcgccgctgggcagggcccagaaacaacagatgtgcrgttctgcacgctccttccaatcyctttgtttggattgaattaggttctgctttgagcaggtggtaaagagtgactgcctggtcctgaaagagatggagagatatcacacccacctgcragaggctggcggcgtggaagccatagcctgaggggctgctgagcagtgcctggcacaaagcatgtttattgtcctggggctgtggaacgctggttaggtgtcttggtgcgtggggatatttgcagaagcactaagtgttggcctgctgcatgctgctaatttaaaataaacaagtgctgcc

SEQ ID NO: 46194 - DNA, 600 bp, Chicken  19866894286891_3
ttcttttcctatactcagtttccttgcattgaaaggaaatatttggacttgtttcttttctttgtttttgttttggtcagagaagtaatagaaattcgtgtacaataacttcttgctcattctctgaagatgacgtgttctggtgggctgtgatgggtgtcatcgtgggggagccgtggtgatgagctctgccccggggtgacgagctgtgcatggcaagcaaagaaccacattkgagcagcgccgctgggcagggcccagaaacaacagatgtgcrgttctgcacgctccttccaatcyctttgtttggattgaattaggttctgctttgagcaggtggtaaagagtgactgcctggtcctgaaagagatggagagatatcacacccacctgcragaggctggcggcgtggaagccatagcctgaggggctgctgagcagtgcctggcacaaagcatgtttattgtcctggggctgtggaacgctggttaggtgtcttggtgcgtggggatatttgcagaagcactaagtgttggcctgctgcatgctgctaatttaaaataaacaagtgctgccctctcattttgaaagatgaacgcc

SEQ ID NO: 46195 - DNA, 600 bp, Chicken  19866894286891_4
tcgtgtacaataacttcttgctcattctctgaagatgacgtgttctggtgggctgtgatgggtgtcatcgtgggggagccgtggtgatgagctctgccccggggtgacgagctgtgcatggcaagcaaagaaccacattkgagcagcgccgctgggcagggcccagaaacaacagatgtgcrgttctgcacgctccttccaatcyctttgtttggattgaattaggttctgctttgagcaggtggtaaagagtgactgcctggtcctgaaagagatggagagatatcacacccacctgcragaggctggcggcgtggaagccatagcctgaggggctgctgagcagtgcctggcacaaagcatgtttattgtcctggggctgtggaacgctggttaggtgtcttggtgcgtggggatatttgcagaagcactaagtgttggcctgctgcatgctgctaatttaaaataaacaagtgctgccctctcattttgaaagatgaacgccctagagggatacattaatggagaaaatgaggaagcgttgtgtratttgaaggcgtaatgtaaagtaaatagtcctaaatgagtgctcaaaccctt

SEQ ID NO: 46196 - DNA, 600 bp, Chicken  19866894286891_5
tctgccccggggtgacgagctgtgcatggcaagcaaagaaccacattkgagcagcgccgctgggcagggcccagaaacaacagatgtgcrgttctgcacgctccttccaatcyctttgtttggattgaattaggttctgctttgagcaggtggtaaagagtgactgcctggtcctgaaagagatggagagatatcacacccacctgcragaggctggcggcgtggaagccatagcctgaggggctgctgagcagtgcctggcacaaagcatgtttattgtcctggggctgtggaacgctrgttaggtgtcttggtgcgtggggatatttgcagaagcactaagtgttggcctgctgcatgctgctaatttaaaataaacaagtgctgccctctcattttgaaagatgaacgccctagagggatacattaatggagaaaatgaggaagcgttgtgtratttgaaggcgtaatgtaaagtaaatagtcctaaatgagtgctcaaacccttgtctttgtagctccaagggatatgcagtgtgggaagggttatggtgatggaggctgatgatggaagcctcactggtaaagtcataatgtcgg

SEQ ID NO: 46197 - DNA, 600 bp, Chicken  19866894286891_6
agagtgactgcctggtcctgaaagagatggagagatatcacacccacctgcragaggctggcggcgtggaagccatagcctgaggggctgctgagcagtgcctggcacaaagcatgtttattgtcctggggctgtggaacgctggttaggtgtcttggtgcgtggggatatttgcagaagcactaagtgttggcctgctgcatgctgctaatttaaaataaacaagtgctgccctctcattttgaaagatgaacgccctagagggatacattaatggagaaaatgaggaagcgttgtgtratttgaaggcgtaatgtaaagtaaatagtcctaaatgagtgctcaaacccttgtctttgtagctccaagggatatgcagtgtgggaagggttatggtgatggaggctgatgatggaagcctcactggtaaagtcataatgtcggaggggtccaggtttggccaaagccacactcttgggaatcagtggttactgctcatcgttacccactttcattctctttttttgaacttaatcacgtagtgttttccacatctcttactgcagtgaggctttactgttggaaaagtcatccatggca

SEQ ID NO: 46198 - DNA, 600 bp, Chicken  19866894286897_1
cattaagctgttatacttattagggctattgtacaagaaattcatttcaatgcactttagatatgtcttctggagactaaagcatgtttgcattttcttcctgagcaagaaaagaaacaaaccaaaaagcaaaaacctggttgtgctaatttaacacactgtttgtgcaggcttctctatctattgtgtatttgaaggctggtgcatctctggatgtttgttagaagcacctggtgatacaaatgttgaagtataccctttggttctgtaacctggttgagctgatggggaggactaaawtgcagtgattggagtacctctagaaaaatctgaataagcagtaaggtgcttaacttacagcagcaaggttgctggtacctctgtagatgtgctaagtkcttaacactcctattggtggcaataaaataaagatgtggcagaggatgcagttatgaagtttactcttccacatcagatgattaggataacagtgctccttttactttacgatcccaggtgattttacatgtggaagaagttaatgctttcttctgtctgcaaagtagaaatgcatttttctgattacagagttcagttact

SEQ ID NO: 46199 - DNA, 600 bp, Chicken  19866894286897_2
tcctgagcaagaaaagaaacaaaccaaaaagcaaaaacctggttgtgctaatttaacacactgtttgtgcaggcttctctatctattgtgtatttgaaggctggtgcatctctggatgtttgttagaagcacctggtgatacaaatgttgaagtataccctttggttctgtaacctggttgagctgatggggaggactaaawtgcagtgattggagtacctctagaaaaatctgaataagcagtaaggtgcttaacttacagcagcaaggttgctggtacctctgtagatgtgctaagtkcttaacactcctattggtggcaataaaataaagatgtggcagaggatgcagttatgaagtttactcttccacatcagatgattaggataacagtgctccttttactttacgatcccaggtgattttacatgtggaagaagttaatgctttcttctgtctgcaaagtagaaatgcatttttctgattacagagttcagttacttttttaataagaagtgactaggaggcaaaaatgcaagatcataattagagcactgatttccctccactgtccttctgtacccactttctctttgtcct

SEQ ID NO: 46200 - DNA, 600 bp, Chicken  19866894286911_1
ggaagtgtctccagtgattaccagaaaacatgtaaaaaaactgatgaaaagatggaggaatctgttgatactcctgtgtcttttatagatgggtgttatgaaaggttgcaagagaacataacagccatgtctccaaagagaatgaataatgaagtatcttacgagtcagtaccaaaacaagctgtccttcaaaatctaaataatttgcaagataaacaagaaagctgcaacaagaaaagcatgatacagaagctgtttcacagaaatacagcctcctgttttgcagactctgaaatgacrgacttgaaaaaagagatacctcagcctctctcaaatagtggtgatcttcaggaggagaagttaagtttcagtgatggcttcaagagtagtagtggttcttggtcagcagcagaaaacataaagcttgaaaatcaaagaccaagctctgtcacggatgatgaagatactgaagaagggcagtataaagaagtagataataaagtccatgaagcactgaaacaagaaggtgaaaacctgtgcctaaatagatgtgaggaaaatctaagggcaacattttcctcaagcacaaaagtaagtata

SEQ ID NO: 46201 - DNA, 600 bp, Chicken  19866894286913_1
cgaaagcacttcaccttcttctactttggagattgataagtgtgctatatacatggttaagaaatatccttttcctcttgacaatgatctaaaaagcagaaaaatgaagcagtcttaaaaatgaggatcatatttatagtagttttctatgtttacttttctctgaaagttcagcagaaaatacgtggcctctgttgaggaggtggttgtaacatttgggagggatgttgagccattggttttcctttaaggaagtgatgtcttgagacagcttaccctaatggtcttccactttcccasgcagatttataaacatccagtatttgctcacctccttgtagcacttctgttttgttgctgttaatacatattacttatctactgcactgaggttgttgmtgtgaggaatggattgtaggatctagaaaacataggtgtcccccacatacattacaaggttttgagtgaagttttgccattaactattctaagatttatcagtacacttaagagtatttctgatcccttaaataaatgtgtaaacctttaaggttctttaacaatatagagtttagcaatttgttatttaaaacttccaca

SEQ ID NO: 46202 - DNA, 600 bp, Chicken  19866894286913_2
aaaaatgaagcagtcttaaaaatgaggatcatatttatagtagttttctatgtttacttttctctgaaagttcagcagaaaatacgtggcctctgttgaggaggtggttgtaacatttgggagggatgttgagccattggttttcctttaaggaagtgatgtcttgagacagcttaccctaatggtcttccactttcccasgcagatttataaacatccagtatttgctcacctccttgtagcacttctgttttgttgctgttaatacatattacttatctactgcactgaggttgttgmtgtgaggaatggattgtaggatctagaaaacataggtgtcccccacatacattacaaggttttgagtgaagttttgccattaactattctaagatttatcagtacacttaagagtatttctgatcccttaaataaatgtgtaaacctttaaggttctttaacaatatagagtttagcaatttgttatttaaaacttccacacaatgtagactgaatttctggaaatgttaacagtgatacagccccccagtagctgctgtctgcttttatttcatcatagtatgggctgtagagtctttg

SEQ ID NO: 46203 - DNA, 600 bp, Chicken  19866894286918_1
tcagacttcaaaacaacattcacacctcagctgttcctttaaatcccttttggttgttgcacctcgagtctaataccatcctgttggttaggactgaaacagttccatattctctgagcactggtcaagactttgtgctctgttcctcaaaaccatggaattatgagcatactgttaagcacccagacagcgtgagtgaaactaagtgttctgtttgtcttctgatagtcattccagtatttcagaggaaccaggtgtttaacagaatggtagtccctgggatgatttgtttctgtttcrgatgataatttgcacagcatttacttttcctctgttctattgcattcccagctatctgtggctgctcagaactaattagcagtcatgcaataaatccatttgctaattccctagaatctctgggatgcctctcatctatatatcctaccacagacacaatgaaacgttcctcattgattaccttacctacagcttgacagtaattctttcctgaagatgtaacagcctggctgaatttttcttgcttttcatgagaaaatttcaggggacattctttagaagaagtctgaatgatggcac

SEQ ID NO: 46204 - DNA, 600 bp, Chicken  19866894286919_1
cacgacaccgaggcttcgagtgtgttcagggaagggagctgcgataggtctggagcaccagaattacaaggagcagctcagggaggtgggtcagtctggagaaggctcaggacagaccctattgctccatacaactgcctaaagagagcttgtggtgaggtgggagtcagcctcttctcccacgtaactagcaataagaacagagagaatggcctcaagttgcaccagagggttcaggttggacgtcaggaaatacttctccaagagagtcaggtgctgaaacaggctgcccagggaggygatggagtcactgacyataacacaacagaaaacgcagcaataacaggggggtagcaaagtcctaggccacagcaagcaacgatacactcaaacacagcagctatagacacaagaaacaaaggaaaaaaaaaaaatctgcttacccttggaaggcctcaggtacacaggcatctccaacaagatccccttaactccactgccaacccttaaatgagggctgggaagggggtggatcctggctccagcccttccagtcactcaggtgacttatatatgtattgcatacacctgagctccccc

SEQ ID NO: 46205 - DNA, 600 bp, Chicken  19866894286919_2
cgagtgtgttcagggaagggagctgcgataggtctggagcaccagaattacaaggagcagctcagggaggtgggtcagtctggagaaggctcaggacagaccctattgctccatacaactgcctaaagagagcttgtggtgaggtgggagtcagcctcttctcccacgtaactagcaataagaacagagagaatggcctcaagttgcaccagagggttcaggttggacgtcaggaaatacttctccaagagagtcaggtgctgaaacaggctgcccagggaggygatggagtcactgacyataacacaacagaaaacgcagcaataacaggggggtagcaaagtcctaggccacagcaagcaacgatacactcaaacacagcagctatagacacaagaaacaaaggaaaaaaaaaaaatctgcttacccttggaaggcctcaggtacacaggcatctccaacaagatccccttaactccactgccaacccttaaatgagggctgggaagggggtggatcctggctccagcccttccagtcactcaggtgacttatatatgtattgcatacacctgagctcccccctgggctggccctgcc

SEQ ID NO: 46206 - DNA, 599 bp, Chicken  19866894286927_1
  misc_feature (1)..(65): n is any nucleotide
nnnnnnnnnnnnnnnnnnnnnnnnnnnnnnnnnnnnnnnnnnnnnnnnnnnnnnnnnnnnnnnnntgattcaggtaccatacagtttttcaggatgaaaactgttggagaccagtgctatactttctctggagctctattccttttgctattgagagaagataaatatgagctcatttcccagcgaagcacacaaaatataaaataaatattaccatatatggaaaggatttcatttcctgtaacagcatccaaacacccttaccaatgtttacttcactacaccaactcaattttattyttgggtaatggagtcagatcatcaattttacagggatattctctcaatgagctgtcaaatatatgcaaagatatttcagttggtgttactgagctatttgctggcctgtgtaagccgcagtgcatgaaacacaggcttaggataactatctcagcatggtgctccctgctcaaatgtaggatacattgagctgaaaagtgttatagcatttgcttaaatatcacatttcatcatagaatatctcaagttggaagagacccataaggattatcaagtctacctcctggctccacacaaga

SEQ ID NO: 46207 - DNA, 600 bp, Chicken  19866894286930_1
aagtgtaagtgtcatcttttgtgtcaacatgttgagtttcatgataactcaagtctgttggcattatcatactatactcaacaaataacaaaggcttccttgcagtgtgctctccttatacaacaaagcttttgtgctcaatccacggagctcctctctctgtccatcctcctcaatgtttttgaacccactggccaatttcacctgtatctgacaagagatcttaaaggtaatgaagctcttgtgacttttctaagagaaaaataaataaagaaataaataaaggcggccagttggtayagagacccgctaagaagaaaggctgcagcatgtgatcacacctcacttgataccagaaaacgcacacagatgagaatgttctaagaactccaaagaaaaagcatcaatcagagctttcaattaactctctatgggaaatcaagcctttctaagtattttttttttttttgatcatggaacgactygtatttattttacgacatatgaytcagattcagaggtgccagcttttaactaatatataaattaccttcatccttgaaaccaacagggacattgctgtatagtgtatattataat

SEQ ID NO: 46208 - DNA, 600 bp, Chicken  19866894286930_2
acccactggccaatttcacctgtatctgacaagagatcttaaaggtaatgaagctcttgtgacttttctaagagaaaaataaataaagaaataaataaaggcggccagttggtayagagacccgctaagaagaaaggctgcagcatgtgatcacacctcacttgataccagaaaacgcacacagatgagaatgttctaagaactccaaagaaaaagcatcaatcagagctttcaattaactctctatgggaaatcaagcctttctaagtattttttttttttttgatcatggaacgactygtatttattttacgacatatgaytcagattcagaggtgccagcttttaactaatatataaattaccttcatccttgaaaccaacagggacattgctgtatagtgtatattataatgcataattatagcttcagggcatcattttatgtgaaaatgtaacatataaaataaaagaaaattccgtttttattgcaatcagatttttgcatttaaagtgatcccgtacatgtggagaagttggtaaactgcctgctcaagcagcacagaaaacatggtcccatgcttatgttaagggctgtaa

SEQ ID NO: 46209 - DNA, 600 bp, Chicken  19866894286930_3
atctgacaagagatcttaaaggtaatgaagctcttgtgacttttctaagagaaaaataaataaagaaataaataaaggcggccagttggtayagagacccgctaagaagaaaggctgcagcatgtgatcacacctcacttgataccagaaaacgcacacagatgagaatgttctaagaactccaaagaaaaagcatcaatcagagctttcaattaactctctatgggaaatcaagcctttctaagtattttttttttttttgatcatggaacgactygtatttattttacgacatatgaytcagattcagaggtgccagcttttaactaatatataaattaccttcatccttgaaaccaacagggacattgctgtatagtgtatattataatgcataattatagcttcagggcatcattttatgtgaaaatgtaacatataaaataaaagaaaattccgtttttattgcaatcagatttttgcatttaaagtgatcccgtacatgtggagaagttggtaaactgcctgctcaagcagcacagaaaacatggtcccatgcttatgttaagggctgtaagattacaacttttggtttatttc

SEQ ID NO: 46210 - DNA, 600 bp, Chicken  19866894286946_1
ctatgatttctacatcagtatcaatcatatattaattctgtctttacctgaactgatgcaaaatcattgataatatgtattagtgcagactaatttgtacttagtgacatgtagttttgttttgtcatgaaaaatatatagaattgtaaagccgagtttctgatatctttaacttccaagaattgcaaatgcctgattctctgtcatggtaaaactgctatttaaaaggctttattcccttactgcacgtgcacaaattgtggctcggtgtatcaaggaacattttgaatagacagttcrgtgctgatagcataaaagtgttctaaatagatatttcagattacccagaaaaaaggtaaattggattcctgtagacaattgatctgttcatattcctaactactaaaaaataaattattccactaaatatattattttgatgtgtattctcctctagttttaatatttatttacttatttatagcacatctgctcttagctatagttccatcagctacaatactattctggtatatatcatggacggttgtgttcatggtacagtaatttgaaaatctgcacttggaacgagtgagagag

SEQ ID NO: 46211 - DNA, 600 bp, Chicken  19866894286947_1
taggaggggaacagatagttcaaacttgagcagtaagtggaagaaatgaggcttgaagccaaagactgggatgcagtgcaccaaaacttaggtatgatatctgaatttaccagctattttgattgcctccagagggagcctcaaacagtttaagtacttcatggaaagatatgctgttaggtggcacaagtctgaaaccaaatcttcctactcctaggcctgtaactgctctgggatatcccaaagtagtatatctgcagccatatctagaggtgcaacagatctatagtgaaatatttrcggttgaaagttaaagtttgtacaaatttttgatgagactggttggtaggcagaggtgtaaaaaggaaatcccaaagttgctgaaaatctcctctcacggatctgcatacctgtaggaagttaaaaggattcaggaaatttaccttttagttgcaagatctgtgtacacacaccctcgttagtacctgctcaaaaatatacatcaaaaacccttaatacaatacaagattgccaatcctgcctacagtaagcatagcatatcaattgcctaggcagtgtccttgggaaaagatgttcctg

SEQ ID NO: 46212 - DNA, 599 bp, Chicken  19866894286950_1
  misc_feature (1)..(207): n is any nucleotide
nnnnnnnnnnnnnnnnnnnnnnnnnnnnnnnnnnnnnnnnnnnnnnnnnnnnnnnnnnnnnnnnnnnnnnnnnnnnnnnnnnnnnnnnnnnnnnnnnnnnnnnnnnnnnnnnnnnnnnnnnnnnnnnnnnnnnnnnnnnnnnnnnnnnnnnnnnnnnnnnnnnnnnnnnnnnnnnnnnnnnnnnnnnnnnnnnnnnnnnnnnnnnnntttctcattccaacctcccatgggcattccaattcacggaaaagaacaaaaacattaattttgctttgagctcatgaatcctaaaacccatgyatattcacaacaaaggaatacaggcatcttcttttagaagcattgttcttctaaacagagggtccttaacagcttagcagaactgctttaatacttactctgtgtcacctgaagaagagaggacacagagaaccatttctgtcacagcatgaagtgccatacttgccagctttccagaacacacaggatgctttgaccccagcttctctgggaataaaccgtgtaggagactctcatcctctattaaggcatggtgtgatttctttaagaacagacactgggaagctcttttcagcaga

SEQ ID NO: 46213 - DNA, 600 bp, Chicken  19866894286950_2
tacttactctgtgtcacctgaagaagagaggacacagagaaccatttctgtcacagcatgaagtgccatacttgccagctttccagaacacacaggatgctttgaccccagcttctctgggaataaaccgtgtaggagactctcatcctctattaaggcatggtgtgatttctttaagaacagacactgggaagctcttttcagcagacacaaaaccgtatttctgtgaaaagaacattcacacgtacaagtgtcctagctgcattacttatcttcttcctgagacctaacagatacttmttttttctaccttagaagacgttcaatgggaaccaaaggataatttctaatgtcgactgatgctgtattaaagaaattatatccacctgtgcttctttaacatgctgataaagcaaggatttaaaagatagcatcaatagatggagaagcagtctagtacatttctgttacaataactatcctcttaaggcgtaatgacagcattgagtctactgctttgaaagacagaattacacagcrtatgaccagaatattatcgcaggactacatgtgagtgttgcaaaagtttgcaagtttaaa

SEQ ID NO: 46214 - DNA, 600 bp, Chicken  19866894286950_3
acacgtacaagtgtcctagctgcattacttatcttcttcctgagacctaacagatacttmttttttctaccttagaagacgttcaatgggaaccaaaggataatttctaatgtcgactgatgctgtattaaagaaattatatccacctgtgcttctttaacatgctgataaagcaaggatttaaaagatagcatcaatagatggagaagcagtctagtacatttctgttacaataactatcctcttaaggcgtaatgacagcattgagtctactgctttgaaagacagaattacacagcrtatgaccagaatattatcgcaggactacatgtgagtgttgcaaaagtttgcaagtttaaaagactacagatttttttattcttcagaggaagcactctaaacccagattataatgcatatccaaaaagtcctatttacccttctgttgacagatgccttagtttgagattaaataaaacccaaagactatctacagttgatcctgatggatgcctagtttcattaaactgctcccagaagccacgaaaacaaaagcaacggtctgctagaatctaattctactagaattctaatactaga

SEQ ID NO: 46215 - DNA, 600 bp, Chicken  19866894286954_1
aaatatgtatgcatggttaccaaagggagcacagagctcccttggaagtctccctcggagctgttacatttcacatacctcaaagtttgtcattacattttattcaaatccttaagttttcaaagcatgtccacttctaaatgaattatcttgtattccagtctcttgctaaggtaaacgtaaagtaaatactaaagtaaaagtcccagttcaccaaaatactacagatgaaaactggaggtgtctgcaaagattcaagtgagtactgctactgctcacttctgatgtataggcaaaatrcctgtgtataattctagggcacaagagtcagtagttggagcagattggcttttgctgctttttgtagggagttaccctcgcagaggtgcaaggtacagtgcagccagtatctcctgtgctaagagaggaaatttcacatatctcatgaaaatatgtctgttcagtacaattggcagatatcgaagaaataaatcaatttgattgtgttgatttcaatcaaagtacaggaaataaatcattgtaacaccataagtaaaggctattctggttacaaatcccagtgagttagctttctaggaa

SEQ ID NO: 46216 - DNA, 600 bp, Chicken  19866894286960_1
caggaatctgaagtgctttgtggtttgcagtcaccactttagataacctctgtatgtgttcatgaaggaccctaaaaacaaacacaaaaaacaagaataagaagcaagcagcagccagtaggctccagaaatttcccactagtttggtatactacaggagagatcttcagaaatgtgtatcatgatggtcccagctaatggacattaggtcaataagcaacacagaggattttccccatacaatcaagtacaactacgaagtcagtaaagcattcaaagaagtttttctataaaatacakcggaaatcctagatggaaagtactgtaccaaaacagaaaatggaaggaaggagtactgaaacagattttattcattctytcagyatacagactttcagttctgtgtgcatcttgagtcattacattttttaactttattctgctcctgtggtctgctgcaaacacaaaccttcacacatgatgctaaagtacttcttggttcttgtacaagacattctgaaatgaaacataagtttgtagggcacagctgccttaagagaatcaagtctgtcacattaagaccaaaaagcagccatctgc

SEQ ID NO: 46217 - DNA, 600 bp, Chicken  19866894286960_2
aaacacaaaaaacaagaataagaagcaagcagcagccagtaggctccagaaatttcccactagtttggtatactacaggagagatcttcagaaatgtgtatcatgatggtcccagctaatggacattaggtcaataagcaacacagaggattttccccatacaatcaagtacaactacgaagtcagtaaagcattcaaagaagtttttctataaaatacakcggaaatcctagatggaaagtactgtaccaaaacagaaaatggaaggaaggagtactgaaacagattttattcattctytcagyatacagactttcagttctgtgtgcatcttgagtcattacattttttaactttattctgctcctgtggtctgctgcaaacacaaaccttcacacatgatgctaaagtacttcttggttcttgtacaagacattctgaaatgaaacataagtttgtagggcacagctgccttaagagaatcaagtctgtcacattaagaccaaaaagcagccatctgcaccaatagcaaaaaagaaaccacatacttcaaactactgtgacttactggtcacgtaaaatatctccrtcctgattagg

SEQ ID NO: 46218 - DNA, 600 bp, Chicken  19866894286960_3
caaaaaacaagaataagaagcaagcagcagccagtaggctccagaaatttcccactagtttggtatactacaggagagatcttcagaaatgtgtatcatgatggtcccagctaatggacattaggtcaataagcaacacagaggattttccccatacaatcaagtacaactacgaagtcagtaaagcattcaaagaagtttttctataaaatacakcggaaatcctagatggaaagtactgtaccaaaacagaaaatggaaggaaggagtactgaaacagattttattcattctytcagyatacagactttcagttctgtgtgcatcttgagtcattacattttttaactttattctgctcctgtggtctgctgcaaacacaaaccttcacacatgatgctaaagtacttcttggttcttgtacaagacattctgaaatgaaacataagtttgtagggcacagctgccttaagagaatcaagtctgtcacattaagaccaaaaagcagccatctgcaccaatagcaaaaaagaaaccacatacttcaaactactgtgacttactggtcacgtaaaatatctccrtcctgattagggtaga

SEQ ID NO: 46219 - DNA, 473 bp, Chicken  19866894286960_4
tattcattctytcagyatacagactttcagttctgtgtgcatcttgagtcattacattttttaactttattctgctcctgtggtctgctgcaaacacaaaccttcacacatgatgctaaagtacttcttggttcttgtacaagacattctgaaatgaaacataagtttgtagggcacagctgccttaagagaatcaagtctgtcacattaagaccaaaaagcagccatctgcaccaatagcaaaaaagaaaccacatacttcaaactactgtgacttactggtcacgtaaaatatctccrtcctgattagggtagaatgcaagtttgaaaatacgattcatcacactgcgctctatagctaattgtgcatcctggaagctgttcttcactggcattctgccatatggcatcctgagccattgctccatataagaactgaagaaaatcttcaacttgggctgttttatcatctg

SEQ ID NO: 46220 - DNA, 599 bp, Chicken  19866894286961_1
  misc_feature (1)..(27): n is any nucleotide
nnnnnnnnnnnnnnnnnnnnnnnnnnncagttctgtgtgcatcttgagtcattacattttttaactttattctgctcctgtggtctgctgcaaacacaaaccttcacacatgatgctaaagtacttcttggttcttgtacaagacattctgaaatgaaacataagtttgtagggcacagctgccttaagagaatcaagtctgtcacattaagaccaaaaagcagccatctgcaccaatagcaaaaaagaaaccacatacttcaaactactgtgacttactggtcacgtaaaatatctccrtcctgattagggtagaatgcaagtttgaaaatacgattcatcacactgcgctctatagctaattgtgcatcctgaagctgttcttcactggcattctgccatatggcatcctgagccattgctccatataagaactgaagaaaatcttcaacttgggctgttttatcatctgctgccgtaagtttctggaaatctgatagaaaaagagaacacattcagttaaggttaaaaaaaaaaaaaaaacattatttccaataggtttttctggaaagaagagctcagaatccacgttgtacctc

SEQ ID NO: 46221 - DNA, 599 bp, Chicken  19866894286971_1
  misc_feature (1)..(65): n is any nucleotide
nnnnnnnnnnnnnnnnnnnnnnnnnnnnnnnnnnnnnnnnnnnnnnnnnnnnnnnnnnnnnnnnntctgagccctggagaggttcaggggagcacagaagggttcagaagctcctccttttaccggcagcccgatgagatgcaggcagcaggaaggaacaccatctctccaagtgaaaccagctatgagctctgcctgcctctgagactagtgccctaaaattgccttgccagaatgctcccctgtgccttcccagctacacttctgttctcagagaggaagactggtttatcagtgtartcctagccttcgctgtggtccaagatctgttgaaccatgtgatggaggagaagccatcaaccttccaatcrtcacacccagaagagtatgataaggtatgmcaggagtgcagagcacttcacttcatkagagggtgcagtttcagtaggaccaaggggaggtggcaggtgatagggataaggggagaccctgtgtcccagcagaaaggttttcacaagtgtcagggagggcaatgtcagcagagagaggagacagagcctggatcagcccaggtacaaggaaagatggggagaatatag

SEQ ID NO: 46222 - DNA, 600 bp, Chicken  19866894286971_2
ccctggagaggttcaggggagcacagaagggttcagaagctcctccttttaccggcagcccgatgagatgcaggcagcaggaaggaacaccatctctccaagtgaaaccagctatgagctctgcctgcctctgagactagtgccctaaaattgccttgccagaatgctcccctgtgccttcccagctacacttctgttctcagagaggaagactggtttatcagtgtartcctagccttcgctgtggtccaagatctgttgaaccatgtgatggaggagaagccatcaaccttccaatcrtcacacccagaagagtatgataaggtatgmcaggagtgcagagcacttcacttcatkagagggtgcagtttcagtaggaccaaggggaggtggcaggtgatagggataaggggagaccctgtgtcccagcagaaaggttttcacaagtgtcagggagggcaatgtcagcagagagaggagacagagcctggatcagcccaggtacaaggaaagatggggagaatatagagaggggagacggaaggaagaggactggtagagcagtagtcactgcgacaatgcatccatggagggtcttga

SEQ ID NO: 46223 - DNA, 600 bp, Chicken  19866894286971_3
gttcagaagctcctccttttaccggcagcccgatgagatgcaggcagcaggaaggaacaccatctctccaagtgaaaccagctatgagctctgcctgcctctgagactagtgccctaaaattgccttgccagaatgctcccctgtgccttcccagctacacttctgttctcagagaggaagactggtttatcagtgtartcctagccttcgctgtggtccaagatctgttgaaccatgtgatggaggagaagccatcaaccttccaatcrtcacacccagaagagtatgataaggtatgmcaggagtgcagagcacttcacttcatkagagggtgcagtttcagtaggaccaaggggaggtggcaggtgatagggataaggggagaccctgtgtcccagcagaaaggttttcacaagtgtcagggagggcaatgtcagcagagagaggagacagagcctggatcagcccaggtacaaggaaagatggggagaatatagagaggggagacggaaggaagaggactggtagagcagtagtcactgcgacaatgcatccatggagggtcttgaaagatagaataaatggtttcaagctgagag

SEQ ID NO: 46224 - DNA, 600 bp, Chicken  19866894286971_4
gcccgatgagatgcaggcagcaggaaggaacaccatctctccaagtgaaaccagctatgagctctgcctgcctctgagactagtgccctaaaattgccttgccagaatgctcccctgtgccttcccagctacacttctgttctcagagaggaagactggtttatcagtgtartcctagccttcgctgtggtccaagatctgttgaaccatgtgatggaggagaagccatcaaccttccaatcrtcacacccagaagagtatgataaggtatgmcaggagtgcagagcacttcacttcatkagagggtgcagtttcagtaggaccaaggggaggtggcaggtgatagggataaggggagaccctgtgtcccagcagaaaggttttcacaagtgtcagggagggcaatgtcagcagagagaggagacagagcctggatcagcccaggtacaaggaaagatggggagaatatagagaggggagacggaaggaagaggactggtagagcagtagtcactgcgacaatgcatccatggagggtcttgaaagatagaataaatggtttcaagctgagagatagaaaagttaagacggagtttttgc

SEQ ID NO: 46225 - DNA, 600 bp, Chicken  19866894286979_1
gccctgggcagcccgttccatgcccaccgccctctggtacagaccctgtccctcacccccagctgcccctcccctgacacagctctatgccgttccctcgggccctgtcgctgtcacacagagcagagctcagcgctgcccctccgctccctgtgaggagctgcagccgccatgaggcctcccctcagctcctctgctctgcactgagcaaacacagggacttcagccgctcctcacacgccttgccctccagacccttccccatctttatagcctcctttgggtgccctccattagttwtatgccttttatgccttcacccatccagtgtgacagcagtcactgctagcactccatcacttcctatgaccgtgtcccagtgctgctgtgrcagaaacccacgctgctgatgtcagtgtgggccctactgccagmgcagctgcaagaggagtgtggccaagcctggcccagtgtctgtgcctggtataaggtgcttaggatacaacgtaccagatacggccatagctgtgtcagtttacaccagtgcccgtattgataagtttttttctctgtagataatacagtcaattttcctctact

SEQ ID NO: 46226 - DNA, 600 bp, Chicken  19866894286979_2
gttccctcgggccctgtcgctgtcacacagagcagagctcagcgctgcccctccgctccctgtgaggagctgcagccgccatgaggcctcccctcagctcctctgctctgcactgagcaaacacagggacttcagccgctcctcacacgccttgccctccagacccttccccatctttatagcctcctttgggtgccctccattagttwtatgccttttatgccttcacccatccagtgtgacagcagtcactgctagcactccatcacttcctatgaccgtgtcccagtgctgctgtgrcagaaacccacgctgctgatgtcagtgtgggccctactgccagmgcagctgcaagaggagtgtggccaagcctggcccagtgtctgtgcctggtataaggtgcttaggatacaacgtaccagatacggccatagctgtgtcagtttacaccagtgcccgtattgataagtttttttctctgtagataatacagtcaattttcctctacttctgcctttagaaagaatgtaaatcaccatagttaaaatcactgggccttgtaaaaacctgcctgtgcccagaaaaccaagcgtcggagct

SEQ ID NO: 46227 - DNA, 600 bp, Chicken  19866894286979_3
ctgcccctccgctccctgtgaggagctgcagccgccatgaggcctcccctcagctcctctgctctgcactgagcaaacacagggacttcagccgctcctcacacgccttgccctccagacccttccccatctttatagcctcctttgggtgccctccattagttwtatgccttttatgccttcacccatccagtgtgacagcagtcactgctagcactccatcacttcctatgaccgtgtcccagtgctgctgtgrcagaaacccacgctgctgatgtcagtgtgggccctactgccagmgcagctgcaagaggagtgtggccaagcctggcccagtgtctgtgcctggtataaggtgcttaggatacaacgtaccagatacggccatagctgtgtcagtttacaccagtgcccgtattgataagtttttttctctgtagataatacagtcaattttcctctacttctgcctttagaaagaatgtaaatcaccatagttaaaatcactgggccttgtaaaaacctgcctgtgcccagaaaaccaagcgtcggagcttgcctggagctgaggaagaagtggcatctttttcaataaattta

SEQ ID NO: 46228 - DNA, 600 bp, Chicken  19866894286980_1
cagtcagttgtcctggacagcatacgatggcagtaacttgatactatactgctctaattccttaacaggatatgttctgaactgtaggaaagtacaaaatgtttccatctaaatgctagatttcacctcactgtggaggtatttatttgtacggtatcgtgtggtagacagtcttttgtgtcagtcaagagctagtgatttgggaagcatcaaatttccccctagtatgaagtcatacagtcaagacaccgaagaagttatcattttactggagttgaggtcagttatagccacaagttygcttttaaaggtaccatttgtataggtatctggactggtgtcagtgtggacccctcagaagtgactcacctgttgggtcttcagttacagccctgctgttctcagccttctcttaccctgggcttacagggtaccagtttgggttcagcttgagggggggagggaaggacttgatggcccaggctgtgtggtttgtttgagggtaactggaattgtttcatatctaaagagtcttttgtctccagacgtgttcaaatacccgatcactaacaaaacatgtgcttaaaacctactttggag

SEQ ID NO: 46229 - DNA, 600 bp, Chicken  19866894287005_1
aatctatcatattaaaaatcttaagtaaaataatatacttcatgacaaatactagtaagttaatacattattaagcaagaaatgccacactccaagtgttgggtttttttaatacattaaagtatggacaagtatccactgaatttccaatacagacaaatatccactgaatttccatagtctttggtgctggcaccaagctccagtgataatgggagactggtttatgaacaagctgcaaagtactgaaagcagagttacaaagagaagaacgggaggttgagtcagagtttctgggargtattctgagcttctttcattccatttaaaccagctgaaaaatgttttgttttgtttttttcatataagtttatagtttcttctagttgatactgtaggacactgactgcaataagttatttctgccaagcgtaagtgcttggtaaagaggatttgagttaactttcaataatcagtatgttgacttttggctagcattgtcatcatttctggtggagtttattttgacattatttctcaacactgcaataaaccttgagtctaaaattgtttatatttcgtatagcagttaataaatca

SEQ ID NO: 46230 - DNA, 600 bp, Chicken  19866894287005_2
taaagaggatttgagttaactttcaataatcagtatgttgacttttggctagcattgtcatcatttctggtggagtttattttgacattatttctcaacactgcaataaaccttgagtctaaaattgtttatatttcgtatagcagttaataaatcagactgaatttacaaatgctctgctattctcgtgctccaactctatgaggcagaaccaaagaaatttttcattcactgcttttgagatttccagaattaggaggttgctgctgattttaagacattctgaggcatacctggctkgtttgccagcaaccatgtattagttcagtcatcctagctatttatcaatattgtggaaactgtgtaactgcctttataaatctgcccattaattatkaggtatggttattgctgagtaatgaaacagtggccagcggaaaatgctggtgaagccacagctgtttttctcacaggatgcttttgttgcatcacttcatgctcattcagccagtgacaactgctctgactgtttgtgcatttgttccacaactgcctctgttattcatccagagctcattcataactaatctgcaaatcctc

SEQ ID NO: 46231 - DNA, 600 bp, Chicken  19866894287005_3
acactgcaataaaccttgagtctaaaattgtttatatttcgtatagcagttaataaatcagactgaatttacaaatgctctgctattctcgtgctccaactctatgaggcagaaccaaagaaatttttcattcactgcttttgagatttccagaattaggaggttgctgctgattttaagacattctgaggcatacctggctkgtttgccagcaaccatgtattagttcagtcatcctagctatttatcaatattgtggaaactgtgtaactgcctttataaatctgcccattaattatkaggtatggttattgctgagtaatgaaacagtggccagcggaaaatgctggtgaagccacagctgtttttctcacaggatgcttttgttgcatcacttcatgctcattcagccagtgacaactgctctgactgtttgtgcatttgttccacaactgcctctgttattcatccagagctcattcataactaatctgcaaatcctcattcccttctccttatggtctctctgtagaactcctcaaagtgcacacatggttagatatagtggtgaggcaggacagcttctcctgtgtgcatttt

SEQ ID NO: 46232 - DNA, 580 bp, Chicken  19866894287005_4
atattcagacagccagcactagcaagcccttgttcttcctctcattttcagtctgttccatctgtgtggagaacaaactgccacttttgtgtctgtgctgttggctaagctcggttttagtcctttctggaagacatataacaggaggttataatagagagaatcatttggattggaagagacctcctcaaaggtaatctagtacaaccccaatgcaatgaacagggacatctacagctagatcaggttgctaggagcctgggccagtcttaccttgaatgtctccaaggacagggcttyrgattaacctgaacaacggcatggtgtatggaaagagaagtatctttccaaagcccgcaactcaaaagctgacataagggagattggaagaggatcctgctgtatatacacctcctcaatgggagagaagtagacatacagaggcaaccacartgctataatgcaggagcacttattttcttcttttacagagaggagcatagtggtagtcaagtgtttactcactgtaggagcgtaggtgcactgggtacctggttgctgaggtgatctgaacaatcac

SEQ ID NO: 46233 - DNA, 579 bp, Chicken  19866894287005_5
tattcagacagccagcactagcaagcccttgttcttcctctcattttcagtctgttccatctgtgtggagaacaaactgccacttttgtgtctgtgctgttggctaagctcggttttagtcctttctggaagacatataacaggaggttataatagagagaatcatttggattggaagagacctcctcaaaggtaatctagtacaaccccaatgcaatgaacagggacatctacagctagatcaggttgctaggagcctgggccagtcttaccttgaatgtctccaaggacagggcttyrgattaacctgaacaacggcatggtgtatggaaagagaagtatctttccaaagcccgcaactcaaaagctgacataagggagattggaagaggatcctgctgtatatacacctcctcaatgggagagaagtagacatacagaggcaaccacartgctataatgcaggagcacttattttcttcttttacagagaggagcatagtggtagtcaagtgtttactcactgtaggagcgtaggtgcactgggtacctggttgctgaggtgatctgaacaatcac

SEQ ID NO: 46234 - DNA, 427 bp, Chicken  19866894287005_6
atagagagaatcatttggattggaagagacctcctcaaaggtaatctagtacaaccccaatgcaatgaacagggacatctacagctagatcaggttgctaggagcctgggccagtcttaccttgaatgtctccaaggacagggcttyrgattaacctgaacaacggcatggtgtatggaaagagaagtatctttccaaagcccgcaactcaaaagctgacataagggagattggaagaggatcctgctgtatatacacctcctcaatgggagagaagtagacatacagaggcaaccacartgctataatgcaggagcacttattttcttcttttacagagaggagcatagtggtagtcaagtgtttactcactgtaggagcgtaggtgcactgggtacctggttgctgaggtgatctgaacaatcac

SEQ ID NO: 46235 - DNA, 600 bp, Chicken  19866894287006_1
tgaaaacatacatttgacacagaatctcaatatacagaggaactgccttccctgctggtctcgttcaacatccttttcttcagaaccaccatgctgaggtgctggggtgaaaccataaagcactcatgtggaagaggatatttcatcttgagtgaagggaatggcttctccccagaggcagaaatgtgtttgacaaaaagtactatgtttttgaaaaaagattttgctttttgaagatggtgcaaagtaggaatttcacttctacatccatttttagccagattgtgatcttttattgcytttcttctacacattgataaagcaaatgctcccttcagagttgtttaccctcaatagtgcagagccaagcagttgttttaattacacggttttctgtagaaaagggcatttccctaatactgttcttgcttcacgaccaaacagattgagaactttagtgcagaaatgactgtgagtcatcactgaaaacaaaaccagcccaaaataaatagaaatgtggctgatactcgacccagatcacgagtaccctatcactgttgctgatcaacagagtcacaaatggaaacctatccatccatc

SEQ ID NO: 46236 - DNA, 600 bp, Chicken  19866894287006_2
cttctacacattgataaagcaaatgctcccttcagagttgtttaccctcaatagtgcagagccaagcagttgttttaattacacggttttctgtagaaaagggcatttccctaatactgttcttgcttcacgaccaaacagattgagaactttagtgcagaaatgactgtgagtcatcactgaaaacaaaaccagcccaaaataaatagaaatgtggctgatactcgacccagatcacgagtaccctatcactgttgctgatcaacagagtcacaaatggaaacctatccatccatcaascaaaggagtgtttgccatctcacygaatcactctgtatatctccagttggagcgtcrcaacagcattggcagtgcaggtttggtaaattggatacatgtccaagttaaaaagatatgcatgaccttaacagccatgctactgcaaagcaccctctgggcacttgcataactttgggaaaaatggaggaaaagagaaaaggaaaacgatatggtaaactcagctagataaagtttcatttgtcaaagaactgttgaggaaaacggctgatgcattcccggctgttgtatagtgtattacag

SEQ ID NO: 46237 - DNA, 600 bp, Chicken  19866894287006_3
gctcccttcagagttgtttaccctcaatagtgcagagccaagcagttgttttaattacacggttttctgtagaaaagggcatttccctaatactgttcttgcttcacgaccaaacagattgagaactttagtgcagaaatgactgtgagtcatcactgaaaacaaaaccagcccaaaataaatagaaatgtggctgatactcgacccagatcacgagtaccctatcactgttgctgatcaacagagtcacaaatggaaacctatccatccatcaascaaaggagtgtttgccatctcacygaatcactctgtatatctccagttggagcgtcrcaacagcattggcagtgcaggtttggtaaattggatacatgtccaagttaaaaagatatgcatgaccttaacagccatgctactgcaaagcaccctctgggcacttgcataactttgggaaaaatggaggaaaagagaaaaggaaaacgatatggtaaactcagctagataaagtttcatttgtcaaagaactgttgaggaaaacggctgatgcattcccggctgttgtatagtgtattacagaagcaatctatttttgttctgcta

SEQ ID NO: 46238 - DNA, 600 bp, Chicken  19866894287006_4
agagccaagcagttgttttaattacacggttttctgtagaaaagggcatttccctaatactgttcttgcttcacgaccaaacagattgagaactttagtgcagaaatgactgtgagtcatcactgaaaacaaaaccagcccaaaataaatagaaatgtggctgatactcgacccagatcacgagtaccctatcactgttgctgatcaacagagtcacaaatggaaacctatccatccatcaascaaaggagtgtttgccatctcacygaatcactctgtatatctccagttggagcgtcrcaacagcattggcagtgcaggtttggtaaattggatacatgtccaagttaaaaagatatgcatgaccttaacagccatgctactgcaaagcaccctctgggcacttgcataactttgggaaaaatggaggaaaagagaaaaggaaaacgatatggtaaactcagctagataaagtttcatttgtcaaagaactgttgaggaaaacggctgatgcattcccggctgttgtatagtgtattacagaagcaatctatttttgttctgctattatgccatggagaattcatctctctgcaacag

SEQ ID NO: 46239 - DNA, 599 bp, Chicken  19866894287018_1
  misc_feature (1)..(130): n is any nucleotide
nnnnnnnnnnnnnnnnnnnnnnnnnnnnnnnnnnnnnnnnnnnnnnnnnnnnnnnnnnnnnnnnnnnnnnnnnnnnnnnnnnnnnnnnnnnnnnnnnnnnnnnnnnnnnnnnnnnnnnnnnnnnnnnnnncacatccataccaatccttacattgaagtagttcccagggtgtgagtggaacaccctacactacgctaggtgttgtgtagtgacaaaggaaaacacgctcccaaaatggaatttcacatatttttgtttgcacccattacctcctgtcttggtacaactaagaaagatcygtctctctccctctcatcagacatttctatacccgaataacatcccctctgagccttctcttctccaagcctctcctcacatgaaagatgctccagtcccctagccagcttagtggccctttgctggactcactcccgtackggggagtcccaaactggaatgtctggaaaaacacagacccagatctttcaactgatatatacaaaacatgctgctcccagaaaagcactcttgtattgaaatatcgacaayggtaaagacttttctgctcttgctaagacaccctatctgcagccaa

SEQ ID NO: 46240 - DNA, 600 bp, Chicken  19866894287018_2
aatccttacattgaagtagttcccagggtgtgagtggaacaccctacactacgctaggtgttgtgtagtgacaaaggaaaacacgctcccaaaatggaatttcacatatttttgtttgcacccattacctcctgtcttggtacaactaagaaagatcygtctctctccctctcatcagacatttctatacccgaataacatcccctctgagccttctcttctccaagcctctcctcacatgaaagatgctccagtcccctagccagcttagtggccctttgctggactcactcccgtackggggagtcccaaactggaatgtctggaaaaacacagacccagatctttcaactgatatatacaaaacatgctgctcccagaaaagcactcttgtattgaaatatcgacaayggtaaagacttttctgctcttgctaagacaccctatctgcagccaatcctyaatctcactygaacaactcctccccagccaactcatgtagcaagccccaagaacttggcaaagagcaaagcctagatttagaactaacacaaacaggtcactgtcatcttgttggctagcaatttactatgtacatga

SEQ ID NO: 46241 - DNA, 600 bp, Chicken  19866894287018_3
ttgtttgcacccattacctcctgtcttggtacaactaagaaagatcygtctctctccctctcatcagacatttctatacccgaataacatcccctctgagccttctcttctccaagcctctcctcacatgaaagatgctccagtcccctagccagcttagtggccctttgctggactcactcccgtackggggagtcccaaactggaatgtctggaaaaacacagacccagatctttcaactgatatatacaaaacatgctgctcccagaaaagcactcttgtattgaaatatcgacaayggtaaagacttttctgctcttgctaagacaccctatctgcagccaatcctyaatctcactygaacaactcctccccagccaactcatgtagcaagccccaagaacttggcaaagagcaaagcctagatttagaactaacacaaacaggtcactgtcatcttgttggctagcaatttactatgtacatgaccgcaaagattgctacattaataaacacaatgattttcattccattcttccagctatttttattcaaaccgcataatggcctttaccactaatcctgtgatctgacctgca

SEQ ID NO: 46242 - DNA, 550 bp, Chicken  19866894287018_4
ctctccctctcatcagacatttctatacccgaataacatcccctctgagccttctcttctccaagcctctcctcacatgaaagatgctccagtcccctagccagcttagtggccctttgctggactcactcccgtackggggagtcccaaactggaatgtctggaaaaacacagacccagatctttcaactgatatatacaaaacatgctgctcccagaaaagcactcttgtattgaaatatcgacaayggtaaagacttttctgctcttgctaagacaccctatctgcagccaatcctyaatctcactygaacaactcctccccagccaactcatgtagcaagccccaagaacttggcaaagagcaaagcctagatttagaactaacacaaacaggtcactgtcatcttgttggctagcaatttactatgtacatgaccgcaaagattgctacattaataaacacaatgattttcattccattcttccagctatttttattcaaaccgcataatggcctttaccactaatcctgtgatctgacctgcag

SEQ ID NO: 46243 - DNA, 540 bp, Chicken  19866894287018_5
catcagacatttctatacccgaataacatcccctctgagccttctcttctccaagcctctcctcacatgaaagatgctccagtcccctagccagcttagtggccctttgctggactcactcccgtackggggagtcccaaactggaatgtctggaaaaacacagacccagatctttcaactgatatatacaaaacatgctgctcccagaaaagcactcttgtattgaaatatcgacaayggtaaagacttttctgctcttgctaagacaccctatctgcagccaatcctyaatctcactygaacaactcctccccagccaactcatgtagcaagccccaagaacttggcaaagagcaaagcctagatttagaactaacacaaacaggtcactgtcatcttgttggctagcaatttactatgtacatgaccgcaaagattgctacattaataaacacaatgattttcattccattcttccagctatttttattcaaaccgcataatggcctttaccactaatcctgtgatctgacctgcag

SEQ ID NO: 46244 - DNA, 600 bp, Chicken  19866894287032_1
gagcagcctcaaagcacttattgatagcaataggtttagcttagaaaagaattcttatgctccaaatatttttgctcatgaacaaatgccttcgagcatttgttttgactttctccatcactacttaggagaagcctcaatagacattggatcaaaccacagaggatctgcatcagtgtttaggaaaatactgaatattttttgcgacgtttgaagatgagcattaacaattcccttccagctgttactggcacctatggagcttgacacagacatgttcacatttaaatcccaattcartagggttagaaatctatcagaagagctctctgtccaaagtacgttacctattgctgctcgtttctggagcatgcattgattttaaaaagctaataaatgtattcttgcttcaatttttaactgcttcactctgcaatttatttcatcactcccctaaaagagctgatgagagtgacagcccattattattttttatcatccttttagtgataatagcattagaattcatcaccttgagaagacacggggctattcaagttgcaggaacttatgtttaaggttataatttttctttgaagc

SEQ ID NO: 46245 - DNA, 600 bp, Chicken  19866894287035_1
caagtagacagaatgctggttatctctcatgagccttggtgctctactttactggagatcgtaactctggaaaacagtttgctgtagcattagttagcaggtgatttacagacctgcagttttctcaagactttgcttaagaagaaaaatgaagggcaaagcgttgtttatcacttaattggatgtgtagaccaaactgtaatctgatacaaaaagtattgcaaatttatcagatcattagtgaaggaatatatttgcctgctgtgtatattcctctgccactaaagtcatatttttagrattgctttataaaggagaacataaataatgtccaggaaacctgcagtcagatgaaaaacaacatgattgctttcattgttgccagcttccaaacagtggacatcacagacttcattcaagagcagccaagagctctttacaactttgctcacttctaagtcagattttaaaaggaagatttgagggtgggataaattatggcaaagtcttctttctgagaatgaatgacccagtgttctacatagcagacttttacaagcacacttcttatgtgcaaacctaacgtcctcttacagaaac

SEQ ID NO: 46246 - DNA, 600 bp, Chicken  19866894287035_2
tctaagtcagattttaaaaggaagatttgagggtgggataaattatggcaaagtcttctttctgagaatgaatgacccagtgttctacatagcagacttttacaagcacacttcttatgtgcaaacctaacgtcctcttacagaaacttcttttctccagtctccctgggtagactatttcctagcagacttggaaagctataaatgctttcttatgttgcatatatgatataggatgcctcacctcaagtaaattccaagttaatggagaaaaataaacaattggataatatcaaaccrttcctgatattataaaacagaatgccttgcatgctgtttctgtagcggtgtggggatgtcggggtgtgtgtggaggaaacagcactgtcctaaaaaagctataaagtctttcaatatagtaacgttgagccaagtaggaaaaaaagaagttcctctgccctggaatgttatatataatgcaatatgctggtcctgtaattagacattttgatgcctggccatgttgagcttctctcttccttgattctttgtctgctgctactttctgaccctctcaccacacacgcacaatcccttttc

SEQ ID NO: 46247 - DNA, 599 bp, Chicken  19866894287038_1
  misc_feature (1)..(31): n is any nucleotide
nnnnnnnnnnnnnnnnnnnnnnnnnnnnnnncaaccctgaattcaagggctggcatggagagctgcagtcagtccccttcccatctgcacaacttgcagacccgaagcactttttggaggggtacccccaatgcactgagccatgccaaccctctgagctcagggaggcgatctgtctgcaggctgctggggctgcacacggccgtccccatggtcagggtctcaccagtcagccctatcttcttccggcacgtgaagcagcgattcttcttctgtttcggtttctccggagatgttttrtcctcagctgcactctgtgatgtttcaaggagagtacctgaaccaaagaccacagttctgttacctcgataaacaaagagacrcatcattttgctcctgcagctgcttgattgtgggtctgtgccagacaacacccccgcacgcacgctgccctaacccaagttagcagcctgcagacatcagwccccaaactgagacttgtcttcttccactgacagagacctacgcctcacacagcctcatgtttcctccccacgtcaattccccaagcccacagctcagaaacaccaacaagacac

SEQ ID NO: 46248 - DNA, 600 bp, Chicken  19866894287038_2
tctgcacaacttgcagacccgaagcactttttggaggggtacccccaatgcactgagccatgccaaccctctgagctcagggaggcgatctgtctgcaggctgctggggctgcacacggccgtccccatggtcagggtctcaccagtcagccctatcttcttccggcacgtgaagcagcgattcttcttctgtttcggtttctccggagatgttttrtcctcagctgcactctgtgatgtttcaaggagagtacctgaaccaaagaccacagttctgttacctcgataaacaaagagacrcatcattttgctcctgcagctgcttgattgtgggtctgtgccagacaacacccccgcacgcacgctgccctaacccaagttagcagcctgcagacatcagwccccaaactgagacttgtcttcttccactgacagagacctacgcctcacacagcctcatgtttcctccccacgtcaattccccaagcccacagctcagaaacaccaacaagacactcaggtttagctaaggcatccataaggtacggctccctcctgctgagtaaagtcaatgctaagtagaattatctggtgcttgcc

SEQ ID NO: 46249 - DNA, 600 bp, Chicken  19866894287038_3
tgctggggctgcacacggccgtccccatggtcagggtctcaccagtcagccctatcttcttccggcacgtgaagcagcgattcttcttctgtttcggtttctccggagatgttttrtcctcagctgcactctgtgatgtttcaaggagagtacctgaaccaaagaccacagttctgttacctcgataaacaaagagacrcatcattttgctcctgcagctgcttgattgtgggtctgtgccagacaacacccccgcacgcacgctgccctaacccaagttagcagcctgcagacatcagwccccaaactgagacttgtcttcttccactgacagagacctacgcctcacacagcctcatgtttcctccccacgtcaattccccaagcccacagctcagaaacaccaacaagacactcaggtttagctaaggcatccataaggtacggctccctcctgctgagtaaagtcaatgctaagtagaattatctggtgcttgccacaggttaagaatgcacagggatactcagctgagttgatgtaaacatctgagcctgggatttaaaaaaataaataaaaaattaaccccttgcaagtaacag

SEQ ID NO: 46250 - DNA, 600 bp, Chicken  19866894287044_1
aatcagtcacaacttcatgttctaaatacatgtagtcagtaataagtgtacagcttatatatcgtgtgattgctataggagagaaacatggcttaagacttctggttattgggctttattcatttttatttttaatttgggaatgaggacttgttagctttccctgcaagcctgagtaacagctattttgtgggcgtaaagtaaaacccaagattttttagaagaagaaatagtgtttctcagaatgctgtttctcagagagcatggacaagctaacagtgggaatccatgttgagaacrggtacagaaatcctgaataagaaagtctctaagaaagcagctttggagatgagtaagattgcatttgaaatgtcggttttagatgttatatatgttagggtaactttgacatwcttactggattgtgcttaagagacccgggatacttttccagtcagatttagagtgaaaaaggtttttgatcttttctgttcacatggcctcctgtgcaaaggaacgaagctgctggtcaggagctctctctgtactgttctggtggagttctcttggcatcccagattgtttcaaaagcagcagtca

SEQ ID NO: 46251 - DNA, 600 bp, Chicken  19866894287044_2
ctttattcatttttatttttaatttgggaatgaggacttgttagctttccctgcaagcctgagtaacagctattttgtgggcgtaaagtaaaacccaagattttttagaagaagaaatagtgtttctcagaatgctgtttctcagagagcatggacaagctaacagtgggaatccatgttgagaacrggtacagaaatcctgaataagaaagtctctaagaaagcagctttggagatgagtaagattgcatttgaaatgtcggttttagatgttatatatgttagggtaactttgacatwcttactggattgtgcttaagagacccgggatacttttccagtcagatttagagtgaaaaaggtttttgatcttttctgttcacatggcctcctgtgcaaaggaacgaagctgctggtcaggagctctctctgtactgttctggtggagttctcttggcatcccagattgtttcaaaagcagcagtcagttgctgataaagtagtagctgtgagtgacaactgagaatagctatttttgtgtttgaggatgccagatgggagtgatatagtgtgtggtaagctgaagccttcaaaggacag

SEQ ID NO: 46252 - DNA, 600 bp, Chicken  19866894287053_1
cagaaatggttaaaataattgctatattgatgaacaataacacattctcccttaaactgatacccaatatttttatgccagtacatatttgacagaactgaaaccagtagtgtgtcagagcaaagtgctggttagccttagcagcgctatggaaacaatggagtaaagcttccagtaacagcactcctgcactgcttcctggtgccaaacttccaagagtaaggcatgagagatgccagccctgtgcaaagcctacacttgttccctgatgcaccgtgtgcttcggaagcacctttcccrtcacaaattctattataatttcaacagatttaatrcatcaagagyccttcatgagtgtgctgccttatcactgagtggggctgctggatcccacaggatccccatgccatgcatacccatcactgcagcacatcgtctgggccacagccaagagctgcgggaagaactaaactccttggccatttccaatccataattaatacacaacctgctggttttagacaagagtacttaaaaacattcagggcctcaagattcaagtacaagtcaccaggtgggctgctggtgtgattttttttc

SEQ ID NO: 46253 - DNA, 600 bp, Chicken  19866894287053_2
aataacacattctcccttaaactgatacccaatatttttatgccagtacatatttgacagaactgaaaccagtagtgtgtcagagcaaagtgctggttagccttagcagcgctatggaaacaatggagtaaagcttccagtaacagcactcctgcactgcttcctggtgccaaacttccaagagtaaggcatgagagatgccagccctgtgcaaagcctacacttgttccctgatgcaccgtgtgcttcggaagcacctttcccrtcacaaattctattataatttcaacagatttaatrcatcaagagyccttcatgagtgtgctgccttatcactgagtggggctgctggatcccacaggatccccatgccatgcatacccatcactgcagcacatcgtctgggccacagccaagagctgcgggaagaactaaactccttggccatttccaatccataattaatacacaacctgctggttttagacaagagtacttaaaaacattcagggcctcaagattcaagtacaagtcaccaggtgggctgctggtgtgattttttttccttttgccacaatgatggatttctctttttaaaga

SEQ ID NO: 46254 - DNA, 600 bp, Chicken  19866894287053_3
tctcccttaaactgatacccaatatttttatgccagtacatatttgacagaactgaaaccagtagtgtgtcagagcaaagtgctggttagccttagcagcgctatggaaacaatggagtaaagcttccagtaacagcactcctgcactgcttcctggtgccaaacttccaagagtaaggcatgagagatgccagccctgtgcaaagcctacacttgttccctgatgcaccgtgtgcttcggaagcacctttcccrtcacaaattctattataatttcaacagatttaatrcatcaagagyccttcatgagtgtgctgccttatcactgagtggggctgctggatcccacaggatccccatgccatgcatacccatcactgcagcacatcgtctgggccacagccaagagctgcgggaagaactaaactccttggccatttccaatccataattaatacacaacctgctggttttagacaagagtacttaaaaacattcagggcctcaagattcaagtacaagtcaccaggtgggctgctggtgtgattttttttccttttgccacaatgatggatttctctttttaaagaaatgtattgc

SEQ ID NO: 46255 - DNA, 599 bp, Chicken  19866894287054_1
  misc_feature (1)..(21): n is any nucleotide
nnnnnnnnnnnnnnnnnnnnntcttcctcttcctgtggtcaagaggatgaaaacatgatgaaagtagagaaggctgaagaaaaagaaattataaaattgccagtaatagtaaaattagagaagccttcggaatacaatgaagaaaaacaagctgtcaaagaagaaagtgactcttttaaagaaaacgtcaagcctgttaaagtagaggtgaaggaaaacaaaatagaaccaaaagacttaaaagaagtaaaatgttctactgacaaaatagcagttcatgagcccgagaggttggaattytgtgttaatgtcaaaactccgcaggaaattgtggagaaatctgtagaagaaagtgagaaacttaaaaatgaccagcaggcaaaaatacctcttaaaaagcgagagatcaagctgacagatgactatgacagtcctattaaggggtccctgtgtaaatgtgtgactccaacaaaggatgtcttgaaggaagaggggaaaccagaagaggaaacttttaagagagtccctacaattactgctttatgccctgatgggaaagtgctggtaaatggagaggttagcagtgaaaaartaacccc

SEQ ID NO: 46256 - DNA, 485 bp, Chicken  19866894287054_2
tggaattytgtgttaatgtcaaaactccgcaggaaattgtggagaaatctgtagaagaaagtgagaaacttaaaaatgaccagcaggcaaaaatacctcttaaaaagcgagagatcaagctgacagatgactatgacagtcctattaaggggtccctgtgtaaatgtgtgactccaacaaaggatgtcttgaaggaagaggggaaaccagaagaggaaacttttaagagagtccctacaattactgctttatgccctgatgggaaagtgctggtaaatggagaggttagcagtgaaaaartaaccccaastgtcatacaaaataataggtcggagcactctgtcggtacaaaggaagacagcagctcattaaaagagaaaaatggtaaaagtggggaaaaggtatcggactccctaaattctgttagtaaaattataaaagcatgtgaggttgagaaaaatgcagtaactgtggtgaaagagctg

SEQ ID NO: 46257 - DNA, 475 bp, Chicken  19866894287054_3
tgttaatgtcaaaactccgcaggaaattgtggagaaatctgtagaagaaagtgagaaacttaaaaatgaccagcaggcaaaaatacctcttaaaaagcgagagatcaagctgacagatgactatgacagtcctattaaggggtccctgtgtaaatgtgtgactccaacaaaggatgtcttgaaggaagaggggaaaccagaagaggaaacttttaagagagtccctacaattactgctttatgccctgatgggaaagtgctggtaaatggagaggttagcagtgaaaaartaaccccaastgtcatacaaaataataggtcggagcactctgtcggtacaaaggaagacagcagctcattaaaagagaaaaatggtaaaagtggggaaaaggtatcggactccctaaattctgttagtaaaattataaaagcatgtgaggttgagaaaaatgcagtaactgtggtgaaagagctg

SEQ ID NO: 46258 - DNA, 600 bp, Chicken  19866894287061_1
ggcaagagttgtttttttcttctagtcagcacgccatcgctaaatcttccatactgtgacttttatcttgatagtgatgatcccttcacctcacacgttgagcacaacgctttctgttgtggagattcccaccagtgacaaagtattagtgccgcttttctgcctgtctcttttttgtctgtattttctggcatgtggggatttcttttagtggcccacaagcacttgccagataagcaggcagtgcaggaggaggcaggggcaagaggcaggagcaagggcagagtggtttctttgttrctaaatggaatgactgtattttctgcatgtggatttgccatagtgcttcttacaaggcctaagggtgggatgaaatgtgccctgaagcaggtgtgcttgcaggaaggcaaaagagaaatgcaaatcatttacccccaaaaagagggtaatcccaggaaaaagaggggacaggaaaaaatctttgctattaaccccagacttgatgggaaaggaaaagctgaagaagcaggtgtgcttgggggtgttcgtcttctagactgcacccagagaaggcgaatgattctgatgccgcagtcttgg

SEQ ID NO: 46259 - DNA, 600 bp, Chicken  19866894287063_1
aaaacactaaaagtgtgcgtgggaggtacttacagggtggcactggaaacttagatgcagctcctggaatagctggcaaacaagatggtgttaaaggccggaagtttttgttcaacaagtgtgatgtaaatctttgagaggggaaaaaacctaggattttatgtctggactggttcttctcttacctgtcgggacttggtctatatatgtggtcttcgtttggctttgcatcagttcaaagaggtgggggatgagaagtcagatctttctagcttttgtatctgtactgtagcttttttyttctttctagattaaagaaacaactgtttttgaaaattctttgtggttgatagacaaacaacaggtmtgaatagcgttagcactgcttatgttagttaaggccactcagtgcctttgtctaacttgattaatcctaatttgttttagctttttaatactctaaagttaaacactcttaaagacttggaaaaggaaaattagtttgaatcattaatttgcttttagaggagtttgagtttgtgtgcttatttgatgctttttttttcttttyttttttttttttagttcttttgtgggggg

SEQ ID NO: 46260 - DNA, 600 bp, Chicken  19866894287063_2
aatagctggcaaacaagatggtgttaaaggccggaagtttttgttcaacaagtgtgatgtaaatctttgagaggggaaaaaacctaggattttatgtctggactggttcttctcttacctgtcgggacttggtctatatatgtggtcttcgtttggctttgcatcagttcaaagaggtgggggatgagaagtcagatctttctagcttttgtatctgtactgtagcttttttyttctttctagattaaagaaacaactgtttttgaaaattctttgtggttgatagacaaacaacaggtmtgaatagcgttagcactgcttatgttagttaaggccactcagtgcctttgtctaacttgattaatcctaatttgttttagctttttaatactctaaagttaaacactcttaaagacttggaaaaggaaaattagtttgaatcattaatttgcttttagaggagtttgagtttgtgtgcttatttgatgctttttttttcttttyttttttttttttagttcttttgtggggggagctgcaaattgagggggattaggcatagaaaattggtaaaactgtaatgctaacaatttacaccaa

SEQ ID NO: 46261 - DNA, 600 bp, Chicken  19866894287063_3
gcttttgtatctgtactgtagcttttttyttctttctagattaaagaaacaactgtttttgaaaattctttgtggttgatagacaaacaacaggtmtgaatagcgttagcactgcttatgttagttaaggccactcagtgcctttgtctaacttgattaatcctaatttgttttagctttttaatactctaaagttaaacactcttaaagacttggaaaaggaaaattagtttgaatcattaatttgcttttagaggagtttgagtttgtgtgcttatttgatgctttttttttcttttyttttttttttttagttcttttgtggggggagctgcaaattgagggggattaggcatagaaaattggtaaaactgtaatgctaacaatttacaccaaagaaaattggagaaatcaactacagggaaccactgagttcacttactgctaccatcaggtagtcatgaaaacatttttcctatttttaattgaatgtaactcctatagtcagtacaagtctgagaaccgtacagaaaacaaccaaataagcacatgctgggcaatgacagtgcagcccttcctgcagtgcctcacgtaagtgcc

SEQ ID NO: 46262 - DNA, 576 bp, Chicken  19866894287063_4
tgtaactcctatagtcagtacaagtctgagaaccgtacagaaaacaaccaaataagcacatgctgggcaatgacagtgcagcccttcctgcagtgcctcacgtaagtgcctcagtgttggtctgaaggtcacctctagacactaatagttaggggcatgttggctcaggagaatttacactggttaaatctagtttagctagatttactttggaagtatgctaattaagacaactgtaaaactatattgtcagttaaaaaaggcttactgcagatgtactgcttgacctaacttagatcragtttaaactgttttttctcgagagtcctgatgtaaacaaacttacagtctcagtgtcagttcttgctgttcacacaaattgaccatggtgccagttgatacgggtaagataaccaccttgttttgccaccagctctgcaatttctctaagaaaacaggaagagttttcaggtacaagttgcctgtcatacctttcttgatctaaacctgagctgacagcttcacaataaaatgatcttgtgcactatctttaattggttattttaagtcaggcag

SEQ ID NO: 46263 - DNA, 599 bp, Chicken  19866894287064_1
  misc_feature (1)..(218): n is any nucleotide
nnnnnnnnnnnnnnnnnnnnnnnnnnnnnnnnnnnnnnnnnnnnnnnnnnnnnnnnnnnnnnnnnnnnnnnnnnnnnnnnnnnnnnnnnnnnnnnnnnnnnnnnnnnnnnnnnnnnnnnnnnnnnnnnnnnnnnnnnnnnnnnnnnnnnnnnnnnnnnnnnnnnnnnnnnnnnnnnnnnnnnnnnnnnnnnnnnnnnnnnnnnnnnnnnnnnnnnnnnccatcatgtaattcatgacttgtcttgcacaaaaaatggcaatttttttgctatcggattctgtaattccctctgattgacrggcttttccacttaactacctccaaggacacttctgaggagtgtgtgggcttatagtcagaggctgaacttcatttatcaacttggagagaagaatggggtatgtgtattagagggtgaggtctgaagctgttgttgcactgtttcgtgcaattttttgccttgattctggtgcgttgtaaggttaaggtaggactaccattttatttgcattttctcccaaatagcttccatcaagccacgttatctttcacacaggaaggtaacctttcttttctacacaagttgacttgtgtacct

SEQ ID NO: 46264 - DNA, 600 bp, Chicken  19866894287065_1
cagataaccacattctcaataatcccggcctttaaagttcttcccctgctctcactgagtaggtatgacagtccctcagaaacttccttgaggtcatttaattaatcgaatggtgtagtttcatgttggatatctaccaactgggaggagggtcgaattggatttgaagtattccctctgcttaaaatttatcagagatggaagtggctgattcggatgcagcagagtgcagaccttgggcagaacggtggagggaagcaggagtatgcggctcttcgtggtacggcgtccatgcacagycatgggtctgagccactcggagcgagctgttctcacaaaccaatagggctctccttgacctgtgtgcatcccctagcacagagtctttccagtttctgctgtgtgtgtgtctttcacatattcagctggaggtgaaaggccagatgctattctctaagactgctgtcagcctggaactctgctccctttgaagtcagtagtgcttcctctgcatttgtgtctgtgcaaccgagacccaaatccagtacaaggtgacgggagctttttttgccccttttttgtggttttagtcactggagt

SEQ ID NO: 46265 - DNA, 600 bp, Chicken  19866894287066_1
atgcattttcaccagcagtgaacagcacgctgtgcttatgaaaatctacaccagtggatgtgatctactgtcactgttgccactactgaaatgcaccattcatcaccttgctgtgctcacatccactgtttggtcttcagaaacattcagcaagcattgatgcatgtaagtagatgccattctttttccacaaaaagaaaataaattacactcctttgattcatgcccactaccatgtcaggcatcactttgtcagactgcctctctgctgccatctgtcgcacagcaacaaaatgtaayggaatacttgtgggaagctccagtctctactgccataccatgaatatccatctctgatgtcacgggcaaacataataaaatargaggcattattttcagagcagctgtcatacacaacaatatgtgtatatatattcatacttatatatgcataacatacatctgccaataataagaaagctaaaacaaagtaggtagtagtgtcagataactgctgttccagctaaataagtgaacacagaggtcacccaagtcaagacaagaccaaacaaagcctgaaaggccctaaggacrgtgctg

SEQ ID NO: 46266 - DNA, 600 bp, Chicken  19866894287066_2
tactgaaatgcaccattcatcaccttgctgtgctcacatccactgtttggtcttcagaaacattcagcaagcattgatgcatgtaagtagatgccattctttttccacaaaaagaaaataaattacactcctttgattcatgcccactaccatgtcaggcatcactttgtcagactgcctctctgctgccatctgtcgcacagcaacaaaatgtaayggaatacttgtgggaagctccagtctctactgccataccatgaatatccatctctgatgtcacgggcaaacataataaaatargaggcattattttcagagcagctgtcatacacaacaatatgtgtatatatattcatacttatatatgcataacatacatctgccaataataagaaagctaaaacaaagtaggtagtagtgtcagataactgctgttccagctaaataagtgaacacagaggtcacccaagtcaagacaagaccaaacaaagcctgaaaggccctaaggacrgtgctgttagctcaacacagtctgtggcctgctgcaagtaatagcaacatcatatttacagggctacaaaagcataatttcacataaat

SEQ ID NO: 46267 - DNA, 600 bp, Chicken  19866894287066_3
tgtaayggaatacttgtgggaagctccagtctctactgccataccatgaatatccatctctgatgtcacgggcaaacataataaaatargaggcattattttcagagcagctgtcatacacaacaatatgtgtatatatattcatacttatatatgcataacatacatctgccaataataagaaagctaaaacaaagtaggtagtagtgtcagataactgctgttccagctaaataagtgaacacagaggtcacccaagtcaagacaagaccaaacaaagcctgaaaggccctaaggacrgtgctgttagctcaacacagtctgtggcctgctgcaagtaatagcaacatcatatttacagggctacaaaagcataatttcacataaatggtgcaagaaaaaaaatgacggtggattaacaatatcttcaacagctcctgatttgctttaacaatctttctgctgctatggatgaaacagattttggcatgaattcaatactttctgcatacactcaaagtagcattcagacaccattaatcttttctacaatcctactctttcccaccattttataactagttttccaaccttggctct

SEQ ID NO: 46268 - DNA, 600 bp, Chicken  19866894287066_4
ggtgtggtacttgtgctatatagccttgtgcttccttttaccttggttcagggacctgactggctcctggtggctgaagctgcccacacagcacatcactagggaaagcacagcagaaaagctggccacaattatcactgtaataaacagcaaaatattctgagaagctgcaagagcatcaagtgacaaagtgtgcatgtagggtatggagatgagggtacttacctatttacaaatacaagaggccattaaggctgcttcacacagagattattctcttgaccaatccaggttcatccyagacaaatgtcttctaaccctttaagcatttggcattgccacgtcaaacaggcaaatggcttcttggaggataggaggagctcctcagtctctccccaaggctccgagccagcccagtacattacaccacttaagataccttgtttcttaacacgaccctttaataaggatggacagtacagatgtacttagtgaagtgctcccagccctgctatcatctgacggatatttcctgttagagctaatgaggttctgctcccacttaatctctagatatggcatagttagcactttttagtt

SEQ ID NO: 46269 - DNA, 600 bp, Chicken  19866894287069_1
agcctgagggaacctcctgtggaagaaaggatgggcaacctggtgagaatacaaagaagctgttaagacatgcagggagaaaatcagaaatgcaaaagctcagcttgaactcaacttggccactatagtaagagaacaaaatcttttttataaatatagtaacagtaagaagagggctaaggagaatctccatcctttagtggatgtggtggggaatgtgaccactgaggataaggaaaaggctgaggttctcaatgccttctttacatttgtctttaacagtcagaccaattatcctcrgggtattctacctcctgatctggaagtctgagatggtgggcagaataaaccccccatgattcaggtggagacagtttgagaactaatactgtacctggactgtcgcaagtccatggggtttgatgggatccatgtggggatgctgagggagctagaagaggcgatttccaacgtgttttccaccatctatcagtgctcctggttaaccagagaggtcccagaggattggaggcttgccagcgtgaccccccccatctacaaaaaaggtcataagaaggatccagggaactacaggcttgt

SEQ ID NO: 46270 - DNA, 600 bp, Chicken  19866894287082_1
atgctacaaaaattgtaagcataaaacaatagcaataataattatttgaagtatatagatggatcaacaggtagagattctaagttcatgggtctgaggtctacacaagaaatatttttatatggtagaaattcatcagtaaagctgcaaaatgagaaataatgactttactgtaatcatattaacaacaacagacttaaatacaaagtgaaatacgggtatcagttccaccattcccgcctcttgtgtattactgactgttaaccaaaggcttacagaatttgaagctaagaaaaagcrgtgtattgggttgaagaagtgtagtgtgtgcattatgtagcttgccttctgtmtttctcacaaaaaaaacctgcttatttctaggaagcagtaattttgtagctctgtacttgaaagttctcatctaattgcctttgtacttggccctgccttgtatgacacatttcaaatcagaaataagcaaaaaaaaacccttacagctgctgaggcatcactcctgaattgatattgcaagagttggaagcctcccaaattagattacatgcagtaattcaaaatcctgtgcatttatttgtagct

SEQ ID NO: 46271 - DNA, 600 bp, Chicken  19866894287082_2
tatagatggatcaacaggtagagattctaagttcatgggtctgaggtctacacaagaaatatttttatatggtagaaattcatcagtaaagctgcaaaatgagaaataatgactttactgtaatcatattaacaacaacagacttaaatacaaagtgaaatacgggtatcagttccaccattcccgcctcttgtgtattactgactgttaaccaaaggcttacagaatttgaagctaagaaaaagcrgtgtattgggttgaagaagtgtagtgtgtgcattatgtagcttgccttctgtmtttctcacaaaaaaaacctgcttatttctaggaagcagtaattttgtagctctgtacttgaaagttctcatctaattgcctttgtacttggccctgccttgtatgacacatttcaaatcagaaataagcaaaaaaaaacccttacagctgctgaggcatcactcctgaattgatattgcaagagttggaagcctcccaaattagattacatgcagtaattcaaaatcctgtgcatttatttgtagctgtttgtagtttttaaaactgtaaagaaacaaagtttttcttcgcaaatggacc

SEQ ID NO: 46272 - DNA, 558 bp, Chicken  19866894287092_1
cataagcatagtatggaaaaggacaagagaaggtaaatttgtgtgtgttttattctgttaacattagctctttaaattatagtcccatgggacgtttcctagtatgtgtacagaaagtattagctctccacagacaaccaaccttaaagcaactctgtgttacaaaaaggcttatttagaaaagatttctgaaaacaaaacaaaacaaaagaaacaaacaaaacaaacaacaggtaaacgtctcggtgatggagaggtttctaaatacgtgtttgtaactgtctcctcaatgagcaaatrggagaaaccataagaggcttgtcagatgtaaatgcgattgaaaacactgcagtgtaagtgacaaactgtaagtgtgctgacctcaggagaactatggaatgcctgcagtctggctccgtgtataactccatgcctattaagggagtttctgaagcattagcgtgcccatatggccgtggcctcctgttcagattgcctgtagcactgctctctgttactgaacatttactacagatattttctaagtagggctgcttg

SEQ ID NO: 46273 - DNA, 600 bp, Chicken  19866894287099_1
tctgtagccaaaatatcctaacaatgaaggaaacagcagtgttttcctggtttaaaagaaaacaaccaccacacattagaagcttacacacacacgcaaaaagacgttaaatacatctgagttttgcaaccgcaaaaccacaaagttggttatataattaaatatatgtaactatactgctatttgacctgtgaacctgaactaccattgagttaaatatttatacataatgcgtatttacgtccacagacttacaggggtcacatacggaagaggcagtagtattgattttgtatattygtatttgcaaatgtcattgaagtctcctgaagaactggattttaagtcattctgtgatcaaacattcagcagcaaaatgcagtctcagattactgaaaacaagcaagaagtttccgtgaagagattaaacacacatctatccctagccagaacaaataggaaaactggggctgttggaaggtacacagctctgccttacaaagttagaatcattttggctgacttaaacttctctgtttaaggaacgtttccagctcagtcggcaaactcaggtggattaataggctaacaaagaatcaa

SEQ ID NO: 46274 - DNA, 600 bp, Chicken  19866894287099_2
aatgcagtctcagattactgaaaacaagcaagaagtttccgtgaagagattaaacacacatctatccctagccagaacaaataggaaaactggggctgttggaaggtacacagctctgccttacaaagttagaatcattttggctgacttaaacttctctgtttaaggaacgtttccagctcagtcggcaaactcaggtggattaataggctaacaaagaatcaaaattatctttgcttgtgtgcaaccagagaaaaggtttgctctaaaataaactagaacaactctgataaaggtgtyrtacctacagacagaagcctgtcaragaaggacttggtgtgttaaacacatgcacaggtacgctgctgccatttactccacaaacccytgcacaggaacttggatgaaagtgttgggatgggactttatgaggttgtgtaattgatgtcagtacatctgccacatcttaagggatattcaactttttctaaaggtgtcatagttcatgcgccattgggtctttctgcacttaaacttaaaaaaaaaaacaaccatacttcaagtagaccttttatccctagatatctattttccagtgtt

SEQ ID NO: 46275 - DNA, 600 bp, Chicken  19866894287099_3
atgcagtctcagattactgaaaacaagcaagaagtttccgtgaagagattaaacacacatctatccctagccagaacaaataggaaaactggggctgttggaaggtacacagctctgccttacaaagttagaatcattttggctgacttaaacttctctgtttaaggaacgtttccagctcagtcggcaaactcaggtggattaataggctaacaaagaatcaaaattatctttgcttgtgtgcaaccagagaaaaggtttgctctaaaataaactagaacaactctgataaaggtgtyrtacctacagacagaagcctgtcaragaaggacttggtgtgttaaacacatgcacaggtacgctgctgccatttactccacaaacccytgcacaggaacttggatgaaagtgttgggatgggactttatgaggttgtgtaattgatgtcagtacatctgccacatcttaagggatattcaactttttctaaaggtgtcatagttcatgcgccattgggtctttctgcacttaaacttaaaaaaaaaaacaaccatacttcaagtagaccttttatccctagatatctattttccagtgtta

SEQ ID NO: 46276 - DNA, 600 bp, Chicken  19866894287099_4
aagcaagaagtttccgtgaagagattaaacacacatctatccctagccagaacaaataggaaaactggggctgttggaaggtacacagctctgccttacaaagttagaatcattttggctgacttaaacttctctgtttaaggaacgtttccagctcagtcggcaaactcaggtggattaataggctaacaaagaatcaaaattatctttgcttgtgtgcaaccagagaaaaggtttgctctaaaataaactagaacaactctgataaaggtgtyrtacctacagacagaagcctgtcaragaaggacttggtgtgttaaacacatgcacaggtacgctgctgccatttactccacaaacccytgcacaggaacttggatgaaagtgttgggatgggactttatgaggttgtgtaattgatgtcagtacatctgccacatcttaagggatattcaactttttctaaaggtgtcatagttcatgcgccattgggtctttctgcacttaaacttaaaaaaaaaaacaaccatacttcaagtagaccttttatccctagatatctattttccagtgttaaaccgaagagaccaatgttctaat

SEQ ID NO: 46277 - DNA, 600 bp, Chicken  19866894287099_5
actggggctgttggaaggtacacagctctgccttacaaagttagaatcattttggctgacttaaacttctctgtttaaggaacgtttccagctcagtcggcaaactcaggtggattaataggctaacaaagaatcaaaattatctttgcttgtgtgcaaccagagaaaaggtttgctctaaaataaactagaacaactctgataaaggtgtyrtacctacagacagaagcctgtcaragaaggacttggtgtgttaaacacatgcacaggtacgctgctgccatttactccacaaacccytgcacaggaacttggatgaaagtgttgggatgggactttatgaggttgtgtaattgatgtcagtacatctgccacatcttaagggatattcaactttttctaaaggtgtcatagttcatgcgccattgggtctttctgcacttaaacttaaaaaaaaaaacaaccatacttcaagtagaccttttatccctagatatctattttccagtgttaaaccgaagagaccaatgttctaatccagtgaacgtggaaaatgactacgtattatctgcttattattttttaagcatgttatcatgc

SEQ ID NO: 46278 - DNA, 600 bp, Chicken  19866894287104_1
tgctggtgcttttatttccttatttttcttcagctgtacctgagcatacagtcatattagaggaggtgctgttagtttacaggagaaatttttcttgttaacctctgcctgtcccatctccacacagggaagcatgctgaagagaataactaaagtttcctgcctcttggcctctgcatcctacagcaccatggagaccaggtgaatggaggttactgagcagtaggaaagatatttttgccatctaacttgaagcattttggcactttcctcttcacacagaaatagaagcaagtagawgcgcattcgtcaaaacaaggggagtttgttagagagctcagtgttttttatgcagaagactccaaatttggtacactgtgacagatgtacaacattacagatcagcattttgaatgtaagaatgattttctgaccaaatgaaaaacttagtagtaccacagagtatcttgcaggctccttgctatttcattaactgcccagtagcaacttgctctgttaaaaatgcaacacagaaaagacacaatctgcagaaagatttggacattacaattaggtagccagaaaattagcctctctttc

SEQ ID NO: 46279 - DNA, 600 bp, Chicken  19866894287104_2
aaagatttggacattacaattaggtagccagaaaattagcctctctttccaaattatagcctctgttagttcaggaagaagaaattctctcccttctgcaccattttattgaagtatagtccatccagttttatgtagtgtgtagaatttaacctataggacaaagttatttgccattatattattgctatattcttgaaagactgttctatatcaaagcagccatttgtcagagattactggtagaaaagtttttatgttttattgcacaaatatgagacaaaagtcttgagactcagwtatataaaattagggttctatttttacatacctctgccttcwaggggttcaaaacccttacactgaataaacataatgggtttgcaatgcctcagaaaagtcaagcaagatttgtttagttttccaatagttactcctgtgtctaaccacaggtataagttctggatatatggcctcacaaaacatgcctaagactgtccaaggtgatcaggtttagcttaactctatgctcagagtttactgaaaacattaaatgtatattgatttctacagwtatggagaaacaagcacttctgagaa

SEQ ID NO: 46280 - DNA, 600 bp, Chicken  19866894287104_3
ctctttccaaattatagcctctgttagttcaggaagaagaaattctctcccttctgcaccattttattgaagtatagtccatccagttttatgtagtgtgtagaatttaacctataggacaaagttatttgccattatattattgctatattcttgaaagactgttctatatcaaagcagccatttgtcagagattactggtagaaaagtttttatgttttattgcacaaatatgagacaaaagtcttgagactcagwtatataaaattagggttctatttttacatacctctgccttcwaggggttcaaaacccttacactgaataaacataatgggtttgcaatgcctcagaaaagtcaagcaagatttgtttagttttccaatagttactcctgtgtctaaccacaggtataagttctggatatatggcctcacaaaacatgcctaagactgtccaaggtgatcaggtttagcttaactctatgctcagagtttactgaaaacattaaatgtatattgatttctacagwtatggagaaacaagcacttctgagaaccctgtcttcaytggttatagactgcaactcttacactattt

SEQ ID NO: 46281 - DNA, 600 bp, Chicken  19866894287104_4
atgagacaaaagtcttgagactcagwtatataaaattagggttctatttttacatacctctgccttcwaggggttcaaaacccttacactgaataaacataatgggtttgcaatgcctcagaaaagtcaagcaagatttgtttagttttccaatagttactcctgtgtctaaccacaggtataagttctggatatatggcctcacaaaacatgcctaagactgtccaaggtgatcaggtttagcttaactctatgctcagagtttactgaaaacattaaatgtatattgatttctacagwtatggagaaacaagcacttctgagaaccctgtcttcaytggttatagactgcaactcttacactatttacaatattgaaacagacaataaagcttcttccagaaatgttaaggttggaaatatacaacttacttccaaatcaactgtcagaaacttacagagcatacgcagggatgaggtgtatgtgcaccaaagggcagctgactgccctcatagtcttaggtggactgtgagtcacttaaaggacagtgattcggaccctgtgggaccccttaggtccagagtacaaagccaccccac

SEQ ID NO: 46282 - DNA, 600 bp, Chicken  19866894287104_5
gggttctatttttacatacctctgccttcwaggggttcaaaacccttacactgaataaacataatgggtttgcaatgcctcagaaaagtcaagcaagatttgtttagttttccaatagttactcctgtgtctaaccacaggtataagttctggatatatggcctcacaaaacatgcctaagactgtccaaggtgatcaggtttagcttaactctatgctcagagtttactgaaaacattaaatgtatattgatttctacagwtatggagaaacaagcacttctgagaaccctgtcttcaytggttatagactgcaactcttacactatttacaatattgaaacagacaataaagcttcttccagaaatgttaaggttggaaatatacaacttacttccaaatcaactgtcagaaacttacagagcatacgcagggatgaggtgtatgtgcaccaaagggcagctgactgccctcatagtcttaggtggactgtgagtcacttaaaggacagtgattcggaccctgtgggaccccttaggtccagagtacaaagccaccccactgctggtgatttgcagcccttctgagtaatgctcataa

SEQ ID NO: 46283 - DNA, 600 bp, Chicken  19866894287104_6
agagcatacgcagggatgaggtgtatgtgcaccaaagggcagctgactgccctcatagtcttaggtggactgtgagtcacttaaaggacagtgattcggaccctgtgggaccccttaggtccagagtacaaagccaccccactgctggtgatttgcagcccttctgagtaatgctcataacttccaaactgtggttcactgttgtggagcctgtttcagtgatgtcccatcaatcatttctgtgatttataagtgactgtcagccgcacgagtagtgtgctattaaaaactctataccayggacaggatctcgtcagagagagcaatggtttcctcctgactgttctgcatggaaaagctttcatttagccaggcttctaccccaatctatgtctggaaatagatatttgtttcctgagactgttcattacaccacaacasagctctgagtgcccatgacattttattagcgcagttgaaaacaggcttcaaatatgtaaaatgaaacctgaccaacgctacgatttccagccatttgaggccaagctttgacagagtaaactaagactcagcaaaaacaaactgatgtgaattgaggga

SEQ ID NO: 46284 - DNA, 600 bp, Chicken  19866894287104_7
ctgctggtgatttgcagcccttctgagtaatgctcataacttccaaactgtggttcactgttgtggagcctgtttcagtgatgtcccatcaatcatttctgtgatttataagtgactgtcagccgcacgagtagtgtgctattaaaaactctataccayggacaggatctcgtcagagagagcaatggtttcctcctgactgttctgcatggaaaagctttcatttagccaggcttctaccccaatctatgtctggaaatagatatttgtttcctgagactgttcattacaccacaacasagctctgagtgcccatgacattttattagcgcagttgaaaacaggcttcaaatatgtaaaatgaaacctgaccaacgctacgatttccagccatttgaggccaagctttgacagagtaaactaagactcagcaaaaacaaactgatgtgaattgagggactaattgaaagggcaaagagtagtctgtgtgtgttcctttttgttcatacataggttagctatcagcatgtattgattatgggaagtcaacaaagattgtattatatcaaatgatttgatacaagaagatgaattttatat

SEQ ID NO: 46285 - DNA, 506 bp, Chicken  19866894287107_1
  misc_feature (1)..(36): n is any nucleotide
nnnnnnnnnnnnnnnnnnnnnnnnnnnnnnnnnnnnggcaaggcgggttgtggcaggtgaagcggggcaaggcgaggcgaggcggggcgaggcgatgtggggttgggtgaggctaggcgtggcagggtgaggcggggtgaggcagggcgaggcaaggcgaggcagggcggggcagggcaaggttaggcggggtggggtgaggcagggcggggcaaaaggaagagaggcggggcctggcggggcgaggcgaggcaatgcggggtgaggcggggcgaggctagatgggatggggcgaagcgrggtgaggcagaatgaggcagaacaaggcaaggtgaggcagggaaaggcaaggcagggagaggcgtggaaggacgaggtggggcgaggcaaggcgaggcaaggcgatgcaaggcggggcgagttgaggcgaggcagggcgaagcgaaaaaaggcggggagaggtggggagaggcggggtggggtggggcagggctgggtggggagag

SEQ ID NO: 46286 - DNA, 600 bp, Chicken  19866894287109_1
aatgtttttcctgtcagccctagtgagaataatgtacaggaaaaggtgatgtaatgatgatatcgcttacattattctctccctaatgaataatctacactaaggatgagctcacttactattattggaatcacatctgtaagccacagtgcacagctcaatctgccagggttttggtgctgtaataatttgcttgtagcttacacttttcattagaattggaaagccgttctacttactacatatggagtaaattttcctcacgaggaataagacaggctataaaacaaaataaacccrctaagcttttatttacagcatttatacttgggattcacacccttcctaagcacagctatatctttctgaaagccaatcccagactattattagcatagaacatcgaaaacatgatgatgtcttctgttctcatttaagtcagagctcacatgattgacatagtagtctaagtttaatttcaaactaaggatagaaaatcctttctatgtctatttgtagtttccatgtagacagtcagtgtgctctattgtgaaactgtgtaacttatgtgatgtgctttctgtaaatgatgaatcattc

SEQ ID NO: 46287 - DNA, 600 bp, Chicken  19866894287111_1
gctaatttctaccatgacagtgattttctttaagtggctggctgggataaaataggacgggaatgtatcagctgagctgtgagatgcaaaggaaaagttctgtccttgctgcagatgggatgcaggctcctggctccttggtgtactttctcctccgtacgtggatggctgatgtgctacaggtgtatgcagtatactgtgtggcagccatgggagatgtaccccaacatgatcccagagccagagtgcaccgaggtgctgctaatggctccacaaactttgagaacatccctgcgagtrtaagtggcaggcaggtctccagagtgactttggccaagtgttcgttgcaatgcaatgtatacagtagatatttttgcttgtttgcctaatcagcttctcttgcaggtttttgccttttaagttctcccttgagtggcatttgtgaagggtaaggttgtcactgctcctgtgaagtctgagtgaggttgatgctgtcactgcttctctaatggctgtgtgctgaaaacaagttttaatgccttcagagcaaggatctcaaagctctttgtgaacaggacatcatttagcctctgaaatgcc

SEQ ID NO: 46288 - DNA, 600 bp, Chicken  19866894287113_1
atgcaaagattggttattttggattccccacacaacctgggcttggcctacatgaggatgctttgtgttgtgagtggcagaaccaatgactgtggatgttctgtctgcctccatcacctagcctaagcagctgtctgagctctacacgcacaagctgcagggaaggcaggactgctggtcatctggctggttgctgctgagcacaatttgcaacagctgagcctactcctctgctggaagtcaggtgctagttcaggcctttctcatcattttgcctgattttcaggaaatctgtaggarcttcctaatctttgaagtttgtagccctgtagtgagtgtggcagaagctggacaacagatttagatgggatttgcaggagcaggtaggcagcaggagcatatcagctctgtttctggatggagtggggagatgacaagctggaagtggcataagttgtttcatgttcttatatggaaactgctggtgaatttagcagggattagacagtttttcatataggtgtggactcatagctttggtaaaaggaggcaaccattctgaaccagttatttaatgtgaaatactgtttttttaaatag

SEQ ID NO: 46289 - DNA, 543 bp, Chicken  19866894287119_1
agagaaaggaatagagagggtcaaagatggatgaggaagagaaaatagacccagaaggcaattacggtaaaggtggtaaaaaagttaggatcaggaagcccataaatgtacttactggaaaaagaataaataaaatggagtaatgccaagaaaattaaaaggctttaaaaagcagctgagaagaaagaggctgccaagcttcattcatcaaatattagacacattccaccagtatttgtcaaatttattcaacaaacaatacttacagccatagttggctaaatactcttcagcaaacayagatcaagaaatacgatgtaaattcatcaaataatctatcctgctactatttttctagacatacaatcctttccaaaagtagactgtgctgttgttaaatttgtgaactgtaatgaataatatttgaagcaaggacaggttatctctttgcagttgagatgcatatggtccttttcagtggaaatgagaacaagatactggcagcactacaattatacaccatactaggcaaacaatatacaa

SEQ ID NO: 46290 - DNA, 600 bp, Chicken  19866894287125_1
aatcaaaacaccatttcaaggtgctgcttccattttgttcaagatccttactgcaccctgttttttattagctatggtttttataacaaatgatagcaacagttaacgctgtgtgtttactcaaatcaacgtgcagtagtcacgctgcttagataacaatggcttctctaaggtaacagcagcaagagagccctcttgtcatctcatcttctgatgctttgctttctgcttttcacaccagtaatccagttgcttagacagagcagtcagatgtgccatctaaatctttggagtgaatgrcacyttcttaatgtgttcaaaatctgcagcaccgacaagcctgtggtcataggagtatttggaagattaagagtgaataatccaatgcaatacaatctcaaaatttcctttcaggctttaaggtggactgcttcgaattaggtttcatctgaagtcggtggttgtatgtggagaactgtcaacagtcccaaacccaaaaaacaagagcagacagaactcctactcttcttcctgaaaaaacaacaacaagaacaaatgagcaacattatraggtaagagtgactctattccttgtttatg

SEQ ID NO: 46291 - DNA, 600 bp, Chicken  19866894287125_2
aaaacaccatttcaaggtgctgcttccattttgttcaagatccttactgcaccctgttttttattagctatggtttttataacaaatgatagcaacagttaacgctgtgtgtttactcaaatcaacgtgcagtagtcacgctgcttagataacaatggcttctctaaggtaacagcagcaagagagccctcttgtcatctcatcttctgatgctttgctttctgcttttcacaccagtaatccagttgcttagacagagcagtcagatgtgccatctaaatctttggagtgaatgrcacyttcttaatgtgttcaaaatctgcagcaccgacaagcctgtggtcataggagtatttggaagattaagagtgaataatccaatgcaatacaatctcaaaatttcctttcaggctttaaggtggactgcttcgaattaggtttcatctgaagtcggtggttgtatgtggagaactgtcaacagtcccaaacccaaaaaacaagagcagacagaactcctactcttcttcctgaaaaaacaacaacaagaacaaatgagcaacattatraggtaagagtgactctattccttgtttatgctta

SEQ ID NO: 46292 - DNA, 600 bp, Chicken  19866894287125_3
agtaatccagttgcttagacagagcagtcagatgtgccatctaaatctttggagtgaatgrcacyttcttaatgtgttcaaaatctgcagcaccgacaagcctgtggtcataggagtatttggaagattaagagtgaataatccaatgcaatacaatctcaaaatttcctttcaggctttaaggtggactgcttcgaattaggtttcatctgaagtcggtggttgtatgtggagaactgtcaacagtcccaaacccaaaaaacaagagcagacagaactcctactcttcttcctgaaaayacaacaacaagaacaaatgagcaacattatraggtaagagtgactctattccttgtttatgcttagtgctaaactaaacaggtaccagaatgttcttctccatcgacatgtatatccatccaatcgcagtgctatattatgtaggttgctctgaaagtaatgccttgtgtttatctcaggggaaatgacaacagatacaaagagcaaaataacactgtttgatagagcaaattagcagctacagaacagttgttttccaacgttagctctaaattttcacatgcaatgaacaagagcctg

SEQ ID NO: 46293 - DNA, 600 bp, Chicken  19866894287125_4
gtaatccagttgcttagacagagcagtcagatgtgccatctaaatctttggagtgaatgrcacyttcttaatgtgttcaaaatctgcagcaccgacaagcctgtggtcataggagtatttggaagattaagagtgaataatccaatgcaatacaatctcaaaatttcctttcaggctttaaggtggactgcttcgaattaggtttcatctgaagtcggtggttgtatgtggagaactgtcaacagtcccaaacccaaaaaacaagagcagacagaactcctactcttcttcctgaaaaaycaacaacaagaacaaatgagcaacattatraggtaagagtgactctattccttgtttatgcttagtgctaaactaaacaggtaccagaatgttcttctccatcgacatgtatatccatccaatcgcagtgctatattatgtaggttgctctgaaagtaatgccttgtgtttatctcaggggaaatgacaacagatacaaagagcaaaataacactgtttgatagagcaaattagcagctacagaacagttgttttccaacgttagctctaaattttcacatgcaatgaacaagagcctgc

SEQ ID NO: 46294 - DNA, 600 bp, Chicken  19866894287125_5
taatccagttgcttagacagagcagtcagatgtgccatctaaatctttggagtgaatgrcacyttcttaatgtgttcaaaatctgcagcaccgacaagcctgtggtcataggagtatttggaagattaagagtgaataatccaatgcaatacaatctcaaaatttcctttcaggctttaaggtggactgcttcgaattaggtttcatctgaagtcggtggttgtatgtggagaactgtcaacagtcccaaacccaaaaaacaagagcagacagaactcctactcttcttcctgaaaaaayaacaacaagaacaaatgagcaacattatraggtaagagtgactctattccttgtttatgcttagtgctaaactaaacaggtaccagaatgttcttctccatcgacatgtatatccatccaatcgcagtgctatattatgtaggttgctctgaaagtaatgccttgtgtttatctcaggggaaatgacaacagatacaaagagcaaaataacactgtttgatagagcaaattagcagctacagaacagttgttttccaacgttagctctaaattttcacatgcaatgaacaagagcctgca

SEQ ID NO: 46295 - DNA, 600 bp, Chicken  19866894287125_6
atgtgccatctaaatctttggagtgaatgrcacyttcttaatgtgttcaaaatctgcagcaccgacaagcctgtggtcataggagtatttggaagattaagagtgaataatccaatgcaatacaatctcaaaatttcctttcaggctttaaggtggactgcttcgaattaggtttcatctgaagtcggtggttgtatgtggagaactgtcaacagtcccaaacccaaaaaacaagagcagacagaactcctactcttcttcctgaaaaaacaacaacaagaacaaatgagcaacattatraggtaagagtgactctattccttgtttatgcttagtgctaaactaaacaggtaccagaatgttcttctccatcgacatgtatatccatccaatcgcagtgctatattatgtaggttgctctgaaagtaatgccttgtgtttatctcaggggaaatgacaacagatacaaagagcaaaataacactgtttgatagagcaaattagcagctacagaacagttgttttccaacgttagctctaaattttcacatgcaatgaacaagagcctgcataccacactcataaaaatctgctctagtg

SEQ ID NO: 46296 - DNA, 600 bp, Chicken  19866894287126_1
ggatctaagtaggacacagaatggttgtctttcagatctctagaagataaaaacacagggtacgcttaaggactcgcactacaagcttaattgtattttgtgtggtcctttctgtaagttcagtcaagctgcgtcttcgagctgatgaagctctttccttttgcacacttcagcagtgggtgtttttccctgctgttgagatgggaacgttttgggtggagcgagagtgcttttggttagcttgtggcataaggggtatagggccatcacacctgagtgtggctcctgtcctccctctgrcagcagagtatcctttgctgcatccccatcatcattctcttcctcagctgtctttctgycagcagctttctctaaaatacctgtttatgttttttcccctctggtcttgacctgtagagccatcttggtgagggagcatgtgcacatagctggggcactgaacaaggtgcatggggaggctcaggattcaaaaccgcatacttgagcaggctgggaakgctcgtagcttccaaggtacctggctggatgmatgtgagcatttctggttacgtcctgaatggttctgcaggttgtggttct

SEQ ID NO: 46297 - DNA, 600 bp, Chicken  19866894287126_2
gtacgcttaaggactcgcactacaagcttaattgtattttgtgtggtcctttctgtaagttcagtcaagctgcgtcttcgagctgatgaagctctttccttttgcacacttcagcagtgggtgtttttccctgctgttgagatgggaacgttttgggtggagcgagagtgcttttggttagcttgtggcataaggggtatagggccatcacacctgagtgtggctcctgtcctccctctgrcagcagagtatcctttgctgcatccccatcatcattctcttcctcagctgtctttctgycagcagctttctctaaaatacctgtttatgttttttcccctctggtcttgacctgtagagccatcttggtgagggagcatgtgcacatagctggggcactgaacaaggtgcatggggaggctcaggattcaaaaccgcatacttgagcaggctgggaakgctcgtagcttccaaggtacctggctggatgmatgtgagcatttctggttacgtcctgaatggttctgcaggttgtggttctgcaggagggatgtggctggctgcacrggtcctccaggtcttctgctgaygtgcctcaag

SEQ ID NO: 46298 - DNA, 600 bp, Chicken  19866894287126_3
gagcgagagtgcttttggttagcttgtggcataaggggtatagggccatcacacctgagtgtggctcctgtcctccctctgrcagcagagtatcctttgctgcatccccatcatcattctcttcctcagctgtctttctgycagcagctttctctaaaatacctgtttatgttttttcccctctggtcttgacctgtagagccatcttggtgagggagcatgtgcacatagctggggcactgaacaaggtgcatggggaggctcaggattcaaaaccgcatacttgagcaggctgggaakgctcgtagcttccaaggtacctggctggatgmatgtgagcatttctggttacgtcctgaatggttctgcaggttgtggttctgcaggagggatgtggctggctgcacrggtcctccaggtcttctgctgaygtgcctcaagcacatggcttgatgctgggaagttgatstcaaatcaaagcacacggggaatgttgttccattttaggctcagttttcatttatagaagtagagtcacccgttgtggcatcacaagaaaagacggtgctttttcagcatggatgctaaatgcctctgctc

SEQ ID NO: 46299 - DNA, 600 bp, Chicken  19866894287126_4
aaggggtatagggccatcacacctgagtgtggctcctgtcctccctctgrcagcagagtatcctttgctgcatccccatcatcattctcttcctcagctgtctttctgycagcagctttctctaaaatacctgtttatgttttttcccctctggtcttgacctgtagagccatcttggtgagggagcatgtgcacatagctggggcactgaacaaggtgcatggggaggctcaggattcaaaaccgcatacttgagcaggctgggaakgctcgtagcttccaaggtacctggctggatgmatgtgagcatttctggttacgtcctgaatggttctgcaggttgtggttctgcaggagggatgtggctggctgcacrggtcctccaggtcttctgctgaygtgcctcaagcacatggcttgatgctgggaagttgatstcaaatcaaagcacacggggaatgttgttccattttaggctcagttttcatttatagaagtagagtcacccgttgtggcatcacaagaaaagacggtgctttttcagcatggatgctaaatgcctctgctctttgccagctagactacctctagctcgcagcc

SEQ ID NO: 46300 - DNA, 580 bp, Chicken  19866894287126_5
catcatcattctcttcctcagctgtctttctgycagcagctttctctaaaatacctgtttatgttttttcccctctggtcttgacctgtagagccatcttggtgagggagcatgtgcacatagctggggcactgaacaaggtgcatggggaggctcaggattcaaaaccgcatacttgagcaggctgggaakgctcgtagcttccaaggtacctggctggatgmatgtgagcatttctggttacgtcctgaatggttctgcaggttgtggttctgcaggagggatgtggctggctgcacrggtcctccaggtcttctgctgaygtgcctcaagcacatggcttgatgctgggaagttgatstcaaatcaaagcacacggggaatgttgttccattttaggctcagttttcatttatagaagtagagtcacccgttgtggcatcacaagaaaagacggtgctttttcagcatggatgctaaatgcctctgctctttgccagctagactacctctagctcgcagcctccagccactctctggccagatgctcttgtcctctttcctgatgcgtcagtgttgt

SEQ ID NO: 46301 - DNA, 557 bp, Chicken  19866894287126_6
gtctttctgycagcagctttctctaaaatacctgtttatgttttttcccctctggtcttgacctgtagagccatcttggtgagggagcatgtgcacatagctggggcactgaacaaggtgcatggggaggctcaggattcaaaaccgcatacttgagcaggctgggaakgctcgtagcttccaaggtacctggctggatgmatgtgagcatttctggttacgtcctgaatggttctgcaggttgtggttctgcaggagggatgtggctggctgcacrggtcctccaggtcttctgctgaygtgcctcaagcacatggcttgatgctgggaagttgatstcaaatcaaagcacacggggaatgttgttccattttaggctcagttttcatttatagaagtagagtcacccgttgtggcatcacaagaaaagacggtgctttttcagcatggatgctaaatgcctctgctctttgccagctagactacctctagctcgcagcctccagccactctctggccagatgctcttgtcctctttcctgatgcgtcagtgttgt

SEQ ID NO: 46302 - DNA, 519 bp, Chicken  19866894287126_7
tgttttttcccctctggtcttgacctgtagagccatcttggtgagggagcatgtgcacatagctggggcactgaacaaggtgcatggggaggctcaggattcaaaaccgcatacttgagcaggctgggaakgctcgtagcttccaaggtacctggctggatgmatgtgagcatttctggttacgtcctgaatggttctgcaggttgtggttctgcaggagggatgtggctggctgcacrggtcctccaggtcttctgctgaygtgcctcaagcacatggcttgatgctgggaagttgatstcaaatcaaagcacacggggaatgttgttccattttaggctcagttttcatttatagaagtagagtcacccgttgtggcatcacaagaaaagacggtgctttttcagcatggatgctaaatgcctctgctctttgccagctagactacctctagctcgcagcctccagccactctctggccagatgctcttgtcctctttcctgatgcgtcagtgttgt

SEQ ID NO: 46303 - DNA, 600 bp, Chicken  19866894287148_1
tgatacattcactgttctctgggagtttctgaaaactccctgagtactactgaagtttgccattgacacgcattcagttcacataattagaagcagcttatttcattcttggagcttcacatacacaataattgcatgttgaaaacaccgcactttgggctttttgtgttcaaagttcggattgggtcacagaagcaactggatcaattccacgaagacctatgtgtgaaaagtgcagagcctttctgcctctaagctgaaacacatgctgtgactgtaaatcaaatacagatgatagakgaagagtygtcatctgcagctggagttgctggtcagctgaatggtgtggccaagtacatgtctcatcaagccacatgaaagtcctgggatgctgtgaatctgaggcttgcaaacccctcctaggtggtgtgctgcttctcagaaagtgtttgcatcagggacttttccttgaggcagaaccagtgactggttctgtgaaatgtgtcttaggagcctcaaggtgctgttccacttctctcttggtgacaagtgacgtggggagcccagccttgaagcaggaacaagaaagcattgggtatg

SEQ ID NO: 46304 - DNA, 600 bp, Chicken  19866894287148_2
tcactgttctctgggagtttctgaaaactccctgagtactactgaagtttgccattgacacgcattcagttcacataattagaagcagcttatttcattcttggagcttcacatacacaataattgcatgttgaaaacaccgcactttgggctttttgtgttcaaagttcggattgggtcacagaagcaactggatcaattccacgaagacctatgtgtgaaaagtgcagagcctttctgcctctaagctgaaacacatgctgtgactgtaaatcaaatacagatgatagakgaagagtygtcatctgcagctggagttgctggtcagctgaatggtgtggccaagtacatgtctcatcaagccacatgaaagtcctgggatgctgtgaatctgaggcttgcaaacccctcctaggtggtgtgctgcttctcagaaagtgtttgcatcagggacttttccttgaggcagaaccagtgactggttctgtgaaatgtgtcttaggagcctcaaggtgctgttccacttctctcttggtgacaagtgacgtggggagcccagccttgaagcaggaacaagaaagcattgggtatgctaagaag

SEQ ID NO: 46305 - DNA, 600 bp, Chicken  19866894287151_1
agatttctgatttgaattcctgtgttatttaaattataggaggtcacatttgagtctgtgtcacttagaagatctactgggcaaagctttttatgctgtggaaacaaatgttatatatatataaacaaatgcaaacattcctgtgtcttttgatctctgcacaggacacaaaaagcagtacggtacagctgtgaactttaaggacgtggaataacaataagcttggatctgtttgtacttctgtctgactcagtggcaaatatcccatcaatttcacagggatccggcacaagctcccaygagcaggatggacagcactttttgcagtggtatgggaacatgttatacctcagaaagtaaagtgtggaagtgtgtttcacagaagggcagcattggaaataggcttgagaactctaagtgcttctggctttctggtccatgcccaaaccagaaactatctctcaaaaygtatttccacattggagaatcacagatttatagcatatgttgtgtactcaagaggcaataatggtgagaatctatcctgacccactggtcctagttttagagatcttttatctggcctttgtgtgaatcagc

SEQ ID NO: 46306 - DNA, 600 bp, Chicken  19866894287151_2
caaaaagcagtacggtacagctgtgaactttaaggacgtggaataacaataagcttggatctgtttgtacttctgtctgactcagtggcaaatatcccatcaatttcacagggatccggcacaagctcccaygagcaggatggacagcactttttgcagtggtatgggaacatgttatacctcagaaagtaaagtgtggaagtgtgtttcacagaagggcagcattggaaataggcttgagaactctaagtgcttctggctttctggtccatgcccaaaccagaaactatctctcaaaaygtatttccacattggagaatcacagatttatagcatatgttgtgtactcaagaggcaataatggtgagaatctatcctgacccactggtcctagttttagagatcttttatctggcctttgtgtgaatcagcacattgctacataacgtggaaaaagctcttttatattcgatcctgacagtgcaggatattggtagtatgtgaattggttatataaatgcctaaggtgtgcttagggtgcacctaatgtgttatctggggtaactgagagcagctgcaacccccacatttctgcttctg

SEQ ID NO: 46307 - DNA, 600 bp, Chicken  19866894287156_1
tgatttcacttcatagtggtgacatcacacctcttcactaggaattatgtgactgatccaggaaactgtcactgtcaaccttatattggttcaacaggtcctaacaaaattgcatacagcgttctttccgttcctgtgtgagcattcatggaacccaattgctgtaaattttacagtattccaacattgccatcatcatttccgatacttaaagatgatattcagccctgtacacagttcctggatcataatccacagattcatgtggatgagcagaccaagatgctcttcattttgtgrtgtgtctgctaatacatggctgtctggaacatagcttgaatttcacattgctgtagccactgctgaaattcatcacccaccacctcactgtgcaatatgtgttggtgtccactaatgtttagaaagcrtcaatgaatgtcaatggttacaacttactcagggttgaggaattcaatggcacatctctgctttaaccgctcttccacgtcagatgccattttgtcagacttcccttctgctgacatctgtcatatcgcaaaatggaatggaatgaaatattagtaggaaggctcaacctct

SEQ ID NO: 46308 - DNA, 600 bp, Chicken  19866894287156_2
cgttcctgtgtgagcattcatggaacccaattgctgtaaattttacagtattccaacattgccatcatcatttccgatacttaaagatgatattcagccctgtacacagttcctggatcataatccacagattcatgtggatgagcagaccaagatgctcttcattttgtgrtgtgtctgctaatacatggctgtctggaacatagcttgaatttcacattgctgtagccactgctgaaattcatcacccaccacctcactgtgcaatatgtgttggtgtccactaatgtttagaaagcrtcaatgaatgtcaatggttacaacttactcagggttgaggaattcaatggcacatctctgctttaaccgctcttccacgtcagatgccattttgtcagacttcccttctgctgacatctgtcatatcgcaaaatggaatggaatgaaatattagtaggaaggctcaacctctactctcctaccaccagctacagcctctgacatcatgggtcaatataataaaacaggaagcattactttcagagcaacccttgtacatatgggtgtacatggtaaatgttaaataagtgatcacttacc

SEQ ID NO: 46309 - DNA, 600 bp, Chicken  19866894287161_1
ttgattatgtctgcctccatcatgttatgttctcttaaataaaaaacaaagtttaaaattaaactcatttaaagctaaattgagtttcctcatttaaatggcatcgaaggaatactataggatctagccttcaaagacagctgccaaaccattttaaagccctcaactactatttgtttctttccattccagcagctgttctcacattaactcctcacagctctcagcattacctggccagaggaaatccacaggacttcaatagtttgagagaatatatctggaactgaagtcactccrtctcttaactcaccaaataatttgtaagcaaacagtgagctgtgaaatcactggacaaacttccaggacagttaagagaattctaacaaaaaggcaatttctcttaccatcttcaatatcataggcgtaagatgataaccgcagagtggtggcacagtattcacacttgaagcaactgcggtggaagaacttgccttcggcactcagcctttccatcacatagactcgcttgcggcagaagtaacagacatcactgcctcccaggttctgggggaactccttcttgagcgagccctagac

SEQ ID NO: 46310 - DNA, 600 bp, Chicken  19866894287168_1
tgcaatacctatgcgcgaactgttagacggctgtacgcatgcgcgagctttagaaatgcactacgcatgcgcctactattagactgcagtacgcatgcgcgagagtggagacggcagtacgcatgcgcgggtttctaaattgcaatacccatgcgcgaactgttagacggctgtacgcatgcgcgagctttagaaatgcactacgcatgcgcaaactattagactactgaacgcatgcgcgggtgccggagttgcagtacgcatgcgccaacctcgagacggcagtacgcatgcgcgttsaattagagagcggtacgcatgtgcgcgtttggaggcggcagtacgcatgcgctggctttgagactgcagtaagcatgcgcgggtttcaaaagtgcaatacgcattcgcgaacttgtgtccatgaaatgccacgcctatcaggtagttcctgaagaacgaagttaaaaatattaaagctgcataatttgctgcaacttgggtccatttacgaacttcctgtgaaagcctgctgtttcaagaacagcaccgatccaaactggcgccagaagtttcacggtcaaggtgtgaacacagttttgc

SEQ ID NO: 46311 - DNA, 600 bp, Chicken  19866894287172_1
catttctgaccaggctcagatatactgagaagagtttttcagcttctcttcttgaaagatagtttaggagaagttcaaaaagatggctaagcaggaaagtcaactttgatgatggaatccattgttattcttgcaggctgatgcaaggacttgcactggaaatggacctttcttttacaagttttacaaatctaatctcaaaacaccatttctttattacagaacctcattaagagactaacaatagcaaaactattccaaaactcttcatcaaggaattttctgacaaatgaagttaartgaagtgtgattcagtgctgtctctcctaaagagaagttggtcatatccagcttatcctccagcgactcctgctttctgagaaaatggattgattggtgtgcattttttcttttttttagagacatctgctaaagaaggacttttgttatggtgtcagaggaagacagctccctacaaaaatgtaaacatccagaacttccatatcaggtgagaacaggcaagaactcagctttaccatctgtgtcatttttgctacattcaatgatgttcctgatgcaactgcatttctttgggaggtc

SEQ ID NO: 46312 - DNA, 600 bp, Chicken  19866894287172_2
gtaaagattctgtgtaatagtgcttttgccagcacatctttgagcactgatgaatcatataaatgtaaagcttttatttttttttgagagcttaagttctgtccacatcagtcagtgctgtagtgaaccttgctatggacttgccttaagtcttatatctgagtgcacaagtgcctctgagaaaagcaaggggattggtgtctcacatcccagattagttgatgaagtctttaggttcagtaaattgtaagaaacaatcctactaattgaaatgaggaattctggttccagttcttctcraaagtccagtctaggctgggaggcaaagcattggcttgtacagtgctggttatagccatgagtagtcattcccctgctcctcagtctgccttttcctatggccttttttcaagctctgtacctgttcttgcatgctccccaggatagcagacattcagagcagagagctggcataaaggacatgacagtgcaaagggcaagtcctaattgcatcaaattattgtagaaaagaaagaggaaagaaatcctttccagcacttagagagacactgctagctagaaactaaaccgtgattaatc

SEQ ID NO: 46313 - DNA, 600 bp, Chicken  19866894287177_1
ttactgttaacatcattaaaagattacaagtgtcaaaaattagcctacagtgtgttgagctctaagtggaaatacaaagattagcttatgctcagcaggtagaaattctgacaaaagccttttagctttattagaaaggctactcaaattagcgtgggatgctaatggttttaaatttacaatgcattgcaaagtacacagtgtagttagtatctgacactttacttctgtaaaccataccacagattctaatctcttctgcagaattaatggtgggagtctttgcgtgtctgtgtaacmcatttatgcaacactttgtatttgttgttcaaggaaggtttccaggtgtgatgtaattgttttgtttctttgagtttttcasgttttaaagagagctgtgttttgagttattaacatacaggaaataaaatatttctttgaagggctccatactgagcgttttttccatagttgtcctgatgtgagttgagaagtttcctaaataccttttgttagttgcttaacaccatccattgtcatttccttccgctttcatcctgttgtcagtctcttctctgcatgtgccatgtcatccatcct

SEQ ID NO: 46314 - DNA, 600 bp, Chicken  19866894287177_2
agcttatgctcagcaggtagaaattctgacaaaagccttttagctttattagaaaggctactcaaattagcgtgggatgctaatggttttaaatttacaatgcattgcaaagtacacagtgtagttagtatctgacactttacttctgtaaaccataccacagattctaatctcttctgcagaattaatggtgggagtctttgcgtgtctgtgtaacmcatttatgcaacactttgtatttgttgttcaaggaaggtttccaggtgtgatgtaattgttttgtttctttgagtttttcasgttttaaagagagctgtgttttgagttattaacatacaggaaataaaatatttctttgaagggctccatactgagcgttttttccatagttgtcctgatgtgagttgagaagtttcctaaataccttttgttagttgcttaacaccatccattgtcatttccttccgctttcatcctgttgtcagtctcttctctgcatgtgccatgtcatccatcctagtagctatgtgagtggcactctgtacctggaatcttgacttctctcttcaataaatgatctaatgctggattggtaaaagc

SEQ ID NO: 46315 - DNA, 600 bp, Chicken  19866894287178_1
ggtttccatgctcagtggctaaaagtacaggatttcagctagtctttgtgtaactatagctactttctaacctgattttttctgaacgtgatataaaactttgaaccgtcttttcttgcagcatcatcattatgctgtgtttgaataagatgccaatcagcttttagtcatacaacattatttacttttgctcatttataccactgctgacaaattgttatgatgggaggctcacatttgcatatgtgaaaaggtgctgcttccttttttcttgcagcatatctcagcacaacatgtttyatttatttaagagtcccagagcaaaaaaaatctggattttgactagatttcttagacttaagttcctcttgcggagaactggaagtataggtacttggcatgaccatttgctgaggagagattttaaaggaaatatcacttatataaatgggtattattgttgttttaagagttcwgagggattgtagttgttgaatttagatgatttttttttttttaatccagctgagaaaaactgtttgagtgcctaaggaagcaagtaataaccacttaaaaatttattatttacaactgacagct

SEQ ID NO: 46316 - DNA, 590 bp, Chicken  19866894287178_2
attatttacttttgctcatttataccactgctgacaaattgttatgatgggaggctcacatttgcatatgtgaaaaggtgctgcttccttttttcttgcagcatatctcagcacaacatgtttyatttatttaagagtcccagagcaaaaaaaatctggattttgactagatttcttagacttaagttcctcttgcggagaactggaagtataggtacttggcatgaccatttgctgaggagagattttaaaggaaatatcacttatataaatgggtattattgttgttttaagagttcwgagggattgtagttgttgaatttagatgatttttttttttttaatccagctgagaaaaactgtttgagtgcctaaggaagcaagtaataaccacttaaaaatttattatttacaactgacagctaacttggaacatgttttacatctcaggatataaatatctgcatggatccttccagctaacagtagcagmcaatggttgtttaaaacaatagttgtgcaggattagtaaccatctttaaatttacctttctattgctaatacttgtagtccttcattgcatttgtca

SEQ ID NO: 46317 - DNA, 397 bp, Chicken  19866894287178_3
tgcggagaactggaagtataggtacttggcatgaccatttgctgaggagagattttaaaggaaatatcacttatataaatgggtattattgttgttttaagagttcwgagggattgtagttgttgaatttagatgatttttttttttttaatccagctgagaaaaactgtttgagtgcctaaggaagcaagtaataaccacttaaaaatttattatttacaactgacagctaacttggaacatgttttacatctcaggatataaatatctgcatggatccttccagctaacagtagcagmcaatggttgtttaaaacaatagttgtgcaggattagtaaccatctttaaatttacctttctattgctaatacttgtagtccttcattgcatttgtca

SEQ ID NO: 46318 - DNA, 600 bp, Chicken  19866894287188_1
agaaaataacatcattggtaatttgaaaggcagtctgtaacttctctgtagaaggtaaatccaagtaatgcagatcgcattggtggagcctaccacaactttaaatcatgttgacagtcactctctaatagccaaaagaattatagtctgctggattaatgctgtacactgtcattaggctggcaattaaatcccatttctgagattgtgtgatctgagttaccaacatctgcaaatatctctacatcttgtgtaacagctggccacagatcatgatacaccaaaggaaaaaggcctttytaatggctcccacgttattttggacttaaaacttcatgacgacagcagcttctcaaaacaccccattaatcaaatttattatccagtttgtcatgtgagatttcttaactctaaaccaatatagcaataaagaatcaaggtcattgtttatcgtacatgaataaaaattaaccacctgttcaaagttttaccttttgacactgaatggtatttggtctcagagacttttgacatctgtaacattttccagttttgtgaacatgtgagaaaccrctctcaaagagcacctccactcacaac

SEQ ID NO: 46319 - DNA, 600 bp, Chicken  19866894287188_2
tgatacaccaaaggaaaaaggcctttytaatggctcccacgttattttggacttaaaacttcatgacgacagcagcttctcaaaacaccccattaatcaaatttattatccagtttgtcatgtgagatttcttaactctaaaccaatatagcaataaagaatcaaggtcattgtttatcgtacatgaataaaaattaaccacctgttcaaagttttaccttttgacactgaatggtatttggtctcagagacttttgacatctgtaacattttccagttttgtgaacatgtgagaaaccrctctcaaagagcacctccactcacaacagtctgtcttaattttaaaaaaatcaacagccattctacttccaacatcagtagctacacacaatgagatgggcaattcaattacaggatgctcacacaaggcattaatttccttcccaayagtaccattgaatagttaagcagatcgctgatttccaagagatcatttagtgacaagaacagcagtacaacatgatctttaacagccayacagaacagagaagagacactctgaaaacaaagatgtggctctacaaatccattgaagaagga

SEQ ID NO: 46320 - DNA, 600 bp, Chicken  19866894287188_3
tagcaataaagaatcaaggtcattgtttatcgtacatgaataaaaattaaccacctgttcaaagttttaccttttgacactgaatggtatttggtctcagagacttttgacatctgtaacattttccagttttgtgaacatgtgagaaaccrctctcaaagagcacctccactcacaacagtctgtcttaattttaaaaaaatcaacagccattctacttccaacatcagtagctacacacaatgagatgggcaattcaattacaggatgctcacacaaggcattaatttccttcccaayagtaccattgaatagttaagcagatcgctgatttccaagagatcatttagtgacaagaacagcagtacaacatgatctttaacagccayacagaacagagaagagacactctgaaaacaaagatgtggctctacaaatccattgaagaaggaaagaaatgtcacctgcaatcacagttacactaggcactcctttccttagagcttaaccatgaggcctaataaaatgctaagcatggagatctaaataaggaacaatactttgaaaaattctgatcctttactgcttaaacaatcgctt

SEQ ID NO: 46321 - DNA, 559 bp, Chicken  19866894287188_4
tttggtctcagagacttttgacatctgtaacattttccagttttgtgaacatgtgagaaaccrctctcaaagagcacctccactcacaacagtctgtcttaattttaaaaaaatcaacagccattctacttccaacatcagtagctacacacaatgagatgggcaattcaattacaggatgctcacacaaggcattaatttccttcccaayagtaccattgaatagttaagcagatcgctgatttccaagagatcatttagtgacaagaacagcagtacaacatgatctttaacagccayacagaacagagaagagacactctgaaaacaaagatgtggctctacaaatccattgaagaaggaaagaaatgtcacctgcaatcacagttacactaggcactcctttccttagagcttaaccatgaggcctaataaaatgctaagcatggagatctaaataaggaacaatactttgaaaaattctgatcctttactgcttaaacaatcgcttgtagttcttgcaataacaaaggaacgtaaaatgttggcagccaaaaat

SEQ ID NO: 46322 - DNA, 600 bp, Chicken  19866894287196_1
ttctacaaaaacttcaaagcagcagcatggctttactctgcacagtgtctgtgtgactgcatctattctgtgccgtgtccctgagtggaagtcaggattgctgatctgtttcctgatttaaaaactagtattgcatctgtcatctttcatttctgtgtcaccacagctgagatattatatatgggtagattgtgtgtcacagtagtagtttaaagactttatatttgggctccagctgtattcagagctcctgtgtgaatacctggactgaatttaatactttatgaacccttgtgtgarcactactcagatgaatagcccccctcatgagaggtgcacactgctctggagtgaaaggggagtgctgytttgctgtgggttccctgaggtgagggctgtgggctgtccccagagatgtcccactcctgtggcaggacacagagcccagcccacgcctcgctgtgttgtgtgcagccctgggaaccataagccctgggagcagtgccaaagcagagccccagtcacacagagccccggctgagctgcattttgggtctgactggggctggagtttagggtccctcatgccatgaggccact

SEQ ID NO: 46323 - DNA, 600 bp, Chicken  19866894287196_2
tgtgccgtgtccctgagtggaagtcaggattgctgatctgtttcctgatttaaaaactagtattgcatctgtcatctttcatttctgtgtcaccacagctgagatattatatatgggtagattgtgtgtcacagtagtagtttaaagactttatatttgggctccagctgtattcagagctcctgtgtgaatacctggactgaatttaatactttatgaacccttgtgtgarcactactcagatgaatagcccccctcatgagaggtgcacactgctctggagtgaaaggggagtgctgytttgctgtgggttccctgaggtgagggctgtgggctgtccccagagatgtcccactcctgtggcaggacacagagcccagcccacgcctcgctgtgttgtgtgcagccctgggaaccataagccctgggagcagtgccaaagcagagccccagtcacacagagccccggctgagctgcattttgggtctgactggggctggagtttagggtccctcatgccatgaggccacttcctttagcctgacgctctgagctgggcctggcyggcagcaacmagggcagacttgtgggaagggctc

SEQ ID NO: 46324 - DNA, 600 bp, Chicken  19866894287196_3
tgcacactgctctggagtgaaaggggagtgctgytttgctgtgggttccctgaggtgagggctgtgggctgtccccagagatgtcccactcctgtggcaggacacagagcccagcccacgcctcgctgtgttgtgtgcagccctgggaaccataagccctgggagcagtgccaaagcagagccccagtcacacagagccccggctgagctgcattttgggtctgactggggctggagtttagggtccctcatgccatgaggccacttcctttagcctgacgctctgagctgggcctggcyggcagcaacmagggcagacttgtgggaagggctcagcacctggctaggagcagccttctgctgttcttggggaaaggtttcatctctgcagctggcaattttattgcaaagggaaggagagataggaaacatcacacttcttcctggctttgccaaaagcacttaaaaacaacttcagagaaggtcatgagcagccccaacgccatgcttagagcatacaacatccccttgtaagggagttaaaccagactgatggcaagggggagagaaatcttccctgaccttttgttactcagaact

SEQ ID NO: 46325 - DNA, 600 bp, Chicken  19866894287196_4
tctggagtgaaaggggagtgctgytttgctgtgggttccctgaggtgagggctgtgggctgtccccagagatgtcccactcctgtggcaggacacagagcccagcccacgcctcgctgtgttgtgtgcagccctgggaaccataagccctgggagcagtgccaaagcagagccccagtcacacagagccccggctgagctgcattttgggtctgactggggctggagtttagggtccctcatgccatgaggccacttcctttagcctgacgctctgagctgggcctggcyggcagcaacmagggcagacttgtgggaagggctcagcacctggctaggagcagccttctgctgttcttggggaaaggtttcatctctgcagctggcaattttattgcaaagggaaggagagataggaaacatcacacttcttcctggctttgccaaaagcacttaaaaacaacttcagagaaggtcatgagcagccccaacgccatgcttagagcatacaacatccccttgtaagggagttaaaccagactgatggcaagggggagagaaatcttccctgaccttttgttactcagaactcctcagtaac

SEQ ID NO: 46326 - DNA, 600 bp, Chicken  19866894287199_1
gcctaagttatgagatacgtgcattttgttgcagtcccttatagcctgattcctctgtcaaactaacaaggagcagccctcagctctaccccagcccggcagaagcgcagcacggggtggctgggcactgctgtaagtcaggacaaagtggataagagttcctgggtctgacagcatgcacatagctcgacaggcctgctgggggcacagaaagcgcagtagctccagctgggagttttcaaaagctcttacctttgaagcctttgatggatccacacatcctcaatagaacatatctgycctttttatcaggaaggtgacatcaccactggggtcctacttacagaatcctagaatcaccaaggttggaaaagacctctaaagtcatggagtccagccatccacccaccaccaccatttcccactaaaccacgttatcagtgtctgagaaagtgccagtgttgaaacagcaggcagacagaagttcctggtgttgcttgttatcctgaggtgttcagctctcagcccacagcyaggccaggtttctttgtaattcatccacatcagtggtaatcatttgaaacgttttggtttcttctt

SEQ ID NO: 46327 - DNA, 600 bp, Chicken  19866894287199_2
gttttcaaaagctcttacctttgaagcctttgatggatccacacatcctcaatagaacatatctgycctttttatcaggaaggtgacatcaccactggggtcctacttacagaatcctagaatcaccaaggttggaaaagacctctaaagtcatggagtccagccatccacccaccaccaccatttcccactaaaccacgttatcagtgtctgagaaagtgccagtgttgaaacagcaggcagacagaagttcctggtgttgcttgttatcctgaggtgttcagctctcagcccacagcyaggccaggtttctttgtaattcatccacatcagtggtaatcatttgaaacgttttggtttcttctttttggagtagaacacattttttttttcagtaagacctttggaaaccttgtccatgtaaagaaaaagggaaaagtaagatgagagtaggtttgagggtaaaaagaaccctttggggtgatgaccaatgcagctaacctcatcccagatgttggccaaaaagagaattaactgtgctgttcaaccagagcatccctttctccctgtttttaaaacagaaaatgtctaacacttttc

SEQ ID NO: 46328 - DNA, 524 bp, Chicken  19866894287199_3
cagtggtaatcatttgaaacgttttggtttcttctttttggagtagaacacattttttttttcagtaagacctttggaaaccttgtccatgtaaagaaaaagggaaaagtaagatgagagtaggtttgagggtaaaaagaaccctttggggtgatgaccaatgcagctaacctcatcccagatgttggccaaaaagagaattaactgtgctgttcaaccagagcatccctttctccctgtttttaaaacagaaaatgtctaacacttttcattttacttctttaaagggaagccctttgktttttttacaacaagattgacctaacagtgaactcaacgctgatatgttcaatactctaagtaattttggaaatgtaatctaacaaatttaatcaaatttaaatgtaacaaatgtaatcactactcatctgaagctcttcctttcttctcttccttcctggtccttcccaccttgtcatctgggatcgttctgagtttttctctaagaatattttcctccttaa

SEQ ID NO: 46329 - DNA, 600 bp, Chicken  19866894287203_1
tgctcctctgggcaccgaaggcatttccgctgcagaacagatcagcctggaactgtttcattcctttctgctgtgatttaaagcagataagagttcttgcctgttgctaattagtagaacgtgtttttttctgtttgggtctaatttcaggtattgcttggagtttgtgttgctgaatatttagtttgttggagcatgaaccttgggcagatcgggctccccgtaaattaagagagctaagatgccggcccaggtctgttgctagagatatacaaccacccctcccatgtgctgtaaaaygtgcagcgttgcatctgctggctcgyggccaggtgttggaggccatttagctgtggctagacttgttgcatgtgttcttcattcatcatgagccatgtctgaacttggcaactgctgcctaggccacgggcagcagctctaccaggtgagccattagcggctggactcggctggaattcttcttcctgcagatcttgaatgcagttcaaccgtgctacacagcaaaccacagctacactcacgtgcatgcggcagtggaaacaatttgacatgcaaatcagaaatgtcattccgtttagc

SEQ ID NO: 46330 - DNA, 600 bp, Chicken  19866894287203_2
ccgctgcagaacagatcagcctggaactgtttcattcctttctgctgtgatttaaagcagataagagttcttgcctgttgctaattagtagaacgtgtttttttctgtttgggtctaatttcaggtattgcttggagtttgtgttgctgaatatttagtttgttggagcatgaaccttgggcagatcgggctccccgtaaattaagagagctaagatgccggcccaggtctgttgctagagatatacaaccacccctcccatgtgctgtaaaaygtgcagcgttgcatctgctggctcgyggccaggtgttggaggccatttagctgtggctagacttgttgcatgtgttcttcattcatcatgagccatgtctgaacttggcaactgctgcctaggccacgggcagcagctctaccaggtgagccattagcggctggactcggctggaattcttcttcctgcagatcttgaatgcagttcaaccgtgctacacagcaaaccacagctacactcacgtgcatgcggcagtggaaacaatttgacatgcaaatcagaaatgtcattccgtttagccaacaactgttggctgagaaagagct

SEQ ID NO: 46331 - DNA, 599 bp, Chicken  19866894287213_1
  misc_feature (1)..(4): n is any nucleotide
nnnncgtttagggcatatggaattgagcagctgtacagcagtgctgactaggctaggatccaaatcataggtaagtgtttatatttctaaattataatcattcatccttcggaagaagatgaacagaaaaaacactgcaagtgcagcctgcctgtgtctgaggtataattgtattcacatgtacacaggtgcttaaatatagctctgcaggtaaagcagctttccaagttcttgagtcccaggactgtaactaagcctgcactatctttaggttttgatctttgggttagaagctttccygaacgggaagagcccttgttaagcttttgtacatcacttagtataaagtggttagaggcaagtcagtcactccccagtataaatatgtgacttaaatgggtgtattctgtcgaatgcacggttgtgataattcatgaaaggctccctttaaatatcagcacaggagataagattccggaacagagttcctattgagataagaggaaaaagataacagaccttgaatgtgtgaagaaaaaggtgctatatgctggatgcagtccagatgtatgcagtctcactccccttctctatgtaag

SEQ ID NO: 46332 - DNA, 600 bp, Chicken  19866894287213_2
gtgacttaaatgggtgtattctgtcgaatgcacggttgtgataattcatgaaaggctccctttaaatatcagcacaggagataagattccggaacagagttcctattgagataagaggaaaaagataacagaccttgaatgtgtgaagaaaaaggtgctatatgctggatgcagtccagatgtatgcagtctcactccccttctctatgtaagtgtcaggcattggcaagcaacctaaagagcttgcctggatcttttgttctacggaggagattggcttggatctcatttgtgacttgyttggggcgtttgctcctctatggcttgctttgtgtgctctcctgagcatgctgagctacctgcaactcttcctcgagtttgttatcaaatggcagaagtgagaaagtggttgcactgcgatctggaagtatgaaaggtattctttcagcaggaaaacagatcagggctttttttgtcttggagtttttttcctaggccttacttgaaaatgatttccctctcctttattcctgttgtgttaactttcaatgaatgaaatcattacctgcaacaggttcctatggccgctattcctacaac

SEQ ID NO: 46333 - DNA, 600 bp, Chicken  19866894287213_3
agtggttgcactgcgatctggaagtatgaaaggtattctttcagcaggaaaacagatcagggctttttttgtcttggagtttttttcctaggccttacttgaaaatgatttccctctcctttattcctgttgtgttaactttcaatgaatgaaatcattacctgcaacaggttcctatggccgctattcctacaacctctgagtgcctctttcaaaacagtcttctgaaatacatatggttccatctcgttgcttttggcagttttgtctttacatccagagatacaaagcatgtgtgcrggcatgcatctctaaacagtagacacatctgaagaataagtacagtttttataggtacataactaagctattgtgtaagtttgggatttgaggaaygtctgcttaccactcacactgatagatgaaaaatatctgccgatgcaacgggaaactgaaattgatctgccttatggctcccgcagcactaagggctactgcagaaatagcccacccgagctttcctctcctcaaggcacctcatatgtgcacagtttttctagtaactacctcttctggtcacagtattcaattgcggttaag

SEQ ID NO: 46334 - DNA, 600 bp, Chicken  19866894287213_4
acttgaaaatgatttccctctcctttattcctgttgtgttaactttcaatgaatgaaatcattacctgcaacaggttcctatggccgctattcctacaacctctgagtgcctctttcaaaacagtcttctgaaatacatatggttccatctcgttgcttttggcagttttgtctttacatccagagatacaaagcatgtgtgcrggcatgcatctctaaacagtagacacatctgaagaataagtacagtttttataggtacataactaagctattgtgtaagtttgggatttgaggaaygtctgcttaccactcacactgatagatgaaaaatatctgccgatgcaacgggaaactgaaattgatctgccttatggctcccgcagcactaagggctactgcagaaatagcccacccgagctttcctctcctcaaggcacctcatatgtgcacagtttttctagtaactacctcttctggtcacagtattcaattgcggttaagttctgatatggtgataacatatacttgctaattgcagctaccttgcctgacagcttccagttttcttaagatctctgtccaactcttgttttccgt

SEQ ID NO: 46335 - DNA, 599 bp, Chicken  19866894287216_1
  misc_feature (1)..(49): n is any nucleotide
nnnnnnnnnnnnnnnnnnnnnnnnnnnnnnnnnnnnnnnnnnnnnnnnnttttacttttatcgagtaaattcgaagcgaaggtgaactgaaagcagttttccatgtgtgcgctgcttcctgtcagaatagcgtggaagaagtgcgggagcagcgggctgggaacgccgtgtggtaaaaggttgtgaaggcctcagaggtctgcgtgagcgcggagtacggcgggcgttcacctcatcccccttctcctacgtgccagccggtgggctgcgacgttttggcttctcgttggtttgcgtgcmgggctgtcggtgtgttcggtgtctgtgtgctgactgtgcgttctgtgcaggacggcggggcgctgcctgcagagctgtgtgatcacctgtggagctccgcttcagaactgaaagttttccatgttgaaagagtgtatccgtaacctcacccagtctgctaaacgcggaccatgcctagcaggatgggctcaaaagttaatttgagcaaagacatcatcagagtgaaggcgcactacagtgggtgagtctgtgtgttttctctctgttgtatcctgccaacctttgacgcctgtcaaaca

SEQ ID NO: 46336 - DNA, 600 bp, Chicken  19866894287216_2
tgctgactgtgcgttctgtgcaggacggcggggcgctgcctgcagagctgtgtgatcacctgtggagctccgcttcagaactgaaagttttccatgttgaaagagtgtatccgtaacctcacccagtctgctaaacgcggaccatgcctagcaggatgggctcaaaagttaatttgagcaaagacatcatcagagtgaaggcgcactacagtgggtgagtctgtgtgttttctctctgttgtatcctgccaacctttgacgcctgtcaaacaggagtctgcggtctgatgtagtaacagrgtaaccacagtgtccacrtagttgtatttaatgtctggtaattaaatagagttgttaagatcccatccagattcctgcagtgtactggttgtaggaaggagttgatggtttggccttgaagtggggaaaatgtgcgtgaatggtgtaaagtcactggaattatttagataaatatgggaagttaacgaatcttaattgcctctgatgctaatggtagagtcagatgaacctgtgcaagctgcttgaggatccacttgaactaaattaaacacctggagattaaacaaatctgttttcctg

SEQ ID NO: 46337 - DNA, 600 bp, Chicken  19866894287216_3
tgcaggacggcggggcgctgcctgcagagctgtgtgatcacctgtggagctccgcttcagaactgaaagttttccatgttgaaagagtgtatccgtaacctcacccagtctgctaaacgcggaccatgcctagcaggatgggctcaaaagttaatttgagcaaagacatcatcagagtgaaggcgcactacagtgggtgagtctgtgtgttttctctctgttgtatcctgccaacctttgacgcctgtcaaacaggagtctgcggtctgatgtagtaacagrgtaaccacagtgtccacrtagttgtatttaatgtctggtaattaaatagagttgttaagatcccatccagattcctgcagtgtactggttgtaggaaggagttgatggtttggccttgaagtggggaaaatgtgcgtgaatggtgtaaagtcactggaattatttagataaatatgggaagttaacgaatcttaattgcctctgatgctaatggtagagtcagatgaacctgtgcaagctgcttgaggatccacttgaactaaattaaacacctggagattaaacaaatctgttttcctgctgtgaataaacaccaga

SEQ ID NO: 46338 - DNA, 600 bp, Chicken  19866894287219_1
cagcagtagaactgactgttgtgccacccaaataaataggatgattggtatttagagtggggggaggtgtgcttgtactgcaaacagaattgtttgtaaggcctctaacttgacaacttgcttctttctgtttttctgtgtacttgctctctctctctctctctgttaatcccttgttctacaagtatccaatggtgagtcagaaacttttgatctggacgtgtacaatcatgtatccttaatacaggaaccaattcaaaggaaaagaagagtaaataaagtcaatgtgatagaggttcygactgagggctctgtgaattttggtagtcacgtgtgcagaggaagattgaatcacaggcattctcagagtgctctgcttcgatcgttagatttgttcaaggctgtrtgttaatattttgtcttacatagatactttatycacaagggcagtcactgtgagcwctggttgccttgaatactgtattttcttgataataatcyttttctttttttttcctttgtttggaattggttaagtttcaccattstggggtaatgctcctccaatagccagcactggagcacttacatagcacaagg

SEQ ID NO: 46339 - DNA, 600 bp, Chicken  19866894287219_2
aacttgacaacttgcttctttctgtttttctgtgtacttgctctctctctctctctctgttaatcccttgttctacaagtatccaatggtgagtcagaaacttttgatctggacgtgtacaatcatgtatccttaatacaggaaccaattcaaaggaaaagaagagtaaataaagtcaatgtgatagaggttcygactgagggctctgtgaattttggtagtcacgtgtgcagaggaagattgaatcacaggcattctcagagtgctctgcttcgatcgttagatttgttcaaggctgtrtgttaatattttgtcttacatagatactttatycacaagggcagtcactgtgagcwctggttgccttgaatactgtattttcttgataataatcyttttctttttttttcctttgtttggaattggttaagtttcaccattstggggtaatgctcctccaatagccagcactggagcacttacatagcacaaggcttttgattttcttgtgctcagcacagttttattgtgctcaacacagtttggagggccctaagcggtggtttggcttcagcttccttggaccttcctcagccttcc

SEQ ID NO: 46340 - DNA, 600 bp, Chicken  19866894287219_3
gtacttgctctctctctctctctctgttaatcccttgttctacaagtatccaatggtgagtcagaaacttttgatctggacgtgtacaatcatgtatccttaatacaggaaccaattcaaaggaaaagaagagtaaataaagtcaatgtgatagaggttcygactgagggctctgtgaattttggtagtcacgtgtgcagaggaagattgaatcacaggcattctcagagtgctctgcttcgatcgttagatttgttcaaggctgtrtgttaatattttgtcttacatagatactttatycacaagggcagtcactgtgagcwctggttgccttgaatactgtattttcttgataataatcyttttctttttttttcctttgtttggaattggttaagtttcaccattstggggtaatgctcctccaatagccagcactggagcacttacatagcacaaggcttttgattttcttgtgctcagcacagttttattgtgctcaacacagtttggagggccctaagcggtggtttggcttcagcttccttggaccttcctcagccttccttacaaggagctggactggaaggacagatggct

SEQ ID NO: 46341 - DNA, 600 bp, Chicken  19866894287219_4
ctgttaatcccttgttctacaagtatccaatggtgagtcagaaacttttgatctggacgtgtacaatcatgtatccttaatacaggaaccaattcaaaggaaaagaagagtaaataaagtcaatgtgatagaggttcygactgagggctctgtgaattttggtagtcacgtgtgcagaggaagattgaatcacaggcattctcagagtgctctgcttcgatcgttagatttgttcaaggctgtrtgttaatattttgtcttacatagatactttatycacaagggcagtcactgtgagcwctggttgccttgaatactgtattttcttgataataatcyttttctttttttttcctttgtttggaattggttaagtttcaccattstggggtaatgctcctccaatagccagcactggagcacttacatagcacaaggcttttgattttcttgtgctcagcacagttttattgtgctcaacacagtttggagggccctaagcggtggtttggcttcagcttccttggaccttcctcagccttccttacaaggagctggactggaaggacagatggcttttagcattaaagataaattact

SEQ ID NO: 46342 - DNA, 600 bp, Chicken  19866894287219_5
agaaacttttgatctggacgtgtacaatcatgtatccttaatacaggaaccaattcaaaggaaaagaagagtaaataaagtcaatgtgatagaggttcygactgagggctctgtgaattttggtagtcacgtgtgcagaggaagattgaatcacaggcattctcagagtgctctgcttcgatcgttagatttgttcaaggctgtrtgttaatattttgtcttacatagatactttatycacaagggcagtcactgtgagcwctggttgccttgaatactgtattttcttgataataatcyttttctttttttttcctttgtttggaattggttaagtttcaccattstggggtaatgctcctccaatagccagcactggagcacttacatagcacaaggcttttgattttcttgtgctcagcacagttttattgtgctcaacacagtttggagggccctaagcggtggtttggcttcagcttccttggaccttcctcagccttccttacaaggagctggactggaaggacagatggcttttagcattaaagataaattactgaacagtgaaggctcctttctcatcttctaagggacagc

SEQ ID NO: 46343 - DNA, 600 bp, Chicken  19866894287219_6
aaccaattcaaaggaaaagaagagtaaataaagtcaatgtgatagaggttcygactgagggctctgtgaattttggtagtcacgtgtgcagaggaagattgaatcacaggcattctcagagtgctctgcttcgatcgttagatttgttcaaggctgtrtgttaatattttgtcttacatagatactttatycacaagggcagtcactgtgagcwctggttgccttgaatactgtattttcttgataataatcyttttctttttttttcctttgtttggaattggttaagtttcaccattstggggtaatgctcctccaatagccagcactggagcacttacatagcacaaggcttttgattttcttgtgctcagcacagttttattgtgctcaacacagtttggagggccctaagcggtggtttggcttcagcttccttggaccttcctcagccttccttacaaggagctggactggaaggacagatggcttttagcattaaagataaattactgaacagtgaaggctcctttctcatcttctaagggacagcagcacagaagaaatatgcttttagtttatggaattttatggaatgac

SEQ ID NO: 46344 - DNA, 600 bp, Chicken  19866894287221_1
gctgctgtcacaaagttattgtgctactttcatttttgaaatgtcatccaggtagttaaactcagcacgaattctgaatttctttaagcaaagctacttttttttttactctatttttaaagctactccttactaactgttaagcaatatttccaccttagcaggactgcatgcaaaatagaaatacgaattctcaatactgacactaaaaacaaagacttacagtttgaatctgtggttgatttttactccaggatacatatttatcccaagacagagaagaatcctgctgtgcattcractttcaccactgctacttcagaagacaaggagaacacaggctctgtggagtccaggtgccagggagaagacttaagcttacaatggcagcatggagtccagcctcactgacccaacatgctgatgttccccagcccttcccatataaaaatgttgctgaatttctggtatttacagaattatacacacctccttacataccataacttaataaagagatatagcatttattttttcccccaaagtagagctcgcagcaatattcgtaccagattcagactgaaagaaccaaaccagacc

SEQ ID NO: 46345 - DNA, 600 bp, Chicken  19866894287222_1
aaaagggatactgcaaaccttccaagttcttacaacagctactaaacatgggacaatattatgaaaattcttattttacattccctggaagaacaaaggtatttctaacgtcagctacatgacactttctcattatttaaaacctaacaagacaaaaatacctgcggaggtgtcgctgggcttttcagcacctgtggctcacagacctcctgagggcacagctggctgcatcctgctcccacataagccacatcaaagccacagcagcccgactgcccagcttcttcctttgtccctgcraagtttcactgtcagaggattgttcttgacttagagttaagactgctttcacttgggcacagtgaccctgataagttgtacagtgcaagagaaaagcacaaattgctttattagactcacatacactgacaaccactaaattctacttgagtctatcatggtctctacatyactgaactcttcccaaacacatcgctaccttctatcacacccacgcaatgaaacactccagctttttcataactctcctgctgattgacagaggcttctcttactctgaattaattccttgtgttgttg

SEQ ID NO: 46346 - DNA, 600 bp, Chicken  19866894287222_2
gtcgctgggcttttcagcacctgtggctcacagacctcctgagggcacagctggctgcatcctgctcccacataagccacatcaaagccacagcagcccgactgcccagcttcttcctttgtccctgcraagtttcactgtcagaggattgttcttgacttagagttaagactgctttcacttgggcacagtgaccctgataagttgtacagtgcaagagaaaagcacaaattgctttattagactcacatacactgacaaccactaaattctacttgagtctatcatggtctctacatyactgaactcttcccaaacacatcgctaccttctatcacacccacgcaatgaaacactccagctttttcataactctcctgctgattgacagaggcttctcttactctgaattaattccttgtgttgttggagctatggaacaagcctctcagagaagcctgatcctactcatccttcccagaaatatatacttttcatttgctgaacagcaaaggatgacatcttgaaaaaatatcacagtgctgcacacaacaagggcatccaagaaggcacattccctctccactccacattttaatt

SEQ ID NO: 46347 - DNA, 599 bp, Chicken  19866894287223_1
  misc_feature (1)..(52): n is any nucleotide
nnnnnnnnnnnnnnnnnnnnnnnnnnnnnnnnnnnnnnnnnnnnnnnnnnnntcagagtatgaaaaaaaagtatctcagttaactaggtttcagtttcctcaaatctatcctgtcataattctgtcagttgtctaaaatatcatctgaaacatcagtttcttaagaggaaaatagggtacaagactttttcctttgcaaatctttacagaataatatgtctgactatacaattaacataagttacttcccaaatgtgccagcacaatgcatcttggaagttgttccacttacatcacttytatttaacacgttgtggarattttwaaattattttaaagtattttttaatgcatctattcatcagcttttccatacaaccaaaaaagaacagacttatgaaaaaaaagttacttcagaaatactaacttgacatagaagaatcttaagttcaagcatcttttgtctcttttctatattgacacttgacagatcatccatgattactcctctgctgctgacactagctgtaaataaccactcacatctaygtcttattatagtgccaaaacctttggagttaagctctcaatgagaattt

SEQ ID NO: 46348 - DNA, 599 bp, Chicken  19866894287223_2
  misc_feature (1)..(33): n is any nucleotide
nnnnnnnnnnnnnnnnnnnnnnnnnnnnnnnnntcagagtatgaaaaaaaagtatctcagttaactaggtttcagtttcctcaaatctatcctgtcataattctgtcagttgtctaaaatatcatctgaaacatcagtttcttaagaggaaaatagggtacaagactttttcctttgcaaatctttacagaataatatgtctgactatacaattaacataagttacttcccaaatgtgccagcacaatgcatcttggaagttgttccacttacatcacttytatttaacacgttgtggarattttwaaattattttaaagtattttttaatgcatctattcatcagcttttccatacaaccaaaaaagaacagacttatgaaaaaaaagttacttcagaaatactaacttgacatagaagaatcttaagttcaagcatcttttgtctcttttctatattgacacttgacagatcatccatgattactcctctgctgctgacactagctgtaaataaccactcacatctaygtcttattatagtgccaaaacctttggagttaagctctcaatgagaatttatacgatcaatgtttccct

SEQ ID NO: 46349 - DNA, 599 bp, Chicken  19866894287223_3
  misc_feature (1)..(27): n is any nucleotide
nnnnnnnnnnnnnnnnnnnnnnnnnnntcagagtatgaaaaaaaagtatctcagttaactaggtttcagtttcctcaaatctatcctgtcataattctgtcagttgtctaaaatatcatctgaaacatcagtttcttaagaggaaaatagggtacaagactttttcctttgcaaatctttacagaataatatgtctgactatacaattaacataagttacttcccaaatgtgccagcacaatgcatcttggaagttgttccacttacatcacttytatttaacacgttgtggarattttwaaattattttaaagtattttttaatgcatctattcatcagcttttccatacaaccaaaaaagaacagacttatgaaaaaaaagttacttcagaaatactaacttgacatagaagaatcttaagttcaagcatcttttgtctcttttctatattgacacttgacagatcatccatgattactcctctgctgctgacactagctgtaaataaccactcacatctaygtcttattatagtgccaaaacctttggagttaagctctcaatgagaatttatacgatcaatgtttccctattytt

SEQ ID NO: 46350 - DNA, 600 bp, Chicken  19866894287223_4
caaatgtgccagcacaatgcatcttggaagttgttccacttacatcacttytatttaacacgttgtggarattttwaaattattttaaagtattttttaatgcatctattcatcagcttttccatacaaccaaaaaagaacagacttatgaaaaaaaagttacttcagaaatactaacttgacatagaagaatcttaagttcaagcatcttttgtctcttttctatattgacacttgacagatcatccatgattactcctctgctgctgacactagctgtaaataaccactcacatctaygtcttattatagtgccaaaacctttggagttaagctctcaatgagaatttatacgatcaatgtttccctattyttaaaatgtatgaaaaagagaagaaaataaaaatattgataaagaatgcaytgttttcaccttcatttgaaatggagaaataactaaaataaaggaagaagagagaactgagtgcactgtgacgtcargcttgtttcctcagttaattagcttaaaaagtaaattaaaaaaaaaattatatatgcatttgctttcccacagtcttattttcccacagtcatatacta

SEQ ID NO: 46351 - DNA, 600 bp, Chicken  19866894287223_5
ttwaaattattttaaagtattttttaatgcatctattcatcagcttttccatacaaccaaaaaagaacagacttatgaaaaaaaagttacttcagaaatactaacttgacatagaagaatcttaagttcaagcatcttttgtctcttttctatattgacacttgacagatcatccatgattactcctctgctgctgacactagctgtaaataaccactcacatctaygtcttattatagtgccaaaacctttggagttaagctctcaatgagaatttatacgatcaatgtttccctattyttaaaatgtatgaaaaagagaagaaaataaaaatattgataaagaatgcaytgttttcaccttcatttgaaatggagaaataactaaaataaaggaagaagagagaactgagtgcactgtgacgtcargcttgtttcctcagttaattagcttaaaaagtaaattaaaaaaaaaattatatatgcatttgctttcccacagtcttattttcccacagtcatatactactggctctgtagagtccaaatatgcatctgatggtttcaaagatatcatcaagagtcttacagttaaaagcca

SEQ ID NO: 46352 - DNA, 600 bp, Chicken  19866894287223_6
tacaaccaaaaaagaacagacttatgaaaaaaaagttacttcagaaatactaacttgacatagaagaatcttaagttcaagcatcttttgtctcttttctatattgacacttgacagatcatccatgattactcctctgctgctgacactagctgtaaataaccactcacatctaygtcttattatagtgccaaaacctttggagttaagctctcaatgagaatttatacgatcaatgtttccctattyttaaaatgtatgaaaaagagaagaaaataaaaatattgataaagaatgcaytgttttcaccttcatttgaaatggagaaataactaaaataaaggaagaagagagaactgagtgcactgtgacgtcargcttgtttcctcagttaattagcttaaaaagtaaattaaaaaaaaaattatatatgcatttgctttcccacagtcttattttcccacagtcatatactactggctctgtagagtccaaatatgcatctgatggtttcaaagatatcatcaagagtcttacagttaaaagccactctgaacacaaatggtatgttagcagttttccaagtgttacatcaaatgt

SEQ ID NO: 46353 - DNA, 600 bp, Chicken  19866894287223_7
caagcatcttttgtctcttttctatattgacacttgacagatcatccatgattactcctctgctgctgacactagctgtaaataaccactcacatctaygtcttattatagtgccaaaacctttggagttaagctctcaatgagaatttatacgatcaatgtttccctattyttaaaatgtatgaaaaagagaagaaaataaaaatattgataaagaatgcaytgttttcaccttcatttgaaatggagaaataactaaaataaaggaagaagagagaactgagtgcactgtgacgtcargcttgtttcctcagttaattagcttaaaaagtaaattaaaaaaaaaattatatatgcatttgctttcccacagtcttattttcccacagtcatatactactggctctgtagagtccaaatatgcatctgatggtttcaaagatatcatcaagagtcttacagttaaaagccactctgaacacaaatggtatgttagcagttttccaagtgttacatcaaatgttgagaacctagtttaaaatagtgattttatgagaatccttagatagagctttatgtacttatgaaatcataactaaa

SEQ ID NO: 46354 - DNA, 599 bp, Chicken  19866894287234_1
  misc_feature (1)..(183): n is any nucleotide
nnnnnnnnnnnnnnnnnnnnnnnnnnnnnnnnnnnnnnnnnnnnnnnnnnnnnnnnnnnnnnnnnnnnnnnnnnnnnnnnnnnnnnnnnnnnnnnnnnnnnnnnnnnnnnnnnnnnnnnnnnnnnnnnnnnnnnnnnnnnnnnnnnnnnnnnnnnnnnnnnnnnnnnnnnnnnnnnnnnnnnnatcctcatgttcagtacatgtcttcttttacatgtcttttttgaaacaactggggttgtttcagacccagtcaatacaaatagttgcttgtgaagatcaggctaccccttaaatacytgtgttttatccttccatgcttctgcatgtctcctgctacagatgccagaaacccaaagaggatttctcctctggaggtcttcagttacacagaattccaatgctacatgtgtaattcgacaaatcaatacacatcrtatacatccctctcttacttttattctgtcatgtcctacagttgcaaaaaaaaaaaaaaaaaaaaaaaaaaaagagaaagaaatcaactctcaaaaatccaaagagtttacaaaattcaaatctcaggtgagtcaaatgatttttctagaatattaactctt

SEQ ID NO: 46355 - DNA, 599 bp, Chicken  19866894287234_2
  misc_feature (1)..(46): n is any nucleotide
nnnnnnnnnnnnnnnnnnnnnnnnnnnnnnnnnnnnnnnnnnnnnnatcctcatgttcagtacatgtcttcttttacatgtcttttttgaaacaactggggttgtttcagacccagtcaatacaaatagttgcttgtgaagatcaggctaccccttaaatacytgtgttttatccttccatgcttctgcatgtctcctgctacagatgccagaaacccaaagaggatttctcctctggaggtcttcagttacacagaattccaatgctacatgtgtaattcgacaaatcaatacacatcrtatacatccctctcttacttttattctgtcatgtcctacagttgcaaaaaaaaaaaaaaaaaaaaaaaaaaaagagaaagaaatcaactctcaaaaatccaaagagtttacaaaattcaaatctcaggtgagtcaaatgatttttctagaatattaactcttccaacaggcctgcaaaaagagtttgtgacagctgttccaaagaccttcagtgcctacagcctgaagtcttggttacaacatcataaaagttgaagttttagacaatgtaagtgcttctgtcttcattctaccgtggc

SEQ ID NO: 46356 - DNA, 600 bp, Chicken  19866894287240_1
agtcaatatgtttctgcatagacttactctgataaacagggaccctattcagatgattatttctgcctcacgttatgctggcattggaaaaaaaacagaagcaaggtgccccacaaaagtaagtaaaagaacaaaaccacttcttcttagttgagtttaggtgaataatatctgctatttgacaaaatatttaacaaagtttggattttacaagttcttagatgcacacatgttattgaaactagaaagaagtctcctttgattttaaagaaggaggaaactaaataacattttccacartgcttcagcaatgataacaagctgcttggcttctactgtgaaaactacaataaatactacggcctatttctggctacaaaaacatatagcagagtaacaacaaggttggtaacaacactgaaaaaaaaaacagtaatatgcttagttttttgaaacgcgtttctctgctatgctcaggaaattctagagaatttctgacagtataattttcaaatgcaacagcagcagatgccctcagctggacaacacacgtggaaggaaggattctgcagtagcagaggtagcttagagggcaactga

SEQ ID NO: 46357 - DNA, 600 bp, Chicken  19866894287250_1
gaactaaagctgtgattcctggcatcctgtggtggttggttttattactatttggaggtacttagatgataacagcacgaggaggaggactttggctgtgagaggccaaaggagaggggaagaaagcaattaagggcttataatggtgccaaagatttgtttctggtgctgtgactgtggaggtgaaagcttcacgacctgttgttgtttcactgtgtgcaaaagggaaaatttcactgggctgccttctaaccagctgttggcctaagggaggagaaatgatgatgtgtttgatttaaygccaccaatacaaggagaaagagcagagctgcacagaggatcaggctgcaaacaagcttatgggaactatacatccctcagccttcccctaaatcctggagctgactgccagggatcaagagagtgaaggcagccatcctggtggagctccagagcagaggaacttctgtgtatgtgaaagaccagagattaggagggaaacgcaggggagtatgtgagggggggggaggctaagtggccgttgattaaactcccatgaatgggatgagcagcagcaggcaggctattcatgtggttctc

SEQ ID NO: 46358 - DNA, 599 bp, Chicken  19866894287252_1
  misc_feature (1)..(142): n is any nucleotide
nnnnnnnnnnnnnnnnnnnnnnnnnnnnnnnnnnnnnnnnnnnnnnnnnnnnnnnnnnnnnnnnnnnnnnnnnnnnnnnnnnnnnnnnnnnnnnnnnnnnnnnnnnnnnnnnnnnnnnnnnnnnnnnnnnnnnnnnnnnnnnttgcagatctggtgtttctggtcttatttgactcttggcatttaaaggaaaggtacagagaataaaaaacatctgcagaaggcagttagtttaaactttagtagataacttattgtgatctatccctctctacagggtacagatgggattaaattggrtgcccatttttttttaggttgaggttaagccagaggaatcccacaccaggtacagaagtcttagcatagaatttctcctcaccatcaagttaacaggaagctcagtattttagttatagagacagaggtgtgtggaatatttaagcaagttcttgtgatagtacacaagtggatcccaatgaaggataaatatggtggctgttattagagtagaagtataaggaattattgttttcctgatctggtaggcacagttgcagacaattctgctttggatgttgaatacatttaccacaaat

SEQ ID NO: 46359 - DNA, 600 bp, Chicken  19866894287256_1
ccatagctatgacctctatacaatcttaatgcttggagcagctgaagtaactagaggagatcagtcctagtgacagctagatatggatttcagaaagaaaaacagatttcataaataaatcacttctctgtatctacatacacaatatcacatgtattggcaatgacagggaagggacaagtatgtagcaaattttcttcagtaggttgagataatatagcactgtcttcctgaaactgtagagtaccatgaggatatattttaaaaatgaaacacacgaacacttctatatgcagtacygaaaaatcygctcaatatattatgaaatatattatttcattctttgtgcaaacataagggatacttgacgttatatctgtcagggaagaatacagtacttacagcacctttaccaagattggtctctgccrggaagcaggagagccagcactttggagagaagcaaaatctctgtcttcagtgttcaagactaaattcatcagcataaagaaaaggagtgttcttcctgtatcagataacttttactggggagagtttagttttggagaatttagtatttggttttgtatgggctgggta

SEQ ID NO: 46360 - DNA, 600 bp, Chicken  19866894287256_2
tgacctctatacaatcttaatgcttggagcagctgaagtaactagaggagatcagtcctagtgacagctagatatggatttcagaaagaaaaacagatttcataaataaatcacttctctgtatctacatacacaatatcacatgtattggcaatgacagggaagggacaagtatgtagcaaattttcttcagtaggttgagataatatagcactgtcttcctgaaactgtagagtaccatgaggatatattttaaaaatgaaacacacgaacacttctatatgcagtacygaaaaatcygctcaatatattatgaaatatattatttcattctttgtgcaaacataagggatacttgacgttatatctgtcagggaagaatacagtacttacagcacctttaccaagattggtctctgccrggaagcaggagagccagcactttggagagaagcaaaatctctgtcttcagtgttcaagactaaattcatcagcataaagaaaaggagtgttcttcctgtatcagataacttttactggggagagtttagttttggagaatttagtatttggttttgtatgggctgggtattaagtaca

SEQ ID NO: 46361 - DNA, 492 bp, Chicken  19866894287256_3
atctacatacacaatatcacatgtattggcaatgacagggaagggacaagtatgtagcaaattttcttcagtaggttgagataatatagcactgtcttcctgaaactgtagagtaccatgaggatatattttaaaaatgaaacacacgaacacttctatatgcagtacygaaaaatcygctcaatatattatgaaatatattatttcattctttgtgcaaacataagggatacttgacgttatatctgtcagggaagaatacagtacttacagcacctttaccaagattggtctctgccrggaagcaggagagccagcactttggagagaagcaaaatctctgtcttcagtgttcaagactaaattcatcagcataaagaaaaggagtgttcttcctgtatcagataacttttactggggagagtttagttttggagaatttagtatttggttttgtatgggctgggtattaagtacacatgcgtgtcatga

SEQ ID NO: 46362 - DNA, 600 bp, Chicken  19866894287266_1
tcctacaagcatgagtgagttgtcacctggagacacaaagatgcatccatttttttttttttttgtcagtgtagtttcctatgagcaagagtcaaggagggagaactaatgcccctgctaagtcagcctattagcagctctcctagtaggtgttcagaattgcaaaacattcttagtgtataagatataaatcattatgactttgagatatgggactttttgtttctatccattccccaaatcttttcacaacagaagaaaattatttcacaaaaataaatagcagatgcatagatagartgatwtccaggggtctggccattccactcaagagaatctgttggcagacagaacacttaacccacaacactaggcttcaaatacagacattggattcttcccagccttgccatcatcagtccttttatcgtacttcatcaaatccctattcccttagtatattccaccgctgtaggattactagagctgatccttgaacatagatttgaaattgagattgtatgcgtgagaactagccacactatccactctacgtatcaatctcaggcaagatctgttagttctgtaacattagtcaaa

SEQ ID NO: 46363 - DNA, 600 bp, Chicken  19866894287266_2
caagcatgagtgagttgtcacctggagacacaaagatgcatccatttttttttttttttgtcagtgtagtttcctatgagcaagagtcaaggagggagaactaatgcccctgctaagtcagcctattagcagctctcctagtaggtgttcagaattgcaaaacattcttagtgtataagatataaatcattatgactttgagatatgggactttttgtttctatccattccccaaatcttttcacaacagaagaaaattatttcacaaaaataaatagcagatgcatagatagartgatwtccaggggtctggccattccactcaagagaatctgttggcagacagaacacttaacccacaacactaggcttcaaatacagacattggattcttcccagccttgccatcatcagtccttttatcgtacttcatcaaatccctattcccttagtatattccaccgctgtaggattactagagctgatccttgaacatagatttgaaattgagattgtatgcgtgagaactagccacactatccactctacgtatcaatctcaggcaagatctgttagttctgtaacattagtcaaagctca

SEQ ID NO: 46364 - DNA, 537 bp, Chicken  19866894287266_3
gagaactagccacactatccactctacgtatcaatctcaggcaagatctgttagttctgtaacattagtcaaagctcagttggcaatgtaatctagagcaatcagttctgtgctgtcactgcaaagtcttcctgggaaatggtaaacctgaagtagacttcttggagcgcagtgcagggtgaaaactgaaagaatagtaactgttgaacattagcaaagggtatgaagtcatttatcatgtcattttgacaggcttgtaacatgcgtagaaagcaaaagcaagtaagaactacaggacaragatccaagagtgcatggggagagtgcagagaaatgaaccattaatcaagggcacatggtcagaacacgggaaagctccatgtttcaaagtacagtgacctttatcacatatctagttaaataaaatgattaatgttctatgttcattgcttaatcagttgcattatttattaagaaagtgggcatgaattttttaaaaaatcaaagtaagaacagctttttaaagcaacaaaggag

SEQ ID NO: 46365 - DNA, 600 bp, Chicken  19866894287270_1
ggtagagctaccctgagccctgctgccttccatccttttcttgcagcagagctgcagactctctgactcctggagcaggtgaggctcccggcagtggaagtctcagacagggaaaggcaaatagtttgggactgcaccattgttttttttataaactataccggtggtgtaacagtgcttgcaaagcttgtgtgttcttgctttcagagccatggatccctgaagaactgaccgtaaacctggaatgcccatcaggtgttgtaatgcaagagcagacgatataaagatcttgtaagcttyactgctaggaattgttctctgctattgggttatcagggccgcacaaagccttttgatacaagtccaaggagtgagctgtttcttcagagatgatgaagcttagattaaatcaagacctcttatgactcaaaccaaatgacttccccttccctccccacagactaaatcagactttacaagctgtggcaatttcagtgcacaccacagctgttacctgaagcctgtagctgccttacaacttcttgaataggaactcgctttcctgcttttacccaagccttgctttctagcatcaccctt

SEQ ID NO: 46366 - DNA, 471 bp, Chicken  19866894287271_1
gcacttttgtctgtgatgtttcagcctcggagctgtcagcaggtgagaggacagcacagcttgctctctccaatattcagatacagtttagcatcagaaaatctttcagaacggtcgtagtccaggagaatacatctaattccctctaaaataatttggagcttcactgggtagaaaattgctatttctgctccattgccagagaattccatttttaattatagaaatttctgttatgaacaattataatactcctttgcattctctctcgctcttagttcaaacataccattagctttytaaactgctgctatgcactgagcaggcacaggtcactcctgatgcacagcagctcagacatccacgcctcccgaaccggctcatgctgagtaagaaaatacaaagctggtttgtttttgttgggtttttttttttttttttttgacatgttccaggacaaattatcctaaa

SEQ ID NO: 46367 - DNA, 600 bp, Chicken  19866894287280_1
cacatttggtttgaacgttggtcatctgatctgacttactgtagggctgagctgagctgggaggtgaaaactggctgtaagcttttggccactgagcaccaccctgtcagtggtgttgtgtgccatatctgtgccctttttgttttctttcttttttttttttaaagcattttaagcatgtgtgtaatggctgctgactcttgtgcacttacctctagcaaattgctgaacaggacatatccatgtttggctgcaaccatttcaaggctttcctacaaagaaagcagtagattagtctartaaatacattagaaacgtatttaaaacacagatattgtcttgatttcccckttaagtattactgtttgtttttttttgttatgaattccattgaagaagccctgtgcagaagtcctcttatgctattcttagcattaatgtgcttcctgaatgaattttaaatatagcatttaacttcttgggcagtgtcaaactatttttacggaagatcatcttagtatcactacttcatgtaagacgtgcatagtaacaacagttactgttaggtaatataaaagctccatagttgagaatgaccat

SEQ ID NO: 46368 - DNA, 600 bp, Chicken  19866894287280_2
ctgagctgggaggtgaaaactggctgtaagcttttggccactgagcaccaccctgtcagtggtgttgtgtgccatatctgtgccctttttgttttctttcttttttttttttaaagcattttaagcatgtgtgtaatggctgctgactcttgtgcacttacctctagcaaattgctgaacaggacatatccatgtttggctgcaaccatttcaaggctttcctacaaagaaagcagtagattagtctartaaatacattagaaacgtatttaaaacacagatattgtcttgatttcccckttaagtattactgtttgtttttttttgttatgaattccattgaagaagccctgtgcagaagtcctcttatgctattcttagcattaatgtgcttcctgaatgaattttaaatatagcatttaacttcttgggcagtgtcaaactatttttacggaagatcatcttagtatcactacttcatgtaagacgtgcatagtaacaacagttactgttaggtaatataaaagctccatagttgagaatgaccatgagctgcacttaccctcttagagcctggggggaaatcctgaatgtgtgatg

SEQ ID NO: 46369 - DNA, 600 bp, Chicken  19866894287283_1
cttcattgagaacaccattcttaaaccaaggagctttgctgttttgcttctttgctagtatgatctgtcaagcaactcagtctttcggacagatatgtccttaggtatacctatgaaatttcttggacacactccctcacttgaatatttaggaaaaaagtgcaacttcatctggaatattgtaaaaagctgtgttgaatgatggaaaaattatgggctgaagagaaaacaagttgtatttcctaatcttgtttaaaaatgtgagtggggtggaattatacagatagaggagggctgaaygtatggacggtttatgcaatcttctcagtattgtaataaataggaaacaagtatctacttcaaaatcagaaaagaatggatgtatttgtagaatatcagtttaaattaaacttcttctgtttttgttgtggatcagtgccccctgcaatgcttgtctgtataatctctgggagatttaggtctgagagcaacaatgaagttactgtcagaatgccctatatctgctgtattttgctgctccccacattgaacaactttttgcaccttgagatgagcacacttgctttctccaagttttgt

SEQ ID NO: 46370 - DNA, 600 bp, Chicken  19866894287289_1
cagtggagcaaggcattgccctagcaccagcagcgctctgaattcatctccacactccatgttttccttcactaagtctaatgagggctgcaggctgctagggaggcacgcagcaataaagactgaaaacagtgcgcaggacttccagctgcaaactgtgtgtgacccaggacctgacttgacttggcttgtgtggggatcctcttcccaatgtctgattcaccctcatactgtatgtagcatcatggtttttgtcagcattccatatcatagcatcatgtcatacgttctcagtactgrggctgctggggttgtaattcctggtttccttatggtgtgatgttatgatatggaatatcgatggacagtaccctggacgtgctccataggcatagggggacccagggtgaaagcccacccaaggaccgcagacaagggcacccataataactagagggtagctggagaagcagcaccattgggtgtatcagctgtgtgtaacctccagcagcatcatacaagaaatgtttggcctgacccaaagcccactggagaaaataaggagaagcatcacttccaggaacagcatggatgtggtgc

SEQ ID NO: 46371 - DNA, 600 bp, Chicken  19866894287293_1
atcataggttaaccatgttgggagaggtttttatatgtcgcaggtaggtctgtcatctgtatttcattccctgggtgctcatgagcctgcaggtattgcagtacaccaaagcacaggggctgcctgcaaggcccatgcaatgaaggcaattagcatggacgagtgcagacggtgccacatggctccaggcacacggtctcacatgtatccacacacttcttggtgcacacctccacgcatggtgctgggcagggctccacgcacttggtgctgcactgggtgctgcactgctccacgcayggaaccgggcactgcgtcgggcactgggtggcacagggcttgatgcaggcatcgacgcatgtagggggacagacatccacacactgagtggtgcactgggtgctgcaaggctccacacactgggtgacacactgggtgccacactgagtgctgcaaggctccacgcattgggtgacgcactgggtgctacactgagtgctgcaaggctccacgcactgggtgctgcactgagtgctgcaaggctccacacactgggtgacacactgagtgctgcaaggctccacacactgggtgacgcac

SEQ ID NO: 46372 - DNA, 599 bp, Chicken  19866894287295_1
  misc_feature (1)..(131): n is any nucleotide
nnnnnnnnnnnnnnnnnnnnnnnnnnnnnnnnnnnnnnnnnnnnnnnnnnnnnnnnnnnnnnnnnnnnnnnnnnnnnnnnnnnnnnnnnnnnnnnnnnnnnnnnnnnnnnnnnnnnnnnnnnnnnnnnnnntggagagctgctcacagtgcaaatcagctgagtcctctccctcttcctctctttctttctctctccctctggactagatggaccaacagaatggtcccattctgctgtctgtcatagcaattcctctagtagtaggtattttactaactaagtggagtattggtaccartagagwgactggcagtctttgtctactccaacgcattcatgtatgtttgcaggtgatgacacatctccgtgtgattgaggagcggatgaatcaaagcttatctctgctctacaaggtgccatatgtggctgaagaaatccargatgagattggtgagtgtctctgtgccagctcccttgccactgcgttagactaggatctgtgccttgaagtgcagaggactgcagaaggattgctaacttctttgaggatgccctaaacaataagcatgtgggtgtagacacaggtactgcagggca

SEQ ID NO: 46373 - DNA, 599 bp, Chicken  19866894287295_2
  misc_feature (1)..(125): n is any nucleotide
nnnnnnnnnnnnnnnnnnnnnnnnnnnnnnnnnnnnnnnnnnnnnnnnnnnnnnnnnnnnnnnnnnnnnnnnnnnnnnnnnnnnnnnnnnnnnnnnnnnnnnnnnnnnnnnnnnnnnnnnnnnnntggagagctgctcacagtgcaaatcagctgagtcctctccctcttcctctctttctttctctctccctctggactagatggaccaacagaatggtcccattctgctgtctgtcatagcaattcctctagtagtaggtattttactaactaagtggagtattggtaccartagagwgactggcagtctttgtctactccaacgcattcatgtatgtttgcaggtgatgacacatctccgtgtgattgaggagcggatgaatcaaagcttatctctgctctacaaggtgccatatgtggctgaagaaatccargatgagattggtgagtgtctctgtgccagctcccttgccactgcgttagactaggatctgtgccttgaagtgcagaggactgcagaaggattgctaacttctttgaggatgccctaaacaataagcatgtgggtgtagacacaggtactgcagggcagatatt

SEQ ID NO: 46374 - DNA, 600 bp, Chicken  19866894287295_3
tcacagtgcaaatcagctgagtcctctccctcttcctctctttctttctctctccctctggactagatggaccaacagaatggtcccattctgctgtctgtcatagcaattcctctagtagtaggtattttactaactaagtggagtattggtaccartagagwgactggcagtctttgtctactccaacgcattcatgtatgtttgcaggtgatgacacatctccgtgtgattgaggagcggatgaatcaaagcttatctctgctctacaaggtgccatatgtggctgaagaaatccargatgagattggtgagtgtctctgtgccagctcccttgccactgcgttagactaggatctgtgccttgaagtgcagaggactgcagaaggattgctaacttctttgaggatgccctaaacaataagcatgtgggtgtagacacaggtactgcagggcagatattctgtgggttttgcaacacagcaggtcagaacagcttgtcctaaaaactttcattctctgtgtcaaagtcaacaacagtcagcatattaaagatgtcattcaaaggtagatgaaaaaagaagcataaaaataagcaga

SEQ ID NO: 46375 - DNA, 600 bp, Chicken  19866894287307_1
tttttttaggtctccagcaactaaaggagagaccaaatgaagtgtcaggactttgtaaagattcgccttacaaaagttgttcaagggacatcacaagtgtggaccctgatgttcagttatgccagtgtgttgagagtactataattgaaataattaacatgagtgtaagtggagtttaggaagaatgtaaatgagattgtactgtgggtagtcccatggcctatggtgtctggatttggagagagctgccaaattggattgaagcacaaatctgtgtttttcattcattggattcaattrtggctgaaccttgttggaggaaaagaatacttcaaagggacttattttgcttggtaaatcatttctagtgagagtaggcatgattttttgggtgtgctttgtttctgatttgatacagcaacacaccccataatgggtttggtaacactgtgaagtgaggacttcatttgttgagcaaaatgcaaaatgatgggtaagaaaaatttaagattggagacctttactgaaactcaaatgaagtactgcttcagagccctgcagggcaagatggaataaaatattccaaggaacacttgaaaa

SEQ ID NO: 46376 - DNA, 600 bp, Chicken  19866894287310_1
tcatgccttcgatgttgttgtattctagcaggctgacataagcacccatttcagcaatggatcgaacattgaccatcacaacatcttccacctccggaaacttatgctggtagaacctacagcttagtgctggcattctggaatgtgaacagaaagaaacaaggatgacttatttcagagtacgtcactgccttctcctacataagtgttaagaagcagcaaagaccagcgaggttagagagcaacattaacactagaaagagctaactaggataaggcttaggtagcgtacagttaggwtttaacagataaactatagattaattactattttaaaatgagcacttttttctaactttctatttcacaagaaagaaaaagtttgctacccagactttattatccatgtagcagtccaatacagaggagacttcaagtggtgaaaagaaggcactgcacccttacattcatccaattcataaaataaagttggaaactaggtttcaccaacagcaggacacgagagagaagaaacccacagcgctgaaaggtatttctataaacacagacagcactgaaaggctgagaaagtaagaggta

SEQ ID NO: 46377 - DNA, 600 bp, Chicken  19866894287317_1
ctcaaccatttcttccctgcaatgctcaaaatctcagaaaataaataatatataaactgataagacataccactttcactgatatgataaggcaaaattataataatgaataaaaagtagatgtatcaggatctgtatgccaccaatgagccttgctgtctctgctgtgatctcctgggatcttttccaccctgtccatggtatagaagcacattttggctcagtctgaggccatcagttccctcacaagtgatgctgcaacagggcaagtctgtatacctgcctctggacctacctccyagatcaatacaagactttaataccaggtacttcacatcctgtatagacctctcaggcatacactgtgttttttttttttttttttccttggttgtttttttttctggtccagttttcagtcttgcatccttcattaactaggaatccatgttatagccttctcttcattcttgtctcagacctcatccacttctgtgccaagctatgttccctatgtggaccctagacttggcttgtcactcctcattgggggccatcatcagggctactgatggagcctgttaccagcacctggctctg

SEQ ID NO: 46378 - DNA, 501 bp, Chicken  19866894287318_1
tgggatccattttgcgtgttgagtttagtgacaaacacccaccctgacataagtattgctgtggggcctgcatggtgtaggattttaacctgattgtaatgctttcacttgagttggggtgtttgagactgcttctggtgttgatcctggttccctgcagcaacatctcccatatatcagaggccaacaacagtcttgtaacatattcagctatattctgttgacaccgaatggttggtttcatgctttcatataaccaaaaactcttaaatctgtgttttcctactatctttccctctkgtaggtggtagggaaaggaatgtttcttgtcctgtgctgaccccacacaggctgccagctccttctcctgygtccaggctcccactggtttttgggcacaagaaagctggtaaggtgtggctccctgcacatgcctgtgaacccagtggaggacaagctcccaggagatagacgctgttgctgacaagtgcacatttgcag

SEQ ID NO: 46379 - DNA, 430 bp, Chicken  19866894287318_2
tgggatccattttgcgtgttgagtttagtgacaaacacccaccctgacataagtattgctgtggggcctgcatggtgtaggattttaacctgattgtaatgctttcacttgagttggggtgtttgagactgcttctggtgttgatcctggttccctgcagcaacatctcccatatatcagaggccaacaacagtcttgtaacatattcagctatattctgttgacaccgaatggttggtttcatgctttcatataaccaaaaactcttaaatctgtgttttcctactatctttccctctygtccaggctcccactggtttttgggcacaagaaagctggtaaggtgtggctccctgcacatgcctgtgaacccagtggaggacaagctcccaggagatagacgctgttgctgacaagtgcacatttgcag

SEQ ID NO: 46380 - DNA, 600 bp, Chicken  19866894287322_1
caaagggaacaagagggctggttgataatttatagcaacatctcaaatttaaatggaaagtaaatatcaagttgttagcattaaagaaaacccattccagagagctggagatgtaacgttcgggggacattctccttccttcactcttcttgacttttccttctttttcctttgttcctttctttcccctcttcttccccattttttttcccccatttctcctttccttctttctttttctcagattctcaggcaagagagtcctttgtagcttctgaattgctgtttggaccagagctygcttaagcagaggttcagagctgtgaagttcccagcaccgtgctctgtccctttcctctggagcctgctggacaaccctcactgatgccagtgcacacctggagccaggctgggcagggagcagggaaggtaagaccatcggcagggttcctttctgatgaacttggcctggttcacctcatcttggtttatgtgtggaaatgaaaggggtgtggcagcttcatctcagcattccccagttccagctacccaaaggcacttaacgtgagaaagatactgaccctttatcaccactttttt

SEQ ID NO: 46381 - DNA, 600 bp, Chicken  19866894287325_1
gagcaatgccttttgggagtgcaggctggaacttacagagaacttacagatggagctgttttggaggatgaaaagtgtaagatttgtctctttaattacacctttttcttccagaatttctgcctatggagcagctggagggaagggagccaaaaaccacaatgagaggtcccacggggtcttcatctcggccaccttccagctggagaaagatgagctgctgtacatcttagtggggcagcagggggaggatgcctgccctggggtgagggcacaagtgggcagagactttgtagatayaattcactgagattcagtgggtggtttggggtttggctggactggtgatgaaagatagaaatcccaggatccagctctgaaatccagtcagtatagtacgaacgaataaaccaagttagaaagaatctcaaaacaaacatgaagaactctgaaaagaaaattgaccccaaaatgtgcaaacacatacaaaacccacaggaactttactttaagctcctggtgttttaattcattattggctttcttctgcttattttaagaggggagctactaggcaagagtattcccactcttattttt

SEQ ID NO: 46382 - DNA, 520 bp, Chicken  19866894287332_1
aaggcaagatggaattccagttccactctgagagattgtcttagagatcattataaaggcccattcagccaaagatcacacttgcattgcaggaagtcctctttatgcactgttaattacttcaacaatctataaaattaatggctaaatgaaccacatttatagagattatatttcagatattatttacatttaacagaatagcctttgttagtaatcactagatttatgaactgcttggaacaaaatggacacaccccagggaacctgcctcaatcccacaaacgcaccacagacgcrtgcacacatcgctcattcagcccggtgctgcagaactgcaccaagggagaggcttttcactgcccttttcattttcctaaatcctgcattttgtgctcttgcaaaggacaccgctcactatttcagtgtgagcacacgaggcgcatcccaaagatctgggatgaggtgctgagggacacttctttccctgcaaaactccagacacatctccagctttgca

SEQ ID NO: 46383 - DNA, 600 bp, Chicken  19866894287337_1
ggacctagaatttgcctcctgcaacaaactcccttgcaggggctgcctctttgtccttgcttgggcccgcattgttctgcctgctatatagccaagctgcataaataaaatatctcctgcatctttcatcattaaccgagttctcatagcgcttttcatttttagacacttcaccttttcaaaatcactgattaaatattaataaattaatctctcacacattcatgtgactcattctagacattttcacgatgattgtcttatgttctgcttttttatttgaatagcaaataaatcaartagatgtatcactcagtacaattaggtggcagttatgaatggtgccagaaatcaaggctggcaagctgatttctgctacatgtattcaacttgtgcttaaacacaggagataaaaaatgaagaactagtggcatgaatgatttaaaaaatgtttgtgttcttcagaagactgtttacttgtttgcttttaggattaatgagtcctttctaatggaagttattaaaaccatcattgatcatcaaggccctgtggccatagcggcatccctgggggaagtggtgtgacactgccctggagca

SEQ ID NO: 46384 - DNA, 600 bp, Chicken  19866894287343_1
gttctgaccctgcaatgagttttgcatgggcttatcaccatttacgcggatgggatgtgttagatgtgctatttcttctttcattgtggtaacaagtggcagctttgtcagtagttcatgttcatgaaacgctatcattttgtattaagcttcagtgaggtttgtaaactgttgttgaaatgaggaaaagcttgcaaatgagtgcaagctgaaagaaggctttaacaatatttggtttaggttgttaaaatagagttaattttttgctatttcctcttcactgttcagcttatttgcacrttaacttgcactactgttattaatttctggtttgtgcaaacagcatagaccttgtatgtgtttcctggagtgagtgagggcaggggcaggatgtacctaagaattagggaatcagtttggtgtgtgtttatactggctgtctagtgatatatgtaaatgttcggatcctgtcaggagttctaccctcagacatagttgagtttcttactctgagctctcttgtccactgccaaaggatttgttcttacttaaatattgcgtttagtgcaagatttgtaaatcgtgctgatggtttggcag

SEQ ID NO: 46385 - DNA, 600 bp, Chicken  19866894287343_2
gtacacaggagctgcagagcccatgggagaccctgtgtctgccctggacctccccacagtgcctgtttgttctgtaattttggtttaaaccttttttattttcctgtgaaatgaagtgctagagaaacaataacttgagtgaaacagttcataaagttgaagagtattgatcaaagtcctacagaataataaactattccctatgagagtagtttgctgttctgtgaattacctgcctgtcttcatgtagtggtaaaactttgatgccttaacatgataaatgccagtatttctgttcgyttctcatttcaaagttgcatgtttaaggaagtcagactagtcagttttgtactytctgttaatggaaactacctgtgataaatatcaggtgttgaggaagatatttcttacagatragattgtttcagtttgaatactatctcacattctgtttatctattatctaacatgttaagttgggggggggggggaagccaatgaaacaaaaagccactgtgctatcttaagtttacatgctttaaaaatgcaaaatatgctaatgaaagatgaaatgcaccttcagatactacagagaagtct

SEQ ID NO: 46386 - DNA, 600 bp, Chicken  19866894287343_3
cacagtgcctgtttgttctgtaattttggtttaaaccttttttattttcctgtgaaatgaagtgctagagaaacaataacttgagtgaaacagttcataaagttgaagagtattgatcaaagtcctacagaataataaactattccctatgagagtagtttgctgttctgtgaattacctgcctgtcttcatgtagtggtaaaactttgatgccttaacatgataaatgccagtatttctgttcgyttctcatttcaaagttgcatgtttaaggaagtcagactagtcagttttgtactytctgttaatggaaactacctgtgataaatatcaggtgttgaggaagatatttcttacagatragattgtttcagtttgaatactatctcacattctgtttatctattatctaacatgttaagttgggggggggggggaagccaatgaaacaaaaagccactgtgctatcttaagtttacatgctttaaaaatgcaaaatatgctaatgaaagatgaaatgcaccttcagatactacagagaagtctctgggaaggaggcccttgtgttgcacaaaatataggcacatgcacaggagtaat

SEQ ID NO: 46387 - DNA, 600 bp, Chicken  19866894287343_4
tgctagagaaacaataacttgagtgaaacagttcataaagttgaagagtattgatcaaagtcctacagaataataaactattccctatgagagtagtttgctgttctgtgaattacctgcctgtcttcatgtagtggtaaaactttgatgccttaacatgataaatgccagtatttctgttcgyttctcatttcaaagttgcatgtttaaggaagtcagactagtcagttttgtactytctgttaatggaaactacctgtgataaatatcaggtgttgaggaagatatttcttacagatragattgtttcagtttgaatactatctcacattctgtttatctattatctaacatgttaagttgggggggggggggaagccaatgaaacaaaaagccactgtgctatcttaagtttacatgctttaaaaatgcaaaatatgctaatgaaagatgaaatgcaccttcagatactacagagaagtctctgggaaggaggcccttgtgttgcacaaaatataggcacatgcacaggagtaatggaacagttttgcttataaatgataacgtctgtttcacacagtattccttttcattaggatc

SEQ ID NO: 46388 - DNA, 600 bp, Chicken  19866894287343_5
agccagttcctatgagcaattggtaataccgacctctgagcagtattgattggtttgttctgtttgtggacagccgctggtattactgtttttacttgctgaaagcctgctacttttatacctttgcaaacaattagggaaagtaacacctaagctttgccaacttgtatttattggctcacttcttgttgaagggaatagtgttcacgccttccagcttaattagttcggtgtgtgggtgcttgtgtaaagttaaatatttggtatcaattggaatttacatgatccaatgcattttcrtgataataataattattgattgggggtaaacatttgagatttctgtgcaggacttcttgaggtttttgtgtttggcttggccatacttgtacatgctgaggccaccaaggatgttggtcatctccagtaagggtcaaaaatctcacatcaactttgttcatcacttacagttgttctgtgaattaagcattttttttaaaagtaaggcctccaaatcatgttatttttagcatgtattttcattaaatatacctagggttttgtacaactgaaaccatcttttatttccttcaggtgatg

SEQ ID NO: 46389 - DNA, 600 bp, Chicken  19866894287357_1
gtgagaaggtacttcgtgtcaaaatttcagcatttcaaaacttacttcagattttcagacatgagaactcattggagcactttaatttctgcataattctgtttaactgagaaccctgtatttcagctggctgctaactcactatttgctttagagagcttggcagcctaatgtatcttaatgtaattatttgttaggacaatgatagctttgcttacaaactaagggacatatccttaaatgagaaagcctaatttgtgtatggacacataatacttaattgggtaaaatgtccctcaytgcatcaattactgaaatctagcacaatacagaattaagacaaaaatactgtaagaaaatttctaacaataacttgtaagatgaacaaatagaatgaaatcaaacaaatggtatgatggaagtggactaatgtatctctcaggaatttagcatcatttaatgctaatattaagtaaatcacattgatgacaagaaacagttgggcctgaaatacctatgctaacagtagttaagaactggaacgataatggaggctatgggggagaagttgcacttccacacgggtgctaaccagacaat

SEQ ID NO: 46390 - DNA, 600 bp, Chicken  19866894287358_1
ttttaatctttgatgtgtattctctaatatactactaagttttcttctccttttttcccagtagagtaaatacgttgggagttggtacttagcaagaattcccagtgttgcagcagtgctttatgcattaatcccagtctcggcattgaattgatactagatttcagagtgtttccacttcggtcctgtttgcttccttacaaaattccatacctattgaaccggagagataagatgaggagcataaagtcaatcaaatactgaaacgtaatctctaactaattctgtcagtgtttatcrtggaaatccataatattgagtgaagttcatcccaacctttcctcgggcccttctcacagaaaattcaaatccttaatttggtttttattcattagcttctctattgctcctctgtctttgcttccttgttgttgctgcaaaggggataattaaaactgtacagcaaaataaaaattttccaggagcagcatgtggctgaataggcaggatgcttcgtctcctctgacagcctgtttacaatgtgttgagctttgaatttcagtcgtaagtgcagtaagaattctagataactcagtccct

SEQ ID NO: 46391 - DNA, 599 bp, Chicken  19866894287361_1
  misc_feature (1)..(8): n is any nucleotide
nnnnnnnnacgtcgttcctcacgcacgccgtgcaaatgcacgcacacaaatacagaggagcgtgaaggtgtttgtacttctgctctgaggggcaggctatcaacagcgtaatcggggggagacagttcaatggtgtgacacggtacggtggcccgatcagcaggaggaaaaagacttccactgagctgcgtcttagggaacccgagaacagaagttctcggtcttctctgtcggggtgctctgtgccattttaacaggagcgaagggaaatggcggtatgtgccgaacgggtggccaggyagaggtaacctccagatattcccgtcctcgcttccarcatcggcgtggggtgaatggatttcaggcacctctctaaaagagttattattttttctttcaaataattaataataaaaaaagacaccaagcacgttgagcttggatacagcgctgggtttggcgggggtgggcaggagccgtgctctgtgcaaggagcggcggtgctgggtgatggcagctgccgttggtcatctrttgctgaccgcaaggaccgcagtgcctgcctttaatgaccagaatgtcacttaatgtcagaagca

SEQ ID NO: 46392 - DNA, 600 bp, Chicken  19866894287361_2
gcacgcacacaaatacagaggagcgtgaaggtgtttgtacttctgctctgaggggcaggctatcaacagcgtaatcggggggagacagttcaatggtgtgacacggtacggtggcccgatcagcaggaggaaaaagacttccactgagctgcgtcttagggaacccgagaacagaagttctcggtcttctctgtcggggtgctctgtgccattttaacaggagcgaagggaaatggcggtatgtgccgaacgggtggccaggyagaggtaacctccagatattcccgtcctcgcttccarcatcggcgtggggtgaatggatttcaggcacctctctaaaagagttattattttttctttcaaataattaataataaaaaaagacaccaagcacgttgagcttggatacagcgctgggtttggcgggggtgggcaggagccgtgctctgtgcaaggagcggcggtgctgggtgatggcagctgccgttggtcatctrttgctgaccgcaaggaccgcagtgcctgcctttaatgaccagaatgtcacttaatgtcagaagcacatcttcaaacaaaaagactcaggtaggtttatttttc

SEQ ID NO: 46393 - DNA, 600 bp, Chicken  19866894287361_3
ggtgctctgtgccattttaacaggagcgaagggaaatggcggtatgtgccgaacgggtggccaggyagaggtaacctccagatattcccgtcctcgcttccarcatcggcgtggggtgaatggatttcaggcacctctctaaaagagttattattttttctttcaaataattaataataaaaaaagacaccaagcacgttgagcttggatacagcgctgggtttggcgggggtgggcaggagccgtgctctgtgcaaggagcggcggtgctgggtgatggcagctgccgttggtcatctrttgctgaccgcaaggaccgcagtgcctgcctttaatgaccagaatgtcacttaatgtcagaagcacatcttcaaacaaaaagactcaggtaggtttatttttcacgcctgtatttgtgtcggcagtacctcttgtatgctctgtctgtgtgtaaatatctctgtttataataatctgtatacgcggtattggctgtcataaaagattgcttgccgctgaacttggaaattattaaaacaatgatagggcgataatagacaggcagctattctcagaacgtgacagactgctgaaaagcaa

SEQ ID NO: 46394 - DNA, 477 bp, Chicken  19866894287361_4
tgatatacggcggtcacagttgtcttttactaagaggagcacggtgatgctggttgtcattcttactctgctgtgtggcagcgtaaatagtcccctttctaaccaacctggtgggaaaagtcaatatcccatcagcaaaggaggtaaacacatcaggagctgtgtcctctctcatcttcccctgctctgtattaccgcagttctttaaatctcctctccccagtcatcagaggcactcgtgtcattcaaatgcaccgtgcggccgtgctgcggggacgctgccgcctgcctcccgccgcygagatccggctgccattgtcttataattgaaacttaaagctggcctcgccacttcagccgggcccctcgtgtgcctcccttcttctcagccacccttctcggctcgcccgcgcgaaagtcttaagaagtgtttgaggcaggctggttatcgtgtgtaattacagttcaggttgatgg

SEQ ID NO: 46395 - DNA, 600 bp, Chicken  19866894287369_1
atcagtgcttggtcagagctgggcacccacagtgcaatgcaacgcgattgttaccagtacttggaattagagataaatggaagattgaaacctcttttcttccaaaaggcttaattcctagaaggttcatgagctgcagtttgttggcatgtgctaaaaatgaggtcacgttcctgtgatatttgcctggagtttctctttggtttatagctttggttgaaggaaagtagtgccaagaaacactgcgaagcagacatttgtgcttactgctggcctgtgcatgggaagtattttccatcrttgcttgtcttacagctgtggatttgagagggaagtcttttatactaataatagcaagaagttatgatagaagttatccatgaaaaatcccaggcatgtgctgcttgctccctagagaagggcttcatggtagaaatggagattttgttttattatttatttgtttaaaggatcacaggcctgctcaccagttgtctcatgtgttctgtgcgtgtaagggcattccttggattcttttcttggcaatgttctcataaaatatccaatgttggaaatcagaaacagattttctctttaaac

SEQ ID NO: 46396 - DNA, 600 bp, Chicken  19866894287369_2
ttgagagggaagtcttttatactaataatagcaagaagttatgatagaagttatccatgaaaaatcccaggcatgtgctgcttgctccctagagaagggcttcatggtagaaatggagattttgttttattatttatttgtttaaaggatcacaggcctgctcaccagttgtctcatgtgttctgtgcgtgtaagggcattccttggattcttttcttggcaatgttctcataaaatatccaatgttggaaatcagaaacagattttctctttaaacaaatgcattttccaagttgaacygggcatacagaattttgtaaaacttgcttgcttctttctgtctttaatttgttttctttttcacatgcagccatcccaagtgaggggagggacttgcagtcatccaaatggaagagtctgtctaagtgaagatcctttgcagaatttaggatttagtttaaatctaaggaaagaactgattgatcgtggggtgtttgttcccctgacttcatttcagtttttcaatcctgcctcaactgtgtgtaatcactgttgggtttatgagtccgatccattccttttgtggttatttctttgtca

SEQ ID NO: 46397 - DNA, 599 bp, Chicken  19866894287374_1
  misc_feature (1)..(229): n is any nucleotide
nnnnnnnnnnnnnnnnnnnnnnnnnnnnnnnnnnnnnnnnnnnnnnnnnnnnnnnnnnnnnnnnnnnnnnnnnnnnnnnnnnnnnnnnnnnnnnnnnnnnnnnnnnnnnnnnnnnnnnnnnnnnnnnnnnnnnnnnnnnnnnnnnnnnnnnnnnnnnnnnnnnnnnnnnnnnnnnnnnnnnnnnnnnnnnnnnnnnnnnnnnnnnnnnnnnnnnnnnnnnnnnnnnnnntgtgaaagagtatccttagtcactgggcacagcggataactccagtcatttgagtaagtattaaaaaaaamaacaaccaagcagcaatgatcagtgctgcaccaccacaatagcagccatattcatagcacagctcctaytgctggttcctggactgagggcccacggaatccctttccatcatcagctccaacagtggtaaggagacataactgcccatggagaaatgcggcaactcaacctcacagacagcaaggcaacaacacttcagtaaacccttttgaaaaaaattgggtgcaagwttttggttttctgattcatgctgacctcatgaaaacacgactaaaagcttcttccttccattccttct

SEQ ID NO: 46398 - DNA, 599 bp, Chicken  19866894287374_2
  misc_feature (1)..(160): n is any nucleotide
nnnnnnnnnnnnnnnnnnnnnnnnnnnnnnnnnnnnnnnnnnnnnnnnnnnnnnnnnnnnnnnnnnnnnnnnnnnnnnnnnnnnnnnnnnnnnnnnnnnnnnnnnnnnnnnnnnnnnnnnnnnnnnnnnnnnnnnnnnnnnnnnnnnnnnnnnnnnnnnntgtgaaagagtatccttagtcactgggcacagcggataactccagtcatttgagtaagtattaaaaaaaamaacaaccaagcagcaatgatcagtgctgcaccaccacaatagcagccatattcatagcacagctcctaytgctggttcctggactgagggcccacggaatccctttccatcatcagctccaacagtggtaaggagacataactgcccatggagaaatgcggcaactcaacctcacagacagcaaggcaacaacacttcagtaaacccttttgaaaaaaattgggtgcaagwttttggttttctgattcatgctgacctcatgaaaacacgactaaaagcttcttccttccattccttctattttcatcttcttgcctgccagtcttttttttttttttaaattcttaattttatgtatgtgtatattt

SEQ ID NO: 46399 - DNA, 600 bp, Chicken  19866894287374_3
tgaaagagtatccttagtcactgggcacagcggataactccagtcatttgagtaagtattaaaaaaaamaacaaccaagcagcaatgatcagtgctgcaccaccacaatagcagccatattcatagcacagctcctaytgctggttcctggactgagggcccacggaatccctttccatcatcagctccaacagtggtaaggagacataactgcccatggagaaatgcggcaactcaacctcacagacagcaaggcaacaacacttcagtaaacccttttgaaaaaaattgggtgcaagwttttggttttctgattcatgctgacctcatgaaaacacgactaaaagcttcttccttccattccttctattttcatcttcttgcctgccagtcttttttttttttttaaattcttaattttatgtatgtgtatatttatgtatttattgccccctttatttgtacttagaattattctgcatttcttcactggaaatagcagcaataaaacacatccaaataggctgaaagaagcttttgggagtgaaatctatgtagctcattacagccttcctctgtgtgagattatccctccgtgta

SEQ ID NO: 46400 - DNA, 600 bp, Chicken  19866894287379_1
gcatgtcacagtttctgccaaaaattatcaaaagttttggttttgtttccataatggcttggcagataaatgttggctcatttcagagccctgagtcatcagaaatgtctgagtacccctttgttttcacgagggatgggcacagagtggatttctagcacaaatgaagagtgtttttaagaacgatcaagggtgggatatgtagttgattttcttgtacttgtgtagttgtatgacttaagtagagatgacaaagtccaaggagatcataaaggggacacaaaaggggccaaggaatgragtctgtgaataacttccaaaattacttgaggaaggctttagatgattacaggagaagatacttgartgtttggggaagacagtgtccaacagagataaaaatgccaagagaactgaagaagaactgaatgaagtcgtggggggtgtagaggttgttagaataattagtttctttgcaggagtatttcaaagcaatgaaacattggcaaggttatcwgtggggaatgatatggacttactgcattatatttaagttcactaaatagctatgtctctttgttaagatggatttaataatga

SEQ ID NO: 46401 - DNA, 600 bp, Chicken  19866894287379_2
aaatgttggctcatttcagagccctgagtcatcagaaatgtctgagtacccctttgttttcacgagggatgggcacagagtggatttctagcacaaatgaagagtgtttttaagaacgatcaagggtgggatatgtagttgattttcttgtacttgtgtagttgtatgacttaagtagagatgacaaagtccaaggagatcataaaggggacacaaaaggggccaaggaatgragtctgtgaataacttccaaaattacttgaggaaggctttagatgattacaggagaagatacttgartgtttggggaagacagtgtccaacagagataaaaatgccaagagaactgaagaagaactgaatgaagtcgtggggggtgtagaggttgttagaataattagtttctttgcaggagtatttcaaagcaatgaaacattggcaaggttatcwgtggggaatgatatggacttactgcattatatttaagttcactaaatagctatgtctctttgttaagatggatttaataatgaaaattcaatgctggagttgtgctggagttttttgcatataaaaagattgctcctgtctggtgcagca

SEQ ID NO: 46402 - DNA, 564 bp, Chicken  19866894287379_3
tacttgtgtagttgtatgacttaagtagagatgacaaagtccaaggagatcataaaggggacacaaaaggggccaaggaatgragtctgtgaataacttccaaaattacttgaggaaggctttagatgattacaggagaagatacttgartgtttggggaagacagtgtccaacagagataaaaatgccaagagaactgaagaagaactgaatgaagtcgtggggggtgtagaggttgttagaataattagtttctttgcaggagtatttcaaagcaatgaaacattggcaaggttatcwgtggggaatgatatggacttactgcattatatttaagttcactaaatagctatgtctctttgttaagatggatttaataatgaaaattcaatgctggagttgtgctggagttttttgcatataaaaagattgctcctgtctggtgcagcaggagttttgctggatttggtctgatatgcaggatatattcagttttccaatggaattagagtgtattgtgtctgcatagcatgttactaaaatggtgttggaggacacgatgtt

SEQ ID NO: 46403 - DNA, 600 bp, Chicken  19866894287386_1
agttttctgcagttagattttgtctgtatgtaggcaggtatttttgccaaagagagaacggcgtagtcatttagaacaggcacaaactcagttaaacacatactgggtgtctgtttagttttgaatatggtctttgcatgtaaatttctcagcgattgtctcttccttcctgggctcctgggcgatgtaagctatgtcgtgctgctcataagcagctgggaggtgctgctaagctgtccattatttatcaggtaaaagtcaagctccaacaggagataactacagaaatgtggcacttamatgtacactctcagcagagtttctgaagctatgtcaaaggytttgtcaaaagagaagggaaactttgagacatctgtcagagycgcagtcccacttctgctccgtgtaggacaacttcttatatgttgctgtgataatttagatttagcaattcccaaaatggaacagtaaccaccttgaagtagaaatgacgggcttggcttatttcaagatgagggcactgtcttgattaacagcctcaatttgatctaccagcgagggctactaacagtgaagttactcacttttccaggtcacaga

SEQ ID NO: 46404 - DNA, 600 bp, Chicken  19866894287386_2
ttttgccaaagagagaacggcgtagtcatttagaacaggcacaaactcagttaaacacatactgggtgtctgtttagttttgaatatggtctttgcatgtaaatttctcagcgattgtctcttccttcctgggctcctgggcgatgtaagctatgtcgtgctgctcataagcagctgggaggtgctgctaagctgtccattatttatcaggtaaaagtcaagctccaacaggagataactacagaaatgtggcacttamatgtacactctcagcagagtttctgaagctatgtcaaaggytttgtcaaaagagaagggaaactttgagacatctgtcagagycgcagtcccacttctgctccgtgtaggacaacttcttatatgttgctgtgataatttagatttagcaattcccaaaatggaacagtaaccaccttgaagtagaaatgacgggcttggcttatttcaagatgagggcactgtcttgattaacagcctcaatttgatctaccagcgagggctactaacagtgaagttactcacttttccaggtcacagaataaaaggcttaccattggtttccgcttgagccttgcattg

SEQ ID NO: 46405 - DNA, 600 bp, Chicken  19866894287386_3
aaactcagttaaacacatactgggtgtctgtttagttttgaatatggtctttgcatgtaaatttctcagcgattgtctcttccttcctgggctcctgggcgatgtaagctatgtcgtgctgctcataagcagctgggaggtgctgctaagctgtccattatttatcaggtaaaagtcaagctccaacaggagataactacagaaatgtggcacttamatgtacactctcagcagagtttctgaagctatgtcaaaggytttgtcaaaagagaagggaaactttgagacatctgtcagagycgcagtcccacttctgctccgtgtaggacaacttcttatatgttgctgtgataatttagatttagcaattcccaaaatggaacagtaaccaccttgaagtagaaatgacgggcttggcttatttcaagatgagggcactgtcttgattaacagcctcaatttgatctaccagcgagggctactaacagtgaagttactcacttttccaggtcacagaataaaaggcttaccattggtttccgcttgagccttgcattgtcacaaaatttcacaggaaaggggagctttgctgaaaaatgt

SEQ ID NO: 46406 - DNA, 365 bp, Chicken  19866894287394_1
cctgttctgctccgagatttatttttccagctgcaggagctgatgtctgcagagtgcagaccgacccagggcgcctgagcagcctctgctgggggctcagtgctcaggatgggatccagcactgggactgtgcctgcctgttcacggtgctgcctttggggtgttaggacccatggcaccgacccttcctgcaacccagaggacacctatgaggcacctcaggggtcctggagaagtctccctgcaggcccatgtcccacagtgtgggcactgagcacccccaggcccagcaacacaggygggacattaaggaggctgcatggtcagtgctgatggcacaccgggagcacgcagaggggggtgga

SEQ ID NO: 46407 - DNA, 559 bp, Chicken  19866894287398_1
atatcctcttcagcccctggcagaagcacatcctcaactgatacacaaagcaggcaacagctgagctgcacgcaacctgacacaacagtgtcttcctctgatctttccaagccaaggacttgctttaatttctgcagttaatatttgagttaaatggctcatgactaactgatggaactaataatctgcagggagcaggtagtttttctcttccattgctgctcttggtaggcaagggtcagcacccattagtgaggaatgaaggcagacagttgtttgtttttaggatgttggcaagamttctccacaacaactgtcagaaattagcagcttgcaggtaaggttctggagaaaagaagtaaaaaaattctacaagggacaaattattaatgcaatctcttttagtgtaattccttttactctcataatactccctgatagaacatctgatcagcagaacaacatcttcatgagtttagacattcaaatgaattacacgagtgtgtattactacttgacaaatatcctccattttgctttttgcactaggaaagtcaat

SEQ ID NO: 46408 - DNA, 600 bp, Chicken  19866894287405_1
ttctcaaacatttagggtgagcactataaagcatgaaacaagacaaagagcacgcagcaacaaatgtccttgcttaatagttctgtccacacatctccctgctgtgcactttcagtccaggctgtactgccagggtaactttcagtactgatttcagtactaaactctacaatagtatctccgcacctgagaaagacaactggcatctttttcactgagagagtggcacgatgctggaacaggctgcccagagaggttgtggaggccctatccctggaggtgttcaaagccaggttggakggggccttggacagcctggtctagtacttgatgtagtggctggaaccctgcctgtagtagtgcggttggaacccgatgatccttgaggtccaacacaagccattctatgattctgtgtttctgtaatcttcaaraaacttcagtgtctcagaaggtgaagctctacagccagccagccagcctaagcactttaaagacaaatcaagttaccttctgtcatcaaaactgtatcctgagcacagcatttgagaactgragtggcaaagcaggaaagcttgccttgtgaacattctcattcct

SEQ ID NO: 46409 - DNA, 600 bp, Chicken  19866894287405_2
gtaactttcagtactgatttcagtactaaactctacaatagtatctccgcacctgagaaagacaactggcatctttttcactgagagagtggcacgatgctggaacaggctgcccagagaggttgtggaggccctatccctggaggtgttcaaagccaggttggakggggccttggacagcctggtctagtacttgatgtagtggctggaaccctgcctgtagtagtgcggttggaacccgatgatccttgaggtccaacacaagccattctatgattctgtgtttctgtaatcttcaaraaacttcagtgtctcagaaggtgaagctctacagccagccagccagcctaagcactttaaagacaaatcaagttaccttctgtcatcaaaactgtatcctgagcacagcatttgagaactgragtggcaaagcaggaaagcttgccttgtgaacattctcattcctctatttaacgtggatgygcagaaatgtgcattattctatctgtataacagaaaaataaggcacagcaaatccaggccaacattcaggtctgctgacgtgtcatgctctgctctctctgcagctctcatccagaa

SEQ ID NO: 46410 - DNA, 600 bp, Chicken  19866894287405_3
ttgtggaggccctatccctggaggtgttcaaagccaggttggakggggccttggacagcctggtctagtacttgatgtagtggctggaaccctgcctgtagtagtgcggttggaacccgatgatccttgaggtccaacacaagccattctatgattctgtgtttctgtaatcttcaaraaacttcagtgtctcagaaggtgaagctctacagccagccagccagcctaagcactttaaagacaaatcaagttaccttctgtcatcaaaactgtatcctgagcacagcatttgagaactgragtggcaaagcaggaaagcttgccttgtgaacattctcattcctctatttaacgtggatgygcagaaatgtgcattattctatctgtataacagaaaaataaggcacagcaaatccaggccaacattcaggtctgctgacgtgtcatgctctgctctctctgcagctctcatccagaactactttccccagcaccagaatggtgctacttgattttgatttattgcaagtgaattattataatgaaatcaccaacttgatttaagcctctgagaaggatacggttggactaacaaaaaat

SEQ ID NO: 46411 - DNA, 600 bp, Chicken  19866894287405_4
ggtctagtacttgatgtagtggctggaaccctgcctgtagtagtgcggttggaacccgatgatccttgaggtccaacacaagccattctatgattctgtgtttctgtaatcttcaaraaacttcagtgtctcagaaggtgaagctctacagccagccagccagcctaagcactttaaagacaaatcaagttaccttctgtcatcaaaactgtatcctgagcacagcatttgagaactgragtggcaaagcaggaaagcttgccttgtgaacattctcattcctctatttaacgtggatgygcagaaatgtgcattattctatctgtataacagaaaaataaggcacagcaaatccaggccaacattcaggtctgctgacgtgtcatgctctgctctctctgcagctctcatccagaactactttccccagcaccagaatggtgctacttgattttgatttattgcaagtgaattattataatgaaatcaccaacttgatttaagcctctgagaaggatacggttggactaacaaaaaattgttctgcaaaacaagcaattattgttaggttcactggatattggccttagcaatccaact

SEQ ID NO: 46412 - DNA, 600 bp, Chicken  19866894287405_5
ctctctgcagctctcatccagaactactttccccagcaccagaatggtgctacttgattttgatttattgcaagtgaattattataatgaaatcaccaacttgatttaagcctctgagaaggatacggttggactaacaaaaaattgttctgcaaaacaagcaattattgttaggttcactggatattggccttagcaatccaactgattatagaaagttaatgatttaaaaagcaatgaagaaataagagattaaatcctttaaatttgcatgaaaggctctgagaggaactttatagygattttcactgcatattttattagatatgtgatattttattcatgggtaaagcaaatataacaattaggaataattagcatttcagcacagagtgttatctaataggttaaaatacacatataattcttcatttaaattctatgtcttcacattttcccctttctggttcagaacttttccatttagtatatcacttacaggaatattacacagctcctggagaaacagaaacagagaactagcgtctctcgcctttgatatcttattttcttctgctccttgcatttttactcagcttc

SEQ ID NO: 46413 - DNA, 574 bp, Chicken  19866894287408_1
cattctatgacaaggtgacctgcttagtggatgaaggtaaggctgttgatgtggtctatctggacttcagtagagcctctgacattgtccctctcaacattctcatggaaaagctgactgcccacagtttggatgggcgtacactccattgggtgaaacgctggctggatggccaggccctaagagttgtggtcaatggagttaaatccagttggtggccagtgtcccccagggctcggtactgggactgcttctatttagcatctttattaacaatcttgataaggggattgagtgcaycctcagtaagttggcagacaacaccaagttgggaggaaatgttgatctgcctgaggggagaaaggcactacagagggacctggatcgactggattgatgggccaaggttaactgtatgagtttcaatagggccaagtgtcaggtcctgcattttggtcacaacaaccacaggcaaccctacaggcttggggaggattggctaaaaagctgcctgatggaaagggacttttggtgtactgatggacagttggctgaatatgagccagtagcgtgc

SEQ ID NO: 46414 - DNA, 600 bp, Chicken  19866894287411_1
tgcttctcacggtgtccacacaaagcctccgtgctcagctcagctcatggtgctggaccaggtctgttcaactctgagcagtttccccagaggggcagtgagtcccagctttggcaataggccacagttactgggcagagagcagtgcaaagaggtggtgctgctgcccttgagcgtttcgtttcaaagcaggtttccaaacatggacaaggaggaattaagacctggaggcatagtgtggtgtgctgtcacagcctaagggctgtgctgttggctttatttcctcctgctggcccaggrctcattcagccaagccagcgtgggaggctttccaccaggcagwgctgctctgaggtttgcaaagctgggagggaaggtgtacagcaaggacatggacattggcatggcattgagccactctaggcagtgataactgttaatgcgggcttttcctgcttccacagcttcaggttggaacccaacagtctcagctgcacaatccagcagctctgtgctgctccatgggcatcaacactgtgtgctgctgccycagaggaatcagagccatgagctggggtgacagtgaaagggcaccaccaa

SEQ ID NO: 46415 - DNA, 600 bp, Chicken  19866894287411_2
ctcatggtgctggaccaggtctgttcaactctgagcagtttccccagaggggcagtgagtcccagctttggcaataggccacagttactgggcagagagcagtgcaaagaggtggtgctgctgcccttgagcgtttcgtttcaaagcaggtttccaaacatggacaaggaggaattaagacctggaggcatagtgtggtgtgctgtcacagcctaagggctgtgctgttggctttatttcctcctgctggcccaggrctcattcagccaagccagcgtgggaggctttccaccaggcagwgctgctctgaggtttgcaaagctgggagggaaggtgtacagcaaggacatggacattggcatggcattgagccactctaggcagtgataactgttaatgcgggcttttcctgcttccacagcttcaggttggaacccaacagtctcagctgcacaatccagcagctctgtgctgctccatgggcatcaacactgtgtgctgctgccycagaggaatcagagccatgagctggggtgacagtgaaagggcaccaccaacacaggagtcaaggggatgctgggagctgtgggtgtttgatgc

SEQ ID NO: 46416 - DNA, 600 bp, Chicken  19866894287411_3
acagcctaagggctgtgctgttggctttatttcctcctgctggcccaggrctcattcagccaagccagcgtgggaggctttccaccaggcagwgctgctctgaggtttgcaaagctgggagggaaggtgtacagcaaggacatggacattggcatggcattgagccactctaggcagtgataactgttaatgcgggcttttcctgcttccacagcttcaggttggaacccaacagtctcagctgcacaatccagcagctctgtgctgctccatgggcatcaacactgtgtgctgctgccycagaggaatcagagccatgagctggggtgacagtgaaagggcaccaccaacacaggagtcaaggggatgctgggagctgtgggtgtttgatgctttaggatgtgttgttgctctgctttggagcccagaggaaaagaaaggtgcaacagccttctagactatatggtgcattggctttagagctgtgatgatgaactgcagaacttctcaatgggggactcaactaacttatcagatacatttcctgcttctgagatgatgagatgctgtgtgagaaagcaagaaaaaaagaaactcaaa

SEQ ID NO: 46417 - DNA, 595 bp, Chicken  19866894287412_1
gaagcacttctttcctgttcttaggtggcagttttagcatttagaatgataggggcttggaaagcaaattgtcagatctgacacttttcactgaagccagtactgttcagtggctgcagaaaataattcagctttcataaatgtgtgatagagctcatatgaatttactatggttcatgtgcctttacatgaatcatgtttaaaacaaacaaatggcttattaaggggaaaatctcctgcagaccccaatcctgagatgcccgttgctgtgctctcatgtctcaaatctcactgtgcccrtagtatgtgccacttgctgtcactgtgaggagcagcaygragtcacactgcagcctgcttcagtccayctctgtgaatgatcagtctctcattgatataaaacgatagtgagaagcaactaaaggttgctcagctttctgaactcagctcttagggctgctcctgcacctgaccagttggtggggcatgggaggctgcatctggtccccagttcctggctggcagacctgtgcctgcaagctggctgtgctgcttatagctgctcacaaccactgctgctcaggtctatcagggg

SEQ ID NO: 46418 - DNA, 557 bp, Chicken  19866894287412_2
atttagaatgataggggcttggaaagcaaattgtcagatctgacacttttcactgaagccagtactgttcagtggctgcagaaaataattcagctttcataaatgtgtgatagagctcatatgaatttactatggttcatgtgcctttacatgaatcatgtttaaaacaaacaaatggcttattaaggggaaaatctcctgcagaccccaatcctgagatgcccgttgctgtgctctcatgtctcaaatctcactgtgcccrtagtatgtgccacttgctgtcactgtgaggagcagcaygragtcacactgcagcctgcttcagtccayctctgtgaatgatcagtctctcattgatataaaacgatagtgagaagcaactaaaggttgctcagctttctgaactcagctcttagggctgctcctgcacctgaccagttggtggggcatgggaggctgcatctggtccccagttcctggctggcagacctgtgcctgcaagctggctgtgctgcttatagctgctcacaaccactgctgctcaggtctatcagggg

SEQ ID NO: 46419 - DNA, 555 bp, Chicken  19866894287412_3
ttagaatgataggggcttggaaagcaaattgtcagatctgacacttttcactgaagccagtactgttcagtggctgcagaaaataattcagctttcataaatgtgtgatagagctcatatgaatttactatggttcatgtgcctttacatgaatcatgtttaaaacaaacaaatggcttattaaggggaaaatctcctgcagaccccaatcctgagatgcccgttgctgtgctctcatgtctcaaatctcactgtgcccrtagtatgtgccacttgctgtcactgtgaggagcagcaygragtcacactgcagcctgcttcagtccayctctgtgaatgatcagtctctcattgatataaaacgatagtgagaagcaactaaaggttgctcagctttctgaactcagctcttagggctgctcctgcacctgaccagttggtggggcatgggaggctgcatctggtccccagttcctggctggcagacctgtgcctgcaagctggctgtgctgcttatagctgctcacaaccactgctgctcaggtctatcagggg

SEQ ID NO: 46420 - DNA, 527 bp, Chicken  19866894287412_4
ttgtcagatctgacacttttcactgaagccagtactgttcagtggctgcagaaaataattcagctttcataaatgtgtgatagagctcatatgaatttactatggttcatgtgcctttacatgaatcatgtttaaaacaaacaaatggcttattaaggggaaaatctcctgcagaccccaatcctgagatgcccgttgctgtgctctcatgtctcaaatctcactgtgcccrtagtatgtgccacttgctgtcactgtgaggagcagcaygragtcacactgcagcctgcttcagtccayctctgtgaatgatcagtctctcattgatataaaacgatagtgagaagcaactaaaggttgctcagctttctgaactcagctcttagggctgctcctgcacctgaccagttggtggggcatgggaggctgcatctggtccccagttcctggctggcagacctgtgcctgcaagctggctgtgctgcttatagctgctcacaaccactgctgctcaggtctatcagggg

SEQ ID NO: 46421 - DNA, 599 bp, Chicken  19866894287434_1
  misc_feature (1)..(143): n is any nucleotide
nnnnnnnnnnnnnnnnnnnnnnnnnnnnnnnnnnnnnnnnnnnnnnnnnnnnnnnnnnnnnnnnnnnnnnnnnnnnnnnnnnnnnnnnnnnnnnnnnnnnnnnnnnnnnnnnnnnnnnnnnnnnnnnnnnnnnnnnnnnnnnnatttagcagacctgagttcacttctcacagtgctacatgtgttctgggtcacctttggcaagtcatcttgactacctcttaaaagctgctttcaacaggagaatctctctgaagacctgagctgcagccaatgcctcagttgctcatatcccagtgytgtcatagaatcattgaatcatagaatggattgagttggaarggacctcaaagatcatctagttccaaccctctgctatgggcaggcttaccagccactacatgagacactaaatgagggttcccagggccccatccaacctggccttgaacacctcttgggttgcgtcatccacaacttatctggktagcttgtgccagggcctcaccagtttcaactttctgtggctgcaaaaagtataattacatgacagcaaggaaaaaacaagggggaaaggattatggtgctcagtagaaatc

SEQ ID NO: 46422 - DNA, 599 bp, Chicken  19866894287434_2
  misc_feature (1)..(101): n is any nucleotide
nnnnnnnnnnnnnnnnnnnnnnnnnnnnnnnnnnnnnnnnnnnnnnnnnnnnnnnnnnnnnnnnnnnnnnnnnnnnnnnnnnnnnnnnnnnnnnnnnnnnnatttagcagacctgagttcacttctcacagtgctacatgtgttctgggtcacctttggcaagtcatcttgactacctcttaaaagctgctttcaacaggagaatctctctgaagacctgagctgcagccaatgcctcagttgctcatatcccagtgytgtcatagaatcattgaatcatagaatggattgagttggaarggacctcaaagatcatctagttccaaccctctgctatgggcaggcttaccagccactacatgagacactaaatgagggttcccagggccccatccaacctggccttgaacacctcttgggttgcgtcatccacaacttatctggktagcttgtgccagggcctcaccagtttcaactttctgtggctgcaaaaagtataattacatgacagcaaggaaaaaacaagggggaaaggattatggtgctcagtagaaatctcagtggtcaggtgagaagtaacccaatggagattctagtgt

SEQ ID NO: 46423 - DNA, 600 bp, Chicken  19866894287434_3
tgggtcacctttggcaagtcatcttgactacctcttaaaagctgctttcaacaggagaatctctctgaagacctgagctgcagccaatgcctcagttgctcatatcccagtgytgtcatagaatcattgaatcatagaatggattgagttggaarggacctcaaagatcatctagttccaaccctctgctatgggcaggcttaccagccactacatgagacactaaatgagggttcccagggccccatccaacctggccttgaacacctcttgggttgcgtcatccacaacttatctggktagcttgtgccagggcctcaccagtttcaactttctgtggctgcaaaaagtataattacatgacagcaaggaaaaaacaagggggaaaggattatggtgctcagtagaaatctcagtggtcaggtgagaagtaacccaatggagattctagtgtttgatgtagactttgaaagcatcagcatgaagaaaaaagtagacatgagatgtcagctcatgcctctggtttgtgcctaatagactctctccagagtttccttaaacaggacaaactacttcccagcaagcagccaaaatggttgt

SEQ ID NO: 46424 - DNA, 599 bp, Chicken  19866894287439_1
  misc_feature (1)..(181): n is any nucleotide
nnnnnnnnnnnnnnnnnnnnnnnnnnnnnnnnnnnnnnnnnnnnnnnnnnnnnnnnnnnnnnnnnnnnnnnnnnnnnnnnnnnnnnnnnnnnnnnnnnnnnnnnnnnnnnnnnnnnnnnnnnnnnnnnnnnnnnnnnnnnnnnnnnnnnnnnnnnnnnnnnnnnnnnnnnnnnnnnnnnnngtttctcattcaggtcccacagggttccatagagtctttttgtccaccccttcagggactgggagtctgtcttcagggcagccttaagaataccgttataacattcagtgaggcctgcycctgttggattatatggcaagtagaatcatcattcactgttgttttcttctgcccatcattgtatcattgcaccagtaaaacgagtcccttggttgttctcgatgacttgaattgtcctgtaggcagacatcagtttagtaagtgccttgatggtatatgcctggtttgcttttggtactggataggcctgcagtagcccacttgcagcatcgacacaggtcagggcatatctagcccctcagaccaagggagaggcccaatgtaatcaacctgccattgctggagaggatgggctgtt

SEQ ID NO: 46425 - DNA, 600 bp, Chicken  19866894287439_2
cctgcagtagcccacttgcagcatcgacacaggtcagggcatatctagcccctcagaccaagggagaggcccaatgtaatcaacctgccattgctggagaggatgggctgttgtttcaggcaacactatcaggttttctccaattcaccaggtcacgtgctactagattatcacaatatgttggtgaacgtacgtaaccctgtagcaggacctgaatgccaccccactgcctgcctccccatgtaaacgtgaactggtcttgcaattcttcagcaattggaatactgaagaatgcatttrctaaatctaggacaaaatgctaggtttttatctccctactcagtgtgtccattagggaggcaatactgggtacagctgcatgaatagctttaattctctataatccaccgtcattctccatgttccatctgacttttgcactggccatatgggggaattatatgggctatgtgcaggtcttataatgctgactttttcgaattcctgcaccattcttggtacttcgtcttgcccacatgggaacctatactgtcttatattagtaatctggcacagtttcagcaggcaaatagtctcatg

SEQ ID NO: 46426 - DNA, 486 bp, Chicken  19866894287441_1
ctaaagcctattgatttcagtgtcaagcagtgaccttttgttattcatgacataagtttactggaaccaaaattccatcttctgttcactcattcaggaatttgaaacataatcttcctagaaaaaaataattaccttgtaatatgattaactgtttttgcttgtttgttgtgtgtgtgtgatttttaagttttccatttagaatttgtaaaaataccattacacctttatttataaataattgtttaattaaaaaagaatagtgagagatgcagtaaaaatccatttagttaatccttycwctattctgccattgctaacaaaagccatcaatttcttataagaaaccaactgaatgataataacagtaaaaagataattgagcatctggtatcagcattctattaccagatcaacataatgattctctctagcaatgaaaaaaagatgagtcaccagaataaccggagatccatccattatgag

SEQ ID NO: 46427 - DNA, 484 bp, Chicken  19866894287441_2
aaagcctattgatttcagtgtcaagcagtgaccttttgttattcatgacataagtttactggaaccaaaattccatcttctgttcactcattcaggaatttgaaacataatcttcctagaaaaaaataattaccttgtaatatgattaactgtttttgcttgtttgttgtgtgtgtgtgatttttaagttttccatttagaatttgtaaaaataccattacacctttatttataaataattgtttaattaaaaaagaatagtgagagatgcagtaaaaatccatttagttaatccttycwctattctgccattgctaacaaaagccatcaatttcttataagaaaccaactgaatgataataacagtaaaaagataattgagcatctggtatcagcattctattaccagatcaacataatgattctctctagcaatgaaaaaaagatgagtcaccagaataaccggagatccatccattatgag

SEQ ID NO: 46428 - DNA, 466 bp, Chicken  19866894287442_1
ctccctgtgcttatctcaacacatgagccttttttttcccccaccatgttttctcccagtttttttaaatagtggaacagagagaacaatgtggcagagttacctgctcatcagcctgaaaccaccacattcacctttatcacaacagaagaaagatgtttcaacagaagcactgcacgcacaggacatgttttgtaatgcagccaaaagtcattatctgatgcagcctgttaatttaactctgattcagacagcatctgattgaagcaaacactaagtagagccagaattaactcatgrtaaggagacaacgtcaggagccaagaaaccttgcctctccttgcagctctgtctcagactatttatgtaaccacaggttactcaggtcagagctcaaatgcacgactgaattacgagcatctaataagtgactgtgtgtctaagcagggataactcatggtaacaa

SEQ ID NO: 46429 - DNA, 600 bp, Chicken  19866894287443_1
acatcttcagggaattcacaaatttgtgctgtgacaaaattctgccgttcctgccaagaaacaggaaccgctggcagtttaacgtccttttgcttttcctaaacagcagtattaatggcatttttgtacttggaaacttcaggcgcatacttttgccgtactaatttcaactgcactcacagtcgtggtggatggccacgtccctcctaattgcacatgaacctacacgccgtctgcacgcgctcttccccagcgctggggtgtcacctgcctaccacagtgtgcttcctacgtgctccrcttgctttattccctttctttcctaactcgtcaccaaatgttgcaaccgtaatgcagcctctggggccaccacattcatccaggtctgccgccgcggcgtctcctcttgcctcgtgctttccaccctgcttggataacttgtaggtacaggacaggctgctgggatggaaatggttcagcaaaccacgtgattgctggaatctgggacctacatcttaaatatgtctacagtgttactgttcctcgttgctctgcctcatcagtgtgtatatgccattttcccttaacgaggagctgtta

SEQ ID NO: 46430 - DNA, 600 bp, Chicken  19866894287443_2
tcctcttgcctcgtgctttccaccctgcttggataacttgtaggtacaggacaggctgctgggatggaaatggttcagcaaaccacgtgattgctggaatctgggacctacatcttaaatatgtctacagtgttactgttcctcgttgctctgcctcatcagtgtgtatatgccattttcccttaacgaggagctgttacaaagcgagttcattcaccctagctgggtgttggaagatcaaaccacacggggtgacaagattgcaaacactttgctggagggttgaaaatactctggaamgggataagaggcttaatgcgctcacagggcttcagtgtgccagcgagtagaaggtgttatcattccagaaagcacaggaagcgatcactgggcaatgagaagatgtgcaagttacaggaaatattcaaaaccagctaaatctgctctgacacccaagcctcaaataaagcttctagggatggattaattattcaggcagaaatccgcacccaccccagcttgctgcctgtaagcctgccaagcccaacccagcattgcgcctgcagagtcacagccaccctttaagcgtttgtattctaa

SEQ ID NO: 46431 - DNA, 600 bp, Chicken  19866894287448_1
actatcatgtcaactaacaactgtacgctttcagtatgttcacacatacatcaaagcagcatgagattctttgctgtaccaggaacttgcaatatgcaggaagtaaatttataattaatttttactactaaaacgtatttaaagaatttaaaaaattcccaaaatacattttttcatttgctttctttaatctatttagctgcctggccctgcccccatagtccaaatataggccatcttcatgtccttgaagattaaagatccccattcctctcacgtgcagaagtcttgtcctgaaawgccagtgttagtcaaggaaactccatacctaacactctcaggaatgtggtgttttttctctccttctttaaagtgactcagacaaatcttttcacccttccctgtctcaactgttctaaccatttctcatgcgaggaacctgtggcctcctggttaggcaaaaatattcaccacatcagagtaaaacatggctgtgtcatgagaaaaattttgactcaaacttgagggggaaaagaaagtatttttgcaaccttaggtacygtttacattacwtgcctgataaaatgctatactgccaaa

SEQ ID NO: 46432 - DNA, 600 bp, Chicken  19866894287448_2
tccccattcctctcacgtgcagaagtcttgtcctgaaawgccagtgttagtcaaggaaactccatacctaacactctcaggaatgtggtgttttttctctccttctttaaagtgactcagacaaatcttttcacccttccctgtctcaactgttctaaccatttctcatgcgaggaacctgtggcctcctggttaggcaaaaatattcaccacatcagagtaaaacatggctgtgtcatgagaaaaattttgactcaaacttgagggggaaaagaaagtatttttgcaaccttaggtacygtttacattacwtgcctgataaaatgctatactgccaaaagytggaaatctctgcaaggtatagaaatttctagagcacctttaaacacaaatgctgtgaggaaatactgttacrttcaaagaatgatcagcaatgtcagatagactggagagtttacaatcctgtttyagagaagtataaaacaagaagtggaaatatctgggacacattaaaagatttcagtgtatttgtcacagagacagtggaacaygcaaaaatgcatcagctgcatctcttacattcagagaggaatagttgtg

SEQ ID NO: 46433 - DNA, 600 bp, Chicken  19866894287448_3
tcacgtgcagaagtcttgtcctgaaawgccagtgttagtcaaggaaactccatacctaacactctcaggaatgtggtgttttttctctccttctttaaagtgactcagacaaatcttttcacccttccctgtctcaactgttctaaccatttctcatgcgaggaacctgtggcctcctggttaggcaaaaatattcaccacatcagagtaaaacatggctgtgtcatgagaaaaattttgactcaaacttgagggggaaaagaaagtatttttgcaaccttaggtacygtttacattacwtgcctgataaaatgctatactgccaaaagytggaaatctctgcaaggtatagaaatttctagagcacctttaaacacaaatgctgtgaggaaatactgttacrttcaaagaatgatcagcaatgtcagatagactggagagtttacaatcctgtttyagagaagtataaaacaagaagtggaaatatctgggacacattaaaagatttcagtgtatttgtcacagagacagtggaacaygcaaaaatgcatcagctgcatctcttacattcagagaggaatagttgtggaactcacacac

SEQ ID NO: 46434 - DNA, 600 bp, Chicken  19866894287448_4
agtgttagtcaaggaaactccatacctaacactctcaggaatgtggtgttttttctctccttctttaaagtgactcagacaaatcttttcacccttccctgtctcaactgttctaaccatttctcatgcgaggaacctgtggcctcctggttaggcaaaaatattcaccacatcagagtaaaacatggctgtgtcatgagaaaaattttgactcaaacttgagggggaaaagaaagtatttttgcaaccttaggtacygtttacattacwtgcctgataaaatgctatactgccaaaagytggaaatctctgcaaggtatagaaatttctagagcacctttaaacacaaatgctgtgaggaaatactgttacrttcaaagaatgatcagcaatgtcagatagactggagagtttacaatcctgtttyagagaagtataaaacaagaagtggaaatatctgggacacattaaaagatttcagtgtatttgtcacagagacagtggaacaygcaaaaatgcatcagctgcatctcttacattcagagaggaatagttgtggaactcacacactagacctgcaaagaccaagccaaaataaac

SEQ ID NO: 46435 - DNA, 600 bp, Chicken  19866894287448_5
ctcagacaaatcttttcacccttccctgtctcaactgttctaaccatttctcatgcgaggaacctgtggcctcctggttaggcaaaaatattcaccacatcagagtaaaacatggctgtgtcatgagaaaaattttgactcaaacttgagggggaaaagaaagtatttttgcaaccttaggtacygtttacattacwtgcctgataaaatgctatactgccaaaagytggaaatctctgcaaggtatagaaatttctagagcacctttaaacacaaatgctgtgaggaaatactgttacrttcaaagaatgatcagcaatgtcagatagactggagagtttacaatcctgtttyagagaagtataaaacaagaagtggaaatatctgggacacattaaaagatttcagtgtatttgtcacagagacagtggaacaygcaaaaatgcatcagctgcatctcttacattcagagaggaatagttgtggaactcacacactagacctgcaaagaccaagccaaaataaacacagggtctgaatagggctttcaccatctatctggtgtcaaaggcaggagacgatatcaaattaattttaaaa

SEQ ID NO: 46436 - DNA, 600 bp, Chicken  19866894287448_6
gcgaggaacctgtggcctcctggttaggcaaaaatattcaccacatcagagtaaaacatggctgtgtcatgagaaaaattttgactcaaacttgagggggaaaagaaagtatttttgcaaccttaggtacygtttacattacwtgcctgataaaatgctatactgccaaaagytggaaatctctgcaaggtatagaaatttctagagcacctttaaacacaaatgctgtgaggaaatactgttacrttcaaagaatgatcagcaatgtcagatagactggagagtttacaatcctgtttyagagaagtataaaacaagaagtggaaatatctgggacacattaaaagatttcagtgtatttgtcacagagacagtggaacaygcaaaaatgcatcagctgcatctcttacattcagagaggaatagttgtggaactcacacactagacctgcaaagaccaagccaaaataaacacagggtctgaatagggctttcaccatctatctggtgtcaaaggcaggagacgatatcaaattaattttaaaacctcaaatagatatggaatccaaattccttgatctgcttttcaacagcagttac

SEQ ID NO: 46437 - DNA, 600 bp, Chicken  19866894287448_7
gactcaaacttgagggggaaaagaaagtatttttgcaaccttaggtacygtttacattacwtgcctgataaaatgctatactgccaaaagytggaaatctctgcaaggtatagaaatttctagagcacctttaaacacaaatgctgtgaggaaatactgttacrttcaaagaatgatcagcaatgtcagatagactggagagtttacaatcctgtttyagagaagtataaaacaagaagtggaaatatctgggacacattaaaagatttcagtgtatttgtcacagagacagtggaacaygcaaaaatgcatcagctgcatctcttacattcagagaggaatagttgtggaactcacacactagacctgcaaagaccaagccaaaataaacacagggtctgaatagggctttcaccatctatctggtgtcaaaggcaggagacgatatcaaattaattttaaaacctcaaatagatatggaatccaaattccttgatctgcttttcaacagcagttacttatactaaaatcaaaaacagcattaagaagtctttctggtcttactttctggtttactaccaagaatttctttcagtatca

SEQ ID NO: 46438 - DNA, 371 bp, Chicken  19866894287449_1
gattctcactgtgatgacactccagcttggctcatcttcatcagcgtgtctgatgtactgtgggcctatttgcagaatctcaagggatgctaatcaagttgtcttttcatctcccagctagcagcactcttaaggaggcactaaggcactacttcaacgtgtaatttctcttcattttctggggaggtggtgagggacacttcaggccaccaggtagtacacctcagtcgatcttgtagacagttatccggtaaaagtagcagtagaacatcagctcctgtgggagctaaatgaagactraataaggaattcctccttttttttttcaactcccaggaaattaaactaacaaaaaatgaatcaaatgtctc

SEQ ID NO: 46439 - DNA, 600 bp, Chicken  19866894287451_1
cagtaaagctttgtccctgtggggacgcagctggggacctcagccctggagtgccatggtgtccagtggctgaggccctttctttttcctcctgttccagcggacacatacgatgaggttgcacagtacctagaccacctgctgcagcgcacggttccccagtcaaacctccctcccactgcccagcaaggagggctgaagcgcttccgtgctgccgtccacaccacccgtgacctcatgtccctggcgtccaaggccaaggaccttcaggtccagagtgagtaactccagcacccttcrcaccttctcttcatggtgaggctgaggtgcctttgggargctgaagtgcctttcccattcatgtgggatacagtgtgacccagggcagcctgcagggcaacmtgccgactttgcctgggcacgtgcatctgcacttcgttgtggtagtgttcattctggctatggagtatcayrgagctggtcccccttgtaagctcccaaacattcctctaaccacatgggtttcttctgacagtcagctcctctgcagctgctccttgggagagcagagggtgggtcatgagctggtttgagtggagt

SEQ ID NO: 46440 - DNA, 600 bp, Chicken  19866894287451_2
tcagccctggagtgccatggtgtccagtggctgaggccctttctttttcctcctgttccagcggacacatacgatgaggttgcacagtacctagaccacctgctgcagcgcacggttccccagtcaaacctccctcccactgcccagcaaggagggctgaagcgcttccgtgctgccgtccacaccacccgtgacctcatgtccctggcgtccaaggccaaggaccttcaggtccagagtgagtaactccagcacccttcrcaccttctcttcatggtgaggctgaggtgcctttgggargctgaagtgcctttcccattcatgtgggatacagtgtgacccagggcagcctgcagggcaacmtgccgactttgcctgggcacgtgcatctgcacttcgttgtggtagtgttcattctggctatggagtatcayrgagctggtcccccttgtaagctcccaaacattcctctaaccacatgggtttcttctgacagtcagctcctctgcagctgctccttgggagagcagagggtgggtcatgagctggtttgagtggagtgatggtggctaaggttgagaaatacctgcaccaactgag

SEQ ID NO: 46441 - DNA, 600 bp, Chicken  19866894287451_3
gacacatacgatgaggttgcacagtacctagaccacctgctgcagcgcacggttccccagtcaaacctccctcccactgcccagcaaggagggctgaagcgcttccgtgctgccgtccacaccacccgtgacctcatgtccctggcgtccaaggccaaggaccttcaggtccagagtgagtaactccagcacccttcrcaccttctcttcatggtgaggctgaggtgcctttgggargctgaagtgcctttcccattcatgtgggatacagtgtgacccagggcagcctgcagggcaacmtgccgactttgcctgggcacgtgcatctgcacttcgttgtggtagtgttcattctggctatggagtatcayrgagctggtcccccttgtaagctcccaaacattcctctaaccacatgggtttcttctgacagtcagctcctctgcagctgctccttgggagagcagagggtgggtcatgagctggtttgagtggagtgatggtggctaaggttgagaaatacctgcaccaactgagcctgtctttcctttagacgttgggatgtatgtccctagcaagatcttccaggcatcccagcag

SEQ ID NO: 46442 - DNA, 600 bp, Chicken  19866894287451_4
tcccactgcccagcaaggagggctgaagcgcttccgtgctgccgtccacaccacccgtgacctcatgtccctggcgtccaaggccaaggaccttcaggtccagagtgagtaactccagcacccttcrcaccttctcttcatggtgaggctgaggtgcctttgggargctgaagtgcctttcccattcatgtgggatacagtgtgacccagggcagcctgcagggcaacmtgccgactttgcctgggcacgtgcatctgcacttcgttgtggtagtgttcattctggctatggagtatcayrgagctggtcccccttgtaagctcccaaacattcctctaaccacatgggtttcttctgacagtcagctcctctgcagctgctccttgggagagcagagggtgggtcatgagctggtttgagtggagtgatggtggctaaggttgagaaatacctgcaccaactgagcctgtctttcctttagacgttgggatgtatgtccctagcaagatcttccaggcatcccagcagtcagtaaagttgttgagctcaccccaccagcatgaccaggaagtcaaggtgagcccttttcctccctggct

SEQ ID NO: 46443 - DNA, 600 bp, Chicken  19866894287451_5
cccactgcccagcaaggagggctgaagcgcttccgtgctgccgtccacaccacccgtgacctcatgtccctggcgtccaaggccaaggaccttcaggtccagagtgagtaactccagcacccttcrcaccttctcttcatggtgaggctgaggtgcctttgggargctgaagtgcctttcccattcatgtgggatacagtgtgacccagggcagcctgcagggcaacmtgccgactttgcctgggcacgtgcatctgcacttcgttgtggtagtgttcattctggctatggagtatcayrgagctggtcccccttgtaagctcccaaacattcctctaaccacatgggtttcttctgacagtcagctcctctgcagctgctccttgggagagcagagggtgggtcatgagctggtttgagtggagtgatggtggctaaggttgagaaatacctgcaccaactgagcctgtctttcctttagacgttgggatgtatgtccctagcaagatcttccaggcatcccagcagtcagtaaagttgttgagctcaccccaccagcatgaccaggaagtcaaggtgagcccttttcctccctggctg

SEQ ID NO: 46444 - DNA, 599 bp, Chicken  19866894287453_1
  misc_feature (1)..(6): n is any nucleotide
nnnnnnggcaaatatttatgtttatatacattaataactgctgtgaaatttcttcagtctttgtatcttaattactcaaaccctttgaacttctttcatctggtttaaattttttcctggatgaaggcgtgctgcagagcctggttgatgctaatccgtttagctggatctaacattagaatctggtccaacaagtccttcagctggtgtacttttttacgctggtcttcagggagtcgctggcacccaatcaagtctgctaacaggtccttagttggattaatggtgctcattacagtwactttctcctacaaacacaaaaatggcaaccttgtacaacagtggaaatacacagaaccgctgtaattcttacacygcttaagcagcaatttctttgcagggctttcttatttctcaccagcaatgctcttcatcatcacatggcctcataaatactcatggcaggcaaaggaaaatagcggaaagaaagccactggggcaggccagcctgcatcttttgccagcagctacttgtatctgatgttccagttcgtgccaactgcctcttttcctggtatcrggcaccactgaagagactg

SEQ ID NO: 46445 - DNA, 600 bp, Chicken  19866894287453_2
caaaccctttgaacttctttcatctggtttaaattttttcctggatgaaggcgtgctgcagagcctggttgatgctaatccgtttagctggatctaacattagaatctggtccaacaagtccttcagctggtgtacttttttacgctggtcttcagggagtcgctggcacccaatcaagtctgctaacaggtccttagttggattaatggtgctcattacagtwactttctcctacaaacacaaaaatggcaaccttgtacaacagtggaaatacacagaaccgctgtaattcttacacygcttaagcagcaatttctttgcagggctttcttatttctcaccagcaatgctcttcatcatcacatggcctcataaatactcatggcaggcaaaggaaaatagcggaaagaaagccactggggcaggccagcctgcatcttttgccagcagctacttgtatctgatgttccagttcgtgccaactgcctcttttcctggtatcrggcaccactgaagagactggcttcattttcactgcaccccctatatatatatataatacccccggtatttatatgcattgataagattcctctgcc

SEQ ID NO: 46446 - DNA, 474 bp, Chicken  19866894287453_3
taatggtgctcattacagtwactttctcctacaaacacaaaaatggcaaccttgtacaacagtggaaatacacagaaccgctgtaattcttacacygcttaagcagcaatttctttgcagggctttcttatttctcaccagcaatgctcttcatcatcacatggcctcataaatactcatggcaggcaaaggaaaatagcggaaagaaagccactggggcaggccagcctgcatcttttgccagcagctacttgtatctgatgttccagttcgtgccaactgcctcttttcctggtatcrggcaccactgaagagactggcttcattttcactgcaccccctatatatatatataatacccccggtatttatatgcattgataagattcctctgccctcgccttcctgttttccaggcttaatagttgttattctctcagtcattcctcacaggagaaatgctttagtcctctg

SEQ ID NO: 46447 - DNA, 600 bp, Chicken  19866894287455_1
aacagataaatccacacatattctatctttaattctaaattgcaaaatgcttacttttaagatagatagtaaattatattaattaagattaaaggctgacattattaggctcagttaaacaacctcaacctagtgaggcattttttgttatttagaaaatagcattaaggatagatagatgtgaatatatgtgtgaatttttgcaaacccttaggggaattatataccctattcagtaaaaaaaatcactttaagtccatttcatgtttaggatctaaattaatgtaaaaaatctctatmttttcatcttagactacagcatgaaacagaatactatactaagacccccatgcaaactccttatgggctgatttatacacagaatgcatcatatcacaaagtgatgtactgtatctttaaaatagaatatatacattaccactatgatagcacagctaataagccttgttctcaacatggttggtgtagtatcatgctggcttgagtgccacagacatagcacttaatgttctgaatcatagaactgtagaatcacagaatagcttgggttggaagggaacccaaggctcataaagtttc

SEQ ID NO: 46448 - DNA, 600 bp, Chicken  19866894287456_1
cactgcactgcaccttacctctaggggctgccctcagagcacaacatcagcacgtggacttagctccaagcagtgcaggcatccaaatattatcaaaagtcacctcagccttcagttcgtcacctccaatcaatcagtgttgtttaggtgcattcaagctctgggagatctcatcctatagctcagtctgggcctgctggtcatctcatggactcctactggtcacatggaccgtaggtatgcatggactacatccagctcatctagttctgcccttggttcttcctggaagataggaartttcccctccagcacatacgatcatcctgacattcccagcctgaagatgatgagtcaccagaaaagctgcatggaagacagactgggtgacaccccagggaatcagatctggaagcatttcaggaagctgaaacactgactcattttacagcattcacaatgcaactgcagtaacaccattacacagcaggtctagattttccccatccatcactccagtcttgaaaacacaatcagcagaagcagtggcgcctacagtgagccacagttcactgagggtgaccaaatccagattaattg

SEQ ID NO: 46449 - DNA, 600 bp, Chicken  19866894287466_1
gccaagtaaccttgcagcttgcaattcccaaactgagccgagcccatcaagtggtcgtgacccaaacacttggcatgcatccctccagcaagcaccagctgccacatcgagagcagtgctgcagctctggtacagcttgggaagtgagaacctgagctcccagcattgctgtgcccatgctgacatctagtggaggtgaggatgagcgtcctcaaatccctgccaagaccccaaagcaggcagcagggctgtgttggcagcgtgttgctggaggaatggcagtcccctgggcagggacarctcttcctgtgccccccatctcaacgcatatggaggcattttaagtggagaagctgtagtgttcccagccttttaactctcctacttgcttaaattagcttactgacttttttatcttgaagtataaatgtgtcgtaacagctgaatgtggtcaaatggcagggtgttgcaaagcaagttggatgggctcagacatggcaggctttccttgccagctgggtgagttgcctcttctccatcaactgggatgtgcctygaacagctctggagtcagagctctgtgcctttctctaaatcatc

SEQ ID NO: 46450 - DNA, 600 bp, Chicken  19866894287466_2
gcagcgtgttgctggaggaatggcagtcccctgggcagggacarctcttcctgtgccccccatctcaacgcatatggaggcattttaagtggagaagctgtagtgttcccagccttttaactctcctacttgcttaaattagcttactgacttttttatcttgaagtataaatgtgtcgtaacagctgaatgtggtcaaatggcagggtgttgcaaagcaagttggatgggctcagacatggcaggctttccttgccagctgggtgagttgcctcttctccatcaactgggatgtgcctygaacagctctggagtcagagctctgtgcctttctctaaatcatcagcacaaccatccttaggtcctgggggctgccctgctggctaatgccacgctcaatgtgatgtaattcagattggtgtttctgttttactccagtttgaggtaggagtggtgaggggaatgggggaaacaaacccagaggcagccctgaagaattagagtgagccataggttgctgaaaagaagaatggtgtcgaagggatgaagagacaaaggcagcagaaaaaaaaacaaaaatagagtgcctggaaatgaaaa

SEQ ID NO: 46451 - DNA, 600 bp, Chicken  19866894287467_1
tggaagaactctggaggtccttcccctcctcagctgtactgtgataaacagttcctcagaagaataatacaagaatacccaacaggcgaagaatccagaggaaaaaaaacaacaaatggcctctgggctcagtggattgtcaaaggctgtttggtaaagcatgccaacacctgcttaccgtcaagcacatgagtagtaccactgacttccttggagaaacatgcgtgctcctgtcaaggtttgcaggaggaccgtgttttagagccaagctcttttttcctcctatttgttgaagaggaygctaagcaagagtgtgcttgtgctcgtagggtcggaggacttcaatgagtcagctacaaagcacaaccacgttactcagaccttgaaaaaacacacacacaggtgcttctgaaaggggaaccagcagcgctcagattcctgtcctcaggcttacggaaatatttattctcggtgctgttgagcaatcggatgacagcagaagctgtgtgtcatggatgctaaaattactttctcactcagatgaatattcagacggacatttcagagaagataaagttgcacgggcctctttcttttaaa

SEQ ID NO: 46452 - DNA, 599 bp, Chicken  19866894287468_1
  misc_feature (1)..(48): n is any nucleotide
nnnnnnnnnnnnnnnnnnnnnnnnnnnnnnnnnnnnnnnnnnnnnnnnataaagattgccgggctttgttttcatgtaggtgtgcgcattggctttccatgcagtgtaaaaagccatggatgaagctgtgggatctcaagcgtgcatggtcagcatgtggccttggaggagcacagggacctcagggtggggtggaatgtggggcagtgacccccatgttgggtagtttgcctgctgtggtgctggtggatgtgtttagtgtggagccgaggagcaccaatcctccttgagatcactttktgtgttcttaaggcttgaggtaaccggtgagagggttgctgatgcacgcttcttttttctccacaaaatgaagttatatttagcatgatgttaattgggtactgcccttcaaaatgcatcacgtgatggttttggtttgcacggtggctgaggaaggagtaacacagctgaaatgcagaaccgacacttgtggctccctgactgcgtctgcactgcttatacttccatttataaaaggaagagaaacttttggcttcggttttgccagctataaagaaaatattttgatttgagctcat

SEQ ID NO: 46453 - DNA, 600 bp, Chicken  19866894287472_1
ctgaacattaacactgcttcagcagtggtcttaggcagttctccagaaagcattgttttcctttattctaccttcattcataacaaaacaaacaaacaaaaccccacaacctgcagaatttcattattctcaataggatgacagagcacacaaagtgtactctctccctcatctgtattacttttatcctttcagggcttcaggctattatagcaaataagcattaattaggatatgacaacaacaacaacttgtttgtttgagtatttcccatcctcctacagctctcctcagtgtttyagtcttattacagacctgttcgcaaacactctcaccagcctatccttgccctcactgcagatctgagtcagcaggcacaaaagcgccctattccacttgaattctctgtgtaaccataatttaagtaataaatgagatctggtagtgaaatagttttgcaagaaaagaaaaaaaaaccatttagccagattaaaaacaagaaaaccgacaacacaaagatcaactgtccaatatcacaagcaaaccatttaaatcatctcataattattctcttttgctgatctctgaattctacagact

SEQ ID NO: 46454 - DNA, 600 bp, Chicken  19866894287472_2
atggcagtcaaaactctactggctcaaagtggcagccgcagagagtgcaagtgcagggaagccatctgctcagcacagataacacttgtataaagctttagtaattgtaaccatttctctttgtgcaaaggtttatttgaaagttctccccctttccttcactgccccccttctagaaaggggaatctgtcatctgattttgcctaaaatctgtggcaaacagtttggagatttatgattgcaatgaggaaagcaaatccaaaaagcaccccactaaaatatcccccataccattaccaytcaacagttctttcaccacattccaaagatttccataaaagaataattcttcacaaacttcagtgataaacttgctttctataataaaataaaatgttaaggaaataacagaaaacaaacggagggaggggcaggggaaatcaaattcactttctgtgtcatttaggggcaagtatactaaattggaaccggtcagmtcttcaaattccaggctgagacaggaaaatacgttgagctgcctcagtaactgcctcacttgagctgctcagaagcaaattaggccaggattctacaaatgca

SEQ ID NO: 46455 - DNA, 512 bp, Chicken  19866894287472_3
ttttgcctaaaatctgtggcaaacagtttggagatttatgattgcaatgaggaaagcaaatccaaaaagcaccccactaaaatatcccccataccattaccaytcaacagttctttcaccacattccaaagatttccataaaagaataattcttcacaaacttcagtgataaacttgctttctataataaaataaaatgttaaggaaataacagaaaacaaacggagggaggggcaggggaaatcaaattcactttctgtgtcatttaggggcaagtatactaaattggaaccggtcagmtcttcaaattccaggctgagacaggaaaatacgttgagctgcctcagtaactgcctcacttgagctgctcagaagcaaattaggccaggattctacaaatgcaggcgagttctacttcctgaagtgtgagagaggagaaataactattaaactcttcgaggtggtaggttgatctatactgctaagtgcctaaagagaattaaaactgatgt

SEQ ID NO: 46456 - DNA, 600 bp, Chicken  19866894287473_1
cacactgctgtcgcttggtttggagcatgagcgatgcttggcttgtccctagcataggaggagccaaggagtcccatctgtgccctcaaatgtggtagttaactggtcatgcaatttcccagcagccaagcaggagagttggtcatatttaagggtgccataagtctgggcaagtccttgtcctgggctctgacctgccaggagctctgctgccagatggaacctgctccagaaggatgcagtgtaggggaagcagccttcccatgctgctgctcctgttgccagagctgtctggtacakgtaacaatgcatttgcagcatttctgaactgctgcagagctcaccttgagtctcagggtgtgtgctcatccagcccaggctggtataggtgtagaagcaccacagataggaagctgcagagtagacagggcatcttagctccagcagatggatatttcctcaccactgccagtagctgtcagtgctttgctggctggccaactgctcattaagagcaaagctgtgtccctcaacatggaagcagtgggtgctaagtctgctaaatggggaaatgcaagcatgaggtgacaaactgggtat

SEQ ID NO: 46457 - DNA, 600 bp, Chicken  19866894287473_2
gctcatccagcccaggctggtataggtgtagaagcaccacagataggaagctgcagagtagacagggcatcttagctccagcagatggatatttcctcaccactgccagtagctgtcagtgctttgctggctggccaactgctcattaagagcaaagctgtgtccctcaacatggaagcagtgggtgctaagtctgctaaatggggaaatgcaagcatgaggtgacaaactgggtatgtgactgcaggatgatggccctcgttcccctgttgggctttgctacatgaatagctgcaggcmstgctgggacaggaaacctctctgagagactcctctgcattcttctgtcacagggcatccgctttgacccagagaaccctcagaccttgcggttagagtttgctaaagccaacacaaagatggccaagagcaagctgatggccacaccaaaccccaccaatatccaccctgccctgggcgcacacttcattgcacgggacccctgtgagtatgctgggatgcagcttgagggccagcctgggtatctggcactsggaatgctggtggcagggcttggtgcagctgagcctacagccaggg

SEQ ID NO: 46458 - DNA, 600 bp, Chicken  19866894287473_3
ctcatccagcccaggctggtataggtgtagaagcaccacagataggaagctgcagagtagacagggcatcttagctccagcagatggatatttcctcaccactgccagtagctgtcagtgctttgctggctggccaactgctcattaagagcaaagctgtgtccctcaacatggaagcagtgggtgctaagtctgctaaatggggaaatgcaagcatgaggtgacaaactgggtatgtgactgcaggatgatggccctcgttcccctgttgggctttgctacatgaatagctgcaggcmstgctgggacaggaaacctctctgagagactcctctgcattcttctgtcacagggcatccgctttgacccagagaaccctcagaccttgcggttagagtttgctaaagccaacacaaagatggccaagagcaagctgatggccacaccaaaccccaccaatatccaccctgccctgggcgcacacttcattgcacgggacccctgtgagtatgctgggatgcagcttgagggccagcctgggtatctggcactsggaatgctggtggcagggcttggtgcagctgagcctacagccagggt

SEQ ID NO: 46459 - DNA, 600 bp, Chicken  19866894287473_4
gccctcgttcccctgttgggctttgctacatgaatagctgcaggcmstgctgggacaggaaacctctctgagagactcctctgcattcttctgtcacagggcatccgctttgacccagagaaccctcagaccttgcggttagagtttgctaaagccaacacaaagatggccaagagcaagctgatggccacaccaaaccccaccaatatccaccctgccctgggcgcacacttcattgcacgggacccctgtgagtatgctgggatgcagcttgagggccagcctgggtatctggcactsggaatgctggtggcagggcttggtgcagctgagcctacagccagggtgggaaggaaagctgtgtcttctggctgacttctgccagcaggttggggttgcaggagaacagcaggcatctgcttaggcttctgaccaagtctggaagtgcggaggggagccttactactaaaggcttgaaatcgtctctaggtgcaaagcaaggaggggcagtgctgtgctgtgccgtgcagccttggcatgctttgatggggtgcagagcgggtgatgttctatcttaaatctcagagttttaagttgggg

SEQ ID NO: 46460 - DNA, 600 bp, Chicken  19866894287479_1
attacttttgctaaactaacacatcagtccttaaactaatatactgatccctactgctaaacaaaccagcctatatcaaaacaagctgtttgagatcaccagaggaaagacactataaaattgaaagtacttccctaattttaaggtccactgcgttttcaaagagtttttaattcagaagtactaatatgcaaaacagctatgggatctagaacaattcctacgtcactgaaataagtcaaactagttcaacacatactcacacgaggcaaattttcaaaatacaaaggagttgcttcwgtctttccgttttaagtctgaaatgcgtctataataaaaccattctgttggtaaagggttcaccagtaaggacatattttctccaggtggattcatgttattttaaatcacagtatttccagctcttttctatgaaacattcttggtctgtccattttyggataagttccttgaaagttacattgtcttgataatatactaaggttatctacagcattggaaatgaactstgcattggtggaygggagatttrtaattagaaatgaagagcttgtttccaatagattatagcccaaagta

SEQ ID NO: 46461 - DNA, 600 bp, Chicken  19866894287479_2
caaagagtttttaattcagaagtactaatatgcaaaacagctatgggatctagaacaattcctacgtcactgaaataagtcaaactagttcaacacatactcacacgaggcaaattttcaaaatacaaaggagttgcttcwgtctttccgttttaagtctgaaatgcgtctataataaaaccattctgttggtaaagggttcaccagtaaggacatattttctccaggtggattcatgttattttaaatcacagtatttccagctcttttctatgaaacattcttggtctgtccattttyggataagttccttgaaagttacattgtcttgataatatactaaggttatctacagcattggaaatgaactstgcattggtggaygggagatttrtaattagaaatgaagagcttgtttccaatagattatagcccaaagtaaagagctctgacaaaacttaygtatttactctctcacraaatttctgcaggtgacctttgatgaatcatagaacctctttttggttctccactggagagacaacagcaatttcctgtccactgggtaaatcaccagactgaaatcctcacaacacagaa

SEQ ID NO: 46462 - DNA, 600 bp, Chicken  19866894287479_3
gaaataagtcaaactagttcaacacatactcacacgaggcaaattttcaaaatacaaaggagttgcttcwgtctttccgttttaagtctgaaatgcgtctataataaaaccattctgttggtaaagggttcaccagtaaggacatattttctccaggtggattcatgttattttaaatcacagtatttccagctcttttctatgaaacattcttggtctgtccattttyggataagttccttgaaagttacattgtcttgataatatactaaggttatctacagcattggaaatgaactstgcattggtggaygggagatttrtaattagaaatgaagagcttgtttccaatagattatagcccaaagtaaagagctctgacaaaacttaygtatttactctctcacraaatttctgcaggtgacctttgatgaatcatagaacctctttttggttctccactggagagacaacagcaatttcctgtccactgggtaaatcaccagactgaaatcctcacaacacagaattcaacaccaaatttttactgacctttacagtggctgaattcagtggcaccaaaagccaaagacagacttg

SEQ ID NO: 46463 - DNA, 600 bp, Chicken  19866894287479_4
ctagttcaacacatactcacacgaggcaaattttcaaaatacaaaggagttgcttcwgtctttccgttttaagtctgaaatgcgtctataataaaaccattctgttggtaaagggttcaccagtaaggacatattttctccaggtggattcatgttattttaaatcacagtatttccagctcttttctatgaaacattcttggtctgtccattttyggataagttccttgaaagttacattgtcttgataatatactaaggttatctacagcattggaaatgaactstgcattggtggaygggagatttrtaattagaaatgaagagcttgtttccaatagattatagcccaaagtaaagagctctgacaaaacttaygtatttactctctcacraaatttctgcaggtgacctttgatgaatcatagaacctctttttggttctccactggagagacaacagcaatttcctgtccactgggtaaatcaccagactgaaatcctcacaacacagaattcaacaccaaatttttactgacctttacagtggctgaattcagtggcaccaaaagccaaagacagacttggtaataggaagaa

SEQ ID NO: 46464 - DNA, 600 bp, Chicken  19866894287479_5
acatactcacacgaggcaaattttcaaaatacaaaggagttgcttcwgtctttccgttttaagtctgaaatgcgtctataataaaaccattctgttggtaaagggttcaccagtaaggacatattttctccaggtggattcatgttattttaaatcacagtatttccagctcttttctatgaaacattcttggtctgtccattttyggataagttccttgaaagttacattgtcttgataatatactaaggttatctacagcattggaaatgaactstgcattggtggaygggagatttrtaattagaaatgaagagcttgtttccaatagattatagcccaaagtaaagagctctgacaaaacttaygtatttactctctcacraaatttctgcaggtgacctttgatgaatcatagaacctctttttggttctccactggagagacaacagcaatttcctgtccactgggtaaatcaccagactgaaatcctcacaacacagaattcaacaccaaatttttactgacctttacagtggctgaattcagtggcaccaaaagccaaagacagacttggtaataggaagaaaagagtaatc

SEQ ID NO: 46465 - DNA, 571 bp, Chicken  19866894287479_6
aatgcgtctataataaaaccattctgttggtaaagggttcaccagtaaggacatattttctccaggtggattcatgttattttaaatcacagtatttccagctcttttctatgaaacattcttggtctgtccattttyggataagttccttgaaagttacattgtcttgataatatactaaggttatctacagcattggaaatgaactstgcattggtggaygggagatttrtaattagaaatgaagagcttgtttccaatagattatagcccaaagtaaagagctctgacaaaacttaygtatttactctctcacraaatttctgcaggtgacctttgatgaatcatagaacctctttttggttctccactggagagacaacagcaatttcctgtccactgggtaaatcaccagactgaaatcctcacaacacagaattcaacaccaaatttttactgacctttacagtggctgaattcagtggcaccaaaagccaaagacagacttggtaataggaagaaaagagtaatccttttattgcttgactttagtttctagacctatttccca

SEQ ID NO: 46466 - DNA, 554 bp, Chicken  19866894287479_7
accattctgttggtaaagggttcaccagtaaggacatattttctccaggtggattcatgttattttaaatcacagtatttccagctcttttctatgaaacattcttggtctgtccattttyggataagttccttgaaagttacattgtcttgataatatactaaggttatctacagcattggaaatgaactstgcattggtggaygggagatttrtaattagaaatgaagagcttgtttccaatagattatagcccaaagtaaagagctctgacaaaacttaygtatttactctctcacraaatttctgcaggtgacctttgatgaatcatagaacctctttttggttctccactggagagacaacagcaatttcctgtccactgggtaaatcaccagactgaaatcctcacaacacagaattcaacaccaaatttttactgacctttacagtggctgaattcagtggcaccaaaagccaaagacagacttggtaataggaagaaaagagtaatccttttattgcttgactttagtttctagacctatttccca
